United States Patent Application Publication US 2005/0244851 A1 - sequence listing, part 92

SEQ ID NO: 3584748 - DNA, 25 bp, Homo sapien
cgagagagacttggggagcgcaagt

SEQ ID NO: 3584749 - DNA, 25 bp, Homo sapien
ttcccaagcctggtcccggcagagt

SEQ ID NO: 3584750 - DNA, 25 bp, Homo sapien
ccaagcctggtcccggcagagtcat

SEQ ID NO: 3584751 - DNA, 25 bp, Homo sapien
tgttttcccaagcctggtcccggca

SEQ ID NO: 3584752 - DNA, 25 bp, Homo sapien
ttttcccaagcctggtcccggcaga

SEQ ID NO: 3584753 - DNA, 25 bp, Homo sapien
ccatttcaacaccaacttgcaaatt

SEQ ID NO: 3584754 - DNA, 25 bp, Homo sapien
tccatttcaacaccaacttgcaaat

SEQ ID NO: 3584755 - DNA, 25 bp, Homo sapien
gcatttgcccagtctgagaccaagg

SEQ ID NO: 3584756 - DNA, 25 bp, Homo sapien
gaaaccagtaagcttgtggcagtca

SEQ ID NO: 3584757 - DNA, 25 bp, Homo sapien
taaggactgaagttggttctggccc

SEQ ID NO: 3584758 - DNA, 25 bp, Homo sapien
tatttttcctcgaagggcatttgcc

SEQ ID NO: 3584759 - DNA, 25 bp, Homo sapien
gactggtaacactaagtagagaatg

SEQ ID NO: 3584760 - DNA, 25 bp, Homo sapien
caagtatcgaaggatctttccttaa

SEQ ID NO: 3584761 - DNA, 25 bp, Homo sapien
aactgattgttatgaagcattgact

SEQ ID NO: 3584762 - DNA, 25 bp, Homo sapien
ttccttaaggcctgttgagaatcaa

SEQ ID NO: 3584763 - DNA, 25 bp, Homo sapien
tctataggatattggtagatgggat

SEQ ID NO: 3584764 - DNA, 25 bp, Homo sapien
catctataggatattggtagatggg

SEQ ID NO: 3584765 - DNA, 25 bp, Homo sapien
atctataggatattggtagatggga

SEQ ID NO: 3584766 - DNA, 25 bp, Homo sapien
ccgggagactgaaaagaatattgca

SEQ ID NO: 3584767 - DNA, 25 bp, Homo sapien
taagggagctcacatgcctagaggg

SEQ ID NO: 3584768 - DNA, 25 bp, Homo sapien
agcacaaaggttaaggactgcagcc

SEQ ID NO: 3584769 - DNA, 25 bp, Homo sapien
aaattgccttgggagtgctctggag

SEQ ID NO: 3584770 - DNA, 25 bp, Homo sapien
gatcaaaggtatgtggcagcatgcc

SEQ ID NO: 3584771 - DNA, 25 bp, Homo sapien
tgattccgaccctggctatgccttc

SEQ ID NO: 3584772 - DNA, 25 bp, Homo sapien
cctggagccctactgcagttcaagg

SEQ ID NO: 3584773 - DNA, 25 bp, Homo sapien
cagaaaatacgtgggttttgcacaa

SEQ ID NO: 3584774 - DNA, 25 bp, Homo sapien
tggccagtggccgattgaaaggtat

SEQ ID NO: 3584775 - DNA, 25 bp, Homo sapien
cttccagaaaattcccacttaattg

SEQ ID NO: 3584776 - DNA, 25 bp, Homo sapien
tcccctttacaactgatgcagatca

SEQ ID NO: 3584777 - DNA, 25 bp, Homo sapien
aagtctacagtctgtgaatatacca

SEQ ID NO: 3584778 - DNA, 25 bp, Homo sapien
aaatcttgggcgtactttcctgcaa

SEQ ID NO: 3584779 - DNA, 25 bp, Homo sapien
tctgcggatccggaagtagccattc

SEQ ID NO: 3584780 - DNA, 25 bp, Homo sapien
agtcagtgccatagcccacaagcag

SEQ ID NO: 3584781 - DNA, 25 bp, Homo sapien
tgcaataaggtatgggaagccgcct

SEQ ID NO: 3584782 - DNA, 25 bp, Homo sapien
ccaaagccgtgtgaagagtttaact

SEQ ID NO: 3584783 - DNA, 25 bp, Homo sapien
tattatggtcattgctaagcagcca

SEQ ID NO: 3584784 - DNA, 25 bp, Homo sapien
cacctaatatggatgtagctatggc

SEQ ID NO: 3584785 - DNA, 25 bp, Homo sapien
tgcatgttacccctgaaagttgttc

SEQ ID NO: 3584786 - DNA, 25 bp, Homo sapien
ctgttccccgcccataaatagggat

SEQ ID NO: 3584787 - DNA, 25 bp, Homo sapien
ttttctgactatagacactgcgctc

SEQ ID NO: 3584788 - DNA, 25 bp, Homo sapien
gtgatagggccagacttgcactcag

SEQ ID NO: 3584789 - DNA, 25 bp, Homo sapien
ggtacagtaaattccatgagcaatc

SEQ ID NO: 3584790 - DNA, 25 bp, Homo sapien
tatacggattctcgcttctagcata

SEQ ID NO: 3584791 - DNA, 25 bp, Homo sapien
ccatagaagcaaatgagtagcagct

SEQ ID NO: 3584792 - DNA, 25 bp, Homo sapien
tacaagacacaacctcctgagggct

SEQ ID NO: 3584793 - DNA, 25 bp, Homo sapien
tgagaattgttggttagtatacgga

SEQ ID NO: 3584794 - DNA, 25 bp, Homo sapien
cctcacagagaatcatgcaaaaacc

SEQ ID NO: 3584795 - DNA, 25 bp, Homo sapien
aaaggcaaacattagtacatgggac

SEQ ID NO: 3584796 - DNA, 25 bp, Homo sapien
gaagactcaactaacaagcattgtt

SEQ ID NO: 3584797 - DNA, 25 bp, Homo sapien
tgcaaaaaccttagtgaatcacata

SEQ ID NO: 3584798 - DNA, 25 bp, Homo sapien
tcaagtagcccaattagcaggaaga

SEQ ID NO: 3584799 - DNA, 25 bp, Homo sapien
taagaagtgaatctagcccagccag

SEQ ID NO: 3584800 - DNA, 25 bp, Homo sapien
cacactgaactaggagtcgggagtc

SEQ ID NO: 3584801 - DNA, 25 bp, Homo sapien
tgaaaatgagacacggcagagactg

SEQ ID NO: 3584802 - DNA, 25 bp, Homo sapien
tcgaacaggactgacaaaattgata

SEQ ID NO: 3584803 - DNA, 25 bp, Homo sapien
tgacaaaattgataccatgaacatt

SEQ ID NO: 3584804 - DNA, 25 bp, Homo sapien
cttggtttcgaacaggactgacaaa

SEQ ID NO: 3584805 - DNA, 25 bp, Homo sapien
gaacatttctccagtcccaagatgt

SEQ ID NO: 3584806 - DNA, 25 bp, Homo sapien
gattgtcagccgttattccagaggt

SEQ ID NO: 3584807 - DNA, 25 bp, Homo sapien
tagcgacgaaagagatggcaggcat

SEQ ID NO: 3584808 - DNA, 25 bp, Homo sapien
tagtgggcagtaacacagtctcgta

SEQ ID NO: 3584809 - DNA, 25 bp, Homo sapien
gaacctgagtccagctaaggcgcag

SEQ ID NO: 3584810 - DNA, 25 bp, Homo sapien
gggatttttcgactgtggccaccac

SEQ ID NO: 3584811 - DNA, 25 bp, Homo sapien
gaatggcattgatagctttcacaaa

SEQ ID NO: 3584812 - DNA, 25 bp, Homo sapien
catgtatgtagttgcagtccaagac

SEQ ID NO: 3584813 - DNA, 25 bp, Homo sapien
tatctcccagggtaagagtctcata

SEQ ID NO: 3584814 - DNA, 25 bp, Homo sapien
gaggaacattttaggcatactgcaa

SEQ ID NO: 3584815 - DNA, 25 bp, Homo sapien
tttatcatacctgtgtgctagatgc

SEQ ID NO: 3584816 - DNA, 25 bp, Homo sapien
gagtgactcactatctaagacttcc

SEQ ID NO: 3584817 - DNA, 25 bp, Homo sapien
ggtttaccttgtgccaaatgcttgg

SEQ ID NO: 3584818 - DNA, 25 bp, Homo sapien
tgagaattcttaaggtgtgctatgt

SEQ ID NO: 3584819 - DNA, 25 bp, Homo sapien
ttcctgagaattcttaaggtgtgct

SEQ ID NO: 3584820 - DNA, 25 bp, Homo sapien
aattcttaaggtgtgctatgttgac

SEQ ID NO: 3584821 - DNA, 25 bp, Homo sapien
taaggtgtgctatgttgacatacac

SEQ ID NO: 3584822 - DNA, 25 bp, Homo sapien
tcgttgcagtaagtggtcaccttgc

SEQ ID NO: 3584823 - DNA, 25 bp, Homo sapien
tgtctcgttgcagtaagtggtcacc

SEQ ID NO: 3584824 - DNA, 25 bp, Homo sapien
cgttgcagtaagtggtcaccttgct

SEQ ID NO: 3584825 - DNA, 25 bp, Homo sapien
tctcgttgcagtaagtggtcacctt

SEQ ID NO: 3584826 - DNA, 25 bp, Homo sapien
aaacaggagcaatggccaggtacag

SEQ ID NO: 3584827 - DNA, 25 bp, Homo sapien
gagcaagtcacgttcctctctgtac

SEQ ID NO: 3584828 - DNA, 25 bp, Homo sapien
caatgatccagccactgaactccgg

SEQ ID NO: 3584829 - DNA, 25 bp, Homo sapien
tcctgagcaagtcacgttcctctct

SEQ ID NO: 3584830 - DNA, 25 bp, Homo sapien
gtacccctgtgattttcttgatttg

SEQ ID NO: 3584831 - DNA, 25 bp, Homo sapien
gaccatccactgtacccctgtgatt

SEQ ID NO: 3584832 - DNA, 25 bp, Homo sapien
gatttgaatgttttcggggtatgtc

SEQ ID NO: 3584833 - DNA, 25 bp, Homo sapien
ggggaccatccactgtacccctgtg

SEQ ID NO: 3584834 - DNA, 25 bp, Homo sapien
tacaacaggctcttgggttcctcaa

SEQ ID NO: 3584835 - DNA, 25 bp, Homo sapien
tacctgcgatatgcaatgggaacca

SEQ ID NO: 3584836 - DNA, 25 bp, Homo sapien
ggagttgatccttgccctaatgaag

SEQ ID NO: 3584837 - DNA, 25 bp, Homo sapien
caatgtgcagaagtcaccaggatcc

SEQ ID NO: 3584838 - DNA, 25 bp, Homo sapien
aggtaggtcaccaggactcctttgc

SEQ ID NO: 3584839 - DNA, 25 bp, Homo sapien
ggtaggtccacactgtcgcaggctg

SEQ ID NO: 3584840 - DNA, 25 bp, Homo sapien
tagaggcctttgctagctgctacag

SEQ ID NO: 3584841 - DNA, 25 bp, Homo sapien
tactgttttccaagggagtgttcag

SEQ ID NO: 3584842 - DNA, 25 bp, Homo sapien
tttaaaagagtccctcaacagatgc

SEQ ID NO: 3584843 - DNA, 25 bp, Homo sapien
ttttaaaagagtccctcaacagatg

SEQ ID NO: 3584844 - DNA, 25 bp, Homo sapien
ttaaaagagtccctcaacagatgct

SEQ ID NO: 3584845 - DNA, 25 bp, Homo sapien
ggttacaagccaacaaggatcatat

SEQ ID NO: 3584846 - DNA, 25 bp, Homo sapien
cttaatatttaatcatatcagtttc

SEQ ID NO: 3584847 - DNA, 25 bp, Homo sapien
actagggttacaagccaacaaggat

SEQ ID NO: 3584848 - DNA, 25 bp, Homo sapien
agggttacaagccaacaaggatcat

SEQ ID NO: 3584849 - DNA, 25 bp, Homo sapien
tacctggcagatgtgtgggtcactg

SEQ ID NO: 3584850 - DNA, 25 bp, Homo sapien
aactgatgagcaattcctacctggc

SEQ ID NO: 3584851 - DNA, 25 bp, Homo sapien
gacatttatggatccagtgtgagca

SEQ ID NO: 3584852 - DNA, 25 bp, Homo sapien
tgctgaagcttaacaagataacgcg

SEQ ID NO: 3584853 - DNA, 25 bp, Homo sapien
aaatagtgcagacaacttagaaaca

SEQ ID NO: 3584854 - DNA, 25 bp, Homo sapien
gaaacagcagacaagcaggctcaag

SEQ ID NO: 3584855 - DNA, 25 bp, Homo sapien
aatagtgcagacaacttagaaacag

SEQ ID NO: 3584856 - DNA, 25 bp, Homo sapien
caggctcaagcaagaaattcataag

SEQ ID NO: 3584857 - DNA, 25 bp, Homo sapien
aataggcattaatttgcataagcca

SEQ ID NO: 3584858 - DNA, 25 bp, Homo sapien
cattaatttgcataagccatcagga

SEQ ID NO: 3584859 - DNA, 25 bp, Homo sapien
ggcattaatttgcataagccatcag

SEQ ID NO: 3584860 - DNA, 25 bp, Homo sapien
taggcattaatttgcataagccatc

SEQ ID NO: 3584861 - DNA, 25 bp, Homo sapien
aaatgactgataaaatcagtgacat

SEQ ID NO: 3584862 - DNA, 25 bp, Homo sapien
acagttcccagctgcatgaacaaat

SEQ ID NO: 3584863 - DNA, 25 bp, Homo sapien
aatgactgataaaatcagtgacatc

SEQ ID NO: 3584864 - DNA, 25 bp, Homo sapien
atcatatatccccacagttcccagc

SEQ ID NO: 3584865 - DNA, 25 bp, Homo sapien
aaatagttaggcaggcactcagtgc

SEQ ID NO: 3584866 - DNA, 25 bp, Homo sapien
gctgagcttgatatattgaatccaa

SEQ ID NO: 3584867 - DNA, 25 bp, Homo sapien
gaaacacaggcgacatttctggctg

SEQ ID NO: 3584868 - DNA, 25 bp, Homo sapien
gtgagaaattaaaccctctagtatg

SEQ ID NO: 3584869 - DNA, 25 bp, Homo sapien
ctattctgattgattccgaagtgga

SEQ ID NO: 3584870 - DNA, 25 bp, Homo sapien
tggaatgccgagaatggcaaagaag

SEQ ID NO: 3584871 - DNA, 25 bp, Homo sapien
tccgaagtggaatgccgagaatggc

SEQ ID NO: 3584872 - DNA, 25 bp, Homo sapien
ctgattgattccgaagtggaatgcc

SEQ ID NO: 3584873 - DNA, 25 bp, Homo sapien
catatcctgaaatcagtagggcagg

SEQ ID NO: 3584874 - DNA, 25 bp, Homo sapien
tattatattctactctgcctaagga

SEQ ID NO: 3584875 - DNA, 25 bp, Homo sapien
taagacctaactactgaccagagtg

SEQ ID NO: 3584876 - DNA, 25 bp, Homo sapien
taaggattcgatcaatgccatccag

SEQ ID NO: 3584877 - DNA, 25 bp, Homo sapien
tggtacatggtaacaattgccttga

SEQ ID NO: 3584878 - DNA, 25 bp, Homo sapien
ctttgaagggctgtgacagagtaac

SEQ ID NO: 3584879 - DNA, 25 bp, Homo sapien
tgcaaaggcctaggctcatcaacgt

SEQ ID NO: 3584880 - DNA, 25 bp, Homo sapien
caaatgtgcttacaccgtgattcac

SEQ ID NO: 3584881 - DNA, 25 bp, Homo sapien
tttagcttacaagaaaagttccagc

SEQ ID NO: 3584882 - DNA, 25 bp, Homo sapien
tactctatgtataatgagaaacgcc

SEQ ID NO: 3584883 - DNA, 25 bp, Homo sapien
gagaaacgcctagtttcaggcttat

SEQ ID NO: 3584884 - DNA, 25 bp, Homo sapien
tggaccgccataaccttgtgacaaa

SEQ ID NO: 3584885 - DNA, 25 bp, Homo sapien
gccaaggtcatcatatgctgtatcc

SEQ ID NO: 3584886 - DNA, 25 bp, Homo sapien
gcaaaccacttgtagtcattcaaca

SEQ ID NO: 3584887 - DNA, 25 bp, Homo sapien
tgtaaatgatggtgaaatggccaga

SEQ ID NO: 3584888 - DNA, 25 bp, Homo sapien
gcttctgaaggtacaccactacttt

SEQ ID NO: 3584889 - DNA, 25 bp, Homo sapien
tttgagataatgcaagcagaagcag

SEQ ID NO: 3584890 - DNA, 25 bp, Homo sapien
tcaaacagttcctgctccgaggcaa

SEQ ID NO: 3584891 - DNA, 25 bp, Homo sapien
cacagtctgcctagtgaagaaacca

SEQ ID NO: 3584892 - DNA, 25 bp, Homo sapien
tgctacccagtttgagcacagtctg

SEQ ID NO: 3584893 - DNA, 25 bp, Homo sapien
aaaccaattagtgctgataggaatg

SEQ ID NO: 3584894 - DNA, 25 bp, Homo sapien
gataggaatgatacgtttaaccttc

SEQ ID NO: 3584895 - DNA, 25 bp, Homo sapien
ttagaacctcataatctgaatcctt

SEQ ID NO: 3584896 - DNA, 25 bp, Homo sapien
cctcaaaggctctacagtttagaac

SEQ ID NO: 3584897 - DNA, 25 bp, Homo sapien
caggtcaagataggtgcagttggca

SEQ ID NO: 3584898 - DNA, 25 bp, Homo sapien
cataaccgagcagttgacatcgcgc

SEQ ID NO: 3584899 - DNA, 25 bp, Homo sapien
caggtgcccagcaggtcaagatagg

SEQ ID NO: 3584900 - DNA, 25 bp, Homo sapien
ttgacatcgcgctgggaaccgctgg

SEQ ID NO: 3584901 - DNA, 25 bp, Homo sapien
ggcggcgagcagcaaggagggccca

SEQ ID NO: 3584902 - DNA, 25 bp, Homo sapien
agggcggcgagcagcaaggagggcc

SEQ ID NO: 3584903 - DNA, 25 bp, Homo sapien
acggcgccgtcgccggagagaagca

SEQ ID NO: 3584904 - DNA, 25 bp, Homo sapien
cggcgccgtcgccggagagaagcag

SEQ ID NO: 3584905 - DNA, 25 bp, Homo sapien
agcgctgcgggctagcggtgagtcc

SEQ ID NO: 3584906 - DNA, 25 bp, Homo sapien
acgaggcgcgcgccttgaaatagct

SEQ ID NO: 3584907 - DNA, 25 bp, Homo sapien
gaggtgaagaattaccaggaagccg

SEQ ID NO: 3584908 - DNA, 25 bp, Homo sapien
tagcggtgagtccaccacgaggcgc

SEQ ID NO: 3584909 - DNA, 25 bp, Homo sapien
aacattaccacaagttgaactttct

SEQ ID NO: 3584910 - DNA, 25 bp, Homo sapien
tagcatctttataggtggtgggcat

SEQ ID NO: 3584911 - DNA, 25 bp, Homo sapien
ccttagcatctttataggtggtggg

SEQ ID NO: 3584912 - DNA, 25 bp, Homo sapien
ttccttagcatctttataggtggtg

SEQ ID NO: 3584913 - DNA, 25 bp, Homo sapien
cttagcatctttataggtggtgggc

SEQ ID NO: 3584914 - DNA, 25 bp, Homo sapien
ggagagttttacttccaagaatgtg

SEQ ID NO: 3584915 - DNA, 25 bp, Homo sapien
tgaggagagttttacttccaagaat

SEQ ID NO: 3584916 - DNA, 25 bp, Homo sapien
gaggagagttttacttccaagaatg

SEQ ID NO: 3584917 - DNA, 25 bp, Homo sapien
agagttttacttccaagaatgtggt

SEQ ID NO: 3584918 - DNA, 25 bp, Homo sapien
gagtgcagctcattggggacttccc

SEQ ID NO: 3584919 - DNA, 25 bp, Homo sapien
tcagtatttcttgagagtgcagctc

SEQ ID NO: 3584920 - DNA, 25 bp, Homo sapien
ccctgatcctggattcagaaatgct

SEQ ID NO: 3584921 - DNA, 25 bp, Homo sapien
ctgatcctggattcagaaatgctgg

SEQ ID NO: 3584922 - DNA, 25 bp, Homo sapien
ttatgcttgtttaagtgggttgatg

SEQ ID NO: 3584923 - DNA, 25 bp, Homo sapien
aagtgggttgatgaggcttaggtaa

SEQ ID NO: 3584924 - DNA, 25 bp, Homo sapien
gtgggttgatgaggcttaggtaatc

SEQ ID NO: 3584925 - DNA, 25 bp, Homo sapien
taagtgggttgatgaggcttaggta

SEQ ID NO: 3584926 - DNA, 25 bp, Homo sapien
gaacgcgaagaattccttgtttcac

SEQ ID NO: 3584927 - DNA, 25 bp, Homo sapien
ccttgtttcaccaaatgcaatcacc

SEQ ID NO: 3584928 - DNA, 25 bp, Homo sapien
attgaagttccttggtccgaacgcg

SEQ ID NO: 3584929 - DNA, 25 bp, Homo sapien
tccttggtccgaacgcgaagaattc

SEQ ID NO: 3584930 - DNA, 25 bp, Homo sapien
gtgtgccatgaggtctaccacccta

SEQ ID NO: 3584931 - DNA, 25 bp, Homo sapien
tgccatgaggtctaccaccctattg

SEQ ID NO: 3584932 - DNA, 25 bp, Homo sapien
tgtgccatgaggtctaccaccctat

SEQ ID NO: 3584933 - DNA, 25 bp, Homo sapien
gtgccatgaggtctaccaccctatt

SEQ ID NO: 3584934 - DNA, 25 bp, Homo sapien
tggaggagactaccaagtgctcagt

SEQ ID NO: 3584935 - DNA, 25 bp, Homo sapien
gaagttggaggagactaccaagtgc

SEQ ID NO: 3584936 - DNA, 25 bp, Homo sapien
tgcctgctacaccacttcttgatgt

SEQ ID NO: 3584937 - DNA, 25 bp, Homo sapien
aggagactaccaagtgctcagtgta

SEQ ID NO: 3584938 - DNA, 25 bp, Homo sapien
tccactaccgacacgttggtggtgg

SEQ ID NO: 3584939 - DNA, 25 bp, Homo sapien
gtccactaccgacacgttggtggtg

SEQ ID NO: 3584940 - DNA, 25 bp, Homo sapien
ccactaccgacacgttggtggtggg

SEQ ID NO: 3584941 - DNA, 25 bp, Homo sapien
cagagattatgatccttttggcttc

SEQ ID NO: 3584942 - DNA, 25 bp, Homo sapien
gcagagattatgatccttttggctt

SEQ ID NO: 3584943 - DNA, 25 bp, Homo sapien
acttctcacggtttatgcccatcat

SEQ ID NO: 3584944 - DNA, 25 bp, Homo sapien
ttctcacggtttatgcccatcatga

SEQ ID NO: 3584945 - DNA, 25 bp, Homo sapien
agccttttccatggtggtgaagatg

SEQ ID NO: 3584946 - DNA, 25 bp, Homo sapien
cccagccttttccatggtggtgaag

SEQ ID NO: 3584947 - DNA, 25 bp, Homo sapien
ctgcaagtaagccccagccttttcc

SEQ ID NO: 3584948 - DNA, 25 bp, Homo sapien
tgcaagtaagccccagccttttcca

SEQ ID NO: 3584949 - DNA, 25 bp, Homo sapien
gccatggaatttgccatggaatcat

SEQ ID NO: 3584950 - DNA, 25 bp, Homo sapien
gtgccatggaatttgccatggaatc

SEQ ID NO: 3584951 - DNA, 25 bp, Homo sapien
ggaagatggtgatgggatttccctt

SEQ ID NO: 3584952 - DNA, 25 bp, Homo sapien
atggtgatgggatttcccttgatga

SEQ ID NO: 3584953 - DNA, 25 bp, Homo sapien
ggtcaatgaaggggtagttgaggtc

SEQ ID NO: 3584954 - DNA, 25 bp, Homo sapien
attgatggtgacaatatctacttta

SEQ ID NO: 3584955 - DNA, 25 bp, Homo sapien
tcaatgaaggggtagttgaggtcaa

SEQ ID NO: 3584956 - DNA, 25 bp, Homo sapien
tggtgacaatatctactttaccaga

SEQ ID NO: 3584957 - DNA, 25 bp, Homo sapien
gtatggccaaatccgttgacttcca

SEQ ID NO: 3584958 - DNA, 25 bp, Homo sapien
agtatggccaaatccgttgacttcc

SEQ ID NO: 3584959 - DNA, 25 bp, Homo sapien
tggccaaatccgttgacttccacct

SEQ ID NO: 3584960 - DNA, 25 bp, Homo sapien
gccaaatccgttgacttccaccttc

SEQ ID NO: 3584961 - DNA, 25 bp, Homo sapien
acccctactgcttcttgcctaccat

SEQ ID NO: 3584962 - DNA, 25 bp, Homo sapien
ctactgcttcttgcctaccatatgc

SEQ ID NO: 3584963 - DNA, 25 bp, Homo sapien
cacccctactgcttcttgcctacca

SEQ ID NO: 3584964 - DNA, 25 bp, Homo sapien
ccctactgcttcttgcctaccatat

SEQ ID NO: 3584965 - DNA, 25 bp, Homo sapien
ggccctgctatcacccatgtgttta

SEQ ID NO: 3584966 - DNA, 25 bp, Homo sapien
tgctgttccgataaagagttgctgg

SEQ ID NO: 3584967 - DNA, 25 bp, Homo sapien
aacacagatgttcacgataatgcct

SEQ ID NO: 3584968 - DNA, 25 bp, Homo sapien
aaaagatccgcttagcattgggccc

SEQ ID NO: 3584969 - DNA, 25 bp, Homo sapien
cacctgctaccacgctcggttaatt

SEQ ID NO: 3584970 - DNA, 25 bp, Homo sapien
tcactgctagttttgcctcccgggt

SEQ ID NO: 3584971 - DNA, 25 bp, Homo sapien
aggcacctgctaccacgctcggtta

SEQ ID NO: 3584972 - DNA, 25 bp, Homo sapien
cggctcactgctagttttgcctccc

SEQ ID NO: 3584973 - DNA, 25 bp, Homo sapien
cactgcttactttgtaaaccccata

SEQ ID NO: 3584974 - DNA, 25 bp, Homo sapien
tcaagattaattagtatcatggctc

SEQ ID NO: 3584975 - DNA, 25 bp, Homo sapien
tgtatagatcatccagtattcaaga

SEQ ID NO: 3584976 - DNA, 25 bp, Homo sapien
tgaaaagtaactggcttcacaaaca

SEQ ID NO: 3584977 - DNA, 25 bp, Homo sapien
ggaaaatctctggtagaagccctac

SEQ ID NO: 3584978 - DNA, 25 bp, Homo sapien
tgtcagccctcaaagatatcagccg

SEQ ID NO: 3584979 - DNA, 25 bp, Homo sapien
tggaatccccgatgcaggcttttgg

SEQ ID NO: 3584980 - DNA, 25 bp, Homo sapien
tctgaaataagtaggtggaatcccc

SEQ ID NO: 3584981 - DNA, 25 bp, Homo sapien
acagagggccgactcggacactggc

SEQ ID NO: 3584982 - DNA, 25 bp, Homo sapien
gttgtgctccccgagtccaccgagt

SEQ ID NO: 3584983 - DNA, 25 bp, Homo sapien
gagctctgagtgtaatctcttatga

SEQ ID NO: 3584984 - DNA, 25 bp, Homo sapien
catatttgggagacgacgggataca

SEQ ID NO: 3584985 - DNA, 25 bp, Homo sapien
cgtcatggtcgtgggcaactggatc

SEQ ID NO: 3584986 - DNA, 25 bp, Homo sapien
tgcgcgcctcccgtgacttcgatgg

SEQ ID NO: 3584987 - DNA, 25 bp, Homo sapien
ctccaggtctggcttggcggccgca

SEQ ID NO: 3584988 - DNA, 25 bp, Homo sapien
ccggcagaggctggatttcggcaaa

SEQ ID NO: 3584989 - DNA, 25 bp, Homo sapien
tggggatcaggtaggacgagcagag

SEQ ID NO: 3584990 - DNA, 25 bp, Homo sapien
ctttggggatcaggtaggacgagca

SEQ ID NO: 3584991 - DNA, 25 bp, Homo sapien
gggatcaggtaggacgagcagagcg

SEQ ID NO: 3584992 - DNA, 25 bp, Homo sapien
gatcaggtaggacgagcagagcggg

SEQ ID NO: 3584993 - DNA, 25 bp, Homo sapien
ttggccgtgaagcgggtgaccacac

SEQ ID NO: 3584994 - DNA, 25 bp, Homo sapien
ttgagctcgctgatgttggccgtga

SEQ ID NO: 3584995 - DNA, 25 bp, Homo sapien
agctcgctgatgttggccgtgaagc

SEQ ID NO: 3584996 - DNA, 25 bp, Homo sapien
gagttgagctcgctgatgttggccg

SEQ ID NO: 3584997 - DNA, 25 bp, Homo sapien
tccgagtgcagcgacggcacatcgt

SEQ ID NO: 3584998 - DNA, 25 bp, Homo sapien
ccacaggctccgagtgcagcgacgg

SEQ ID NO: 3584999 - DNA, 25 bp, Homo sapien
tgcagcgacggcacatcgtcgtccg

SEQ ID NO: 3585000 - DNA, 25 bp, Homo sapien
cgacggcacatcgtcgtccgtgcgg

SEQ ID NO: 3585001 - DNA, 25 bp, Homo sapien
cgagcccgcgcggtggctcagcgtg

SEQ ID NO: 3585002 - DNA, 25 bp, Homo sapien
tggccgagcccgcgcggtggctcag

SEQ ID NO: 3585003 - DNA, 25 bp, Homo sapien
ctggccgagcccgcgcggtggctca

SEQ ID NO: 3585004 - DNA, 25 bp, Homo sapien
gccgagcccgcgcggtggctcagcg

SEQ ID NO: 3585005 - DNA, 25 bp, Homo sapien
gatgggcgacggtgagcgcggccgc

SEQ ID NO: 3585006 - DNA, 25 bp, Homo sapien
gcgggcgccgggaagtgctcctcag

SEQ ID NO: 3585007 - DNA, 25 bp, Homo sapien
ctgatgggcgacggtgagcgcggcc

SEQ ID NO: 3585008 - DNA, 25 bp, Homo sapien
cgggcgccgggaagtgctcctcagc

SEQ ID NO: 3585009 - DNA, 25 bp, Homo sapien
gggccggcgcctgcgcagcccgcac

SEQ ID NO: 3585010 - DNA, 25 bp, Homo sapien
ctgggccggcgcctgcgcagcccgc

SEQ ID NO: 3585011 - DNA, 25 bp, Homo sapien
tcgggcccgcctgggccggcgcctg

SEQ ID NO: 3585012 - DNA, 25 bp, Homo sapien
gactcgggcccgcctgggccggcgc

SEQ ID NO: 3585013 - DNA, 25 bp, Homo sapien
tcattctgggcccacgtgacggatt

SEQ ID NO: 3585014 - DNA, 25 bp, Homo sapien
cttgttgatgtggatggacaggcgc

SEQ ID NO: 3585015 - DNA, 25 bp, Homo sapien
ggaagggcttgatgacggccgtttg

SEQ ID NO: 3585016 - DNA, 25 bp, Homo sapien
caggccacggctctccgtgctcttg

SEQ ID NO: 3585017 - DNA, 25 bp, Homo sapien
cttggatgccgcttccccaatggtg

SEQ ID NO: 3585018 - DNA, 25 bp, Homo sapien
tggttgctcatgggccccggactgg

SEQ ID NO: 3585019 - DNA, 25 bp, Homo sapien
cccagggggcttggatgccgcttcc

SEQ ID NO: 3585020 - DNA, 25 bp, Homo sapien
caaaaggacatcatggaaagagacc

SEQ ID NO: 3585021 - DNA, 25 bp, Homo sapien
tttctgcatcccctttaatgacatg

SEQ ID NO: 3585022 - DNA, 25 bp, Homo sapien
aaacctgagtaggtttgctaggtgg

SEQ ID NO: 3585023 - DNA, 25 bp, Homo sapien
gactaagacttttagacacatcaag

SEQ ID NO: 3585024 - DNA, 25 bp, Homo sapien
ttttgaaacctgagtaggtttgcta

SEQ ID NO: 3585025 - DNA, 25 bp, Homo sapien
catcaaggaggaatggacattagag

SEQ ID NO: 3585026 - DNA, 25 bp, Homo sapien
ccagaattgatttttgagcaaacaa

SEQ ID NO: 3585027 - DNA, 25 bp, Homo sapien
ttttccagaattgatttttgagcaa

SEQ ID NO: 3585028 - DNA, 25 bp, Homo sapien
gaattgatttttgagcaaacaacca

SEQ ID NO: 3585029 - DNA, 25 bp, Homo sapien
ttccagaattgatttttgagcaaac

SEQ ID NO: 3585030 - DNA, 25 bp, Homo sapien
ccaccattccccatactccctttgg

SEQ ID NO: 3585031 - DNA, 25 bp, Homo sapien
caccattccccatactccctttggg

SEQ ID NO: 3585032 - DNA, 25 bp, Homo sapien
cccaccattccccatactccctttg

SEQ ID NO: 3585033 - DNA, 25 bp, Homo sapien
gaaacactctatttccgacttgtgc

SEQ ID NO: 3585034 - DNA, 25 bp, Homo sapien
aacactctatttccgacttgtgctg

SEQ ID NO: 3585035 - DNA, 25 bp, Homo sapien
ctatttccgacttgtgctgggccag

SEQ ID NO: 3585036 - DNA, 25 bp, Homo sapien
actctatttccgacttgtgctgggc

SEQ ID NO: 3585037 - DNA, 25 bp, Homo sapien
caaacagaaagacgtgattgtgtgc

SEQ ID NO: 3585038 - DNA, 25 bp, Homo sapien
aggagcaaacagaaagacgtgattg

SEQ ID NO: 3585039 - DNA, 25 bp, Homo sapien
cagaaagacgtgattgtgtgcttaa

SEQ ID NO: 3585040 - DNA, 25 bp, Homo sapien
gacgtgattgtgtgcttaactgcca

SEQ ID NO: 3585041 - DNA, 25 bp, Homo sapien
tctacaagagcctatactcatctgg

SEQ ID NO: 3585042 - DNA, 25 bp, Homo sapien
tcttctgtactgagttctacaagag

SEQ ID NO: 3585043 - DNA, 25 bp, Homo sapien
caagagcctatactcatctggtaaa

SEQ ID NO: 3585044 - DNA, 25 bp, Homo sapien
tgcttatcttctgtaaagatttttg

SEQ ID NO: 3585045 - DNA, 25 bp, Homo sapien
tatcagattcacttgccactttact

SEQ ID NO: 3585046 - DNA, 25 bp, Homo sapien
cttcacgatgtagacactgattaga

SEQ ID NO: 3585047 - DNA, 25 bp, Homo sapien
aattatcagattcacttgccacttt

SEQ ID NO: 3585048 - DNA, 25 bp, Homo sapien
tgtagacactgattagactaagatg

SEQ ID NO: 3585049 - DNA, 25 bp, Homo sapien
tcacatggggccttgtagagctgac

SEQ ID NO: 3585050 - DNA, 25 bp, Homo sapien
ttctttctcacatggggccttgtag

SEQ ID NO: 3585051 - DNA, 25 bp, Homo sapien
gggccttgtagagctgaccgtttaa

SEQ ID NO: 3585052 - DNA, 25 bp, Homo sapien
gctgaccgtttaagctttctccttc

SEQ ID NO: 3585053 - DNA, 25 bp, Homo sapien
tctactccttgtattacggacttcc

SEQ ID NO: 3585054 - DNA, 25 bp, Homo sapien
tccgtaaatgtgtgcattgcctcct

SEQ ID NO: 3585055 - DNA, 25 bp, Homo sapien
cttgtgtctccttgagtgaaactcc

SEQ ID NO: 3585056 - DNA, 25 bp, Homo sapien
cattcactgagcagacaagccttgc

SEQ ID NO: 3585057 - DNA, 25 bp, Homo sapien
cctacagtccccagtataaaatgtg

SEQ ID NO: 3585058 - DNA, 25 bp, Homo sapien
catgacagtgctgcaaagcctcagt

SEQ ID NO: 3585059 - DNA, 25 bp, Homo sapien
tctgcacttggcaatacagtcctag

SEQ ID NO: 3585060 - DNA, 25 bp, Homo sapien
cagggcccagttggatctgcacttg

SEQ ID NO: 3585061 - DNA, 25 bp, Homo sapien
gtctttgattattgctacacaagct

SEQ ID NO: 3585062 - DNA, 25 bp, Homo sapien
tctgctgcttacattgagctctctg

SEQ ID NO: 3585063 - DNA, 25 bp, Homo sapien
cccacagtggtagtctttgattatt

SEQ ID NO: 3585064 - DNA, 25 bp, Homo sapien
gctctctgtgcaaacccacagtggt

SEQ ID NO: 3585065 - DNA, 25 bp, Homo sapien
tgcccaaagaacttcgcctgccacc

SEQ ID NO: 3585066 - DNA, 25 bp, Homo sapien
cccaaagaacttcgcctgccaccta

SEQ ID NO: 3585067 - DNA, 25 bp, Homo sapien
aagaacttcgcctgccacctactgg

SEQ ID NO: 3585068 - DNA, 25 bp, Homo sapien
caaagaacttcgcctgccacctact

SEQ ID NO: 3585069 - DNA, 25 bp, Homo sapien
caatgatctctggtagaacatgcat

SEQ ID NO: 3585070 - DNA, 25 bp, Homo sapien
tcttgtcctcaatgatctctggtag

SEQ ID NO: 3585071 - DNA, 25 bp, Homo sapien
ccacgacagtgatttactgagtatc

SEQ ID NO: 3585072 - DNA, 25 bp, Homo sapien
ctactcagagccaacctagggatga

SEQ ID NO: 3585073 - DNA, 25 bp, Homo sapien
ggatacatcctgtattatgttcaca

SEQ ID NO: 3585074 - DNA, 25 bp, Homo sapien
tcacagtggacctttgagcacaata

SEQ ID NO: 3585075 - DNA, 25 bp, Homo sapien
gagcacaatacagagtgaaatgaat

SEQ ID NO: 3585076 - DNA, 25 bp, Homo sapien
gcatggccctgtgggatacatcctg

SEQ ID NO: 3585077 - DNA, 25 bp, Homo sapien
tacatgcatgcgcaccacggtagat

SEQ ID NO: 3585078 - DNA, 25 bp, Homo sapien
gaatgaaagcaatcactagctgggc

SEQ ID NO: 3585079 - DNA, 25 bp, Homo sapien
tctgtttgggcttcgcaatgaggca

SEQ ID NO: 3585080 - DNA, 25 bp, Homo sapien
cagctgcaatgggttcagggtcacc

SEQ ID NO: 3585081 - DNA, 25 bp, Homo sapien
tctagtcatctacgttcccatgtgc

SEQ ID NO: 3585082 - DNA, 25 bp, Homo sapien
taaaaaattgtggatagctcagact

SEQ ID NO: 3585083 - DNA, 25 bp, Homo sapien
ctttagtatgccatagagtttaggc

SEQ ID NO: 3585084 - DNA, 25 bp, Homo sapien
tacaaatttgctccttggagaggct

SEQ ID NO: 3585085 - DNA, 25 bp, Homo sapien
taatttcctctcatcaacgtttact

SEQ ID NO: 3585086 - DNA, 25 bp, Homo sapien
tcctctcatcaacgtttactcccat

SEQ ID NO: 3585087 - DNA, 25 bp, Homo sapien
ccaagacctggttaatttcctctca

SEQ ID NO: 3585088 - DNA, 25 bp, Homo sapien
tccaagacctggttaatttcctctc

SEQ ID NO: 3585089 - DNA, 25 bp, Homo sapien
cttcttcaagtaatgtgatgacacc

SEQ ID NO: 3585090 - DNA, 25 bp, Homo sapien
gtgatgacaccatttcttgtgtgct

SEQ ID NO: 3585091 - DNA, 25 bp, Homo sapien
agcttgctgtctcctttgttgtttt

SEQ ID NO: 3585092 - DNA, 25 bp, Homo sapien
tcagcttgctgtctcctttgttgtt

SEQ ID NO: 3585093 - DNA, 25 bp, Homo sapien
tgtacaggtccaacaacagctgact

SEQ ID NO: 3585094 - DNA, 25 bp, Homo sapien
gagatcatcagtgggccaagacccc

SEQ ID NO: 3585095 - DNA, 25 bp, Homo sapien
tcattctccttacaaggtgtacagg

SEQ ID NO: 3585096 - DNA, 25 bp, Homo sapien
catgccttgcatgtgtactcatcaa

SEQ ID NO: 3585097 - DNA, 25 bp, Homo sapien
caacgttgatataatcaaagtaatc

SEQ ID NO: 3585098 - DNA, 25 bp, Homo sapien
tttaattctccattgtcccaacttc

SEQ ID NO: 3585099 - DNA, 25 bp, Homo sapien
gtcccaacttccaacgttgatataa

SEQ ID NO: 3585100 - DNA, 25 bp, Homo sapien
tttcttggaccatacttcatcatca

SEQ ID NO: 3585101 - DNA, 25 bp, Homo sapien
ttatggtcaattccgggtggcagcc

SEQ ID NO: 3585102 - DNA, 25 bp, Homo sapien
tgttttcaaatacttcgcacccatg

SEQ ID NO: 3585103 - DNA, 25 bp, Homo sapien
taacattgggtgtccacgtttcctc

SEQ ID NO: 3585104 - DNA, 25 bp, Homo sapien
tagttgtactcagtctaacattggg

SEQ ID NO: 3585105 - DNA, 25 bp, Homo sapien
gacatctgcatgttgtggagcccat

SEQ ID NO: 3585106 - DNA, 25 bp, Homo sapien
gagcccataggccatcgaatagatg

SEQ ID NO: 3585107 - DNA, 25 bp, Homo sapien
tcacagagtcctgcatagcctgggc

SEQ ID NO: 3585108 - DNA, 25 bp, Homo sapien
tcatcagggactccaaaagtttccg

SEQ ID NO: 3585109 - DNA, 25 bp, Homo sapien
tttggaatcctgaacatgatgtgtt

SEQ ID NO: 3585110 - DNA, 25 bp, Homo sapien
tgatgtgttttcagagtcagagaac

SEQ ID NO: 3585111 - DNA, 25 bp, Homo sapien
aacatgatgtgttttcagagtcaga

SEQ ID NO: 3585112 - DNA, 25 bp, Homo sapien
catgatgtgttttcagagtcagaga

SEQ ID NO: 3585113 - DNA, 25 bp, Homo sapien
attttatcagagttagaaccatggg

SEQ ID NO: 3585114 - DNA, 25 bp, Homo sapien
taacactgagaaacagtaccaacat

SEQ ID NO: 3585115 - DNA, 25 bp, Homo sapien
gggtaacactgagaaacagtaccaa

SEQ ID NO: 3585116 - DNA, 25 bp, Homo sapien
ctgtaattagagaatgcactggagc

SEQ ID NO: 3585117 - DNA, 25 bp, Homo sapien
tataacccagacttcaattcctttg

SEQ ID NO: 3585118 - DNA, 25 bp, Homo sapien
gctatctgcagtatacctaaaacga

SEQ ID NO: 3585119 - DNA, 25 bp, Homo sapien
tcctttgatttatgggatcacccag

SEQ ID NO: 3585120 - DNA, 25 bp, Homo sapien
gactctttcaactatgctatctgca

SEQ ID NO: 3585121 - DNA, 25 bp, Homo sapien
gaaactctaattcctagtgtgatgg

SEQ ID NO: 3585122 - DNA, 25 bp, Homo sapien
taagagaagagataccagtgacttg

SEQ ID NO: 3585123 - DNA, 25 bp, Homo sapien
ggaaaatgaggcttcaccagaaccc

SEQ ID NO: 3585124 - DNA, 25 bp, Homo sapien
cagagactgtgtgttatggactaaa

SEQ ID NO: 3585125 - DNA, 25 bp, Homo sapien
caattgcccttggatactctgacct

SEQ ID NO: 3585126 - DNA, 25 bp, Homo sapien
aattgcccttggatactctgacctg

SEQ ID NO: 3585127 - DNA, 25 bp, Homo sapien
ccaattgcccttggatactctgacc

SEQ ID NO: 3585128 - DNA, 25 bp, Homo sapien
gactataggtatgcgctgtcacacc

SEQ ID NO: 3585129 - DNA, 25 bp, Homo sapien
ggactataggtatgcgctgtcacac

SEQ ID NO: 3585130 - DNA, 25 bp, Homo sapien
tataggtatgcgctgtcacacctgg

SEQ ID NO: 3585131 - DNA, 25 bp, Homo sapien
ataggtatgcgctgtcacacctggc

SEQ ID NO: 3585132 - DNA, 25 bp, Homo sapien
ctacacatgaagtggagagaaactt

SEQ ID NO: 3585133 - DNA, 25 bp, Homo sapien
acacatgaagtggagagaaacttgt

SEQ ID NO: 3585134 - DNA, 25 bp, Homo sapien
gagagaaacttgtgttagtgtgtag

SEQ ID NO: 3585135 - DNA, 25 bp, Homo sapien
gagaaacttgtgttagtgtgtagaa

SEQ ID NO: 3585136 - DNA, 25 bp, Homo sapien
tttggtacacatagagatggttgtg

SEQ ID NO: 3585137 - DNA, 25 bp, Homo sapien
aaatggggaagtatatctgtgctca

SEQ ID NO: 3585138 - DNA, 25 bp, Homo sapien
tattaacagtagtttggtacacata

SEQ ID NO: 3585139 - DNA, 25 bp, Homo sapien
gatggttgtgtgagtagttccttgg

SEQ ID NO: 3585140 - DNA, 25 bp, Homo sapien
actgcagtaaagaacagattctgag

SEQ ID NO: 3585141 - DNA, 25 bp, Homo sapien
gactgcagtaaagaacagattctga

SEQ ID NO: 3585142 - DNA, 25 bp, Homo sapien
tgactgcagtaaagaacagattctg

SEQ ID NO: 3585143 - DNA, 25 bp, Homo sapien
ttaaatgaaataataaatctgctta

SEQ ID NO: 3585144 - DNA, 25 bp, Homo sapien
taaatgaaataataaatctgcttac

SEQ ID NO: 3585145 - DNA, 25 bp, Homo sapien
ggaaacccttccagtcggcactgaa

SEQ ID NO: 3585146 - DNA, 25 bp, Homo sapien
ggagcttgattgtgatgccaccaac

SEQ ID NO: 3585147 - DNA, 25 bp, Homo sapien
tggccggagcttcagataataatca

SEQ ID NO: 3585148 - DNA, 25 bp, Homo sapien
gaaaacgatgctgccaaaattcttg

SEQ ID NO: 3585149 - DNA, 25 bp, Homo sapien
ttagaacagatatctcctaagcaaa

SEQ ID NO: 3585150 - DNA, 25 bp, Homo sapien
gatatctcctaagcaaatgagtcca

SEQ ID NO: 3585151 - DNA, 25 bp, Homo sapien
tctcctaagcaaatgagtccatttg

SEQ ID NO: 3585152 - DNA, 25 bp, Homo sapien
gaacagatatctcctaagcaaatga

SEQ ID NO: 3585153 - DNA, 25 bp, Homo sapien
ctgctattttttttcctaggtctct

SEQ ID NO: 3585154 - DNA, 25 bp, Homo sapien
tcaacatttattaaatatctaccca

SEQ ID NO: 3585155 - DNA, 25 bp, Homo sapien
caacatttattaaatatctacccat

SEQ ID NO: 3585156 - DNA, 25 bp, Homo sapien
cctaggtctctataaccttccttct

SEQ ID NO: 3585157 - DNA, 25 bp, Homo sapien
ctgtgcactgttcttgccaagaagt

SEQ ID NO: 3585158 - DNA, 25 bp, Homo sapien
agtcagaggcttggctgtggagcat

SEQ ID NO: 3585159 - DNA, 25 bp, Homo sapien
gttcttgccaagaagtcagaggctt

SEQ ID NO: 3585160 - DNA, 25 bp, Homo sapien
tgccaagaagtcagaggcttggctg

SEQ ID NO: 3585161 - DNA, 25 bp, Homo sapien
tacagacttcaatctcaacatctac

SEQ ID NO: 3585162 - DNA, 25 bp, Homo sapien
acagacttcaatctcaacatctact

SEQ ID NO: 3585163 - DNA, 25 bp, Homo sapien
ttacagacttcaatctcaacatcta

SEQ ID NO: 3585164 - DNA, 25 bp, Homo sapien
tttacagacttcaatctcaacatct

SEQ ID NO: 3585165 - DNA, 25 bp, Homo sapien
tggtgatcaggaagtcagacctctc

SEQ ID NO: 3585166 - DNA, 25 bp, Homo sapien
cacagtttttaccatgacagggaag

SEQ ID NO: 3585167 - DNA, 25 bp, Homo sapien
tcaagacaagcatagtcaagggttc

SEQ ID NO: 3585168 - DNA, 25 bp, Homo sapien
tgagggaactttagaatgcaccgga

SEQ ID NO: 3585169 - DNA, 25 bp, Homo sapien
tgtggatgatcagattgatcctggc

SEQ ID NO: 3585170 - DNA, 25 bp, Homo sapien
tttgaggatcagtgaagtagaacct

SEQ ID NO: 3585171 - DNA, 25 bp, Homo sapien
aaggaatgattctgcatcgctctgc

SEQ ID NO: 3585172 - DNA, 25 bp, Homo sapien
gggttcactcctcccattagctgtg

SEQ ID NO: 3585173 - DNA, 25 bp, Homo sapien
cctaagtcaacagaggctgtatttc

SEQ ID NO: 3585174 - DNA, 25 bp, Homo sapien
taagtcaacagaggctgtatttcca

SEQ ID NO: 3585175 - DNA, 25 bp, Homo sapien
tgtatttccatcaccatttccgggc

SEQ ID NO: 3585176 - DNA, 25 bp, Homo sapien
ccatcaccatttccgggcaagcttg

SEQ ID NO: 3585177 - DNA, 25 bp, Homo sapien
tttagctgagttttgaatgtgtgaa

SEQ ID NO: 3585178 - DNA, 25 bp, Homo sapien
ttctagatcactagtttcctgctgt

SEQ ID NO: 3585179 - DNA, 25 bp, Homo sapien
tgattctagatcactagtttcctgc

SEQ ID NO: 3585180 - DNA, 25 bp, Homo sapien
cagtatttaccaaagtatggcgtaa

SEQ ID NO: 3585181 - DNA, 25 bp, Homo sapien
tcttgctgattctagatcactagtt

SEQ ID NO: 3585182 - DNA, 25 bp, Homo sapien
cgatagacttcatgttatgttcagg

SEQ ID NO: 3585183 - DNA, 25 bp, Homo sapien
tatgttcaggttttactagtacaag

SEQ ID NO: 3585184 - DNA, 25 bp, Homo sapien
caaactgggtacacgatagacttca

SEQ ID NO: 3585185 - DNA, 25 bp, Homo sapien
tcaagttgccactacttggcaccaa

SEQ ID NO: 3585186 - DNA, 25 bp, Homo sapien
tggtagtgacgagttaaggcttcaa

SEQ ID NO: 3585187 - DNA, 25 bp, Homo sapien
ttttctggtagtgacgagttaaggc

SEQ ID NO: 3585188 - DNA, 25 bp, Homo sapien
tctggtagtgacgagttaaggcttc

SEQ ID NO: 3585189 - DNA, 25 bp, Homo sapien
ccattttctggtagtgacgagttaa

SEQ ID NO: 3585190 - DNA, 25 bp, Homo sapien
ttttcacctcgtacatcaacactgt

SEQ ID NO: 3585191 - DNA, 25 bp, Homo sapien
gctaaggtcggtgaattccaactcc

SEQ ID NO: 3585192 - DNA, 25 bp, Homo sapien
aaacaccagaaatcatctgattcaa

SEQ ID NO: 3585193 - DNA, 25 bp, Homo sapien
ttagtcaccgaaaagcaaacaccag

SEQ ID NO: 3585194 - DNA, 25 bp, Homo sapien
gtttcttgcatccttcccttgttct

SEQ ID NO: 3585195 - DNA, 25 bp, Homo sapien
gatgtttcttgcatccttcccttgt

SEQ ID NO: 3585196 - DNA, 25 bp, Homo sapien
tgcatccttcccttgttctttgtca

SEQ ID NO: 3585197 - DNA, 25 bp, Homo sapien
ttgcatccttcccttgttctttgtc

SEQ ID NO: 3585198 - DNA, 25 bp, Homo sapien
caactgccctagtcactggtcccat

SEQ ID NO: 3585199 - DNA, 25 bp, Homo sapien
gcaactgccctagtcactggtccca

SEQ ID NO: 3585200 - DNA, 25 bp, Homo sapien
ggcaactgccctagtcactggtccc

SEQ ID NO: 3585201 - DNA, 25 bp, Homo sapien
tacagcacctatcagtgataacagc

SEQ ID NO: 3585202 - DNA, 25 bp, Homo sapien
agaaatgacatactcttcccaaaaa

SEQ ID NO: 3585203 - DNA, 25 bp, Homo sapien
tttacagcacctatcagtgataaca

SEQ ID NO: 3585204 - DNA, 25 bp, Homo sapien
tgacatactcttcccaaaaaaggct

SEQ ID NO: 3585205 - DNA, 25 bp, Homo sapien
aaggcgagcaaatatgtgtgcgaga

SEQ ID NO: 3585206 - DNA, 25 bp, Homo sapien
gctgctttatcccatgttggcagac

SEQ ID NO: 3585207 - DNA, 25 bp, Homo sapien
ggttcaaggacccatatctggcaag

SEQ ID NO: 3585208 - DNA, 25 bp, Homo sapien
tgttggcagacaaaaaggcgagcaa

SEQ ID NO: 3585209 - DNA, 25 bp, Homo sapien
tgctgtcagtattggaagttgttct

SEQ ID NO: 3585210 - DNA, 25 bp, Homo sapien
tcaatctgctgtcagtattggaagt

SEQ ID NO: 3585211 - DNA, 25 bp, Homo sapien
tgattggcttttgtggacttcacag

SEQ ID NO: 3585212 - DNA, 25 bp, Homo sapien
tctgattggcttttgtggacttcac

SEQ ID NO: 3585213 - DNA, 25 bp, Homo sapien
tccaatgggtattaggtaactgatg

SEQ ID NO: 3585214 - DNA, 25 bp, Homo sapien
tccgttttccaccatctggacatat

SEQ ID NO: 3585215 - DNA, 25 bp, Homo sapien
gggccaatggaccagcatctggtag

SEQ ID NO: 3585216 - DNA, 25 bp, Homo sapien
tctggtagccactagtccaatgggt

SEQ ID NO: 3585217 - DNA, 25 bp, Homo sapien
aaaactgtaatttcattggcaagga

SEQ ID NO: 3585218 - DNA, 25 bp, Homo sapien
gggaatagccactatcatagtttga

SEQ ID NO: 3585219 - DNA, 25 bp, Homo sapien
caaacgcacattttctccaaggaat

SEQ ID NO: 3585220 - DNA, 25 bp, Homo sapien
tgtagattgacctctaagaaatgct

SEQ ID NO: 3585221 - DNA, 25 bp, Homo sapien
attaaagtcaatctctgtagaagct

SEQ ID NO: 3585222 - DNA, 25 bp, Homo sapien
taattaaagtcaatctctgtagaag

SEQ ID NO: 3585223 - DNA, 25 bp, Homo sapien
caatcaagtgaattatccagataat

SEQ ID NO: 3585224 - DNA, 25 bp, Homo sapien
agataattaaagtcaatctctgtag

SEQ ID NO: 3585225 - DNA, 25 bp, Homo sapien
caaatcccttccttcgctgacatat

SEQ ID NO: 3585226 - DNA, 25 bp, Homo sapien
taagagtgggcgatgcaaatccctt

SEQ ID NO: 3585227 - DNA, 25 bp, Homo sapien
gcaagtgacttgtgagcttcttcag

SEQ ID NO: 3585228 - DNA, 25 bp, Homo sapien
gctgacatatctttgaaggcttcca

SEQ ID NO: 3585229 - DNA, 25 bp, Homo sapien
tgaaatctgttaactttgagggtgg

SEQ ID NO: 3585230 - DNA, 25 bp, Homo sapien
ggtgaagttttatctccatgaacaa

SEQ ID NO: 3585231 - DNA, 25 bp, Homo sapien
aatctgttaactttgagggtggatt

SEQ ID NO: 3585232 - DNA, 25 bp, Homo sapien
gattttggtgaagttttatctccat

SEQ ID NO: 3585233 - DNA, 25 bp, Homo sapien
ccttgattctaactggatctaatga

SEQ ID NO: 3585234 - DNA, 25 bp, Homo sapien
tagccaccaatgatccttgattcta

SEQ ID NO: 3585235 - DNA, 25 bp, Homo sapien
ccaatgatccttgattctaactgga

SEQ ID NO: 3585236 - DNA, 25 bp, Homo sapien
tgattctaactggatctaatgacaa

SEQ ID NO: 3585237 - DNA, 25 bp, Homo sapien
aaaaagtcgcttctttgacagcagc

SEQ ID NO: 3585238 - DNA, 25 bp, Homo sapien
tagccagattccctttggaaggact

SEQ ID NO: 3585239 - DNA, 25 bp, Homo sapien
agctgaaggcagaaaatcctctaca

SEQ ID NO: 3585240 - DNA, 25 bp, Homo sapien
ctgtctgggttctgttgtagccaga

SEQ ID NO: 3585241 - DNA, 25 bp, Homo sapien
tagtagtgccacacaaggacataga

SEQ ID NO: 3585242 - DNA, 25 bp, Homo sapien
cacactctagtgtcccacagaggga

SEQ ID NO: 3585243 - DNA, 25 bp, Homo sapien
tgtccaaaactgctagtagtgccac

SEQ ID NO: 3585244 - DNA, 25 bp, Homo sapien
gacatagaaactgagagcaagactg

SEQ ID NO: 3585245 - DNA, 25 bp, Homo sapien
tggtatctccaagatgcagagggtg

SEQ ID NO: 3585246 - DNA, 25 bp, Homo sapien
tctagcttgtttccgtgatggcact

SEQ ID NO: 3585247 - DNA, 25 bp, Homo sapien
gaacatgaagcccacctactgcaat

SEQ ID NO: 3585248 - DNA, 25 bp, Homo sapien
taaccccagttaccatagcagtgtc

SEQ ID NO: 3585249 - DNA, 25 bp, Homo sapien
gatgagaagtcacaaataagtattg

SEQ ID NO: 3585250 - DNA, 25 bp, Homo sapien
tcagaggaacgtgtatctgtataac

SEQ ID NO: 3585251 - DNA, 25 bp, Homo sapien
aataacagcatctaaccagttgggg

SEQ ID NO: 3585252 - DNA, 25 bp, Homo sapien
tgtacaatactgtaagtattggcga

SEQ ID NO: 3585253 - DNA, 25 bp, Homo sapien
ttcgtagaaccatcttcatttgaat

SEQ ID NO: 3585254 - DNA, 25 bp, Homo sapien
tcgtagaaccatcttcatttgaatc

SEQ ID NO: 3585255 - DNA, 25 bp, Homo sapien
tctatgggagctactcagcaaatac

SEQ ID NO: 3585256 - DNA, 25 bp, Homo sapien
ggagactaaaacttcaatgcatgca

SEQ ID NO: 3585257 - DNA, 25 bp, Homo sapien
gaatggctctttacatctatgggag

SEQ ID NO: 3585258 - DNA, 25 bp, Homo sapien
gtttatcgcacacctagaatggctc

SEQ ID NO: 3585259 - DNA, 25 bp, Homo sapien
cttagttgagtcagccagagacaca

SEQ ID NO: 3585260 - DNA, 25 bp, Homo sapien
tcagatattgaccttagttgagtca

SEQ ID NO: 3585261 - DNA, 25 bp, Homo sapien
tattgaccttagttgagtcagccag

SEQ ID NO: 3585262 - DNA, 25 bp, Homo sapien
gaccttagttgagtcagccagagac

SEQ ID NO: 3585263 - DNA, 25 bp, Homo sapien
gactattcatgatcctcttcttttt

SEQ ID NO: 3585264 - DNA, 25 bp, Homo sapien
ttatcataaatttgtcatctggcat

SEQ ID NO: 3585265 - DNA, 25 bp, Homo sapien
ttgactattcatgatcctcttcttt

SEQ ID NO: 3585266 - DNA, 25 bp, Homo sapien
attttatcataaatttgtcatctgg

SEQ ID NO: 3585267 - DNA, 25 bp, Homo sapien
gatgtagtaacaataagattagatt

SEQ ID NO: 3585268 - DNA, 25 bp, Homo sapien
tgtggaaggtgtattatagacagca

SEQ ID NO: 3585269 - DNA, 25 bp, Homo sapien
gatagccaggatcgggttttttaga

SEQ ID NO: 3585270 - DNA, 25 bp, Homo sapien
caaagggtttagatgatatgacaag

SEQ ID NO: 3585271 - DNA, 25 bp, Homo sapien
ttctctgtgcttaggtctgatgctt

SEQ ID NO: 3585272 - DNA, 25 bp, Homo sapien
tactaaagaatcattccatctaatt

SEQ ID NO: 3585273 - DNA, 25 bp, Homo sapien
ttccagggcatcatatactaaagaa

SEQ ID NO: 3585274 - DNA, 25 bp, Homo sapien
gagacagcacttggatgttttcatt

SEQ ID NO: 3585275 - DNA, 25 bp, Homo sapien
tttattaaagctataggagaaagaa

SEQ ID NO: 3585276 - DNA, 25 bp, Homo sapien
gataatgaacattgaagggtaggca

SEQ ID NO: 3585277 - DNA, 25 bp, Homo sapien
tataagctgaataaggtcggagtga

SEQ ID NO: 3585278 - DNA, 25 bp, Homo sapien
taaatcaaatagcagaggtcttcgc

SEQ ID NO: 3585279 - DNA, 25 bp, Homo sapien
taagtgattctaaagctgaactgga

SEQ ID NO: 3585280 - DNA, 25 bp, Homo sapien
gataacatcaatgtctgatccctct

SEQ ID NO: 3585281 - DNA, 25 bp, Homo sapien
acatcaatgtctgatccctcttacg

SEQ ID NO: 3585282 - DNA, 25 bp, Homo sapien
tcaatgtctgatccctcttacgcat

SEQ ID NO: 3585283 - DNA, 25 bp, Homo sapien
tgtctgatccctcttacgcatctct

SEQ ID NO: 3585284 - DNA, 25 bp, Homo sapien
gagaatcaagaactgctgcacagaa

SEQ ID NO: 3585285 - DNA, 25 bp, Homo sapien
tgcacagaaacctttgatagccaat

SEQ ID NO: 3585286 - DNA, 25 bp, Homo sapien
tatgactctacattgaatgcataca

SEQ ID NO: 3585287 - DNA, 25 bp, Homo sapien
gatcaaatccactaagagaatcaag

SEQ ID NO: 3585288 - DNA, 25 bp, Homo sapien
ctttttcgtgcaattgcaaacttat

SEQ ID NO: 3585289 - DNA, 25 bp, Homo sapien
tttttcgtgcaattgcaaacttatc

SEQ ID NO: 3585290 - DNA, 25 bp, Homo sapien
tcagcaattgatgacagcaatggtg

SEQ ID NO: 3585291 - DNA, 25 bp, Homo sapien
cagcaattgatgacagcaatggtgc

SEQ ID NO: 3585292 - DNA, 25 bp, Homo sapien
ttatttactgagtccatagactgtt

SEQ ID NO: 3585293 - DNA, 25 bp, Homo sapien
tatttactgagtccatagactgttc

SEQ ID NO: 3585294 - DNA, 25 bp, Homo sapien
ttactgagtccatagactgttcctt

SEQ ID NO: 3585295 - DNA, 25 bp, Homo sapien
tttactgagtccatagactgttcct

SEQ ID NO: 3585296 - DNA, 25 bp, Homo sapien
cctttgccagattgcaatcccactg

SEQ ID NO: 3585297 - DNA, 25 bp, Homo sapien
gggtctgaattgatcctttccaggg

SEQ ID NO: 3585298 - DNA, 25 bp, Homo sapien
gactgacaggatcaacagaaggacc

SEQ ID NO: 3585299 - DNA, 25 bp, Homo sapien
caaattctggacctgaatggctaca

SEQ ID NO: 3585300 - DNA, 25 bp, Homo sapien
gctgagcatctgaaggcacaaccct

SEQ ID NO: 3585301 - DNA, 25 bp, Homo sapien
ggttctgatagctacgaacaagcga

SEQ ID NO: 3585302 - DNA, 25 bp, Homo sapien
caggagggttctgatagctacgaac

SEQ ID NO: 3585303 - DNA, 25 bp, Homo sapien
aagatagcatggtggggaaaattca

SEQ ID NO: 3585304 - DNA, 25 bp, Homo sapien
ctgatagctacgaacaagcgatgtc

SEQ ID NO: 3585305 - DNA, 25 bp, Homo sapien
aaatcaagaaattagccagcaattc

SEQ ID NO: 3585306 - DNA, 25 bp, Homo sapien
attagccagcaattcagatgtattt

SEQ ID NO: 3585307 - DNA, 25 bp, Homo sapien
tacgttgagtcgcaaatcaagaaat

SEQ ID NO: 3585308 - DNA, 25 bp, Homo sapien
catttagttagatgatccatgtggt

SEQ ID NO: 3585309 - DNA, 25 bp, Homo sapien
aagagatcattgaatgagcaggcag

SEQ ID NO: 3585310 - DNA, 25 bp, Homo sapien
agaaactcaagaagagatcattgaa

SEQ ID NO: 3585311 - DNA, 25 bp, Homo sapien
caagaagagatcattgaatgagcag

SEQ ID NO: 3585312 - DNA, 25 bp, Homo sapien
ctcaagaagagatcattgaatgagc

SEQ ID NO: 3585313 - DNA, 25 bp, Homo sapien
gctgtcaatattgcatatgccatca

SEQ ID NO: 3585314 - DNA, 25 bp, Homo sapien
gtggcctcatcacaaacagtcaggg

SEQ ID NO: 3585315 - DNA, 25 bp, Homo sapien
tcacaaacagtcagggctgtcaata

SEQ ID NO: 3585316 - DNA, 25 bp, Homo sapien
agggctgtcaatattgcatatgcca

SEQ ID NO: 3585317 - DNA, 25 bp, Homo sapien
tcacaattccgagccctcgggtggt

SEQ ID NO: 3585318 - DNA, 25 bp, Homo sapien
caaagagaggcaatatagcctgagt

SEQ ID NO: 3585319 - DNA, 25 bp, Homo sapien
tgcattcgaaaccacgcgcacctgg

SEQ ID NO: 3585320 - DNA, 25 bp, Homo sapien
gaagcggcccctaacagatctattg

SEQ ID NO: 3585321 - DNA, 25 bp, Homo sapien
gaatcttgtcggctttggccacccc

SEQ ID NO: 3585322 - DNA, 25 bp, Homo sapien
tcgcaaatggaacagacttgaatct

SEQ ID NO: 3585323 - DNA, 25 bp, Homo sapien
caggtttaattaaggctgttcgcaa

SEQ ID NO: 3585324 - DNA, 25 bp, Homo sapien
gaactcggatgcgaaggcatgcaga

SEQ ID NO: 3585325 - DNA, 25 bp, Homo sapien
aagttgggccacggggatcagcagg

SEQ ID NO: 3585326 - DNA, 25 bp, Homo sapien
agtgagactcggtctagctagcccc

SEQ ID NO: 3585327 - DNA, 25 bp, Homo sapien
agttgggccacggggatcagcaggg

SEQ ID NO: 3585328 - DNA, 25 bp, Homo sapien
agcagtgagactcggtctagctagc

SEQ ID NO: 3585329 - DNA, 25 bp, Homo sapien
tgcgctctcgtagcggccttggctg

SEQ ID NO: 3585330 - DNA, 25 bp, Homo sapien
gctgcagctggagcgctagtgtcgg

SEQ ID NO: 3585331 - DNA, 25 bp, Homo sapien
ctagtgtcggcgatggaggcagcgg

SEQ ID NO: 3585332 - DNA, 25 bp, Homo sapien
aggtgcgcgccctgagccttgcgcc

SEQ ID NO: 3585333 - DNA, 25 bp, Homo sapien
tgttgggttttacaatggcatcttt

SEQ ID NO: 3585334 - DNA, 25 bp, Homo sapien
cttgttgggttttacaatggcatct

SEQ ID NO: 3585335 - DNA, 25 bp, Homo sapien
ttgttgggttttacaatggcatctt

SEQ ID NO: 3585336 - DNA, 25 bp, Homo sapien
tatactgggttcgaatgggcatcac

SEQ ID NO: 3585337 - DNA, 25 bp, Homo sapien
ttatactgggttcgaatgggcatca

SEQ ID NO: 3585338 - DNA, 25 bp, Homo sapien
atactgggttcgaatgggcatcacc

SEQ ID NO: 3585339 - DNA, 25 bp, Homo sapien
gttatactgggttcgaatgggcatc

SEQ ID NO: 3585340 - DNA, 25 bp, Homo sapien
cttacaccaatcttctttcaagctc

SEQ ID NO: 3585341 - DNA, 25 bp, Homo sapien
attttcttacaccaatcttctttca

SEQ ID NO: 3585342 - DNA, 25 bp, Homo sapien
cttctttcaagctcagttcaggcat

SEQ ID NO: 3585343 - DNA, 25 bp, Homo sapien
cctctctattttcttacaccaatct

SEQ ID NO: 3585344 - DNA, 25 bp, Homo sapien
acaggtgccagagtagagctctcta

SEQ ID NO: 3585345 - DNA, 25 bp, Homo sapien
agctctctaaaattccctcgtaggt

SEQ ID NO: 3585346 - DNA, 25 bp, Homo sapien
cttgacaggtgccagagtagagctc

SEQ ID NO: 3585347 - DNA, 25 bp, Homo sapien
ttgacaggtgccagagtagagctct

SEQ ID NO: 3585348 - DNA, 25 bp, Homo sapien
aggtacagggatctgccaacgatcc

SEQ ID NO: 3585349 - DNA, 25 bp, Homo sapien
tgccaacgatcctatcttccttctt

SEQ ID NO: 3585350 - DNA, 25 bp, Homo sapien
gccttgcacatctatatgaatggaa

SEQ ID NO: 3585351 - DNA, 25 bp, Homo sapien
aagcagcatgcacaatgccttgcac

SEQ ID NO: 3585352 - DNA, 25 bp, Homo sapien
aattaagcttcatcatctggacaag

SEQ ID NO: 3585353 - DNA, 25 bp, Homo sapien
tttcaattaactctggacaatctaa

SEQ ID NO: 3585354 - DNA, 25 bp, Homo sapien
gtttcaattaactctggacaatcta

SEQ ID NO: 3585355 - DNA, 25 bp, Homo sapien
ttaaggaatgtttcaattaactctg

SEQ ID NO: 3585356 - DNA, 25 bp, Homo sapien
ttagaattaaggaatgtttcaatta

SEQ ID NO: 3585357 - DNA, 25 bp, Homo sapien
ttcccaagtactgtcaacatctgac

SEQ ID NO: 3585358 - DNA, 25 bp, Homo sapien
gggttcccaagtactgtcaacatct

SEQ ID NO: 3585359 - DNA, 25 bp, Homo sapien
gcgggttcccaagtactgtcaacat

SEQ ID NO: 3585360 - DNA, 25 bp, Homo sapien
ctgcgggttcccaagtactgtcaac

SEQ ID NO: 3585361 - DNA, 25 bp, Homo sapien
tttgctgtaattcgatccagtagtt

SEQ ID NO: 3585362 - DNA, 25 bp, Homo sapien
gctgtaattcgatccagtagttttt

SEQ ID NO: 3585363 - DNA, 25 bp, Homo sapien
cttttgctgtaattcgatccagtag

SEQ ID NO: 3585364 - DNA, 25 bp, Homo sapien
taattcgatccagtagtttttccac

SEQ ID NO: 3585365 - DNA, 25 bp, Homo sapien
ctgttttcactcagcccttttaaca

SEQ ID NO: 3585366 - DNA, 25 bp, Homo sapien
tgtcttgctgttttcactcagccct

SEQ ID NO: 3585367 - DNA, 25 bp, Homo sapien
ctttgtcttgctgttttcactcagc

SEQ ID NO: 3585368 - DNA, 25 bp, Homo sapien
tgttttcactcagcccttttaacat

SEQ ID NO: 3585369 - DNA, 25 bp, Homo sapien
gaatgcaagcacataactactaatc

SEQ ID NO: 3585370 - DNA, 25 bp, Homo sapien
actactaatcttgccttttaaatgc

SEQ ID NO: 3585371 - DNA, 25 bp, Homo sapien
tcatgaccccattgtgacacaaagc

SEQ ID NO: 3585372 - DNA, 25 bp, Homo sapien
caaatagtgcacatagcgaatgcaa

SEQ ID NO: 3585373 - DNA, 25 bp, Homo sapien
gaggctcatctagaatggcagacca

SEQ ID NO: 3585374 - DNA, 25 bp, Homo sapien
taaacatgcaagatgaagccctgca

SEQ ID NO: 3585375 - DNA, 25 bp, Homo sapien
tatttgatagcaattgatagccgac

SEQ ID NO: 3585376 - DNA, 25 bp, Homo sapien
taagcctggactaactcaaagtgtc

SEQ ID NO: 3585377 - DNA, 25 bp, Homo sapien
gatcacacagtgtagttccaacggt

SEQ ID NO: 3585378 - DNA, 25 bp, Homo sapien
ccaagaatatgatagccagggaaca

SEQ ID NO: 3585379 - DNA, 25 bp, Homo sapien
tcaggataccaaaaagtgcgacagt

SEQ ID NO: 3585380 - DNA, 25 bp, Homo sapien
caatagttccctatggaaactcagg

SEQ ID NO: 3585381 - DNA, 25 bp, Homo sapien
aataataataatagagacaaaaatg

SEQ ID NO: 3585382 - DNA, 25 bp, Homo sapien
acaataataataatagagacaaaaa

SEQ ID NO: 3585383 - DNA, 25 bp, Homo sapien
taatatatttgcctggagtgcttgc

SEQ ID NO: 3585384 - DNA, 25 bp, Homo sapien
gagacgattagatattgacacaaag

SEQ ID NO: 3585385 - DNA, 25 bp, Homo sapien
cccgtatcaatacagagtcttgtgc

SEQ ID NO: 3585386 - DNA, 25 bp, Homo sapien
tatgtctaatgcatgctaagggaag

SEQ ID NO: 3585387 - DNA, 25 bp, Homo sapien
aggaacacgacaatcagccttagat

SEQ ID NO: 3585388 - DNA, 25 bp, Homo sapien
tcttgcatttgttcaaccaaaaaca

SEQ ID NO: 3585389 - DNA, 25 bp, Homo sapien
cactagggagttcttgaatccacca

SEQ ID NO: 3585390 - DNA, 25 bp, Homo sapien
ttgagcaagttcagctcctcactag

SEQ ID NO: 3585391 - DNA, 25 bp, Homo sapien
gattccgctgagtttcaaagtctta

SEQ ID NO: 3585392 - DNA, 25 bp, Homo sapien
aagtcttagaaattgcactcattcc

SEQ ID NO: 3585393 - DNA, 25 bp, Homo sapien
tctttggcataacacagctgattga

SEQ ID NO: 3585394 - DNA, 25 bp, Homo sapien
tccttctttagagtcctgcttcatg

SEQ ID NO: 3585395 - DNA, 25 bp, Homo sapien
tgaattgggtccacaacagaaaaca

SEQ ID NO: 3585396 - DNA, 25 bp, Homo sapien
gctgaaagactctttattgtattca

SEQ ID NO: 3585397 - DNA, 25 bp, Homo sapien
atagtgaattgggtccacaacagaa

SEQ ID NO: 3585398 - DNA, 25 bp, Homo sapien
attgggtccacaacagaaaacacca

SEQ ID NO: 3585399 - DNA, 25 bp, Homo sapien
ggagtagatctacccttttacatta

SEQ ID NO: 3585400 - DNA, 25 bp, Homo sapien
tagggagtagatctacccttttaca

SEQ ID NO: 3585401 - DNA, 25 bp, Homo sapien
tgcagccatgatggggtaataggga

SEQ ID NO: 3585402 - DNA, 25 bp, Homo sapien
acttgcagccatgatggggtaatag

SEQ ID NO: 3585403 - DNA, 25 bp, Homo sapien
gcaaaaatagcaaaacggatggaag

SEQ ID NO: 3585404 - DNA, 25 bp, Homo sapien
gtacatgaagtgttacaatattatt

SEQ ID NO: 3585405 - DNA, 25 bp, Homo sapien
tatgtatatgtaagatgaatgcaaa

SEQ ID NO: 3585406 - DNA, 25 bp, Homo sapien
ggaagaaatggaagtacatgaagtg

SEQ ID NO: 3585407 - DNA, 25 bp, Homo sapien
taacgaagagttaccagtcattacc

SEQ ID NO: 3585408 - DNA, 25 bp, Homo sapien
gctcgttcttcctagcaaagccaag

SEQ ID NO: 3585409 - DNA, 25 bp, Homo sapien
gtatactaacctaatgcctactggt

SEQ ID NO: 3585410 - DNA, 25 bp, Homo sapien
gataaaaactgttgcccaacccatg

SEQ ID NO: 3585411 - DNA, 25 bp, Homo sapien
cagtcttgaattcagtgcatgatat

SEQ ID NO: 3585412 - DNA, 25 bp, Homo sapien
gaggacgtcctataaacagtcttga

SEQ ID NO: 3585413 - DNA, 25 bp, Homo sapien
catcaaacaaaagtttccaccgagg

SEQ ID NO: 3585414 - DNA, 25 bp, Homo sapien
ttccaccgaggacgtcctataaaca

SEQ ID NO: 3585415 - DNA, 25 bp, Homo sapien
cattattcgatatttagttaagtaa

SEQ ID NO: 3585416 - DNA, 25 bp, Homo sapien
aagcactacattattcgatatttag

SEQ ID NO: 3585417 - DNA, 25 bp, Homo sapien
aagaaagcactacattattcgatat

SEQ ID NO: 3585418 - DNA, 25 bp, Homo sapien
ctacattattcgatatttagttaag

SEQ ID NO: 3585419 - DNA, 25 bp, Homo sapien
tctgctggtgctgcggcttcccacc

SEQ ID NO: 3585420 - DNA, 25 bp, Homo sapien
ttctgctggtgctgcggcttcccac

SEQ ID NO: 3585421 - DNA, 25 bp, Homo sapien
gctggtgctgcggcttcccaccaaa

SEQ ID NO: 3585422 - DNA, 25 bp, Homo sapien
ggtgctgcggcttcccaccaaattg

SEQ ID NO: 3585423 - DNA, 25 bp, Homo sapien
cagagcattagatctaaatcaatgt

SEQ ID NO: 3585424 - DNA, 25 bp, Homo sapien
gagcattagatctaaatcaatgtga

SEQ ID NO: 3585425 - DNA, 25 bp, Homo sapien
cattagatctaaatcaatgtgaaga

SEQ ID NO: 3585426 - DNA, 25 bp, Homo sapien
ttaacagagcattagatctaaatca

SEQ ID NO: 3585427 - DNA, 25 bp, Homo sapien
atgttgacatagtcaggtctgttct

SEQ ID NO: 3585428 - DNA, 25 bp, Homo sapien
catctgtttgactgaggtacagctg

SEQ ID NO: 3585429 - DNA, 25 bp, Homo sapien
caacggaaggactggatatctctgc

SEQ ID NO: 3585430 - DNA, 25 bp, Homo sapien
gtaaatctgcaaaccaacggaagga

SEQ ID NO: 3585431 - DNA, 25 bp, Homo sapien
ggatatctctgcatacccaaataaa

SEQ ID NO: 3585432 - DNA, 25 bp, Homo sapien
tctgcaaaccaacggaaggactgga

SEQ ID NO: 3585433 - DNA, 25 bp, Homo sapien
aggacagaggagtgcataactgtga

SEQ ID NO: 3585434 - DNA, 25 bp, Homo sapien
aaaatgaaggatggaggcgaatgac

SEQ ID NO: 3585435 - DNA, 25 bp, Homo sapien
gatggaggcgaatgacttttaacag

SEQ ID NO: 3585436 - DNA, 25 bp, Homo sapien
cgctgatgaggacatagaaaatgaa

SEQ ID NO: 3585437 - DNA, 25 bp, Homo sapien
gatgcaaatggagttactccaatgc

SEQ ID NO: 3585438 - DNA, 25 bp, Homo sapien
gtattgatgcaaatggagttactcc

SEQ ID NO: 3585439 - DNA, 25 bp, Homo sapien
aatggagttactccaatgcctccag

SEQ ID NO: 3585440 - DNA, 25 bp, Homo sapien
ggagttactccaatgcctccagcca

SEQ ID NO: 3585441 - DNA, 25 bp, Homo sapien
gattcctcaaatggacttccaaaag

SEQ ID NO: 3585442 - DNA, 25 bp, Homo sapien
tccaaaaggaccatcaatatacagc

SEQ ID NO: 3585443 - DNA, 25 bp, Homo sapien
tcaaatggacttccaaaaggaccat

SEQ ID NO: 3585444 - DNA, 25 bp, Homo sapien
ttcagtgattcctcaaatggacttc

SEQ ID NO: 3585445 - DNA, 25 bp, Homo sapien
aatttctagattgaatgaagggcag

SEQ ID NO: 3585446 - DNA, 25 bp, Homo sapien
gagtcttgactagatggaggcagta

SEQ ID NO: 3585447 - DNA, 25 bp, Homo sapien
tgaagggcagaatttcggagtcttg

SEQ ID NO: 3585448 - DNA, 25 bp, Homo sapien
ggcagtagtaaatctcgaaatcgtt

SEQ ID NO: 3585449 - DNA, 25 bp, Homo sapien
gagtcatacctatggaaaggcttcc

SEQ ID NO: 3585450 - DNA, 25 bp, Homo sapien
ttcaggaataggtatgcattacctc

SEQ ID NO: 3585451 - DNA, 25 bp, Homo sapien
tatgcattacctctagagtcatacc

SEQ ID NO: 3585452 - DNA, 25 bp, Homo sapien
ggaaaggcttccttgatccctccat

SEQ ID NO: 3585453 - DNA, 25 bp, Homo sapien
taagtcaggcaccaactgaggttct

SEQ ID NO: 3585454 - DNA, 25 bp, Homo sapien
catttctgagcatgcactgtaagtc

SEQ ID NO: 3585455 - DNA, 25 bp, Homo sapien
tgagttttctcacaacatgtaggaa

SEQ ID NO: 3585456 - DNA, 25 bp, Homo sapien
tgaggttcttcatgggctaaaggtc

SEQ ID NO: 3585457 - DNA, 25 bp, Homo sapien
ggtggctcatggctacattcccaat

SEQ ID NO: 3585458 - DNA, 25 bp, Homo sapien
tgagaggctctcaaattagtactac

SEQ ID NO: 3585459 - DNA, 25 bp, Homo sapien
tagtactactttacataaaccagga

SEQ ID NO: 3585460 - DNA, 25 bp, Homo sapien
cttattaaagatataggcaggccag

SEQ ID NO: 3585461 - DNA, 25 bp, Homo sapien
gggttctttccactgccgtcatact

SEQ ID NO: 3585462 - DNA, 25 bp, Homo sapien
tgccttattctctcccgagaatata

SEQ ID NO: 3585463 - DNA, 25 bp, Homo sapien
gagaatatacagtactcccttttct

SEQ ID NO: 3585464 - DNA, 25 bp, Homo sapien
cactgccgtcatactgccttattct

SEQ ID NO: 3585465 - DNA, 25 bp, Homo sapien
gtaccatcgccagacctttcctttg

SEQ ID NO: 3585466 - DNA, 25 bp, Homo sapien
taattcgcagcaatatgtaccatcg

SEQ ID NO: 3585467 - DNA, 25 bp, Homo sapien
tccaatgccctcagtaattcgcagc

SEQ ID NO: 3585468 - DNA, 25 bp, Homo sapien
gcaatatgtaccatcgccagacctt

SEQ ID NO: 3585469 - DNA, 25 bp, Homo sapien
attttaagatgaaccccaaatgttg

SEQ ID NO: 3585470 - DNA, 25 bp, Homo sapien
taagatgaaccccaaatgttgcttt

SEQ ID NO: 3585471 - DNA, 25 bp, Homo sapien
aagatgaaccccaaatgttgctttg

SEQ ID NO: 3585472 - DNA, 25 bp, Homo sapien
tttaagatgaaccccaaatgttgct

SEQ ID NO: 3585473 - DNA, 25 bp, Homo sapien
ctgaacctggacatttttagtagtg

SEQ ID NO: 3585474 - DNA, 25 bp, Homo sapien
gtctccaataacctgctttactaca

SEQ ID NO: 3585475 - DNA, 25 bp, Homo sapien
ccaataacctgctttactacaatta

SEQ ID NO: 3585476 - DNA, 25 bp, Homo sapien
cctgctttactacaattatcctttt

SEQ ID NO: 3585477 - DNA, 25 bp, Homo sapien
taacctgctttactacaattatcct

SEQ ID NO: 3585478 - DNA, 25 bp, Homo sapien
gccacctcaagagtgaaggcccggg

SEQ ID NO: 3585479 - DNA, 25 bp, Homo sapien
aggcccggggtgagatgtcctttgc

SEQ ID NO: 3585480 - DNA, 25 bp, Homo sapien
tctgaaacaagcctgcaatggactc

SEQ ID NO: 3585481 - DNA, 25 bp, Homo sapien
tgctgtaggaggcaacccataggga

SEQ ID NO: 3585482 - DNA, 25 bp, Homo sapien
gaacataggtgaaaaattctttgat

SEQ ID NO: 3585483 - DNA, 25 bp, Homo sapien
gaagcctctcttcagtgtgaacata

SEQ ID NO: 3585484 - DNA, 25 bp, Homo sapien
ccttgtgaaaagggcctaggcctgc

SEQ ID NO: 3585485 - DNA, 25 bp, Homo sapien
cctaggcctgctgaaagaaattgat

SEQ ID NO: 3585486 - DNA, 25 bp, Homo sapien
aaagcccggtagagacacaacaaat

SEQ ID NO: 3585487 - DNA, 25 bp, Homo sapien
gcagtaattaacagcttcccaacca

SEQ ID NO: 3585488 - DNA, 25 bp, Homo sapien
ggcagtaattaacagcttcccaacc

SEQ ID NO: 3585489 - DNA, 25 bp, Homo sapien
acttcctgaattgcaaggtgtcaaa

SEQ ID NO: 3585490 - DNA, 25 bp, Homo sapien
catcaagagtactatgatagccttg

SEQ ID NO: 3585491 - DNA, 25 bp, Homo sapien
gaaaaatatgcatagcaccctacaa

SEQ ID NO: 3585492 - DNA, 25 bp, Homo sapien
gatagcttacttaaacatcaagagt

SEQ ID NO: 3585493 - DNA, 25 bp, Homo sapien
cactgggacaatgtagagtaatata

SEQ ID NO: 3585494 - DNA, 25 bp, Homo sapien
tacactgggacaatgtagagtaata

SEQ ID NO: 3585495 - DNA, 25 bp, Homo sapien
attttctaatgcagatacactggga

SEQ ID NO: 3585496 - DNA, 25 bp, Homo sapien
tggatgattttctaatgcagataca

SEQ ID NO: 3585497 - DNA, 25 bp, Homo sapien
cggatttccatgacatctgagggat

SEQ ID NO: 3585498 - DNA, 25 bp, Homo sapien
cagtacaggcacaaaggtccagaaa

SEQ ID NO: 3585499 - DNA, 25 bp, Homo sapien
cacagtacaggcacaaaggtccaga

SEQ ID NO: 3585500 - DNA, 25 bp, Homo sapien
ctttcggcacagtacaggcacaaag

SEQ ID NO: 3585501 - DNA, 25 bp, Homo sapien
ggcacaaaggtccagaaatccaaag

SEQ ID NO: 3585502 - DNA, 25 bp, Homo sapien
tgctgggtaaactctgccggttttg

SEQ ID NO: 3585503 - DNA, 25 bp, Homo sapien
gctgggtaaactctgccggttttga

SEQ ID NO: 3585504 - DNA, 25 bp, Homo sapien
tttgtgctgggtaaactctgccggt

SEQ ID NO: 3585505 - DNA, 25 bp, Homo sapien
tgtgctgggtaaactctgccggttt

SEQ ID NO: 3585506 - DNA, 25 bp, Homo sapien
aggaaatattctgagagctggttcg

SEQ ID NO: 3585507 - DNA, 25 bp, Homo sapien
atctaaattagtttgatacttcagc

SEQ ID NO: 3585508 - DNA, 25 bp, Homo sapien
tcggttaagactgatgcagccggga

SEQ ID NO: 3585509 - DNA, 25 bp, Homo sapien
gagctggttcggttaagactgatgc

SEQ ID NO: 3585510 - DNA, 25 bp, Homo sapien
tcattgtatgagtaaagagtaaaag

SEQ ID NO: 3585511 - DNA, 25 bp, Homo sapien
cattgtatgagtaaagagtaaaagt

SEQ ID NO: 3585512 - DNA, 25 bp, Homo sapien
ttcattgtatgagtaaagagtaaaa

SEQ ID NO: 3585513 - DNA, 25 bp, Homo sapien
gagtataccagaagatatcatagtt

SEQ ID NO: 3585514 - DNA, 25 bp, Homo sapien
gacaaagaagaggttatgagtatac

SEQ ID NO: 3585515 - DNA, 25 bp, Homo sapien
cctgaaacatgcaacgtcagcagca

SEQ ID NO: 3585516 - DNA, 25 bp, Homo sapien
gaagaggttatgagtataccagaag

SEQ ID NO: 3585517 - DNA, 25 bp, Homo sapien
tctgcaggttcttatatattgcaag

SEQ ID NO: 3585518 - DNA, 25 bp, Homo sapien
cctcataagcttgtaatgccacctt

SEQ ID NO: 3585519 - DNA, 25 bp, Homo sapien
tactgactttgtcccttggttcaat

SEQ ID NO: 3585520 - DNA, 25 bp, Homo sapien
ttgcaaggtcatttacagggctttt

SEQ ID NO: 3585521 - DNA, 25 bp, Homo sapien
tcatgaggaatagcaccaccaccat

SEQ ID NO: 3585522 - DNA, 25 bp, Homo sapien
ggctgtgatcatgaggaatagcacc

SEQ ID NO: 3585523 - DNA, 25 bp, Homo sapien
atgcagacccctgtcaggccaggaa

SEQ ID NO: 3585524 - DNA, 25 bp, Homo sapien
cttattgcatatgtagaggctgtga

SEQ ID NO: 3585525 - DNA, 25 bp, Homo sapien
agttgtgaagagaagttttctagga

SEQ ID NO: 3585526 - DNA, 25 bp, Homo sapien
ttgtgaagagaagttttctaggatc

SEQ ID NO: 3585527 - DNA, 25 bp, Homo sapien
cagttgtgaagagaagttttctagg

SEQ ID NO: 3585528 - DNA, 25 bp, Homo sapien
gttgtgaagagaagttttctaggat

SEQ ID NO: 3585529 - DNA, 25 bp, Homo sapien
ttaatatttcacaagcttttgaatt

SEQ ID NO: 3585530 - DNA, 25 bp, Homo sapien
tgtgtgcctccattgaatctggggt

SEQ ID NO: 3585531 - DNA, 25 bp, Homo sapien
tgtgcctccattgaatctggggtca

SEQ ID NO: 3585532 - DNA, 25 bp, Homo sapien
ttctgtgtgcctccattgaatctgg

SEQ ID NO: 3585533 - DNA, 25 bp, Homo sapien
ctcatctcggtatcttgctgcattc

SEQ ID NO: 3585534 - DNA, 25 bp, Homo sapien
tcaccagatgggcagccacatgcac

SEQ ID NO: 3585535 - DNA, 25 bp, Homo sapien
catctcggtatcttgctgcattcag

SEQ ID NO: 3585536 - DNA, 25 bp, Homo sapien
gggcattcaccagatgggcagccac

SEQ ID NO: 3585537 - DNA, 25 bp, Homo sapien
caggggtaagttagtgggatttgca

SEQ ID NO: 3585538 - DNA, 25 bp, Homo sapien
aggggtaagttagtgggatttgcat

SEQ ID NO: 3585539 - DNA, 25 bp, Homo sapien
attttaggtattccacatctttcac

SEQ ID NO: 3585540 - DNA, 25 bp, Homo sapien
ttttaggtattccacatctttcacc

SEQ ID NO: 3585541 - DNA, 25 bp, Homo sapien
cctgatattttaggtattccacatc

SEQ ID NO: 3585542 - DNA, 25 bp, Homo sapien
ctccctgatattttaggtattccac

SEQ ID NO: 3585543 - DNA, 25 bp, Homo sapien
gaaaatacagatagtaacaccacag

SEQ ID NO: 3585544 - DNA, 25 bp, Homo sapien
tacagatagtaacaccacaggtaat

SEQ ID NO: 3585545 - DNA, 25 bp, Homo sapien
gttctgcttttatccaacaatctcc

SEQ ID NO: 3585546 - DNA, 25 bp, Homo sapien
gatagtaacaccacaggtaatatgg

SEQ ID NO: 3585547 - DNA, 25 bp, Homo sapien
ctggaatttgaaagtaggactgttt

SEQ ID NO: 3585548 - DNA, 25 bp, Homo sapien
tatgctggaatttgaaagtaggact

SEQ ID NO: 3585549 - DNA, 25 bp, Homo sapien
ttttatgctggaatttgaaagtagg

SEQ ID NO: 3585550 - DNA, 25 bp, Homo sapien
tgctggaatttgaaagtaggactgt

SEQ ID NO: 3585551 - DNA, 25 bp, Homo sapien
cttctgtgatcctcggaggtaagcc

SEQ ID NO: 3585552 - DNA, 25 bp, Homo sapien
tgtgatcctcggaggtaagccaaga

SEQ ID NO: 3585553 - DNA, 25 bp, Homo sapien
ggtaagccaagagtgttcggcacat

SEQ ID NO: 3585554 - DNA, 25 bp, Homo sapien
tgatcctcggaggtaagccaagagt

SEQ ID NO: 3585555 - DNA, 25 bp, Homo sapien
gttgaggttaagaacagatgctgag

SEQ ID NO: 3585556 - DNA, 25 bp, Homo sapien
tgaggttaagaacagatgctgaggc

SEQ ID NO: 3585557 - DNA, 25 bp, Homo sapien
gctgaggctctgcttagacacaatc

SEQ ID NO: 3585558 - DNA, 25 bp, Homo sapien
tgctgaggctctgcttagacacaat

SEQ ID NO: 3585559 - DNA, 25 bp, Homo sapien
acatgtatgcatcatgaaatgacca

SEQ ID NO: 3585560 - DNA, 25 bp, Homo sapien
tgtatgcatcatgaaatgaccaaat

SEQ ID NO: 3585561 - DNA, 25 bp, Homo sapien
atgtatgcatcatgaaatgaccaaa

SEQ ID NO: 3585562 - DNA, 25 bp, Homo sapien
catgtatgcatcatgaaatgaccaa

SEQ ID NO: 3585563 - DNA, 25 bp, Homo sapien
gatatttccaacttaactgttggca

SEQ ID NO: 3585564 - DNA, 25 bp, Homo sapien
tatttccaacttaactgttggcaaa

SEQ ID NO: 3585565 - DNA, 25 bp, Homo sapien
atatttccaacttaactgttggcaa

SEQ ID NO: 3585566 - DNA, 25 bp, Homo sapien
tgatatttccaacttaactgttggc

SEQ ID NO: 3585567 - DNA, 25 bp, Homo sapien
tatgtcactcttacattttcctccc

SEQ ID NO: 3585568 - DNA, 25 bp, Homo sapien
gagcatttgattttatgtcactctt

SEQ ID NO: 3585569 - DNA, 25 bp, Homo sapien
cattttcctccctctacagaaatta

SEQ ID NO: 3585570 - DNA, 25 bp, Homo sapien
aattatctgtgcacaggagaaggca

SEQ ID NO: 3585571 - DNA, 25 bp, Homo sapien
gggcgaggtgaggtcttactctctg

SEQ ID NO: 3585572 - DNA, 25 bp, Homo sapien
aggggcgaggtgaggtcttactctc

SEQ ID NO: 3585573 - DNA, 25 bp, Homo sapien
cgaggtgaggtcttactctctgggt

SEQ ID NO: 3585574 - DNA, 25 bp, Homo sapien
taagcaacttgaggggcgaggtgag

SEQ ID NO: 3585575 - DNA, 25 bp, Homo sapien
ccttggttatacagcaagaaggttt

SEQ ID NO: 3585576 - DNA, 25 bp, Homo sapien
cccaacatctggtggaggtagtgat

SEQ ID NO: 3585577 - DNA, 25 bp, Homo sapien
tctggcccttggttatacagcaaga

SEQ ID NO: 3585578 - DNA, 25 bp, Homo sapien
gaggtagtgatactctggcccttgg

SEQ ID NO: 3585579 - DNA, 25 bp, Homo sapien
accccttcgttggcgagccagctcc

SEQ ID NO: 3585580 - DNA, 25 bp, Homo sapien
ttaaccccttcgttggcgagccagc

SEQ ID NO: 3585581 - DNA, 25 bp, Homo sapien
caggcagaggtgtttaaccccttcg

SEQ ID NO: 3585582 - DNA, 25 bp, Homo sapien
taaccccttcgttggcgagccagct

SEQ ID NO: 3585583 - DNA, 25 bp, Homo sapien
aaagactgagtggaagcccgaaggc

SEQ ID NO: 3585584 - DNA, 25 bp, Homo sapien
tctgtgcccgccggaccgagaagga

SEQ ID NO: 3585585 - DNA, 25 bp, Homo sapien
agcggttacagttgtgcggcctgcc

SEQ ID NO: 3585586 - DNA, 25 bp, Homo sapien
gggccgctgagcgaggaccgagggt

SEQ ID NO: 3585587 - DNA, 25 bp, Homo sapien
gagttgacccaggtacctattcgac

SEQ ID NO: 3585588 - DNA, 25 bp, Homo sapien
tgtgtggagttgacccaggtaccta

SEQ ID NO: 3585589 - DNA, 25 bp, Homo sapien
gtgagaagtgtgtggagttgaccca

SEQ ID NO: 3585590 - DNA, 25 bp, Homo sapien
ctagtctgtttgtaagtaataggaa

SEQ ID NO: 3585591 - DNA, 25 bp, Homo sapien
tctcctgctagaggcccatgtagac

SEQ ID NO: 3585592 - DNA, 25 bp, Homo sapien
tctctcagagtagttattgtgcccc

SEQ ID NO: 3585593 - DNA, 25 bp, Homo sapien
gatgcttacttagtctccaaactca

SEQ ID NO: 3585594 - DNA, 25 bp, Homo sapien
gaacctcttctttgcgtccactgtg

SEQ ID NO: 3585595 - DNA, 25 bp, Homo sapien
ccagtagagggtgcacttgcaagcg

SEQ ID NO: 3585596 - DNA, 25 bp, Homo sapien
tccggtagagggtgcactcgcaaga

SEQ ID NO: 3585597 - DNA, 25 bp, Homo sapien
taaggcttgcggtgaggtttcttca

SEQ ID NO: 3585598 - DNA, 25 bp, Homo sapien
tgtagcattcggtgaggtttcttta

SEQ ID NO: 3585599 - DNA, 25 bp, Homo sapien
gatgcggccacttgatgttgaactt

SEQ ID NO: 3585600 - DNA, 25 bp, Homo sapien
gcagcacagaacgaaataagacaga

SEQ ID NO: 3585601 - DNA, 25 bp, Homo sapien
ttaccacgttatgacccaacaagaa

SEQ ID NO: 3585602 - DNA, 25 bp, Homo sapien
caagattcttatgtagttttagctc

SEQ ID NO: 3585603 - DNA, 25 bp, Homo sapien
accttgctccatgcaatgagcatcg

SEQ ID NO: 3585604 - DNA, 25 bp, Homo sapien
tgctccatgcaatgagcatcgcatc

SEQ ID NO: 3585605 - DNA, 25 bp, Homo sapien
cttgctccatgcaatgagcatcgca

SEQ ID NO: 3585606 - DNA, 25 bp, Homo sapien
atcaccttgctccatgcaatgagca

SEQ ID NO: 3585607 - DNA, 25 bp, Homo sapien
tccaatgtctagacgctggcacctg

SEQ ID NO: 3585608 - DNA, 25 bp, Homo sapien
aaatccaatgtctagacgctggcac

SEQ ID NO: 3585609 - DNA, 25 bp, Homo sapien
tggaaaatccaatgtctagacgctg

SEQ ID NO: 3585610 - DNA, 25 bp, Homo sapien
ggctggaaaatccaatgtctagacg

SEQ ID NO: 3585611 - DNA, 25 bp, Homo sapien
gctgtaaaactgtggtcctaccact

SEQ ID NO: 3585612 - DNA, 25 bp, Homo sapien
gaagtgcctacccaagttagactcc

SEQ ID NO: 3585613 - DNA, 25 bp, Homo sapien
tggcaggcagggtactaactccttt

SEQ ID NO: 3585614 - DNA, 25 bp, Homo sapien
atccgctcacggaaactggcaggca

SEQ ID NO: 3585615 - DNA, 25 bp, Homo sapien
gaggctgagatgtcttgtcagcaca

SEQ ID NO: 3585616 - DNA, 25 bp, Homo sapien
aagttagagacccaatactatgcca

SEQ ID NO: 3585617 - DNA, 25 bp, Homo sapien
tatagctagttaatcactgacctgg

SEQ ID NO: 3585618 - DNA, 25 bp, Homo sapien
taacatgtgaagaatgccagaggct

SEQ ID NO: 3585619 - DNA, 25 bp, Homo sapien
tgctcatagatatctttgaaggata

SEQ ID NO: 3585620 - DNA, 25 bp, Homo sapien
tctggatttaaatttgctgccccga

SEQ ID NO: 3585621 - DNA, 25 bp, Homo sapien
gatttaaatttgctgccccgatcac

SEQ ID NO: 3585622 - DNA, 25 bp, Homo sapien
ttccctgtgctcatagatatctttg

SEQ ID NO: 3585623 - DNA, 25 bp, Homo sapien
cattcggcttagcagcctcatctga

SEQ ID NO: 3585624 - DNA, 25 bp, Homo sapien
gaatgccatctcttcgaatccagca

SEQ ID NO: 3585625 - DNA, 25 bp, Homo sapien
taaaggagtaacaacacattcggct

SEQ ID NO: 3585626 - DNA, 25 bp, Homo sapien
tgagatcccagaccataactagcac

SEQ ID NO: 3585627 - DNA, 25 bp, Homo sapien
catgacagagattggcagataccat

SEQ ID NO: 3585628 - DNA, 25 bp, Homo sapien
gccattgagtaagaccatgacagag

SEQ ID NO: 3585629 - DNA, 25 bp, Homo sapien
gattcatgattgagtaggaagctgc

SEQ ID NO: 3585630 - DNA, 25 bp, Homo sapien
gataccatcagtatattctgcagag

SEQ ID NO: 3585631 - DNA, 25 bp, Homo sapien
cattctgcactctttacttgtccca

SEQ ID NO: 3585632 - DNA, 25 bp, Homo sapien
ttgacctctcggacttgacaatcag

SEQ ID NO: 3585633 - DNA, 25 bp, Homo sapien
ttggtttcattgacctctcggactt

SEQ ID NO: 3585634 - DNA, 25 bp, Homo sapien
tctgcattctgcactctttacttgt

SEQ ID NO: 3585635 - DNA, 25 bp, Homo sapien
tcctgttgtttcagaagctgcaaac

SEQ ID NO: 3585636 - DNA, 25 bp, Homo sapien
cacagcaaagttccagaggcatcaa

SEQ ID NO: 3585637 - DNA, 25 bp, Homo sapien
ctgcaaacaattttggagtggtact

SEQ ID NO: 3585638 - DNA, 25 bp, Homo sapien
gagtggtacttacagattcttgaag

SEQ ID NO: 3585639 - DNA, 25 bp, Homo sapien
cagacatcaacttctatttcttctc

SEQ ID NO: 3585640 - DNA, 25 bp, Homo sapien
ggactgtggatctgcttgtttcaac

SEQ ID NO: 3585641 - DNA, 25 bp, Homo sapien
gggtccgggcctcctgtcatggcca

SEQ ID NO: 3585642 - DNA, 25 bp, Homo sapien
ccgggcctcctgtcatggccatatt

SEQ ID NO: 3585643 - DNA, 25 bp, Homo sapien
agcgtctgccaatctctaccatgcg

SEQ ID NO: 3585644 - DNA, 25 bp, Homo sapien
aaagtcttgagccagagatccaatt

SEQ ID NO: 3585645 - DNA, 25 bp, Homo sapien
tcccagggtacatttgggagtactg

SEQ ID NO: 3585646 - DNA, 25 bp, Homo sapien
ccttagcataggtcgattctttgta

SEQ ID NO: 3585647 - DNA, 25 bp, Homo sapien
gcattccagtaacctcaagatgtct

SEQ ID NO: 3585648 - DNA, 25 bp, Homo sapien
atctgtggccagtgtaaaagaaaga

SEQ ID NO: 3585649 - DNA, 25 bp, Homo sapien
tcatctgtggccagtgtaaaagaaa

SEQ ID NO: 3585650 - DNA, 25 bp, Homo sapien
tctgtggccagtgtaaaagaaagac

SEQ ID NO: 3585651 - DNA, 25 bp, Homo sapien
catctgtggccagtgtaaaagaaag

SEQ ID NO: 3585652 - DNA, 25 bp, Homo sapien
ggagccagctgggtaattccatatg

SEQ ID NO: 3585653 - DNA, 25 bp, Homo sapien
gtaattccatatgagggaattcttg

SEQ ID NO: 3585654 - DNA, 25 bp, Homo sapien
aaacacaccaactcggcccagaggt

SEQ ID NO: 3585655 - DNA, 25 bp, Homo sapien
tcaaaatcaagaaacacaccaactc

SEQ ID NO: 3585656 - DNA, 25 bp, Homo sapien
ctacatagtgaggaaacattgggga

SEQ ID NO: 3585657 - DNA, 25 bp, Homo sapien
cttagatttaaacattgtgctattc

SEQ ID NO: 3585658 - DNA, 25 bp, Homo sapien
gaagaaatatgtccttagatttaaa

SEQ ID NO: 3585659 - DNA, 25 bp, Homo sapien
atgtccttagatttaaacattgtgc

SEQ ID NO: 3585660 - DNA, 25 bp, Homo sapien
catcctcaaacagcccgatattgta

SEQ ID NO: 3585661 - DNA, 25 bp, Homo sapien
caaacagcccgatattgtaattggt

SEQ ID NO: 3585662 - DNA, 25 bp, Homo sapien
tcaaagatccacgtctaaacatcaa

SEQ ID NO: 3585663 - DNA, 25 bp, Homo sapien
tctgtcagaattcaaagatccacgt

SEQ ID NO: 3585664 - DNA, 25 bp, Homo sapien
ggccctgtagggaactctggattca

SEQ ID NO: 3585665 - DNA, 25 bp, Homo sapien
tgtgatgggccctgtagggaactct

SEQ ID NO: 3585666 - DNA, 25 bp, Homo sapien
ctgtgatgggccctgtagggaactc

SEQ ID NO: 3585667 - DNA, 25 bp, Homo sapien
gtcctgtgatgggccctgtagggaa

SEQ ID NO: 3585668 - DNA, 25 bp, Homo sapien
cttagctgagtacccccacattgat

SEQ ID NO: 3585669 - DNA, 25 bp, Homo sapien
cccccacattgatgtcaactggcag

SEQ ID NO: 3585670 - DNA, 25 bp, Homo sapien
gaggggaacgcagccctaatcatag

SEQ ID NO: 3585671 - DNA, 25 bp, Homo sapien
cgtggtggccttagctgagtacccc

SEQ ID NO: 3585672 - DNA, 25 bp, Homo sapien
gcttctgctcgggttgatgtggcat

SEQ ID NO: 3585673 - DNA, 25 bp, Homo sapien
gcagcttctgctcgggttgatgtgg

SEQ ID NO: 3585674 - DNA, 25 bp, Homo sapien
ttaggcagcttctgctcgggttgat

SEQ ID NO: 3585675 - DNA, 25 bp, Homo sapien
taggcagcttctgctcgggttgatg

SEQ ID NO: 3585676 - DNA, 25 bp, Homo sapien
cagttatcattgagacttcactcca

SEQ ID NO: 3585677 - DNA, 25 bp, Homo sapien
tcactccaagttttttgcatgaagc

SEQ ID NO: 3585678 - DNA, 25 bp, Homo sapien
agaaccaatacgtatacttttagcg

SEQ ID NO: 3585679 - DNA, 25 bp, Homo sapien
gaatatactgtatgccatgatcatg

SEQ ID NO: 3585680 - DNA, 25 bp, Homo sapien
aaagctcacagtcttagcctcacaa

SEQ ID NO: 3585681 - DNA, 25 bp, Homo sapien
agctcacagtcttagcctcacaatc

SEQ ID NO: 3585682 - DNA, 25 bp, Homo sapien
aagctcacagtcttagcctcacaat

SEQ ID NO: 3585683 - DNA, 25 bp, Homo sapien
tgcagtgaaatagggtacatcttga

SEQ ID NO: 3585684 - DNA, 25 bp, Homo sapien
ggcttcttcatgatgcagagtaata

SEQ ID NO: 3585685 - DNA, 25 bp, Homo sapien
gggtacatcttgatggtcacatcca

SEQ ID NO: 3585686 - DNA, 25 bp, Homo sapien
tgaaatagggtacatcttgatggtc

SEQ ID NO: 3585687 - DNA, 25 bp, Homo sapien
ctcggaattggttgagcctgtccct

SEQ ID NO: 3585688 - DNA, 25 bp, Homo sapien
tgcactgagctctggattcagaggc

SEQ ID NO: 3585689 - DNA, 25 bp, Homo sapien
tcagtccagtgatgggccctgcact

SEQ ID NO: 3585690 - DNA, 25 bp, Homo sapien
cggaattggttgagcctgtccctca

SEQ ID NO: 3585691 - DNA, 25 bp, Homo sapien
ttaacgtcctgggaaagtctgagtc

SEQ ID NO: 3585692 - DNA, 25 bp, Homo sapien
cccagtcagttgtattgttattaat

SEQ ID NO: 3585693 - DNA, 25 bp, Homo sapien
aaacccagtcagttgtattgttatt

SEQ ID NO: 3585694 - DNA, 25 bp, Homo sapien
cttgaagacattctctaaagaagtg

SEQ ID NO: 3585695 - DNA, 25 bp, Homo sapien
cttaaaatctccatcctatgagcca

SEQ ID NO: 3585696 - DNA, 25 bp, Homo sapien
ggtttatggcacatttcgttcagct

SEQ ID NO: 3585697 - DNA, 25 bp, Homo sapien
gctctaattgcttctagccttaaat

SEQ ID NO: 3585698 - DNA, 25 bp, Homo sapien
ggctttacttaaatgaagtcgatga

SEQ ID NO: 3585699 - DNA, 25 bp, Homo sapien
cagcatctggttctggtggtttcca

SEQ ID NO: 3585700 - DNA, 25 bp, Homo sapien
caaagactgcattttctgtaaaagc

SEQ ID NO: 3585701 - DNA, 25 bp, Homo sapien
cattcaggtttctgtgattttcaca

SEQ ID NO: 3585702 - DNA, 25 bp, Homo sapien
tttcacaagctttttcccacaaaga

SEQ ID NO: 3585703 - DNA, 25 bp, Homo sapien
gctcggttgactttgtgcattcaga

SEQ ID NO: 3585704 - DNA, 25 bp, Homo sapien
aagtagttcatgcacagggggcaga

SEQ ID NO: 3585705 - DNA, 25 bp, Homo sapien
ggcagatgagttccccctgaaagac

SEQ ID NO: 3585706 - DNA, 25 bp, Homo sapien
tggacaagaaatgggatgtcttgcc

SEQ ID NO: 3585707 - DNA, 25 bp, Homo sapien
tgtctcttccgtgtccttttataag

SEQ ID NO: 3585708 - DNA, 25 bp, Homo sapien
gaggtcgccaaaatgcagttctaag

SEQ ID NO: 3585709 - DNA, 25 bp, Homo sapien
tcagagaaaactgagcttgtctctt

SEQ ID NO: 3585710 - DNA, 25 bp, Homo sapien
gttcacctcaagatcagaagctcat

SEQ ID NO: 3585711 - DNA, 25 bp, Homo sapien
ttaaagtcaatagggggcaactgga

SEQ ID NO: 3585712 - DNA, 25 bp, Homo sapien
ccaattgtgggagctgcttaagcaa

SEQ ID NO: 3585713 - DNA, 25 bp, Homo sapien
gtgagatcctgggtacagtccatca

SEQ ID NO: 3585714 - DNA, 25 bp, Homo sapien
gatcctgggtacagtccatcaggaa

SEQ ID NO: 3585715 - DNA, 25 bp, Homo sapien
ggtgggcacgggcgccttgctgagg

SEQ ID NO: 3585716 - DNA, 25 bp, Homo sapien
gcacgggcgccttgctgaggcggac

SEQ ID NO: 3585717 - DNA, 25 bp, Homo sapien
tggaaggtgggcacgggcgccttgc

SEQ ID NO: 3585718 - DNA, 25 bp, Homo sapien
ggaaggtgggcacgggcgccttgct

SEQ ID NO: 3585719 - DNA, 25 bp, Homo sapien
cgggccgcaagctgctccgctgcag

SEQ ID NO: 3585720 - DNA, 25 bp, Homo sapien
cacgccgggccgcaagctgctccgc

SEQ ID NO: 3585721 - DNA, 25 bp, Homo sapien
cgccgggccgcaagctgctccgctg

SEQ ID NO: 3585722 - DNA, 25 bp, Homo sapien
accacgccgggccgcaagctgctcc

SEQ ID NO: 3585723 - DNA, 25 bp, Homo sapien
ctgcgctctccgcttcgcccgcctc

SEQ ID NO: 3585724 - DNA, 25 bp, Homo sapien
agccgcgccgccagaatttcctgag

SEQ ID NO: 3585725 - DNA, 25 bp, Homo sapien
tgggcagggcggcttgtgctgctct

SEQ ID NO: 3585726 - DNA, 25 bp, Homo sapien
gaggccggctcttagggagccctcc

SEQ ID NO: 3585727 - DNA, 25 bp, Homo sapien
cacacggtctggcacgcgagggcca

SEQ ID NO: 3585728 - DNA, 25 bp, Homo sapien
gagctctgggggcacacggtctggc

SEQ ID NO: 3585729 - DNA, 25 bp, Homo sapien
ctcttccccacgcacagggagctct

SEQ ID NO: 3585730 - DNA, 25 bp, Homo sapien
tcttccccacgcacagggagctctg

SEQ ID NO: 3585731 - DNA, 25 bp, Homo sapien
ttcttcgagccctcgggcttccgca

SEQ ID NO: 3585732 - DNA, 25 bp, Homo sapien
agcgcggcgtcagcgtggacagctc

SEQ ID NO: 3585733 - DNA, 25 bp, Homo sapien
tcctccgggccacgcacggagcgcg

SEQ ID NO: 3585734 - DNA, 25 bp, Homo sapien
ttccgcaccctctcgtggagcggag

SEQ ID NO: 3585735 - DNA, 25 bp, Homo sapien
gatgcgatcggttcgaccctgcatg

SEQ ID NO: 3585736 - DNA, 25 bp, Homo sapien
gctagctcagggctcggatgcgatc

SEQ ID NO: 3585737 - DNA, 25 bp, Homo sapien
gcatggcggctttcaacccgaacgc

SEQ ID NO: 3585738 - DNA, 25 bp, Homo sapien
catgagacggacgtgtaagtggcca

SEQ ID NO: 3585739 - DNA, 25 bp, Homo sapien
gcaagcagttggtgatgatagcgtg

SEQ ID NO: 3585740 - DNA, 25 bp, Homo sapien
tcagcaagcagttggtgatgatagc

SEQ ID NO: 3585741 - DNA, 25 bp, Homo sapien
cagcaagcagttggtgatgatagcg

SEQ ID NO: 3585742 - DNA, 25 bp, Homo sapien
agttcagcaagcagttggtgatgat

SEQ ID NO: 3585743 - DNA, 25 bp, Homo sapien
taaagctcaaatgaaccagcccagg

SEQ ID NO: 3585744 - DNA, 25 bp, Homo sapien
agctcaaatgaaccagcccaggtga

SEQ ID NO: 3585745 - DNA, 25 bp, Homo sapien
atgaaccagcccaggtgatgctgac

SEQ ID NO: 3585746 - DNA, 25 bp, Homo sapien
ttaaagctcaaatgaaccagcccag

SEQ ID NO: 3585747 - DNA, 25 bp, Homo sapien
cgtctaaggcaactgtgcccatggg

SEQ ID NO: 3585748 - DNA, 25 bp, Homo sapien
gagccagcgtctaaggcaactgtgc

SEQ ID NO: 3585749 - DNA, 25 bp, Homo sapien
tgagagccagcgtctaaggcaactg

SEQ ID NO: 3585750 - DNA, 25 bp, Homo sapien
gcaaggctgagagccagcgtctaag

SEQ ID NO: 3585751 - DNA, 25 bp, Homo sapien
ctgcctgtgcagctatgattagggt

SEQ ID NO: 3585752 - DNA, 25 bp, Homo sapien
ctcctgcctgtgcagctatgattag

SEQ ID NO: 3585753 - DNA, 25 bp, Homo sapien
tgcagctatgattagggttgcgttc

SEQ ID NO: 3585754 - DNA, 25 bp, Homo sapien
cctgtgcagctatgattagggttgc

SEQ ID NO: 3585755 - DNA, 25 bp, Homo sapien
caaagccgtggtagcaggcgacatt

SEQ ID NO: 3585756 - DNA, 25 bp, Homo sapien
ccacggtatatccacaaagccgtgg

SEQ ID NO: 3585757 - DNA, 25 bp, Homo sapien
ggtagcaggcgacattaaggccgct

SEQ ID NO: 3585758 - DNA, 25 bp, Homo sapien
ggcactcagctaaggccaccacggt

SEQ ID NO: 3585759 - DNA, 25 bp, Homo sapien
tcctccaggacgccctcctccagga

SEQ ID NO: 3585760 - DNA, 25 bp, Homo sapien
gtctgcagcagccccacgcctccag

SEQ ID NO: 3585761 - DNA, 25 bp, Homo sapien
agcagccccacgcctccaggacgcc

SEQ ID NO: 3585762 - DNA, 25 bp, Homo sapien
ccacgcctccaggacgccctcctcc

SEQ ID NO: 3585763 - DNA, 25 bp, Homo sapien
tcctggaactctttgtagtcagcgc

SEQ ID NO: 3585764 - DNA, 25 bp, Homo sapien
cgtcccaggcgatgctgcgggtgtc

SEQ ID NO: 3585765 - DNA, 25 bp, Homo sapien
ggtagaaagagtcgtcccaggcgat

SEQ ID NO: 3585766 - DNA, 25 bp, Homo sapien
aagagtcgtcccaggcgatgctgcg

SEQ ID NO: 3585767 - DNA, 25 bp, Homo sapien
cggtggcggggtcatgcagcgcgcc

SEQ ID NO: 3585768 - DNA, 25 bp, Homo sapien
ggcggtggcggggtcatgcagcgcg

SEQ ID NO: 3585769 - DNA, 25 bp, Homo sapien
tggcggggtcatgcagcgcgccccg

SEQ ID NO: 3585770 - DNA, 25 bp, Homo sapien
ggtggcggggtcatgcagcgcgccc

SEQ ID NO: 3585771 - DNA, 25 bp, Homo sapien
gccagcagcaccacgccggcggccg

SEQ ID NO: 3585772 - DNA, 25 bp, Homo sapien
ccagcagcaccacgccggcggccgg

SEQ ID NO: 3585773 - DNA, 25 bp, Homo sapien
cagcagcaccacgccggcggccgga

SEQ ID NO: 3585774 - DNA, 25 bp, Homo sapien
ggaggaaaaccatagataagagaac

SEQ ID NO: 3585775 - DNA, 25 bp, Homo sapien
catcagaatcaataacgaaattggc

SEQ ID NO: 3585776 - DNA, 25 bp, Homo sapien
cagaatcaataacgaaattggcatc

SEQ ID NO: 3585777 - DNA, 25 bp, Homo sapien
atcaataacgaaattggcatctgca

SEQ ID NO: 3585778 - DNA, 25 bp, Homo sapien
gaatcaataacgaaattggcatctg

SEQ ID NO: 3585779 - DNA, 25 bp, Homo sapien
cttatatagcaaggaatcatttccg

SEQ ID NO: 3585780 - DNA, 25 bp, Homo sapien
ggaatcatttccgtgctcagagcac

SEQ ID NO: 3585781 - DNA, 25 bp, Homo sapien
tatatagcaaggaatcatttccgtg

SEQ ID NO: 3585782 - DNA, 25 bp, Homo sapien
gcaaggaatcatttccgtgctcaga

SEQ ID NO: 3585783 - DNA, 25 bp, Homo sapien
ggttaagccgtgttcacagatccct

SEQ ID NO: 3585784 - DNA, 25 bp, Homo sapien
gacctgctctctagaatgggcctaa

SEQ ID NO: 3585785 - DNA, 25 bp, Homo sapien
taagttatgcctgttatagtctcaa

SEQ ID NO: 3585786 - DNA, 25 bp, Homo sapien
gattcaatctactctgggttcctgc

SEQ ID NO: 3585787 - DNA, 25 bp, Homo sapien
gttgagcatgtctaggactccagtt

SEQ ID NO: 3585788 - DNA, 25 bp, Homo sapien
tgttgagcatgtctaggactccagt

SEQ ID NO: 3585789 - DNA, 25 bp, Homo sapien
taggactccagttatgcaccatgaa

SEQ ID NO: 3585790 - DNA, 25 bp, Homo sapien
ctaggactccagttatgcaccatga

SEQ ID NO: 3585791 - DNA, 25 bp, Homo sapien
gcagtaatacgtgaatggagaagtg

SEQ ID NO: 3585792 - DNA, 25 bp, Homo sapien
aatggagaagtgtaatggtggaagt

SEQ ID NO: 3585793 - DNA, 25 bp, Homo sapien
tatgcagtaatacgtgaatggagaa

SEQ ID NO: 3585794 - DNA, 25 bp, Homo sapien
aagtatgcagtaatacgtgaatgga

SEQ ID NO: 3585795 - DNA, 25 bp, Homo sapien
tacgcaggtgatatttgcatgtcct

SEQ ID NO: 3585796 - DNA, 25 bp, Homo sapien
gacatacgcaggtgatatttgcatg

SEQ ID NO: 3585797 - DNA, 25 bp, Homo sapien
agtgacatacgcaggtgatatttgc

SEQ ID NO: 3585798 - DNA, 25 bp, Homo sapien
tagagcagtgacatacgcaggtgat

SEQ ID NO: 3585799 - DNA, 25 bp, Homo sapien
ctcacttgactgtcttgtagttgtt

SEQ ID NO: 3585800 - DNA, 25 bp, Homo sapien
acttgactgtcttgtagttgttgga

SEQ ID NO: 3585801 - DNA, 25 bp, Homo sapien
cacttgactgtcttgtagttgttgg

SEQ ID NO: 3585802 - DNA, 25 bp, Homo sapien
cttgactgtcttgtagttgttggaa

SEQ ID NO: 3585803 - DNA, 25 bp, Homo sapien
ggttaaaaggattacatgttctcac

SEQ ID NO: 3585804 - DNA, 25 bp, Homo sapien
tggttaaaaggattacatgttctca

SEQ ID NO: 3585805 - DNA, 25 bp, Homo sapien
tactgagtcaattgtttcctctact

SEQ ID NO: 3585806 - DNA, 25 bp, Homo sapien
tgtttcctctactaatctctctttt

SEQ ID NO: 3585807 - DNA, 25 bp, Homo sapien
tttcctctactaatctctcttttag

SEQ ID NO: 3585808 - DNA, 25 bp, Homo sapien
gtttcctctactaatctctctttta

SEQ ID NO: 3585809 - DNA, 25 bp, Homo sapien
gatttcccataaatagtccatttcc

SEQ ID NO: 3585810 - DNA, 25 bp, Homo sapien
tagtttcctgatttagattgtttct

SEQ ID NO: 3585811 - DNA, 25 bp, Homo sapien
ctttaacgaatgaaatgtgctagtt

SEQ ID NO: 3585812 - DNA, 25 bp, Homo sapien
cttgattgatttcccataaatagtc

SEQ ID NO: 3585813 - DNA, 25 bp, Homo sapien
gagcacacagatattgtctgagctg

SEQ ID NO: 3585814 - DNA, 25 bp, Homo sapien
ctgtgagccatgtgctctggtgact

SEQ ID NO: 3585815 - DNA, 25 bp, Homo sapien
ctgtggctgtgagccatgtgctctg

SEQ ID NO: 3585816 - DNA, 25 bp, Homo sapien
gcctcacagaagagctccttagtct

SEQ ID NO: 3585817 - DNA, 25 bp, Homo sapien
tctggaagacttgcaggtcgtctga

SEQ ID NO: 3585818 - DNA, 25 bp, Homo sapien
ggaagacttgcaggtcgtctgaatc

SEQ ID NO: 3585819 - DNA, 25 bp, Homo sapien
aagacttgcaggtcgtctgaatcca

SEQ ID NO: 3585820 - DNA, 25 bp, Homo sapien
ctggaagacttgcaggtcgtctgaa

SEQ ID NO: 3585821 - DNA, 25 bp, Homo sapien
ctgtagatatccagattagaagtca

SEQ ID NO: 3585822 - DNA, 25 bp, Homo sapien
gaatggtctcagtctagaaactctg

SEQ ID NO: 3585823 - DNA, 25 bp, Homo sapien
ggctactatgaatggtctcagtcta

SEQ ID NO: 3585824 - DNA, 25 bp, Homo sapien
gaagtcactcctggctcttcaaagc

SEQ ID NO: 3585825 - DNA, 25 bp, Homo sapien
ttgaatagtaatatgtacactgtcc

SEQ ID NO: 3585826 - DNA, 25 bp, Homo sapien
caaagctttcaagtattgtgcaggt

SEQ ID NO: 3585827 - DNA, 25 bp, Homo sapien
cactgtcctacatctaccatactgt

SEQ ID NO: 3585828 - DNA, 25 bp, Homo sapien
gcatgctggccgaattgattgaacg

SEQ ID NO: 3585829 - DNA, 25 bp, Homo sapien
gtcttccaaaacgtacttgatgtat

SEQ ID NO: 3585830 - DNA, 25 bp, Homo sapien
gaaagtagttacactcctctcgatg

SEQ ID NO: 3585831 - DNA, 25 bp, Homo sapien
aatgccttggtttctagtaagggtg

SEQ ID NO: 3585832 - DNA, 25 bp, Homo sapien
gtatttctttaacttgccacaatca

SEQ ID NO: 3585833 - DNA, 25 bp, Homo sapien
ccatcatgactctttctgagtgaca

SEQ ID NO: 3585834 - DNA, 25 bp, Homo sapien
atcaaacagagcgttagaaactcct

SEQ ID NO: 3585835 - DNA, 25 bp, Homo sapien
ttagcctcgcatgggtccactttcc

SEQ ID NO: 3585836 - DNA, 25 bp, Homo sapien
aaaatacatcaatatacccatcatg

SEQ ID NO: 3585837 - DNA, 25 bp, Homo sapien
tcagagtcaagctcatgtaatgagt

SEQ ID NO: 3585838 - DNA, 25 bp, Homo sapien
ggccacatctgaggtgctcagagtc

SEQ ID NO: 3585839 - DNA, 25 bp, Homo sapien
catgtaatgagtatcattctgtgaa

SEQ ID NO: 3585840 - DNA, 25 bp, Homo sapien
tcattagttctttattggccacatc

SEQ ID NO: 3585841 - DNA, 25 bp, Homo sapien
cctcttggtgggatcaacatgcaat

SEQ ID NO: 3585842 - DNA, 25 bp, Homo sapien
ttccttgcaggagtgagtccgtgct

SEQ ID NO: 3585843 - DNA, 25 bp, Homo sapien
tgaatccagagctcactacagggcg

SEQ ID NO: 3585844 - DNA, 25 bp, Homo sapien
gacaggctcaaccacttccaaggtg

SEQ ID NO: 3585845 - DNA, 25 bp, Homo sapien
ggccactcaaaataataccaacgct

SEQ ID NO: 3585846 - DNA, 25 bp, Homo sapien
tatcctgacagcacttttttcctcc

SEQ ID NO: 3585847 - DNA, 25 bp, Homo sapien
aaactgccacggatactgttacagg

SEQ ID NO: 3585848 - DNA, 25 bp, Homo sapien
gattttctgtgcgatcacagctgac

SEQ ID NO: 3585849 - DNA, 25 bp, Homo sapien
tgaaaaccataagaatgaggcccaa

SEQ ID NO: 3585850 - DNA, 25 bp, Homo sapien
ttcctccgcaggcacatttcaatga

SEQ ID NO: 3585851 - DNA, 25 bp, Homo sapien
gtatcctggagggtcatatttctgt

SEQ ID NO: 3585852 - DNA, 25 bp, Homo sapien
taatatctgatccttgatagaggta

SEQ ID NO: 3585853 - DNA, 25 bp, Homo sapien
gatcatcatactgctaaactcactt

SEQ ID NO: 3585854 - DNA, 25 bp, Homo sapien
cttataaacattgtcattgtcatta

SEQ ID NO: 3585855 - DNA, 25 bp, Homo sapien
ttataaacattgtcattgtcattat

SEQ ID NO: 3585856 - DNA, 25 bp, Homo sapien
gtaaggatgagacgctgaactctga

SEQ ID NO: 3585857 - DNA, 25 bp, Homo sapien
tgagacgctgaactctgaaaactct

SEQ ID NO: 3585858 - DNA, 25 bp, Homo sapien
caggtaaggatgagacgctgaactc

SEQ ID NO: 3585859 - DNA, 25 bp, Homo sapien
gatgagacgctgaactctgaaaact

SEQ ID NO: 3585860 - DNA, 25 bp, Homo sapien
tatatttgacctcgaaggcagggat

SEQ ID NO: 3585861 - DNA, 25 bp, Homo sapien
tttgacctcgaaggcagggattgaa

SEQ ID NO: 3585862 - DNA, 25 bp, Homo sapien
atttatatttgacctcgaaggcagg

SEQ ID NO: 3585863 - DNA, 25 bp, Homo sapien
ggttctatactacaaacttccacag

SEQ ID NO: 3585864 - DNA, 25 bp, Homo sapien
tactccagattttgatacttcacaa

SEQ ID NO: 3585865 - DNA, 25 bp, Homo sapien
gggcagtccactttccttgcctgcc

SEQ ID NO: 3585866 - DNA, 25 bp, Homo sapien
cacacaaggttgtatgtatctgcta

SEQ ID NO: 3585867 - DNA, 25 bp, Homo sapien
tccacacaaggttgtatgtatctgc

SEQ ID NO: 3585868 - DNA, 25 bp, Homo sapien
agcctgagtatggagagagctcaag

SEQ ID NO: 3585869 - DNA, 25 bp, Homo sapien
ctgagtatggagagagctcaagcca

SEQ ID NO: 3585870 - DNA, 25 bp, Homo sapien
cctgagtatggagagagctcaagcc

SEQ ID NO: 3585871 - DNA, 25 bp, Homo sapien
gcctgagtatggagagagctcaagc

SEQ ID NO: 3585872 - DNA, 25 bp, Homo sapien
taggcagggtctaggtccaagattc

SEQ ID NO: 3585873 - DNA, 25 bp, Homo sapien
gatgaaataggcagggtctaggtcc

SEQ ID NO: 3585874 - DNA, 25 bp, Homo sapien
ggtctaggtccaagattccaggtct

SEQ ID NO: 3585875 - DNA, 25 bp, Homo sapien
agattccaggtcttgataagtgtga

SEQ ID NO: 3585876 - DNA, 25 bp, Homo sapien
cagccaacacacttgaggagccagg

SEQ ID NO: 3585877 - DNA, 25 bp, Homo sapien
ctccagagttgtttcccaccatgct

SEQ ID NO: 3585878 - DNA, 25 bp, Homo sapien
gggtcaatgctatctatggcaagat

SEQ ID NO: 3585879 - DNA, 25 bp, Homo sapien
tacagggctatgtgaatgaacagct

SEQ ID NO: 3585880 - DNA, 25 bp, Homo sapien
caactcttaattcatgtgtggccgg

SEQ ID NO: 3585881 - DNA, 25 bp, Homo sapien
tcttaattcatgtgtggccggatta

SEQ ID NO: 3585882 - DNA, 25 bp, Homo sapien
catgtgtggccggattataagctgc

SEQ ID NO: 3585883 - DNA, 25 bp, Homo sapien
taattcatgtgtggccggattataa

SEQ ID NO: 3585884 - DNA, 25 bp, Homo sapien
ctggacggcagagggtagctcaaaa

SEQ ID NO: 3585885 - DNA, 25 bp, Homo sapien
ccactaagtttctggacggcagagg

SEQ ID NO: 3585886 - DNA, 25 bp, Homo sapien
tctacagataagtggctcgtttaac

SEQ ID NO: 3585887 - DNA, 25 bp, Homo sapien
caattctacagataagtggctcgtt

SEQ ID NO: 3585888 - DNA, 25 bp, Homo sapien
tgctatcaattctacagataagtgg

SEQ ID NO: 3585889 - DNA, 25 bp, Homo sapien
cattgtcctgctatcaattctacag

SEQ ID NO: 3585890 - DNA, 25 bp, Homo sapien
catcattgactctgccatccgagtt

SEQ ID NO: 3585891 - DNA, 25 bp, Homo sapien
tctgccatccgagtttattctaggc

SEQ ID NO: 3585892 - DNA, 25 bp, Homo sapien
tccgagtttattctaggccactctg

SEQ ID NO: 3585893 - DNA, 25 bp, Homo sapien
atttccacagctaatctcatcattg

SEQ ID NO: 3585894 - DNA, 25 bp, Homo sapien
tggttggtaggtcttgggacatact

SEQ ID NO: 3585895 - DNA, 25 bp, Homo sapien
ctacatggttggtaggtcttgggac

SEQ ID NO: 3585896 - DNA, 25 bp, Homo sapien
catggttggtaggtcttgggacata

SEQ ID NO: 3585897 - DNA, 25 bp, Homo sapien
tacatggttggtaggtcttgggaca

SEQ ID NO: 3585898 - DNA, 25 bp, Homo sapien
ctcggaattggttgagcctgtccct

SEQ ID NO: 3585899 - DNA, 25 bp, Homo sapien
ccctgagctctagattcagaggctg

SEQ ID NO: 3585900 - DNA, 25 bp, Homo sapien
cctgccctgagctctagattcagag

SEQ ID NO: 3585901 - DNA, 25 bp, Homo sapien
cggaattggttgagcctgtccctca

SEQ ID NO: 3585902 - DNA, 25 bp, Homo sapien
ctgaaaccacattgtgagtttgtac

SEQ ID NO: 3585903 - DNA, 25 bp, Homo sapien
ggcacattttcatcagctccgcata

SEQ ID NO: 3585904 - DNA, 25 bp, Homo sapien
ttttcatcagctccgcatacgttcc

SEQ ID NO: 3585905 - DNA, 25 bp, Homo sapien
cattttcatcagctccgcatacgtt

SEQ ID NO: 3585906 - DNA, 25 bp, Homo sapien
atcagctccgcatacgttcctctta

SEQ ID NO: 3585907 - DNA, 25 bp, Homo sapien
cttccagtggctgattctggtggtt

SEQ ID NO: 3585908 - DNA, 25 bp, Homo sapien
actttttcccataaagactgcattt

SEQ ID NO: 3585909 - DNA, 25 bp, Homo sapien
tggtttccacgttcaggtttctctg

SEQ ID NO: 3585910 - DNA, 25 bp, Homo sapien
cacgttcaggtttctctgattttca

SEQ ID NO: 3585911 - DNA, 25 bp, Homo sapien
agaaatagatcttcagaggcatcac

SEQ ID NO: 3585912 - DNA, 25 bp, Homo sapien
gaaatagatcttcagaggcatcact

SEQ ID NO: 3585913 - DNA, 25 bp, Homo sapien
atagatcttcagaggcatcacttac

SEQ ID NO: 3585914 - DNA, 25 bp, Homo sapien
aaatagatcttcagaggcatcactt

SEQ ID NO: 3585915 - DNA, 25 bp, Homo sapien
gctgtgttgtctttaggcattcaaa

SEQ ID NO: 3585916 - DNA, 25 bp, Homo sapien
tctctgctgtgttgtctttaggcat

SEQ ID NO: 3585917 - DNA, 25 bp, Homo sapien
tttctggcacgggaagccatcttct

SEQ ID NO: 3585918 - DNA, 25 bp, Homo sapien
gccatcttcttcaatcgaatgttag

SEQ ID NO: 3585919 - DNA, 25 bp, Homo sapien
aagaaagagcaacatgtcattttgg

SEQ ID NO: 3585920 - DNA, 25 bp, Homo sapien
ctgaggaagaaagagcaacatgtca

SEQ ID NO: 3585921 - DNA, 25 bp, Homo sapien
gaggaagaaagagcaacatgtcatt

SEQ ID NO: 3585922 - DNA, 25 bp, Homo sapien
ggaagaaagagcaacatgtcatttt

SEQ ID NO: 3585923 - DNA, 25 bp, Homo sapien
tgaaaagcttctgaacatgtggaga

SEQ ID NO: 3585924 - DNA, 25 bp, Homo sapien
ttcattaaagcacagcaaactattt

SEQ ID NO: 3585925 - DNA, 25 bp, Homo sapien
catgtggagataagtgatagctata

SEQ ID NO: 3585926 - DNA, 25 bp, Homo sapien
cattaaagcacagcaaactatttct

SEQ ID NO: 3585927 - DNA, 25 bp, Homo sapien
gggttcccacaatgattcttcgaga

SEQ ID NO: 3585928 - DNA, 25 bp, Homo sapien
gttctttgaagggttcccacaatga

SEQ ID NO: 3585929 - DNA, 25 bp, Homo sapien
tctgttaagtactcctcaaggtcag

SEQ ID NO: 3585930 - DNA, 25 bp, Homo sapien
aattctgttaagtactcctcaaggt

SEQ ID NO: 3585931 - DNA, 25 bp, Homo sapien
aaactcagtactgcggcgaatgagc

SEQ ID NO: 3585932 - DNA, 25 bp, Homo sapien
gtactgcggcgaatgagctcctgac

SEQ ID NO: 3585933 - DNA, 25 bp, Homo sapien
ctgaaactcagtactgcggcgaatg

SEQ ID NO: 3585934 - DNA, 25 bp, Homo sapien
cagtactgcggcgaatgagctcctg

SEQ ID NO: 3585935 - DNA, 25 bp, Homo sapien
aacagaattatttctcgaagaatca

SEQ ID NO: 3585936 - DNA, 25 bp, Homo sapien
gagtacttaacagaattatttctcg

SEQ ID NO: 3585937 - DNA, 25 bp, Homo sapien
ttgaggagtacttaacagaattatt

SEQ ID NO: 3585938 - DNA, 25 bp, Homo sapien
tacttaacagaattatttctcgaag

SEQ ID NO: 3585939 - DNA, 25 bp, Homo sapien
tgtccaagaatcattgcaaaatcca

SEQ ID NO: 3585940 - DNA, 25 bp, Homo sapien
gcaatgttgagataatcagaaccaa

SEQ ID NO: 3585941 - DNA, 25 bp, Homo sapien
cagggctcgccatcaagaaaacact

SEQ ID NO: 3585942 - DNA, 25 bp, Homo sapien
aacgtccacctctcagtaatatctt

SEQ ID NO: 3585943 - DNA, 25 bp, Homo sapien
gcaaagattcacgtctcaacatcaa

SEQ ID NO: 3585944 - DNA, 25 bp, Homo sapien
gaacgcaaagattcacgtctcaaca

SEQ ID NO: 3585945 - DNA, 25 bp, Homo sapien
tcagatctgtcagaacgcaaagatt

SEQ ID NO: 3585946 - DNA, 25 bp, Homo sapien
tgtcagaacgcaaagattcacgtct

SEQ ID NO: 3585947 - DNA, 25 bp, Homo sapien
tgatgcgccctgtagtgagctctgg

SEQ ID NO: 3585948 - DNA, 25 bp, Homo sapien
tgcgccctgtagtgagctctggatt

SEQ ID NO: 3585949 - DNA, 25 bp, Homo sapien
gcctgtccaccggtcctgtgatgcg

SEQ ID NO: 3585950 - DNA, 25 bp, Homo sapien
ctgtgatgcgccctgtagtgagctc

SEQ ID NO: 3585951 - DNA, 25 bp, Homo sapien
tccctggggacgcagaagcaagaag

SEQ ID NO: 3585952 - DNA, 25 bp, Homo sapien
ttatcaatgtcctaaaaaattgaaa

SEQ ID NO: 3585953 - DNA, 25 bp, Homo sapien
tatcaatgtcctaaaaaattgaaat

SEQ ID NO: 3585954 - DNA, 25 bp, Homo sapien
ggaggggaacgcaaccctaatcata

SEQ ID NO: 3585955 - DNA, 25 bp, Homo sapien
gaggggaacgcaaccctaatcatag

SEQ ID NO: 3585956 - DNA, 25 bp, Homo sapien
agtgcccccacattgaagtcaactg

SEQ ID NO: 3585957 - DNA, 25 bp, Homo sapien
cgtggtggccttagctgagtgcccc

SEQ ID NO: 3585958 - DNA, 25 bp, Homo sapien
cgttcgggttgaaagccgccatgca

SEQ ID NO: 3585959 - DNA, 25 bp, Homo sapien
ttcgggttgaaagccgccatgcagg

SEQ ID NO: 3585960 - DNA, 25 bp, Homo sapien
gacgcgttcgggttgaaagccgcca

SEQ ID NO: 3585961 - DNA, 25 bp, Homo sapien
cgcgttcgggttgaaagccgccatg

SEQ ID NO: 3585962 - DNA, 25 bp, Homo sapien
gggcgccctggaccacatggtcagg

SEQ ID NO: 3585963 - DNA, 25 bp, Homo sapien
ggcgccctggaccacatggtcagga

SEQ ID NO: 3585964 - DNA, 25 bp, Homo sapien
cggggcgccctggaccacatggtca

SEQ ID NO: 3585965 - DNA, 25 bp, Homo sapien
accggggcgccctggaccacatggt

SEQ ID NO: 3585966 - DNA, 25 bp, Homo sapien
agctccctgtgcgtggggaagaggc

SEQ ID NO: 3585967 - DNA, 25 bp, Homo sapien
gctccctgtgcgtggggaagaggcg

SEQ ID NO: 3585968 - DNA, 25 bp, Homo sapien
agagctccctgtgcgtggggaagag

SEQ ID NO: 3585969 - DNA, 25 bp, Homo sapien
gagctccctgtgcgtggggaagagg

SEQ ID NO: 3585970 - DNA, 25 bp, Homo sapien
tttgatgaggtgcgaaaaagagggc

SEQ ID NO: 3585971 - DNA, 25 bp, Homo sapien
ttgatgaggtgcgaaaaagagggct

SEQ ID NO: 3585972 - DNA, 25 bp, Homo sapien
tgaggtgcgaaaaagagggctttct

SEQ ID NO: 3585973 - DNA, 25 bp, Homo sapien
gatgaggtgcgaaaaagagggcttt

SEQ ID NO: 3585974 - DNA, 25 bp, Homo sapien
ttgccagatgtgaaagccggagccc

SEQ ID NO: 3585975 - DNA, 25 bp, Homo sapien
atcctactgtgctggtaggtcttgg

SEQ ID NO: 3585976 - DNA, 25 bp, Homo sapien
gtctcttctctttccgataattgtt

SEQ ID NO: 3585977 - DNA, 25 bp, Homo sapien
acgtgaacctcccaataatatttgc

SEQ ID NO: 3585978 - DNA, 25 bp, Homo sapien
tcgggatcatcttgagggtcacatc

SEQ ID NO: 3585979 - DNA, 25 bp, Homo sapien
cattcagattttgcagtgatatcgg

SEQ ID NO: 3585980 - DNA, 25 bp, Homo sapien
agattttgcagtgatatcgggatca

SEQ ID NO: 3585981 - DNA, 25 bp, Homo sapien
ttgcagtgatatcgggatcatcttg

SEQ ID NO: 3585982 - DNA, 25 bp, Homo sapien
aggaagatatgactattggttcttt

SEQ ID NO: 3585983 - DNA, 25 bp, Homo sapien
tacaggaagatatgactattggttc

SEQ ID NO: 3585984 - DNA, 25 bp, Homo sapien
agatatgactattggttctttcagg

SEQ ID NO: 3585985 - DNA, 25 bp, Homo sapien
ttctcaaatctccatacaggaagat

SEQ ID NO: 3585986 - DNA, 25 bp, Homo sapien
tgtgggaattctgccaatgggctga

SEQ ID NO: 3585987 - DNA, 25 bp, Homo sapien
tcagacacttgcagcagcggggact

SEQ ID NO: 3585988 - DNA, 25 bp, Homo sapien
actgagcctgtccagcagtccagtg

SEQ ID NO: 3585989 - DNA, 25 bp, Homo sapien
ctctgaatccactgagcctgtccag

SEQ ID NO: 3585990 - DNA, 25 bp, Homo sapien
acaggctcagacacttgcagcagcg

SEQ ID NO: 3585991 - DNA, 25 bp, Homo sapien
ttttgttgctggtggataaggtagg

SEQ ID NO: 3585992 - DNA, 25 bp, Homo sapien
ctggtggataaggtaggagggacct

SEQ ID NO: 3585993 - DNA, 25 bp, Homo sapien
tagccattctacaaagttttgttgc

SEQ ID NO: 3585994 - DNA, 25 bp, Homo sapien
tgttgctggtggataaggtaggagg

SEQ ID NO: 3585995 - DNA, 25 bp, Homo sapien
cttcccaaccaagtagcattagtta

SEQ ID NO: 3585996 - DNA, 25 bp, Homo sapien
gagaggaaaaacacccatgtatgtg

SEQ ID NO: 3585997 - DNA, 25 bp, Homo sapien
cattagttatcgaatcatgtttttg

SEQ ID NO: 3585998 - DNA, 25 bp, Homo sapien
gtatgtgaatgttcaacatcatgat

SEQ ID NO: 3585999 - DNA, 25 bp, Homo sapien
atctgctttatggtacatttgcttc

SEQ ID NO: 3586000 - DNA, 25 bp, Homo sapien
cacatctgctttatggtacatttgc

SEQ ID NO: 3586001 - DNA, 25 bp, Homo sapien
ccacatctgctttatggtacatttg

SEQ ID NO: 3586002 - DNA, 25 bp, Homo sapien
caggagtagctccacatctgcttta

SEQ ID NO: 3586003 - DNA, 25 bp, Homo sapien
ggctttcattgagttgctgaaaaat

SEQ ID NO: 3586004 - DNA, 25 bp, Homo sapien
tgaaaaatgtcctcgccctcctttc

SEQ ID NO: 3586005 - DNA, 25 bp, Homo sapien
cttaaaagctccctgggatgttcca

SEQ ID NO: 3586006 - DNA, 25 bp, Homo sapien
ctctgattgcttctgtccttaaact

SEQ ID NO: 3586007 - DNA, 25 bp, Homo sapien
ggtggtttctgtgttcaggtttctg

SEQ ID NO: 3586008 - DNA, 25 bp, Homo sapien
ctggtggtttctgtgttcaggtttc

SEQ ID NO: 3586009 - DNA, 25 bp, Homo sapien
gtttctgtgttcaggtttctgagat

SEQ ID NO: 3586010 - DNA, 25 bp, Homo sapien
tggtttctgtgttcaggtttctgag

SEQ ID NO: 3586011 - DNA, 25 bp, Homo sapien
agtgaggacaataaagtatcactca

SEQ ID NO: 3586012 - DNA, 25 bp, Homo sapien
gccatgaattgaagcacaagtgagg

SEQ ID NO: 3586013 - DNA, 25 bp, Homo sapien
gaggacaataaagtatcactcacac

SEQ ID NO: 3586014 - DNA, 25 bp, Homo sapien
ctgcaaaagagccatgaattgaagc

SEQ ID NO: 3586015 - DNA, 25 bp, Homo sapien
tttcatgtgtcctgtatagaaatag

SEQ ID NO: 3586016 - DNA, 25 bp, Homo sapien
aagaatttcatgtgtcctgtataga

SEQ ID NO: 3586017 - DNA, 25 bp, Homo sapien
gaatttcatgtgtcctgtatagaaa

SEQ ID NO: 3586018 - DNA, 25 bp, Homo sapien
catgtgtcctgtatagaaatagatc

SEQ ID NO: 3586019 - DNA, 25 bp, Homo sapien
caacagagccggctcttgttcactt

SEQ ID NO: 3586020 - DNA, 25 bp, Homo sapien
ccaacagagccggctcttgttcact

SEQ ID NO: 3586021 - DNA, 25 bp, Homo sapien
agccaacagagccggctcttgttca

SEQ ID NO: 3586022 - DNA, 25 bp, Homo sapien
acagccaacagagccggctcttgtt

SEQ ID NO: 3586023 - DNA, 25 bp, Homo sapien
gaagagagagcagcatgtcattttg

SEQ ID NO: 3586024 - DNA, 25 bp, Homo sapien
tcattttggggtctgggttggtgaa

SEQ ID NO: 3586025 - DNA, 25 bp, Homo sapien
agcatgtcattttggggtctgggtt

SEQ ID NO: 3586026 - DNA, 25 bp, Homo sapien
ctgatgaagaagagagagcagcatg

SEQ ID NO: 3586027 - DNA, 25 bp, Homo sapien
ctggtcagaggtgaatacaccgaaa

SEQ ID NO: 3586028 - DNA, 25 bp, Homo sapien
tggtcagaggtgaatacaccgaaag

SEQ ID NO: 3586029 - DNA, 25 bp, Homo sapien
ggtcagaggtgaatacaccgaaaga

SEQ ID NO: 3586030 - DNA, 25 bp, Homo sapien
aacctgaaaccacattgtgagtttg

SEQ ID NO: 3586031 - DNA, 25 bp, Homo sapien
caaaaacctgaaaccacattgtgag

SEQ ID NO: 3586032 - DNA, 25 bp, Homo sapien
tcaaaaacctgaaaccacattgtga

SEQ ID NO: 3586033 - DNA, 25 bp, Homo sapien
aaaacctgaaaccacattgtgagtt

SEQ ID NO: 3586034 - DNA, 25 bp, Homo sapien
tggctttacttaaatgaagttgatg

SEQ ID NO: 3586035 - DNA, 25 bp, Homo sapien
atcttctgatactcagctctcatag

SEQ ID NO: 3586036 - DNA, 25 bp, Homo sapien
tctgatactcagctctcatagcttc

SEQ ID NO: 3586037 - DNA, 25 bp, Homo sapien
tgatactcagctctcatagcttcta

SEQ ID NO: 3586038 - DNA, 25 bp, Homo sapien
cttccagtggctgattctggtggtt

SEQ ID NO: 3586039 - DNA, 25 bp, Homo sapien
caagctttttcccataaagactgca

SEQ ID NO: 3586040 - DNA, 25 bp, Homo sapien
acattcaggtttctctgattttcac

SEQ ID NO: 3586041 - DNA, 25 bp, Homo sapien
gtggtttccacattcaggtttctct

SEQ ID NO: 3586042 - DNA, 25 bp, Homo sapien
tgccatgttgtcttcatgcattcaa

SEQ ID NO: 3586043 - DNA, 25 bp, Homo sapien
gccatgttgtcttcatgcattcaaa

SEQ ID NO: 3586044 - DNA, 25 bp, Homo sapien
tcaagtcgcagaaatctcctaattc

SEQ ID NO: 3586045 - DNA, 25 bp, Homo sapien
caccagtagatagagccatccaaaa

SEQ ID NO: 3586046 - DNA, 25 bp, Homo sapien
tctcctaattcttcaacaccagtag

SEQ ID NO: 3586047 - DNA, 25 bp, Homo sapien
tcctcaagtcgcagaaatctcctaa

SEQ ID NO: 3586048 - DNA, 25 bp, Homo sapien
agcagatgagccaatattgctccat

SEQ ID NO: 3586049 - DNA, 25 bp, Homo sapien
ttttccagagcagatgagccaatat

SEQ ID NO: 3586050 - DNA, 25 bp, Homo sapien
tccagagcagatgagccaatattgc

SEQ ID NO: 3586051 - DNA, 25 bp, Homo sapien
agtttttccagagcagatgagccaa

SEQ ID NO: 3586052 - DNA, 25 bp, Homo sapien
tgacccttcaatttggctgtagcct

SEQ ID NO: 3586053 - DNA, 25 bp, Homo sapien
tctggagactgcaagactgaaggac

SEQ ID NO: 3586054 - DNA, 25 bp, Homo sapien
cacaaggctcatgcatagtctccag

SEQ ID NO: 3586055 - DNA, 25 bp, Homo sapien
cacagatgtgctggaatcaccgctg

SEQ ID NO: 3586056 - DNA, 25 bp, Homo sapien
aagggaaaaggctgtatatgaggga

SEQ ID NO: 3586057 - DNA, 25 bp, Homo sapien
ggtgtcaaaagggaagacaaagaga

SEQ ID NO: 3586058 - DNA, 25 bp, Homo sapien
gagaaagggaaaaggctgtatatga

SEQ ID NO: 3586059 - DNA, 25 bp, Homo sapien
gggaaaaggctgtatatgagggaac

SEQ ID NO: 3586060 - DNA, 25 bp, Homo sapien
cttttgaaacatcataaaagctcac

SEQ ID NO: 3586061 - DNA, 25 bp, Homo sapien
gagaaggcctgagctccccatgctg

SEQ ID NO: 3586062 - DNA, 25 bp, Homo sapien
catgctgcaaagttctctgctctct

SEQ ID NO: 3586063 - DNA, 25 bp, Homo sapien
tccccgggtgcaccatcatggtcat

SEQ ID NO: 3586064 - DNA, 25 bp, Homo sapien
gggactccccgggtgcaccatcatg

SEQ ID NO: 3586065 - DNA, 25 bp, Homo sapien
tgttgagcatatctagcactccggt

SEQ ID NO: 3586066 - DNA, 25 bp, Homo sapien
atatctagcactccggtgatgtgcc

SEQ ID NO: 3586067 - DNA, 25 bp, Homo sapien
gagcatatctagcactccggtgatg

SEQ ID NO: 3586068 - DNA, 25 bp, Homo sapien
ttgagcatatctagcactccggtga

SEQ ID NO: 3586069 - DNA, 25 bp, Homo sapien
cgtcttggagttgtcgaacaatctc

SEQ ID NO: 3586070 - DNA, 25 bp, Homo sapien
gatattgttatctgatcatcccttt

SEQ ID NO: 3586071 - DNA, 25 bp, Homo sapien
tgatattgttatctgatcatccctt

SEQ ID NO: 3586072 - DNA, 25 bp, Homo sapien
atattgttatctgatcatccctttc

SEQ ID NO: 3586073 - DNA, 25 bp, Homo sapien
ctgatattgttatctgatcatccct

SEQ ID NO: 3586074 - DNA, 25 bp, Homo sapien
ctcatgctcttgtgactcagagcag

SEQ ID NO: 3586075 - DNA, 25 bp, Homo sapien
gggcccacagaggagtctctcctct

SEQ ID NO: 3586076 - DNA, 25 bp, Homo sapien
ctgtggccataagcctcatgctctt

SEQ ID NO: 3586077 - DNA, 25 bp, Homo sapien
catcctattgggctgtggccataag

SEQ ID NO: 3586078 - DNA, 25 bp, Homo sapien
cagataaagcaacagagctccctct

SEQ ID NO: 3586079 - DNA, 25 bp, Homo sapien
ctgttgatgttgtgaggtctgcgct

SEQ ID NO: 3586080 - DNA, 25 bp, Homo sapien
gaggtctgcgctgccttgcaagaga

SEQ ID NO: 3586081 - DNA, 25 bp, Homo sapien
gctccctctggaaggtttgcagtgt

SEQ ID NO: 3586082 - DNA, 25 bp, Homo sapien
taagcagagaatgtccacaggatca

SEQ ID NO: 3586083 - DNA, 25 bp, Homo sapien
caggatcaagtccatgacccagggt

SEQ ID NO: 3586084 - DNA, 25 bp, Homo sapien
cttgtaatggagtaccagggccccg

SEQ ID NO: 3586085 - DNA, 25 bp, Homo sapien
cacggagctccagaatttaagcaga

SEQ ID NO: 3586086 - DNA, 25 bp, Homo sapien
taagtgatggctctgaagatcgatt

SEQ ID NO: 3586087 - DNA, 25 bp, Homo sapien
cgggtaagtgatggctctgaagatc

SEQ ID NO: 3586088 - DNA, 25 bp, Homo sapien
gaacaccgggtaagtgatggctctg

SEQ ID NO: 3586089 - DNA, 25 bp, Homo sapien
ctgctgaggaacaccgggtaagtga

SEQ ID NO: 3586090 - DNA, 25 bp, Homo sapien
tcttccagggcagcgggcgcttctc

SEQ ID NO: 3586091 - DNA, 25 bp, Homo sapien
cttcttccagggcagcgggcgcttc

SEQ ID NO: 3586092 - DNA, 25 bp, Homo sapien
ctcttcttccagggcagcgggcgct

SEQ ID NO: 3586093 - DNA, 25 bp, Homo sapien
ttccagggcagcgggcgcttctcct

SEQ ID NO: 3586094 - DNA, 25 bp, Homo sapien
tccgcgctgccctcttgggctggaa

SEQ ID NO: 3586095 - DNA, 25 bp, Homo sapien
accttgttatgccacttgggtatct

SEQ ID NO: 3586096 - DNA, 25 bp, Homo sapien
ttgttatgccacttgggtatctgca

SEQ ID NO: 3586097 - DNA, 25 bp, Homo sapien
tccttggccaccttgttatgccact

SEQ ID NO: 3586098 - DNA, 25 bp, Homo sapien
tgcctggccacaagctgctccgccg

SEQ ID NO: 3586099 - DNA, 25 bp, Homo sapien
ctcttggggattcctcacgggagcc

SEQ ID NO: 3586100 - DNA, 25 bp, Homo sapien
gattcctcacgggagcccgccgcct

SEQ ID NO: 3586101 - DNA, 25 bp, Homo sapien
ccggctcttggggattcctcacggg

SEQ ID NO: 3586102 - DNA, 25 bp, Homo sapien
ttggggattcctcacgggagcccgc

SEQ ID NO: 3586103 - DNA, 25 bp, Homo sapien
cgccctccgtttcgcccgccacctg

SEQ ID NO: 3586104 - DNA, 25 bp, Homo sapien
tgcgccctccgtttcgcccgccacc

SEQ ID NO: 3586105 - DNA, 25 bp, Homo sapien
ctgcgccctccgtttcgcccgccac

SEQ ID NO: 3586106 - DNA, 25 bp, Homo sapien
cgccgccagaatttcctgagtcgcc

SEQ ID NO: 3586107 - DNA, 25 bp, Homo sapien
gccgccagaatttcctgagtcgcca

SEQ ID NO: 3586108 - DNA, 25 bp, Homo sapien
ccgccagaatttcctgagtcgccag

SEQ ID NO: 3586109 - DNA, 25 bp, Homo sapien
acagggtcctctcggggcacacggt

SEQ ID NO: 3586110 - DNA, 25 bp, Homo sapien
tccccacgcacagggtcctctcggg

SEQ ID NO: 3586111 - DNA, 25 bp, Homo sapien
acgcacagggtcctctcggggcaca

SEQ ID NO: 3586112 - DNA, 25 bp, Homo sapien
tcttccccacgcacagggtcctctc

SEQ ID NO: 3586113 - DNA, 25 bp, Homo sapien
ctggcacgcgaaggccacggcgggg

SEQ ID NO: 3586114 - DNA, 25 bp, Homo sapien
tgttagaggctcgtggtcatcctga

SEQ ID NO: 3586115 - DNA, 25 bp, Homo sapien
ctgttagaggctcgtggtcatcctg

SEQ ID NO: 3586116 - DNA, 25 bp, Homo sapien
gttagaggctcgtggtcatcctgac

SEQ ID NO: 3586117 - DNA, 25 bp, Homo sapien
tatgtggtccagggcgccccggtcc

SEQ ID NO: 3586118 - DNA, 25 bp, Homo sapien
tccagggcgccccggtcctctgggc

SEQ ID NO: 3586119 - DNA, 25 bp, Homo sapien
cagggcgccccggtcctctgggcca

SEQ ID NO: 3586120 - DNA, 25 bp, Homo sapien
tggtccagggcgccccggtcctctg

SEQ ID NO: 3586121 - DNA, 25 bp, Homo sapien
agcgcggacagctcgcagttcctga

SEQ ID NO: 3586122 - DNA, 25 bp, Homo sapien
gcgtcagcgcggacagctcgcagtt

SEQ ID NO: 3586123 - DNA, 25 bp, Homo sapien
ggcgcccggcgtcagcgcggacagc

SEQ ID NO: 3586124 - DNA, 25 bp, Homo sapien
cgcccggcgtcagcgcggacagctc

SEQ ID NO: 3586125 - DNA, 25 bp, Homo sapien
actagctcagggctccgatgtgatc

SEQ ID NO: 3586126 - DNA, 25 bp, Homo sapien
acggcagggaccctcgtgtggacac

SEQ ID NO: 3586127 - DNA, 25 bp, Homo sapien
caggcaggcagtttttggagccctc

SEQ ID NO: 3586128 - DNA, 25 bp, Homo sapien
cgatgtgatcggttcgaccctgcat

SEQ ID NO: 3586129 - DNA, 25 bp, Homo sapien
acaagtagttggtgatgatagcgtg

SEQ ID NO: 3586130 - DNA, 25 bp, Homo sapien
aagtagttggtgatgatagcgtgcc

SEQ ID NO: 3586131 - DNA, 25 bp, Homo sapien
agttcaacaagtagttggtgatgat

SEQ ID NO: 3586132 - DNA, 25 bp, Homo sapien
tcaacaagtagttggtgatgatagc

SEQ ID NO: 3586133 - DNA, 25 bp, Homo sapien
tgtctaaggcaacagtgcccatggg

SEQ ID NO: 3586134 - DNA, 25 bp, Homo sapien
gcaaggctgagagccagtgtctaag

SEQ ID NO: 3586135 - DNA, 25 bp, Homo sapien
agcccagttgatgctgacgcaggaa

SEQ ID NO: 3586136 - DNA, 25 bp, Homo sapien
taaagctcaaatgaaccagcccagt

SEQ ID NO: 3586137 - DNA, 25 bp, Homo sapien
tatgattagggctgcgttcccctcc

SEQ ID NO: 3586138 - DNA, 25 bp, Homo sapien
ccagttgacatcaatgtgggggtac

SEQ ID NO: 3586139 - DNA, 25 bp, Homo sapien
ttcctgcctgtgcagctatgattag

SEQ ID NO: 3586140 - DNA, 25 bp, Homo sapien
ttgacatcaatgtgggggtactcag

SEQ ID NO: 3586141 - DNA, 25 bp, Homo sapien
tcccgcgccttcttaaagctcaccc

SEQ ID NO: 3586142 - DNA, 25 bp, Homo sapien
ctcccgcgccttcttaaagctcacc

SEQ ID NO: 3586143 - DNA, 25 bp, Homo sapien
cagcgtccgcctctgccccgcgcct

SEQ ID NO: 3586144 - DNA, 25 bp, Homo sapien
tttgaattcagtgcggtcctcctcg

SEQ ID NO: 3586145 - DNA, 25 bp, Homo sapien
cagaggcgacgctgcgagtgtcggg

SEQ ID NO: 3586146 - DNA, 25 bp, Homo sapien
cctggaactctttgaattcagtgcg

SEQ ID NO: 3586147 - DNA, 25 bp, Homo sapien
agagtcgtcagaggcgacgctgcga

SEQ ID NO: 3586148 - DNA, 25 bp, Homo sapien
tggcgggatcatgcagcgcgccccg

SEQ ID NO: 3586149 - DNA, 25 bp, Homo sapien
gccccgccaccctgcggccgagtcc

SEQ ID NO: 3586150 - DNA, 25 bp, Homo sapien
caccctgcggccgagtcccagccag

SEQ ID NO: 3586151 - DNA, 25 bp, Homo sapien
aggagtggggatggcggtggcggga

SEQ ID NO: 3586152 - DNA, 25 bp, Homo sapien
gaagtgataaaagtgcccaggcaga

SEQ ID NO: 3586153 - DNA, 25 bp, Homo sapien
agttcatttttctaccccagcctgg

SEQ ID NO: 3586154 - DNA, 25 bp, Homo sapien
tatgtcagtttaaggccagtctcca

SEQ ID NO: 3586155 - DNA, 25 bp, Homo sapien
tctgtgaggtcaacttaacttggtc

SEQ ID NO: 3586156 - DNA, 25 bp, Homo sapien
ggtggagagactatagtgattgctc

SEQ ID NO: 3586157 - DNA, 25 bp, Homo sapien
ttggtggagagactatagtgattgc

SEQ ID NO: 3586158 - DNA, 25 bp, Homo sapien
tatcataatccagaaacaccccaac

SEQ ID NO: 3586159 - DNA, 25 bp, Homo sapien
agatccattatcataatccagaaac

SEQ ID NO: 3586160 - DNA, 25 bp, Homo sapien
tgttgagcatgtctaggactccagt

SEQ ID NO: 3586161 - DNA, 25 bp, Homo sapien
taggactccagttatgcaccatgaa

SEQ ID NO: 3586162 - DNA, 25 bp, Homo sapien
gttgagcatgtctaggactccagtt

SEQ ID NO: 3586163 - DNA, 25 bp, Homo sapien
ctaggactccagttatgcaccatga

SEQ ID NO: 3586164 - DNA, 25 bp, Homo sapien
ctcacttgactgtcttgtagttgtt

SEQ ID NO: 3586165 - DNA, 25 bp, Homo sapien
acttgactgtcttgtagttgttgga

SEQ ID NO: 3586166 - DNA, 25 bp, Homo sapien
cttgactgtcttgtagttgttggaa

SEQ ID NO: 3586167 - DNA, 25 bp, Homo sapien
cacttgactgtcttgtagttgttgg

SEQ ID NO: 3586168 - DNA, 25 bp, Homo sapien
cctgatttagattgtttcgtgtctc

SEQ ID NO: 3586169 - DNA, 25 bp, Homo sapien
cgtgtctcttgattgattttccata

SEQ ID NO: 3586170 - DNA, 25 bp, Homo sapien
tgaacaaaatttgctagtttcctga

SEQ ID NO: 3586171 - DNA, 25 bp, Homo sapien
ctaatgaacaaaatttgctagtttc

SEQ ID NO: 3586172 - DNA, 25 bp, Homo sapien
ctttgaaaagtgttcttggtgctgg

SEQ ID NO: 3586173 - DNA, 25 bp, Homo sapien
tgactttgaaaagtgttcttggtgc

SEQ ID NO: 3586174 - DNA, 25 bp, Homo sapien
tgaaaagtgttcttggtgctggcca

SEQ ID NO: 3586175 - DNA, 25 bp, Homo sapien
ctgactttgaaaagtgttcttggtg

SEQ ID NO: 3586176 - DNA, 25 bp, Homo sapien
ctgtgagccatgtgctctggtgact

SEQ ID NO: 3586177 - DNA, 25 bp, Homo sapien
ctgtggctgtgagccatgtgctctg

SEQ ID NO: 3586178 - DNA, 25 bp, Homo sapien
gcctcacagaagagctccttagtct

SEQ ID NO: 3586179 - DNA, 25 bp, Homo sapien
gagcacacagatattgtctgagctg

SEQ ID NO: 3586180 - DNA, 25 bp, Homo sapien
ggaagactcgcagggcatcagaatc

SEQ ID NO: 3586181 - DNA, 25 bp, Homo sapien
agtgctctcagagtcatcacttaca

SEQ ID NO: 3586182 - DNA, 25 bp, Homo sapien
tgccctccagctttcaaagtgctct

SEQ ID NO: 3586183 - DNA, 25 bp, Homo sapien
ttccccttcagtgggccagtgtttc

SEQ ID NO: 3586184 - DNA, 25 bp, Homo sapien
catcacttacacagtgttcctttgc

SEQ ID NO: 3586185 - DNA, 25 bp, Homo sapien
tcctgtataccctatggaaccatga

SEQ ID NO: 3586186 - DNA, 25 bp, Homo sapien
gaaggatggagtcctaaattccagg

SEQ ID NO: 3586187 - DNA, 25 bp, Homo sapien
ttaaatctgtaagaagctcagccac

SEQ ID NO: 3586188 - DNA, 25 bp, Homo sapien
ggaaccatgagccaactaaaggtat

SEQ ID NO: 3586189 - DNA, 25 bp, Homo sapien
tcatcacctggtactggtttagaag

SEQ ID NO: 3586190 - DNA, 25 bp, Homo sapien
tctggtgtctactaacttttgaatt

SEQ ID NO: 3586191 - DNA, 25 bp, Homo sapien
tttatacactaccagttcttcttcc

SEQ ID NO: 3586192 - DNA, 25 bp, Homo sapien
ttttagtgcctatatcatagaaagg

SEQ ID NO: 3586193 - DNA, 25 bp, Homo sapien
aagtgccggcgcacatcgtgggact

SEQ ID NO: 3586194 - DNA, 25 bp, Homo sapien
cgacgagcaccgcttcctgctccac

SEQ ID NO: 3586195 - DNA, 25 bp, Homo sapien
cggcgcacatcgtgggactggcagg

SEQ ID NO: 3586196 - DNA, 25 bp, Homo sapien
agggctgagaagtgccggcgcacat

SEQ ID NO: 3586197 - DNA, 25 bp, Homo sapien
taaatgtagttgcttctacccctaa

SEQ ID NO: 3586198 - DNA, 25 bp, Homo sapien
tacatggcaaaattaccaacacagg

SEQ ID NO: 3586199 - DNA, 25 bp, Homo sapien
tccccagccctgatgatgggtttga

SEQ ID NO: 3586200 - DNA, 25 bp, Homo sapien
gaaattacatcttaggtacatggca

SEQ ID NO: 3586201 - DNA, 25 bp, Homo sapien
tttgatcacatctcatgactttttg

SEQ ID NO: 3586202 - DNA, 25 bp, Homo sapien
ttttgatcacatctcatgacttttt

SEQ ID NO: 3586203 - DNA, 25 bp, Homo sapien
atcacatctcatgactttttgagtc

SEQ ID NO: 3586204 - DNA, 25 bp, Homo sapien
tgatcacatctcatgactttttgag

SEQ ID NO: 3586205 - DNA, 25 bp, Homo sapien
gaaaattagactaatctgatgtatg

SEQ ID NO: 3586206 - DNA, 25 bp, Homo sapien
catatgtatgtattgttaaaacaaa

SEQ ID NO: 3586207 - DNA, 25 bp, Homo sapien
acatatgtatgtattgttaaaacaa

SEQ ID NO: 3586208 - DNA, 25 bp, Homo sapien
tgtatgtatgtatagccattatata

SEQ ID NO: 3586209 - DNA, 25 bp, Homo sapien
tagactcagtctgttgacaactcca

SEQ ID NO: 3586210 - DNA, 25 bp, Homo sapien
gcagccacgtgatggatgaagagtt

SEQ ID NO: 3586211 - DNA, 25 bp, Homo sapien
tgaactgacccctttaattggccaa

SEQ ID NO: 3586212 - DNA, 25 bp, Homo sapien
caagatcagtgtcaaccaattcaat

SEQ ID NO: 3586213 - DNA, 25 bp, Homo sapien
ggtgatgccattgcgaaaagactca

SEQ ID NO: 3586214 - DNA, 25 bp, Homo sapien
tggtcccaatgatgcagtcacaagg

SEQ ID NO: 3586215 - DNA, 25 bp, Homo sapien
tgtggtaagcataataatggcctcc

SEQ ID NO: 3586216 - DNA, 25 bp, Homo sapien
ggatgagtcacactaatcagctgag

SEQ ID NO: 3586217 - DNA, 25 bp, Homo sapien
aactcgcaccattttcaaagtaaat

SEQ ID NO: 3586218 - DNA, 25 bp, Homo sapien
atttactttgaaaatggtgcgagtt

SEQ ID NO: 3586219 - DNA, 25 bp, Homo sapien
ccctaaattatagcaaggaacatga

SEQ ID NO: 3586220 - DNA, 25 bp, Homo sapien
aattctcagacattgtgagtgtggg

SEQ ID NO: 3586221 - DNA, 25 bp, Homo sapien
tccctaaattatagcaaggaacatg

SEQ ID NO: 3586222 - DNA, 25 bp, Homo sapien
ctaaattatagcaaggaacatgaat

SEQ ID NO: 3586223 - DNA, 25 bp, Homo sapien
tattattggcagacattgttgaagg

SEQ ID NO: 3586224 - DNA, 25 bp, Homo sapien
tgaagtggcaaactaatctgtagtg

SEQ ID NO: 3586225 - DNA, 25 bp, Homo sapien
gaggaaactttctccaatagatgag

SEQ ID NO: 3586226 - DNA, 25 bp, Homo sapien
tgtggtatccattacacaatagact

SEQ ID NO: 3586227 - DNA, 25 bp, Homo sapien
ggatacttacgaaataatgacatgg

SEQ ID NO: 3586228 - DNA, 25 bp, Homo sapien
gaacaagtgattgtgtggcatgcac

SEQ ID NO: 3586229 - DNA, 25 bp, Homo sapien
aagtcctgagagagatactgttcct

SEQ ID NO: 3586230 - DNA, 25 bp, Homo sapien
tggcatgcactataatcaattcagg

SEQ ID NO: 3586231 - DNA, 25 bp, Homo sapien
tatgtgacacaaaggtgtttaccac

SEQ ID NO: 3586232 - DNA, 25 bp, Homo sapien
gaaaactggacagaatgacaatgta

SEQ ID NO: 3586233 - DNA, 25 bp, Homo sapien
aatcacaagctaaatatcaatggag

SEQ ID NO: 3586234 - DNA, 25 bp, Homo sapien
tagtgcttgcatttcggtggtagac

SEQ ID NO: 3586235 - DNA, 25 bp, Homo sapien
gccagaacgatcttcctagacgtga

SEQ ID NO: 3586236 - DNA, 25 bp, Homo sapien
gatacgaaagagctgtggaagcgct

SEQ ID NO: 3586237 - DNA, 25 bp, Homo sapien
gagccctaaacccaatactgagtga

SEQ ID NO: 3586238 - DNA, 25 bp, Homo sapien
tagtactggcagtcgctcccaggtg

SEQ ID NO: 3586239 - DNA, 25 bp, Homo sapien
tcttagtaagaaaatcaatggctga

SEQ ID NO: 3586240 - DNA, 25 bp, Homo sapien
tgaccctggaggcaagttatgcccc

SEQ ID NO: 3586241 - DNA, 25 bp, Homo sapien
gaactaactactgcgaaaactgaaa

SEQ ID NO: 3586242 - DNA, 25 bp, Homo sapien
tgtgattagacacctactttccctg

SEQ ID NO: 3586243 - DNA, 25 bp, Homo sapien
tagtctgggctcaatctgttactgg

SEQ ID NO: 3586244 - DNA, 25 bp, Homo sapien
caaatatgaactgagtagtctgggc

SEQ ID NO: 3586245 - DNA, 25 bp, Homo sapien
cacactgagtatttagcaggtgagc

SEQ ID NO: 3586246 - DNA, 25 bp, Homo sapien
tattcccatgcttgtgtactgctac

SEQ ID NO: 3586247 - DNA, 25 bp, Homo sapien
tatttcatgccctcatcctaactgg

SEQ ID NO: 3586248 - DNA, 25 bp, Homo sapien
ctcagcagtcccttgagaaaatcat

SEQ ID NO: 3586249 - DNA, 25 bp, Homo sapien
gaggctgttaagaaaaactagagac

SEQ ID NO: 3586250 - DNA, 25 bp, Homo sapien
taagagtcatcaaatcacaagtgat

SEQ ID NO: 3586251 - DNA, 25 bp, Homo sapien
tataatatacctaactttgactgct

SEQ ID NO: 3586252 - DNA, 25 bp, Homo sapien
cctttatactagtaaatgtgctatg

SEQ ID NO: 3586253 - DNA, 25 bp, Homo sapien
aaggctcagtttattaggatcttac

SEQ ID NO: 3586254 - DNA, 25 bp, Homo sapien
tctatgataacgtaagattttaaca

SEQ ID NO: 3586255 - DNA, 25 bp, Homo sapien
cagatgcttatgtactccatgtggg

SEQ ID NO: 3586256 - DNA, 25 bp, Homo sapien
tgggtccaacttttactgcccagag

SEQ ID NO: 3586257 - DNA, 25 bp, Homo sapien
tgcccagagtttcttgtcatggtaa

SEQ ID NO: 3586258 - DNA, 25 bp, Homo sapien
tatgctacctaacgataactgtgtc

SEQ ID NO: 3586259 - DNA, 25 bp, Homo sapien
tttgctaatggtagtagaatgatac

SEQ ID NO: 3586260 - DNA, 25 bp, Homo sapien
tcactagaattgtgaagctcttcat

SEQ ID NO: 3586261 - DNA, 25 bp, Homo sapien
tcttcttgagttctgcactaactca

SEQ ID NO: 3586262 - DNA, 25 bp, Homo sapien
taactcaaaacctatccaaacgatc

SEQ ID NO: 3586263 - DNA, 25 bp, Homo sapien
gaataatcaatcttacataacacaa

SEQ ID NO: 3586264 - DNA, 25 bp, Homo sapien
tcacacagtattaaaaattcggaaa

SEQ ID NO: 3586265 - DNA, 25 bp, Homo sapien
aaattcggaaataatgtaatagcct

SEQ ID NO: 3586266 - DNA, 25 bp, Homo sapien
ggaaataatgtaatagccttccttc

SEQ ID NO: 3586267 - DNA, 25 bp, Homo sapien
tcaatctgttgtggcatctttttgt

SEQ ID NO: 3586268 - DNA, 25 bp, Homo sapien
cataacttcgctttacatcaatcac

SEQ ID NO: 3586269 - DNA, 25 bp, Homo sapien
tagttacataacttcgctttacatc

SEQ ID NO: 3586270 - DNA, 25 bp, Homo sapien
gttgcagtcatagttacataacttc

SEQ ID NO: 3586271 - DNA, 25 bp, Homo sapien
aggcctcttttatatctagtcttaa

SEQ ID NO: 3586272 - DNA, 25 bp, Homo sapien
ctttttggtaggatacactgttaag

SEQ ID NO: 3586273 - DNA, 25 bp, Homo sapien
tatacatctatactttgcatcaatg

SEQ ID NO: 3586274 - DNA, 25 bp, Homo sapien
agaattacaggaaacctcagtagtt

SEQ ID NO: 3586275 - DNA, 25 bp, Homo sapien
ccccataatttcacattttgatcaa

SEQ ID NO: 3586276 - DNA, 25 bp, Homo sapien
tctccttcaaatacaatatgcacat

SEQ ID NO: 3586277 - DNA, 25 bp, Homo sapien
tcacattttgatcaaattccttctc

SEQ ID NO: 3586278 - DNA, 25 bp, Homo sapien
tctctccttcaaatacaatatgcac

SEQ ID NO: 3586279 - DNA, 25 bp, Homo sapien
gataaatctactacagtatctccag

SEQ ID NO: 3586280 - DNA, 25 bp, Homo sapien
tgggagtcattataaaatcttaccc

SEQ ID NO: 3586281 - DNA, 25 bp, Homo sapien
tccagaatggttcagcagtaagtct

SEQ ID NO: 3586282 - DNA, 25 bp, Homo sapien
caaactgaagatttatgctatcaaa

SEQ ID NO: 3586283 - DNA, 25 bp, Homo sapien
gaagtgagtttttagcatatactga

SEQ ID NO: 3586284 - DNA, 25 bp, Homo sapien
catatactgaaatggtaacttcacc

SEQ ID NO: 3586285 - DNA, 25 bp, Homo sapien
gcttctactcggctaagttctggaa

SEQ ID NO: 3586286 - DNA, 25 bp, Homo sapien
gtcatgtctacatggaacaactttt

SEQ ID NO: 3586287 - DNA, 25 bp, Homo sapien
aaaaagtgccacataattaatttct

SEQ ID NO: 3586288 - DNA, 25 bp, Homo sapien
gaaaaaactaccatgcacaacaact

SEQ ID NO: 3586289 - DNA, 25 bp, Homo sapien
catctgagaaaaaactaccatgcac

SEQ ID NO: 3586290 - DNA, 25 bp, Homo sapien
tgcacaacaactaagcacttaatgt

SEQ ID NO: 3586291 - DNA, 25 bp, Homo sapien
cactggcagcttgactcagattcat

SEQ ID NO: 3586292 - DNA, 25 bp, Homo sapien
tcgtagtcacatcaaagctctatgg

SEQ ID NO: 3586293 - DNA, 25 bp, Homo sapien
tcccattagcaagcagaggcattca

SEQ ID NO: 3586294 - DNA, 25 bp, Homo sapien
agtgagcctgcactgcacgtctggg

SEQ ID NO: 3586295 - DNA, 25 bp, Homo sapien
tcttctacaacagctccagtatttc

SEQ ID NO: 3586296 - DNA, 25 bp, Homo sapien
taaaatctcacaaccaattaaatcc

SEQ ID NO: 3586297 - DNA, 25 bp, Homo sapien
taaattatcacagaaaaacttcaga

SEQ ID NO: 3586298 - DNA, 25 bp, Homo sapien
tcacaaccaattaaatccacaagta

SEQ ID NO: 3586299 - DNA, 25 bp, Homo sapien
tctcacaaccaattaaatccacaag

SEQ ID NO: 3586300 - DNA, 25 bp, Homo sapien
tgcaggatgcggaaaaatatgggtc

SEQ ID NO: 3586301 - DNA, 25 bp, Homo sapien
gccagtaagtgtacaaactctagca

SEQ ID NO: 3586302 - DNA, 25 bp, Homo sapien
taatgttgtcttagtgccccagggc

SEQ ID NO: 3586303 - DNA, 25 bp, Homo sapien
caaacccctgtgtttgtgtaggcta

SEQ ID NO: 3586304 - DNA, 25 bp, Homo sapien
ctcatggaaaataggtactccagaa

SEQ ID NO: 3586305 - DNA, 25 bp, Homo sapien
ccctcatggaaaataggtactccag

SEQ ID NO: 3586306 - DNA, 25 bp, Homo sapien
atggaaaataggtactccagaatga

SEQ ID NO: 3586307 - DNA, 25 bp, Homo sapien
catggaaaataggtactccagaatg

SEQ ID NO: 3586308 - DNA, 25 bp, Homo sapien
acatatttgcagtattggtgacctc

SEQ ID NO: 3586309 - DNA, 25 bp, Homo sapien
gaaaattcataaatccatcccacgc

SEQ ID NO: 3586310 - DNA, 25 bp, Homo sapien
tggtgacctctacgaactttgcaaa

SEQ ID NO: 3586311 - DNA, 25 bp, Homo sapien
tcagccttttgagtatgagatccca

SEQ ID NO: 3586312 - DNA, 25 bp, Homo sapien
tttgtctggaagatccgggccccat

SEQ ID NO: 3586313 - DNA, 25 bp, Homo sapien
ccgggccccattgctgctgtagatg

SEQ ID NO: 3586314 - DNA, 25 bp, Homo sapien
tatatatatccagggtttgtctgga

SEQ ID NO: 3586315 - DNA, 25 bp, Homo sapien
ctatatatatatccagggtttgtct

SEQ ID NO: 3586316 - DNA, 25 bp, Homo sapien
acagccctgaagtaagcaacgattt

SEQ ID NO: 3586317 - DNA, 25 bp, Homo sapien
taaatgtgcctccatatgagaaaac

SEQ ID NO: 3586318 - DNA, 25 bp, Homo sapien
aaaatccattcgttcctcttcagca

SEQ ID NO: 3586319 - DNA, 25 bp, Homo sapien
tttgatggcaccgtacagactcagt

SEQ ID NO: 3586320 - DNA, 25 bp, Homo sapien
tgtactccagggtgggttacaagag

SEQ ID NO: 3586321 - DNA, 25 bp, Homo sapien
taaagtagaaattagttgtggcaca

SEQ ID NO: 3586322 - DNA, 25 bp, Homo sapien
tgttcataataggccggctgcggtg

SEQ ID NO: 3586323 - DNA, 25 bp, Homo sapien
tggcacattcaaataatgacatacc

SEQ ID NO: 3586324 - DNA, 25 bp, Homo sapien
tcttacatgaggtcccaatcttaat

SEQ ID NO: 3586325 - DNA, 25 bp, Homo sapien
acaccctccattcttacatgaggtc

SEQ ID NO: 3586326 - DNA, 25 bp, Homo sapien
catgaggtcccaatcttaatttcat

SEQ ID NO: 3586327 - DNA, 25 bp, Homo sapien
cctccattcttacatgaggtcccaa

SEQ ID NO: 3586328 - DNA, 25 bp, Homo sapien
taaaatagaacttcgctgtggcatc

SEQ ID NO: 3586329 - DNA, 25 bp, Homo sapien
cgactgtgactaggatttgcttata

SEQ ID NO: 3586330 - DNA, 25 bp, Homo sapien
tgtggcatcattcttaaaaactagg

SEQ ID NO: 3586331 - DNA, 25 bp, Homo sapien
tatccccaaattgatatatgacaca

SEQ ID NO: 3586332 - DNA, 25 bp, Homo sapien
aagtttatcaagtgcttgttttagg

SEQ ID NO: 3586333 - DNA, 25 bp, Homo sapien
tgacagtttaagtttatcaagtgct

SEQ ID NO: 3586334 - DNA, 25 bp, Homo sapien
cttgttttagggaggcagatatttt

SEQ ID NO: 3586335 - DNA, 25 bp, Homo sapien
cctgatgacagtttaagtttatcaa

SEQ ID NO: 3586336 - DNA, 25 bp, Homo sapien
taccattattaatataccaaaatat

SEQ ID NO: 3586337 - DNA, 25 bp, Homo sapien
tgaaaccttattaccattattaata

SEQ ID NO: 3586338 - DNA, 25 bp, Homo sapien
taccaaaatatttctttgtactcca

SEQ ID NO: 3586339 - DNA, 25 bp, Homo sapien
caaaatatttctttgtactccaaat

SEQ ID NO: 3586340 - DNA, 25 bp, Homo sapien
tagctcccctaatctccacatggtg

SEQ ID NO: 3586341 - DNA, 25 bp, Homo sapien
taatcagttgcactaacgagaaagg

SEQ ID NO: 3586342 - DNA, 25 bp, Homo sapien
tcccatgcccaagctcaatgctgag

SEQ ID NO: 3586343 - DNA, 25 bp, Homo sapien
tgagtaatgctgaggaagggaccat

SEQ ID NO: 3586344 - DNA, 25 bp, Homo sapien
gtaaaaactgatatcctcataattg

SEQ ID NO: 3586345 - DNA, 25 bp, Homo sapien
atacagtcatagtagcatacaccta

SEQ ID NO: 3586346 - DNA, 25 bp, Homo sapien
aaaagtcaatctcaagatcctcctg

SEQ ID NO: 3586347 - DNA, 25 bp, Homo sapien
catactattatagtacagactgtat

SEQ ID NO: 3586348 - DNA, 25 bp, Homo sapien
caaatggttcaaagcttggtggcct

SEQ ID NO: 3586349 - DNA, 25 bp, Homo sapien
gaaaaatgtgacttccctaccctga

SEQ ID NO: 3586350 - DNA, 25 bp, Homo sapien
taaaggaaagtaccatgcacaagtg

SEQ ID NO: 3586351 - DNA, 25 bp, Homo sapien
caagtgctactattcaagtgtgaca

SEQ ID NO: 3586352 - DNA, 25 bp, Homo sapien
ttgggttttaattcacatagctcct

SEQ ID NO: 3586353 - DNA, 25 bp, Homo sapien
tttaattcacatagctccttcttct

SEQ ID NO: 3586354 - DNA, 25 bp, Homo sapien
gttttaattcacatagctccttctt

SEQ ID NO: 3586355 - DNA, 25 bp, Homo sapien
gggttttaattcacatagctccttc

SEQ ID NO: 3586356 - DNA, 25 bp, Homo sapien
ttcttctcttacagcaagaccaacc

SEQ ID NO: 3586357 - DNA, 25 bp, Homo sapien
aaaatcagttgttcttctcttacag

SEQ ID NO: 3586358 - DNA, 25 bp, Homo sapien
agaaaaatcagttgttcttctctta

SEQ ID NO: 3586359 - DNA, 25 bp, Homo sapien
aatcagaaaaatcagttgttcttct

SEQ ID NO: 3586360 - DNA, 25 bp, Homo sapien
caactagtatccctgtattgatgta

SEQ ID NO: 3586361 - DNA, 25 bp, Homo sapien
ttggtcaactagtatccctgtattg

SEQ ID NO: 3586362 - DNA, 25 bp, Homo sapien
ccctgtattgatgtatacgcatttt

SEQ ID NO: 3586363 - DNA, 25 bp, Homo sapien
gtatccctgtattgatgtatacgca

SEQ ID NO: 3586364 - DNA, 25 bp, Homo sapien
agaccggaacacctgggtggtatgt

SEQ ID NO: 3586365 - DNA, 25 bp, Homo sapien
tgcatcgtgaaagaccggaacacct

SEQ ID NO: 3586366 - DNA, 25 bp, Homo sapien
cgtgaaagaccggaacacctgggtg

SEQ ID NO: 3586367 - DNA, 25 bp, Homo sapien
ctttaatgcatcgtgaaagaccgga

SEQ ID NO: 3586368 - DNA, 25 bp, Homo sapien
cggctgcaggagatccgcggacacc

SEQ ID NO: 3586369 - DNA, 25 bp, Homo sapien
ggacggctgcaggagatccgcggac

SEQ ID NO: 3586370 - DNA, 25 bp, Homo sapien
acggctgcaggagatccgcggacac

SEQ ID NO: 3586371 - DNA, 25 bp, Homo sapien
gctgcaggagatccgcggacaccct

SEQ ID NO: 3586372 - DNA, 25 bp, Homo sapien
tggtctcaggatcgaagcgctgacc

SEQ ID NO: 3586373 - DNA, 25 bp, Homo sapien
agccccggttgtagcacagcaaggc

SEQ ID NO: 3586374 - DNA, 25 bp, Homo sapien
cgtcggaattggtctcaggatcgaa

SEQ ID NO: 3586375 - DNA, 25 bp, Homo sapien
gctgaccgcagccccggttgtagca

SEQ ID NO: 3586376 - DNA, 25 bp, Homo sapien
cgttgcgtttcaggaaccttcgcga

SEQ ID NO: 3586377 - DNA, 25 bp, Homo sapien
ccgggccacgataggtcggactaca

SEQ ID NO: 3586378 - DNA, 25 bp, Homo sapien
cagacaacagcggaggagaaatttc

SEQ ID NO: 3586379 - DNA, 25 bp, Homo sapien
ttgggtatctcctgcagcaaagtgg

SEQ ID NO: 3586380 - DNA, 25 bp, Homo sapien
ctctgatctaagttggtcagggtcc

SEQ ID NO: 3586381 - DNA, 25 bp, Homo sapien
agggtcctcccctggagtttgcagg

SEQ ID NO: 3586382 - DNA, 25 bp, Homo sapien
tgatctaagttggtcagggtcctcc

SEQ ID NO: 3586383 - DNA, 25 bp, Homo sapien
cagggtcctcccctggagtttgcag

SEQ ID NO: 3586384 - DNA, 25 bp, Homo sapien
tgtgacatctgttgtagaaacctca

SEQ ID NO: 3586385 - DNA, 25 bp, Homo sapien
tccctagccactatgcgtgaatgcg

SEQ ID NO: 3586386 - DNA, 25 bp, Homo sapien
gaattcgcaagctggctaaccagtg

SEQ ID NO: 3586387 - DNA, 25 bp, Homo sapien
tgaatgcgtctccatccacgttggc

SEQ ID NO: 3586388 - DNA, 25 bp, Homo sapien
acttcacccaaggggagcataatta

SEQ ID NO: 3586389 - DNA, 25 bp, Homo sapien
cacttcacccaaggggagcataatt

SEQ ID NO: 3586390 - DNA, 25 bp, Homo sapien
gctacttcaatttaagcgttcagaa

SEQ ID NO: 3586391 - DNA, 25 bp, Homo sapien
tgaaaacctttgattggttctctaa

SEQ ID NO: 3586392 - DNA, 25 bp, Homo sapien
tctccccaactaatactgtaggtgg

SEQ ID NO: 3586393 - DNA, 25 bp, Homo sapien
cttttagctattttataaggtgcat

SEQ ID NO: 3586394 - DNA, 25 bp, Homo sapien
agggtccaaccaacagtaggccact

SEQ ID NO: 3586395 - DNA, 25 bp, Homo sapien
tcctggttggagtttttgtactcgc

SEQ ID NO: 3586396 - DNA, 25 bp, Homo sapien
tactcgcaaacaaagggtccaacca

SEQ ID NO: 3586397 - DNA, 25 bp, Homo sapien
caaccaacagtaggccacttaaggt

SEQ ID NO: 3586398 - DNA, 25 bp, Homo sapien
tttctctccttgacctcctcctcca

SEQ ID NO: 3586399 - DNA, 25 bp, Homo sapien
tttttctctccttgacctcctcctc

SEQ ID NO: 3586400 - DNA, 25 bp, Homo sapien
ttctctccttgacctcctcctccat

SEQ ID NO: 3586401 - DNA, 25 bp, Homo sapien
ttttctctccttgacctcctcctcc

SEQ ID NO: 3586402 - DNA, 25 bp, Homo sapien
acttaaatttgtgtcggcagcgtat

SEQ ID NO: 3586403 - DNA, 25 bp, Homo sapien
ttatccacttaaatttgtgtcggca

SEQ ID NO: 3586404 - DNA, 25 bp, Homo sapien
tccacttaaatttgtgtcggcagcg

SEQ ID NO: 3586405 - DNA, 25 bp, Homo sapien
cacttaaatttgtgtcggcagcgta

SEQ ID NO: 3586406 - DNA, 25 bp, Homo sapien
tccacgtctgtactttttcatcatc

SEQ ID NO: 3586407 - DNA, 25 bp, Homo sapien
tgagaattaactgaagtgcagcatg

SEQ ID NO: 3586408 - DNA, 25 bp, Homo sapien
gaagacactagctgagaattaactg

SEQ ID NO: 3586409 - DNA, 25 bp, Homo sapien
tttgcagctgcgagattatcataag

SEQ ID NO: 3586410 - DNA, 25 bp, Homo sapien
aagagaagacactagctgagaatta

SEQ ID NO: 3586411 - DNA, 25 bp, Homo sapien
agaatcctgtaccaagctggcttct

SEQ ID NO: 3586412 - DNA, 25 bp, Homo sapien
aaatttgccactctcagaacccaca

SEQ ID NO: 3586413 - DNA, 25 bp, Homo sapien
atttgccactctcagaacccacaag

SEQ ID NO: 3586414 - DNA, 25 bp, Homo sapien
gctggcttcttctataacttctgaa

SEQ ID NO: 3586415 - DNA, 25 bp, Homo sapien
ctttttcagtgcctgtctcttccat

SEQ ID NO: 3586416 - DNA, 25 bp, Homo sapien
acaagcttcatgaacaactctccag

SEQ ID NO: 3586417 - DNA, 25 bp, Homo sapien
aacaagcttcatgaacaactctcca

SEQ ID NO: 3586418 - DNA, 25 bp, Homo sapien
caagcttcatgaacaactctccaga

SEQ ID NO: 3586419 - DNA, 25 bp, Homo sapien
tctaacaagcttcatgaacaactct

SEQ ID NO: 3586420 - DNA, 25 bp, Homo sapien
ttattttcggtcattcctagttgcc

SEQ ID NO: 3586421 - DNA, 25 bp, Homo sapien
tattttcggtcattcctagttgcca

SEQ ID NO: 3586422 - DNA, 25 bp, Homo sapien
attttcggtcattcctagttgccac

SEQ ID NO: 3586423 - DNA, 25 bp, Homo sapien
caaggcaagtgcttatcgagtttgc

SEQ ID NO: 3586424 - DNA, 25 bp, Homo sapien
ctgcaaggcaagtgcttatcgagtt

SEQ ID NO: 3586425 - DNA, 25 bp, Homo sapien
cttatcgagtttgctggccaatttc

SEQ ID NO: 3586426 - DNA, 25 bp, Homo sapien
caagtgcttatcgagtttgctggcc

SEQ ID NO: 3586427 - DNA, 25 bp, Homo sapien
tgtttgctgctagatgtcactatag

SEQ ID NO: 3586428 - DNA, 25 bp, Homo sapien
tcatcatgtcgaatatgtttgctgc

SEQ ID NO: 3586429 - DNA, 25 bp, Homo sapien
tgtccagcatatgattcacaaatgg

SEQ ID NO: 3586430 - DNA, 25 bp, Homo sapien
cacggaatagtttcttggactgtaa

SEQ ID NO: 3586431 - DNA, 25 bp, Homo sapien
ctattaagaaaaaatcatgatacat

SEQ ID NO: 3586432 - DNA, 25 bp, Homo sapien
ggcaagaatttcttatccctgaaat

SEQ ID NO: 3586433 - DNA, 25 bp, Homo sapien
aaagcacatggccatttttctacat

SEQ ID NO: 3586434 - DNA, 25 bp, Homo sapien
ttgctctgggaactcactcacgcta

SEQ ID NO: 3586435 - DNA, 25 bp, Homo sapien
tggagaccaatcctgctggaccatg

SEQ ID NO: 3586436 - DNA, 25 bp, Homo sapien
tgtttggtatacaagtccacaggag

SEQ ID NO: 3586437 - DNA, 25 bp, Homo sapien
taaactgggttttgagagcatactg

SEQ ID NO: 3586438 - DNA, 25 bp, Homo sapien
tggtctcaggtccacactgttctga

SEQ ID NO: 3586439 - DNA, 25 bp, Homo sapien
gagcatactgtgaagtccaaacttg

SEQ ID NO: 3586440 - DNA, 25 bp, Homo sapien
ctttcagccttaggcccattgcagc

SEQ ID NO: 3586441 - DNA, 25 bp, Homo sapien
ggcccattgcagccactatttcttc

SEQ ID NO: 3586442 - DNA, 25 bp, Homo sapien
ccattgcagccactatttcttcttt

SEQ ID NO: 3586443 - DNA, 25 bp, Homo sapien
tctttcagccttaggcccattgcag

SEQ ID NO: 3586444 - DNA, 25 bp, Homo sapien
cagtgtgaatgctggccccttgcat

SEQ ID NO: 3586445 - DNA, 25 bp, Homo sapien
gaatgctggccccttgcattgcctt

SEQ ID NO: 3586446 - DNA, 25 bp, Homo sapien
ctcttgtttcttggtcaacagtgtg

SEQ ID NO: 3586447 - DNA, 25 bp, Homo sapien
gcattgccttccctttaggcctttc

SEQ ID NO: 3586448 - DNA, 25 bp, Homo sapien
gctcagacacagtctcagagcttta

SEQ ID NO: 3586449 - DNA, 25 bp, Homo sapien
tctctaactttaaagctcagacaca

SEQ ID NO: 3586450 - DNA, 25 bp, Homo sapien
gacacagtctcagagctttaatcaa

SEQ ID NO: 3586451 - DNA, 25 bp, Homo sapien
actttaaagctcagacacagtctca

SEQ ID NO: 3586452 - DNA, 25 bp, Homo sapien
ggacaaggtagttctgtgctcagtg

SEQ ID NO: 3586453 - DNA, 25 bp, Homo sapien
acaaggtagttctgtgctcagtgga

SEQ ID NO: 3586454 - DNA, 25 bp, Homo sapien
aaggtagttctgtgctcagtggaat

SEQ ID NO: 3586455 - DNA, 25 bp, Homo sapien
ggtagttctgtgctcagtggaataa

SEQ ID NO: 3586456 - DNA, 25 bp, Homo sapien
gttgaatcacccacatttccttgga

SEQ ID NO: 3586457 - DNA, 25 bp, Homo sapien
gtctggcaagataccaactggtgct

SEQ ID NO: 3586458 - DNA, 25 bp, Homo sapien
tggtgctaacttgatttccccggcc

SEQ ID NO: 3586459 - DNA, 25 bp, Homo sapien
ggttgctgtgtccatagagaagtga

SEQ ID NO: 3586460 - DNA, 25 bp, Homo sapien
tttgaaccatagacagtaaggaccc

SEQ ID NO: 3586461 - DNA, 25 bp, Homo sapien
aacctctaacttggtcactgtgtcc

SEQ ID NO: 3586462 - DNA, 25 bp, Homo sapien
tctcataactgatagactgtcctgt

SEQ ID NO: 3586463 - DNA, 25 bp, Homo sapien
gtgttcagaccataaaaagtagagg

SEQ ID NO: 3586464 - DNA, 25 bp, Homo sapien
tggtttacatttctccttcttgatc

SEQ ID NO: 3586465 - DNA, 25 bp, Homo sapien
gatctccactggaataactgctagt

SEQ ID NO: 3586466 - DNA, 25 bp, Homo sapien
tccttcttgatctccactggaataa

SEQ ID NO: 3586467 - DNA, 25 bp, Homo sapien
tccactggaataactgctagttcct

SEQ ID NO: 3586468 - DNA, 25 bp, Homo sapien
tagagaccaggtgttctaagtacaa

SEQ ID NO: 3586469 - DNA, 25 bp, Homo sapien
ggtgactttagagaccaggtgttct

SEQ ID NO: 3586470 - DNA, 25 bp, Homo sapien
tctttgctctggtgactttagagac

SEQ ID NO: 3586471 - DNA, 25 bp, Homo sapien
caactggctccaaaatcttctttgc

SEQ ID NO: 3586472 - DNA, 25 bp, Homo sapien
caaggttgtctctgcatgggaagcc

SEQ ID NO: 3586473 - DNA, 25 bp, Homo sapien
tacacaaggttgtctctgcatggga

SEQ ID NO: 3586474 - DNA, 25 bp, Homo sapien
ttgtctctgcatgggaagccttttc

SEQ ID NO: 3586475 - DNA, 25 bp, Homo sapien
cttgtacacaaggttgtctctgcat

SEQ ID NO: 3586476 - DNA, 25 bp, Homo sapien
taaaaggagtaatcacaaacaggag

SEQ ID NO: 3586477 - DNA, 25 bp, Homo sapien
aaagctgacgttgattggataattg

SEQ ID NO: 3586478 - DNA, 25 bp, Homo sapien
caggagaaactgacgaaaactgttg

SEQ ID NO: 3586479 - DNA, 25 bp, Homo sapien
aacataagccgccattgctgaaagc

SEQ ID NO: 3586480 - DNA, 25 bp, Homo sapien
gatgtgttgcaaggtggctttccct

SEQ ID NO: 3586481 - DNA, 25 bp, Homo sapien
gaatactggccctaggtcaaagcca

SEQ ID NO: 3586482 - DNA, 25 bp, Homo sapien
caaagccagaggctgcaacttgaca

SEQ ID NO: 3586483 - DNA, 25 bp, Homo sapien
caacttgacaagatgtgttgcaagg

SEQ ID NO: 3586484 - DNA, 25 bp, Homo sapien
atctgagtccaaaagtccagtatcc

SEQ ID NO: 3586485 - DNA, 25 bp, Homo sapien
tcatctgagtccaaaagtccagtat

SEQ ID NO: 3586486 - DNA, 25 bp, Homo sapien
ttcatctgagtccaaaagtccagta

SEQ ID NO: 3586487 - DNA, 25 bp, Homo sapien
gttcatctgagtccaaaagtccagt

SEQ ID NO: 3586488 - DNA, 25 bp, Homo sapien
tgtgctttgcttcagttgctgattt

SEQ ID NO: 3586489 - DNA, 25 bp, Homo sapien
tatgaaataaccttgtctcccactg

SEQ ID NO: 3586490 - DNA, 25 bp, Homo sapien
ctccatctttatgaaataaccttgt

SEQ ID NO: 3586491 - DNA, 25 bp, Homo sapien
tgctcttttattcaagcctgtgctt

SEQ ID NO: 3586492 - DNA, 25 bp, Homo sapien
tatctgcaaaggatgtattttccca

SEQ ID NO: 3586493 - DNA, 25 bp, Homo sapien
cttggtatctgcaaaggatgtattt

SEQ ID NO: 3586494 - DNA, 25 bp, Homo sapien
gctgagaggtatgatttcacaacca

SEQ ID NO: 3586495 - DNA, 25 bp, Homo sapien
ggtcagccacgaatgttacagtatt

SEQ ID NO: 3586496 - DNA, 25 bp, Homo sapien
acccaggaccatgtgaggatagacc

SEQ ID NO: 3586497 - DNA, 25 bp, Homo sapien
tgatttggcccagacatgagcagtg

SEQ ID NO: 3586498 - DNA, 25 bp, Homo sapien
tctagtatctggatgttttagacta

SEQ ID NO: 3586499 - DNA, 25 bp, Homo sapien
aattacctacaaatcttgattgaac

SEQ ID NO: 3586500 - DNA, 25 bp, Homo sapien
tctctagtatctggatgttttagac

SEQ ID NO: 3586501 - DNA, 25 bp, Homo sapien
tgctgctgatgtaattacctacaaa

SEQ ID NO: 3586502 - DNA, 25 bp, Homo sapien
gactgaatgattgattttgccacaa

SEQ ID NO: 3586503 - DNA, 25 bp, Homo sapien
gattttgccacaaggcacgtccttg

SEQ ID NO: 3586504 - DNA, 25 bp, Homo sapien
actgaatgattgattttgccacaag

SEQ ID NO: 3586505 - DNA, 25 bp, Homo sapien
ttttgccacaaggcacgtccttggc

SEQ ID NO: 3586506 - DNA, 25 bp, Homo sapien
tatgatactcgacactcagaatgtc

SEQ ID NO: 3586507 - DNA, 25 bp, Homo sapien
tgtcttccacgattagaacataaag

SEQ ID NO: 3586508 - DNA, 25 bp, Homo sapien
gcaataatggcacaatattcatttc

SEQ ID NO: 3586509 - DNA, 25 bp, Homo sapien
tcatttctatagcagccctacagca

SEQ ID NO: 3586510 - DNA, 25 bp, Homo sapien
caagtaagtctgatgcaagctgttc

SEQ ID NO: 3586511 - DNA, 25 bp, Homo sapien
ctgatgcaagctgttctacaattac

SEQ ID NO: 3586512 - DNA, 25 bp, Homo sapien
tatctgcaagtaagtctgatgcaag

SEQ ID NO: 3586513 - DNA, 25 bp, Homo sapien
tatcttattgagtgcaggtacttct

SEQ ID NO: 3586514 - DNA, 25 bp, Homo sapien
ttttccatacattgcaaactccaag

SEQ ID NO: 3586515 - DNA, 25 bp, Homo sapien
caaggcaagacttctaaagctacca

SEQ ID NO: 3586516 - DNA, 25 bp, Homo sapien
tgtctcataatctatcaaggcaaga

SEQ ID NO: 3586517 - DNA, 25 bp, Homo sapien
tcctcaatagtagtcattgtctcat

SEQ ID NO: 3586518 - DNA, 25 bp, Homo sapien
tataacgtttctaagtcaatctctc

SEQ ID NO: 3586519 - DNA, 25 bp, Homo sapien
aaggaagtgcttaaattgatcagat

SEQ ID NO: 3586520 - DNA, 25 bp, Homo sapien
aggaagtgcttaaattgatcagatc

SEQ ID NO: 3586521 - DNA, 25 bp, Homo sapien
tcagtcatataacgtttctaagtca

SEQ ID NO: 3586522 - DNA, 25 bp, Homo sapien
ctggtaagctgtgagttatgtccag

SEQ ID NO: 3586523 - DNA, 25 bp, Homo sapien
tgcttcaacatagctccagggtgta

SEQ ID NO: 3586524 - DNA, 25 bp, Homo sapien
tgtttcctgtatgtatgacacctca

SEQ ID NO: 3586525 - DNA, 25 bp, Homo sapien
tagctacctcaatagcaaccagctg

SEQ ID NO: 3586526 - DNA, 25 bp, Homo sapien
gaatcctcaattagcgaaaaagcct

SEQ ID NO: 3586527 - DNA, 25 bp, Homo sapien
gaacctagaaatccaagtcacaggg

SEQ ID NO: 3586528 - DNA, 25 bp, Homo sapien
tctccagcatggatcaagggaagcc

SEQ ID NO: 3586529 - DNA, 25 bp, Homo sapien
gaagagccttgtgtgcattcccagt

SEQ ID NO: 3586530 - DNA, 25 bp, Homo sapien
gaattctaccaactaactcaggcag

SEQ ID NO: 3586531 - DNA, 25 bp, Homo sapien
attcttcagacaccgatcgacaggg

SEQ ID NO: 3586532 - DNA, 25 bp, Homo sapien
tcagacaggatcagttcctccttgc

SEQ ID NO: 3586533 - DNA, 25 bp, Homo sapien
cagcatgccaacagaagcgtcaagt

SEQ ID NO: 3586534 - DNA, 25 bp, Homo sapien
aaagttctcagggtcagagactcca

SEQ ID NO: 3586535 - DNA, 25 bp, Homo sapien
tttgaatatctcggatatagcaatg

SEQ ID NO: 3586536 - DNA, 25 bp, Homo sapien
tgaatatctcggatatagcaatggg

SEQ ID NO: 3586537 - DNA, 25 bp, Homo sapien
ttgaatatctcggatatagcaatgg

SEQ ID NO: 3586538 - DNA, 25 bp, Homo sapien
tgaatatttcgggtgtagcaatggg

SEQ ID NO: 3586539 - DNA, 25 bp, Homo sapien
ctttgaatatttcgggtgtagcaat

SEQ ID NO: 3586540 - DNA, 25 bp, Homo sapien
ttgaatatttcgggtgtagcaatgg

SEQ ID NO: 3586541 - DNA, 25 bp, Homo sapien
ccctttgaatatttcgggtgtagca

SEQ ID NO: 3586542 - DNA, 25 bp, Homo sapien
tcctgtttcttatatgctgagctcc

SEQ ID NO: 3586543 - DNA, 25 bp, Homo sapien
taaatctaggtcataaacgttcctg

SEQ ID NO: 3586544 - DNA, 25 bp, Homo sapien
ccaatagtcacatatagtgctgtct

SEQ ID NO: 3586545 - DNA, 25 bp, Homo sapien
agccaggaagatatccaaaagaaca

SEQ ID NO: 3586546 - DNA, 25 bp, Homo sapien
gggttcccagcagaccatagtttct

SEQ ID NO: 3586547 - DNA, 25 bp, Homo sapien
tgtctgtctatgttccacggtctga

SEQ ID NO: 3586548 - DNA, 25 bp, Homo sapien
cacggtctgagcaacaggatcatta

SEQ ID NO: 3586549 - DNA, 25 bp, Homo sapien
tggaagcaccgagctccaggatgat

SEQ ID NO: 3586550 - DNA, 25 bp, Homo sapien
attcctccaacatcctctctagggt

SEQ ID NO: 3586551 - DNA, 25 bp, Homo sapien
ttcctccaacatcctctctagggtt

SEQ ID NO: 3586552 - DNA, 25 bp, Homo sapien
tctagggttgtcttctgataaagac

SEQ ID NO: 3586553 - DNA, 25 bp, Homo sapien
tcctctctagggttgtcttctgata

SEQ ID NO: 3586554 - DNA, 25 bp, Homo sapien
cttttacatggtaatacttatttgg

SEQ ID NO: 3586555 - DNA, 25 bp, Homo sapien
tcttttacatggtaatacttatttg

SEQ ID NO: 3586556 - DNA, 25 bp, Homo sapien
cagggtacagacatggtgaaaactt

SEQ ID NO: 3586557 - DNA, 25 bp, Homo sapien
cagagaagtcgagattcaggatatc

SEQ ID NO: 3586558 - DNA, 25 bp, Homo sapien
gcttcttcagagaagtcgagattca

SEQ ID NO: 3586559 - DNA, 25 bp, Homo sapien
tcagggtacagacatggtgaaaact

SEQ ID NO: 3586560 - DNA, 25 bp, Homo sapien
gctctttagagtcctcattccggga

SEQ ID NO: 3586561 - DNA, 25 bp, Homo sapien
tcaggcatagagagtgtagggtagc

SEQ ID NO: 3586562 - DNA, 25 bp, Homo sapien
agtgtagggtagctctttagagtcc

SEQ ID NO: 3586563 - DNA, 25 bp, Homo sapien
gcatagagagtgtagggtagctctt

SEQ ID NO: 3586564 - DNA, 25 bp, Homo sapien
gtgggcaccaatattcaacatacta

SEQ ID NO: 3586565 - DNA, 25 bp, Homo sapien
tttacaagcaaattctgagagattt

SEQ ID NO: 3586566 - DNA, 25 bp, Homo sapien
aaatcctttacaagcaaattctgag

SEQ ID NO: 3586567 - DNA, 25 bp, Homo sapien
tgggcaccaatattcaacatactaa

SEQ ID NO: 3586568 - DNA, 25 bp, Homo sapien
tcccatatctggttgagggctcctg

SEQ ID NO: 3586569 - DNA, 25 bp, Homo sapien
gagggctcctgcaacacaaatggaa

SEQ ID NO: 3586570 - DNA, 25 bp, Homo sapien
aaattccagtgtagtcccatatctg

SEQ ID NO: 3586571 - DNA, 25 bp, Homo sapien
aatgcttgctataatcgagatataa

SEQ ID NO: 3586572 - DNA, 25 bp, Homo sapien
agtaaacggttcccgttgactgcat

SEQ ID NO: 3586573 - DNA, 25 bp, Homo sapien
tagtaaacggttcccgttgactgca

SEQ ID NO: 3586574 - DNA, 25 bp, Homo sapien
cagacaggcatattaaagctacata

SEQ ID NO: 3586575 - DNA, 25 bp, Homo sapien
ggctagaacctatttaagactcatt

SEQ ID NO: 3586576 - DNA, 25 bp, Homo sapien
tataaaggagatatgaccagctacc

SEQ ID NO: 3586577 - DNA, 25 bp, Homo sapien
taaaaaatctatcgtcttcacgtgc

SEQ ID NO: 3586578 - DNA, 25 bp, Homo sapien
gtgaaattaccaagatctcatgggt

SEQ ID NO: 3586579 - DNA, 25 bp, Homo sapien
tcagacatggtggaagacatctctt

SEQ ID NO: 3586580 - DNA, 25 bp, Homo sapien
gcaaaggtcttgtcgtactctgaat

SEQ ID NO: 3586581 - DNA, 25 bp, Homo sapien
gctctgtggcactaaaatggcttag

SEQ ID NO: 3586582 - DNA, 25 bp, Homo sapien
tctccagttatcatcaccactaaag

SEQ ID NO: 3586583 - DNA, 25 bp, Homo sapien
tcacaagtccactggcacctcacaa

SEQ ID NO: 3586584 - DNA, 25 bp, Homo sapien
caccactaaaggtgatacttggatc

SEQ ID NO: 3586585 - DNA, 25 bp, Homo sapien
ggtgatacttggatctccatctctc

SEQ ID NO: 3586586 - DNA, 25 bp, Homo sapien
tgagctccagatcttttatggccat

SEQ ID NO: 3586587 - DNA, 25 bp, Homo sapien
cttgagctccagatcttttatggcc

SEQ ID NO: 3586588 - DNA, 25 bp, Homo sapien
ttgagctccagatcttttatggcca

SEQ ID NO: 3586589 - DNA, 25 bp, Homo sapien
tccatggcttgtatgactgtgcgcc

SEQ ID NO: 3586590 - DNA, 25 bp, Homo sapien
ttgtatgactgtgcgccttcagtgg

SEQ ID NO: 3586591 - DNA, 25 bp, Homo sapien
agtgctgcgggtgctgccgctccca

SEQ ID NO: 3586592 - DNA, 25 bp, Homo sapien
gaattccatggcttgtatgactgtg

SEQ ID NO: 3586593 - DNA, 25 bp, Homo sapien
ccgaagtatctcataggtggattgc

SEQ ID NO: 3586594 - DNA, 25 bp, Homo sapien
agttagtaaactccgaagtatctca

SEQ ID NO: 3586595 - DNA, 25 bp, Homo sapien
ttgagcaccagaagttagtaaactc

SEQ ID NO: 3586596 - DNA, 25 bp, Homo sapien
aaaagcaacatctggttgagcacca

SEQ ID NO: 3586597 - DNA, 25 bp, Homo sapien
gcacaggttcttgccttaacatcac

SEQ ID NO: 3586598 - DNA, 25 bp, Homo sapien
tgatacagtgtttctcatccttatg

SEQ ID NO: 3586599 - DNA, 25 bp, Homo sapien
aggaaaacacaaatgtataggagga

SEQ ID NO: 3586600 - DNA, 25 bp, Homo sapien
catccttatgatcaggcacaggttc

SEQ ID NO: 3586601 - DNA, 25 bp, Homo sapien
tagctcaaagtccaccaactctgtg

SEQ ID NO: 3586602 - DNA, 25 bp, Homo sapien
ttatagctcaaagtccaccaactct

SEQ ID NO: 3586603 - DNA, 25 bp, Homo sapien
tatagctcaaagtccaccaactctg

SEQ ID NO: 3586604 - DNA, 25 bp, Homo sapien
gcttatagctcaaagtccaccaact

SEQ ID NO: 3586605 - DNA, 25 bp, Homo sapien
cttcaccttgattggtaattctgca

SEQ ID NO: 3586606 - DNA, 25 bp, Homo sapien
tcttcaccttgattggtaattctgc

SEQ ID NO: 3586607 - DNA, 25 bp, Homo sapien
gaaatgcccagagctaggctctgca

SEQ ID NO: 3586608 - DNA, 25 bp, Homo sapien
agcctcggagaagtgaggaaatgcc

SEQ ID NO: 3586609 - DNA, 25 bp, Homo sapien
caacatggccctgaatcagcctgca

SEQ ID NO: 3586610 - DNA, 25 bp, Homo sapien
aacatggccctgaatcagcctgcac

SEQ ID NO: 3586611 - DNA, 25 bp, Homo sapien
gaaaccatcagttgtatttgcaggt

SEQ ID NO: 3586612 - DNA, 25 bp, Homo sapien
tttccttcatgatagaaccaaactg

SEQ ID NO: 3586613 - DNA, 25 bp, Homo sapien
ccacagttgagggaagggcaaccct

SEQ ID NO: 3586614 - DNA, 25 bp, Homo sapien
gaaattgtagtggtataaagaagct

SEQ ID NO: 3586615 - DNA, 25 bp, Homo sapien
tggagaagacaaagaacacactgtc

SEQ ID NO: 3586616 - DNA, 25 bp, Homo sapien
ctggagaagacaaagaacacactgt

SEQ ID NO: 3586617 - DNA, 25 bp, Homo sapien
gagaagacaaagaacacactgtctt

SEQ ID NO: 3586618 - DNA, 25 bp, Homo sapien
aagacaaagaacacactgtcttcat

SEQ ID NO: 3586619 - DNA, 25 bp, Homo sapien
ccagcttctctactggacggaccta

SEQ ID NO: 3586620 - DNA, 25 bp, Homo sapien
cttctctactggacggacctacaat

SEQ ID NO: 3586621 - DNA, 25 bp, Homo sapien
tccaccagcttctctactggacgga

SEQ ID NO: 3586622 - DNA, 25 bp, Homo sapien
tactggacggacctacaatttccat

SEQ ID NO: 3586623 - DNA, 25 bp, Homo sapien
ctaattatcgatgatcatgttgaag

SEQ ID NO: 3586624 - DNA, 25 bp, Homo sapien
taattatcgatgatcatgttgaagt

SEQ ID NO: 3586625 - DNA, 25 bp, Homo sapien
tctagtcaatggctctctcagagac

SEQ ID NO: 3586626 - DNA, 25 bp, Homo sapien
acccaagccaatgattagggcccaa

SEQ ID NO: 3586627 - DNA, 25 bp, Homo sapien
ctttgcacccaagccaatgattagg

SEQ ID NO: 3586628 - DNA, 25 bp, Homo sapien
tagtcaatggctctctcagagaccc

SEQ ID NO: 3586629 - DNA, 25 bp, Homo sapien
agaccttgtggactcatcccttgag

SEQ ID NO: 3586630 - DNA, 25 bp, Homo sapien
gctgcagaccttgtggactcatccc

SEQ ID NO: 3586631 - DNA, 25 bp, Homo sapien
tagctgcagaccttgtggactcatc

SEQ ID NO: 3586632 - DNA, 25 bp, Homo sapien
tgcagaccttgtggactcatccctt

SEQ ID NO: 3586633 - DNA, 25 bp, Homo sapien
tatgtctactaaaaccttcagtgag

SEQ ID NO: 3586634 - DNA, 25 bp, Homo sapien
gggaaacaatgcttattatgtctac

SEQ ID NO: 3586635 - DNA, 25 bp, Homo sapien
cagtgagctccccatggctatagga

SEQ ID NO: 3586636 - DNA, 25 bp, Homo sapien
cacaccagaataatcttccagggaa

SEQ ID NO: 3586637 - DNA, 25 bp, Homo sapien
atgtagtctgcaaagtaataagtgc

SEQ ID NO: 3586638 - DNA, 25 bp, Homo sapien
tgagtcccttctttaccagaactac

SEQ ID NO: 3586639 - DNA, 25 bp, Homo sapien
tatttggaatcaatgtgagggtctg

SEQ ID NO: 3586640 - DNA, 25 bp, Homo sapien
tgtaacactaggcttctgagtccct

SEQ ID NO: 3586641 - DNA, 25 bp, Homo sapien
ggcaggccagtcttggctggacacc

SEQ ID NO: 3586642 - DNA, 25 bp, Homo sapien
aggcaggccagtcttggctggacac

SEQ ID NO: 3586643 - DNA, 25 bp, Homo sapien
cttcctcaggcaggccagtcttggc

SEQ ID NO: 3586644 - DNA, 25 bp, Homo sapien
gaactccctagatagctctttgtcc

SEQ ID NO: 3586645 - DNA, 25 bp, Homo sapien
ttgaactccctagatagctctttgt

SEQ ID NO: 3586646 - DNA, 25 bp, Homo sapien
tgaactccctagatagctctttgtc

SEQ ID NO: 3586647 - DNA, 25 bp, Homo sapien
actccctagatagctctttgtccat

SEQ ID NO: 3586648 - DNA, 25 bp, Homo sapien
caatgagcatggaactgacactttt

SEQ ID NO: 3586649 - DNA, 25 bp, Homo sapien
actctgcttgtagcaatgccgtgga

SEQ ID NO: 3586650 - DNA, 25 bp, Homo sapien
ctaatctccaatgagcatggaactg

SEQ ID NO: 3586651 - DNA, 25 bp, Homo sapien
ttttcacaatcactctgcttgtagc

SEQ ID NO: 3586652 - DNA, 25 bp, Homo sapien
acacctctgggtgagttccaactgc

SEQ ID NO: 3586653 - DNA, 25 bp, Homo sapien
gtacacctctgggtgagttccaact

SEQ ID NO: 3586654 - DNA, 25 bp, Homo sapien
caggtacacctctgggtgagttcca

SEQ ID NO: 3586655 - DNA, 25 bp, Homo sapien
accaggtacacctctgggtgagttc

SEQ ID NO: 3586656 - DNA, 25 bp, Homo sapien
gtgactaacacagcagctaggtgca

SEQ ID NO: 3586657 - DNA, 25 bp, Homo sapien
tgcaagccactggtgactaacacag

SEQ ID NO: 3586658 - DNA, 25 bp, Homo sapien
gggcagctgcaagccactggtgact

SEQ ID NO: 3586659 - DNA, 25 bp, Homo sapien
gactaacacagcagctaggtgcagg

SEQ ID NO: 3586660 - DNA, 25 bp, Homo sapien
cctctataatatgtcagcattttct

SEQ ID NO: 3586661 - DNA, 25 bp, Homo sapien
gcctctataatatgtcagcattttc

SEQ ID NO: 3586662 - DNA, 25 bp, Homo sapien
agcctctataatatgtcagcatttt

SEQ ID NO: 3586663 - DNA, 25 bp, Homo sapien
ctctataatatgtcagcattttctc

SEQ ID NO: 3586664 - DNA, 25 bp, Homo sapien
tggtgaatacctaagtctgactatg

SEQ ID NO: 3586665 - DNA, 25 bp, Homo sapien
taagagtctggtatcttgccaggag

SEQ ID NO: 3586666 - DNA, 25 bp, Homo sapien
tgatgagactgtcggctgccagact

SEQ ID NO: 3586667 - DNA, 25 bp, Homo sapien
gacagtggtactagacagattggaa

SEQ ID NO: 3586668 - DNA, 25 bp, Homo sapien
cacatgcaagaatggcagccactga

SEQ ID NO: 3586669 - DNA, 25 bp, Homo sapien
gggatgccgtcacatgcaagaatgg

SEQ ID NO: 3586670 - DNA, 25 bp, Homo sapien
ccgtcacatgcaagaatggcagcca

SEQ ID NO: 3586671 - DNA, 25 bp, Homo sapien
cgaaatggggatgccgtcacatgca

SEQ ID NO: 3586672 - DNA, 25 bp, Homo sapien
gcccaatgtccttaaaccaagcata

SEQ ID NO: 3586673 - DNA, 25 bp, Homo sapien
cctggcccaatgtccttaaaccaag

SEQ ID NO: 3586674 - DNA, 25 bp, Homo sapien
tggcccaatgtccttaaaccaagca

SEQ ID NO: 3586675 - DNA, 25 bp, Homo sapien
caatgtccttaaaccaagcataaaa

SEQ ID NO: 3586676 - DNA, 25 bp, Homo sapien
tgtgctcctgcttattccttcttgc

SEQ ID NO: 3586677 - DNA, 25 bp, Homo sapien
tcctgcttattccttcttgctagca

SEQ ID NO: 3586678 - DNA, 25 bp, Homo sapien
gctcctgcttattccttcttgctag

SEQ ID NO: 3586679 - DNA, 25 bp, Homo sapien
tctgtgctcctgcttattccttctt

SEQ ID NO: 3586680 - DNA, 25 bp, Homo sapien
cagcatatagatgccatggcagtgg

SEQ ID NO: 3586681 - DNA, 25 bp, Homo sapien
ttgagggaactagctttaagagaca

SEQ ID NO: 3586682 - DNA, 25 bp, Homo sapien
gaggactaaatggagccacttgagg

SEQ ID NO: 3586683 - DNA, 25 bp, Homo sapien
tgttttgggtgagaagaggactaaa

SEQ ID NO: 3586684 - DNA, 25 bp, Homo sapien
atcggacaagtgagtgcctttcccc

SEQ ID NO: 3586685 - DNA, 25 bp, Homo sapien
agataaggaaaaggtggaatctgga

SEQ ID NO: 3586686 - DNA, 25 bp, Homo sapien
gtggctccatcggacaagtgagtgc

SEQ ID NO: 3586687 - DNA, 25 bp, Homo sapien
tccatcggacaagtgagtgcctttc

SEQ ID NO: 3586688 - DNA, 25 bp, Homo sapien
cattgccacattcaactccgtagac

SEQ ID NO: 3586689 - DNA, 25 bp, Homo sapien
cattcattgccacattcaactccgt

SEQ ID NO: 3586690 - DNA, 25 bp, Homo sapien
ttcattgccacattcaactccgtag

SEQ ID NO: 3586691 - DNA, 25 bp, Homo sapien
tcattcattgccacattcaactccg

SEQ ID NO: 3586692 - DNA, 25 bp, Homo sapien
tcatagaacatgttgtgagtgaatg

SEQ ID NO: 3586693 - DNA, 25 bp, Homo sapien
agaacatgttgtgagtgaatgaaaa

SEQ ID NO: 3586694 - DNA, 25 bp, Homo sapien
tagaacatgttgtgagtgaatgaaa

SEQ ID NO: 3586695 - DNA, 25 bp, Homo sapien
catagaacatgttgtgagtgaatga

SEQ ID NO: 3586696 - DNA, 25 bp, Homo sapien
ccacccttcactcagtaacagaatg

SEQ ID NO: 3586697 - DNA, 25 bp, Homo sapien
cacccttcactcagtaacagaatgc

SEQ ID NO: 3586698 - DNA, 25 bp, Homo sapien
acccttcactcagtaacagaatgct

SEQ ID NO: 3586699 - DNA, 25 bp, Homo sapien
ttccacccttcactcagtaacagaa

SEQ ID NO: 3586700 - DNA, 25 bp, Homo sapien
actgctctaagatacacctgaatag

SEQ ID NO: 3586701 - DNA, 25 bp, Homo sapien
cctgcttgcccatagcatcctgata

SEQ ID NO: 3586702 - DNA, 25 bp, Homo sapien
gatattgttgggactcagacatcag

SEQ ID NO: 3586703 - DNA, 25 bp, Homo sapien
tacacctgaatagcacctggaaggc

SEQ ID NO: 3586704 - DNA, 25 bp, Homo sapien
tgaagaaggtggcagacatttttag

SEQ ID NO: 3586705 - DNA, 25 bp, Homo sapien
ccccaaagttggatatcacagacag

SEQ ID NO: 3586706 - DNA, 25 bp, Homo sapien
ttttagcccccaaagttggatatca

SEQ ID NO: 3586707 - DNA, 25 bp, Homo sapien
ctgaagaaggtggcagacattttta

SEQ ID NO: 3586708 - DNA, 25 bp, Homo sapien
gatcttcacaaaagagcttctctga

SEQ ID NO: 3586709 - DNA, 25 bp, Homo sapien
aactgtcttctatgatcttcacaaa

SEQ ID NO: 3586710 - DNA, 25 bp, Homo sapien
atcttcacaaaagagcttctctgaa

SEQ ID NO: 3586711 - DNA, 25 bp, Homo sapien
tcaacgtattcttcatagatcacag

SEQ ID NO: 3586712 - DNA, 25 bp, Homo sapien
agatcacagatctctctggtgcacc

SEQ ID NO: 3586713 - DNA, 25 bp, Homo sapien
atagatcacagatctctctggtgca

SEQ ID NO: 3586714 - DNA, 25 bp, Homo sapien
tcaggcatttctgtactcaacgtat

SEQ ID NO: 3586715 - DNA, 25 bp, Homo sapien
tctgagaaagtcatttacttccaaa

SEQ ID NO: 3586716 - DNA, 25 bp, Homo sapien
tctttgaagcacatagttgggtaca

SEQ ID NO: 3586717 - DNA, 25 bp, Homo sapien
atctctgaacactctttgaagcaca

SEQ ID NO: 3586718 - DNA, 25 bp, Homo sapien
gggtacatctaagattctgagaaag

SEQ ID NO: 3586719 - DNA, 25 bp, Homo sapien
ttcttgagaagtaccagcatggctg

SEQ ID NO: 3586720 - DNA, 25 bp, Homo sapien
tggctgataaactctggaactgggc

SEQ ID NO: 3586721 - DNA, 25 bp, Homo sapien
tcttgagcgagacactaaattgcag

SEQ ID NO: 3586722 - DNA, 25 bp, Homo sapien
tatgaggtgacctgatggccagctg

SEQ ID NO: 3586723 - DNA, 25 bp, Homo sapien
gacattgcctttggacaagtatgct

SEQ ID NO: 3586724 - DNA, 25 bp, Homo sapien
gattccagttcagggaacggttcca

SEQ ID NO: 3586725 - DNA, 25 bp, Homo sapien
gtataggaaacatagtggcatctgc

SEQ ID NO: 3586726 - DNA, 25 bp, Homo sapien
caactgagctaacctgcatggcaca

SEQ ID NO: 3586727 - DNA, 25 bp, Homo sapien
tgacggtgacggtttctgcttctcc

SEQ ID NO: 3586728 - DNA, 25 bp, Homo sapien
cctgagaatgcttagggctctagcc

SEQ ID NO: 3586729 - DNA, 25 bp, Homo sapien
tcaaatgatgggtaacttcagctcc

SEQ ID NO: 3586730 - DNA, 25 bp, Homo sapien
tccttttttacacatgacggtgacg

SEQ ID NO: 3586731 - DNA, 25 bp, Homo sapien
ggaaagtattccttcatccaagata

SEQ ID NO: 3586732 - DNA, 25 bp, Homo sapien
gtattccttcatccaagatactcat

SEQ ID NO: 3586733 - DNA, 25 bp, Homo sapien
aagtattccttcatccaagatactc

SEQ ID NO: 3586734 - DNA, 25 bp, Homo sapien
gaaagtattccttcatccaagatac

SEQ ID NO: 3586735 - DNA, 25 bp, Homo sapien
gaatatccaagtaatcttgccgcat

SEQ ID NO: 3586736 - DNA, 25 bp, Homo sapien
gagaatatccaagtaatcttgccgc

SEQ ID NO: 3586737 - DNA, 25 bp, Homo sapien
ttggagaatatccaagtaatcttgc

SEQ ID NO: 3586738 - DNA, 25 bp, Homo sapien
ggagaatatccaagtaatcttgccg

SEQ ID NO: 3586739 - DNA, 25 bp, Homo sapien
cttcttataattgaatagtattcca

SEQ ID NO: 3586740 - DNA, 25 bp, Homo sapien
caggatttcattcttcttataattg

SEQ ID NO: 3586741 - DNA, 25 bp, Homo sapien
tctttatccatgatggacttttcag

SEQ ID NO: 3586742 - DNA, 25 bp, Homo sapien
ttatccatgatggacttttcagtta

SEQ ID NO: 3586743 - DNA, 25 bp, Homo sapien
tctgaaagtccaactctaggaggta

SEQ ID NO: 3586744 - DNA, 25 bp, Homo sapien
catttaccatataagaaacgataag

SEQ ID NO: 3586745 - DNA, 25 bp, Homo sapien
tctaggaggtaacgtccttcaccat

SEQ ID NO: 3586746 - DNA, 25 bp, Homo sapien
ttcaccatttaccatataagaaacg

SEQ ID NO: 3586747 - DNA, 25 bp, Homo sapien
ctctcccttactccactttttcatg

SEQ ID NO: 3586748 - DNA, 25 bp, Homo sapien
gagggtggacaataggccattgctt

SEQ ID NO: 3586749 - DNA, 25 bp, Homo sapien
taccaccaatgccatatccctatgg

SEQ ID NO: 3586750 - DNA, 25 bp, Homo sapien
cagagatgcatagatcataaatcac

SEQ ID NO: 3586751 - DNA, 25 bp, Homo sapien
tcataaatcacaagatgataacatt

SEQ ID NO: 3586752 - DNA, 25 bp, Homo sapien
atttccattctagtgactcttttga

SEQ ID NO: 3586753 - DNA, 25 bp, Homo sapien
tatattacaagacagggtcaatttc

SEQ ID NO: 3586754 - DNA, 25 bp, Homo sapien
caatttccattctagtgactctttt

SEQ ID NO: 3586755 - DNA, 25 bp, Homo sapien
aatttccattctagtgactcttttg

SEQ ID NO: 3586756 - DNA, 25 bp, Homo sapien
caactgagcatccaactcgaaactt

SEQ ID NO: 3586757 - DNA, 25 bp, Homo sapien
tctttattaaagtccattgtttgga

SEQ ID NO: 3586758 - DNA, 25 bp, Homo sapien
tttggactctattttggagcttgtc

SEQ ID NO: 3586759 - DNA, 25 bp, Homo sapien
tccatgcagattatccaactgagca

SEQ ID NO: 3586760 - DNA, 25 bp, Homo sapien
attctcttgtcgtagaaagaaccat

SEQ ID NO: 3586761 - DNA, 25 bp, Homo sapien
tagccattctcttgtcgtagaaaga

SEQ ID NO: 3586762 - DNA, 25 bp, Homo sapien
gccattctcttgtcgtagaaagaac

SEQ ID NO: 3586763 - DNA, 25 bp, Homo sapien
ttagccattctcttgtcgtagaaag

SEQ ID NO: 3586764 - DNA, 25 bp, Homo sapien
tggtttccatattgctggtcactcc

SEQ ID NO: 3586765 - DNA, 25 bp, Homo sapien
ctggtttccatattgctggtcactc

SEQ ID NO: 3586766 - DNA, 25 bp, Homo sapien
ggtttccatattgctggtcactccc

SEQ ID NO: 3586767 - DNA, 25 bp, Homo sapien
cctggtttccatattgctggtcact

SEQ ID NO: 3586768 - DNA, 25 bp, Homo sapien
tgtagcgtgatgatttggctgcctg

SEQ ID NO: 3586769 - DNA, 25 bp, Homo sapien
ccgttgctaccgctgcaaacaggag

SEQ ID NO: 3586770 - DNA, 25 bp, Homo sapien
ccgagcaccgggtgaagaagaccac

SEQ ID NO: 3586771 - DNA, 25 bp, Homo sapien
ttgtaaagttccaacctccgcgcag

SEQ ID NO: 3586772 - DNA, 25 bp, Homo sapien
tgactcgggcttgcggggcttgtgg

SEQ ID NO: 3586773 - DNA, 25 bp, Homo sapien
cagtctgcgggtccgttccccacgc

SEQ ID NO: 3586774 - DNA, 25 bp, Homo sapien
cgttccccacgcctgactcgggctt

SEQ ID NO: 3586775 - DNA, 25 bp, Homo sapien
cccacgcctgactcgggcttgcggg

SEQ ID NO: 3586776 - DNA, 25 bp, Homo sapien
cagggtgagatgtagtgaacggcgg

SEQ ID NO: 3586777 - DNA, 25 bp, Homo sapien
agggtgagatgtagtgaacggcggc

SEQ ID NO: 3586778 - DNA, 25 bp, Homo sapien
tcagggtgagatgtagtgaacggcg

SEQ ID NO: 3586779 - DNA, 25 bp, Homo sapien
ttgcgagagtgcatgatttttggcg

SEQ ID NO: 3586780 - DNA, 25 bp, Homo sapien
gagactgtccctgctatcttgacaa

SEQ ID NO: 3586781 - DNA, 25 bp, Homo sapien
gaaaagaaagcagcgcgggtctgac

SEQ ID NO: 3586782 - DNA, 25 bp, Homo sapien
caaggagagggaaccggaatgcttt

SEQ ID NO: 3586783 - DNA, 25 bp, Homo sapien
ttcgggacgaatcccctctacaggc

SEQ ID NO: 3586784 - DNA, 25 bp, Homo sapien
agtgtgtgtgcagggcaagtgtagg

SEQ ID NO: 3586785 - DNA, 25 bp, Homo sapien
aatcccctctacaggccagtgtgtg

SEQ ID NO: 3586786 - DNA, 25 bp, Homo sapien
ccaggagtgcggaggagctgtctcc

SEQ ID NO: 3586787 - DNA, 25 bp, Homo sapien
ctctggcacgcggaatctggtggac

SEQ ID NO: 3586788 - DNA, 25 bp, Homo sapien
atctggtggactcctagcgcctcgg

SEQ ID NO: 3586789 - DNA, 25 bp, Homo sapien
cggtggctctggcacgcggaatctg

SEQ ID NO: 3586790 - DNA, 25 bp, Homo sapien
cacgcggaatctggtggactcctag

SEQ ID NO: 3586791 - DNA, 25 bp, Homo sapien
tatcgatcaaacagagcccagattt

SEQ ID NO: 3586792 - DNA, 25 bp, Homo sapien
tcagtatcgatcaaacagagcccag

SEQ ID NO: 3586793 - DNA, 25 bp, Homo sapien
ttgaatgatgttctggtgtgacgtg

SEQ ID NO: 3586794 - DNA, 25 bp, Homo sapien
gaatgcttgaatgatgttctggtgt

SEQ ID NO: 3586795 - DNA, 25 bp, Homo sapien
gcattccttcatagcccacatctgt

SEQ ID NO: 3586796 - DNA, 25 bp, Homo sapien
tggcattggggtatggcattccttc

SEQ ID NO: 3586797 - DNA, 25 bp, Homo sapien
tcatagcccacatctgtccagttgc

SEQ ID NO: 3586798 - DNA, 25 bp, Homo sapien
tccagttgcctggtgggttggcttt

SEQ ID NO: 3586799 - DNA, 25 bp, Homo sapien
agtggacgcatggtgtcttgtaaac

SEQ ID NO: 3586800 - DNA, 25 bp, Homo sapien
gctgttggaacttgaccatttgtca

SEQ ID NO: 3586801 - DNA, 25 bp, Homo sapien
taactgtgcaactgattaggatgat

SEQ ID NO: 3586802 - DNA, 25 bp, Homo sapien
tgattatttccatggagtggacgca

SEQ ID NO: 3586803 - DNA, 25 bp, Homo sapien
acaatgtcagtacttttgctgacac

SEQ ID NO: 3586804 - DNA, 25 bp, Homo sapien
tgtcagtacttttgctgacactccc

SEQ ID NO: 3586805 - DNA, 25 bp, Homo sapien
tgctgacactcccatttctagcctt

SEQ ID NO: 3586806 - DNA, 25 bp, Homo sapien
ctgacactcccatttctagcctttg

SEQ ID NO: 3586807 - DNA, 25 bp, Homo sapien
tctgcacgtgcatggcaaatatggt

SEQ ID NO: 3586808 - DNA, 25 bp, Homo sapien
catggcaaatatggtttgagtttct

SEQ ID NO: 3586809 - DNA, 25 bp, Homo sapien
ttcaaacatctgcacgtgcatggca

SEQ ID NO: 3586810 - DNA, 25 bp, Homo sapien
tctccaggttgtagtaccccttcaa

SEQ ID NO: 3586811 - DNA, 25 bp, Homo sapien
tccaaggtcattactaaaaggcttc

SEQ ID NO: 3586812 - DNA, 25 bp, Homo sapien
tggtccaaggtcattactaaaaggc

SEQ ID NO: 3586813 - DNA, 25 bp, Homo sapien
ctggtccaaggtcattactaaaagg

SEQ ID NO: 3586814 - DNA, 25 bp, Homo sapien
tggctttggacccagcttttcttgc

SEQ ID NO: 3586815 - DNA, 25 bp, Homo sapien
atttcattgcctgaagtagattcat

SEQ ID NO: 3586816 - DNA, 25 bp, Homo sapien
tttcattgcctgaagtagattcata

SEQ ID NO: 3586817 - DNA, 25 bp, Homo sapien
tgttttttcttgttcttttgcagcc

SEQ ID NO: 3586818 - DNA, 25 bp, Homo sapien
gttttttcttgttcttttgcagcca

SEQ ID NO: 3586819 - DNA, 25 bp, Homo sapien
aatgctgttttttcttgttcttttg

SEQ ID NO: 3586820 - DNA, 25 bp, Homo sapien
gctgttttttcttgttcttttgcag

SEQ ID NO: 3586821 - DNA, 25 bp, Homo sapien
tctactgatggtaagggactcagac

SEQ ID NO: 3586822 - DNA, 25 bp, Homo sapien
tactgatggtaagggactcagacat

SEQ ID NO: 3586823 - DNA, 25 bp, Homo sapien
ctgtctactgatggtaagggactca

SEQ ID NO: 3586824 - DNA, 25 bp, Homo sapien
tgtctactgatggtaagggactcag

SEQ ID NO: 3586825 - DNA, 25 bp, Homo sapien
gaacctgtatctgccttaactttgg

SEQ ID NO: 3586826 - DNA, 25 bp, Homo sapien
tgtgacatgcctcttctgcaactgc

SEQ ID NO: 3586827 - DNA, 25 bp, Homo sapien
ttaactttgggtacatggctgagcc

SEQ ID NO: 3586828 - DNA, 25 bp, Homo sapien
ttttgtagggctcccgaatccctgc

SEQ ID NO: 3586829 - DNA, 25 bp, Homo sapien
tcacttgccaagaacacctaggaca

SEQ ID NO: 3586830 - DNA, 25 bp, Homo sapien
ccaactgggaagcttaagtatgtgg

SEQ ID NO: 3586831 - DNA, 25 bp, Homo sapien
ctaacttcctagtgatcagcattgc

SEQ ID NO: 3586832 - DNA, 25 bp, Homo sapien
gagctgttcctctgtggaatgggcc

SEQ ID NO: 3586833 - DNA, 25 bp, Homo sapien
gttaagagttcttgcatcatcctct

SEQ ID NO: 3586834 - DNA, 25 bp, Homo sapien
gagttcttgcatcatcctctcgttc

SEQ ID NO: 3586835 - DNA, 25 bp, Homo sapien
ggttaagagttcttgcatcatcctc

SEQ ID NO: 3586836 - DNA, 25 bp, Homo sapien
ttgcatcatcctctcgttctttctc

SEQ ID NO: 3586837 - DNA, 25 bp, Homo sapien
ttggttatagaagtggtaaggcatg

SEQ ID NO: 3586838 - DNA, 25 bp, Homo sapien
tggaactgatggcttaataatagct

SEQ ID NO: 3586839 - DNA, 25 bp, Homo sapien
aactgatggcttaataatagctgga

SEQ ID NO: 3586840 - DNA, 25 bp, Homo sapien
tagaagtggtaaggcatgaaattgg

SEQ ID NO: 3586841 - DNA, 25 bp, Homo sapien
gttctttaaggctgttaaggctctg

SEQ ID NO: 3586842 - DNA, 25 bp, Homo sapien
atcccttagttgaattttgctgaca

SEQ ID NO: 3586843 - DNA, 25 bp, Homo sapien
aatgcaccagtgtaacaaggcttca

SEQ ID NO: 3586844 - DNA, 25 bp, Homo sapien
aatgggccatgaactaattcaggac

SEQ ID NO: 3586845 - DNA, 25 bp, Homo sapien
atgtagaccaggaagcctattttat

SEQ ID NO: 3586846 - DNA, 25 bp, Homo sapien
gatgtagaccaggaagcctatttta

SEQ ID NO: 3586847 - DNA, 25 bp, Homo sapien
tgtagaccaggaagcctattttatg

SEQ ID NO: 3586848 - DNA, 25 bp, Homo sapien
gtagaccaggaagcctattttatgt

SEQ ID NO: 3586849 - DNA, 25 bp, Homo sapien
taccacactgaaagtaggagcctct

SEQ ID NO: 3586850 - DNA, 25 bp, Homo sapien
gattctctagtcttcccaggtacca

SEQ ID NO: 3586851 - DNA, 25 bp, Homo sapien
tcacgggtgccataatcctaggcca

SEQ ID NO: 3586852 - DNA, 25 bp, Homo sapien
tgtgtgccatgaacgccaaaccttg

SEQ ID NO: 3586853 - DNA, 25 bp, Homo sapien
gacctctaggcaatcactgccagtg

SEQ ID NO: 3586854 - DNA, 25 bp, Homo sapien
tgccagtgataggatcagtccaggg

SEQ ID NO: 3586855 - DNA, 25 bp, Homo sapien
gcctggataatcgagcagtgcgtaa

SEQ ID NO: 3586856 - DNA, 25 bp, Homo sapien
taatgggatgtgaatgccgaagtcc

SEQ ID NO: 3586857 - DNA, 25 bp, Homo sapien
tcctgtcgtttaactctatatgctg

SEQ ID NO: 3586858 - DNA, 25 bp, Homo sapien
cgtttaactctatatgctggcttat

SEQ ID NO: 3586859 - DNA, 25 bp, Homo sapien
tgttgcatctcctgtcgtttaactc

SEQ ID NO: 3586860 - DNA, 25 bp, Homo sapien
tctatatgctggcttatttatgcct

SEQ ID NO: 3586861 - DNA, 25 bp, Homo sapien
aatggatgaatgtatgccttctgca

SEQ ID NO: 3586862 - DNA, 25 bp, Homo sapien
taaatggatgaatgtatgccttctg

SEQ ID NO: 3586863 - DNA, 25 bp, Homo sapien
cttaaatcctctcctggaatacggc

SEQ ID NO: 3586864 - DNA, 25 bp, Homo sapien
cctggaatacggcagtgtgtaaata

SEQ ID NO: 3586865 - DNA, 25 bp, Homo sapien
caggcagatcatcagtcttttcttc

SEQ ID NO: 3586866 - DNA, 25 bp, Homo sapien
gattaccaggcagatcatcagtctt

SEQ ID NO: 3586867 - DNA, 25 bp, Homo sapien
tttcacttgtgagattaccaggcag

SEQ ID NO: 3586868 - DNA, 25 bp, Homo sapien
gggctttcacttgtgagattaccag

SEQ ID NO: 3586869 - DNA, 25 bp, Homo sapien
ttggagcttccataagcatcatgcc

SEQ ID NO: 3586870 - DNA, 25 bp, Homo sapien
tcatctgttgcaatgccagagttcc

SEQ ID NO: 3586871 - DNA, 25 bp, Homo sapien
tccataagcatcatgcctaacatct

SEQ ID NO: 3586872 - DNA, 25 bp, Homo sapien
tggtgagtggagctacacagaagag

SEQ ID NO: 3586873 - DNA, 25 bp, Homo sapien
acctggaattcacgaaactagatcc

SEQ ID NO: 3586874 - DNA, 25 bp, Homo sapien
tcacgaaactagatcctgcattgac

SEQ ID NO: 3586875 - DNA, 25 bp, Homo sapien
gaattcacgaaactagatcctgcat

SEQ ID NO: 3586876 - DNA, 25 bp, Homo sapien
tggaattcacgaaactagatcctgc

SEQ ID NO: 3586877 - DNA, 25 bp, Homo sapien
tcttcaaccttgtacaagacctcac

SEQ ID NO: 3586878 - DNA, 25 bp, Homo sapien
aagacctcacaagaagaggcaaatt

SEQ ID NO: 3586879 - DNA, 25 bp, Homo sapien
gataagctcacagcccaaggttctt

SEQ ID NO: 3586880 - DNA, 25 bp, Homo sapien
catcccgcttcattgtatctctcag

SEQ ID NO: 3586881 - DNA, 25 bp, Homo sapien
catgtcccgattgctgattactggt

SEQ ID NO: 3586882 - DNA, 25 bp, Homo sapien
ggccagctcgttttgtatccagttg

SEQ ID NO: 3586883 - DNA, 25 bp, Homo sapien
gattactggtgatttggccagctcg

SEQ ID NO: 3586884 - DNA, 25 bp, Homo sapien
cctgcaaagctgtgaagccttgttt

SEQ ID NO: 3586885 - DNA, 25 bp, Homo sapien
tggaactaacagtttggaaatgctg

SEQ ID NO: 3586886 - DNA, 25 bp, Homo sapien
cagcagaacatcgtttatccaagaa

SEQ ID NO: 3586887 - DNA, 25 bp, Homo sapien
tgtaccattgacatgcaggaaggag

SEQ ID NO: 3586888 - DNA, 25 bp, Homo sapien
aaggagccctccctgatttgcataa

SEQ ID NO: 3586889 - DNA, 25 bp, Homo sapien
tgcccatgaaggctatgattttcag

SEQ ID NO: 3586890 - DNA, 25 bp, Homo sapien
cccatgaaggctatgattttcagcc

SEQ ID NO: 3586891 - DNA, 25 bp, Homo sapien
tccaacaagaggatagggtggtgcc

SEQ ID NO: 3586892 - DNA, 25 bp, Homo sapien
caacaagaggatagggtggtgccca

SEQ ID NO: 3586893 - DNA, 25 bp, Homo sapien
agcagttggattccatgatgggaag

SEQ ID NO: 3586894 - DNA, 25 bp, Homo sapien
aagcagttggattccatgatgggaa

SEQ ID NO: 3586895 - DNA, 25 bp, Homo sapien
gaagcagttggattccatgatggga

SEQ ID NO: 3586896 - DNA, 25 bp, Homo sapien
gccaaggaccgggacaatggagacg

SEQ ID NO: 3586897 - DNA, 25 bp, Homo sapien
ctgccaaggaccgggacaatggaga

SEQ ID NO: 3586898 - DNA, 25 bp, Homo sapien
ggaccgggacaatggagacgccaaa

SEQ ID NO: 3586899 - DNA, 25 bp, Homo sapien
gaccgggacaatggagacgccaaag

SEQ ID NO: 3586900 - DNA, 25 bp, Homo sapien
tcctgccaatgtacggtcagttccg

SEQ ID NO: 3586901 - DNA, 25 bp, Homo sapien
cctcctgccaatgtacggtcagttc

SEQ ID NO: 3586902 - DNA, 25 bp, Homo sapien
cctgccaatgtacggtcagttccgg

SEQ ID NO: 3586903 - DNA, 25 bp, Homo sapien
tgccaatgtacggtcagttccgggg

SEQ ID NO: 3586904 - DNA, 25 bp, Homo sapien
accactgccgccaaaagactgggag

SEQ ID NO: 3586905 - DNA, 25 bp, Homo sapien
aaaagactgggagcgctcaaactta

SEQ ID NO: 3586906 - DNA, 25 bp, Homo sapien
ctgggagcgctcaaacttaacagcc

SEQ ID NO: 3586907 - DNA, 25 bp, Homo sapien
caccactgccgccaaaagactggga

SEQ ID NO: 3586908 - DNA, 25 bp, Homo sapien
gggtctccaactcctatagactcta

SEQ ID NO: 3586909 - DNA, 25 bp, Homo sapien
caactcctatagactctatgtggat

SEQ ID NO: 3586910 - DNA, 25 bp, Homo sapien
gatgataaagatttgatgcctttcc

SEQ ID NO: 3586911 - DNA, 25 bp, Homo sapien
tgataaagatttgatgcctttccat

SEQ ID NO: 3586912 - DNA, 25 bp, Homo sapien
ggtggtagtgtccttcagatgctca

SEQ ID NO: 3586913 - DNA, 25 bp, Homo sapien
ctctggtggtagtgtccttcagatg

SEQ ID NO: 3586914 - DNA, 25 bp, Homo sapien
tggtggtagtgtccttcagatgctc

SEQ ID NO: 3586915 - DNA, 25 bp, Homo sapien
ggtagtgtccttcagatgctcacag

SEQ ID NO: 3586916 - DNA, 25 bp, Homo sapien
ggtcagacacccatagtgcccttat

SEQ ID NO: 3586917 - DNA, 25 bp, Homo sapien
gacacccatagtgcccttattgagg

SEQ ID NO: 3586918 - DNA, 25 bp, Homo sapien
tgactctggtcagacacccatagtg

SEQ ID NO: 3586919 - DNA, 25 bp, Homo sapien
tttattgactctggtcagacaccca

SEQ ID NO: 3586920 - DNA, 25 bp, Homo sapien
aggttccacatgctctctctgtggt

SEQ ID NO: 3586921 - DNA, 25 bp, Homo sapien
gatcaataacatctagcactgtccg

SEQ ID NO: 3586922 - DNA, 25 bp, Homo sapien
tctctgtggtggatcagcaccagct

SEQ ID NO: 3586923 - DNA, 25 bp, Homo sapien
tttgccttctcgtggcctgctgggc

SEQ ID NO: 3586924 - DNA, 25 bp, Homo sapien
ttgtttgatagtgctcaacaccttg

SEQ ID NO: 3586925 - DNA, 25 bp, Homo sapien
tgtttgatagtgctcaacaccttgg

SEQ ID NO: 3586926 - DNA, 25 bp, Homo sapien
gtttgatagtgctcaacaccttggg

SEQ ID NO: 3586927 - DNA, 25 bp, Homo sapien
actagaatccatagtcctcccagtg

SEQ ID NO: 3586928 - DNA, 25 bp, Homo sapien
gctgagctttgacgtgaaccactaa

SEQ ID NO: 3586929 - DNA, 25 bp, Homo sapien
catgccttccgaggatggatgtctg

SEQ ID NO: 3586930 - DNA, 25 bp, Homo sapien
gcctgctgctaatggattgaccact

SEQ ID NO: 3586931 - DNA, 25 bp, Homo sapien
aaggagaatgaggaacaggattgcc

SEQ ID NO: 3586932 - DNA, 25 bp, Homo sapien
taaggagaatgaggaacaggattgc

SEQ ID NO: 3586933 - DNA, 25 bp, Homo sapien
tataaggagaatgaggaacaggatt

SEQ ID NO: 3586934 - DNA, 25 bp, Homo sapien
ctataaggagaatgaggaacaggat

SEQ ID NO: 3586935 - DNA, 25 bp, Homo sapien
catttggatgtctgtgctatggcag

SEQ ID NO: 3586936 - DNA, 25 bp, Homo sapien
ttctgccaggatttcgccgccaaac

SEQ ID NO: 3586937 - DNA, 25 bp, Homo sapien
gccgccaaaccatctgaaccatatg

SEQ ID NO: 3586938 - DNA, 25 bp, Homo sapien
catcacagtgaaacatgtggcatca

SEQ ID NO: 3586939 - DNA, 25 bp, Homo sapien
gccacagacagcctagatgttttag

SEQ ID NO: 3586940 - DNA, 25 bp, Homo sapien
gacccttgtgtaaaccttctgtagc

SEQ ID NO: 3586941 - DNA, 25 bp, Homo sapien
tagcactaatatccgtgtattcacc

SEQ ID NO: 3586942 - DNA, 25 bp, Homo sapien
tattcaccagggatccagggtatgt

SEQ ID NO: 3586943 - DNA, 25 bp, Homo sapien
gtaactgtcttaggtttggatcact

SEQ ID NO: 3586944 - DNA, 25 bp, Homo sapien
gaggtaatgccaaagaaatccacag

SEQ ID NO: 3586945 - DNA, 25 bp, Homo sapien
tcacttatccacaaaatgtataggc

SEQ ID NO: 3586946 - DNA, 25 bp, Homo sapien
ggcctgaagtctggctgtaaatagc

SEQ ID NO: 3586947 - DNA, 25 bp, Homo sapien
taaatactagataagtaacaacagg

SEQ ID NO: 3586948 - DNA, 25 bp, Homo sapien
tataaacagcgctatgaaggaggta

SEQ ID NO: 3586949 - DNA, 25 bp, Homo sapien
tatgaaggaggtactttctataaag

SEQ ID NO: 3586950 - DNA, 25 bp, Homo sapien
gataagtaacaacagggtaagccac

SEQ ID NO: 3586951 - DNA, 25 bp, Homo sapien
ctgagcaagatgtctgtttacattg

SEQ ID NO: 3586952 - DNA, 25 bp, Homo sapien
gggcatggaggttgcttcactctga

SEQ ID NO: 3586953 - DNA, 25 bp, Homo sapien
tcatggaggatacttttccagtgcc

SEQ ID NO: 3586954 - DNA, 25 bp, Homo sapien
aagcagatctctcctgtttgacaga

SEQ ID NO: 3586955 - DNA, 25 bp, Homo sapien
cctgtttgacagatgtttcactttg

SEQ ID NO: 3586956 - DNA, 25 bp, Homo sapien
tgcagatggtggtagacttccagaa

SEQ ID NO: 3586957 - DNA, 25 bp, Homo sapien
aatttgctgccacgaaagctgtgca

SEQ ID NO: 3586958 - DNA, 25 bp, Homo sapien
ctggattaatttgctgccacgaaag

SEQ ID NO: 3586959 - DNA, 25 bp, Homo sapien
tgccacgaaagctgtgcagatggtg

SEQ ID NO: 3586960 - DNA, 25 bp, Homo sapien
tagaggctggagagttcaagataaa

SEQ ID NO: 3586961 - DNA, 25 bp, Homo sapien
gaggctggagagttcaagataaaga

SEQ ID NO: 3586962 - DNA, 25 bp, Homo sapien
ggctgctagatggctgctttgtcct

SEQ ID NO: 3586963 - DNA, 25 bp, Homo sapien
ctagaggctggagagttcaagataa

SEQ ID NO: 3586964 - DNA, 25 bp, Homo sapien
taacctgttacccttcaactcatgg

SEQ ID NO: 3586965 - DNA, 25 bp, Homo sapien
taaaagtccaactatgatggtggtg

SEQ ID NO: 3586966 - DNA, 25 bp, Homo sapien
cataactattatgattcccacatag

SEQ ID NO: 3586967 - DNA, 25 bp, Homo sapien
tctatataggtaccaaccattgtct

SEQ ID NO: 3586968 - DNA, 25 bp, Homo sapien
ctacacctctgtgttcttatcattt

SEQ ID NO: 3586969 - DNA, 25 bp, Homo sapien
tcttatcattttcttgtttttctgt

SEQ ID NO: 3586970 - DNA, 25 bp, Homo sapien
tacacctctgtgttcttatcatttt

SEQ ID NO: 3586971 - DNA, 25 bp, Homo sapien
tactctacctctatgcttcagatgc

SEQ ID NO: 3586972 - DNA, 25 bp, Homo sapien
ctcatgttggccatcgtttcggaaa

SEQ ID NO: 3586973 - DNA, 25 bp, Homo sapien
ggattgcatttgattcacctcatgt

SEQ ID NO: 3586974 - DNA, 25 bp, Homo sapien
tagctaatctgtcctcctgcatcac

SEQ ID NO: 3586975 - DNA, 25 bp, Homo sapien
gaaagccagtccttggaaagcagtt

SEQ ID NO: 3586976 - DNA, 25 bp, Homo sapien
cagttcaaatagaaagccagtcctt

SEQ ID NO: 3586977 - DNA, 25 bp, Homo sapien
ttgggatgtgaaaacagttcaaata

SEQ ID NO: 3586978 - DNA, 25 bp, Homo sapien
ccagtccttggaaagcagttaacat

SEQ ID NO: 3586979 - DNA, 25 bp, Homo sapien
ccagttaagagggtgaacgcagaca

SEQ ID NO: 3586980 - DNA, 25 bp, Homo sapien
tgtgagatgcccttgtgtagcaggt

SEQ ID NO: 3586981 - DNA, 25 bp, Homo sapien
ggctcctctagcatcctttacagat

SEQ ID NO: 3586982 - DNA, 25 bp, Homo sapien
cgcagacagaaattggtgggactct

SEQ ID NO: 3586983 - DNA, 25 bp, Homo sapien
gggcatttcgccagggcagcttgga

SEQ ID NO: 3586984 - DNA, 25 bp, Homo sapien
ggcagtatcctagggcatttcgcca

SEQ ID NO: 3586985 - DNA, 25 bp, Homo sapien
gatgtgggaagttaggcagtatcct

SEQ ID NO: 3586986 - DNA, 25 bp, Homo sapien
gcaccaggacagatgtgggaagtta

SEQ ID NO: 3586987 - DNA, 25 bp, Homo sapien
ttttatgggcatatcttgctgggaa

SEQ ID NO: 3586988 - DNA, 25 bp, Homo sapien
gtctgcagtagtgacagatgcataa

SEQ ID NO: 3586989 - DNA, 25 bp, Homo sapien
gcataaagtagtttgcttagggaat

SEQ ID NO: 3586990 - DNA, 25 bp, Homo sapien
gtgcgtgctcatttctgtctgcagt

SEQ ID NO: 3586991 - DNA, 25 bp, Homo sapien
gtgaaagctcttgggcacaggctcc

SEQ ID NO: 3586992 - DNA, 25 bp, Homo sapien
tgaaagctcttgggcacaggctcct

SEQ ID NO: 3586993 - DNA, 25 bp, Homo sapien
tctgacaggcccactttgatattct

SEQ ID NO: 3586994 - DNA, 25 bp, Homo sapien
tcaagacaagcctctggctcgatgc

SEQ ID NO: 3586995 - DNA, 25 bp, Homo sapien
ttccaatttctgacaggcccacttt

SEQ ID NO: 3586996 - DNA, 25 bp, Homo sapien
aagacaagcctctggctcgatgccc

SEQ ID NO: 3586997 - DNA, 25 bp, Homo sapien
ccaagagttacccactcgccttgtg

SEQ ID NO: 3586998 - DNA, 25 bp, Homo sapien
ttcttcaccaagagttacccactcg

SEQ ID NO: 3586999 - DNA, 25 bp, Homo sapien
cactcgccttgtgtggtgaagaagg

SEQ ID NO: 3587000 - DNA, 25 bp, Homo sapien
tacccactcgccttgtgtggtgaag

SEQ ID NO: 3587001 - DNA, 25 bp, Homo sapien
cctcggatgaggtggtttgtaatct

SEQ ID NO: 3587002 - DNA, 25 bp, Homo sapien
taatctttaatatcggtagcatact

SEQ ID NO: 3587003 - DNA, 25 bp, Homo sapien
ttaatatcggtagcatacttctggg

SEQ ID NO: 3587004 - DNA, 25 bp, Homo sapien
acagcccagcaattagatggagcct

SEQ ID NO: 3587005 - DNA, 25 bp, Homo sapien
ttttgggctggtgatccatatccat

SEQ ID NO: 3587006 - DNA, 25 bp, Homo sapien
tctaccactattaaaagtctgaact

SEQ ID NO: 3587007 - DNA, 25 bp, Homo sapien
taaaaagatttttgggctggtgatc

SEQ ID NO: 3587008 - DNA, 25 bp, Homo sapien
agatttttgggctggtgatccatat

SEQ ID NO: 3587009 - DNA, 25 bp, Homo sapien
acttttctaacaaaaacatcatgaa

SEQ ID NO: 3587010 - DNA, 25 bp, Homo sapien
tgaagaggataaatagatcggcaag

SEQ ID NO: 3587011 - DNA, 25 bp, Homo sapien
ttctaacaaaaacatcatgaagagg

SEQ ID NO: 3587012 - DNA, 25 bp, Homo sapien
cactttcattcccagtagcttttcc

SEQ ID NO: 3587013 - DNA, 25 bp, Homo sapien
ccttcaaatttggtggacctgttgg

SEQ ID NO: 3587014 - DNA, 25 bp, Homo sapien
gtcctctgtctctggtatctgacca

SEQ ID NO: 3587015 - DNA, 25 bp, Homo sapien
tgctgagtgtaagaggtcctctgtc

SEQ ID NO: 3587016 - DNA, 25 bp, Homo sapien
catgagcttcaataatgatctgcca

SEQ ID NO: 3587017 - DNA, 25 bp, Homo sapien
acatctttagtaattggcttgaatt

SEQ ID NO: 3587018 - DNA, 25 bp, Homo sapien
ccctgaacatctttagtaattggct

SEQ ID NO: 3587019 - DNA, 25 bp, Homo sapien
aacatctttagtaattggcttgaat

SEQ ID NO: 3587020 - DNA, 25 bp, Homo sapien
gaacatctttagtaattggcttgaa

SEQ ID NO: 3587021 - DNA, 25 bp, Homo sapien
gagtccctatgaccagtgcctttcc

SEQ ID NO: 3587022 - DNA, 25 bp, Homo sapien
ggcacttgttcttgctaaccgtcat

SEQ ID NO: 3587023 - DNA, 25 bp, Homo sapien
ttgccaccttttgtatggcacttgt

SEQ ID NO: 3587024 - DNA, 25 bp, Homo sapien
gaagccatcagatacaaaatcggtt

SEQ ID NO: 3587025 - DNA, 25 bp, Homo sapien
ggccttgttggctttagtctgagaa

SEQ ID NO: 3587026 - DNA, 25 bp, Homo sapien
gaagtcctgatgtaaggttcagttc

SEQ ID NO: 3587027 - DNA, 25 bp, Homo sapien
taattaagactagctggtgaagtcc

SEQ ID NO: 3587028 - DNA, 25 bp, Homo sapien
cagtcccttggtgttagggttccat

SEQ ID NO: 3587029 - DNA, 25 bp, Homo sapien
caggacgttcttgtgactggctgca

SEQ ID NO: 3587030 - DNA, 25 bp, Homo sapien
tgcctagtgatatgtgtatcaggta

SEQ ID NO: 3587031 - DNA, 25 bp, Homo sapien
ggacgttcttgtgactggctgcagt

SEQ ID NO: 3587032 - DNA, 25 bp, Homo sapien
tttggtacacatttgcctagtgata

SEQ ID NO: 3587033 - DNA, 25 bp, Homo sapien
catcagatcatgtatgggccagctt

SEQ ID NO: 3587034 - DNA, 25 bp, Homo sapien
ccacaactgttgttgggcttctttg

SEQ ID NO: 3587035 - DNA, 25 bp, Homo sapien
ggcttctttgaactttcctggacga

SEQ ID NO: 3587036 - DNA, 25 bp, Homo sapien
tctgattaagggctcttgaacttct

SEQ ID NO: 3587037 - DNA, 25 bp, Homo sapien
ctgtgcagcagatgcattttggagg

SEQ ID NO: 3587038 - DNA, 25 bp, Homo sapien
cagatgcattttggaggagctgaag

SEQ ID NO: 3587039 - DNA, 25 bp, Homo sapien
tgtgcagcagatgcattttggagga

SEQ ID NO: 3587040 - DNA, 25 bp, Homo sapien
cagcagatgcattttggaggagctg

SEQ ID NO: 3587041 - DNA, 25 bp, Homo sapien
tctacagagtgcagatcctctgccc

SEQ ID NO: 3587042 - DNA, 25 bp, Homo sapien
gggtggtgataatatcccgatctac

SEQ ID NO: 3587043 - DNA, 25 bp, Homo sapien
caaagcgagcttgtgttgtgggatt

SEQ ID NO: 3587044 - DNA, 25 bp, Homo sapien
tgtttttgcatctgaaactgtaggg

SEQ ID NO: 3587045 - DNA, 25 bp, Homo sapien
agcagtcattgaagtacctttctct

SEQ ID NO: 3587046 - DNA, 25 bp, Homo sapien
ttctctcctcttcggttacatggcc

SEQ ID NO: 3587047 - DNA, 25 bp, Homo sapien
ctcctcttcggttacatggccccat

SEQ ID NO: 3587048 - DNA, 25 bp, Homo sapien
tcagcagtcattgaagtacctttct

SEQ ID NO: 3587049 - DNA, 25 bp, Homo sapien
cagtctctttgatggccatgtgcac

SEQ ID NO: 3587050 - DNA, 25 bp, Homo sapien
tgctgcgcttgtcactacagaagtg

SEQ ID NO: 3587051 - DNA, 25 bp, Homo sapien
tcctgccgtgtctgctgcactgaag

SEQ ID NO: 3587052 - DNA, 25 bp, Homo sapien
tcatggtgcgttgttgccagtctct

SEQ ID NO: 3587053 - DNA, 25 bp, Homo sapien
gactcctggatgttttcccaccagt

SEQ ID NO: 3587054 - DNA, 25 bp, Homo sapien
cagactcctggatgttttcccacca

SEQ ID NO: 3587055 - DNA, 25 bp, Homo sapien
tcctggatgttttcccaccagtcac

SEQ ID NO: 3587056 - DNA, 25 bp, Homo sapien
ctcctggatgttttcccaccagtca

SEQ ID NO: 3587057 - DNA, 25 bp, Homo sapien
cttgccctcaccatttgtctcagtg

SEQ ID NO: 3587058 - DNA, 25 bp, Homo sapien
tgtgccttgcttgccgtcatcctct

SEQ ID NO: 3587059 - DNA, 25 bp, Homo sapien
cctgtgccttgcttgccgtcatcct

SEQ ID NO: 3587060 - DNA, 25 bp, Homo sapien
tgtccttgccctcaccatttgtctc

SEQ ID NO: 3587061 - DNA, 25 bp, Homo sapien
cattagtggaggtgataaaacttgc

SEQ ID NO: 3587062 - DNA, 25 bp, Homo sapien
agactgtaggatgcctttaaattcc

SEQ ID NO: 3587063 - DNA, 25 bp, Homo sapien
cagccatgctgcaggtatagactgc

SEQ ID NO: 3587064 - DNA, 25 bp, Homo sapien
tctctgccccagtcagactgtagga

SEQ ID NO: 3587065 - DNA, 25 bp, Homo sapien
tgtttctggctatccccacttttgc

SEQ ID NO: 3587066 - DNA, 25 bp, Homo sapien
caaactgaatgtttctggctatccc

SEQ ID NO: 3587067 - DNA, 25 bp, Homo sapien
tattaagttggcatcgcctcctgcc

SEQ ID NO: 3587068 - DNA, 25 bp, Homo sapien
tttatccatgtcgttggagtcctgt

SEQ ID NO: 3587069 - DNA, 25 bp, Homo sapien
tctgcattggattggtttcctcggt

SEQ ID NO: 3587070 - DNA, 25 bp, Homo sapien
tcctcggtacagtccttacttatat

SEQ ID NO: 3587071 - DNA, 25 bp, Homo sapien
tctgaagtaagaccaggatagctga

SEQ ID NO: 3587072 - DNA, 25 bp, Homo sapien
gctgatggttcttaatgggtccctg

SEQ ID NO: 3587073 - DNA, 25 bp, Homo sapien
acacctgataggcatgttctccagt

SEQ ID NO: 3587074 - DNA, 25 bp, Homo sapien
aggcatgttctccagtgccattcat

SEQ ID NO: 3587075 - DNA, 25 bp, Homo sapien
ctgataggcatgttctccagtgcca

SEQ ID NO: 3587076 - DNA, 25 bp, Homo sapien
cttcacaactgacacctgataggca

SEQ ID NO: 3587077 - DNA, 25 bp, Homo sapien
taaatatattggaacagggagttta

SEQ ID NO: 3587078 - DNA, 25 bp, Homo sapien
ggctacatcagggtcctctaactga

SEQ ID NO: 3587079 - DNA, 25 bp, Homo sapien
tatattggaacagggagtttagaga

SEQ ID NO: 3587080 - DNA, 25 bp, Homo sapien
agtttagagaggctacatcagggtc

SEQ ID NO: 3587081 - DNA, 25 bp, Homo sapien
atccttgtcaatgcctgggtgcctc

SEQ ID NO: 3587082 - DNA, 25 bp, Homo sapien
ctgctgcctgcgagggcagcccagg

SEQ ID NO: 3587083 - DNA, 25 bp, Homo sapien
cttgcagccatccttgtcaatgcct

SEQ ID NO: 3587084 - DNA, 25 bp, Homo sapien
gcagccatccttgtcaatgcctggg

SEQ ID NO: 3587085 - DNA, 25 bp, Homo sapien
ctgaagcctgcattgacatatagca

SEQ ID NO: 3587086 - DNA, 25 bp, Homo sapien
ctctgaagcctgcattgacatatag

SEQ ID NO: 3587087 - DNA, 25 bp, Homo sapien
tctgaagcctgcattgacatatagc

SEQ ID NO: 3587088 - DNA, 25 bp, Homo sapien
tgaagcctgcattgacatatagcat

SEQ ID NO: 3587089 - DNA, 25 bp, Homo sapien
gctgagctatagtccagccatattg

SEQ ID NO: 3587090 - DNA, 25 bp, Homo sapien
taaagtgagagatagcaacatggca

SEQ ID NO: 3587091 - DNA, 25 bp, Homo sapien
gaagcaagggcatgggagcttatcc

SEQ ID NO: 3587092 - DNA, 25 bp, Homo sapien
atattgccgcaagacagtagaaggg

SEQ ID NO: 3587093 - DNA, 25 bp, Homo sapien
gaaagatcatcagagcagcatgaaa

SEQ ID NO: 3587094 - DNA, 25 bp, Homo sapien
gtttgggagcagagcgtgtctttat

SEQ ID NO: 3587095 - DNA, 25 bp, Homo sapien
ggtaacaggatgtgagcctgccttg

SEQ ID NO: 3587096 - DNA, 25 bp, Homo sapien
catgaaagctgcattgcttgttgag

SEQ ID NO: 3587097 - DNA, 25 bp, Homo sapien
gctcaattctgttacagcagtaagg

SEQ ID NO: 3587098 - DNA, 25 bp, Homo sapien
caattaatagggctcaattctgtta

SEQ ID NO: 3587099 - DNA, 25 bp, Homo sapien
cagcagtaaggtagcctttttgcaa

SEQ ID NO: 3587100 - DNA, 25 bp, Homo sapien
cacatcttcaataccttctatgtat

SEQ ID NO: 3587101 - DNA, 25 bp, Homo sapien
agttgtgttgacatatcaggtatcc

SEQ ID NO: 3587102 - DNA, 25 bp, Homo sapien
gagccagctcgcaagtgcctgggaa

SEQ ID NO: 3587103 - DNA, 25 bp, Homo sapien
catgacacaagtttcctgaattcca

SEQ ID NO: 3587104 - DNA, 25 bp, Homo sapien
gaggaagcactttgttaatgtgtcg

SEQ ID NO: 3587105 - DNA, 25 bp, Homo sapien
tctctgggcagatgtgttatagctg

SEQ ID NO: 3587106 - DNA, 25 bp, Homo sapien
gaaatttaaagcatacccaagaggc

SEQ ID NO: 3587107 - DNA, 25 bp, Homo sapien
gaattaactgggtgtttgtgcaact

SEQ ID NO: 3587108 - DNA, 25 bp, Homo sapien
tgtgcaactgcaatgaattggagag

SEQ ID NO: 3587109 - DNA, 25 bp, Homo sapien
ttgtctgatggcagcagttacatcc

SEQ ID NO: 3587110 - DNA, 25 bp, Homo sapien
gtctgatggcagcagttacatccat

SEQ ID NO: 3587111 - DNA, 25 bp, Homo sapien
ctcttttgtctgatggcagcagtta

SEQ ID NO: 3587112 - DNA, 25 bp, Homo sapien
cttttgtctgatggcagcagttaca

SEQ ID NO: 3587113 - DNA, 25 bp, Homo sapien
agactttgcacattctctgagtaat

SEQ ID NO: 3587114 - DNA, 25 bp, Homo sapien
ttctctgagtaatttgcactttatc

SEQ ID NO: 3587115 - DNA, 25 bp, Homo sapien
gactttgcacattctctgagtaatt

SEQ ID NO: 3587116 - DNA, 25 bp, Homo sapien
tgcacattctctgagtaatttgcac

SEQ ID NO: 3587117 - DNA, 25 bp, Homo sapien
ggatggtgaagggtttaccagatag

SEQ ID NO: 3587118 - DNA, 25 bp, Homo sapien
tcaactgtctgaaaggatggtgaag

SEQ ID NO: 3587119 - DNA, 25 bp, Homo sapien
caactgtctgaaaggatggtgaagg

SEQ ID NO: 3587120 - DNA, 25 bp, Homo sapien
tgaaaggatggtgaagggtttacca

SEQ ID NO: 3587121 - DNA, 25 bp, Homo sapien
cacagccacaccacaatgggctgtg

SEQ ID NO: 3587122 - DNA, 25 bp, Homo sapien
acagccacaccacaatgggctgtgg

SEQ ID NO: 3587123 - DNA, 25 bp, Homo sapien
cagccacaccacaatgggctgtggc

SEQ ID NO: 3587124 - DNA, 25 bp, Homo sapien
gcacagccacaccacaatgggctgt

SEQ ID NO: 3587125 - DNA, 25 bp, Homo sapien
actgggatcacgcttttcatatgat

SEQ ID NO: 3587126 - DNA, 25 bp, Homo sapien
cagcactgggatcacgcttttcata

SEQ ID NO: 3587127 - DNA, 25 bp, Homo sapien
gcactgggatcacgcttttcatatg

SEQ ID NO: 3587128 - DNA, 25 bp, Homo sapien
agcactgggatcacgcttttcatat

SEQ ID NO: 3587129 - DNA, 25 bp, Homo sapien
gaaatggaacataaatttgacctcc

SEQ ID NO: 3587130 - DNA, 25 bp, Homo sapien
acataaatttgacctcctaattgcc

SEQ ID NO: 3587131 - DNA, 25 bp, Homo sapien
tcctaattgccatttgacaaaagga

SEQ ID NO: 3587132 - DNA, 25 bp, Homo sapien
tgccatttgacaaaaggaataataa

SEQ ID NO: 3587133 - DNA, 25 bp, Homo sapien
gctgaatagataaccaggaggacat

SEQ ID NO: 3587134 - DNA, 25 bp, Homo sapien
aatgatttcttggtagtttgctatc

SEQ ID NO: 3587135 - DNA, 25 bp, Homo sapien
gatttcttggtagtttgctatcccc

SEQ ID NO: 3587136 - DNA, 25 bp, Homo sapien
ctggcaggtacactgctgaatagat

SEQ ID NO: 3587137 - DNA, 25 bp, Homo sapien
ctatgaatttcgattaacttcataa

SEQ ID NO: 3587138 - DNA, 25 bp, Homo sapien
atgaatttcgattaacttcataaac

SEQ ID NO: 3587139 - DNA, 25 bp, Homo sapien
tatgaatttcgattaacttcataaa

SEQ ID NO: 3587140 - DNA, 25 bp, Homo sapien
ggttctccgggctttgagagagcat

SEQ ID NO: 3587141 - DNA, 25 bp, Homo sapien
tgcaacccccgttgccatttgccat

SEQ ID NO: 3587142 - DNA, 25 bp, Homo sapien
cttctcagggttctccgggctttga

SEQ ID NO: 3587143 - DNA, 25 bp, Homo sapien
tgcagcttgcaacccccgttgccat

SEQ ID NO: 3587144 - DNA, 25 bp, Homo sapien
ggagggctgtgacctgaattcctaa

SEQ ID NO: 3587145 - DNA, 25 bp, Homo sapien
tcatctctaactgctgtgtttggag

SEQ ID NO: 3587146 - DNA, 25 bp, Homo sapien
tgcaaaacgaccttcatgtattggg

SEQ ID NO: 3587147 - DNA, 25 bp, Homo sapien
tctatgctccacagccaaacttgag

SEQ ID NO: 3587148 - DNA, 25 bp, Homo sapien
tctttcgtctccttttgtgtcatct

SEQ ID NO: 3587149 - DNA, 25 bp, Homo sapien
ggcatctccctcatcagggtttttc

SEQ ID NO: 3587150 - DNA, 25 bp, Homo sapien
catctccctcatcagggtttttctt

SEQ ID NO: 3587151 - DNA, 25 bp, Homo sapien
aaggcagtggcttgccgggtgcaat

SEQ ID NO: 3587152 - DNA, 25 bp, Homo sapien
gaagtagcatagacggtcaacagta

SEQ ID NO: 3587153 - DNA, 25 bp, Homo sapien
aagtagcatagacggtcaacagtac

SEQ ID NO: 3587154 - DNA, 25 bp, Homo sapien
gtagcatagacggtcaacagtacca

SEQ ID NO: 3587155 - DNA, 25 bp, Homo sapien
tagcatagacggtcaacagtaccac

SEQ ID NO: 3587156 - DNA, 25 bp, Homo sapien
gggactgccatctgagataagcagg

SEQ ID NO: 3587157 - DNA, 25 bp, Homo sapien
tctctatacaggaagggactgccat

SEQ ID NO: 3587158 - DNA, 25 bp, Homo sapien
atgccctcggatgtctctatacagg

SEQ ID NO: 3587159 - DNA, 25 bp, Homo sapien
gaagggactgccatctgagataagc

SEQ ID NO: 3587160 - DNA, 25 bp, Homo sapien
acacatctcgccttttttgtctgcc

SEQ ID NO: 3587161 - DNA, 25 bp, Homo sapien
gtctgccactttttgagagccatta

SEQ ID NO: 3587162 - DNA, 25 bp, Homo sapien
tttcctgcctcttctgacacatctc

SEQ ID NO: 3587163 - DNA, 25 bp, Homo sapien
accttcagtgaatctctccagtggt

SEQ ID NO: 3587164 - DNA, 25 bp, Homo sapien
agtgttaggacaccttctacagtgt

SEQ ID NO: 3587165 - DNA, 25 bp, Homo sapien
gtgttaggacaccttctacagtgtc

SEQ ID NO: 3587166 - DNA, 25 bp, Homo sapien
tgacccgggagaagtgacctgcttt

SEQ ID NO: 3587167 - DNA, 25 bp, Homo sapien
cagattctggtgacgacaatggtaa

SEQ ID NO: 3587168 - DNA, 25 bp, Homo sapien
tcatcagatttgttcggagcgggtg

SEQ ID NO: 3587169 - DNA, 25 bp, Homo sapien
tttgagcgtgttcaccaggtccctg

SEQ ID NO: 3587170 - DNA, 25 bp, Homo sapien
gggtgactttatgactcagcaatca

SEQ ID NO: 3587171 - DNA, 25 bp, Homo sapien
gaccctctagataaaggtgtccact

SEQ ID NO: 3587172 - DNA, 25 bp, Homo sapien
gcatgccgcaccttcattgttgctg

SEQ ID NO: 3587173 - DNA, 25 bp, Homo sapien
aggctttgggtgtttgcatgccgca

SEQ ID NO: 3587174 - DNA, 25 bp, Homo sapien
gggcttgtgctcaagaatgagagcc

SEQ ID NO: 3587175 - DNA, 25 bp, Homo sapien
tgggacatccctggatcattggcct

SEQ ID NO: 3587176 - DNA, 25 bp, Homo sapien
acatccctggatcattggcctgtcc

SEQ ID NO: 3587177 - DNA, 25 bp, Homo sapien
tcaagaatgagagcctttggagatg

SEQ ID NO: 3587178 - DNA, 25 bp, Homo sapien
tcctcgaatttctatgagggctttc

SEQ ID NO: 3587179 - DNA, 25 bp, Homo sapien
gggctttcttgaagccgctttggta

SEQ ID NO: 3587180 - DNA, 25 bp, Homo sapien
gaggcaacttcctcgaatttctatg

SEQ ID NO: 3587181 - DNA, 25 bp, Homo sapien
gaagccgctttggtagggccaacac

SEQ ID NO: 3587182 - DNA, 25 bp, Homo sapien
tagtgcccttggctaagagactgca

SEQ ID NO: 3587183 - DNA, 25 bp, Homo sapien
tttgtagtgcccttggctaagagac

SEQ ID NO: 3587184 - DNA, 25 bp, Homo sapien
tgccacatttgtagtgcccttggct

SEQ ID NO: 3587185 - DNA, 25 bp, Homo sapien
ccttggctaagagactgcatctgga

SEQ ID NO: 3587186 - DNA, 25 bp, Homo sapien
tgggacttggctgattatggaaaat

SEQ ID NO: 3587187 - DNA, 25 bp, Homo sapien
tacaggaaataattgggacttggct

SEQ ID NO: 3587188 - DNA, 25 bp, Homo sapien
gtctcacaaaacaaatgcggcagag

SEQ ID NO: 3587189 - DNA, 25 bp, Homo sapien
gcggcagagacaatacaggaaataa

SEQ ID NO: 3587190 - DNA, 25 bp, Homo sapien
catcctgctgagagccatttccaga

SEQ ID NO: 3587191 - DNA, 25 bp, Homo sapien
aaggccagctgaagcctgctgccag

SEQ ID NO: 3587192 - DNA, 25 bp, Homo sapien
ggatccggtcacacctgcatgcaaa

SEQ ID NO: 3587193 - DNA, 25 bp, Homo sapien
tggcagccaagacctaaggactcca

SEQ ID NO: 3587194 - DNA, 25 bp, Homo sapien
tgggagcttagacagcccctgttca

SEQ ID NO: 3587195 - DNA, 25 bp, Homo sapien
tatatcgggtacttccaagcagtcc

SEQ ID NO: 3587196 - DNA, 25 bp, Homo sapien
tgcattgcctcttcccacttcggtg

SEQ ID NO: 3587197 - DNA, 25 bp, Homo sapien
caattccagaatccctaacagagta

SEQ ID NO: 3587198 - DNA, 25 bp, Homo sapien
gctttacaatgggattcggaacctc

SEQ ID NO: 3587199 - DNA, 25 bp, Homo sapien
aagaagatcggctacaactggctgc

SEQ ID NO: 3587200 - DNA, 25 bp, Homo sapien
tgatcaccaaggaagtaagcgcctg

SEQ ID NO: 3587201 - DNA, 25 bp, Homo sapien
tgtgtttgtgtatccccgcggtgca

SEQ ID NO: 3587202 - DNA, 25 bp, Homo sapien
tcgacatcccgaagatgccctggtt

SEQ ID NO: 3587203 - DNA, 25 bp, Homo sapien
ccctcgacatcccgaagatgccctg

SEQ ID NO: 3587204 - DNA, 25 bp, Homo sapien
ctcccctcgacatcccgaagatgcc

SEQ ID NO: 3587205 - DNA, 25 bp, Homo sapien
gacatcccgaagatgccctggttca

SEQ ID NO: 3587206 - DNA, 25 bp, Homo sapien
ccccagcaatgtcaccactaaggtt

SEQ ID NO: 3587207 - DNA, 25 bp, Homo sapien
tttttcaaattcgggatagtggtca

SEQ ID NO: 3587208 - DNA, 25 bp, Homo sapien
gttaaatctgtggagatgcaccatg

SEQ ID NO: 3587209 - DNA, 25 bp, Homo sapien
ccactaaggttaaatctgtggagat

SEQ ID NO: 3587210 - DNA, 25 bp, Homo sapien
gttaatgtgatattgaactttcccc

SEQ ID NO: 3587211 - DNA, 25 bp, Homo sapien
aatgtgatattgaactttcccctca

SEQ ID NO: 3587212 - DNA, 25 bp, Homo sapien
tgttaatgtgatattgaactttccc

SEQ ID NO: 3587213 - DNA, 25 bp, Homo sapien
taatgtgatattgaactttcccctc

SEQ ID NO: 3587214 - DNA, 25 bp, Homo sapien
gaggagaccctgagtatctgctgaa

SEQ ID NO: 3587215 - DNA, 25 bp, Homo sapien
tatctgctgaaaatgtgcagttggg

SEQ ID NO: 3587216 - DNA, 25 bp, Homo sapien
actctcggggctccataatcttgaa

SEQ ID NO: 3587217 - DNA, 25 bp, Homo sapien
tcatctggcttagactatctctggg

SEQ ID NO: 3587218 - DNA, 25 bp, Homo sapien
gcaactcggccattagagagtatgg

SEQ ID NO: 3587219 - DNA, 25 bp, Homo sapien
attagagagtatggccctgacaccc

SEQ ID NO: 3587220 - DNA, 25 bp, Homo sapien
tacaaaggcaactcggccattagag

SEQ ID NO: 3587221 - DNA, 25 bp, Homo sapien
ccattacaaaggcaactcggccatt

SEQ ID NO: 3587222 - DNA, 25 bp, Homo sapien
taattgtgatgacaccatgaaaaag

SEQ ID NO: 3587223 - DNA, 25 bp, Homo sapien
tctcatctggggttgcacatgcttt

SEQ ID NO: 3587224 - DNA, 25 bp, Homo sapien
aattgtgatgacaccatgaaaaaga

SEQ ID NO: 3587225 - DNA, 25 bp, Homo sapien
tctaatctcatctggggttgcacat

SEQ ID NO: 3587226 - DNA, 25 bp, Homo sapien
ctgttggactcaatgacttccatca

SEQ ID NO: 3587227 - DNA, 25 bp, Homo sapien
atcatcctggtccaagccgcagtcc

SEQ ID NO: 3587228 - DNA, 25 bp, Homo sapien
aggagttccacaatttcctgttgga

SEQ ID NO: 3587229 - DNA, 25 bp, Homo sapien
ccacaatttcctgttggactcaatg

SEQ ID NO: 3587230 - DNA, 25 bp, Homo sapien
atccctgcaccagggcgtttgcact

SEQ ID NO: 3587231 - DNA, 25 bp, Homo sapien
caccagggcgtttgcactgatgttc

SEQ ID NO: 3587232 - DNA, 25 bp, Homo sapien
tacatggctcacttccttagctcca

SEQ ID NO: 3587233 - DNA, 25 bp, Homo sapien
tttccctctcgtgttacatggctca

SEQ ID NO: 3587234 - DNA, 25 bp, Homo sapien
gcagctattgtgagtgtgtcttata

SEQ ID NO: 3587235 - DNA, 25 bp, Homo sapien
tcttcgcaactttctaagaaggtac

SEQ ID NO: 3587236 - DNA, 25 bp, Homo sapien
tctaagaaggtactattttcatcct

SEQ ID NO: 3587237 - DNA, 25 bp, Homo sapien
aatactcaacattctgagccagcag

SEQ ID NO: 3587238 - DNA, 25 bp, Homo sapien
gactctgcactcaaaagttagggtg

SEQ ID NO: 3587239 - DNA, 25 bp, Homo sapien
ttactggcgcgctttttggccgggc

SEQ ID NO: 3587240 - DNA, 25 bp, Homo sapien
tgagttttgcccctccgaagtgcgg

SEQ ID NO: 3587241 - DNA, 25 bp, Homo sapien
tagtagtcgcttagaaaatccttgc

SEQ ID NO: 3587242 - DNA, 25 bp, Homo sapien
ttcagtgctgagttgaatgcatggc

SEQ ID NO: 3587243 - DNA, 25 bp, Homo sapien
gagttgaatgcatggcacgtgctca

SEQ ID NO: 3587244 - DNA, 25 bp, Homo sapien
aatttcttggcaacagcatgtccac

SEQ ID NO: 3587245 - DNA, 25 bp, Homo sapien
ttatccctatctttcagtgctgagt

SEQ ID NO: 3587246 - DNA, 25 bp, Homo sapien
ttcttggatccataggtttttggtg

SEQ ID NO: 3587247 - DNA, 25 bp, Homo sapien
ggtttgccagggttcggcactgaca

SEQ ID NO: 3587248 - DNA, 25 bp, Homo sapien
gggttcggcactgacaatccactaa

SEQ ID NO: 3587249 - DNA, 25 bp, Homo sapien
catagctgttacctggtttgccagg

SEQ ID NO: 3587250 - DNA, 25 bp, Homo sapien
catccttctaggaccttcctctgga

SEQ ID NO: 3587251 - DNA, 25 bp, Homo sapien
atttctgcctgggttgacatctggg

SEQ ID NO: 3587252 - DNA, 25 bp, Homo sapien
cacacactatttgtgccgtcctcta

SEQ ID NO: 3587253 - DNA, 25 bp, Homo sapien
ggatcaagcccaaagacaacgcaga

SEQ ID NO: 3587254 - DNA, 25 bp, Homo sapien
cactttttgctccatatgagtggct

SEQ ID NO: 3587255 - DNA, 25 bp, Homo sapien
tcttctagggtcactttttgctcca

SEQ ID NO: 3587256 - DNA, 25 bp, Homo sapien
tgctgtacttgtttgtgaaacttct

SEQ ID NO: 3587257 - DNA, 25 bp, Homo sapien
ctgtggatctccaactgcctgccac

SEQ ID NO: 3587258 - DNA, 25 bp, Homo sapien
gtggatctccaactgcctgccacac

SEQ ID NO: 3587259 - DNA, 25 bp, Homo sapien
ggatctccaactgcctgccacacat

SEQ ID NO: 3587260 - DNA, 25 bp, Homo sapien
tgtggatctccaactgcctgccaca

SEQ ID NO: 3587261 - DNA, 25 bp, Homo sapien
ggctttcttactagatccctgacta

SEQ ID NO: 3587262 - DNA, 25 bp, Homo sapien
gactattttggtctccagccacgtc

SEQ ID NO: 3587263 - DNA, 25 bp, Homo sapien
ctgtgctcagtaccatgcatggtat

SEQ ID NO: 3587264 - DNA, 25 bp, Homo sapien
acatatgtttctgccctccaagctg

SEQ ID NO: 3587265 - DNA, 25 bp, Homo sapien
gcagtagtcatagtggcatcacact

SEQ ID NO: 3587266 - DNA, 25 bp, Homo sapien
cagtagtagcataagtcatggcaag

SEQ ID NO: 3587267 - DNA, 25 bp, Homo sapien
tggtcaacatgagcaacccagtcac

SEQ ID NO: 3587268 - DNA, 25 bp, Homo sapien
taagcggaaggcctttccgagagat

SEQ ID NO: 3587269 - DNA, 25 bp, Homo sapien
tgtgctcggtgttctaagcatgcag

SEQ ID NO: 3587270 - DNA, 25 bp, Homo sapien
tcggtgttctaagcatgcagtggga

SEQ ID NO: 3587271 - DNA, 25 bp, Homo sapien
gcatgcagtgggaatcatgcctgca

SEQ ID NO: 3587272 - DNA, 25 bp, Homo sapien
gcactgtgctcggtgttctaagcat

SEQ ID NO: 3587273 - DNA, 25 bp, Homo sapien
gcctcagtgcataaggtggagcaga

SEQ ID NO: 3587274 - DNA, 25 bp, Homo sapien
caaaagcttcaagtgcaggggatga

SEQ ID NO: 3587275 - DNA, 25 bp, Homo sapien
atgagcctcagtgcataaggtggag

SEQ ID NO: 3587276 - DNA, 25 bp, Homo sapien
gaaatatggttgatggcagcaagaa

SEQ ID NO: 3587277 - DNA, 25 bp, Homo sapien
tccacgggggagcttgcctttctat

SEQ ID NO: 3587278 - DNA, 25 bp, Homo sapien
gggagcttgcctttctattccaaat

SEQ ID NO: 3587279 - DNA, 25 bp, Homo sapien
tctattccaaattgtgacgtgaggt

SEQ ID NO: 3587280 - DNA, 25 bp, Homo sapien
tcacagtcgactccacgggggagct

SEQ ID NO: 3587281 - DNA, 25 bp, Homo sapien
cacatgtgtgcagttgcggcctgag

SEQ ID NO: 3587282 - DNA, 25 bp, Homo sapien
cacaagttccgtgaggtcaggtatt

SEQ ID NO: 3587283 - DNA, 25 bp, Homo sapien
gcctgagggattaggagttttcaaa

SEQ ID NO: 3587284 - DNA, 25 bp, Homo sapien
tcacatgtgattatcacaagttccg

SEQ ID NO: 3587285 - DNA, 25 bp, Homo sapien
agtggatctgccaacatgcaaggcc

SEQ ID NO: 3587286 - DNA, 25 bp, Homo sapien
cagtggatctgccaacatgcaaggc

SEQ ID NO: 3587287 - DNA, 25 bp, Homo sapien
ggatgtctgtagccactggtgtgtt

SEQ ID NO: 3587288 - DNA, 25 bp, Homo sapien
tgtgatgacagctcagcagatggag

SEQ ID NO: 3587289 - DNA, 25 bp, Homo sapien
attgagccaccattcagggaagagc

SEQ ID NO: 3587290 - DNA, 25 bp, Homo sapien
aagatgagcttggagggattgagcc

SEQ ID NO: 3587291 - DNA, 25 bp, Homo sapien
attttgccgtaggtataatatttat

SEQ ID NO: 3587292 - DNA, 25 bp, Homo sapien
ttgccgtaggtataatatttattct

SEQ ID NO: 3587293 - DNA, 25 bp, Homo sapien
gcatctttgtccagctttagcctgg

SEQ ID NO: 3587294 - DNA, 25 bp, Homo sapien
tgcatctttgtccagctttagcctg

SEQ ID NO: 3587295 - DNA, 25 bp, Homo sapien
tccctttcccacttggcaagaattg

SEQ ID NO: 3587296 - DNA, 25 bp, Homo sapien
cacttggcaagaattggctttctgt

SEQ ID NO: 3587297 - DNA, 25 bp, Homo sapien
gttcaatgtagatgacatatttcat

SEQ ID NO: 3587298 - DNA, 25 bp, Homo sapien
tgttcaatgtagatgacatatttca

SEQ ID NO: 3587299 - DNA, 25 bp, Homo sapien
ctgttcaatgtagatgacatatttc

SEQ ID NO: 3587300 - DNA, 25 bp, Homo sapien
gtagtaatcagcatcgggtggattc

SEQ ID NO: 3587301 - DNA, 25 bp, Homo sapien
tcagatgattcattgtagtaatcag

SEQ ID NO: 3587302 - DNA, 25 bp, Homo sapien
gatgattcattgtagtaatcagcat

SEQ ID NO: 3587303 - DNA, 25 bp, Homo sapien
aatcagcatcgggtggattctcatc

SEQ ID NO: 3587304 - DNA, 25 bp, Homo sapien
tgtctttgagcccaactggctggct

SEQ ID NO: 3587305 - DNA, 25 bp, Homo sapien
tctgagtgtctcaaggaagtgttca

SEQ ID NO: 3587306 - DNA, 25 bp, Homo sapien
gcaggtgtctttgagcccaactggc

SEQ ID NO: 3587307 - DNA, 25 bp, Homo sapien
taaatatactggagattccttgaca

SEQ ID NO: 3587308 - DNA, 25 bp, Homo sapien
ctttagtgagcacatctgcacattc

SEQ ID NO: 3587309 - DNA, 25 bp, Homo sapien
tagtgagcacatctgcacattccat

SEQ ID NO: 3587310 - DNA, 25 bp, Homo sapien
ttagtgagcacatctgcacattcca

SEQ ID NO: 3587311 - DNA, 25 bp, Homo sapien
tttagtgagcacatctgcacattcc

SEQ ID NO: 3587312 - DNA, 25 bp, Homo sapien
gttattatgtagtagggttggcacc

SEQ ID NO: 3587313 - DNA, 25 bp, Homo sapien
cctacaagctatggaaaattctgcc

SEQ ID NO: 3587314 - DNA, 25 bp, Homo sapien
aaacctcatggccaactaattggac

SEQ ID NO: 3587315 - DNA, 25 bp, Homo sapien
tagcagagccacacttttgttcagg

SEQ ID NO: 3587316 - DNA, 25 bp, Homo sapien
ttcctcaaccagtccgctttctgcc

SEQ ID NO: 3587317 - DNA, 25 bp, Homo sapien
tctcattcctcaaccagtccgcttt

SEQ ID NO: 3587318 - DNA, 25 bp, Homo sapien
tcctaggctcacacgaactctcatt

SEQ ID NO: 3587319 - DNA, 25 bp, Homo sapien
taggctcacacgaactctcattcct

SEQ ID NO: 3587320 - DNA, 25 bp, Homo sapien
gtacaccctgcttggtccattcctt

SEQ ID NO: 3587321 - DNA, 25 bp, Homo sapien
tgtaatgtcagtacaccctgcttgg

SEQ ID NO: 3587322 - DNA, 25 bp, Homo sapien
tgtcagtacaccctgcttggtccat

SEQ ID NO: 3587323 - DNA, 25 bp, Homo sapien
tgcatttgtaatgtcagtacaccct

SEQ ID NO: 3587324 - DNA, 25 bp, Homo sapien
tactaacatatggatctatgtcaca

SEQ ID NO: 3587325 - DNA, 25 bp, Homo sapien
gcaaggagcttaacataactttact

SEQ ID NO: 3587326 - DNA, 25 bp, Homo sapien
gataggctcttttactagtctctac

SEQ ID NO: 3587327 - DNA, 25 bp, Homo sapien
tgttgtctcgtaaaagcactattca

SEQ ID NO: 3587328 - DNA, 25 bp, Homo sapien
ctttcctaattaagagacccacatc

SEQ ID NO: 3587329 - DNA, 25 bp, Homo sapien
gaccactggtacaggaaaagccact

SEQ ID NO: 3587330 - DNA, 25 bp, Homo sapien
gaccagtatccacattcatttccac

SEQ ID NO: 3587331 - DNA, 25 bp, Homo sapien
gacccacatcctattcttaacttat

SEQ ID NO: 3587332 - DNA, 25 bp, Homo sapien
gagctcataagcctgctccctgtgg

SEQ ID NO: 3587333 - DNA, 25 bp, Homo sapien
gctccctgtgggacgggacttcagc

SEQ ID NO: 3587334 - DNA, 25 bp, Homo sapien
taagcctgctccctgtgggacggga

SEQ ID NO: 3587335 - DNA, 25 bp, Homo sapien
gctctgactgcttgttccaggggca

SEQ ID NO: 3587336 - DNA, 25 bp, Homo sapien
gatgcgagggcactaatttaaagcc

SEQ ID NO: 3587337 - DNA, 25 bp, Homo sapien
gggctggatgatgcgagggcactaa

SEQ ID NO: 3587338 - DNA, 25 bp, Homo sapien
tggatgatgcgagggcactaattta

SEQ ID NO: 3587339 - DNA, 25 bp, Homo sapien
ctaatttaaagccagagacaaccat

SEQ ID NO: 3587340 - DNA, 25 bp, Homo sapien
tcatccccagaccagggatggaggc

SEQ ID NO: 3587341 - DNA, 25 bp, Homo sapien
cagggatggaggccagggtttggag

SEQ ID NO: 3587342 - DNA, 25 bp, Homo sapien
gatggaggccagggtttggaggctt

SEQ ID NO: 3587343 - DNA, 25 bp, Homo sapien
gggatggaggccagggtttggaggc

SEQ ID NO: 3587344 - DNA, 25 bp, Homo sapien
gtgctggcaaatgatggtcgtgttt

SEQ ID NO: 3587345 - DNA, 25 bp, Homo sapien
catttgtgctggcaaatgatggtcg

SEQ ID NO: 3587346 - DNA, 25 bp, Homo sapien
ttccatatagagggtcctgaaagtt

SEQ ID NO: 3587347 - DNA, 25 bp, Homo sapien
tttgtgctggcaaatgatggtcgtg

SEQ ID NO: 3587348 - DNA, 25 bp, Homo sapien
catcaattggactaatgccaaagga

SEQ ID NO: 3587349 - DNA, 25 bp, Homo sapien
agaagatcatcaattggactaatgc

SEQ ID NO: 3587350 - DNA, 25 bp, Homo sapien
caattggactaatgccaaaggattc

SEQ ID NO: 3587351 - DNA, 25 bp, Homo sapien
acctctcagaaaggatcagaagatc

SEQ ID NO: 3587352 - DNA, 25 bp, Homo sapien
gatgtcattgctgagcttggacagg

SEQ ID NO: 3587353 - DNA, 25 bp, Homo sapien
ggatggagatgtcattgctgagctt

SEQ ID NO: 3587354 - DNA, 25 bp, Homo sapien
aagggcactggaaattttgataaag

SEQ ID NO: 3587355 - DNA, 25 bp, Homo sapien
ctggtgcaatcaaaagggcactgga

SEQ ID NO: 3587356 - DNA, 25 bp, Homo sapien
ctgattctggctctctaatgttgat

SEQ ID NO: 3587357 - DNA, 25 bp, Homo sapien
tggctctctaatgttgatgactgaa

SEQ ID NO: 3587358 - DNA, 25 bp, Homo sapien
tctggctctctaatgttgatgactg

SEQ ID NO: 3587359 - DNA, 25 bp, Homo sapien
gattctggctctctaatgttgatga

SEQ ID NO: 3587360 - DNA, 25 bp, Homo sapien
gctactaatttctcaaacttcttta

SEQ ID NO: 3587361 - DNA, 25 bp, Homo sapien
ttctcaaacttctttaccaaagatg

SEQ ID NO: 3587362 - DNA, 25 bp, Homo sapien
tcaaacttctttaccaaagatgcct

SEQ ID NO: 3587363 - DNA, 25 bp, Homo sapien
cgctactaatttctcaaacttcttt

SEQ ID NO: 3587364 - DNA, 25 bp, Homo sapien
tttctatacaatggccaccttggcc

SEQ ID NO: 3587365 - DNA, 25 bp, Homo sapien
tgcaaacaacatacttgagcaatgt

SEQ ID NO: 3587366 - DNA, 25 bp, Homo sapien
aaaggcaatgcgctggagcaaatgc

SEQ ID NO: 3587367 - DNA, 25 bp, Homo sapien
cactctgctgtatgtgcaaacaaca

SEQ ID NO: 3587368 - DNA, 25 bp, Homo sapien
tataaatggactaaattctgcaatt

SEQ ID NO: 3587369 - DNA, 25 bp, Homo sapien
ttaaatataaatggactaaattctg

SEQ ID NO: 3587370 - DNA, 25 bp, Homo sapien
aatataaatggactaaattctgcaa

SEQ ID NO: 3587371 - DNA, 25 bp, Homo sapien
taaatataaatggactaaattctgc

SEQ ID NO: 3587372 - DNA, 25 bp, Homo sapien
tatagtaagacttgtgccttgccac

SEQ ID NO: 3587373 - DNA, 25 bp, Homo sapien
gattaactgacttggaacggagctc

SEQ ID NO: 3587374 - DNA, 25 bp, Homo sapien
gcacgcatgcatgtaggaactagct

SEQ ID NO: 3587375 - DNA, 25 bp, Homo sapien
cttattaagggaagctaggtgagcc

SEQ ID NO: 3587376 - DNA, 25 bp, Homo sapien
aagtctctcaggcaactgattaact

SEQ ID NO: 3587377 - DNA, 25 bp, Homo sapien
tctctcaggcaactgattaactttc

SEQ ID NO: 3587378 - DNA, 25 bp, Homo sapien
tctcaggcaactgattaactttcag

SEQ ID NO: 3587379 - DNA, 25 bp, Homo sapien
agaaaagtctctcaggcaactgatt

SEQ ID NO: 3587380 - DNA, 25 bp, Homo sapien
tatgactaaaggctcagtgtaacag

SEQ ID NO: 3587381 - DNA, 25 bp, Homo sapien
aatttgacaggtgcaatcactctca

SEQ ID NO: 3587382 - DNA, 25 bp, Homo sapien
taacaaactagagtatcaccagcct

SEQ ID NO: 3587383 - DNA, 25 bp, Homo sapien
caccagcctgagtaaacagttcatg

SEQ ID NO: 3587384 - DNA, 25 bp, Homo sapien
gaatgtggtgcctacaaaactcagg

SEQ ID NO: 3587385 - DNA, 25 bp, Homo sapien
acagtgtaggcttcttggagttccc

SEQ ID NO: 3587386 - DNA, 25 bp, Homo sapien
gccaggagtttcaccagcaagcggt

SEQ ID NO: 3587387 - DNA, 25 bp, Homo sapien
tggaaagagtccacaaatcctccgt

SEQ ID NO: 3587388 - DNA, 25 bp, Homo sapien
ctctgacgaaaaacaagggagttgc

SEQ ID NO: 3587389 - DNA, 25 bp, Homo sapien
tcaaggctgagtggtctcgaccaag

SEQ ID NO: 3587390 - DNA, 25 bp, Homo sapien
catgatcttgaacagtgcctcttga

SEQ ID NO: 3587391 - DNA, 25 bp, Homo sapien
gagttttctatacttccaggagcca

SEQ ID NO: 3587392 - DNA, 25 bp, Homo sapien
caactttgggagtaggataaataat

SEQ ID NO: 3587393 - DNA, 25 bp, Homo sapien
cagatgttaagcatgttgaattcaa

SEQ ID NO: 3587394 - DNA, 25 bp, Homo sapien
aaggactctgtggagtgccagctac

SEQ ID NO: 3587395 - DNA, 25 bp, Homo sapien
tgccagctacaactttgggagtagg

SEQ ID NO: 3587396 - DNA, 25 bp, Homo sapien
taataagaagccaacaactccagtg

SEQ ID NO: 3587397 - DNA, 25 bp, Homo sapien
taatgttccttcgaaaatgtaagaa

SEQ ID NO: 3587398 - DNA, 25 bp, Homo sapien
cgaggaataagaattgctccggcac

SEQ ID NO: 3587399 - DNA, 25 bp, Homo sapien
tgctcacagctccaacgaaggaaat

SEQ ID NO: 3587400 - DNA, 25 bp, Homo sapien
catcgatgacgattatatcaccaca

SEQ ID NO: 3587401 - DNA, 25 bp, Homo sapien
catctatagggctgaagtggcataa

SEQ ID NO: 3587402 - DNA, 25 bp, Homo sapien
tctagggagctatagagcataactc

SEQ ID NO: 3587403 - DNA, 25 bp, Homo sapien
ccttttaactttgctctctagggag

SEQ ID NO: 3587404 - DNA, 25 bp, Homo sapien
taccgactctaagacaggatatcag

SEQ ID NO: 3587405 - DNA, 25 bp, Homo sapien
tctgaagggtaaatgcagatacatc

SEQ ID NO: 3587406 - DNA, 25 bp, Homo sapien
tacttttctagtctgcagaggcaac

SEQ ID NO: 3587407 - DNA, 25 bp, Homo sapien
aaagcacttgatattacagcaccaa

SEQ ID NO: 3587408 - DNA, 25 bp, Homo sapien
ttgtgaggtgcctatataccaggta

SEQ ID NO: 3587409 - DNA, 25 bp, Homo sapien
tgaggtgcctatataccaggtaagc

SEQ ID NO: 3587410 - DNA, 25 bp, Homo sapien
tgtgaggtgcctatataccaggtaa

SEQ ID NO: 3587411 - DNA, 25 bp, Homo sapien
aggtgcctatataccaggtaagcac

SEQ ID NO: 3587412 - DNA, 25 bp, Homo sapien
taaccaagaaggatcttatcccaaa

SEQ ID NO: 3587413 - DNA, 25 bp, Homo sapien
gatttgcttccatttagtatgaaat

SEQ ID NO: 3587414 - DNA, 25 bp, Homo sapien
aatactaaccaagaaggatcttatc

SEQ ID NO: 3587415 - DNA, 25 bp, Homo sapien
ggatcttatcccaaattcacagatt

SEQ ID NO: 3587416 - DNA, 25 bp, Homo sapien
aaaatgccaaaggaatatagaattt

SEQ ID NO: 3587417 - DNA, 25 bp, Homo sapien
ctggaacatagaactgaattgaata

SEQ ID NO: 3587418 - DNA, 25 bp, Homo sapien
tagaattttcactgattgatataac

SEQ ID NO: 3587419 - DNA, 25 bp, Homo sapien
aactgaattgaatatgtcacaaaaa

SEQ ID NO: 3587420 - DNA, 25 bp, Homo sapien
aagtatagttcttgggtgaaaatct

SEQ ID NO: 3587421 - DNA, 25 bp, Homo sapien
aaaatctttggaggtatgtcatcag

SEQ ID NO: 3587422 - DNA, 25 bp, Homo sapien
atctttggaggtatgtcatcagttg

SEQ ID NO: 3587423 - DNA, 25 bp, Homo sapien
aatctttggaggtatgtcatcagtt

SEQ ID NO: 3587424 - DNA, 25 bp, Homo sapien
cccctccatgtgtccgcgttttcat

SEQ ID NO: 3587425 - DNA, 25 bp, Homo sapien
caatgaacaaaggtatttatgtgtt

SEQ ID NO: 3587426 - DNA, 25 bp, Homo sapien
ctccatgtgtccgcgttttcatcat

SEQ ID NO: 3587427 - DNA, 25 bp, Homo sapien
ttttaaggtctttgaggcatcgcca

SEQ ID NO: 3587428 - DNA, 25 bp, Homo sapien
agtgcagcagctcaatcttagctca

SEQ ID NO: 3587429 - DNA, 25 bp, Homo sapien
ggagtgcagcagctcaatcttagct

SEQ ID NO: 3587430 - DNA, 25 bp, Homo sapien
tgcagcagctcaatcttagctcact

SEQ ID NO: 3587431 - DNA, 25 bp, Homo sapien
ctggagtgcagcagctcaatcttag

SEQ ID NO: 3587432 - DNA, 25 bp, Homo sapien
gcagagtccacacagaaacagacta

SEQ ID NO: 3587433 - DNA, 25 bp, Homo sapien
aaacagactataggctgcatagggc

SEQ ID NO: 3587434 - DNA, 25 bp, Homo sapien
cctctaatgaaaggtggtgtctagc

SEQ ID NO: 3587435 - DNA, 25 bp, Homo sapien
catagggcatatctccacagtgcaa

SEQ ID NO: 3587436 - DNA, 25 bp, Homo sapien
tctcaactagttccattctaattgg

SEQ ID NO: 3587437 - DNA, 25 bp, Homo sapien
gagtctcaactagttccattctaat

SEQ ID NO: 3587438 - DNA, 25 bp, Homo sapien
ctagttccattctaattggaaagtc

SEQ ID NO: 3587439 - DNA, 25 bp, Homo sapien
aatcaagagtctcaactagttccat

SEQ ID NO: 3587440 - DNA, 25 bp, Homo sapien
gattaattggagctactgcagggac

SEQ ID NO: 3587441 - DNA, 25 bp, Homo sapien
gacagtgtcaccctccaagattgag

SEQ ID NO: 3587442 - DNA, 25 bp, Homo sapien
tgtgcctggtaatacaaacctttca

SEQ ID NO: 3587443 - DNA, 25 bp, Homo sapien
ttcaatgtgaatgtgtgcacactcc

SEQ ID NO: 3587444 - DNA, 25 bp, Homo sapien
aataaggaagtaagtctgcatggta

SEQ ID NO: 3587445 - DNA, 25 bp, Homo sapien
ggaagtaagtctgcatggtaatcac

SEQ ID NO: 3587446 - DNA, 25 bp, Homo sapien
tctgcatggtaatcactgccactat

SEQ ID NO: 3587447 - DNA, 25 bp, Homo sapien
gtaagtctgcatggtaatcactgcc

SEQ ID NO: 3587448 - DNA, 25 bp, Homo sapien
aaagttgtaacaatccccatgccaa

SEQ ID NO: 3587449 - DNA, 25 bp, Homo sapien
catgccaatattcaacgcttgaggg

SEQ ID NO: 3587450 - DNA, 25 bp, Homo sapien
gctgcctttgatttcatcatggaaa

SEQ ID NO: 3587451 - DNA, 25 bp, Homo sapien
cgcttgagggaaacgctttgattct

SEQ ID NO: 3587452 - DNA, 25 bp, Homo sapien
tggtattagctttataacactgttt

SEQ ID NO: 3587453 - DNA, 25 bp, Homo sapien
ttagaatcctcagaatctttggagt

SEQ ID NO: 3587454 - DNA, 25 bp, Homo sapien
tattagctttataacactgtttctc

SEQ ID NO: 3587455 - DNA, 25 bp, Homo sapien
agaatcctcagaatctttggagtct

SEQ ID NO: 3587456 - DNA, 25 bp, Homo sapien
cactattggaaggttgtggggatct

SEQ ID NO: 3587457 - DNA, 25 bp, Homo sapien
aatacagcagtaccaaaaaagagtg

SEQ ID NO: 3587458 - DNA, 25 bp, Homo sapien
caaatacagcagtaccaaaaaagag

SEQ ID NO: 3587459 - DNA, 25 bp, Homo sapien
atttcttccaaccagccactattgg

SEQ ID NO: 3587460 - DNA, 25 bp, Homo sapien
tgacaacatactggtaaattatcac

SEQ ID NO: 3587461 - DNA, 25 bp, Homo sapien
tactggtaaattatcacaagactga

SEQ ID NO: 3587462 - DNA, 25 bp, Homo sapien
caacatactggtaaattatcacaag

SEQ ID NO: 3587463 - DNA, 25 bp, Homo sapien
taaattatcacaagactgacagcca

SEQ ID NO: 3587464 - DNA, 25 bp, Homo sapien
tatccttaggtcaacacttcttctc

SEQ ID NO: 3587465 - DNA, 25 bp, Homo sapien
aacgttggcaaggaatgaaagtaca

SEQ ID NO: 3587466 - DNA, 25 bp, Homo sapien
tctttagttcacgaatgaagaccaa

SEQ ID NO: 3587467 - DNA, 25 bp, Homo sapien
ggtttgatgaattggtactatttga

SEQ ID NO: 3587468 - DNA, 25 bp, Homo sapien
gacagagatctacgtttcaacctaa

SEQ ID NO: 3587469 - DNA, 25 bp, Homo sapien
cacatatgagggaacacctgtgtct

SEQ ID NO: 3587470 - DNA, 25 bp, Homo sapien
catgttacacgaccctagaaaggca

SEQ ID NO: 3587471 - DNA, 25 bp, Homo sapien
catggctacttgctctcgctaagac

SEQ ID NO: 3587472 - DNA, 25 bp, Homo sapien
cttctcgaggtgttacctttgtggc

SEQ ID NO: 3587473 - DNA, 25 bp, Homo sapien
caagttgtctccattctccccaaca

SEQ ID NO: 3587474 - DNA, 25 bp, Homo sapien
tctcgaggtgttacctttgtggcgt

SEQ ID NO: 3587475 - DNA, 25 bp, Homo sapien
gaggtgttacctttgtggcgttctc

SEQ ID NO: 3587476 - DNA, 25 bp, Homo sapien
taaggcttgctgtctagtggtgaaa

SEQ ID NO: 3587477 - DNA, 25 bp, Homo sapien
gatgctgagacatggtacactggaa

SEQ ID NO: 3587478 - DNA, 25 bp, Homo sapien
gaaaggtttcacagaacaggtgaca

SEQ ID NO: 3587479 - DNA, 25 bp, Homo sapien
catacagggatagtctaaatcaggg

SEQ ID NO: 3587480 - DNA, 25 bp, Homo sapien
tgttatcaccagaaaaaagtcaacc

SEQ ID NO: 3587481 - DNA, 25 bp, Homo sapien
gctgtgttatcaccagaaaaaagtc

SEQ ID NO: 3587482 - DNA, 25 bp, Homo sapien
aatcccagctgtgttatcaccagaa

SEQ ID NO: 3587483 - DNA, 25 bp, Homo sapien
ccagctgtgttatcaccagaaaaaa

SEQ ID NO: 3587484 - DNA, 25 bp, Homo sapien
catagcaaagctcacagtgtcacta

SEQ ID NO: 3587485 - DNA, 25 bp, Homo sapien
tccaaggactcacttccatagcaaa

SEQ ID NO: 3587486 - DNA, 25 bp, Homo sapien
ttccatagcaaagctcacagtgtca

SEQ ID NO: 3587487 - DNA, 25 bp, Homo sapien
cagtgtcactataacctaatgttga

SEQ ID NO: 3587488 - DNA, 25 bp, Homo sapien
gacatagaaagtgactgcaacgtac

SEQ ID NO: 3587489 - DNA, 25 bp, Homo sapien
cagacatagaaagtgactgcaacgt

SEQ ID NO: 3587490 - DNA, 25 bp, Homo sapien
ctcagacatagaaagtgactgcaac

SEQ ID NO: 3587491 - DNA, 25 bp, Homo sapien
tcagacatagaaagtgactgcaacg

SEQ ID NO: 3587492 - DNA, 25 bp, Homo sapien
tcctataaacacaaggctgattggt

SEQ ID NO: 3587493 - DNA, 25 bp, Homo sapien
cctataaacacaaggctgattggtc

SEQ ID NO: 3587494 - DNA, 25 bp, Homo sapien
taactggtgattacaaagataagtc

SEQ ID NO: 3587495 - DNA, 25 bp, Homo sapien
ttaactggtgattacaaagataagt

SEQ ID NO: 3587496 - DNA, 25 bp, Homo sapien
attgccaatggaagtcctaaaaggc

SEQ ID NO: 3587497 - DNA, 25 bp, Homo sapien
ttgccaatggaagtcctaaaaggcc

SEQ ID NO: 3587498 - DNA, 25 bp, Homo sapien
ctttaagaaggtgcataagagtttg

SEQ ID NO: 3587499 - DNA, 25 bp, Homo sapien
tttaagaaggtgcataagagtttgt

SEQ ID NO: 3587500 - DNA, 25 bp, Homo sapien
caagatccctagcatttgttacgca

SEQ ID NO: 3587501 - DNA, 25 bp, Homo sapien
tataaagaagcatgtactacctcct

SEQ ID NO: 3587502 - DNA, 25 bp, Homo sapien
gtaattcctatacactgctctgtga

SEQ ID NO: 3587503 - DNA, 25 bp, Homo sapien
cattgaaggtggagactatgtctta

SEQ ID NO: 3587504 - DNA, 25 bp, Homo sapien
tgatgtcccatcaaaattctgctca

SEQ ID NO: 3587505 - DNA, 25 bp, Homo sapien
gaacaggcagaagctcttgctcatg

SEQ ID NO: 3587506 - DNA, 25 bp, Homo sapien
catctgatgtcccatcaaaattctg

SEQ ID NO: 3587507 - DNA, 25 bp, Homo sapien
ctgaacaggcagaagctcttgctca

SEQ ID NO: 3587508 - DNA, 25 bp, Homo sapien
cacaataatggactccatcccaaag

SEQ ID NO: 3587509 - DNA, 25 bp, Homo sapien
ttaaaaggtatgcatcagaatggcc

SEQ ID NO: 3587510 - DNA, 25 bp, Homo sapien
gcagggcttgctaaaacacacaata

SEQ ID NO: 3587511 - DNA, 25 bp, Homo sapien
ctgttccttagtttctcatgtttag

SEQ ID NO: 3587512 - DNA, 25 bp, Homo sapien
tttagtttgctagtgaaaaggatgt

SEQ ID NO: 3587513 - DNA, 25 bp, Homo sapien
tgctagtgaaaaggatgtcaaagac

SEQ ID NO: 3587514 - DNA, 25 bp, Homo sapien
gaaaaggatgtcaaagactatgatg

SEQ ID NO: 3587515 - DNA, 25 bp, Homo sapien
aaagactatgatggcttttatgcac

SEQ ID NO: 3587516 - DNA, 25 bp, Homo sapien
caagtgagcaagctacaggtatctc

SEQ ID NO: 3587517 - DNA, 25 bp, Homo sapien
tctgggataacaaggagtaaaatga

SEQ ID NO: 3587518 - DNA, 25 bp, Homo sapien
tcattctggtcagcacgacctgttc

SEQ ID NO: 3587519 - DNA, 25 bp, Homo sapien
cgacctgttcgaaactctgggataa

SEQ ID NO: 3587520 - DNA, 25 bp, Homo sapien
cccggcagccgccggcgtcgccgcc

SEQ ID NO: 3587521 - DNA, 25 bp, Homo sapien
agctcctcgcgcctcgccgccccgg

SEQ ID NO: 3587522 - DNA, 25 bp, Homo sapien
ccgccggcgtcgccgccgcttccat

SEQ ID NO: 3587523 - DNA, 25 bp, Homo sapien
ctagctcctcgcgcctcgccgcccc

SEQ ID NO: 3587524 - DNA, 25 bp, Homo sapien
agtgctcactctcccgccgctgcgt

SEQ ID NO: 3587525 - DNA, 25 bp, Homo sapien
gctgcgtggccggcgtcaggcccag

SEQ ID NO: 3587526 - DNA, 25 bp, Homo sapien
cgccgcccgagtgctcactctcccg

SEQ ID NO: 3587527 - DNA, 25 bp, Homo sapien
tgcgtggccggcgtcaggcccaggc

SEQ ID NO: 3587528 - DNA, 25 bp, Homo sapien
taaatcatgctgcatagagtggtac

SEQ ID NO: 3587529 - DNA, 25 bp, Homo sapien
caggtgtgtgtcagcacatttggct

SEQ ID NO: 3587530 - DNA, 25 bp, Homo sapien
aagactgggccatcagattgtaggt

SEQ ID NO: 3587531 - DNA, 25 bp, Homo sapien
gaggaaatactgtcccaagactggg

SEQ ID NO: 3587532 - DNA, 25 bp, Homo sapien
caaatatcctggtaaacttgagtat

SEQ ID NO: 3587533 - DNA, 25 bp, Homo sapien
cttcatggggatccacacattttta

SEQ ID NO: 3587534 - DNA, 25 bp, Homo sapien
taaacttgagtatagtagagcttca

SEQ ID NO: 3587535 - DNA, 25 bp, Homo sapien
gagcaggcaccggagatttcaaagc

SEQ ID NO: 3587536 - DNA, 25 bp, Homo sapien
tctggttcttgggttgctacgagac

SEQ ID NO: 3587537 - DNA, 25 bp, Homo sapien
tggctgccactctgcaatggttgct

SEQ ID NO: 3587538 - DNA, 25 bp, Homo sapien
gctcagctgacattgttggataaga

SEQ ID NO: 3587539 - DNA, 25 bp, Homo sapien
aatggttgctgcctctcgtggctca

SEQ ID NO: 3587540 - DNA, 25 bp, Homo sapien
tgtcctgcaagcatggaatccccag

SEQ ID NO: 3587541 - DNA, 25 bp, Homo sapien
cagggctgcctgtgaattagtgtgt

SEQ ID NO: 3587542 - DNA, 25 bp, Homo sapien
cctcatcaggaggtgtcacatgtgc

SEQ ID NO: 3587543 - DNA, 25 bp, Homo sapien
ggcttattttcccacacgccatgtg

SEQ ID NO: 3587544 - DNA, 25 bp, Homo sapien
agtataatttgagggcgtggcacag

SEQ ID NO: 3587545 - DNA, 25 bp, Homo sapien
aagtataatttgaagcttctacctg

SEQ ID NO: 3587546 - DNA, 25 bp, Homo sapien
aagtgtgatcattgaaccagcttca

SEQ ID NO: 3587547 - DNA, 25 bp, Homo sapien
gaatggaaaacatggtctaggccag

SEQ ID NO: 3587548 - DNA, 25 bp, Homo sapien
cggtagggacagtaaatgagtgtct

SEQ ID NO: 3587549 - DNA, 25 bp, Homo sapien
gggacagtaaatgagtgtctctgaa

SEQ ID NO: 3587550 - DNA, 25 bp, Homo sapien
gggcggtagggacagtaaatgagtg

SEQ ID NO: 3587551 - DNA, 25 bp, Homo sapien
tgcaggggggcggtagggacagtaa

SEQ ID NO: 3587552 - DNA, 25 bp, Homo sapien
tgggaatgtcaccagcaagaccgtc

SEQ ID NO: 3587553 - DNA, 25 bp, Homo sapien
cacgagactcgccaaaggtatgatg

SEQ ID NO: 3587554 - DNA, 25 bp, Homo sapien
caagaccgtcactgtggtagagaca

SEQ ID NO: 3587555 - DNA, 25 bp, Homo sapien
tcctggagggtatttagtgaagcca

SEQ ID NO: 3587556 - DNA, 25 bp, Homo sapien
cagaattcaccagcatttaaagctc

SEQ ID NO: 3587557 - DNA, 25 bp, Homo sapien
tcagaattcaccagcatttaaagct

SEQ ID NO: 3587558 - DNA, 25 bp, Homo sapien
agaattcaccagcatttaaagctcc

SEQ ID NO: 3587559 - DNA, 25 bp, Homo sapien
gtgctttcaccagcctgaagctgag

SEQ ID NO: 3587560 - DNA, 25 bp, Homo sapien
aaagaggaggctgcattgctagtgc

SEQ ID NO: 3587561 - DNA, 25 bp, Homo sapien
gcctgaagctgagaaccaaagcgga

SEQ ID NO: 3587562 - DNA, 25 bp, Homo sapien
gactgtgacagcgttgagagacctt

SEQ ID NO: 3587563 - DNA, 25 bp, Homo sapien
acagatgtgttgtttcagatgaata

SEQ ID NO: 3587564 - DNA, 25 bp, Homo sapien
cacagatgtgttgtttcagatgaat

SEQ ID NO: 3587565 - DNA, 25 bp, Homo sapien
agtctctgaaggtttaagccacaca

SEQ ID NO: 3587566 - DNA, 25 bp, Homo sapien
acacagatgtgttgtttcagatgaa

SEQ ID NO: 3587567 - DNA, 25 bp, Homo sapien
gagcaaaagcatgtctcaacacaca

SEQ ID NO: 3587568 - DNA, 25 bp, Homo sapien
tttttgagcctcagaagtggagact

SEQ ID NO: 3587569 - DNA, 25 bp, Homo sapien
ttttttgagcctcagaagtggagac

SEQ ID NO: 3587570 - DNA, 25 bp, Homo sapien
acagagcaaaagcatgtctcaacac

SEQ ID NO: 3587571 - DNA, 25 bp, Homo sapien
ttttccagggtgaaagtcaagtcac

SEQ ID NO: 3587572 - DNA, 25 bp, Homo sapien
tatccaacccattatagcagcaatc

SEQ ID NO: 3587573 - DNA, 25 bp, Homo sapien
ccaaaactgtgtgaatacatatcca

SEQ ID NO: 3587574 - DNA, 25 bp, Homo sapien
tctaagatgatttccatagcgcctc

SEQ ID NO: 3587575 - DNA, 25 bp, Homo sapien
tggcactgctcttaacaccggtcat

SEQ ID NO: 3587576 - DNA, 25 bp, Homo sapien
ttggcactgctcttaacaccggtca

SEQ ID NO: 3587577 - DNA, 25 bp, Homo sapien
gcttttggtatttgtcactgtacta

SEQ ID NO: 3587578 - DNA, 25 bp, Homo sapien
cagggttgtcagttgcaaactacaa

SEQ ID NO: 3587579 - DNA, 25 bp, Homo sapien
gatgctaaacttccaagaacaatgg

SEQ ID NO: 3587580 - DNA, 25 bp, Homo sapien
cactactttccctgctaatgctgtt

SEQ ID NO: 3587581 - DNA, 25 bp, Homo sapien
ccaacccagaatttgatatatagcc

SEQ ID NO: 3587582 - DNA, 25 bp, Homo sapien
gaacacaaaccagtggcactatgca

SEQ ID NO: 3587583 - DNA, 25 bp, Homo sapien
caaaacctccgagatatatgggatt

SEQ ID NO: 3587584 - DNA, 25 bp, Homo sapien
gatactctatgggaagattatcccc

SEQ ID NO: 3587585 - DNA, 25 bp, Homo sapien
ggtacataggccaaaggaacagaat

SEQ ID NO: 3587586 - DNA, 25 bp, Homo sapien
gagtagccaaaactaccctgagcaa

SEQ ID NO: 3587587 - DNA, 25 bp, Homo sapien
tatagaacaaaagacccagagtagc

SEQ ID NO: 3587588 - DNA, 25 bp, Homo sapien
tgttgaggaaaggatagtcccttca

SEQ ID NO: 3587589 - DNA, 25 bp, Homo sapien
tctggagccccagcttaaagacagg

SEQ ID NO: 3587590 - DNA, 25 bp, Homo sapien
cagatgattgcaagctggctgtgag

SEQ ID NO: 3587591 - DNA, 25 bp, Homo sapien
tttcacaagactatcaaacggctgc

SEQ ID NO: 3587592 - DNA, 25 bp, Homo sapien
tcctgagggtaaagtcatctggagc

SEQ ID NO: 3587593 - DNA, 25 bp, Homo sapien
caggtgaccgtatacaattcatcta

SEQ ID NO: 3587594 - DNA, 25 bp, Homo sapien
tttgtcaagaaacagcataatggtt

SEQ ID NO: 3587595 - DNA, 25 bp, Homo sapien
catctatgaagctcaatttgtcaag

SEQ ID NO: 3587596 - DNA, 25 bp, Homo sapien
gaaacacctgttagaactgatatcc

SEQ ID NO: 3587597 - DNA, 25 bp, Homo sapien
gggacagcgaggtcgcgctcgcgcg

SEQ ID NO: 3587598 - DNA, 25 bp, Homo sapien
ctcgcgcggggtgaggttggaggca

SEQ ID NO: 3587599 - DNA, 25 bp, Homo sapien
cgggacagcgaggtcgcgctcgcgc

SEQ ID NO: 3587600 - DNA, 25 bp, Homo sapien
cgcgctcgcgcggggtgaggttgga

SEQ ID NO: 3587601 - DNA, 25 bp, Homo sapien
cagttggccgatatcttttccccac

SEQ ID NO: 3587602 - DNA, 25 bp, Homo sapien
cctccatgacagttggccgatatct

SEQ ID NO: 3587603 - DNA, 25 bp, Homo sapien
tgacagttggccgatatcttttccc

SEQ ID NO: 3587604 - DNA, 25 bp, Homo sapien
ggccgatatcttttccccactctat

SEQ ID NO: 3587605 - DNA, 25 bp, Homo sapien
ttcttggtacttcccaagtattctc

SEQ ID NO: 3587606 - DNA, 25 bp, Homo sapien
ttggtacttcccaagtattctcctc

SEQ ID NO: 3587607 - DNA, 25 bp, Homo sapien
acttcccaagtattctcctctaggc

SEQ ID NO: 3587608 - DNA, 25 bp, Homo sapien
ggtacttcccaagtattctcctcta

SEQ ID NO: 3587609 - DNA, 25 bp, Homo sapien
accctcatgtcaatttttaacaatg

SEQ ID NO: 3587610 - DNA, 25 bp, Homo sapien
gagccaccccgtccaccctcatgtc

SEQ ID NO: 3587611 - DNA, 25 bp, Homo sapien
ccgtccaccctcatgtcaattttta

SEQ ID NO: 3587612 - DNA, 25 bp, Homo sapien
accccgtccaccctcatgtcaattt

SEQ ID NO: 3587613 - DNA, 25 bp, Homo sapien
ttaaatataaatggactaaattctg

SEQ ID NO: 3587614 - DNA, 25 bp, Homo sapien
tataaatggactaaattctgcaatt

SEQ ID NO: 3587615 - DNA, 25 bp, Homo sapien
taaatataaatggactaaattctgc

SEQ ID NO: 3587616 - DNA, 25 bp, Homo sapien
aatataaatggactaaattctgcaa

SEQ ID NO: 3587617 - DNA, 25 bp, Homo sapien
catttgcagttggacaatataacac

SEQ ID NO: 3587618 - DNA, 25 bp, Homo sapien
agcatcaagccttccctactaggga

SEQ ID NO: 3587619 - DNA, 25 bp, Homo sapien
taactccaagcattgattctccctg

SEQ ID NO: 3587620 - DNA, 25 bp, Homo sapien
caggttccatggtgagtgcattgtc

SEQ ID NO: 3587621 - DNA, 25 bp, Homo sapien
tgggaaggggactcatcagccgcac

SEQ ID NO: 3587622 - DNA, 25 bp, Homo sapien
gatcaggtaattgcaagacatgcag

SEQ ID NO: 3587623 - DNA, 25 bp, Homo sapien
ctaaatgctgatcaggtaattgcaa

SEQ ID NO: 3587624 - DNA, 25 bp, Homo sapien
agggatggccgcagacgccttcctc

SEQ ID NO: 3587625 - DNA, 25 bp, Homo sapien
ctgaatgagaaagtccttgggacag

SEQ ID NO: 3587626 - DNA, 25 bp, Homo sapien
gagaaagtccttgggacagtggcct

SEQ ID NO: 3587627 - DNA, 25 bp, Homo sapien
gcagtctttctcagaccagcaagca

SEQ ID NO: 3587628 - DNA, 25 bp, Homo sapien
ccttgggacagtggcctgcagtctt

SEQ ID NO: 3587629 - DNA, 25 bp, Homo sapien
tcttcaggtggagctacttatcgat

SEQ ID NO: 3587630 - DNA, 25 bp, Homo sapien
tcaaatcacattaagcacagagaag

SEQ ID NO: 3587631 - DNA, 25 bp, Homo sapien
aatgaggtgagtgtggattccagct

SEQ ID NO: 3587632 - DNA, 25 bp, Homo sapien
tccctttggagattgtgaacacgtg

SEQ ID NO: 3587633 - DNA, 25 bp, Homo sapien
gaaaggcacatgaagtggaccataa

SEQ ID NO: 3587634 - DNA, 25 bp, Homo sapien
catgcgcgcgcgctttgaagtctga

SEQ ID NO: 3587635 - DNA, 25 bp, Homo sapien
gaccataaggtgtatggcacattca

SEQ ID NO: 3587636 - DNA, 25 bp, Homo sapien
gctttgaagtctgaaaggcacatga

SEQ ID NO: 3587637 - DNA, 25 bp, Homo sapien
ccaagaaagcggagatactttaatc

SEQ ID NO: 3587638 - DNA, 25 bp, Homo sapien
gcggagatactttaatcaagtcaaa

SEQ ID NO: 3587639 - DNA, 25 bp, Homo sapien
ctgataaaacatcccctattccctc

SEQ ID NO: 3587640 - DNA, 25 bp, Homo sapien
cctattccctcccaagaaagcggag

SEQ ID NO: 3587641 - DNA, 25 bp, Homo sapien
agctcagcaacatgaacatctctga

SEQ ID NO: 3587642 - DNA, 25 bp, Homo sapien
catgaacatctctgaatatgaaagc

SEQ ID NO: 3587643 - DNA, 25 bp, Homo sapien
cctctccctgccgatggggtccgca

SEQ ID NO: 3587644 - DNA, 25 bp, Homo sapien
tgaaagccattttttgtttgcgtcc

SEQ ID NO: 3587645 - DNA, 25 bp, Homo sapien
acaccacgatcaagagcacgaccac

SEQ ID NO: 3587646 - DNA, 25 bp, Homo sapien
atcaagagcacgaccacggccagcg

SEQ ID NO: 3587647 - DNA, 25 bp, Homo sapien
gggcgcgtggccacgtacacaaaca

SEQ ID NO: 3587648 - DNA, 25 bp, Homo sapien
acgatcaagagcacgaccacggcca

SEQ ID NO: 3587649 - DNA, 25 bp, Homo sapien
cacactcctcttgccaaggctggaa

SEQ ID NO: 3587650 - DNA, 25 bp, Homo sapien
ccacactcctcttgccaaggctgga

SEQ ID NO: 3587651 - DNA, 25 bp, Homo sapien
ggccacactcctcttgccaaggctg

SEQ ID NO: 3587652 - DNA, 25 bp, Homo sapien
gccacactcctcttgccaaggctgg

SEQ ID NO: 3587653 - DNA, 25 bp, Homo sapien
tatctgcaacttacatgacaaaggg

SEQ ID NO: 3587654 - DNA, 25 bp, Homo sapien
atctgcaacttacatgacaaagggc

SEQ ID NO: 3587655 - DNA, 25 bp, Homo sapien
gatcagcgctctaagtagtgggcac

SEQ ID NO: 3587656 - DNA, 25 bp, Homo sapien
cctgggtaccagacaaataatactg

SEQ ID NO: 3587657 - DNA, 25 bp, Homo sapien
ggattgggaagcaccaactacgccg

SEQ ID NO: 3587658 - DNA, 25 bp, Homo sapien
caggctctaagttctcttgggatca

SEQ ID NO: 3587659 - DNA, 25 bp, Homo sapien
ggccagcctcattaaggctgcagag

SEQ ID NO: 3587660 - DNA, 25 bp, Homo sapien
acagaggtcaccgtctagggggcat

SEQ ID NO: 3587661 - DNA, 25 bp, Homo sapien
ggagacccgggtcacagtaataatg

SEQ ID NO: 3587662 - DNA, 25 bp, Homo sapien
gatagagatgaaggactcagttgtg

SEQ ID NO: 3587663 - DNA, 25 bp, Homo sapien
agcttgtcttaaaggatgactgtga

SEQ ID NO: 3587664 - DNA, 25 bp, Homo sapien
ctgaaaggtataggaacccctggct

SEQ ID NO: 3587665 - DNA, 25 bp, Homo sapien
ttattgtgctaggatggcataatgc

SEQ ID NO: 3587666 - DNA, 25 bp, Homo sapien
aatccaggaccaatcacttacaggc

SEQ ID NO: 3587667 - DNA, 25 bp, Homo sapien
ttcgcgggaccgtggtgaggatgga

SEQ ID NO: 3587668 - DNA, 25 bp, Homo sapien
aggatggagtaggaagctgtataac

SEQ ID NO: 3587669 - DNA, 25 bp, Homo sapien
tggtgaggatggagtaggaagctgt

SEQ ID NO: 3587670 - DNA, 25 bp, Homo sapien
tggagtaggaagctgtataactcag

SEQ ID NO: 3587671 - DNA, 25 bp, Homo sapien
tccttgtggagctaatggcctgtcg

SEQ ID NO: 3587672 - DNA, 25 bp, Homo sapien
tctggtcaggatttaaagggcaaac

SEQ ID NO: 3587673 - DNA, 25 bp, Homo sapien
gtgtagttgacattcaaaggcccca

SEQ ID NO: 3587674 - DNA, 25 bp, Homo sapien
gaaacaagccattagcagcactctg

SEQ ID NO: 3587675 - DNA, 25 bp, Homo sapien
taaggatcgcctcaccatggctctg

SEQ ID NO: 3587676 - DNA, 25 bp, Homo sapien
cagggctggctcaagcacatctgct

SEQ ID NO: 3587677 - DNA, 25 bp, Homo sapien
tctctgtaggagcaagacaagaagc

SEQ ID NO: 3587678 - DNA, 25 bp, Homo sapien
gacagacctgccttcgagaggcaaa

SEQ ID NO: 3587679 - DNA, 25 bp, Homo sapien
gcagccaccggccatgtgttgaaca

SEQ ID NO: 3587680 - DNA, 25 bp, Homo sapien
aataatattctcctgggctggcatg

SEQ ID NO: 3587681 - DNA, 25 bp, Homo sapien
ggtttgatgcgagaagcctggttca

SEQ ID NO: 3587682 - DNA, 25 bp, Homo sapien
gctggactgaatatcaaagccggaa

SEQ ID NO: 3587683 - DNA, 25 bp, Homo sapien
tcaacttcaagaatcgttgattaat

SEQ ID NO: 3587684 - DNA, 25 bp, Homo sapien
tccagtacaggtgacttgagttatt

SEQ ID NO: 3587685 - DNA, 25 bp, Homo sapien
agcaaactgatttccagtacaggtg

SEQ ID NO: 3587686 - DNA, 25 bp, Homo sapien
tcaagaatcgttgattaatttcagc

SEQ ID NO: 3587687 - DNA, 25 bp, Homo sapien
tggcagaacgttgagaggaagacct

SEQ ID NO: 3587688 - DNA, 25 bp, Homo sapien
cacagagctgctagcagtggcagaa

SEQ ID NO: 3587689 - DNA, 25 bp, Homo sapien
cctgtacagcacagtgagttagggc

SEQ ID NO: 3587690 - DNA, 25 bp, Homo sapien
gaaagttgtctcacgctgtaacaga

SEQ ID NO: 3587691 - DNA, 25 bp, Homo sapien
caatggatgtgataggacaacagac

SEQ ID NO: 3587692 - DNA, 25 bp, Homo sapien
aagcatttatgagactccagctgtc

SEQ ID NO: 3587693 - DNA, 25 bp, Homo sapien
ggtttcagagtctatgttgcaacaa

SEQ ID NO: 3587694 - DNA, 25 bp, Homo sapien
tacacctgggtcaagttctgatata

SEQ ID NO: 3587695 - DNA, 25 bp, Homo sapien
ctggtactggttctgtctttctcag

SEQ ID NO: 3587696 - DNA, 25 bp, Homo sapien
tggttctgtctttctcagcagaggg

SEQ ID NO: 3587697 - DNA, 25 bp, Homo sapien
actggttctgtctttctcagcagag

SEQ ID NO: 3587698 - DNA, 25 bp, Homo sapien
ggtactggttctgtctttctcagca

SEQ ID NO: 3587699 - DNA, 25 bp, Homo sapien
gaaagattctagctgaaacagggtt

SEQ ID NO: 3587700 - DNA, 25 bp, Homo sapien
ggaagatcagttactaatgcccttc

SEQ ID NO: 3587701 - DNA, 25 bp, Homo sapien
acagggtttttaagcttcatcctct

SEQ ID NO: 3587702 - DNA, 25 bp, Homo sapien
aagtgtgcagggaagatcagttact

SEQ ID NO: 3587703 - DNA, 25 bp, Homo sapien
acatccaatacatcctgtccatcaa

SEQ ID NO: 3587704 - DNA, 25 bp, Homo sapien
gtccatcaacaagtacgtatttact

SEQ ID NO: 3587705 - DNA, 25 bp, Homo sapien
agggcccacatccaatacatcctgt

SEQ ID NO: 3587706 - DNA, 25 bp, Homo sapien
ttactagatgttgggggcatgtcag

SEQ ID NO: 3587707 - DNA, 25 bp, Homo sapien
tctgctgcgggactcttccactttt

SEQ ID NO: 3587708 - DNA, 25 bp, Homo sapien
tgctgcgggactcttccactttttc

SEQ ID NO: 3587709 - DNA, 25 bp, Homo sapien
cctctgctgcgggactcttccactt

SEQ ID NO: 3587710 - DNA, 25 bp, Homo sapien
gctgcgggactcttccactttttca

SEQ ID NO: 3587711 - DNA, 25 bp, Homo sapien
tgaagaagtatgacagtcgaaccaa

SEQ ID NO: 3587712 - DNA, 25 bp, Homo sapien
tatgacagtcgaaccaaatccattc

SEQ ID NO: 3587713 - DNA, 25 bp, Homo sapien
agcagagggagtcgagccagagtcg

SEQ ID NO: 3587714 - DNA, 25 bp, Homo sapien
tggacatcaggcagcatcatatcac

SEQ ID NO: 3587715 - DNA, 25 bp, Homo sapien
gcaggtccaacagaggtaacctggc

SEQ ID NO: 3587716 - DNA, 25 bp, Homo sapien
gagcaggcaggtccaacagaggtaa

SEQ ID NO: 3587717 - DNA, 25 bp, Homo sapien
ttcctcctcgcagcgagaacacagc

SEQ ID NO: 3587718 - DNA, 25 bp, Homo sapien
cagagacagcttgttgctggagatg

SEQ ID NO: 3587719 - DNA, 25 bp, Homo sapien
cgatgacaggacatgcagaccccag

SEQ ID NO: 3587720 - DNA, 25 bp, Homo sapien
cccgcagagactgcacccgtcagag

SEQ ID NO: 3587721 - DNA, 25 bp, Homo sapien
atgacaggacatgcagaccccagcc

SEQ ID NO: 3587722 - DNA, 25 bp, Homo sapien
ggcttggcgccccgcagagactgca

SEQ ID NO: 3587723 - DNA, 25 bp, Homo sapien
gccactcctgcttcccagtcaaccc

SEQ ID NO: 3587724 - DNA, 25 bp, Homo sapien
ctgccactcctgcttcccagtcaac

SEQ ID NO: 3587725 - DNA, 25 bp, Homo sapien
tgttcactgccactcctgcttccca

SEQ ID NO: 3587726 - DNA, 25 bp, Homo sapien
tatgttcactgccactcctgcttcc

SEQ ID NO: 3587727 - DNA, 25 bp, Homo sapien
tctgaaagcaccaacctacgcagac

SEQ ID NO: 3587728 - DNA, 25 bp, Homo sapien
catctgcattgtcaacgggctccac

SEQ ID NO: 3587729 - DNA, 25 bp, Homo sapien
tacgcagacactagcaggccatgtc

SEQ ID NO: 3587730 - DNA, 25 bp, Homo sapien
tgccaccctcgaggctgtgagcaga

SEQ ID NO: 3587731 - DNA, 25 bp, Homo sapien
gcgcgggcgactctggcgcgccaga

SEQ ID NO: 3587732 - DNA, 25 bp, Homo sapien
caccactgccgggaatacgtggcag

SEQ ID NO: 3587733 - DNA, 25 bp, Homo sapien
cgtcctaaccctaactcgctggctg

SEQ ID NO: 3587734 - DNA, 25 bp, Homo sapien
ctctgccgccgggaagccgaatcct

SEQ ID NO: 3587735 - DNA, 25 bp, Homo sapien
gacaccttgttgaggctcaaccagt

SEQ ID NO: 3587736 - DNA, 25 bp, Homo sapien
tgaggctcaaccagtggaacaagcc

SEQ ID NO: 3587737 - DNA, 25 bp, Homo sapien
cagtggaacaagccactctggtttt

SEQ ID NO: 3587738 - DNA, 25 bp, Homo sapien
ccttgttgaggctcaaccagtggaa

SEQ ID NO: 3587739 - DNA, 25 bp, Homo sapien
ccctgctgccggcaaccaaagcatg

SEQ ID NO: 3587740 - DNA, 25 bp, Homo sapien
gccaagaacaccagtgaacccttta

SEQ ID NO: 3587741 - DNA, 25 bp, Homo sapien
agccaagaacaccagtgaacccttt

SEQ ID NO: 3587742 - DNA, 25 bp, Homo sapien
gctgccggcaaccaaagcatgctct

SEQ ID NO: 3587743 - DNA, 25 bp, Homo sapien
caagaagtgcaacttctcggtgcat

SEQ ID NO: 3587744 - DNA, 25 bp, Homo sapien
tatgtctcggacaatgatcaggaca

SEQ ID NO: 3587745 - DNA, 25 bp, Homo sapien
aggcttctctatgtctcggacaatg

SEQ ID NO: 3587746 - DNA, 25 bp, Homo sapien
gacaatgatcaggacaagaagtgca

SEQ ID NO: 3587747 - DNA, 25 bp, Homo sapien
atatcccattagagctcgccagcct

SEQ ID NO: 3587748 - DNA, 25 bp, Homo sapien
caaccaggatctgaaagatgactga

SEQ ID NO: 3587749 - DNA, 25 bp, Homo sapien
gactgaagggcttcccattctggta

SEQ ID NO: 3587750 - DNA, 25 bp, Homo sapien
ggattggattggctgtccaccggcc

SEQ ID NO: 3587751 - DNA, 25 bp, Homo sapien
gaggtctccggtcgtcaaaagagca

SEQ ID NO: 3587752 - DNA, 25 bp, Homo sapien
ggctgtggctgaaccatctccaaga

SEQ ID NO: 3587753 - DNA, 25 bp, Homo sapien
tcctgtgaatctcggaggcttagcc

SEQ ID NO: 3587754 - DNA, 25 bp, Homo sapien
gaagtgttggcttgggaatgaccca

SEQ ID NO: 3587755 - DNA, 25 bp, Homo sapien
aaagtgtgggcagccaactggcttt

SEQ ID NO: 3587756 - DNA, 25 bp, Homo sapien
tcgacatagggtattgggaattggc

SEQ ID NO: 3587757 - DNA, 25 bp, Homo sapien
agccaactggctttcgacatagggt

SEQ ID NO: 3587758 - DNA, 25 bp, Homo sapien
tagggtattgggaattggcaagtca

SEQ ID NO: 3587759 - DNA, 25 bp, Homo sapien
actcccttcttgaagtgaaccatta

SEQ ID NO: 3587760 - DNA, 25 bp, Homo sapien
aactcccttcttgaagtgaaccatt

SEQ ID NO: 3587761 - DNA, 25 bp, Homo sapien
aaactcccttcttgaagtgaaccat

SEQ ID NO: 3587762 - DNA, 25 bp, Homo sapien
ctcccttcttgaagtgaaccattac

SEQ ID NO: 3587763 - DNA, 25 bp, Homo sapien
tcccagatgtagtccaagcagcctg

SEQ ID NO: 3587764 - DNA, 25 bp, Homo sapien
catcttggttctagagacgccatcc

SEQ ID NO: 3587765 - DNA, 25 bp, Homo sapien
gctccacactcagaaactgaaggct

SEQ ID NO: 3587766 - DNA, 25 bp, Homo sapien
agcctggaggagcacactctacagc

SEQ ID NO: 3587767 - DNA, 25 bp, Homo sapien
tctttgagaagttcccgtcttttgc

SEQ ID NO: 3587768 - DNA, 25 bp, Homo sapien
caaggccaatgtccacagggtcttt

SEQ ID NO: 3587769 - DNA, 25 bp, Homo sapien
catgtttgttagctgcctgcatgtc

SEQ ID NO: 3587770 - DNA, 25 bp, Homo sapien
caattacttttgaggatttcgtcgt

SEQ ID NO: 3587771 - DNA, 25 bp, Homo sapien
gctttccagatgctcgggagccatt

SEQ ID NO: 3587772 - DNA, 25 bp, Homo sapien
cattctgcaggcaagcagacctatt

SEQ ID NO: 3587773 - DNA, 25 bp, Homo sapien
cctatttgcagggacgggcaattgt

SEQ ID NO: 3587774 - DNA, 25 bp, Homo sapien
tatgtgggttgggtcaaaactggaa

SEQ ID NO: 3587775 - DNA, 25 bp, Homo sapien
tgcatcttgaccaatgctgccagcc

SEQ ID NO: 3587776 - DNA, 25 bp, Homo sapien
cgtagtaatggcctaactgcttcct

SEQ ID NO: 3587777 - DNA, 25 bp, Homo sapien
tcaaaggatgaagggtatctaccca

SEQ ID NO: 3587778 - DNA, 25 bp, Homo sapien
agcactcaaaccctcgtagtaatgg

SEQ ID NO: 3587779 - DNA, 25 bp, Homo sapien
gattcatttgttcaaagccaataca

SEQ ID NO: 3587780 - DNA, 25 bp, Homo sapien
tttctgtctcagctagaactgattg

SEQ ID NO: 3587781 - DNA, 25 bp, Homo sapien
tctttccttccacggtatacttctg

SEQ ID NO: 3587782 - DNA, 25 bp, Homo sapien
ccacggtatacttctgattcatttg

SEQ ID NO: 3587783 - DNA, 25 bp, Homo sapien
tttatggagcaacttcctaaagtaa

SEQ ID NO: 3587784 - DNA, 25 bp, Homo sapien
tgtttatggagcaacttcctaaagt

SEQ ID NO: 3587785 - DNA, 25 bp, Homo sapien
tatggagcaacttcctaaagtaatt

SEQ ID NO: 3587786 - DNA, 25 bp, Homo sapien
ctgtttatggagcaacttcctaaag

SEQ ID NO: 3587787 - DNA, 25 bp, Homo sapien
gtttccagtagcactgggcacacat

SEQ ID NO: 3587788 - DNA, 25 bp, Homo sapien
ggcacacattgtatgctagaacttg

SEQ ID NO: 3587789 - DNA, 25 bp, Homo sapien
cattgtatgctagaacttggtgaac

SEQ ID NO: 3587790 - DNA, 25 bp, Homo sapien
tttccagtagcactgggcacacatt

SEQ ID NO: 3587791 - DNA, 25 bp, Homo sapien
tccttcaatattggtagcaaacatt

SEQ ID NO: 3587792 - DNA, 25 bp, Homo sapien
cttcaatattggtagcaaacatttg

SEQ ID NO: 3587793 - DNA, 25 bp, Homo sapien
tcaatattggtagcaaacatttgac

SEQ ID NO: 3587794 - DNA, 25 bp, Homo sapien
tttccttcaatattggtagcaaaca

SEQ ID NO: 3587795 - DNA, 25 bp, Homo sapien
tggttgaatgtggactttgttacac

SEQ ID NO: 3587796 - DNA, 25 bp, Homo sapien
ttgatatcagtgcacatgtacaaag

SEQ ID NO: 3587797 - DNA, 25 bp, Homo sapien
tgatatcagtgcacatgtacaaagc

SEQ ID NO: 3587798 - DNA, 25 bp, Homo sapien
gatatcagtgcacatgtacaaagcc

SEQ ID NO: 3587799 - DNA, 25 bp, Homo sapien
gtacgtccagaagcagaaacgtgtc

SEQ ID NO: 3587800 - DNA, 25 bp, Homo sapien
agaagcagaaacgtgtcctccacag

SEQ ID NO: 3587801 - DNA, 25 bp, Homo sapien
ggagtacgtccagaagcagaaacgt

SEQ ID NO: 3587802 - DNA, 25 bp, Homo sapien
ctggagtacgtccagaagcagaaac

SEQ ID NO: 3587803 - DNA, 25 bp, Homo sapien
atgcccttgcaatggcgtggggaag

SEQ ID NO: 3587804 - DNA, 25 bp, Homo sapien
tgcccttgcaatggcgtggggaagc

SEQ ID NO: 3587805 - DNA, 25 bp, Homo sapien
gcccttgcaatggcgtggggaagct

SEQ ID NO: 3587806 - DNA, 25 bp, Homo sapien
tcttttcctttgtgccctgaatcca

SEQ ID NO: 3587807 - DNA, 25 bp, Homo sapien
cctttgtgccctgaatccagctggg

SEQ ID NO: 3587808 - DNA, 25 bp, Homo sapien
aatcttttcctttgtgccctgaatc

SEQ ID NO: 3587809 - DNA, 25 bp, Homo sapien
ttcctttgtgccctgaatccagctg

SEQ ID NO: 3587810 - DNA, 25 bp, Homo sapien
tcatgcagagaataattcagtgtat

SEQ ID NO: 3587811 - DNA, 25 bp, Homo sapien
gcagagaataattcagtgtatgtac

SEQ ID NO: 3587812 - DNA, 25 bp, Homo sapien
tgcagagaataattcagtgtatgta

SEQ ID NO: 3587813 - DNA, 25 bp, Homo sapien
catgcagagaataattcagtgtatg

SEQ ID NO: 3587814 - DNA, 25 bp, Homo sapien
gcacactcagacctttgcattgtgc

SEQ ID NO: 3587815 - DNA, 25 bp, Homo sapien
actcagacctttgcattgtgctttt

SEQ ID NO: 3587816 - DNA, 25 bp, Homo sapien
cagacctttgcattgtgcttttatt

SEQ ID NO: 3587817 - DNA, 25 bp, Homo sapien
cagcacactcagacctttgcattgt

SEQ ID NO: 3587818 - DNA, 25 bp, Homo sapien
ttcggcagactctaaatgcacactg

SEQ ID NO: 3587819 - DNA, 25 bp, Homo sapien
tgcacactgaccatagggaagcctg

SEQ ID NO: 3587820 - DNA, 25 bp, Homo sapien
cagttttgacatagtggagagtaca

SEQ ID NO: 3587821 - DNA, 25 bp, Homo sapien
ggagagtacatgatcttcggcagac

SEQ ID NO: 3587822 - DNA, 25 bp, Homo sapien
caaaactatgtaagacacgattata

SEQ ID NO: 3587823 - DNA, 25 bp, Homo sapien
tcaactttggctccagttgccaaca

SEQ ID NO: 3587824 - DNA, 25 bp, Homo sapien
ctttagcctcagtgtcaactttggc

SEQ ID NO: 3587825 - DNA, 25 bp, Homo sapien
tataatacagtaagcccaaagaaac

SEQ ID NO: 3587826 - DNA, 25 bp, Homo sapien
tgcataccccttttgtgaacagctg

SEQ ID NO: 3587827 - DNA, 25 bp, Homo sapien
tgcagtaggatgctggggtattttc

SEQ ID NO: 3587828 - DNA, 25 bp, Homo sapien
tattttcaaatctttagcctccggc

SEQ ID NO: 3587829 - DNA, 25 bp, Homo sapien
cagtaggatgctggggtattttcaa

SEQ ID NO: 3587830 - DNA, 25 bp, Homo sapien
ttcaaatctttagcctccggcacca

SEQ ID NO: 3587831 - DNA, 25 bp, Homo sapien
aagaattggatcctgtgcttctttg

SEQ ID NO: 3587832 - DNA, 25 bp, Homo sapien
ggtagcagagtttaccttgatattg

SEQ ID NO: 3587833 - DNA, 25 bp, Homo sapien
aaaggggaagaattggatcctgtgc

SEQ ID NO: 3587834 - DNA, 25 bp, Homo sapien
ctctaggtagcagagtttaccttga

SEQ ID NO: 3587835 - DNA, 25 bp, Homo sapien
gataggcccagggaaaagcattgtg

SEQ ID NO: 3587836 - DNA, 25 bp, Homo sapien
ataggcccagggaaaagcattgtga

SEQ ID NO: 3587837 - DNA, 25 bp, Homo sapien
ttaacaccgcgcagccttcccggcg

SEQ ID NO: 3587838 - DNA, 25 bp, Homo sapien
acaccgcgcagccttcccggcggcc

SEQ ID NO: 3587839 - DNA, 25 bp, Homo sapien
taacaccgcgcagccttcccggcgg

SEQ ID NO: 3587840 - DNA, 25 bp, Homo sapien
aacaccgcgcagccttcccggcggc

SEQ ID NO: 3587841 - DNA, 25 bp, Homo sapien
gtgacggcggctcggcgatggctct

SEQ ID NO: 3587842 - DNA, 25 bp, Homo sapien
gcgggcggtttgaatgacggaagtg

SEQ ID NO: 3587843 - DNA, 25 bp, Homo sapien
ccgcggtttggtccggccattggcg

SEQ ID NO: 3587844 - DNA, 25 bp, Homo sapien
atggctctcccgcaggcgcagaaac

SEQ ID NO: 3587845 - DNA, 25 bp, Homo sapien
tgggatcccaggaaggcgccttgtt

SEQ ID NO: 3587846 - DNA, 25 bp, Homo sapien
tgttgcgaacgcaggtacggctcgc

SEQ ID NO: 3587847 - DNA, 25 bp, Homo sapien
taactcagtgcgagaggctttgcgc

SEQ ID NO: 3587848 - DNA, 25 bp, Homo sapien
tgagctgcggttactgtgtccaggc

SEQ ID NO: 3587849 - DNA, 25 bp, Homo sapien
tatctgttagcagtcagtggcccac

SEQ ID NO: 3587850 - DNA, 25 bp, Homo sapien
taaaggatacaattcggcacagcca

SEQ ID NO: 3587851 - DNA, 25 bp, Homo sapien
caaggacagcatctacaggtaagcc

SEQ ID NO: 3587852 - DNA, 25 bp, Homo sapien
tttatggagagatcccaccagaggc

SEQ ID NO: 3587853 - DNA, 25 bp, Homo sapien
ctagctgaagtgaaacaacaaaagg

SEQ ID NO: 3587854 - DNA, 25 bp, Homo sapien
cagagcaagggcaaaagaattccat

SEQ ID NO: 3587855 - DNA, 25 bp, Homo sapien
tacaggttatacaatcaactagctg

SEQ ID NO: 3587856 - DNA, 25 bp, Homo sapien
cataaggtgagtataactgagggag

SEQ ID NO: 3587857 - DNA, 25 bp, Homo sapien
aacttcgagccaaaaatacatgctg

SEQ ID NO: 3587858 - DNA, 25 bp, Homo sapien
aaacactagagaaacttcgagccaa

SEQ ID NO: 3587859 - DNA, 25 bp, Homo sapien
tagagaaacttcgagccaaaaatac

SEQ ID NO: 3587860 - DNA, 25 bp, Homo sapien
ttcgagccaaaaatacatgctgact

SEQ ID NO: 3587861 - DNA, 25 bp, Homo sapien
aaggtcactttagatcctctaaaga

SEQ ID NO: 3587862 - DNA, 25 bp, Homo sapien
ctgaagaagagaaattttgattaac

SEQ ID NO: 3587863 - DNA, 25 bp, Homo sapien
catggcaacaatcctggattattac

SEQ ID NO: 3587864 - DNA, 25 bp, Homo sapien
tcacatggcaacaatcctggattat

SEQ ID NO: 3587865 - DNA, 25 bp, Homo sapien
cacatggcaacaatcctggattatt

SEQ ID NO: 3587866 - DNA, 25 bp, Homo sapien
ctcacatggcaacaatcctggatta

SEQ ID NO: 3587867 - DNA, 25 bp, Homo sapien
catagcaccaaacattaggagtgct

SEQ ID NO: 3587868 - DNA, 25 bp, Homo sapien
gcaccaaacattaggagtgctatgg

SEQ ID NO: 3587869 - DNA, 25 bp, Homo sapien
caaacattaggagtgctatggcttc

SEQ ID NO: 3587870 - DNA, 25 bp, Homo sapien
acatagcaccaaacattaggagtgc

SEQ ID NO: 3587871 - DNA, 25 bp, Homo sapien
aaatgtcttttctaatgcatacata

SEQ ID NO: 3587872 - DNA, 25 bp, Homo sapien
caaatgtcttttctaatgcatacat

SEQ ID NO: 3587873 - DNA, 25 bp, Homo sapien
aatgtcttttctaatgcatacatac

SEQ ID NO: 3587874 - DNA, 25 bp, Homo sapien
ttttaatgaaactgatccagttgtc

SEQ ID NO: 3587875 - DNA, 25 bp, Homo sapien
ccacaagggttacaatataaaggca

SEQ ID NO: 3587876 - DNA, 25 bp, Homo sapien
tgaatgagtccctagaacgagcctg

SEQ ID NO: 3587877 - DNA, 25 bp, Homo sapien
tacatttccagagatgagtgtacag

SEQ ID NO: 3587878 - DNA, 25 bp, Homo sapien
gcttggttattagcaacccacaagg

SEQ ID NO: 3587879 - DNA, 25 bp, Homo sapien
gattgctagcaaagtagcagataga

SEQ ID NO: 3587880 - DNA, 25 bp, Homo sapien
caactgttcccaataagctgattgc

SEQ ID NO: 3587881 - DNA, 25 bp, Homo sapien
attctaaaagccttggtaatgacca

SEQ ID NO: 3587882 - DNA, 25 bp, Homo sapien
gcagatagaaaacctactgggaaat

SEQ ID NO: 3587883 - DNA, 25 bp, Homo sapien
acacccttgagcaaataacttatag

SEQ ID NO: 3587884 - DNA, 25 bp, Homo sapien
gagcaaataacttatagttaagata

SEQ ID NO: 3587885 - DNA, 25 bp, Homo sapien
ttacacccttgagcaaataacttat

SEQ ID NO: 3587886 - DNA, 25 bp, Homo sapien
acccttgagcaaataacttatagtt

SEQ ID NO: 3587887 - DNA, 25 bp, Homo sapien
ggcttctgtcatctcgttttaatat

SEQ ID NO: 3587888 - DNA, 25 bp, Homo sapien
tactttggcttctgtcatctcgttt

SEQ ID NO: 3587889 - DNA, 25 bp, Homo sapien
cataattactttggcttctgtcatc

SEQ ID NO: 3587890 - DNA, 25 bp, Homo sapien
cttctgtcatctcgttttaatatgg

SEQ ID NO: 3587891 - DNA, 25 bp, Homo sapien
gatcccatgcccattcatatccgaa

SEQ ID NO: 3587892 - DNA, 25 bp, Homo sapien
tccaaagtatcctgaaacccggcac

SEQ ID NO: 3587893 - DNA, 25 bp, Homo sapien
caagaatgaggttgcttaggttcca

SEQ ID NO: 3587894 - DNA, 25 bp, Homo sapien
tatccgaatttgctctatgatcatg

SEQ ID NO: 3587895 - DNA, 25 bp, Homo sapien
cagagcagttgaacatttcgcccat

SEQ ID NO: 3587896 - DNA, 25 bp, Homo sapien
cagttgaacatttcgcccatcatca

SEQ ID NO: 3587897 - DNA, 25 bp, Homo sapien
acatttcgcccatcatcataacatc

SEQ ID NO: 3587898 - DNA, 25 bp, Homo sapien
gagcagttgaacatttcgcccatca

SEQ ID NO: 3587899 - DNA, 25 bp, Homo sapien
tagatgttgcaatagcattgctaga

SEQ ID NO: 3587900 - DNA, 25 bp, Homo sapien
aacatttggagaaaagctagtattc

SEQ ID NO: 3587901 - DNA, 25 bp, Homo sapien
actcctaagtggtgatagatgttgc

SEQ ID NO: 3587902 - DNA, 25 bp, Homo sapien
cacataataacgtaagcctagtcct

SEQ ID NO: 3587903 - DNA, 25 bp, Homo sapien
caagaatctttgggatctaatttct

SEQ ID NO: 3587904 - DNA, 25 bp, Homo sapien
agaatctttgggatctaatttcttc

SEQ ID NO: 3587905 - DNA, 25 bp, Homo sapien
ggatctaatttcttcaaccaattta

SEQ ID NO: 3587906 - DNA, 25 bp, Homo sapien
atctaatttcttcaaccaatttact

SEQ ID NO: 3587907 - DNA, 25 bp, Homo sapien
ctagaagttgaattgtacaaagtac

SEQ ID NO: 3587908 - DNA, 25 bp, Homo sapien
aaaaaagtggtcctataagagctga

SEQ ID NO: 3587909 - DNA, 25 bp, Homo sapien
attttgacacctgatccaagacaca

SEQ ID NO: 3587910 - DNA, 25 bp, Homo sapien
tcagtcaatatacagcacataaaaa

SEQ ID NO: 3587911 - DNA, 25 bp, Homo sapien
tcaatttagccacattaactatttt

SEQ ID NO: 3587912 - DNA, 25 bp, Homo sapien
gcaatatgcatactgtgatggaagc

SEQ ID NO: 3587913 - DNA, 25 bp, Homo sapien
ttttggacaccatgatcaacagtgc

SEQ ID NO: 3587914 - DNA, 25 bp, Homo sapien
cagtgcccattctctagaatgaggc

SEQ ID NO: 3587915 - DNA, 25 bp, Homo sapien
taaagcttagtagtgtatttgtacg

SEQ ID NO: 3587916 - DNA, 25 bp, Homo sapien
tatttgtacgaagttcttgttatgc

SEQ ID NO: 3587917 - DNA, 25 bp, Homo sapien
gaagttcttgttatgctggcagtgc

SEQ ID NO: 3587918 - DNA, 25 bp, Homo sapien
gctactgatagagggaaacaagcag

SEQ ID NO: 3587919 - DNA, 25 bp, Homo sapien
ggtggggatctacctggttctcaat

SEQ ID NO: 3587920 - DNA, 25 bp, Homo sapien
gtggtggggatctacctggttctca

SEQ ID NO: 3587921 - DNA, 25 bp, Homo sapien
tggtggggatctacctggttctcaa

SEQ ID NO: 3587922 - DNA, 25 bp, Homo sapien
ggtggtggggatctacctggttctc

SEQ ID NO: 3587923 - DNA, 25 bp, Homo sapien
ctattttagagtatatcaaactgaa

SEQ ID NO: 3587924 - DNA, 25 bp, Homo sapien
attttagagtatatcaaactgaaca

SEQ ID NO: 3587925 - DNA, 25 bp, Homo sapien
tattttagagtatatcaaactgaac

SEQ ID NO: 3587926 - DNA, 25 bp, Homo sapien
ttttagagtatatcaaactgaacac

SEQ ID NO: 3587927 - DNA, 25 bp, Homo sapien
ccctagcaggtgtaaactgctgagt

SEQ ID NO: 3587928 - DNA, 25 bp, Homo sapien
cctttgaacaccctagcaggtgtaa

SEQ ID NO: 3587929 - DNA, 25 bp, Homo sapien
caacgatgccagatactgaatttct

SEQ ID NO: 3587930 - DNA, 25 bp, Homo sapien
agccaagaaaaccaacgatgccaga

SEQ ID NO: 3587931 - DNA, 25 bp, Homo sapien
cacacaggtttacgtgactttagga

SEQ ID NO: 3587932 - DNA, 25 bp, Homo sapien
tgttatacctgaaatactgggatgg

SEQ ID NO: 3587933 - DNA, 25 bp, Homo sapien
agctcattgttgctcaaactgccag

SEQ ID NO: 3587934 - DNA, 25 bp, Homo sapien
gtttggtaggtatagacatgcagtc

SEQ ID NO: 3587935 - DNA, 25 bp, Homo sapien
caacatgaatgagttcaaatcacat

SEQ ID NO: 3587936 - DNA, 25 bp, Homo sapien
aatttaagatccagtttattataca

SEQ ID NO: 3587937 - DNA, 25 bp, Homo sapien
tcatgcccgttatcattcagcagtt

SEQ ID NO: 3587938 - DNA, 25 bp, Homo sapien
tagttcatgcccgttatcattcagc

SEQ ID NO: 3587939 - DNA, 25 bp, Homo sapien
cccgttatcattcagcagttgaaca

SEQ ID NO: 3587940 - DNA, 25 bp, Homo sapien
taagttttagttcatgcccgttatc

SEQ ID NO: 3587941 - DNA, 25 bp, Homo sapien
gattatactgtcaccaattaaaact

SEQ ID NO: 3587942 - DNA, 25 bp, Homo sapien
ttatactgtcaccaattaaaactta

SEQ ID NO: 3587943 - DNA, 25 bp, Homo sapien
agattatactgtcaccaattaaaac

SEQ ID NO: 3587944 - DNA, 25 bp, Homo sapien
aaaagattatactgtcaccaattaa

SEQ ID NO: 3587945 - DNA, 25 bp, Homo sapien
taagcgatcactcaagaatggtaca

SEQ ID NO: 3587946 - DNA, 25 bp, Homo sapien
aagcgatcactcaagaatggtacag

SEQ ID NO: 3587947 - DNA, 25 bp, Homo sapien
agcgatcactcaagaatggtacaga

SEQ ID NO: 3587948 - DNA, 25 bp, Homo sapien
ctaagcgatcactcaagaatggtac

SEQ ID NO: 3587949 - DNA, 25 bp, Homo sapien
cttgtaattccttcccacagatcta

SEQ ID NO: 3587950 - DNA, 25 bp, Homo sapien
aattccttcccacagatctaacaat

SEQ ID NO: 3587951 - DNA, 25 bp, Homo sapien
tgtcttgtaattccttcccacagat

SEQ ID NO: 3587952 - DNA, 25 bp, Homo sapien
caactgtcttgtaattccttcccac

SEQ ID NO: 3587953 - DNA, 25 bp, Homo sapien
aagccccatcgggatagacctcaac

SEQ ID NO: 3587954 - DNA, 25 bp, Homo sapien
ttccaacgatgtgcaggctacagga

SEQ ID NO: 3587955 - DNA, 25 bp, Homo sapien
ctctatgaggcgtttccaacgatgt

SEQ ID NO: 3587956 - DNA, 25 bp, Homo sapien
gaggcgtttccaacgatgtgcaggc

SEQ ID NO: 3587957 - DNA, 25 bp, Homo sapien
caagtagctcctttacatgaaccaa

SEQ ID NO: 3587958 - DNA, 25 bp, Homo sapien
gctgtaggcttcaagtaggaaatcc

SEQ ID NO: 3587959 - DNA, 25 bp, Homo sapien
caaagtctaacactccataggaaag

SEQ ID NO: 3587960 - DNA, 25 bp, Homo sapien
caatcacgttgtgcttaggagccag

SEQ ID NO: 3587961 - DNA, 25 bp, Homo sapien
aactccagacaccatgttctcaaga

SEQ ID NO: 3587962 - DNA, 25 bp, Homo sapien
ctccagacaccatgttctcaagata

SEQ ID NO: 3587963 - DNA, 25 bp, Homo sapien
ttaactccagacaccatgttctcaa

SEQ ID NO: 3587964 - DNA, 25 bp, Homo sapien
ctttaactccagacaccatgttctc

SEQ ID NO: 3587965 - DNA, 25 bp, Homo sapien
aaagccattgtgtatatcatcaaca

SEQ ID NO: 3587966 - DNA, 25 bp, Homo sapien
ccattgtgtatatcatcaacatgaa

SEQ ID NO: 3587967 - DNA, 25 bp, Homo sapien
ttatctattctacaggcctggaatc

SEQ ID NO: 3587968 - DNA, 25 bp, Homo sapien
aaaaagccattgtgtatatcatcaa

SEQ ID NO: 3587969 - DNA, 25 bp, Homo sapien
tggaaccaacctttatggctatcaa

SEQ ID NO: 3587970 - DNA, 25 bp, Homo sapien
cctggcctggaaccaacctttatgg

SEQ ID NO: 3587971 - DNA, 25 bp, Homo sapien
ccatcaatcaactgtctcaggtatc

SEQ ID NO: 3587972 - DNA, 25 bp, Homo sapien
ggctatcaatactcccatcaatcaa

SEQ ID NO: 3587973 - DNA, 25 bp, Homo sapien
tctgtaagtctttgtccacgttaaa

SEQ ID NO: 3587974 - DNA, 25 bp, Homo sapien
acctatctgtaagtctttgtccacg

SEQ ID NO: 3587975 - DNA, 25 bp, Homo sapien
tatctgtaagtctttgtccacgtta

SEQ ID NO: 3587976 - DNA, 25 bp, Homo sapien
cctatctgtaagtctttgtccacgt

SEQ ID NO: 3587977 - DNA, 25 bp, Homo sapien
caagactgcggccattgcactacag

SEQ ID NO: 3587978 - DNA, 25 bp, Homo sapien
cctcttcaagatggttgggtgtcaa

SEQ ID NO: 3587979 - DNA, 25 bp, Homo sapien
tacaatactaagcatctgacaggtc

SEQ ID NO: 3587980 - DNA, 25 bp, Homo sapien
taaaagtagtattaggccaggtgcc

SEQ ID NO: 3587981 - DNA, 25 bp, Homo sapien
tctaagtatacactcagtcttacag

SEQ ID NO: 3587982 - DNA, 25 bp, Homo sapien
aagtatacactcagtcttacaggga

SEQ ID NO: 3587983 - DNA, 25 bp, Homo sapien
ctctttttagacaaagcagcttctt

SEQ ID NO: 3587984 - DNA, 25 bp, Homo sapien
ttcttctaagtatacactcagtctt

SEQ ID NO: 3587985 - DNA, 25 bp, Homo sapien
gaatgccctggattacttcagataa

SEQ ID NO: 3587986 - DNA, 25 bp, Homo sapien
tagtaattacatatagctgaatgcc

SEQ ID NO: 3587987 - DNA, 25 bp, Homo sapien
cctagagactacatgtagatgttaa

SEQ ID NO: 3587988 - DNA, 25 bp, Homo sapien
ggattaagcaataactcaaatagtt

SEQ ID NO: 3587989 - DNA, 25 bp, Homo sapien
gatatcacattcgttatcttcaaga

SEQ ID NO: 3587990 - DNA, 25 bp, Homo sapien
cacattcgttatcttcaagatgtgt

SEQ ID NO: 3587991 - DNA, 25 bp, Homo sapien
tgccaatttgatatcacattcgtta

SEQ ID NO: 3587992 - DNA, 25 bp, Homo sapien
ttcaagatgtgttgcatcctcatcc

SEQ ID NO: 3587993 - DNA, 25 bp, Homo sapien
tatcatcgagatgacagaatcttcg

SEQ ID NO: 3587994 - DNA, 25 bp, Homo sapien
tgcaatactagtcaaaggaaacaca

SEQ ID NO: 3587995 - DNA, 25 bp, Homo sapien
taattagttgtatattccactctga

SEQ ID NO: 3587996 - DNA, 25 bp, Homo sapien
gaatcttcgatgacctaattagttg

SEQ ID NO: 3587997 - DNA, 25 bp, Homo sapien
tcccaattgtcatactctgtatctt

SEQ ID NO: 3587998 - DNA, 25 bp, Homo sapien
tatgaagcaattaacatagaaattt

SEQ ID NO: 3587999 - DNA, 25 bp, Homo sapien
ttaagtataactatattaaaggcaa

SEQ ID NO: 3588000 - DNA, 25 bp, Homo sapien
tgtcatactctgtatctttgttcat

SEQ ID NO: 3588001 - DNA, 25 bp, Homo sapien
caatgattctttcaggtggtgttca

SEQ ID NO: 3588002 - DNA, 25 bp, Homo sapien
catttgcttcaatgattctttcagg

SEQ ID NO: 3588003 - DNA, 25 bp, Homo sapien
ttgtatctacgactgtcaaaatctt

SEQ ID NO: 3588004 - DNA, 25 bp, Homo sapien
tcatccaaaaatttgtatctacgac

SEQ ID NO: 3588005 - DNA, 25 bp, Homo sapien
tcaatatagttaaaaaatcctcttg

SEQ ID NO: 3588006 - DNA, 25 bp, Homo sapien
atagttaaaaaatcctcttgcaaca

SEQ ID NO: 3588007 - DNA, 25 bp, Homo sapien
ttaaaaaatcctcttgcaacagctt

SEQ ID NO: 3588008 - DNA, 25 bp, Homo sapien
taaaaaatcctcttgcaacagcttg

SEQ ID NO: 3588009 - DNA, 25 bp, Homo sapien
tgagtatataggatttctccttcct

SEQ ID NO: 3588010 - DNA, 25 bp, Homo sapien
tcttatctattagtgagtatatagg

SEQ ID NO: 3588011 - DNA, 25 bp, Homo sapien
cagatcctctgcttctaaattgttt

SEQ ID NO: 3588012 - DNA, 25 bp, Homo sapien
gccagatcctctgcttctaaattgt

SEQ ID NO: 3588013 - DNA, 25 bp, Homo sapien
tattggttcaaaagatgagtcactt

SEQ ID NO: 3588014 - DNA, 25 bp, Homo sapien
tcaggtgtacgaacaaattttcgaa

SEQ ID NO: 3588015 - DNA, 25 bp, Homo sapien
gatgaatcacttgcgtgaacacttt

SEQ ID NO: 3588016 - DNA, 25 bp, Homo sapien
tgaacactttcaggtgtacgaacaa

SEQ ID NO: 3588017 - DNA, 25 bp, Homo sapien
ttaggtgagtaagggatacactgag

SEQ ID NO: 3588018 - DNA, 25 bp, Homo sapien
ggtgagtaagggatacactgagttt

SEQ ID NO: 3588019 - DNA, 25 bp, Homo sapien
gagtaagggatacactgagttttaa

SEQ ID NO: 3588020 - DNA, 25 bp, Homo sapien
aggtgagtaagggatacactgagtt

SEQ ID NO: 3588021 - DNA, 25 bp, Homo sapien
cttcgatttgcaagttccacagcat

SEQ ID NO: 3588022 - DNA, 25 bp, Homo sapien
atggtcaagagaatctattcctgat

SEQ ID NO: 3588023 - DNA, 25 bp, Homo sapien
aagagaatctattcctgatttatcc

SEQ ID NO: 3588024 - DNA, 25 bp, Homo sapien
tgcaattcttagaggccacgtgggc

SEQ ID NO: 3588025 - DNA, 25 bp, Homo sapien
tcctacttgggtgtcgatgcctccg

SEQ ID NO: 3588026 - DNA, 25 bp, Homo sapien
ttgtgtgggactcataccagccgcg

SEQ ID NO: 3588027 - DNA, 25 bp, Homo sapien
gctttacccggagctaacgctgtga

SEQ ID NO: 3588028 - DNA, 25 bp, Homo sapien
taaaacggcctcgcagtggccccaa

SEQ ID NO: 3588029 - DNA, 25 bp, Homo sapien
aaacccgcgactggcctggtgtcct

SEQ ID NO: 3588030 - DNA, 25 bp, Homo sapien
ctcctccaaccgtgcggaagaaaag

SEQ ID NO: 3588031 - DNA, 25 bp, Homo sapien
cttgctgcttgtaacccaggcctcg

SEQ ID NO: 3588032 - DNA, 25 bp, Homo sapien
tgcatttgatccacagggtctgggc

SEQ ID NO: 3588033 - DNA, 25 bp, Homo sapien
tgggcaatgacgaagctccaggact

SEQ ID NO: 3588034 - DNA, 25 bp, Homo sapien
taaaaagtccgatcctttaggcagc

SEQ ID NO: 3588035 - DNA, 25 bp, Homo sapien
gctccatagtttggacaattccggg

SEQ ID NO: 3588036 - DNA, 25 bp, Homo sapien
agtgctggaagccacgaactccagt

SEQ ID NO: 3588037 - DNA, 25 bp, Homo sapien
acggctctcaactcctcgcgggagg

SEQ ID NO: 3588038 - DNA, 25 bp, Homo sapien
ggtgcctcacttacttagcccacgg

SEQ ID NO: 3588039 - DNA, 25 bp, Homo sapien
ggatattcctctgaccccttcgtgg

SEQ ID NO: 3588040 - DNA, 25 bp, Homo sapien
tacttgagagtcctatatgcactgt

SEQ ID NO: 3588041 - DNA, 25 bp, Homo sapien
tatagagtagaacgcacaagtgtct

SEQ ID NO: 3588042 - DNA, 25 bp, Homo sapien
tacatcctcccaagattggactttg

SEQ ID NO: 3588043 - DNA, 25 bp, Homo sapien
cattttagaattggacgggccttca

SEQ ID NO: 3588044 - DNA, 25 bp, Homo sapien
gaagctgttgctgaacatgaccact

SEQ ID NO: 3588045 - DNA, 25 bp, Homo sapien
tttcacaaacattagcagtccgggc

SEQ ID NO: 3588046 - DNA, 25 bp, Homo sapien
tgtagtatcagcgaaatcagtcatg

SEQ ID NO: 3588047 - DNA, 25 bp, Homo sapien
catgaccactatcgttgctgaaata

SEQ ID NO: 3588048 - DNA, 25 bp, Homo sapien
cctgtctctcaggatgcacttcctc

SEQ ID NO: 3588049 - DNA, 25 bp, Homo sapien
gaggaacaatttgagaagtgccctg

SEQ ID NO: 3588050 - DNA, 25 bp, Homo sapien
gaagatttaaagactaactggtcta

SEQ ID NO: 3588051 - DNA, 25 bp, Homo sapien
tgtgttctctatgatgttctcagta

SEQ ID NO: 3588052 - DNA, 25 bp, Homo sapien
cgctacactccagttgggatgacag

SEQ ID NO: 3588053 - DNA, 25 bp, Homo sapien
gagatctcttgacatgctaatatat

SEQ ID NO: 3588054 - DNA, 25 bp, Homo sapien
caaaaagactgatgtgtatgataac

SEQ ID NO: 3588055 - DNA, 25 bp, Homo sapien
gagttcatacctcaggggtgacacc

SEQ ID NO: 3588056 - DNA, 25 bp, Homo sapien
gctgtataatatcctataatgtaaa

SEQ ID NO: 3588057 - DNA, 25 bp, Homo sapien
tatgaaagggttcttagagctacct

SEQ ID NO: 3588058 - DNA, 25 bp, Homo sapien
tgtcccaagtcatttgttaccaggg

SEQ ID NO: 3588059 - DNA, 25 bp, Homo sapien
gctgagaacctacacattcaagcag

SEQ ID NO: 3588060 - DNA, 25 bp, Homo sapien
gggaataaacccatcatgaatcatg

SEQ ID NO: 3588061 - DNA, 25 bp, Homo sapien
cagcagattatccttgagccccttg

SEQ ID NO: 3588062 - DNA, 25 bp, Homo sapien
gattgccagccctgacttcgggaca

SEQ ID NO: 3588063 - DNA, 25 bp, Homo sapien
gaatgttcagtatggcagagcttta

SEQ ID NO: 3588064 - DNA, 25 bp, Homo sapien
catggaggcctcttagtgggtgttc

SEQ ID NO: 3588065 - DNA, 25 bp, Homo sapien
tacaggaggcgccttgagggtatct

SEQ ID NO: 3588066 - DNA, 25 bp, Homo sapien
gagggtatcttctacctgtcaggtg

SEQ ID NO: 3588067 - DNA, 25 bp, Homo sapien
ttacccgtgtgtctacaggaggcgc

SEQ ID NO: 3588068 - DNA, 25 bp, Homo sapien
taggacatagtgtgtgagtttaccc

SEQ ID NO: 3588069 - DNA, 25 bp, Homo sapien
tgagacgtgaagtgttagtgactga

SEQ ID NO: 3588070 - DNA, 25 bp, Homo sapien
ttctcttgatactctgactgtgagg

SEQ ID NO: 3588071 - DNA, 25 bp, Homo sapien
gcaagggcctgacttgagacgtgaa

SEQ ID NO: 3588072 - DNA, 25 bp, Homo sapien
gatgcaaagcccgagatgactgatt

SEQ ID NO: 3588073 - DNA, 25 bp, Homo sapien
tccagctcgtcaggaggccaggtgc

SEQ ID NO: 3588074 - DNA, 25 bp, Homo sapien
tccaattaacgttggaatgagggag

SEQ ID NO: 3588075 - DNA, 25 bp, Homo sapien
acttacaatggcctaagtttgagcc

SEQ ID NO: 3588076 - DNA, 25 bp, Homo sapien
catgggagggaaaatccaattaacg

SEQ ID NO: 3588077 - DNA, 25 bp, Homo sapien
tctattccttgtatccaaagctggc

SEQ ID NO: 3588078 - DNA, 25 bp, Homo sapien
gctctgaggcagcagattgtctaaa

SEQ ID NO: 3588079 - DNA, 25 bp, Homo sapien
ggcagcagattgtctaaaagcctca

SEQ ID NO: 3588080 - DNA, 25 bp, Homo sapien
tgaggcagcagattgtctaaaagcc

SEQ ID NO: 3588081 - DNA, 25 bp, Homo sapien
cagcagattgtctaaaagcctcagg

SEQ ID NO: 3588082 - DNA, 25 bp, Homo sapien
tggcctctgatacagggactctgac

SEQ ID NO: 3588083 - DNA, 25 bp, Homo sapien
gggactctgacaacaggccatcctg

SEQ ID NO: 3588084 - DNA, 25 bp, Homo sapien
ctggttggcacagcagttgcagagc

SEQ ID NO: 3588085 - DNA, 25 bp, Homo sapien
cctgcacaccagagcaagtgtcgtg

SEQ ID NO: 3588086 - DNA, 25 bp, Homo sapien
tgtcctgttaggagcgggctgcaac

SEQ ID NO: 3588087 - DNA, 25 bp, Homo sapien
gcgaagctcctggttcaaagcctca

SEQ ID NO: 3588088 - DNA, 25 bp, Homo sapien
cattggttatgtgtcagcacggccc

SEQ ID NO: 3588089 - DNA, 25 bp, Homo sapien
tccttgaacttagcgcgagtcctaa

SEQ ID NO: 3588090 - DNA, 25 bp, Homo sapien
ctcatggattatcacaaggcccagg

SEQ ID NO: 3588091 - DNA, 25 bp, Homo sapien
tgtaaagcaaagacaagtcaatgag

SEQ ID NO: 3588092 - DNA, 25 bp, Homo sapien
gccacatagtgctttcttcgtgaga

SEQ ID NO: 3588093 - DNA, 25 bp, Homo sapien
tcttcgtgagaacaagataacacat

SEQ ID NO: 3588094 - DNA, 25 bp, Homo sapien
gaaatttatatgcacacttattaca

SEQ ID NO: 3588095 - DNA, 25 bp, Homo sapien
atttatatgcacacttattacaaac

SEQ ID NO: 3588096 - DNA, 25 bp, Homo sapien
tctgaaatttatatgcacacttatt

SEQ ID NO: 3588097 - DNA, 25 bp, Homo sapien
cctctgaaatttatatgcacactta

SEQ ID NO: 3588098 - DNA, 25 bp, Homo sapien
gctgattaatactgcggccacagca

SEQ ID NO: 3588099 - DNA, 25 bp, Homo sapien
gacaaagtgcaggtcttcatagagg

SEQ ID NO: 3588100 - DNA, 25 bp, Homo sapien
gcaaggatgacagcgacaaagtgca

SEQ ID NO: 3588101 - DNA, 25 bp, Homo sapien
ccacatgaggctgattaatactgcg

SEQ ID NO: 3588102 - DNA, 25 bp, Homo sapien
tgtccattcgatggtgggcactcca

SEQ ID NO: 3588103 - DNA, 25 bp, Homo sapien
gccgttgtcaaaggtgcagactctg

SEQ ID NO: 3588104 - DNA, 25 bp, Homo sapien
ggtttccactccacgatcttctgcg

SEQ ID NO: 3588105 - DNA, 25 bp, Homo sapien
gatgacatagtagccggaatccctc

SEQ ID NO: 3588106 - DNA, 25 bp, Homo sapien
ctgaggaatgtatagggacacaccc

SEQ ID NO: 3588107 - DNA, 25 bp, Homo sapien
tgaggaatgtatagggacacaccct

SEQ ID NO: 3588108 - DNA, 25 bp, Homo sapien
ggaacttcactttgagcatttcggt

SEQ ID NO: 3588109 - DNA, 25 bp, Homo sapien
gcatttcggttactttggcccaaga

SEQ ID NO: 3588110 - DNA, 25 bp, Homo sapien
cctcatggaacttcactttgagcat

SEQ ID NO: 3588111 - DNA, 25 bp, Homo sapien
cactttgagcatttcggttactttg

SEQ ID NO: 3588112 - DNA, 25 bp, Homo sapien
aacttggtaacacctattggctcca

SEQ ID NO: 3588113 - DNA, 25 bp, Homo sapien
ttggtaacacctattggctccaggg

SEQ ID NO: 3588114 - DNA, 25 bp, Homo sapien
cacctattggctccagggggtaagg

SEQ ID NO: 3588115 - DNA, 25 bp, Homo sapien
tacagccatgactatctggaaagat

SEQ ID NO: 3588116 - DNA, 25 bp, Homo sapien
tttctgaaagaccacagggtatgta

SEQ ID NO: 3588117 - DNA, 25 bp, Homo sapien
ggcaccaacaagagccaccttgctg

SEQ ID NO: 3588118 - DNA, 25 bp, Homo sapien
caagagccaccttgctggaaagctg

SEQ ID NO: 3588119 - DNA, 25 bp, Homo sapien
gtatgtaaaagccactgccgtgatt

SEQ ID NO: 3588120 - DNA, 25 bp, Homo sapien
ggcactaatataggggcctactgga

SEQ ID NO: 3588121 - DNA, 25 bp, Homo sapien
gaggaattattccagcacctttcac

SEQ ID NO: 3588122 - DNA, 25 bp, Homo sapien
ttctcctctggcactaatatagggg

SEQ ID NO: 3588123 - DNA, 25 bp, Homo sapien
ccgtgcctagtgctgaaggacccac

SEQ ID NO: 3588124 - DNA, 25 bp, Homo sapien
aactgccccagggtgtgtctcagca

SEQ ID NO: 3588125 - DNA, 25 bp, Homo sapien
catgggcgctgtcagctgaggattc

SEQ ID NO: 3588126 - DNA, 25 bp, Homo sapien
aagcctagcatgctcccttgaccag

SEQ ID NO: 3588127 - DNA, 25 bp, Homo sapien
gggtcagcatggcacggacctgaac

SEQ ID NO: 3588128 - DNA, 25 bp, Homo sapien
acacatggacaaaaaatgtcctgtg

SEQ ID NO: 3588129 - DNA, 25 bp, Homo sapien
cacatggacaaaaaatgtcctgtgc

SEQ ID NO: 3588130 - DNA, 25 bp, Homo sapien
gctaagttcccatgggtgcatgcta

SEQ ID NO: 3588131 - DNA, 25 bp, Homo sapien
gcagtggctaagttcccatgggtgc

SEQ ID NO: 3588132 - DNA, 25 bp, Homo sapien
catgggtgcatgctagggcaacttc

SEQ ID NO: 3588133 - DNA, 25 bp, Homo sapien
tcccatgggtgcatgctagggcaac

SEQ ID NO: 3588134 - DNA, 25 bp, Homo sapien
cagataagggatatagctgtcctta

SEQ ID NO: 3588135 - DNA, 25 bp, Homo sapien
taagggatatagctgtccttaggtc

SEQ ID NO: 3588136 - DNA, 25 bp, Homo sapien
gataagggatatagctgtccttagg

SEQ ID NO: 3588137 - DNA, 25 bp, Homo sapien
agataagggatatagctgtccttag

SEQ ID NO: 3588138 - DNA, 25 bp, Homo sapien
acggcccacggcaacatagtaggtg

SEQ ID NO: 3588139 - DNA, 25 bp, Homo sapien
ccacatggatggcagcgttgggcag

SEQ ID NO: 3588140 - DNA, 25 bp, Homo sapien
taggtgcttctaagatgtttgccac

SEQ ID NO: 3588141 - DNA, 25 bp, Homo sapien
ttgatcagggatcagtgcacggccc

SEQ ID NO: 3588142 - DNA, 25 bp, Homo sapien
ctaagcccagaacccacagctccat

SEQ ID NO: 3588143 - DNA, 25 bp, Homo sapien
ttccactaagcccagaacccacagc

SEQ ID NO: 3588144 - DNA, 25 bp, Homo sapien
cttccactaagcccagaacccacag

SEQ ID NO: 3588145 - DNA, 25 bp, Homo sapien
ccactaagcccagaacccacagctc

SEQ ID NO: 3588146 - DNA, 25 bp, Homo sapien
tgctcgagactaacaaccaactgtt

SEQ ID NO: 3588147 - DNA, 25 bp, Homo sapien
gagatttgcaacctctgcagctggg

SEQ ID NO: 3588148 - DNA, 25 bp, Homo sapien
ttactgggtttctgagatttgcaac

SEQ ID NO: 3588149 - DNA, 25 bp, Homo sapien
cagaggaacatgcctctgtcttact

SEQ ID NO: 3588150 - DNA, 25 bp, Homo sapien
ggtccggccatccaaagcaaatcta

SEQ ID NO: 3588151 - DNA, 25 bp, Homo sapien
ccgggtccggccatccaaagcaaat

SEQ ID NO: 3588152 - DNA, 25 bp, Homo sapien
agcaaatctactcagtgcgctggtc

SEQ ID NO: 3588153 - DNA, 25 bp, Homo sapien
tcagtgcgctggtcgcgaggaccac

SEQ ID NO: 3588154 - DNA, 25 bp, Homo sapien
cttcaggccacaacgcccaacccaa

SEQ ID NO: 3588155 - DNA, 25 bp, Homo sapien
tcaggccacaacgcccaacccaaac

SEQ ID NO: 3588156 - DNA, 25 bp, Homo sapien
ttcaggccacaacgcccaacccaaa

SEQ ID NO: 3588157 - DNA, 25 bp, Homo sapien
gccctcagccggacaaggtgggcga

SEQ ID NO: 3588158 - DNA, 25 bp, Homo sapien
agccggacaaggtgggcgagggcca

SEQ ID NO: 3588159 - DNA, 25 bp, Homo sapien
gcgcgccctcagccggacaaggtgg

SEQ ID NO: 3588160 - DNA, 25 bp, Homo sapien
caggggggccgctgctagaccccgg

SEQ ID NO: 3588161 - DNA, 25 bp, Homo sapien
caggcagagggcgaagagtcctagg

SEQ ID NO: 3588162 - DNA, 25 bp, Homo sapien
cagaggcctcatgggcgagcccggg

SEQ ID NO: 3588163 - DNA, 25 bp, Homo sapien
tagggagatgcctcgggtcttcctc

SEQ ID NO: 3588164 - DNA, 25 bp, Homo sapien
cgcaggttctttagggccagatgca

SEQ ID NO: 3588165 - DNA, 25 bp, Homo sapien
cgcttgtgggatatgcacactgtcc

SEQ ID NO: 3588166 - DNA, 25 bp, Homo sapien
cttgtgggatatgcacactgtcctt

SEQ ID NO: 3588167 - DNA, 25 bp, Homo sapien
cacactgtccttcttactgggttgg

SEQ ID NO: 3588168 - DNA, 25 bp, Homo sapien
gtccgcttgtgggatatgcacactg

SEQ ID NO: 3588169 - DNA, 25 bp, Homo sapien
acagctgccagatactcctagattt

SEQ ID NO: 3588170 - DNA, 25 bp, Homo sapien
cgagtatggtaaataaaggactgtt

SEQ ID NO: 3588171 - DNA, 25 bp, Homo sapien
cttttggacatatagccccatcaca

SEQ ID NO: 3588172 - DNA, 25 bp, Homo sapien
gatttttctatacgagtatggtaaa

SEQ ID NO: 3588173 - DNA, 25 bp, Homo sapien
agggcagctactgacaatattagca

SEQ ID NO: 3588174 - DNA, 25 bp, Homo sapien
cagggcagctactgacaatattagc

SEQ ID NO: 3588175 - DNA, 25 bp, Homo sapien
gggcagctactgacaatattagcat

SEQ ID NO: 3588176 - DNA, 25 bp, Homo sapien
acagcaggcagttgggtagatacag

SEQ ID NO: 3588177 - DNA, 25 bp, Homo sapien
aaaagcaggtggttagtcttccctg

SEQ ID NO: 3588178 - DNA, 25 bp, Homo sapien
aaagcaggtggttagtcttccctgt

SEQ ID NO: 3588179 - DNA, 25 bp, Homo sapien
gaacacctagtgcaactccatgcca

SEQ ID NO: 3588180 - DNA, 25 bp, Homo sapien
tgagagccttttggagtagacagaa

SEQ ID NO: 3588181 - DNA, 25 bp, Homo sapien
ccatttgtcggtacacagggagaaa

SEQ ID NO: 3588182 - DNA, 25 bp, Homo sapien
ctccatgccatttgtcggtacacag

SEQ ID NO: 3588183 - DNA, 25 bp, Homo sapien
gaccagtaaatatcaaaggtatcag

SEQ ID NO: 3588184 - DNA, 25 bp, Homo sapien
accacaggggaccagtaaatatcaa

SEQ ID NO: 3588185 - DNA, 25 bp, Homo sapien
caggggaccagtaaatatcaaaggt

SEQ ID NO: 3588186 - DNA, 25 bp, Homo sapien
gggaccagtaaatatcaaaggtatc

SEQ ID NO: 3588187 - DNA, 25 bp, Homo sapien
gggagaggcctttggatccagggtg

SEQ ID NO: 3588188 - DNA, 25 bp, Homo sapien
agaggcctttggatccagggtggag

SEQ ID NO: 3588189 - DNA, 25 bp, Homo sapien
tggtggccaattggggagaggcctt

SEQ ID NO: 3588190 - DNA, 25 bp, Homo sapien
ctggtggccaattggggagaggcct

SEQ ID NO: 3588191 - DNA, 25 bp, Homo sapien
gtgtatacagctcccttgtctgctt

SEQ ID NO: 3588192 - DNA, 25 bp, Homo sapien
gtatacagctcccttgtctgctttc

SEQ ID NO: 3588193 - DNA, 25 bp, Homo sapien
atacagctcccttgtctgctttcct

SEQ ID NO: 3588194 - DNA, 25 bp, Homo sapien
ctgtgtatacagctcccttgtctgc

SEQ ID NO: 3588195 - DNA, 25 bp, Homo sapien
gtgccggatcagattaatatttggg

SEQ ID NO: 3588196 - DNA, 25 bp, Homo sapien
gtttttgtagtgcttcgtgcagtgt

SEQ ID NO: 3588197 - DNA, 25 bp, Homo sapien
tgacccacatttgcctcaccacctg

SEQ ID NO: 3588198 - DNA, 25 bp, Homo sapien
gtgttttgtagtgccggatcagatt

SEQ ID NO: 3588199 - DNA, 25 bp, Homo sapien
ttgatccctaaagaagagctttgca

SEQ ID NO: 3588200 - DNA, 25 bp, Homo sapien
aggggccctgcttgatccctaaaga

SEQ ID NO: 3588201 - DNA, 25 bp, Homo sapien
aaggggccctgcttgatccctaaag

SEQ ID NO: 3588202 - DNA, 25 bp, Homo sapien
gaaggggccctgcttgatccctaaa

SEQ ID NO: 3588203 - DNA, 25 bp, Homo sapien
ttctgatttctcatgttatgctgtc

SEQ ID NO: 3588204 - DNA, 25 bp, Homo sapien
tctcatgttatgctgtccctgtgtc

SEQ ID NO: 3588205 - DNA, 25 bp, Homo sapien
tctgatttctcatgttatgctgtcc

SEQ ID NO: 3588206 - DNA, 25 bp, Homo sapien
tgatttctcatgttatgctgtccct

SEQ ID NO: 3588207 - DNA, 25 bp, Homo sapien
gtggacatgcagtacccacagaagg

SEQ ID NO: 3588208 - DNA, 25 bp, Homo sapien
ggacatgcagtacccacagaaggac

SEQ ID NO: 3588209 - DNA, 25 bp, Homo sapien
tggacatgcagtacccacagaagga

SEQ ID NO: 3588210 - DNA, 25 bp, Homo sapien
ttatagcacacggccaaagatacat

SEQ ID NO: 3588211 - DNA, 25 bp, Homo sapien
cagcttcctgcccatgatgacggag

SEQ ID NO: 3588212 - DNA, 25 bp, Homo sapien
tgacggagccttccaatcttttgcc

SEQ ID NO: 3588213 - DNA, 25 bp, Homo sapien
tgcctggagtgctctttgcactctt

SEQ ID NO: 3588214 - DNA, 25 bp, Homo sapien
tggtgaccacaagctcccttcactg

SEQ ID NO: 3588215 - DNA, 25 bp, Homo sapien
tgttccctcaggtgaggaggctaag

SEQ ID NO: 3588216 - DNA, 25 bp, Homo sapien
ttttcccagatctatagcactagcc

SEQ ID NO: 3588217 - DNA, 25 bp, Homo sapien
gagttgccagactgccccagcattt

SEQ ID NO: 3588218 - DNA, 25 bp, Homo sapien
cattatccttagtttgcccattgag

SEQ ID NO: 3588219 - DNA, 25 bp, Homo sapien
tgacatccttaacatcacaagcata

SEQ ID NO: 3588220 - DNA, 25 bp, Homo sapien
atcacaagcataggatggcatggct

SEQ ID NO: 3588221 - DNA, 25 bp, Homo sapien
acatccttaacatcacaagcatagg

SEQ ID NO: 3588222 - DNA, 25 bp, Homo sapien
gtctgacatccttaacatcacaagc

SEQ ID NO: 3588223 - DNA, 25 bp, Homo sapien
agtgaccagcagtgaaattccacag

SEQ ID NO: 3588224 - DNA, 25 bp, Homo sapien
tctctcttcatctaagtgaccagca

SEQ ID NO: 3588225 - DNA, 25 bp, Homo sapien
ccctcgaattcctttctctgtactg

SEQ ID NO: 3588226 - DNA, 25 bp, Homo sapien
aaccacatcacggtaccctcgaatt

SEQ ID NO: 3588227 - DNA, 25 bp, Homo sapien
gctacagaagcatccacggttggca

SEQ ID NO: 3588228 - DNA, 25 bp, Homo sapien
tcctcccagggaaacagtattcagg

SEQ ID NO: 3588229 - DNA, 25 bp, Homo sapien
ggactgttggacatttgcggcttca

SEQ ID NO: 3588230 - DNA, 25 bp, Homo sapien
tattcaggctgcatagagtcattct

SEQ ID NO: 3588231 - DNA, 25 bp, Homo sapien
aggcttgacctatgcctgccatggg

SEQ ID NO: 3588232 - DNA, 25 bp, Homo sapien
gggccgtccctaatccagaatgatc

SEQ ID NO: 3588233 - DNA, 25 bp, Homo sapien
gggacactcctcaacccagtatggg

SEQ ID NO: 3588234 - DNA, 25 bp, Homo sapien
aaagttgccagtggttctgtctgct

SEQ ID NO: 3588235 - DNA, 25 bp, Homo sapien
aaacagggcctgtatagtgtacaaa

SEQ ID NO: 3588236 - DNA, 25 bp, Homo sapien
tacttgttgactggatgggtgagta

SEQ ID NO: 3588237 - DNA, 25 bp, Homo sapien
agtgacccttcctgcatattagtgc

SEQ ID NO: 3588238 - DNA, 25 bp, Homo sapien
agtgtacaaagtccataaatacttg

SEQ ID NO: 3588239 - DNA, 25 bp, Homo sapien
cgcgtttgcttcaaagcatgagctt

SEQ ID NO: 3588240 - DNA, 25 bp, Homo sapien
ggcaaagctgaaggacgcgtttgct

SEQ ID NO: 3588241 - DNA, 25 bp, Homo sapien
caaagctgaaggacgcgtttgcttc

SEQ ID NO: 3588242 - DNA, 25 bp, Homo sapien
tgaaggacgcgtttgcttcaaagca

SEQ ID NO: 3588243 - DNA, 25 bp, Homo sapien
cccaggactttcctgcccgtgtgcc

SEQ ID NO: 3588244 - DNA, 25 bp, Homo sapien
tgtgcctttgaatacgctcttcacc

SEQ ID NO: 3588245 - DNA, 25 bp, Homo sapien
tttgaatacgctcttcaccctttgc

SEQ ID NO: 3588246 - DNA, 25 bp, Homo sapien
ctgcccgtgtgcctttgaatacgct

SEQ ID NO: 3588247 - DNA, 25 bp, Homo sapien
tggtcactggatgcaattcgcaaca

SEQ ID NO: 3588248 - DNA, 25 bp, Homo sapien
gcaattcgcaacatcactgtgccta

SEQ ID NO: 3588249 - DNA, 25 bp, Homo sapien
gagcagcgtctgttggactcctagg

SEQ ID NO: 3588250 - DNA, 25 bp, Homo sapien
aagttttgctgatttagatagactc

SEQ ID NO: 3588251 - DNA, 25 bp, Homo sapien
tgcccactgggaaagtatagcagga

SEQ ID NO: 3588252 - DNA, 25 bp, Homo sapien
aggccaagctcagtatgcccacgca

SEQ ID NO: 3588253 - DNA, 25 bp, Homo sapien
aagtatagcaggaggttggcaatga

SEQ ID NO: 3588254 - DNA, 25 bp, Homo sapien
atgatgactgcggtagccaaggcca

SEQ ID NO: 3588255 - DNA, 25 bp, Homo sapien
gagccattgtcagagcacatgtgaa

SEQ ID NO: 3588256 - DNA, 25 bp, Homo sapien
ccattgtcagagcacatgtgaaact

SEQ ID NO: 3588257 - DNA, 25 bp, Homo sapien
ttgtcagagcacatgtgaaacttcc

SEQ ID NO: 3588258 - DNA, 25 bp, Homo sapien
ctggagccattgtcagagcacatgt

SEQ ID NO: 3588259 - DNA, 25 bp, Homo sapien
aagagaaaacagctgataccaggaa

SEQ ID NO: 3588260 - DNA, 25 bp, Homo sapien
gaaaacagctgataccaggaagctg

SEQ ID NO: 3588261 - DNA, 25 bp, Homo sapien
aaacagctgataccaggaagctgcc

SEQ ID NO: 3588262 - DNA, 25 bp, Homo sapien
gagaaaacagctgataccaggaagc

SEQ ID NO: 3588263 - DNA, 25 bp, Homo sapien
atgtctgtgtaaaccacccacacga

SEQ ID NO: 3588264 - DNA, 25 bp, Homo sapien
ccacacgattggcttgagagggctg

SEQ ID NO: 3588265 - DNA, 25 bp, Homo sapien
gaggagttctcccagtggatgagtt

SEQ ID NO: 3588266 - DNA, 25 bp, Homo sapien
tgtctgctccagatgttggcggctg

SEQ ID NO: 3588267 - DNA, 25 bp, Homo sapien
tgctctcggagcaaatggttatgat

SEQ ID NO: 3588268 - DNA, 25 bp, Homo sapien
ttaatgttgctctcggagcaaatgg

SEQ ID NO: 3588269 - DNA, 25 bp, Homo sapien
gttatgattgcctctgcccagggca

SEQ ID NO: 3588270 - DNA, 25 bp, Homo sapien
caaatggttatgattgcctctgccc

SEQ ID NO: 3588271 - DNA, 25 bp, Homo sapien
tgagccatgccagagcctgaatacg

SEQ ID NO: 3588272 - DNA, 25 bp, Homo sapien
tctgagtgattggtgtcatggtcgc

SEQ ID NO: 3588273 - DNA, 25 bp, Homo sapien
caaacgtagctctttagtctgagtg

SEQ ID NO: 3588274 - DNA, 25 bp, Homo sapien
ggctttccttcagtgtgccctgagc

SEQ ID NO: 3588275 - DNA, 25 bp, Homo sapien
aaggcccaagctgaaaatggtcctg

SEQ ID NO: 3588276 - DNA, 25 bp, Homo sapien
ggagaagaacctcctggctaaggcc

SEQ ID NO: 3588277 - DNA, 25 bp, Homo sapien
cctcctggctaaggcccaagctgaa

SEQ ID NO: 3588278 - DNA, 25 bp, Homo sapien
tggctaaggcccaagctgaaaatgg

SEQ ID NO: 3588279 - DNA, 25 bp, Homo sapien
gggctggcgtcaggtctgcggtggt

SEQ ID NO: 3588280 - DNA, 25 bp, Homo sapien
tcggcacgagctctgcacagactgg

SEQ ID NO: 3588281 - DNA, 25 bp, Homo sapien
tgggctccagcattcggcacgagct

SEQ ID NO: 3588282 - DNA, 25 bp, Homo sapien
tctgcttctgtttacgtggtcagcc

SEQ ID NO: 3588283 - DNA, 25 bp, Homo sapien
gtttttaggaccaggccatcatgta

SEQ ID NO: 3588284 - DNA, 25 bp, Homo sapien
aatgggcaaggaacgggcagaataa

SEQ ID NO: 3588285 - DNA, 25 bp, Homo sapien
ctgagtttggatctttagcatgaat

SEQ ID NO: 3588286 - DNA, 25 bp, Homo sapien
tcatgtagaaaccaccgagttatgc

SEQ ID NO: 3588287 - DNA, 25 bp, Homo sapien
tgggaaaagagagactggggaccca

SEQ ID NO: 3588288 - DNA, 25 bp, Homo sapien
aaagagagactggggacccatttct

SEQ ID NO: 3588289 - DNA, 25 bp, Homo sapien
agagactggggacccatttcttttg

SEQ ID NO: 3588290 - DNA, 25 bp, Homo sapien
agagagactggggacccatttcttt

SEQ ID NO: 3588291 - DNA, 25 bp, Homo sapien
caaggccacgtggacttttgctctc

SEQ ID NO: 3588292 - DNA, 25 bp, Homo sapien
taactggagtttcacctggagtccc

SEQ ID NO: 3588293 - DNA, 25 bp, Homo sapien
tagttggacagctccattgcctgat

SEQ ID NO: 3588294 - DNA, 25 bp, Homo sapien
cctgggtcatctgggtagttggaca

SEQ ID NO: 3588295 - DNA, 25 bp, Homo sapien
tcccttttcccagagcttcaccctg

SEQ ID NO: 3588296 - DNA, 25 bp, Homo sapien
ttcaccctggcccctggatcattca

SEQ ID NO: 3588297 - DNA, 25 bp, Homo sapien
tcaccctggcccctggatcattcaa

SEQ ID NO: 3588298 - DNA, 25 bp, Homo sapien
cttttcccagagcttcaccctggcc

SEQ ID NO: 3588299 - DNA, 25 bp, Homo sapien
ttgcactaagctgcctgataccagg

SEQ ID NO: 3588300 - DNA, 25 bp, Homo sapien
tttcttgcactaagctgcctgatac

SEQ ID NO: 3588301 - DNA, 25 bp, Homo sapien
ctaagctgcctgataccaggaaata

SEQ ID NO: 3588302 - DNA, 25 bp, Homo sapien
cactaagctgcctgataccaggaaa

SEQ ID NO: 3588303 - DNA, 25 bp, Homo sapien
tgacaatgagttcttctatctgaac

SEQ ID NO: 3588304 - DNA, 25 bp, Homo sapien
aacaggagacatagctactggagcc

SEQ ID NO: 3588305 - DNA, 25 bp, Homo sapien
catttgacaatgagttcttctatct

SEQ ID NO: 3588306 - DNA, 25 bp, Homo sapien
cttctatctgaacaggagacatagc

SEQ ID NO: 3588307 - DNA, 25 bp, Homo sapien
tgctgaaagctctaggcttagtctt

SEQ ID NO: 3588308 - DNA, 25 bp, Homo sapien
ctaggcttagtcttgctgaatttag

SEQ ID NO: 3588309 - DNA, 25 bp, Homo sapien
gctctaggcttagtcttgctgaatt

SEQ ID NO: 3588310 - DNA, 25 bp, Homo sapien
gaaagctctaggcttagtcttgctg

SEQ ID NO: 3588311 - DNA, 25 bp, Homo sapien
aaatgaagcagactgatgtgagact

SEQ ID NO: 3588312 - DNA, 25 bp, Homo sapien
tgtgagactgtggactgatagggtc

SEQ ID NO: 3588313 - DNA, 25 bp, Homo sapien
tgaacaaatgaagcagactgatgtg

SEQ ID NO: 3588314 - DNA, 25 bp, Homo sapien
agactgtggactgatagggtctgcg

SEQ ID NO: 3588315 - DNA, 25 bp, Homo sapien
taagtcctcctctatagtgtccgtt

SEQ ID NO: 3588316 - DNA, 25 bp, Homo sapien
gactcatacgaagctcccaaactca

SEQ ID NO: 3588317 - DNA, 25 bp, Homo sapien
tgaagtgccagactcatacgaagct

SEQ ID NO: 3588318 - DNA, 25 bp, Homo sapien
cctctatagtgtccgttgaagtgcc

SEQ ID NO: 3588319 - DNA, 25 bp, Homo sapien
ttttcatatcgtcgtcttctctctg

SEQ ID NO: 3588320 - DNA, 25 bp, Homo sapien
ctttgcctcttacttataaggatgc

SEQ ID NO: 3588321 - DNA, 25 bp, Homo sapien
ttccaggttctggtatctgccagca

SEQ ID NO: 3588322 - DNA, 25 bp, Homo sapien
tttctgtggatgaggactgcggagt

SEQ ID NO: 3588323 - DNA, 25 bp, Homo sapien
agtccatccgggtattaggaccctg

SEQ ID NO: 3588324 - DNA, 25 bp, Homo sapien
tcttgcactatctaagtccatccgg

SEQ ID NO: 3588325 - DNA, 25 bp, Homo sapien
atcaggcctacccatttcaacagaa

SEQ ID NO: 3588326 - DNA, 25 bp, Homo sapien
gattcttcaatctacactcagttag

SEQ ID NO: 3588327 - DNA, 25 bp, Homo sapien
ggtgatgatatgagagcataagaac

SEQ ID NO: 3588328 - DNA, 25 bp, Homo sapien
tatgagagcataagaactggtatgt

SEQ ID NO: 3588329 - DNA, 25 bp, Homo sapien
ctctgccggaaggtaggtgatgata

SEQ ID NO: 3588330 - DNA, 25 bp, Homo sapien
gcacagactgctctgccggaaggta

SEQ ID NO: 3588331 - DNA, 25 bp, Homo sapien
tgtggtggccagtgaattggcactc

SEQ ID NO: 3588332 - DNA, 25 bp, Homo sapien
ctgtggtggccagtgaattggcact

SEQ ID NO: 3588333 - DNA, 25 bp, Homo sapien
gtggtggccagtgaattggcactca

SEQ ID NO: 3588334 - DNA, 25 bp, Homo sapien
tcgttgttaaccggcttggagacca

SEQ ID NO: 3588335 - DNA, 25 bp, Homo sapien
ttaaccggcttggagaccagctctc

SEQ ID NO: 3588336 - DNA, 25 bp, Homo sapien
tgttaaccggcttggagaccagctc

SEQ ID NO: 3588337 - DNA, 25 bp, Homo sapien
gttgttaaccggcttggagaccagc

SEQ ID NO: 3588338 - DNA, 25 bp, Homo sapien
tcaaagtaagcaatcggtaacatga

SEQ ID NO: 3588339 - DNA, 25 bp, Homo sapien
taagcaatcggtaacatgaggatct

SEQ ID NO: 3588340 - DNA, 25 bp, Homo sapien
aaagtaagcaatcggtaacatgagg

SEQ ID NO: 3588341 - DNA, 25 bp, Homo sapien
agtaagcaatcggtaacatgaggat

SEQ ID NO: 3588342 - DNA, 25 bp, Homo sapien
tggctagtgacaggctggaagacaa

SEQ ID NO: 3588343 - DNA, 25 bp, Homo sapien
tgcactctgtgatcttgacattctg

SEQ ID NO: 3588344 - DNA, 25 bp, Homo sapien
tggaagacaatgcactctgtgatct

SEQ ID NO: 3588345 - DNA, 25 bp, Homo sapien
actctgtgatcttgacattctgtaa

SEQ ID NO: 3588346 - DNA, 25 bp, Homo sapien
ctggtgtgttatgtgatcaagagta

SEQ ID NO: 3588347 - DNA, 25 bp, Homo sapien
actggtgtgttatgtgatcaagagt

SEQ ID NO: 3588348 - DNA, 25 bp, Homo sapien
tgtgatcaagagtagcagtcaacga

SEQ ID NO: 3588349 - DNA, 25 bp, Homo sapien
tgatcaagagtagcagtcaacgata

SEQ ID NO: 3588350 - DNA, 25 bp, Homo sapien
agttcctttccatactgcaatgtcc

SEQ ID NO: 3588351 - DNA, 25 bp, Homo sapien
gcagagcctaccgtgcctcctgtaa

SEQ ID NO: 3588352 - DNA, 25 bp, Homo sapien
atataaggcagagcctaccgtgcct

SEQ ID NO: 3588353 - DNA, 25 bp, Homo sapien
gttcctttccatactgcaatgtcct

SEQ ID NO: 3588354 - DNA, 25 bp, Homo sapien
tcctgtaaatatgagcagcactctg

SEQ ID NO: 3588355 - DNA, 25 bp, Homo sapien
tgacctcatattgcgttcccacagc

SEQ ID NO: 3588356 - DNA, 25 bp, Homo sapien
tccgaggctgttctcagtgtatgct

SEQ ID NO: 3588357 - DNA, 25 bp, Homo sapien
caagacagggtttctagttccaagg

SEQ ID NO: 3588358 - DNA, 25 bp, Homo sapien
tgcaccaaaaccttacaaccaatgg

SEQ ID NO: 3588359 - DNA, 25 bp, Homo sapien
gacaatatatatttctaagagccag

SEQ ID NO: 3588360 - DNA, 25 bp, Homo sapien
gcactggttttccagccatgcttaa

SEQ ID NO: 3588361 - DNA, 25 bp, Homo sapien
ccagccatgcttaagcccgtattac

SEQ ID NO: 3588362 - DNA, 25 bp, Homo sapien
gaaatgatagccgagaatcctggga

SEQ ID NO: 3588363 - DNA, 25 bp, Homo sapien
ggtaacaccttcatcagcagagggc

SEQ ID NO: 3588364 - DNA, 25 bp, Homo sapien
ggaaacttcccggagcctgatatgt

SEQ ID NO: 3588365 - DNA, 25 bp, Homo sapien
gccctcaatggatacctcttcggaa

SEQ ID NO: 3588366 - DNA, 25 bp, Homo sapien
taataaagtgtcacataaggtggct

SEQ ID NO: 3588367 - DNA, 25 bp, Homo sapien
gggctatgactatgccaatgacact

SEQ ID NO: 3588368 - DNA, 25 bp, Homo sapien
tgaaaccatcagcaatgtccgccat

SEQ ID NO: 3588369 - DNA, 25 bp, Homo sapien
ccaatgacacttgttagaggaaatg

SEQ ID NO: 3588370 - DNA, 25 bp, Homo sapien
gctgtacccggacctcctggtcgag

SEQ ID NO: 3588371 - DNA, 25 bp, Homo sapien
cggccggtgactgggtgaaggcgcc

SEQ ID NO: 3588372 - DNA, 25 bp, Homo sapien
aggaagcggagctctcgggttcccg

SEQ ID NO: 3588373 - DNA, 25 bp, Homo sapien
accgagacacaaaggcaggcgggat

SEQ ID NO: 3588374 - DNA, 25 bp, Homo sapien
tggccacggagtacgtgttctcgga

SEQ ID NO: 3588375 - DNA, 25 bp, Homo sapien
caagatggtcacgtgcattgcggtg

SEQ ID NO: 3588376 - DNA, 25 bp, Homo sapien
ccacggagcccaagttcaaggggct

SEQ ID NO: 3588377 - DNA, 25 bp, Homo sapien
gctgtggacaagatggtcacgtgca

SEQ ID NO: 3588378 - DNA, 25 bp, Homo sapien
ggattcatggaacctgggcagtgtc

SEQ ID NO: 3588379 - DNA, 25 bp, Homo sapien
tagtggcaccgtcacatggagaggt

SEQ ID NO: 3588380 - DNA, 25 bp, Homo sapien
gaagttgaacgcataaccctcctaa

SEQ ID NO: 3588381 - DNA, 25 bp, Homo sapien
ctgaagctgagacgtgtgagacaac

SEQ ID NO: 3588382 - DNA, 25 bp, Homo sapien
gccctttgacaggtgacgacctggg

SEQ ID NO: 3588383 - DNA, 25 bp, Homo sapien
ctgttttggccctttgacaggtgac

SEQ ID NO: 3588384 - DNA, 25 bp, Homo sapien
ggctagagtgcattgctctttccag

SEQ ID NO: 3588385 - DNA, 25 bp, Homo sapien
cagagtggggctagagtgcattgct

SEQ ID NO: 3588386 - DNA, 25 bp, Homo sapien
ttaggcgctctgggtggggttctca

SEQ ID NO: 3588387 - DNA, 25 bp, Homo sapien
taggcgctctgggtggggttctcac

SEQ ID NO: 3588388 - DNA, 25 bp, Homo sapien
atgaacttgggcctagagctcggga

SEQ ID NO: 3588389 - DNA, 25 bp, Homo sapien
gccattgactgcaggtggctagtct

SEQ ID NO: 3588390 - DNA, 25 bp, Homo sapien
ggctagtcttgtcagctctgtggtt

SEQ ID NO: 3588391 - DNA, 25 bp, Homo sapien
tgctgcttgtgttacgggctggcct

SEQ ID NO: 3588392 - DNA, 25 bp, Homo sapien
cctgtctgcaccttctctcctccct

SEQ ID NO: 3588393 - DNA, 25 bp, Homo sapien
ggcctgtctgcaccttctctcctcc

SEQ ID NO: 3588394 - DNA, 25 bp, Homo sapien
tctgcaccttctctcctccctggcc

SEQ ID NO: 3588395 - DNA, 25 bp, Homo sapien
tgcaccttctctcctccctggccat

SEQ ID NO: 3588396 - DNA, 25 bp, Homo sapien
ccattccgacagaagacagatgttc

SEQ ID NO: 3588397 - DNA, 25 bp, Homo sapien
tgtgtgcagcatcaaatcagggatc

SEQ ID NO: 3588398 - DNA, 25 bp, Homo sapien
gatcctgagaaacgacagcaccgtg

SEQ ID NO: 3588399 - DNA, 25 bp, Homo sapien
tctgaagggtacaacgatttgagcc

SEQ ID NO: 3588400 - DNA, 25 bp, Homo sapien
taagttaggtgtaaggtccgatgcc

SEQ ID NO: 3588401 - DNA, 25 bp, Homo sapien
tctgtacccgtggtgagacaagacc

SEQ ID NO: 3588402 - DNA, 25 bp, Homo sapien
ggcccaagtgctgctctgactgaaa

SEQ ID NO: 3588403 - DNA, 25 bp, Homo sapien
tcaaccttggctgatggaaatcccg

SEQ ID NO: 3588404 - DNA, 25 bp, Homo sapien
ggaacacaggagtatttaaagtgaa

SEQ ID NO: 3588405 - DNA, 25 bp, Homo sapien
tctacaggcggtttctctgttatca

SEQ ID NO: 3588406 - DNA, 25 bp, Homo sapien
caggcggtttctctgttatcaaagg

SEQ ID NO: 3588407 - DNA, 25 bp, Homo sapien
agagtttgtctacaggcggtttctc

SEQ ID NO: 3588408 - DNA, 25 bp, Homo sapien
tagctcttacggacagttgtttaca

SEQ ID NO: 3588409 - DNA, 25 bp, Homo sapien
gaaattatataagctgctgtctgcc

SEQ ID NO: 3588410 - DNA, 25 bp, Homo sapien
aaaactgttcccaattccaactatg

SEQ ID NO: 3588411 - DNA, 25 bp, Homo sapien
agttcagtaatcctcaggaacctcc

SEQ ID NO: 3588412 - DNA, 25 bp, Homo sapien
ctcaggtcagggcagtttgtgccta

SEQ ID NO: 3588413 - DNA, 25 bp, Homo sapien
caagtgcttaaaacagagactggcc

SEQ ID NO: 3588414 - DNA, 25 bp, Homo sapien
tttatgcactgctatatcgcaagtg

SEQ ID NO: 3588415 - DNA, 25 bp, Homo sapien
ggctcattagcctcttggtagaaag

SEQ ID NO: 3588416 - DNA, 25 bp, Homo sapien
taaaggcaaaagattgtgtacatct

SEQ ID NO: 3588417 - DNA, 25 bp, Homo sapien
gggaaaattagtgattcccagtgta

SEQ ID NO: 3588418 - DNA, 25 bp, Homo sapien
gtttgcaggtttggcataaattgcg

SEQ ID NO: 3588419 - DNA, 25 bp, Homo sapien
ctttccaggaatgggaaaattagtg

SEQ ID NO: 3588420 - DNA, 25 bp, Homo sapien
attgcgttaagtagaaaaccaggct

SEQ ID NO: 3588421 - DNA, 25 bp, Homo sapien
gaaatgtagagagttatatatatca

SEQ ID NO: 3588422 - DNA, 25 bp, Homo sapien
gacattcagaaatgtagagagttat

SEQ ID NO: 3588423 - DNA, 25 bp, Homo sapien
gtagagagttatatatatcattata

SEQ ID NO: 3588424 - DNA, 25 bp, Homo sapien
tcagaaatgtagagagttatatata

SEQ ID NO: 3588425 - DNA, 25 bp, Homo sapien
ttgaagtaatagatgcttcatccac

SEQ ID NO: 3588426 - DNA, 25 bp, Homo sapien
gaagatattggccttgaagtaatag

SEQ ID NO: 3588427 - DNA, 25 bp, Homo sapien
ttggccttgaagtaatagatgcttc

SEQ ID NO: 3588428 - DNA, 25 bp, Homo sapien
tcaaggtcctatcagcttcattctt

SEQ ID NO: 3588429 - DNA, 25 bp, Homo sapien
gataggcaacagtgccttgtttccg

SEQ ID NO: 3588430 - DNA, 25 bp, Homo sapien
cttctgataggcaacagtgccttgt

SEQ ID NO: 3588431 - DNA, 25 bp, Homo sapien
ccgatgagtttgatgtcaggatcca

SEQ ID NO: 3588432 - DNA, 25 bp, Homo sapien
aggcaacagtgccttgtttccgatg

SEQ ID NO: 3588433 - DNA, 25 bp, Homo sapien
cagagtgcctggtacctacgggagc

SEQ ID NO: 3588434 - DNA, 25 bp, Homo sapien
tacgaaatgatacaaggaagttaga

SEQ ID NO: 3588435 - DNA, 25 bp, Homo sapien
gttgcctggagaaattacgaaatga

SEQ ID NO: 3588436 - DNA, 25 bp, Homo sapien
ggatgcagacctcccattttttaag

SEQ ID NO: 3588437 - DNA, 25 bp, Homo sapien
tgtcatagtcgaaacttgtggtcct

SEQ ID NO: 3588438 - DNA, 25 bp, Homo sapien
ggaggctaaagtgagtgcatcacct

SEQ ID NO: 3588439 - DNA, 25 bp, Homo sapien
ctggacagggtaagtgttcatttag

SEQ ID NO: 3588440 - DNA, 25 bp, Homo sapien
ttctgcctcaataaacctccctgga

SEQ ID NO: 3588441 - DNA, 25 bp, Homo sapien
cagcccatgacggccatacaagctt

SEQ ID NO: 3588442 - DNA, 25 bp, Homo sapien
acggccatacaagcttccctgacag

SEQ ID NO: 3588443 - DNA, 25 bp, Homo sapien
catgacggccatacaagcttccctg

SEQ ID NO: 3588444 - DNA, 25 bp, Homo sapien
gagagctgaggggtatgtatcccta

SEQ ID NO: 3588445 - DNA, 25 bp, Homo sapien
gactgagctgatgcttggctaacag

SEQ ID NO: 3588446 - DNA, 25 bp, Homo sapien
catcctgtgtcctcggtctgtgctc

SEQ ID NO: 3588447 - DNA, 25 bp, Homo sapien
tgtgggctgtgcgaggacactgtca

SEQ ID NO: 3588448 - DNA, 25 bp, Homo sapien
gctccagcagggaccatagttcctg

SEQ ID NO: 3588449 - DNA, 25 bp, Homo sapien
actcattgacgtaacccatgtggca

SEQ ID NO: 3588450 - DNA, 25 bp, Homo sapien
tcattgacgtaacccatgtggcagg

SEQ ID NO: 3588451 - DNA, 25 bp, Homo sapien
ttactcattgacgtaacccatgtgg

SEQ ID NO: 3588452 - DNA, 25 bp, Homo sapien
attgacgtaacccatgtggcaggtg

SEQ ID NO: 3588453 - DNA, 25 bp, Homo sapien
cacacagggttgaaaaaaaagtgat

SEQ ID NO: 3588454 - DNA, 25 bp, Homo sapien
taaaaatttaagctgatctttacca

SEQ ID NO: 3588455 - DNA, 25 bp, Homo sapien
tggatttggataaaaatttaagctg

SEQ ID NO: 3588456 - DNA, 25 bp, Homo sapien
gatctttaccaccaaaagccacaca

SEQ ID NO: 3588457 - DNA, 25 bp, Homo sapien
gacacaagacagcagatccttgaca

SEQ ID NO: 3588458 - DNA, 25 bp, Homo sapien
agggtctcattgacacaagacagca

SEQ ID NO: 3588459 - DNA, 25 bp, Homo sapien
tgctagggtctcattgacacaagac

SEQ ID NO: 3588460 - DNA, 25 bp, Homo sapien
tagggtctcattgacacaagacagc

SEQ ID NO: 3588461 - DNA, 25 bp, Homo sapien
ttagacaacacagcgaaatggcctt

SEQ ID NO: 3588462 - DNA, 25 bp, Homo sapien
ggcccgtgtacctgtttcaagcaga

SEQ ID NO: 3588463 - DNA, 25 bp, Homo sapien
ttggcagtactgaaggtcccggact

SEQ ID NO: 3588464 - DNA, 25 bp, Homo sapien
ggacaaaccttctgtatgcctgctg

SEQ ID NO: 3588465 - DNA, 25 bp, Homo sapien
tgctgctcatggcaaaccagtggaa

SEQ ID NO: 3588466 - DNA, 25 bp, Homo sapien
agcaggatgaaggtggccaagtcca

SEQ ID NO: 3588467 - DNA, 25 bp, Homo sapien
gtttcttggccacacgagcgtaggc

SEQ ID NO: 3588468 - DNA, 25 bp, Homo sapien
gcagagggagcgcacaatgtcctca

SEQ ID NO: 3588469 - DNA, 25 bp, Homo sapien
gacagcgatgtagatgacacccttt

SEQ ID NO: 3588470 - DNA, 25 bp, Homo sapien
gaaaagaacgtagccatggtccaga

SEQ ID NO: 3588471 - DNA, 25 bp, Homo sapien
gacaccctttgtgattgagatccgg

SEQ ID NO: 3588472 - DNA, 25 bp, Homo sapien
ggtaaataatttctggcagatagca

SEQ ID NO: 3588473 - DNA, 25 bp, Homo sapien
caagcaaaccacatcactaactgaa

SEQ ID NO: 3588474 - DNA, 25 bp, Homo sapien
gcaaaccacatcactaactgaagac

SEQ ID NO: 3588475 - DNA, 25 bp, Homo sapien
accacatcactaactgaagacgttt

SEQ ID NO: 3588476 - DNA, 25 bp, Homo sapien
aaaccacatcactaactgaagacgt

SEQ ID NO: 3588477 - DNA, 25 bp, Homo sapien
cctgagctacatcaggtagctgctg

SEQ ID NO: 3588478 - DNA, 25 bp, Homo sapien
gttcattattgagcccctgagctac

SEQ ID NO: 3588479 - DNA, 25 bp, Homo sapien
tctggattcagaaaaccggggcagg

SEQ ID NO: 3588480 - DNA, 25 bp, Homo sapien
agtcaagcaccccttatgttcatta

SEQ ID NO: 3588481 - DNA, 25 bp, Homo sapien
ctagaccccttagattatgatggac

SEQ ID NO: 3588482 - DNA, 25 bp, Homo sapien
cagacacttatgtgggaactcccaa

SEQ ID NO: 3588483 - DNA, 25 bp, Homo sapien
tctcatcactcatcctgggaagctg

SEQ ID NO: 3588484 - DNA, 25 bp, Homo sapien
cagtgttacaggcttcagactgaaa

SEQ ID NO: 3588485 - DNA, 25 bp, Homo sapien
cacaggcacatgatctcggaaaagc

SEQ ID NO: 3588486 - DNA, 25 bp, Homo sapien
ttgagtaagcatggaaaaggcacct

SEQ ID NO: 3588487 - DNA, 25 bp, Homo sapien
tcagcgtaggtctaagcgtacaacg

SEQ ID NO: 3588488 - DNA, 25 bp, Homo sapien
tctttgaagcctcctatcccgtggt

SEQ ID NO: 3588489 - DNA, 25 bp, Homo sapien
agcagtactgggcaaagcggctgac

SEQ ID NO: 3588490 - DNA, 25 bp, Homo sapien
tcagtgctgagacgtgcagtgagca

SEQ ID NO: 3588491 - DNA, 25 bp, Homo sapien
ggtggcgatccaccgcaatggctgt

SEQ ID NO: 3588492 - DNA, 25 bp, Homo sapien
tatccatgtgctgttcacaaagcga

SEQ ID NO: 3588493 - DNA, 25 bp, Homo sapien
ctctcaggtgtagcctgtcctcgcg

SEQ ID NO: 3588494 - DNA, 25 bp, Homo sapien
tattgccagctctcaggtgtagcct

SEQ ID NO: 3588495 - DNA, 25 bp, Homo sapien
gcagatccagccctgtatcctggct

SEQ ID NO: 3588496 - DNA, 25 bp, Homo sapien
ggcaggtattgccagctctcaggtg

SEQ ID NO: 3588497 - DNA, 25 bp, Homo sapien
tgatcattatgtcggcaactgccag

SEQ ID NO: 3588498 - DNA, 25 bp, Homo sapien
tgcccacaaagttctgccagtcgga

SEQ ID NO: 3588499 - DNA, 25 bp, Homo sapien
gatgacatgacagaccaggacgttg

SEQ ID NO: 3588500 - DNA, 25 bp, Homo sapien
tccaagagaagaagtgcgaggcatt

SEQ ID NO: 3588501 - DNA, 25 bp, Homo sapien
agacagagcagcaagaggtgaggga

SEQ ID NO: 3588502 - DNA, 25 bp, Homo sapien
ctcgcaccaaggggaggagacagag

SEQ ID NO: 3588503 - DNA, 25 bp, Homo sapien
acagagcagcaagaggtgagggacc

SEQ ID NO: 3588504 - DNA, 25 bp, Homo sapien
agagcagcaagaggtgagggaccat

SEQ ID NO: 3588505 - DNA, 25 bp, Homo sapien
cacagcatacaaggccgtcccgagg

SEQ ID NO: 3588506 - DNA, 25 bp, Homo sapien
agccagggagcccggacgcgcggag

SEQ ID NO: 3588507 - DNA, 25 bp, Homo sapien
gcgcacagcatacaaggccgtcccg

SEQ ID NO: 3588508 - DNA, 25 bp, Homo sapien
atacaaggccgtcccgaggagccag

SEQ ID NO: 3588509 - DNA, 25 bp, Homo sapien
gcttggtcactgtagatgcatagaa

SEQ ID NO: 3588510 - DNA, 25 bp, Homo sapien
tgaaagacaataatgacccaaccta

SEQ ID NO: 3588511 - DNA, 25 bp, Homo sapien
tcacaactcaaggaactagggaact

SEQ ID NO: 3588512 - DNA, 25 bp, Homo sapien
tactgatctgtgtacattcatccag

SEQ ID NO: 3588513 - DNA, 25 bp, Homo sapien
ctcttaattgctattgggctatttt

SEQ ID NO: 3588514 - DNA, 25 bp, Homo sapien
gaacgagaaagaggataattagcca

SEQ ID NO: 3588515 - DNA, 25 bp, Homo sapien
tttgttttgaatccgatcctcagaa

SEQ ID NO: 3588516 - DNA, 25 bp, Homo sapien
agccatatttaagctatttgattga

SEQ ID NO: 3588517 - DNA, 25 bp, Homo sapien
tgttaatagcaggattttgatatcc

SEQ ID NO: 3588518 - DNA, 25 bp, Homo sapien
caattatgtgaagcgttaaagggcg

SEQ ID NO: 3588519 - DNA, 25 bp, Homo sapien
tttcagaataacacaagcaggacac

SEQ ID NO: 3588520 - DNA, 25 bp, Homo sapien
tatgctgtggtattccatgacccaa

SEQ ID NO: 3588521 - DNA, 25 bp, Homo sapien
cagcataaatggcatggtccgagca

SEQ ID NO: 3588522 - DNA, 25 bp, Homo sapien
ggtgaattcaggatgaacccaggct

SEQ ID NO: 3588523 - DNA, 25 bp, Homo sapien
ggcagtgtcgagagttatggcatca

SEQ ID NO: 3588524 - DNA, 25 bp, Homo sapien
catgctaggcttggttcagagacaa

SEQ ID NO: 3588525 - DNA, 25 bp, Homo sapien
gcaattcaccgaaaatgggtgtaaa

SEQ ID NO: 3588526 - DNA, 25 bp, Homo sapien
tacacgaacaagcaattcaccgaaa

SEQ ID NO: 3588527 - DNA, 25 bp, Homo sapien
aaatgagtaagatacacgaacaagc

SEQ ID NO: 3588528 - DNA, 25 bp, Homo sapien
gaacaagcaattcaccgaaaatggg

SEQ ID NO: 3588529 - DNA, 25 bp, Homo sapien
caacgggaagcagcgcagttatctc

SEQ ID NO: 3588530 - DNA, 25 bp, Homo sapien
tggaaactcattggactgaaaaacc

SEQ ID NO: 3588531 - DNA, 25 bp, Homo sapien
gagaggattaaaggtaagcacacac

SEQ ID NO: 3588532 - DNA, 25 bp, Homo sapien
agaaacgtgttcctaattgtcggtg

SEQ ID NO: 3588533 - DNA, 25 bp, Homo sapien
ggacactgcgctatttcttgacctg

SEQ ID NO: 3588534 - DNA, 25 bp, Homo sapien
ttccttagcggtgaactgaatcgca

SEQ ID NO: 3588535 - DNA, 25 bp, Homo sapien
tcttgacctgtagagggattccatc

SEQ ID NO: 3588536 - DNA, 25 bp, Homo sapien
cagaagttagggcttgttacccaga

SEQ ID NO: 3588537 - DNA, 25 bp, Homo sapien
tgatgtggcccacagctcagactga

SEQ ID NO: 3588538 - DNA, 25 bp, Homo sapien
gaaatcctggcattgacattccaca

SEQ ID NO: 3588539 - DNA, 25 bp, Homo sapien
taatggtcatgagtatcactgagtc

SEQ ID NO: 3588540 - DNA, 25 bp, Homo sapien
tctacctatgaagaaatgtcgggcc

SEQ ID NO: 3588541 - DNA, 25 bp, Homo sapien
caaagctcttactacaacaaccagg

SEQ ID NO: 3588542 - DNA, 25 bp, Homo sapien
tcttacttatggagttatgctcagg

SEQ ID NO: 3588543 - DNA, 25 bp, Homo sapien
agagtgatattgaaacaaagctctt

SEQ ID NO: 3588544 - DNA, 25 bp, Homo sapien
tcaatgctattgtatgtctgtgaac

SEQ ID NO: 3588545 - DNA, 25 bp, Homo sapien
ttcttcttaaagaactagtgttcat

SEQ ID NO: 3588546 - DNA, 25 bp, Homo sapien
tcttaaagaactagtgttcataaaa

SEQ ID NO: 3588547 - DNA, 25 bp, Homo sapien
cttaaagaactagtgttcataaaag

SEQ ID NO: 3588548 - DNA, 25 bp, Homo sapien
cttcttaaagaactagtgttcataa

SEQ ID NO: 3588549 - DNA, 25 bp, Homo sapien
ttcgatacttgactctgggacatga

SEQ ID NO: 3588550 - DNA, 25 bp, Homo sapien
tcgatacttgactctgggacatgat

SEQ ID NO: 3588551 - DNA, 25 bp, Homo sapien
cgatacttgactctgggacatgatt

SEQ ID NO: 3588552 - DNA, 25 bp, Homo sapien
ttactcctataaaggccagtacggc

SEQ ID NO: 3588553 - DNA, 25 bp, Homo sapien
ttctgcaactctatactctcccgga

SEQ ID NO: 3588554 - DNA, 25 bp, Homo sapien
ttttctactctacccaaaggctgag

SEQ ID NO: 3588555 - DNA, 25 bp, Homo sapien
tgatttgcatctgcgcccatcttgg

SEQ ID NO: 3588556 - DNA, 25 bp, Homo sapien
tgatctgtctttgaagtggtaggaa

SEQ ID NO: 3588557 - DNA, 25 bp, Homo sapien
ctttgatctgtctttgaagtggtag

SEQ ID NO: 3588558 - DNA, 25 bp, Homo sapien
tctttgaagtggtaggaaaaatgtc

SEQ ID NO: 3588559 - DNA, 25 bp, Homo sapien
tggtaggaaaaatgtcttcttccac

SEQ ID NO: 3588560 - DNA, 25 bp, Homo sapien
gttgacaattcataatgcagaaaac

SEQ ID NO: 3588561 - DNA, 25 bp, Homo sapien
tgacaattcataatgcagaaaacat

SEQ ID NO: 3588562 - DNA, 25 bp, Homo sapien
gagttgacaattcataatgcagaaa

SEQ ID NO: 3588563 - DNA, 25 bp, Homo sapien
gacaattcataatgcagaaaacata

SEQ ID NO: 3588564 - DNA, 25 bp, Homo sapien
agtagtgacatttcgggaaggctgc

SEQ ID NO: 3588565 - DNA, 25 bp, Homo sapien
tcttagtagtgacatttcgggaagg

SEQ ID NO: 3588566 - DNA, 25 bp, Homo sapien
aattcttagtagtgacatttcggga

SEQ ID NO: 3588567 - DNA, 25 bp, Homo sapien
gaataattcttagtagtgacatttc

SEQ ID NO: 3588568 - DNA, 25 bp, Homo sapien
tctgagtcctatctgcaaaactgaa

SEQ ID NO: 3588569 - DNA, 25 bp, Homo sapien
cccttctttgttgttgacgatacct

SEQ ID NO: 3588570 - DNA, 25 bp, Homo sapien
tataggtacgcataactcaatgccc

SEQ ID NO: 3588571 - DNA, 25 bp, Homo sapien
tatttcccagcttattgagatactg

SEQ ID NO: 3588572 - DNA, 25 bp, Homo sapien
ccaccttctcggttcaagtattctc

SEQ ID NO: 3588573 - DNA, 25 bp, Homo sapien
tccaccttctcggttcaagtattct

SEQ ID NO: 3588574 - DNA, 25 bp, Homo sapien
tttataaataatcacttgcagtcta

SEQ ID NO: 3588575 - DNA, 25 bp, Homo sapien
ataatcacttgcagtctatactcac

SEQ ID NO: 3588576 - DNA, 25 bp, Homo sapien
tataaataatcacttgcagtctata

SEQ ID NO: 3588577 - DNA, 25 bp, Homo sapien
taaataatcacttgcagtctatact

SEQ ID NO: 3588578 - DNA, 25 bp, Homo sapien
gagttcctgctacgggtagaagtct

SEQ ID NO: 3588579 - DNA, 25 bp, Homo sapien
tcctgctacgggtagaagtctccag

SEQ ID NO: 3588580 - DNA, 25 bp, Homo sapien
tacgggtagaagtctccagaccagt

SEQ ID NO: 3588581 - DNA, 25 bp, Homo sapien
gtctttgagttcctgctacgggtag

SEQ ID NO: 3588582 - DNA, 25 bp, Homo sapien
tgagaccctcctctcgatgctgaat

SEQ ID NO: 3588583 - DNA, 25 bp, Homo sapien
taaggtcatcagcactaaaggcaga

SEQ ID NO: 3588584 - DNA, 25 bp, Homo sapien
gctgagatgctatcatcagagtcat

SEQ ID NO: 3588585 - DNA, 25 bp, Homo sapien
actgagatctgagtgctctggccct

SEQ ID NO: 3588586 - DNA, 25 bp, Homo sapien
caagcgatcctcccagttaagtctc

SEQ ID NO: 3588587 - DNA, 25 bp, Homo sapien
ctacaggtgggagctaccatgcctg

SEQ ID NO: 3588588 - DNA, 25 bp, Homo sapien
gggactacaggtgggagctaccatg

SEQ ID NO: 3588589 - DNA, 25 bp, Homo sapien
cgatcctcccagttaagtctcctga

SEQ ID NO: 3588590 - DNA, 25 bp, Homo sapien
ccctagacctatggactgactattc

SEQ ID NO: 3588591 - DNA, 25 bp, Homo sapien
tgactattctaactaaacctactgg

SEQ ID NO: 3588592 - DNA, 25 bp, Homo sapien
gagtcactgcacttgctaaacaggt

SEQ ID NO: 3588593 - DNA, 25 bp, Homo sapien
acagtgatgatggtgcttaagctaa

SEQ ID NO: 3588594 - DNA, 25 bp, Homo sapien
gtctggtttctctgaaacgacgtac

SEQ ID NO: 3588595 - DNA, 25 bp, Homo sapien
tttgtctggtttctctgaaacgacg

SEQ ID NO: 3588596 - DNA, 25 bp, Homo sapien
tcttcattagtatttttttgtctgg

SEQ ID NO: 3588597 - DNA, 25 bp, Homo sapien
catcatcttcttcattagtattttt

SEQ ID NO: 3588598 - DNA, 25 bp, Homo sapien
caatatgacgttctttaagaaatcg

SEQ ID NO: 3588599 - DNA, 25 bp, Homo sapien
ctcctcatcgattttgtcttcgagg

SEQ ID NO: 3588600 - DNA, 25 bp, Homo sapien
gacgttctttaagaaatcgctgtgt

SEQ ID NO: 3588601 - DNA, 25 bp, Homo sapien
tcgattttgtcttcgagggcatcaa

SEQ ID NO: 3588602 - DNA, 25 bp, Homo sapien
tctctgcggtttgaaagtactgttt

SEQ ID NO: 3588603 - DNA, 25 bp, Homo sapien
ttctctgcggtttgaaagtactgtt

SEQ ID NO: 3588604 - DNA, 25 bp, Homo sapien
tctgcggtttgaaagtactgtttta

SEQ ID NO: 3588605 - DNA, 25 bp, Homo sapien
cttctctgcggtttgaaagtactgt

SEQ ID NO: 3588606 - DNA, 25 bp, Homo sapien
caaggatatgaaggtcctcttcaag

SEQ ID NO: 3588607 - DNA, 25 bp, Homo sapien
caaatttctggctaaagcgaagaac

SEQ ID NO: 3588608 - DNA, 25 bp, Homo sapien
ctctatgcctgaaaaaatggataat

SEQ ID NO: 3588609 - DNA, 25 bp, Homo sapien
tgcctgaaaaaatggataatgtctt

SEQ ID NO: 3588610 - DNA, 25 bp, Homo sapien
ggttcaaaacctccactatagtcca

SEQ ID NO: 3588611 - DNA, 25 bp, Homo sapien
tgttctaagtatgctgttcagggcc

SEQ ID NO: 3588612 - DNA, 25 bp, Homo sapien
ttcacaaactgactgggaagaaaaa

SEQ ID NO: 3588613 - DNA, 25 bp, Homo sapien
catgtaaacagatcactggaagcag

SEQ ID NO: 3588614 - DNA, 25 bp, Homo sapien
cagggccagggatacaaccataaat

SEQ ID NO: 3588615 - DNA, 25 bp, Homo sapien
tggtgagaattacccagacgttccc

SEQ ID NO: 3588616 - DNA, 25 bp, Homo sapien
tcgcagtcgtacaagaggcttctct

SEQ ID NO: 3588617 - DNA, 25 bp, Homo sapien
ccagacgttcccgttcagcattttc

SEQ ID NO: 3588618 - DNA, 25 bp, Homo sapien
tctctggctggtgagaattacccag

SEQ ID NO: 3588619 - DNA, 25 bp, Homo sapien
tcatacagtagacctcaaccagagg

SEQ ID NO: 3588620 - DNA, 25 bp, Homo sapien
gactcaggcctggatcaatcaatgc

SEQ ID NO: 3588621 - DNA, 25 bp, Homo sapien
tctagtgggtacaaaccagggagaa

SEQ ID NO: 3588622 - DNA, 25 bp, Homo sapien
tgatcatcacgaccagttagaaggg

SEQ ID NO: 3588623 - DNA, 25 bp, Homo sapien
gtagatctcattgactttatcaaaa

SEQ ID NO: 3588624 - DNA, 25 bp, Homo sapien
aaagtagatctcattgactttatca

SEQ ID NO: 3588625 - DNA, 25 bp, Homo sapien
agtagatctcattgactttatcaaa

SEQ ID NO: 3588626 - DNA, 25 bp, Homo sapien
aagtagatctcattgactttatcaa

SEQ ID NO: 3588627 - DNA, 25 bp, Homo sapien
ccctttaatacgcagcaaaccaaca

SEQ ID NO: 3588628 - DNA, 25 bp, Homo sapien
aaactgccgcactgtgtgaagagga

SEQ ID NO: 3588629 - DNA, 25 bp, Homo sapien
cctccatgaaaaactgccgcactgt

SEQ ID NO: 3588630 - DNA, 25 bp, Homo sapien
taaaaatgtctggatgattagctag

SEQ ID NO: 3588631 - DNA, 25 bp, Homo sapien
gaagttagtacttccatgtttactc

SEQ ID NO: 3588632 - DNA, 25 bp, Homo sapien
tctggaatgaagttagtacttccat

SEQ ID NO: 3588633 - DNA, 25 bp, Homo sapien
cccagataacaagatcaatgaagtc

SEQ ID NO: 3588634 - DNA, 25 bp, Homo sapien
tgttcatggccccagataacaagat

SEQ ID NO: 3588635 - DNA, 25 bp, Homo sapien
caacaatcagaggaacagtagcaac

SEQ ID NO: 3588636 - DNA, 25 bp, Homo sapien
ggtcatgacctcaaaacagatggga

SEQ ID NO: 3588637 - DNA, 25 bp, Homo sapien
gatttttgccattacaagagccaag

SEQ ID NO: 3588638 - DNA, 25 bp, Homo sapien
tgagcaagccctggtagcagtaagc

SEQ ID NO: 3588639 - DNA, 25 bp, Homo sapien
aattatataatcaggccccaaatcc

SEQ ID NO: 3588640 - DNA, 25 bp, Homo sapien
accattttattcaagggatttcagc

SEQ ID NO: 3588641 - DNA, 25 bp, Homo sapien
ggatttcagcatcccaggattttag

SEQ ID NO: 3588642 - DNA, 25 bp, Homo sapien
ctgacaacttctccggtgtgtccct

SEQ ID NO: 3588643 - DNA, 25 bp, Homo sapien
gatgaatcacaaataagttaaacca

SEQ ID NO: 3588644 - DNA, 25 bp, Homo sapien
gaatcacaaataagttaaaccaaga

SEQ ID NO: 3588645 - DNA, 25 bp, Homo sapien
tgatgaatcacaaataagttaaacc

SEQ ID NO: 3588646 - DNA, 25 bp, Homo sapien
tctgatgaatcacaaataagttaaa

SEQ ID NO: 3588647 - DNA, 25 bp, Homo sapien
ttttattgacaaacattcgatagag

SEQ ID NO: 3588648 - DNA, 25 bp, Homo sapien
ttcctttggtctcaacattgttact

SEQ ID NO: 3588649 - DNA, 25 bp, Homo sapien
caaacattcgatagagcctttcatc

SEQ ID NO: 3588650 - DNA, 25 bp, Homo sapien
tagagcctttcatctggaatggatc

SEQ ID NO: 3588651 - DNA, 25 bp, Homo sapien
catatagcgcaatctttgtgcttcc

SEQ ID NO: 3588652 - DNA, 25 bp, Homo sapien
tatagcgcaatctttgtgcttcctt

SEQ ID NO: 3588653 - DNA, 25 bp, Homo sapien
ctaaaccatatagcgcaatctttgt

SEQ ID NO: 3588654 - DNA, 25 bp, Homo sapien
aaccatatagcgcaatctttgtgct

SEQ ID NO: 3588655 - DNA, 25 bp, Homo sapien
cttaaaatgtccaaggcacaaagtg

SEQ ID NO: 3588656 - DNA, 25 bp, Homo sapien
ttaaaatgtccaaggcacaaagtgc

SEQ ID NO: 3588657 - DNA, 25 bp, Homo sapien
aaaatgtccaaggcacaaagtgcat

SEQ ID NO: 3588658 - DNA, 25 bp, Homo sapien
taaaatgtccaaggcacaaagtgca

SEQ ID NO: 3588659 - DNA, 25 bp, Homo sapien
gtgggatcgtcatgattgccatgaa

SEQ ID NO: 3588660 - DNA, 25 bp, Homo sapien
ctgtgggatcgtcatgattgccatg

SEQ ID NO: 3588661 - DNA, 25 bp, Homo sapien
ccctgtgggatcgtcatgattgcca

SEQ ID NO: 3588662 - DNA, 25 bp, Homo sapien
cctgtgggatcgtcatgattgccat

SEQ ID NO: 3588663 - DNA, 25 bp, Homo sapien
tccagctgttttataccggaaccca

SEQ ID NO: 3588664 - DNA, 25 bp, Homo sapien
tctcaactctgtaagattggcacat

SEQ ID NO: 3588665 - DNA, 25 bp, Homo sapien
gcccacgcggaacaaacagaattaa

SEQ ID NO: 3588666 - DNA, 25 bp, Homo sapien
taatgaatagaatgggaatttcccc

SEQ ID NO: 3588667 - DNA, 25 bp, Homo sapien
gcaacaatacaatagtaatgtgcac

SEQ ID NO: 3588668 - DNA, 25 bp, Homo sapien
ggctgagtctgaagacaagaaagac

SEQ ID NO: 3588669 - DNA, 25 bp, Homo sapien
tgcacatgtaacatccagatcttgg

SEQ ID NO: 3588670 - DNA, 25 bp, Homo sapien
gagtatgtctattctcatgggttag

SEQ ID NO: 3588671 - DNA, 25 bp, Homo sapien
ctgagaatttcaaactggacaggcc

SEQ ID NO: 3588672 - DNA, 25 bp, Homo sapien
actgagaatttcaaactggacaggc

SEQ ID NO: 3588673 - DNA, 25 bp, Homo sapien
tatactgtctcacgggtttcctcac

SEQ ID NO: 3588674 - DNA, 25 bp, Homo sapien
cttatactgtctcacgggtttcctc

SEQ ID NO: 3588675 - DNA, 25 bp, Homo sapien
actcctgcttcacatggatgtacat

SEQ ID NO: 3588676 - DNA, 25 bp, Homo sapien
ggatgtacattctctatgctcccca

SEQ ID NO: 3588677 - DNA, 25 bp, Homo sapien
aaaatttcatcgagtgttacaaacg

SEQ ID NO: 3588678 - DNA, 25 bp, Homo sapien
tcctgggcaagtcttaaaatttcat

SEQ ID NO: 3588679 - DNA, 25 bp, Homo sapien
cgagtgttacaaacgtatcatttcc

SEQ ID NO: 3588680 - DNA, 25 bp, Homo sapien
tacaaacgtatcatttcctctgact

SEQ ID NO: 3588681 - DNA, 25 bp, Homo sapien
aaatccaagatgaatatctgttgca

SEQ ID NO: 3588682 - DNA, 25 bp, Homo sapien
tttctgttcataaacaggttcctta

SEQ ID NO: 3588683 - DNA, 25 bp, Homo sapien
ctgtgatcacagttgacgagcttta

SEQ ID NO: 3588684 - DNA, 25 bp, Homo sapien
cagttgacgagctttagaaacccca

SEQ ID NO: 3588685 - DNA, 25 bp, Homo sapien
caggttccttatttactgcttatta

SEQ ID NO: 3588686 - DNA, 25 bp, Homo sapien
aacccctgggtactgtactcaaatg

SEQ ID NO: 3588687 - DNA, 25 bp, Homo sapien
aatgtcagaaaatgcactcgattcc

SEQ ID NO: 3588688 - DNA, 25 bp, Homo sapien
ttatggtcagtcaagctcctctggg

SEQ ID NO: 3588689 - DNA, 25 bp, Homo sapien
tgcactcgattccaaattctagaaa

SEQ ID NO: 3588690 - DNA, 25 bp, Homo sapien
aagaaaacaacacggtctgaacttg

SEQ ID NO: 3588691 - DNA, 25 bp, Homo sapien
cccactgctggactcttcgaagccc

SEQ ID NO: 3588692 - DNA, 25 bp, Homo sapien
aatcgcgacccaaggctgtcttctt

SEQ ID NO: 3588693 - DNA, 25 bp, Homo sapien
tcttcgaagccccacaatcgcgacc

SEQ ID NO: 3588694 - DNA, 25 bp, Homo sapien
cgcagggccgtaaacctgaattccg

SEQ ID NO: 3588695 - DNA, 25 bp, Homo sapien
taaacctgaattccgcgggagagaa

SEQ ID NO: 3588696 - DNA, 25 bp, Homo sapien
ggagagaacggcgtccgtttctctc

SEQ ID NO: 3588697 - DNA, 25 bp, Homo sapien
aacggcgtccgtttctctcgcgaca

SEQ ID NO: 3588698 - DNA, 25 bp, Homo sapien
ttgacacgggttgtacagaaactgg

SEQ ID NO: 3588699 - DNA, 25 bp, Homo sapien
tattgaggctaaaaccacaaagtgg

SEQ ID NO: 3588700 - DNA, 25 bp, Homo sapien
taagctaatggcgaatcacgatgac

SEQ ID NO: 3588701 - DNA, 25 bp, Homo sapien
ggttttacctgcctaatcctactga

SEQ ID NO: 3588702 - DNA, 25 bp, Homo sapien
gaaaccgtgcccagggctctcggaa

SEQ ID NO: 3588703 - DNA, 25 bp, Homo sapien
ggctgcctgcgactgagctgagaag

SEQ ID NO: 3588704 - DNA, 25 bp, Homo sapien
tcggaagaccgctgcggcatgacag

SEQ ID NO: 3588705 - DNA, 25 bp, Homo sapien
tatggcaacccgagacgcctcgcat

SEQ ID NO: 3588706 - DNA, 25 bp, Homo sapien
ctgggatcactgccggaagcagcag

SEQ ID NO: 3588707 - DNA, 25 bp, Homo sapien
tgggatcactgccggaagcagcagg

SEQ ID NO: 3588708 - DNA, 25 bp, Homo sapien
gatcactgccggaagcagcaggtct

SEQ ID NO: 3588709 - DNA, 25 bp, Homo sapien
ggatcactgccggaagcagcaggtc

SEQ ID NO: 3588710 - DNA, 25 bp, Homo sapien
gaaaggttttactgtgcaggaggaa

SEQ ID NO: 3588711 - DNA, 25 bp, Homo sapien
aaaccccagaagcattatgaaaggt

SEQ ID NO: 3588712 - DNA, 25 bp, Homo sapien
tgggcctagccagaacacctaacat

SEQ ID NO: 3588713 - DNA, 25 bp, Homo sapien
catctagtctccaaactgaggctgt

SEQ ID NO: 3588714 - DNA, 25 bp, Homo sapien
tctacctggctttcgagaactcgca

SEQ ID NO: 3588715 - DNA, 25 bp, Homo sapien
gaccgtgccaactacgagcgctttg

SEQ ID NO: 3588716 - DNA, 25 bp, Homo sapien
gacgtagatgtctccagtgtcgcct

SEQ ID NO: 3588717 - DNA, 25 bp, Homo sapien
gcaatactactatgagccggcaagt

SEQ ID NO: 3588718 - DNA, 25 bp, Homo sapien
tctggaccaaggtgaagcaaatttg

SEQ ID NO: 3588719 - DNA, 25 bp, Homo sapien
caagaagccgttgaggcggtttcct

SEQ ID NO: 3588720 - DNA, 25 bp, Homo sapien
caaatctcatacacaactgttcccg

SEQ ID NO: 3588721 - DNA, 25 bp, Homo sapien
tgttcccgattcacgtttttctgga

SEQ ID NO: 3588722 - DNA, 25 bp, Homo sapien
taagatgaatacatgcgtgtacctc

SEQ ID NO: 3588723 - DNA, 25 bp, Homo sapien
tacaatgtgaatagtcatctcctaa

SEQ ID NO: 3588724 - DNA, 25 bp, Homo sapien
cagtatttaatgaaaccctatggag

SEQ ID NO: 3588725 - DNA, 25 bp, Homo sapien
caaattcattgacttaggggagttc

SEQ ID NO: 3588726 - DNA, 25 bp, Homo sapien
taaaggctaaatctgcgcttctccc

SEQ ID NO: 3588727 - DNA, 25 bp, Homo sapien
tgttaaaggctaaatctgcgcttct

SEQ ID NO: 3588728 - DNA, 25 bp, Homo sapien
cttgttaaaggctaaatctgcgctt

SEQ ID NO: 3588729 - DNA, 25 bp, Homo sapien
aaggctaaatctgcgcttctccctg

SEQ ID NO: 3588730 - DNA, 25 bp, Homo sapien
tgactcactagaggcaatgccttgg

SEQ ID NO: 3588731 - DNA, 25 bp, Homo sapien
tacaaaccttatggtgagggccagt

SEQ ID NO: 3588732 - DNA, 25 bp, Homo sapien
ggtcgctctggtactgggttcctca

SEQ ID NO: 3588733 - DNA, 25 bp, Homo sapien
gggccacatgggtagcagccttgct

SEQ ID NO: 3588734 - DNA, 25 bp, Homo sapien
caaagttcccctgtatttcactggg

SEQ ID NO: 3588735 - DNA, 25 bp, Homo sapien
gcactataaacacttggctggcagt

SEQ ID NO: 3588736 - DNA, 25 bp, Homo sapien
tagattaccccacacaaatgacagg

SEQ ID NO: 3588737 - DNA, 25 bp, Homo sapien
tgtcaagccagcacattaggaaggt

SEQ ID NO: 3588738 - DNA, 25 bp, Homo sapien
cagactctgcaaacgcatataatcc

SEQ ID NO: 3588739 - DNA, 25 bp, Homo sapien
tggaggatttggaaacttacgtagc

SEQ ID NO: 3588740 - DNA, 25 bp, Homo sapien
taaagtagtactagctcatggagga

SEQ ID NO: 3588741 - DNA, 25 bp, Homo sapien
ctgtacgtcatgttttgtagcttgc

SEQ ID NO: 3588742 - DNA, 25 bp, Homo sapien
catagcagattaagaggcaatccgt

SEQ ID NO: 3588743 - DNA, 25 bp, Homo sapien
gccaagtcacttgtaaacatcgaca

SEQ ID NO: 3588744 - DNA, 25 bp, Homo sapien
gataattcccatgttatacaagctg

SEQ ID NO: 3588745 - DNA, 25 bp, Homo sapien
tgtaacaggtacagaccaagaattc

SEQ ID NO: 3588746 - DNA, 25 bp, Homo sapien
tttagtagtaccaagctgcccaatt

SEQ ID NO: 3588747 - DNA, 25 bp, Homo sapien
actcctcctttggtttgtcaatttg

SEQ ID NO: 3588748 - DNA, 25 bp, Homo sapien
caggaatttttagtagtaccaagct

SEQ ID NO: 3588749 - DNA, 25 bp, Homo sapien
ctcctcctttggtttgtcaatttga

SEQ ID NO: 3588750 - DNA, 25 bp, Homo sapien
gagccacgggcaacttttcatgatt

SEQ ID NO: 3588751 - DNA, 25 bp, Homo sapien
agagccacgggcaacttttcatgat

SEQ ID NO: 3588752 - DNA, 25 bp, Homo sapien
gagagccacgggcaacttttcatga

SEQ ID NO: 3588753 - DNA, 25 bp, Homo sapien
gacccctggtatgagatcccagtct

SEQ ID NO: 3588754 - DNA, 25 bp, Homo sapien
gcccttgctggatgtacctgtctgt

SEQ ID NO: 3588755 - DNA, 25 bp, Homo sapien
gagattctctatcctgacccctggt

SEQ ID NO: 3588756 - DNA, 25 bp, Homo sapien
tttggcttctcccactcgtgcttgg

SEQ ID NO: 3588757 - DNA, 25 bp, Homo sapien
tagaaggtggagtaaggcctgtttc

SEQ ID NO: 3588758 - DNA, 25 bp, Homo sapien
tgctcatagaaggtggagtaaggcc

SEQ ID NO: 3588759 - DNA, 25 bp, Homo sapien
gtggagtaaggcctgtttctggtac

SEQ ID NO: 3588760 - DNA, 25 bp, Homo sapien
ctgtgtaggcatatgctcatagaag

SEQ ID NO: 3588761 - DNA, 25 bp, Homo sapien
ttgatgttgggttaggcaagctctt

SEQ ID NO: 3588762 - DNA, 25 bp, Homo sapien
gatgttgggttaggcaagctctttg

SEQ ID NO: 3588763 - DNA, 25 bp, Homo sapien
tgttgggttaggcaagctctttgta

SEQ ID NO: 3588764 - DNA, 25 bp, Homo sapien
ttgggttaggcaagctctttgtagg

SEQ ID NO: 3588765 - DNA, 25 bp, Homo sapien
ataatatggagtgggtcaaagtctt

SEQ ID NO: 3588766 - DNA, 25 bp, Homo sapien
aggcattcataatatggagtgggtc

SEQ ID NO: 3588767 - DNA, 25 bp, Homo sapien
ctgaggcattcataatatggagtgg

SEQ ID NO: 3588768 - DNA, 25 bp, Homo sapien
ggagtgggtcaaagtcttgatttct

SEQ ID NO: 3588769 - DNA, 25 bp, Homo sapien
tgacaatctctgtgggttggtccaa

SEQ ID NO: 3588770 - DNA, 25 bp, Homo sapien
acaatctctgtgggttggtccaaca

SEQ ID NO: 3588771 - DNA, 25 bp, Homo sapien
gacaatctctgtgggttggtccaac

SEQ ID NO: 3588772 - DNA, 25 bp, Homo sapien
tctgacaatctctgtgggttggtcc

SEQ ID NO: 3588773 - DNA, 25 bp, Homo sapien
gccactagccagcttcacttcatag

SEQ ID NO: 3588774 - DNA, 25 bp, Homo sapien
tgatatcagtagtaaccctgaggca

SEQ ID NO: 3588775 - DNA, 25 bp, Homo sapien
ttcattcatgcttggttctgaaggg

SEQ ID NO: 3588776 - DNA, 25 bp, Homo sapien
gaaatgactatacctcccctgctct

SEQ ID NO: 3588777 - DNA, 25 bp, Homo sapien
tgctgatgaaaacgcactgactgac

SEQ ID NO: 3588778 - DNA, 25 bp, Homo sapien
tactctcagagagctatgcaaggta

SEQ ID NO: 3588779 - DNA, 25 bp, Homo sapien
agaccatttgcaggaagtaacccac

SEQ ID NO: 3588780 - DNA, 25 bp, Homo sapien
tgaagggtgctgctttactctcaga

SEQ ID NO: 3588781 - DNA, 25 bp, Homo sapien
agagcatcagtagcaaactgagtgt

SEQ ID NO: 3588782 - DNA, 25 bp, Homo sapien
aactcaaggtttgggtagtagcagt

SEQ ID NO: 3588783 - DNA, 25 bp, Homo sapien
gcctgctttcattgggtgattaaaa

SEQ ID NO: 3588784 - DNA, 25 bp, Homo sapien
caaggtttgggtagtagcagttctg

SEQ ID NO: 3588785 - DNA, 25 bp, Homo sapien
tggaactcccatggctagggccata

SEQ ID NO: 3588786 - DNA, 25 bp, Homo sapien
ctcccatggctagggccatatgttg

SEQ ID NO: 3588787 - DNA, 25 bp, Homo sapien
tagtggaactcccatggctagggcc

SEQ ID NO: 3588788 - DNA, 25 bp, Homo sapien
gattttagtggaactcccatggcta

SEQ ID NO: 3588789 - DNA, 25 bp, Homo sapien
agaaacaagccggaattgtccatag

SEQ ID NO: 3588790 - DNA, 25 bp, Homo sapien
gctcagaaacaagccggaattgtcc

SEQ ID NO: 3588791 - DNA, 25 bp, Homo sapien
agccggaattgtccatagctcttat

SEQ ID NO: 3588792 - DNA, 25 bp, Homo sapien
aacaagccggaattgtccatagctc

SEQ ID NO: 3588793 - DNA, 25 bp, Homo sapien
gccagtgacggcacatttccacaga

SEQ ID NO: 3588794 - DNA, 25 bp, Homo sapien
tggccagtgacggcacatttccaca

SEQ ID NO: 3588795 - DNA, 25 bp, Homo sapien
ggccagtgacggcacatttccacag

SEQ ID NO: 3588796 - DNA, 25 bp, Homo sapien
ttggatttgggggagataatgacat

SEQ ID NO: 3588797 - DNA, 25 bp, Homo sapien
tgcttccacttccccagtaattttc

SEQ ID NO: 3588798 - DNA, 25 bp, Homo sapien
cacctctcagaaagtctaaatatct

SEQ ID NO: 3588799 - DNA, 25 bp, Homo sapien
cacttccccagtaattttcacctct

SEQ ID NO: 3588800 - DNA, 25 bp, Homo sapien
cagagacaatatgaagtcagggaac

SEQ ID NO: 3588801 - DNA, 25 bp, Homo sapien
ggctgtgcccaatcctccacatgga

SEQ ID NO: 3588802 - DNA, 25 bp, Homo sapien
tctcctcatacaaggctctgctgaa

SEQ ID NO: 3588803 - DNA, 25 bp, Homo sapien
aatatgaagtcagggaactgcccag

SEQ ID NO: 3588804 - DNA, 25 bp, Homo sapien
cagtgtggctgaaatctgtaaatcc

SEQ ID NO: 3588805 - DNA, 25 bp, Homo sapien
agctgatactaaggtggttctcaga

SEQ ID NO: 3588806 - DNA, 25 bp, Homo sapien
cagctgatactaaggtggttctcag

SEQ ID NO: 3588807 - DNA, 25 bp, Homo sapien
gtgtggctgaaatctgtaaatcctt

SEQ ID NO: 3588808 - DNA, 25 bp, Homo sapien
cctgttgagtcataggccttgaggc

SEQ ID NO: 3588809 - DNA, 25 bp, Homo sapien
gagcatctcgggctgcaattgggta

SEQ ID NO: 3588810 - DNA, 25 bp, Homo sapien
cagtccacagagaattgcattatct

SEQ ID NO: 3588811 - DNA, 25 bp, Homo sapien
tctgcccttctattatcctcagagc

SEQ ID NO: 3588812 - DNA, 25 bp, Homo sapien
gcaagctctgaaaatcgtccatctc

SEQ ID NO: 3588813 - DNA, 25 bp, Homo sapien
ctgcaagctctgaaaatcgtccatc

SEQ ID NO: 3588814 - DNA, 25 bp, Homo sapien
tgcaagctctgaaaatcgtccatct

SEQ ID NO: 3588815 - DNA, 25 bp, Homo sapien
caagctctgaaaatcgtccatctcc

SEQ ID NO: 3588816 - DNA, 25 bp, Homo sapien
gcctggaagccgcgcggtgccaggg

SEQ ID NO: 3588817 - DNA, 25 bp, Homo sapien
cgagttgtcccccaagtttctgcgg

SEQ ID NO: 3588818 - DNA, 25 bp, Homo sapien
tcccccaagtttctgcggcgatttg

SEQ ID NO: 3588819 - DNA, 25 bp, Homo sapien
gtgccagggccgagttgtcccccaa

SEQ ID NO: 3588820 - DNA, 25 bp, Homo sapien
ttcccggggacctgcgcttgagctg

SEQ ID NO: 3588821 - DNA, 25 bp, Homo sapien
gcttttcccggggacctgcgcttga

SEQ ID NO: 3588822 - DNA, 25 bp, Homo sapien
tctggcggtctgaatcccgcggggc

SEQ ID NO: 3588823 - DNA, 25 bp, Homo sapien
tgggagagagaagcccgcgcttttc

SEQ ID NO: 3588824 - DNA, 25 bp, Homo sapien
gtagcgattcgagttgttttctgct

SEQ ID NO: 3588825 - DNA, 25 bp, Homo sapien
gttctttcatcactagcctgaatat

SEQ ID NO: 3588826 - DNA, 25 bp, Homo sapien
ttctttcatcactagcctgaatatc

SEQ ID NO: 3588827 - DNA, 25 bp, Homo sapien
tgttctttcatcactagcctgaata

SEQ ID NO: 3588828 - DNA, 25 bp, Homo sapien
gatatttggtttgacataggaggaa

SEQ ID NO: 3588829 - DNA, 25 bp, Homo sapien
tggaggatagatatttggtttgaca

SEQ ID NO: 3588830 - DNA, 25 bp, Homo sapien
ggaacgccataacctgcatcactca

SEQ ID NO: 3588831 - DNA, 25 bp, Homo sapien
tgacataggaggaacgccataacct

SEQ ID NO: 3588832 - DNA, 25 bp, Homo sapien
atcatgtatgcctcagaacagctgg

SEQ ID NO: 3588833 - DNA, 25 bp, Homo sapien
tccatcacagtgtgacccgaacggc

SEQ ID NO: 3588834 - DNA, 25 bp, Homo sapien
ctggcggcagccattgtgagctctt

SEQ ID NO: 3588835 - DNA, 25 bp, Homo sapien
tcagtcatggaggtcaaggagaggc

SEQ ID NO: 3588836 - DNA, 25 bp, Homo sapien
cttcctcaaatgctgtccacaccct

SEQ ID NO: 3588837 - DNA, 25 bp, Homo sapien
cctcaaatgctgtccacaccctcat

SEQ ID NO: 3588838 - DNA, 25 bp, Homo sapien
cttgttatctccttcctcaaatgct

SEQ ID NO: 3588839 - DNA, 25 bp, Homo sapien
tctccttcctcaaatgctgtccaca

SEQ ID NO: 3588840 - DNA, 25 bp, Homo sapien
tttgtaagatgatcacagtcatgtt

SEQ ID NO: 3588841 - DNA, 25 bp, Homo sapien
gccacgctgctctctgaattgattt

SEQ ID NO: 3588842 - DNA, 25 bp, Homo sapien
taagatgatcacagtcatgttacac

SEQ ID NO: 3588843 - DNA, 25 bp, Homo sapien
aaggccacgctgctctctgaattga

SEQ ID NO: 3588844 - DNA, 25 bp, Homo sapien
gacctgttggtctgtagtgcatatt

SEQ ID NO: 3588845 - DNA, 25 bp, Homo sapien
gaatggtgagaatttccccacttct

SEQ ID NO: 3588846 - DNA, 25 bp, Homo sapien
tctggagccattaggaatggtgaga

SEQ ID NO: 3588847 - DNA, 25 bp, Homo sapien
atggaaccatctagagtgtctggag

SEQ ID NO: 3588848 - DNA, 25 bp, Homo sapien
cacttgccctccacattgtcctcct

SEQ ID NO: 3588849 - DNA, 25 bp, Homo sapien
cttgtgtatcttcccacttgccctc

SEQ ID NO: 3588850 - DNA, 25 bp, Homo sapien
tgccctccacattgtcctccttttt

SEQ ID NO: 3588851 - DNA, 25 bp, Homo sapien
tgtgtatcttcccacttgccctcca

SEQ ID NO: 3588852 - DNA, 25 bp, Homo sapien
tctgtctttgcaagcccaagcccat

SEQ ID NO: 3588853 - DNA, 25 bp, Homo sapien
gggcccattcagtgaaagtattagc

SEQ ID NO: 3588854 - DNA, 25 bp, Homo sapien
cattcagtgaaagtattagctggta

SEQ ID NO: 3588855 - DNA, 25 bp, Homo sapien
ttgcaagcccaagcccattcttagg

SEQ ID NO: 3588856 - DNA, 25 bp, Homo sapien
tttccctgttttccagttgtggaca

SEQ ID NO: 3588857 - DNA, 25 bp, Homo sapien
ttccctgttttccagttgtggacat

SEQ ID NO: 3588858 - DNA, 25 bp, Homo sapien
gctcttctacttctccagattcttc

SEQ ID NO: 3588859 - DNA, 25 bp, Homo sapien
ttcccagctcttctacttctccaga

SEQ ID NO: 3588860 - DNA, 25 bp, Homo sapien
actgctggcagtctagttagggaac

SEQ ID NO: 3588861 - DNA, 25 bp, Homo sapien
gaatcagaatcaggacatgcaaccc

SEQ ID NO: 3588862 - DNA, 25 bp, Homo sapien
tagggaactgccacaatccagggag

SEQ ID NO: 3588863 - DNA, 25 bp, Homo sapien
ttactcagtaggagggcccatcagg

SEQ ID NO: 3588864 - DNA, 25 bp, Homo sapien
tacggttctgcgaacacatttaata

SEQ ID NO: 3588865 - DNA, 25 bp, Homo sapien
gaggatgtacggttctgcgaacaca

SEQ ID NO: 3588866 - DNA, 25 bp, Homo sapien
ctctactcaggcagataacagcctg

SEQ ID NO: 3588867 - DNA, 25 bp, Homo sapien
gccagaggatgtacggttctgcgaa

SEQ ID NO: 3588868 - DNA, 25 bp, Homo sapien
tgagcgtgcggcctcctgagacgat

SEQ ID NO: 3588869 - DNA, 25 bp, Homo sapien
ttactgatgactaggaagactttcc

SEQ ID NO: 3588870 - DNA, 25 bp, Homo sapien
gagacgatgcggtttggacccaaca

SEQ ID NO: 3588871 - DNA, 25 bp, Homo sapien
tcctgtctccgcgtggcaaatacct

SEQ ID NO: 3588872 - DNA, 25 bp, Homo sapien
tctgctgtttctagggatgttccac

SEQ ID NO: 3588873 - DNA, 25 bp, Homo sapien
gatgttccactcatgggattcttcc

SEQ ID NO: 3588874 - DNA, 25 bp, Homo sapien
gaagcaaatagaaatgcttgggtgg

SEQ ID NO: 3588875 - DNA, 25 bp, Homo sapien
gaattagcacggaaaggtcctcctg

SEQ ID NO: 3588876 - DNA, 25 bp, Homo sapien
aaagagtctggtggtactacaggga

SEQ ID NO: 3588877 - DNA, 25 bp, Homo sapien
gaaatttatatctcaaggtacagag

SEQ ID NO: 3588878 - DNA, 25 bp, Homo sapien
aagggccaactcttgtgaaaaatca

SEQ ID NO: 3588879 - DNA, 25 bp, Homo sapien
caggcagatgtcagctacatagccc

SEQ ID NO: 3588880 - DNA, 25 bp, Homo sapien
caagagttgcatgaacttcgtgacg

SEQ ID NO: 3588881 - DNA, 25 bp, Homo sapien
tgtgccttgcgttcctaaggtcacc

SEQ ID NO: 3588882 - DNA, 25 bp, Homo sapien
tgttctcaacaactaggaccaagag

SEQ ID NO: 3588883 - DNA, 25 bp, Homo sapien
cagtgtagctgcctgagccttaggt

SEQ ID NO: 3588884 - DNA, 25 bp, Homo sapien
tgtggatccctgagtgttgcacgtg

SEQ ID NO: 3588885 - DNA, 25 bp, Homo sapien
caggcttgctttagtgaagaccctc

SEQ ID NO: 3588886 - DNA, 25 bp, Homo sapien
caaaggtggctttgattgggcagtc

SEQ ID NO: 3588887 - DNA, 25 bp, Homo sapien
ccagtatctggagcttggaatggct

SEQ ID NO: 3588888 - DNA, 25 bp, Homo sapien
tgtgattgcagggattcttacagcc

SEQ ID NO: 3588889 - DNA, 25 bp, Homo sapien
agcctggcctaagagctccctgaca

SEQ ID NO: 3588890 - DNA, 25 bp, Homo sapien
ttgcagggattcttacagcctggcc

SEQ ID NO: 3588891 - DNA, 25 bp, Homo sapien
gattcttacagcctggcctaagagc

SEQ ID NO: 3588892 - DNA, 25 bp, Homo sapien
cagcggttcatgatatctgtggacg

SEQ ID NO: 3588893 - DNA, 25 bp, Homo sapien
cagaagaaccaactctggtataagg

SEQ ID NO: 3588894 - DNA, 25 bp, Homo sapien
tatctgtggacgaatcagaaaggcc

SEQ ID NO: 3588895 - DNA, 25 bp, Homo sapien
tcagaaaggccttgttgaaatgagg

SEQ ID NO: 3588896 - DNA, 25 bp, Homo sapien
gagtgctttgccacaggtactggtc

SEQ ID NO: 3588897 - DNA, 25 bp, Homo sapien
ggtactggtctacctgtgttggata

SEQ ID NO: 3588898 - DNA, 25 bp, Homo sapien
gcacgacttcaaggccagagtgctt

SEQ ID NO: 3588899 - DNA, 25 bp, Homo sapien
gttttagtgtagctaaaagcacgac

SEQ ID NO: 3588900 - DNA, 25 bp, Homo sapien
tggccgccacaagtgtcagtgtctt

SEQ ID NO: 3588901 - DNA, 25 bp, Homo sapien
ggttacaagtgtatcctcaggtgga

SEQ ID NO: 3588902 - DNA, 25 bp, Homo sapien
gagttgcaggtttgctccccagttt

SEQ ID NO: 3588903 - DNA, 25 bp, Homo sapien
tcttcagaaccagagcccagtaacc

SEQ ID NO: 3588904 - DNA, 25 bp, Homo sapien
aattttgtcggctctgggattgacc

SEQ ID NO: 3588905 - DNA, 25 bp, Homo sapien
tcggctctgggattgaccgaggatt

SEQ ID NO: 3588906 - DNA, 25 bp, Homo sapien
ctctgggattgaccgaggatttcat

SEQ ID NO: 3588907 - DNA, 25 bp, Homo sapien
ccaaaaggtcaattttgtcggctct

SEQ ID NO: 3588908 - DNA, 25 bp, Homo sapien
atttcttccccacattttaacagca

SEQ ID NO: 3588909 - DNA, 25 bp, Homo sapien
cccatattatccatctctccagaag

SEQ ID NO: 3588910 - DNA, 25 bp, Homo sapien
ttccccacattttaacagcagccat

SEQ ID NO: 3588911 - DNA, 25 bp, Homo sapien
cattttcccatattatccatctctc

SEQ ID NO: 3588912 - DNA, 25 bp, Homo sapien
caggcagggcccataaaacaagaag

SEQ ID NO: 3588913 - DNA, 25 bp, Homo sapien
ggaccctggcatgcctattacattg

SEQ ID NO: 3588914 - DNA, 25 bp, Homo sapien
gaagacttcagcttggagcctcact

SEQ ID NO: 3588915 - DNA, 25 bp, Homo sapien
cctaaactctgattggaaaagtgag

SEQ ID NO: 3588916 - DNA, 25 bp, Homo sapien
gagattccgtgggtccctgtgacat

SEQ ID NO: 3588917 - DNA, 25 bp, Homo sapien
gttgcagctgcgaacctcattctga

SEQ ID NO: 3588918 - DNA, 25 bp, Homo sapien
ttcacatcggctgtcttgcaaggag

SEQ ID NO: 3588919 - DNA, 25 bp, Homo sapien
tctgactgtgaactaagcaagcttt

SEQ ID NO: 3588920 - DNA, 25 bp, Homo sapien
tatgcaaacagtgtggtaaatacct

SEQ ID NO: 3588921 - DNA, 25 bp, Homo sapien
gagctttcctgaagtccggccatat

SEQ ID NO: 3588922 - DNA, 25 bp, Homo sapien
tctgggcagcttacaatatcttaaa

SEQ ID NO: 3588923 - DNA, 25 bp, Homo sapien
catatactgagtacctgctctgagt

SEQ ID NO: 3588924 - DNA, 25 bp, Homo sapien
tcctccatgagcacttacagaattg

SEQ ID NO: 3588925 - DNA, 25 bp, Homo sapien
ggtatctggctgtaacgtttgacgt

SEQ ID NO: 3588926 - DNA, 25 bp, Homo sapien
gcatgggcacccgatttcagctgtc

SEQ ID NO: 3588927 - DNA, 25 bp, Homo sapien
gccaaatgggtctgtgtaccagtgt

SEQ ID NO: 3588928 - DNA, 25 bp, Homo sapien
aagcaacttgtttacactcgccttg

SEQ ID NO: 3588929 - DNA, 25 bp, Homo sapien
actgttttctacagagggccaggaa

SEQ ID NO: 3588930 - DNA, 25 bp, Homo sapien
tcagtgatcggcactgttttctaca

SEQ ID NO: 3588931 - DNA, 25 bp, Homo sapien
acttgtttacactcgccttgttggg

SEQ ID NO: 3588932 - DNA, 25 bp, Homo sapien
taggcagaaagtcctctgctggcat

SEQ ID NO: 3588933 - DNA, 25 bp, Homo sapien
tgctggacctgttaggcagaaagtc

SEQ ID NO: 3588934 - DNA, 25 bp, Homo sapien
tgacgcaggtatctatgctggacct

SEQ ID NO: 3588935 - DNA, 25 bp, Homo sapien
tcctctttaccgcaggtgacgcagg

SEQ ID NO: 3588936 - DNA, 25 bp, Homo sapien
tttccacaggactaggctggactgg

SEQ ID NO: 3588937 - DNA, 25 bp, Homo sapien
tctggatccaagcagggttcgctca

SEQ ID NO: 3588938 - DNA, 25 bp, Homo sapien
gaaagttggatttcatggtacacca

SEQ ID NO: 3588939 - DNA, 25 bp, Homo sapien
tgctgattgcatgcccaaggtatgt

SEQ ID NO: 3588940 - DNA, 25 bp, Homo sapien
agttcaccttcatagccatcttcag

SEQ ID NO: 3588941 - DNA, 25 bp, Homo sapien
gacagacacttaaaatctgtggaac

SEQ ID NO: 3588942 - DNA, 25 bp, Homo sapien
cagaggtttatccagcaccctaggg

SEQ ID NO: 3588943 - DNA, 25 bp, Homo sapien
gaatttctaatgtgtagagcctcag

SEQ ID NO: 3588944 - DNA, 25 bp, Homo sapien
tctggctgaaagagttggtggaggt

SEQ ID NO: 3588945 - DNA, 25 bp, Homo sapien
ggcaaggatgcaaggtctggatccc

SEQ ID NO: 3588946 - DNA, 25 bp, Homo sapien
ggatcccgcttagccctggcaatgg

SEQ ID NO: 3588947 - DNA, 25 bp, Homo sapien
aggacaggtgctcaagcctagggca

SEQ ID NO: 3588948 - DNA, 25 bp, Homo sapien
ttggaagtgtccatgcagggcattc

SEQ ID NO: 3588949 - DNA, 25 bp, Homo sapien
tatgactttgtggtgactgcccaaa

SEQ ID NO: 3588950 - DNA, 25 bp, Homo sapien
caaatcctctttgagtttattacca

SEQ ID NO: 3588951 - DNA, 25 bp, Homo sapien
gcagcaagtccccttgtttgtagca

SEQ ID NO: 3588952 - DNA, 25 bp, Homo sapien
tacctgcagaagtgagcgataccca

SEQ ID NO: 3588953 - DNA, 25 bp, Homo sapien
agagctctcctcttcggccatgaga

SEQ ID NO: 3588954 - DNA, 25 bp, Homo sapien
tgtggtccaaaatagaatccctctc

SEQ ID NO: 3588955 - DNA, 25 bp, Homo sapien
tatccagaacacaagtgagtaccgt

SEQ ID NO: 3588956 - DNA, 25 bp, Homo sapien
aacatatcactggaaacatttggag

SEQ ID NO: 3588957 - DNA, 25 bp, Homo sapien
tggggaagcccacacacaatttaga

SEQ ID NO: 3588958 - DNA, 25 bp, Homo sapien
agtccattatcaagtaaggtatcac

SEQ ID NO: 3588959 - DNA, 25 bp, Homo sapien
gagaatgcaaactgggttaaaccta

SEQ ID NO: 3588960 - DNA, 25 bp, Homo sapien
ctttaattaagcacataaaactgta

SEQ ID NO: 3588961 - DNA, 25 bp, Homo sapien
tctttaattaagcacataaaactgt

SEQ ID NO: 3588962 - DNA, 25 bp, Homo sapien
tttctccatgaactttttgtgaaat

SEQ ID NO: 3588963 - DNA, 25 bp, Homo sapien
tctccatgaactttttgtgaaattc

SEQ ID NO: 3588964 - DNA, 25 bp, Homo sapien
ctatttaatatatttctccatgaac

SEQ ID NO: 3588965 - DNA, 25 bp, Homo sapien
atatttctccatgaactttttgtga

SEQ ID NO: 3588966 - DNA, 25 bp, Homo sapien
aatcttttgtctttcttctggtcat

SEQ ID NO: 3588967 - DNA, 25 bp, Homo sapien
gtgtgtcatttacaaatcttttgtc

SEQ ID NO: 3588968 - DNA, 25 bp, Homo sapien
caaatcttttgtctttcttctggtc

SEQ ID NO: 3588969 - DNA, 25 bp, Homo sapien
gtgtcatttacaaatcttttgtctt

SEQ ID NO: 3588970 - DNA, 25 bp, Homo sapien
cagttcttgaagacaacgtcatcat

SEQ ID NO: 3588971 - DNA, 25 bp, Homo sapien
gttcttgaagacaacgtcatcatcc

SEQ ID NO: 3588972 - DNA, 25 bp, Homo sapien
cttgaagacaacgtcatcatcccac

SEQ ID NO: 3588973 - DNA, 25 bp, Homo sapien
tcttgaagacaacgtcatcatccca

SEQ ID NO: 3588974 - DNA, 25 bp, Homo sapien
gcaaggcttagtcagttacacagaa

SEQ ID NO: 3588975 - DNA, 25 bp, Homo sapien
taggcatctgtacatgatagtagcc

SEQ ID NO: 3588976 - DNA, 25 bp, Homo sapien
tctaatagaaagaagcagcaccgag

SEQ ID NO: 3588977 - DNA, 25 bp, Homo sapien
caagaatactacatgcactgcaagg

SEQ ID NO: 3588978 - DNA, 25 bp, Homo sapien
cttttaactttgaagttggcctgag

SEQ ID NO: 3588979 - DNA, 25 bp, Homo sapien
tcttttaactttgaagttggcctga

SEQ ID NO: 3588980 - DNA, 25 bp, Homo sapien
tcagaatgttttccatacgaatcct

SEQ ID NO: 3588981 - DNA, 25 bp, Homo sapien
tgttttccatacgaatcctctcttc

SEQ ID NO: 3588982 - DNA, 25 bp, Homo sapien
ataaggagagggtttccgctcagaa

SEQ ID NO: 3588983 - DNA, 25 bp, Homo sapien
gagggtttccgctcagaatgttttc

SEQ ID NO: 3588984 - DNA, 25 bp, Homo sapien
tcagtttctatttttatacctccca

SEQ ID NO: 3588985 - DNA, 25 bp, Homo sapien
cagtttctatttttatacctcccat

SEQ ID NO: 3588986 - DNA, 25 bp, Homo sapien
tgcctcagcctctggcacgtgccat

SEQ ID NO: 3588987 - DNA, 25 bp, Homo sapien
ctcagcctctggcacgtgccatcat

SEQ ID NO: 3588988 - DNA, 25 bp, Homo sapien
tgcaagaagagctgcagtatcatca

SEQ ID NO: 3588989 - DNA, 25 bp, Homo sapien
agaagagctgcagtatcatcatcat

SEQ ID NO: 3588990 - DNA, 25 bp, Homo sapien
ttcctggcctgctcttcagctcttt

SEQ ID NO: 3588991 - DNA, 25 bp, Homo sapien
tttttccagttctgcaagaagagct

SEQ ID NO: 3588992 - DNA, 25 bp, Homo sapien
tgtacaacgtatcaccctaagaaag

SEQ ID NO: 3588993 - DNA, 25 bp, Homo sapien
tattactcattggatgccactcagg

SEQ ID NO: 3588994 - DNA, 25 bp, Homo sapien
tccaggtacaactctagagggcact

SEQ ID NO: 3588995 - DNA, 25 bp, Homo sapien
taaagtttagcactgaggtcagggc

SEQ ID NO: 3588996 - DNA, 25 bp, Homo sapien
caggaatctggtctaaccgtggctt

SEQ ID NO: 3588997 - DNA, 25 bp, Homo sapien
taaccgtggcttttttgacactgaa

SEQ ID NO: 3588998 - DNA, 25 bp, Homo sapien
ttggcggcaggaatctggtctaacc

SEQ ID NO: 3588999 - DNA, 25 bp, Homo sapien
atctgcatcaaggttggcggcagga

SEQ ID NO: 3589000 - DNA, 25 bp, Homo sapien
tccacagtgcctgggcaaataagcc

SEQ ID NO: 3589001 - DNA, 25 bp, Homo sapien
taaaagcattatccacagtgaactc

SEQ ID NO: 3589002 - DNA, 25 bp, Homo sapien
gggacctgtgagcacaaggagccca

SEQ ID NO: 3589003 - DNA, 25 bp, Homo sapien
gacctaagaaagtagtacagctcac

SEQ ID NO: 3589004 - DNA, 25 bp, Homo sapien
tcctgaagtcacggttacgaacctc

SEQ ID NO: 3589005 - DNA, 25 bp, Homo sapien
agtcacggttacgaacctcttcagg

SEQ ID NO: 3589006 - DNA, 25 bp, Homo sapien
gaagtcacggttacgaacctcttca

SEQ ID NO: 3589007 - DNA, 25 bp, Homo sapien
cctgaagtcacggttacgaacctct

SEQ ID NO: 3589008 - DNA, 25 bp, Homo sapien
tctggcaggttcaaaggttggcctg

SEQ ID NO: 3589009 - DNA, 25 bp, Homo sapien
tggctcaaatcaccttctccttttc

SEQ ID NO: 3589010 - DNA, 25 bp, Homo sapien
ccacctctggcaggttcaaaggttg

SEQ ID NO: 3589011 - DNA, 25 bp, Homo sapien
tatctttgtatgagagggtaggtct

SEQ ID NO: 3589012 - DNA, 25 bp, Homo sapien
ccctgttagtgtcggaaaagcaagt

SEQ ID NO: 3589013 - DNA, 25 bp, Homo sapien
tgccaaaaatcagggactcattcct

SEQ ID NO: 3589014 - DNA, 25 bp, Homo sapien
tccttctgactatatgggcttgagc

SEQ ID NO: 3589015 - DNA, 25 bp, Homo sapien
gatgcagtcactaaaaccctgttag

SEQ ID NO: 3589016 - DNA, 25 bp, Homo sapien
gggttcgctttacgcagtaggcgag

SEQ ID NO: 3589017 - DNA, 25 bp, Homo sapien
tcgctttacgcagtaggcgagctgc

SEQ ID NO: 3589018 - DNA, 25 bp, Homo sapien
ctggggttcgctttacgcagtaggc

SEQ ID NO: 3589019 - DNA, 25 bp, Homo sapien
gttcgctttacgcagtaggcgagct

SEQ ID NO: 3589020 - DNA, 25 bp, Homo sapien
gataatctcctatcctcttgccgct

SEQ ID NO: 3589021 - DNA, 25 bp, Homo sapien
catcgcgataagaaagataatctcc

SEQ ID NO: 3589022 - DNA, 25 bp, Homo sapien
tgtacgctgcgatctcctcggcggg

SEQ ID NO: 3589023 - DNA, 25 bp, Homo sapien
agagctccagacgcgcctgacaggc

SEQ ID NO: 3589024 - DNA, 25 bp, Homo sapien
tacagacgccattaccactcttggc

SEQ ID NO: 3589025 - DNA, 25 bp, Homo sapien
gccgaggtccgatgcagcaggctcc

SEQ ID NO: 3589026 - DNA, 25 bp, Homo sapien
gaagatcatacagacgccattacca

SEQ ID NO: 3589027 - DNA, 25 bp, Homo sapien
gcaggctccgaagatcatacagacg

SEQ ID NO: 3589028 - DNA, 25 bp, Homo sapien
tccggtactgcgtggacggaaagcc

SEQ ID NO: 3589029 - DNA, 25 bp, Homo sapien
taatgtctcttccgtcttttccgtc

SEQ ID NO: 3589030 - DNA, 25 bp, Homo sapien
ccttcattccggtactgcgtggacg

SEQ ID NO: 3589031 - DNA, 25 bp, Homo sapien
cagactccttcattccggtactgcg

SEQ ID NO: 3589032 - DNA, 25 bp, Homo sapien
gaggatattttcttcaacccctgag

SEQ ID NO: 3589033 - DNA, 25 bp, Homo sapien
taatttccttgactgatgagcctaa

SEQ ID NO: 3589034 - DNA, 25 bp, Homo sapien
tcattgcgggaaaggagacttcacc

SEQ ID NO: 3589035 - DNA, 25 bp, Homo sapien
caagatgcaaggctctctgagggtc

SEQ ID NO: 3589036 - DNA, 25 bp, Homo sapien
caaactggcagacatggtcgtggtc

SEQ ID NO: 3589037 - DNA, 25 bp, Homo sapien
catagtcgttgtgctctggaactgg

SEQ ID NO: 3589038 - DNA, 25 bp, Homo sapien
gagcctcatccgctgtatacagatg

SEQ ID NO: 3589039 - DNA, 25 bp, Homo sapien
cacagtgcacttagttctgggccct

SEQ ID NO: 3589040 - DNA, 25 bp, Homo sapien
aatgtgtttttgtttgtactttcat

SEQ ID NO: 3589041 - DNA, 25 bp, Homo sapien
ctcaatgtgtttttgtttgtacttt

SEQ ID NO: 3589042 - DNA, 25 bp, Homo sapien
ttgtttgtactttcatttatcttca

SEQ ID NO: 3589043 - DNA, 25 bp, Homo sapien
tttgtttgtactttcatttatcttc

SEQ ID NO: 3589044 - DNA, 25 bp, Homo sapien
gaatgatttagcactatctccatag

SEQ ID NO: 3589045 - DNA, 25 bp, Homo sapien
tgtgatacagttctaggaggatctg

SEQ ID NO: 3589046 - DNA, 25 bp, Homo sapien
caggcaaacctgaattgagaccaaa

SEQ ID NO: 3589047 - DNA, 25 bp, Homo sapien
aaaggtacatagcatggatcttcac

SEQ ID NO: 3589048 - DNA, 25 bp, Homo sapien
gaagcaaaccactcctcaccttagt

SEQ ID NO: 3589049 - DNA, 25 bp, Homo sapien
cccatgtcaggtgcattatgtggtg

SEQ ID NO: 3589050 - DNA, 25 bp, Homo sapien
gagtaataaaaacctggtgcttgtc

SEQ ID NO: 3589051 - DNA, 25 bp, Homo sapien
tatgtggtgttccttcaacttgaaa

SEQ ID NO: 3589052 - DNA, 25 bp, Homo sapien
agtcttggctctctatggtcagtgc

SEQ ID NO: 3589053 - DNA, 25 bp, Homo sapien
cagtgccatgtggttaggtgcataa

SEQ ID NO: 3589054 - DNA, 25 bp, Homo sapien
ttaccatctaagtctgagtcttggc

SEQ ID NO: 3589055 - DNA, 25 bp, Homo sapien
ggatattaatattgctaccctaggt

SEQ ID NO: 3589056 - DNA, 25 bp, Homo sapien
atccaagtgcctgagagggctctct

SEQ ID NO: 3589057 - DNA, 25 bp, Homo sapien
ctcgtagaagatccaagtgcctgag

SEQ ID NO: 3589058 - DNA, 25 bp, Homo sapien
tggactgaggcaccacctgtgtcac

SEQ ID NO: 3589059 - DNA, 25 bp, Homo sapien
agatccaagtgcctgagagggctct

SEQ ID NO: 3589060 - DNA, 25 bp, Homo sapien
tccaagtcaaggtcgcgatccaaga

SEQ ID NO: 3589061 - DNA, 25 bp, Homo sapien
tacggcggatctcactacagctcat

SEQ ID NO: 3589062 - DNA, 25 bp, Homo sapien
tacagggaatctcgctacggcggat

SEQ ID NO: 3589063 - DNA, 25 bp, Homo sapien
tggacggcatgatcaccctcaaggt

SEQ ID NO: 3589064 - DNA, 25 bp, Homo sapien
cccggctgcgtagcagttgagtgat

SEQ ID NO: 3589065 - DNA, 25 bp, Homo sapien
tattgtaacttaggaggtgaacgac

SEQ ID NO: 3589066 - DNA, 25 bp, Homo sapien
cacagcctaacgctgtcaagacatg

SEQ ID NO: 3589067 - DNA, 25 bp, Homo sapien
gcctattgaaaaggttgtgtcacac

SEQ ID NO: 3589068 - DNA, 25 bp, Homo sapien
caatttggtgtcaatgatctggtga

SEQ ID NO: 3589069 - DNA, 25 bp, Homo sapien
cacccaggccttgcagataaataat

SEQ ID NO: 3589070 - DNA, 25 bp, Homo sapien
ccttgtcctgaagaacaaatggctg

SEQ ID NO: 3589071 - DNA, 25 bp, Homo sapien
gcacatctagctgacgataatcaca

SEQ ID NO: 3589072 - DNA, 25 bp, Homo sapien
cctaagggtagggaagcattgtcaa

SEQ ID NO: 3589073 - DNA, 25 bp, Homo sapien
atggcatcgtagtagcccctcgcgt

SEQ ID NO: 3589074 - DNA, 25 bp, Homo sapien
gaatgagacccaggcatagctggag

SEQ ID NO: 3589075 - DNA, 25 bp, Homo sapien
aataaaaaatcaggacacccatggc

SEQ ID NO: 3589076 - DNA, 25 bp, Homo sapien
aaaaacttacaagcgctactggcca

SEQ ID NO: 3589077 - DNA, 25 bp, Homo sapien
gagtatgtcatattgccctgggaga

SEQ ID NO: 3589078 - DNA, 25 bp, Homo sapien
cataagtggctgtttctaatggcac

SEQ ID NO: 3589079 - DNA, 25 bp, Homo sapien
aaaggaatgccctcctatgcccagg

SEQ ID NO: 3589080 - DNA, 25 bp, Homo sapien
tgacgtgagtttgttgctaatatta

SEQ ID NO: 3589081 - DNA, 25 bp, Homo sapien
ttagatttgcaacagatgccctcat

SEQ ID NO: 3589082 - DNA, 25 bp, Homo sapien
tacaagatgatgtgacgtgagtttg

SEQ ID NO: 3589083 - DNA, 25 bp, Homo sapien
taatattagatttgcaacagatgcc

SEQ ID NO: 3589084 - DNA, 25 bp, Homo sapien
taaacaaaatcatcctggctgtggg

SEQ ID NO: 3589085 - DNA, 25 bp, Homo sapien
tgaccaaatgtagagacagcagtga

SEQ ID NO: 3589086 - DNA, 25 bp, Homo sapien
gcagtgaattattgatggacctaca

SEQ ID NO: 3589087 - DNA, 25 bp, Homo sapien
ctgagtgcagagacctaagaggatc

SEQ ID NO: 3589088 - DNA, 25 bp, Homo sapien
tagaattgggccacggccttcccag

SEQ ID NO: 3589089 - DNA, 25 bp, Homo sapien
cagccaccttggttcgatcctggct

SEQ ID NO: 3589090 - DNA, 25 bp, Homo sapien
cacaggacccagtgtagaattgggc

SEQ ID NO: 3589091 - DNA, 25 bp, Homo sapien
tcgatcctggcttatttgccatgta

SEQ ID NO: 3589092 - DNA, 25 bp, Homo sapien
aacttgacgtgtatccctgcctgac

SEQ ID NO: 3589093 - DNA, 25 bp, Homo sapien
gtaaaaatactctgacttatgtccc

SEQ ID NO: 3589094 - DNA, 25 bp, Homo sapien
cctgcctgacaaggttgaactgaaa

SEQ ID NO: 3589095 - DNA, 25 bp, Homo sapien
ggtataatacagtcctctccggtgg

SEQ ID NO: 3589096 - DNA, 25 bp, Homo sapien
cacgtatttggacatcaaggttgca

SEQ ID NO: 3589097 - DNA, 25 bp, Homo sapien
cctgttcctaatgagctacgctggg

SEQ ID NO: 3589098 - DNA, 25 bp, Homo sapien
cattggacgtgaagccacagcaggt

SEQ ID NO: 3589099 - DNA, 25 bp, Homo sapien
cagtaaggataggtggctgagaccc

SEQ ID NO: 3589100 - DNA, 25 bp, Homo sapien
ctggctcggctgaatcattgaaatg

SEQ ID NO: 3589101 - DNA, 25 bp, Homo sapien
aatcattgaaatgagtaataggcac

SEQ ID NO: 3589102 - DNA, 25 bp, Homo sapien
tgtctggctcggctgaatcattgaa

SEQ ID NO: 3589103 - DNA, 25 bp, Homo sapien
cattgaaatgagtaataggcactga

SEQ ID NO: 3589104 - DNA, 25 bp, Homo sapien
tgtttccatgacttgagtaatatca

SEQ ID NO: 3589105 - DNA, 25 bp, Homo sapien
gaggaatgacatcattgcagtctcc

SEQ ID NO: 3589106 - DNA, 25 bp, Homo sapien
agtgggtgtgaggaatgacatcatt

SEQ ID NO: 3589107 - DNA, 25 bp, Homo sapien
gacttgagtaatatcataatcatga

SEQ ID NO: 3589108 - DNA, 25 bp, Homo sapien
gaaggcccaaaggtgctggatgtca

SEQ ID NO: 3589109 - DNA, 25 bp, Homo sapien
cactcggtgggcagttgatgcttgc

SEQ ID NO: 3589110 - DNA, 25 bp, Homo sapien
gggactgttagccagagcacctaca

SEQ ID NO: 3589111 - DNA, 25 bp, Homo sapien
tgttcaggcttctcacagtatggtg

SEQ ID NO: 3589112 - DNA, 25 bp, Homo sapien
tcagggagggggctaggtgacagca

SEQ ID NO: 3589113 - DNA, 25 bp, Homo sapien
tcctagggtagatgggggagaaagc

SEQ ID NO: 3589114 - DNA, 25 bp, Homo sapien
cagcatcgccctttcctctccggct

SEQ ID NO: 3589115 - DNA, 25 bp, Homo sapien
gccctttcctctccggctattgcgc

SEQ ID NO: 3589116 - DNA, 25 bp, Homo sapien
cctccggcgtaatacgccaatgctg

SEQ ID NO: 3589117 - DNA, 25 bp, Homo sapien
aatacgccaatgctgctacccacaa

SEQ ID NO: 3589118 - DNA, 25 bp, Homo sapien
agcctgctccctccggcgtaatacg

SEQ ID NO: 3589119 - DNA, 25 bp, Homo sapien
aatgctgctacccacaacgcacaga

SEQ ID NO: 3589120 - DNA, 25 bp, Homo sapien
aaggtgtttttcactaggactcgcg

SEQ ID NO: 3589121 - DNA, 25 bp, Homo sapien
gctcgggttcctttgagagaatcaa

SEQ ID NO: 3589122 - DNA, 25 bp, Homo sapien
taggactcgcggtgggccccacctg

SEQ ID NO: 3589123 - DNA, 25 bp, Homo sapien
cagggctcgggttcctttgagagaa

SEQ ID NO: 3589124 - DNA, 25 bp, Homo sapien
tggccggccgggagctattacagca

SEQ ID NO: 3589125 - DNA, 25 bp, Homo sapien
tctctcatctttggtggcactcgcc

SEQ ID NO: 3589126 - DNA, 25 bp, Homo sapien
gagctattacagcagggtctgcccg

SEQ ID NO: 3589127 - DNA, 25 bp, Homo sapien
ggacggtgagatcaaagaggtagac

SEQ ID NO: 3589128 - DNA, 25 bp, Homo sapien
cagaaaaatgcaccctcatctaccc

SEQ ID NO: 3589129 - DNA, 25 bp, Homo sapien
ctttctccggatgcgggcctttgag

SEQ ID NO: 3589130 - DNA, 25 bp, Homo sapien
tcatctacccaattctgccctaccc

SEQ ID NO: 3589131 - DNA, 25 bp, Homo sapien
agtcagcgacgccttagactcctcc

SEQ ID NO: 3589132 - DNA, 25 bp, Homo sapien
cggggactggttcgccctctcctgg

SEQ ID NO: 3589133 - DNA, 25 bp, Homo sapien
tcctcggaccagtgcgcggggagga

SEQ ID NO: 3589134 - DNA, 25 bp, Homo sapien
accttgagcggcctcgccctggtga

SEQ ID NO: 3589135 - DNA, 25 bp, Homo sapien
ggaggatcccgctaacgccgggcgc

SEQ ID NO: 3589136 - DNA, 25 bp, Homo sapien
cacgagaaagtgctgccgagggccc

SEQ ID NO: 3589137 - DNA, 25 bp, Homo sapien
cgagaaagtgctgccgagggcccac

SEQ ID NO: 3589138 - DNA, 25 bp, Homo sapien
tgcacgagaaagtgctgccgagggc

SEQ ID NO: 3589139 - DNA, 25 bp, Homo sapien
tttgcacgagaaagtgctgccgagg

SEQ ID NO: 3589140 - DNA, 25 bp, Homo sapien
aagttgcagtgacatcaggctcgga

SEQ ID NO: 3589141 - DNA, 25 bp, Homo sapien
ctccagtagggtgacgttttcgccg

SEQ ID NO: 3589142 - DNA, 25 bp, Homo sapien
tcctcgcaaggtgatcggatacttc

SEQ ID NO: 3589143 - DNA, 25 bp, Homo sapien
gcgatgcgttcgtacctccagtagg

SEQ ID NO: 3589144 - DNA, 25 bp, Homo sapien
aagctacaccatgtgccccaagaca

SEQ ID NO: 3589145 - DNA, 25 bp, Homo sapien
aaaagctacaccatgtgccccaaga

SEQ ID NO: 3589146 - DNA, 25 bp, Homo sapien
acaccatgtgccccaagacaccgag

SEQ ID NO: 3589147 - DNA, 25 bp, Homo sapien
ggaaaagctacaccatgtgccccaa

SEQ ID NO: 3589148 - DNA, 25 bp, Homo sapien
gcaggggtagtcagtatcagggccc

SEQ ID NO: 3589149 - DNA, 25 bp, Homo sapien
caggggtagtcagtatcagggccca

SEQ ID NO: 3589150 - DNA, 25 bp, Homo sapien
agcaggggtagtcagtatcagggcc

SEQ ID NO: 3589151 - DNA, 25 bp, Homo sapien
aggggtagtcagtatcagggcccat

SEQ ID NO: 3589152 - DNA, 25 bp, Homo sapien
cagtcctgctgggtagttgtgcctt

SEQ ID NO: 3589153 - DNA, 25 bp, Homo sapien
gaatggaatgccatttaatcttggc

SEQ ID NO: 3589154 - DNA, 25 bp, Homo sapien
gccagacttggagctttgaatggaa

SEQ ID NO: 3589155 - DNA, 25 bp, Homo sapien
aagtcctcctcatgagcatgttgaa

SEQ ID NO: 3589156 - DNA, 25 bp, Homo sapien
ggccaggactacagagcagtatttt

SEQ ID NO: 3589157 - DNA, 25 bp, Homo sapien
ggaagtggacttcgcaccctgtgga

SEQ ID NO: 3589158 - DNA, 25 bp, Homo sapien
cactgtggttagaagcaccagctct

SEQ ID NO: 3589159 - DNA, 25 bp, Homo sapien
ttcaaagagactatatgaggcccct

SEQ ID NO: 3589160 - DNA, 25 bp, Homo sapien
ctgagtcgttagtccattcacagag

SEQ ID NO: 3589161 - DNA, 25 bp, Homo sapien
aatctccacttcaatcaagtggtaa

SEQ ID NO: 3589162 - DNA, 25 bp, Homo sapien
ccttgcccctccctgagtcgttagt

SEQ ID NO: 3589163 - DNA, 25 bp, Homo sapien
agtggtaagaagggtccttctctct

SEQ ID NO: 3589164 - DNA, 25 bp, Homo sapien
caccacggccagcactgtacaaatt

SEQ ID NO: 3589165 - DNA, 25 bp, Homo sapien
cacggccagcactgtacaaattcat

SEQ ID NO: 3589166 - DNA, 25 bp, Homo sapien
ctcaccacggccagcactgtacaaa

SEQ ID NO: 3589167 - DNA, 25 bp, Homo sapien
ccacggccagcactgtacaaattca

SEQ ID NO: 3589168 - DNA, 25 bp, Homo sapien
tgggaaatccatctttgatgtcgcg

SEQ ID NO: 3589169 - DNA, 25 bp, Homo sapien
gtcatgaaactctgtcagtttccca

SEQ ID NO: 3589170 - DNA, 25 bp, Homo sapien
gatttgctcctttaataacgtcatg

SEQ ID NO: 3589171 - DNA, 25 bp, Homo sapien
gatgtcgcgtcttctgaattctatt

SEQ ID NO: 3589172 - DNA, 25 bp, Homo sapien
attacatcagcatctcaaggttggg

SEQ ID NO: 3589173 - DNA, 25 bp, Homo sapien
caagactgaatgcactggattcacc

SEQ ID NO: 3589174 - DNA, 25 bp, Homo sapien
ccagtttggtaaatcagagctgcaa

SEQ ID NO: 3589175 - DNA, 25 bp, Homo sapien
caccaggaacgcttttcaagactga

SEQ ID NO: 3589176 - DNA, 25 bp, Homo sapien
tgtgcagtgtcccatgttagaaacc

SEQ ID NO: 3589177 - DNA, 25 bp, Homo sapien
ggtatgccctgcacgatctcaaaga

SEQ ID NO: 3589178 - DNA, 25 bp, Homo sapien
tactagtagcactgagaagatgcca

SEQ ID NO: 3589179 - DNA, 25 bp, Homo sapien
caagtgcacctagctggagagaaga

SEQ ID NO: 3589180 - DNA, 25 bp, Homo sapien
tttcccattccactgaagggttaca

SEQ ID NO: 3589181 - DNA, 25 bp, Homo sapien
cagaaatttcccattccactgaagg

SEQ ID NO: 3589182 - DNA, 25 bp, Homo sapien
agaaatttcccattccactgaaggg

SEQ ID NO: 3589183 - DNA, 25 bp, Homo sapien
cattccactgaagggttacaagtca

SEQ ID NO: 3589184 - DNA, 25 bp, Homo sapien
tctctagattaggtgtacggtgctg

SEQ ID NO: 3589185 - DNA, 25 bp, Homo sapien
gattctaggtctgctaactaagcca

SEQ ID NO: 3589186 - DNA, 25 bp, Homo sapien
tgaacaacagtgagtgaatccatga

SEQ ID NO: 3589187 - DNA, 25 bp, Homo sapien
gagcaagatatttcggcagcaggga

SEQ ID NO: 3589188 - DNA, 25 bp, Homo sapien
gaaacacagtttacgttgacggcca

SEQ ID NO: 3589189 - DNA, 25 bp, Homo sapien
gaggagccacgactttcagcctgct

SEQ ID NO: 3589190 - DNA, 25 bp, Homo sapien
tgacggccacctagaatagattctg

SEQ ID NO: 3589191 - DNA, 25 bp, Homo sapien
cagtgagcagcttggttcaacagcg

SEQ ID NO: 3589192 - DNA, 25 bp, Homo sapien
caatgcaaagtagtgctcctcagta

SEQ ID NO: 3589193 - DNA, 25 bp, Homo sapien
ttgcacattacagccgcaaaaaaca

SEQ ID NO: 3589194 - DNA, 25 bp, Homo sapien
gttaagcattaatacgccagattca

SEQ ID NO: 3589195 - DNA, 25 bp, Homo sapien
acaaacggctaaactttgacactag

SEQ ID NO: 3589196 - DNA, 25 bp, Homo sapien
gttatggcacgaagagcataaagaa

SEQ ID NO: 3589197 - DNA, 25 bp, Homo sapien
aggtcaaatgccgagttatggcacg

SEQ ID NO: 3589198 - DNA, 25 bp, Homo sapien
tgcattcgtgcttccattaaaagta

SEQ ID NO: 3589199 - DNA, 25 bp, Homo sapien
agttcagcttgcattcgtgcttcca

SEQ ID NO: 3589200 - DNA, 25 bp, Homo sapien
taaaatgggtatccacaagttttca

SEQ ID NO: 3589201 - DNA, 25 bp, Homo sapien
tagacatacatagcttccctagagt

SEQ ID NO: 3589202 - DNA, 25 bp, Homo sapien
aaatctgttaggtactgaagccata

SEQ ID NO: 3589203 - DNA, 25 bp, Homo sapien
catctcggctgataagttaaaatgg

SEQ ID NO: 3589204 - DNA, 25 bp, Homo sapien
tataatgcttaatactgaaacacgt

SEQ ID NO: 3589205 - DNA, 25 bp, Homo sapien
ctatggtataatgcttaatactgaa

SEQ ID NO: 3589206 - DNA, 25 bp, Homo sapien
taatgcttaatactgaaacacgtac

SEQ ID NO: 3589207 - DNA, 25 bp, Homo sapien
atggtataatgcttaatactgaaac

SEQ ID NO: 3589208 - DNA, 25 bp, Homo sapien
gccgccagtaactatcatacatgcg

SEQ ID NO: 3589209 - DNA, 25 bp, Homo sapien
ttttctgagtgtttgaactgccgcc

SEQ ID NO: 3589210 - DNA, 25 bp, Homo sapien
gtcttaatgtaaaccttcaggcttc

SEQ ID NO: 3589211 - DNA, 25 bp, Homo sapien
catacatgcgttttgtagttctctc

SEQ ID NO: 3589212 - DNA, 25 bp, Homo sapien
tatatgtgagattgtagaccatccg

SEQ ID NO: 3589213 - DNA, 25 bp, Homo sapien
taaagtctgttcaccagggagaacc

SEQ ID NO: 3589214 - DNA, 25 bp, Homo sapien
atagttaaataaagctctgcgcagc

SEQ ID NO: 3589215 - DNA, 25 bp, Homo sapien
tctgcgcagcatggttgtgtcaaca

SEQ ID NO: 3589216 - DNA, 25 bp, Homo sapien
tggcaaagtcttcatacccaaaacc

SEQ ID NO: 3589217 - DNA, 25 bp, Homo sapien
ctgagctcggaatgttggcaaatgc

SEQ ID NO: 3589218 - DNA, 25 bp, Homo sapien
gacatcagatgttataatcatgtca

SEQ ID NO: 3589219 - DNA, 25 bp, Homo sapien
cagggtcttcaatatatcgagagac

SEQ ID NO: 3589220 - DNA, 25 bp, Homo sapien
gaaaagagacggtgtttactgagta

SEQ ID NO: 3589221 - DNA, 25 bp, Homo sapien
taactgtatcttactaacaccactg

SEQ ID NO: 3589222 - DNA, 25 bp, Homo sapien
gctccggttacccaatttcagataa

SEQ ID NO: 3589223 - DNA, 25 bp, Homo sapien
caggaaagattaagtgctccggtta

SEQ ID NO: 3589224 - DNA, 25 bp, Homo sapien
gaaatgtacaaaggtccctcaatcc

SEQ ID NO: 3589225 - DNA, 25 bp, Homo sapien
cataatacgggaaacattctgttgc

SEQ ID NO: 3589226 - DNA, 25 bp, Homo sapien
tggaatactttataacgctggtcaa

SEQ ID NO: 3589227 - DNA, 25 bp, Homo sapien
gaatatgacccctgtagaatacttt

SEQ ID NO: 3589228 - DNA, 25 bp, Homo sapien
caagactttctagtcaaaattcact

SEQ ID NO: 3589229 - DNA, 25 bp, Homo sapien
tagtcccagcttaaagttccaagaa

SEQ ID NO: 3589230 - DNA, 25 bp, Homo sapien
ttggctaaggtccaagactttctag

SEQ ID NO: 3589231 - DNA, 25 bp, Homo sapien
agttccaagaaggtagagactgaaa

SEQ ID NO: 3589232 - DNA, 25 bp, Homo sapien
aatacattcaaggatgaaccagcct

SEQ ID NO: 3589233 - DNA, 25 bp, Homo sapien
gcctgagggaaagcaatagcatgag

SEQ ID NO: 3589234 - DNA, 25 bp, Homo sapien
tatccaggatagagtatgaactaca

SEQ ID NO: 3589235 - DNA, 25 bp, Homo sapien
atagcatgagggtaagatagaagag

SEQ ID NO: 3589236 - DNA, 25 bp, Homo sapien
tttcttcttgagacgcctcttcatc

SEQ ID NO: 3589237 - DNA, 25 bp, Homo sapien
tcttctccttttcaaaacgagtgct

SEQ ID NO: 3589238 - DNA, 25 bp, Homo sapien
tcatcctttccattaaggcctctag

SEQ ID NO: 3589239 - DNA, 25 bp, Homo sapien
ggcctctagctcacttagagaatcc

SEQ ID NO: 3589240 - DNA, 25 bp, Homo sapien
gtcattagcaagatcacaaacgcag

SEQ ID NO: 3589241 - DNA, 25 bp, Homo sapien
catgtaccagttcaggcagagacca

SEQ ID NO: 3589242 - DNA, 25 bp, Homo sapien
caaagttgctgcctgaaagagatgc

SEQ ID NO: 3589243 - DNA, 25 bp, Homo sapien
caaagcatgataatgtgccaggagg

SEQ ID NO: 3589244 - DNA, 25 bp, Homo sapien
tgtgctcttttgtgatcagccaagg

SEQ ID NO: 3589245 - DNA, 25 bp, Homo sapien
caaggtcgatgtgctagcagcttat

SEQ ID NO: 3589246 - DNA, 25 bp, Homo sapien
tctttgtggcacatattccaaacca

SEQ ID NO: 3589247 - DNA, 25 bp, Homo sapien
tcagcaatacctccagtctttaaaa

SEQ ID NO: 3589248 - DNA, 25 bp, Homo sapien
tacttagctctatacacacacaagg

SEQ ID NO: 3589249 - DNA, 25 bp, Homo sapien
cacatgcctattttggaagggagaa

SEQ ID NO: 3589250 - DNA, 25 bp, Homo sapien
tccaaatatacccaagacacttggt

SEQ ID NO: 3589251 - DNA, 25 bp, Homo sapien
tatgtgaacataggaaaataagcac

SEQ ID NO: 3589252 - DNA, 25 bp, Homo sapien
ccagacgaccggatgtagagtattc

SEQ ID NO: 3589253 - DNA, 25 bp, Homo sapien
cctgtgtgatgttgtccagacgacc

SEQ ID NO: 3589254 - DNA, 25 bp, Homo sapien
tggctccgcaagaaagactccaggt

SEQ ID NO: 3589255 - DNA, 25 bp, Homo sapien
tgcgcaacatgtaaaactggctccg

SEQ ID NO: 3589256 - DNA, 25 bp, Homo sapien
aataaattatgccactattgaagca

SEQ ID NO: 3589257 - DNA, 25 bp, Homo sapien
taacagacactgaaattatgcagtt

SEQ ID NO: 3589258 - DNA, 25 bp, Homo sapien
tgcagttgctcatactggaaacaga

SEQ ID NO: 3589259 - DNA, 25 bp, Homo sapien
gaaattatgcagttgctcatactgg

SEQ ID NO: 3589260 - DNA, 25 bp, Homo sapien
gaataaaggcacttggtcctcttgt

SEQ ID NO: 3589261 - DNA, 25 bp, Homo sapien
tctggaataaaggcacttggtcctc

SEQ ID NO: 3589262 - DNA, 25 bp, Homo sapien
tggaataaaggcacttggtcctctt

SEQ ID NO: 3589263 - DNA, 25 bp, Homo sapien
aataaaggcacttggtcctcttgtc

SEQ ID NO: 3589264 - DNA, 25 bp, Homo sapien
cataggaccacgtgtactctacagg

SEQ ID NO: 3589265 - DNA, 25 bp, Homo sapien
ctctacaggacagcgcagacatttc

SEQ ID NO: 3589266 - DNA, 25 bp, Homo sapien
cagttctaccggacagtgctgctct

SEQ ID NO: 3589267 - DNA, 25 bp, Homo sapien
gaaaagtatcaagggcacgctcact

SEQ ID NO: 3589268 - DNA, 25 bp, Homo sapien
cacaggatacgaaaatgagcaaccc

SEQ ID NO: 3589269 - DNA, 25 bp, Homo sapien
tatattgtagggaagacgatggagc

SEQ ID NO: 3589270 - DNA, 25 bp, Homo sapien
tcaatgttctcttctatggctacca

SEQ ID NO: 3589271 - DNA, 25 bp, Homo sapien
tagagaactcgctagctcttctccg

SEQ ID NO: 3589272 - DNA, 25 bp, Homo sapien
cgcgcggccaacattactacttttt

SEQ ID NO: 3589273 - DNA, 25 bp, Homo sapien
accacgcgcggccaacattactact

SEQ ID NO: 3589274 - DNA, 25 bp, Homo sapien
gcgcggccaacattactacttttta

SEQ ID NO: 3589275 - DNA, 25 bp, Homo sapien
cacgcgcggccaacattactacttt

SEQ ID NO: 3589276 - DNA, 25 bp, Homo sapien
ggtatcattagatcccaaccatgga

SEQ ID NO: 3589277 - DNA, 25 bp, Homo sapien
cacaaatgtgcaacctagataatgg

SEQ ID NO: 3589278 - DNA, 25 bp, Homo sapien
gaatagggcttgaatcttgcacact

SEQ ID NO: 3589279 - DNA, 25 bp, Homo sapien
tatgtcatggcttgatctgggtatc

SEQ ID NO: 3589280 - DNA, 25 bp, Homo sapien
atccaccacttctgctcatcagagg

SEQ ID NO: 3589281 - DNA, 25 bp, Homo sapien
acactcacatattcctgcatcaggt

SEQ ID NO: 3589282 - DNA, 25 bp, Homo sapien
catattcctgcatcaggtaccacct

SEQ ID NO: 3589283 - DNA, 25 bp, Homo sapien
tccaccacttctgctcatcagagga

SEQ ID NO: 3589284 - DNA, 25 bp, Homo sapien
gaaagacagtctctagtgaagcggt

SEQ ID NO: 3589285 - DNA, 25 bp, Homo sapien
tattagacacagcacaaccgacaag

SEQ ID NO: 3589286 - DNA, 25 bp, Homo sapien
taaatagcagaaccacatctcgcca

SEQ ID NO: 3589287 - DNA, 25 bp, Homo sapien
tacaaagtgaacaaggataagccag

SEQ ID NO: 3589288 - DNA, 25 bp, Homo sapien
gccctgtgagccctagtttctttat

SEQ ID NO: 3589289 - DNA, 25 bp, Homo sapien
cacataagtagtattcagtagaagc

SEQ ID NO: 3589290 - DNA, 25 bp, Homo sapien
tacccatgaggtaaatgtgatcttt

SEQ ID NO: 3589291 - DNA, 25 bp, Homo sapien
gagtcacagtttcagataattacaa

SEQ ID NO: 3589292 - DNA, 25 bp, Homo sapien
caaattgtaattcaagacctgcaca

SEQ ID NO: 3589293 - DNA, 25 bp, Homo sapien
caaatatctgtacaaagatagcaga

SEQ ID NO: 3589294 - DNA, 25 bp, Homo sapien
ttctcatacatgacacagtaacaaa

SEQ ID NO: 3589295 - DNA, 25 bp, Homo sapien
gaagcagcagaacactttttacaaa

SEQ ID NO: 3589296 - DNA, 25 bp, Homo sapien
cttccgcagcactttccggcagttg

SEQ ID NO: 3589297 - DNA, 25 bp, Homo sapien
agcactttccggcagttggtacaga

SEQ ID NO: 3589298 - DNA, 25 bp, Homo sapien
gagcaggtagttggcggcggccgac

SEQ ID NO: 3589299 - DNA, 25 bp, Homo sapien
tttccggcagttggtacagagcagg

SEQ ID NO: 3589300 - DNA, 25 bp, Homo sapien
cgccgaggcgagagcgggcggaggg

SEQ ID NO: 3589301 - DNA, 25 bp, Homo sapien
aagctagcggcactgccagaggcga

SEQ ID NO: 3589302 - DNA, 25 bp, Homo sapien
aggcgactgcctgaaagctagcggc

SEQ ID NO: 3589303 - DNA, 25 bp, Homo sapien
tcaaggcgggatgtcgggaggagag

SEQ ID NO: 3589304 - DNA, 25 bp, Homo sapien
agctgccccagcgacggcggagacg

SEQ ID NO: 3589305 - DNA, 25 bp, Homo sapien
cagagcgagaacctgattggtgccc

SEQ ID NO: 3589306 - DNA, 25 bp, Homo sapien
tgctcccgagtgagaacaaaggccg

SEQ ID NO: 3589307 - DNA, 25 bp, Homo sapien
tagcaatgcgcgtccgagtcgaatg

SEQ ID NO: 3589308 - DNA, 25 bp, Homo sapien
gagataacttgcatcgcctactggc

SEQ ID NO: 3589309 - DNA, 25 bp, Homo sapien
tctcatggaaatgttcagtttctgg

SEQ ID NO: 3589310 - DNA, 25 bp, Homo sapien
gaaatgttcagtttctggacatctc

SEQ ID NO: 3589311 - DNA, 25 bp, Homo sapien
tggaaatgttcagtttctggacatc

SEQ ID NO: 3589312 - DNA, 25 bp, Homo sapien
catggaaatgttcagtttctggaca

SEQ ID NO: 3589313 - DNA, 25 bp, Homo sapien
gaaccagagggtatatttagccaaa

SEQ ID NO: 3589314 - DNA, 25 bp, Homo sapien
tagatgcctttatgtgttggtatca

SEQ ID NO: 3589315 - DNA, 25 bp, Homo sapien
gtttctagatatggagggtaaccaa

SEQ ID NO: 3589316 - DNA, 25 bp, Homo sapien
ggtatcatagtttccatagccctgg

SEQ ID NO: 3589317 - DNA, 25 bp, Homo sapien
tctcagccagctcagctttttgttc

SEQ ID NO: 3589318 - DNA, 25 bp, Homo sapien
gccttttgtcttcagggctccagca

SEQ ID NO: 3589319 - DNA, 25 bp, Homo sapien
ggctccagcaacatcatttaacccc

SEQ ID NO: 3589320 - DNA, 25 bp, Homo sapien
ctctcagccagctcagctttttgtt

SEQ ID NO: 3589321 - DNA, 25 bp, Homo sapien
aatgaactaatcagaaggccagccc

SEQ ID NO: 3589322 - DNA, 25 bp, Homo sapien
taatagtacctcatgcatgggacag

SEQ ID NO: 3589323 - DNA, 25 bp, Homo sapien
agttctttgcgcactgtaaagggca

SEQ ID NO: 3589324 - DNA, 25 bp, Homo sapien
ggagaacgaccaatcagcaggcaga

SEQ ID NO: 3589325 - DNA, 25 bp, Homo sapien
aactctttagcttgacacctggctc

SEQ ID NO: 3589326 - DNA, 25 bp, Homo sapien
tcacatctggaccaacatgtctctt

SEQ ID NO: 3589327 - DNA, 25 bp, Homo sapien
gtctcttcaggtttgtctcccgcga

SEQ ID NO: 3589328 - DNA, 25 bp, Homo sapien
ttcaggtttgtctcccgcgaactcc

SEQ ID NO: 3589329 - DNA, 25 bp, Homo sapien
tgggtcctcagtgctgctagcttca

SEQ ID NO: 3589330 - DNA, 25 bp, Homo sapien
tcaatgggtcctcagtgctgctagc

SEQ ID NO: 3589331 - DNA, 25 bp, Homo sapien
cagtgcagtgtagccttttccttgt

SEQ ID NO: 3589332 - DNA, 25 bp, Homo sapien
tcagtgcagtgtagccttttccttg

SEQ ID NO: 3589333 - DNA, 25 bp, Homo sapien
atagagggtggccttctacactgtt

SEQ ID NO: 3589334 - DNA, 25 bp, Homo sapien
ttatagagggtggccttctacactg

SEQ ID NO: 3589335 - DNA, 25 bp, Homo sapien
gagggtggccttctacactgttctt

SEQ ID NO: 3589336 - DNA, 25 bp, Homo sapien
tagagggtggccttctacactgttc

SEQ ID NO: 3589337 - DNA, 25 bp, Homo sapien
tgagccaagtcacctggcactggaa

SEQ ID NO: 3589338 - DNA, 25 bp, Homo sapien
aatttccaggtcttgtggtacaaag

SEQ ID NO: 3589339 - DNA, 25 bp, Homo sapien
gcgatgagcaaaggcaataatttcc

SEQ ID NO: 3589340 - DNA, 25 bp, Homo sapien
gatactcgtttctaatgtctggcga

SEQ ID NO: 3589341 - DNA, 25 bp, Homo sapien
aattgaacaagccaggccccagcat

SEQ ID NO: 3589342 - DNA, 25 bp, Homo sapien
gcatacttaacctttggaccacgga

SEQ ID NO: 3589343 - DNA, 25 bp, Homo sapien
tttggaccacggatgcctacgtttc

SEQ ID NO: 3589344 - DNA, 25 bp, Homo sapien
ggccccagcatacttaacctttgga

SEQ ID NO: 3589345 - DNA, 25 bp, Homo sapien
cagttgtgcttgtcttagtgactgt

SEQ ID NO: 3589346 - DNA, 25 bp, Homo sapien
cttgtcttagtgactgtgatgcaac

SEQ ID NO: 3589347 - DNA, 25 bp, Homo sapien
tgtcttagtgactgtgatgcaacca

SEQ ID NO: 3589348 - DNA, 25 bp, Homo sapien
tgtgcttgtcttagtgactgtgatg

SEQ ID NO: 3589349 - DNA, 25 bp, Homo sapien
gagttcaggctgcttgcaaacccta

SEQ ID NO: 3589350 - DNA, 25 bp, Homo sapien
gggagttcaggctgcttgcaaaccc

SEQ ID NO: 3589351 - DNA, 25 bp, Homo sapien
caaagcctctgatgagggagttcag

SEQ ID NO: 3589352 - DNA, 25 bp, Homo sapien
cacaatattgcacactgacaaagcc

SEQ ID NO: 3589353 - DNA, 25 bp, Homo sapien
cggtgagtggtaaaacaaatgaaat

SEQ ID NO: 3589354 - DNA, 25 bp, Homo sapien
cacatccggtgagtggtaaaacaaa

SEQ ID NO: 3589355 - DNA, 25 bp, Homo sapien
gccaccttcacatccggtgagtggt

SEQ ID NO: 3589356 - DNA, 25 bp, Homo sapien
ccaccttcacatccggtgagtggta

SEQ ID NO: 3589357 - DNA, 25 bp, Homo sapien
gaaggtctagctcaatgatcaattt

SEQ ID NO: 3589358 - DNA, 25 bp, Homo sapien
aaatcctactgttttgaaggtctag

SEQ ID NO: 3589359 - DNA, 25 bp, Homo sapien
tctagctcaatgatcaatttctttg

SEQ ID NO: 3589360 - DNA, 25 bp, Homo sapien
tcctactgttttgaaggtctagctc

SEQ ID NO: 3589361 - DNA, 25 bp, Homo sapien
tggaagcccttgaccctctgccgct

SEQ ID NO: 3589362 - DNA, 25 bp, Homo sapien
gtggattgtaactctcctggaagcc

SEQ ID NO: 3589363 - DNA, 25 bp, Homo sapien
cccttgaccctctgccgctttggaa

SEQ ID NO: 3589364 - DNA, 25 bp, Homo sapien
gcaggctctcctgtggattgtaact

SEQ ID NO: 3589365 - DNA, 25 bp, Homo sapien
tcccagtgggtgtgccagatacgct

SEQ ID NO: 3589366 - DNA, 25 bp, Homo sapien
tgtccttttcccctgatgtacgcta

SEQ ID NO: 3589367 - DNA, 25 bp, Homo sapien
tcttggattctattcaaggctttaa

SEQ ID NO: 3589368 - DNA, 25 bp, Homo sapien
cagatacgctgagaggctgatccac

SEQ ID NO: 3589369 - DNA, 25 bp, Homo sapien
tatagtcagcactattaatgaacta

SEQ ID NO: 3589370 - DNA, 25 bp, Homo sapien
cttatagtcagcactattaatgaac

SEQ ID NO: 3589371 - DNA, 25 bp, Homo sapien
tcttatagtcagcactattaatgaa

SEQ ID NO: 3589372 - DNA, 25 bp, Homo sapien
tagtcagcactattaatgaactaaa

SEQ ID NO: 3589373 - DNA, 25 bp, Homo sapien
ggagctgccatggttgcggtcttca

SEQ ID NO: 3589374 - DNA, 25 bp, Homo sapien
gggacatcctagttgcttgtaaggt

SEQ ID NO: 3589375 - DNA, 25 bp, Homo sapien
ggtcttcagtctcagagttccagag

SEQ ID NO: 3589376 - DNA, 25 bp, Homo sapien
tagttgcttgtaaggtcagggagct

SEQ ID NO: 3589377 - DNA, 25 bp, Homo sapien
cttgtttgatcttctgggaagtaca

SEQ ID NO: 3589378 - DNA, 25 bp, Homo sapien
ccagagaggagccagtaaagatctc

SEQ ID NO: 3589379 - DNA, 25 bp, Homo sapien
tctgggaagtacactagccacagaa

SEQ ID NO: 3589380 - DNA, 25 bp, Homo sapien
gccacagaaaggtagcgagtcaggg

SEQ ID NO: 3589381 - DNA, 25 bp, Homo sapien
tcagcaatttggtccccggagtcca

SEQ ID NO: 3589382 - DNA, 25 bp, Homo sapien
gttaagggtaatcttgtccagtgtc

SEQ ID NO: 3589383 - DNA, 25 bp, Homo sapien
taagggtaatcttgtccagtgtcat

SEQ ID NO: 3589384 - DNA, 25 bp, Homo sapien
catggcctgatcagcaatttggtcc

SEQ ID NO: 3589385 - DNA, 25 bp, Homo sapien
tatgtcttgataactgcatgtagca

SEQ ID NO: 3589386 - DNA, 25 bp, Homo sapien
gttgggtaataccatagcctatgtc

SEQ ID NO: 3589387 - DNA, 25 bp, Homo sapien
ttatcttcagcctgccccgggcagg

SEQ ID NO: 3589388 - DNA, 25 bp, Homo sapien
ccgggcaggccaacaagaggattct

SEQ ID NO: 3589389 - DNA, 25 bp, Homo sapien
ttttcctcacctcttaggcatttcc

SEQ ID NO: 3589390 - DNA, 25 bp, Homo sapien
cataatcctgcacccttggctgtag

SEQ ID NO: 3589391 - DNA, 25 bp, Homo sapien
cttttcctcacctcttaggcatttc

SEQ ID NO: 3589392 - DNA, 25 bp, Homo sapien
gaactacataatcctgcacccttgg

SEQ ID NO: 3589393 - DNA, 25 bp, Homo sapien
gacaagcttttttcgttgccagtta

SEQ ID NO: 3589394 - DNA, 25 bp, Homo sapien
tatcactgccatacagtaagacgcg

SEQ ID NO: 3589395 - DNA, 25 bp, Homo sapien
taagacgcgattttggctgccagga

SEQ ID NO: 3589396 - DNA, 25 bp, Homo sapien
catcttttacactccacttagacat

SEQ ID NO: 3589397 - DNA, 25 bp, Homo sapien
atgccaccggagtcaaaggaagttc

SEQ ID NO: 3589398 - DNA, 25 bp, Homo sapien
gctggttggtcctggcagttattcc

SEQ ID NO: 3589399 - DNA, 25 bp, Homo sapien
gtcctggcagttattcctgagccaa

SEQ ID NO: 3589400 - DNA, 25 bp, Homo sapien
caggatggatgccaccggagtcaaa

SEQ ID NO: 3589401 - DNA, 25 bp, Homo sapien
ctcctggggtgtctgaggacaagtt

SEQ ID NO: 3589402 - DNA, 25 bp, Homo sapien
acaagttaacatttgcactgtgctt

SEQ ID NO: 3589403 - DNA, 25 bp, Homo sapien
gacaagttaacatttgcactgtgct

SEQ ID NO: 3589404 - DNA, 25 bp, Homo sapien
aagaggtattgtacttggtgatttg

SEQ ID NO: 3589405 - DNA, 25 bp, Homo sapien
caaagaggtattgtacttggtgatt

SEQ ID NO: 3589406 - DNA, 25 bp, Homo sapien
gaggtattgtacttggtgatttgca

SEQ ID NO: 3589407 - DNA, 25 bp, Homo sapien
tacaaagaggtattgtacttggtga

SEQ ID NO: 3589408 - DNA, 25 bp, Homo sapien
tcttttaggtggttcctgatttcca

SEQ ID NO: 3589409 - DNA, 25 bp, Homo sapien
cttttaggtggttcctgatttccat

SEQ ID NO: 3589410 - DNA, 25 bp, Homo sapien
ttttcatttactcctctcaccattt

SEQ ID NO: 3589411 - DNA, 25 bp, Homo sapien
tctcccatcggcactattgctgagc

SEQ ID NO: 3589412 - DNA, 25 bp, Homo sapien
tcattcctgatgatgtgggctggga

SEQ ID NO: 3589413 - DNA, 25 bp, Homo sapien
gggctgggaattgttgcctttgaca

SEQ ID NO: 3589414 - DNA, 25 bp, Homo sapien
tgagcggatggttccctgccctgtc

SEQ ID NO: 3589415 - DNA, 25 bp, Homo sapien
ccaagccgtacttccacctgagtgt

SEQ ID NO: 3589416 - DNA, 25 bp, Homo sapien
cacctgagtgttgggcatatttaaa

SEQ ID NO: 3589417 - DNA, 25 bp, Homo sapien
cattcttctcgtttccttagtttgt

SEQ ID NO: 3589418 - DNA, 25 bp, Homo sapien
agccgtacttccacctgagtgttgg

SEQ ID NO: 3589419 - DNA, 25 bp, Homo sapien
gcccttgaagtggattatcaacaaa

SEQ ID NO: 3589420 - DNA, 25 bp, Homo sapien
tcataaaggattttagcccttgaag

SEQ ID NO: 3589421 - DNA, 25 bp, Homo sapien
tactgagttgaaatagcgccaaaag

SEQ ID NO: 3589422 - DNA, 25 bp, Homo sapien
taatggaaagtcttaaatgtaggat

SEQ ID NO: 3589423 - DNA, 25 bp, Homo sapien
ccgtggaattgtaaccaggaacaga

SEQ ID NO: 3589424 - DNA, 25 bp, Homo sapien
catagtccccgagggttctagtgtg

SEQ ID NO: 3589425 - DNA, 25 bp, Homo sapien
ttagtgggtcggcagtcatagtccc

SEQ ID NO: 3589426 - DNA, 25 bp, Homo sapien
tatggtgtgttgatctgaagagtcc

SEQ ID NO: 3589427 - DNA, 25 bp, Homo sapien
atctgagagctttctagcgttttct

SEQ ID NO: 3589428 - DNA, 25 bp, Homo sapien
tttcttgcagtcgtgtattctggga

SEQ ID NO: 3589429 - DNA, 25 bp, Homo sapien
gtcgtgtattctgggactttcctca

SEQ ID NO: 3589430 - DNA, 25 bp, Homo sapien
cagtcgtgtattctgggactttcct

SEQ ID NO: 3589431 - DNA, 25 bp, Homo sapien
cttgcagtcgtgtattctgggactt

SEQ ID NO: 3589432 - DNA, 25 bp, Homo sapien
gctgggcaagcctgttcttgtctct

SEQ ID NO: 3589433 - DNA, 25 bp, Homo sapien
tttcacacaaccctcctcttcaagc

SEQ ID NO: 3589434 - DNA, 25 bp, Homo sapien
tgtctctcttgtgcttcaggaggaa

SEQ ID NO: 3589435 - DNA, 25 bp, Homo sapien
cttgtctctcttgtgcttcaggagg

SEQ ID NO: 3589436 - DNA, 25 bp, Homo sapien
gcctttccgagcctgcattgtccag

SEQ ID NO: 3589437 - DNA, 25 bp, Homo sapien
ggcgcagacgcatctcaattggcct

SEQ ID NO: 3589438 - DNA, 25 bp, Homo sapien
tagaattcaacactagcccaaagtt

SEQ ID NO: 3589439 - DNA, 25 bp, Homo sapien
tgagaattctctgttagccgcttag

SEQ ID NO: 3589440 - DNA, 25 bp, Homo sapien
gctccaaccgccttcttatgtcctc

SEQ ID NO: 3589441 - DNA, 25 bp, Homo sapien
gttggtccagctccaaccgccttct

SEQ ID NO: 3589442 - DNA, 25 bp, Homo sapien
tcttttcgtgagagcccaattcatg

SEQ ID NO: 3589443 - DNA, 25 bp, Homo sapien
ctcttctgataatgggtcttttcgt

SEQ ID NO: 3589444 - DNA, 25 bp, Homo sapien
caaagtgttgccaagtcactcacag

SEQ ID NO: 3589445 - DNA, 25 bp, Homo sapien
agtgttgccaagtcactcacagaaa

SEQ ID NO: 3589446 - DNA, 25 bp, Homo sapien
aaagtgttgccaagtcactcacaga

SEQ ID NO: 3589447 - DNA, 25 bp, Homo sapien
tcaaagtgttgccaagtcactcaca

SEQ ID NO: 3589448 - DNA, 25 bp, Homo sapien
ggcaccatcataagcatgataacac

SEQ ID NO: 3589449 - DNA, 25 bp, Homo sapien
gaggcaccatcataagcatgataac

SEQ ID NO: 3589450 - DNA, 25 bp, Homo sapien
gacctccatctccagcgacttctaa

SEQ ID NO: 3589451 - DNA, 25 bp, Homo sapien
ctccagcgacttctaaagctgtaca

SEQ ID NO: 3589452 - DNA, 25 bp, Homo sapien
ccttttccctaattccataccacat

SEQ ID NO: 3589453 - DNA, 25 bp, Homo sapien
caaggtttcaaaattcacaggtcca

SEQ ID NO: 3589454 - DNA, 25 bp, Homo sapien
attcacaggtccaaattttcccagg

SEQ ID NO: 3589455 - DNA, 25 bp, Homo sapien
caggtccaaattttcccaggagctc

SEQ ID NO: 3589456 - DNA, 25 bp, Homo sapien
tcaaaattcacaggtccaaattttc

SEQ ID NO: 3589457 - DNA, 25 bp, Homo sapien
tctcaatgtgactaggtgaaaccag

SEQ ID NO: 3589458 - DNA, 25 bp, Homo sapien
ttctcaatgtgactaggtgaaacca

SEQ ID NO: 3589459 - DNA, 25 bp, Homo sapien
gagcaaggctgcctgacaggtttct

SEQ ID NO: 3589460 - DNA, 25 bp, Homo sapien
gctatgatcccaagtgctccaacag

SEQ ID NO: 3589461 - DNA, 25 bp, Homo sapien
accaagaagaagctatgatcccaag

SEQ ID NO: 3589462 - DNA, 25 bp, Homo sapien
cagcttgggtaatttgtctgggaaa

SEQ ID NO: 3589463 - DNA, 25 bp, Homo sapien
gctccaacagcttgggtaatttgtc

SEQ ID NO: 3589464 - DNA, 25 bp, Homo sapien
gttgccagaattaccaaggcctctt

SEQ ID NO: 3589465 - DNA, 25 bp, Homo sapien
ccagaattaccaaggcctctttcac

SEQ ID NO: 3589466 - DNA, 25 bp, Homo sapien
tcaagttgccagaattaccaaggcc

SEQ ID NO: 3589467 - DNA, 25 bp, Homo sapien
aagttgccagaattaccaaggcctc

SEQ ID NO: 3589468 - DNA, 25 bp, Homo sapien
gggagacattacagctcaggataca

SEQ ID NO: 3589469 - DNA, 25 bp, Homo sapien
taggaagagggagacattacagctc

SEQ ID NO: 3589470 - DNA, 25 bp, Homo sapien
cagctcaggatacagtgcatgtgca

SEQ ID NO: 3589471 - DNA, 25 bp, Homo sapien
gctcaggatacagtgcatgtgcatt

SEQ ID NO: 3589472 - DNA, 25 bp, Homo sapien
gagcaaagaccactgaaaatgttgg

SEQ ID NO: 3589473 - DNA, 25 bp, Homo sapien
ctgtactgagcaaagaccactgaaa

SEQ ID NO: 3589474 - DNA, 25 bp, Homo sapien
gcccctctgtacttgtacgtctgta

SEQ ID NO: 3589475 - DNA, 25 bp, Homo sapien
gtacttgtacgtctgtactgagcaa

SEQ ID NO: 3589476 - DNA, 25 bp, Homo sapien
agattgaggtaaggttttcctgcct

SEQ ID NO: 3589477 - DNA, 25 bp, Homo sapien
aggcttggtgtctcttcattctcag

SEQ ID NO: 3589478 - DNA, 25 bp, Homo sapien
tgaggtaaggttttcctgcctctgg

SEQ ID NO: 3589479 - DNA, 25 bp, Homo sapien
tctcttcattctcagtaccagagag

SEQ ID NO: 3589480 - DNA, 25 bp, Homo sapien
ttgcatgtctccaggatttgcaaat

SEQ ID NO: 3589481 - DNA, 25 bp, Homo sapien
tatattaggctcagatcttgcatgt

SEQ ID NO: 3589482 - DNA, 25 bp, Homo sapien
actgtccggactctattttcaggta

SEQ ID NO: 3589483 - DNA, 25 bp, Homo sapien
atttggaaaactgtccggactctat

SEQ ID NO: 3589484 - DNA, 25 bp, Homo sapien
aaatgtaaggtttgatctatcaggg

SEQ ID NO: 3589485 - DNA, 25 bp, Homo sapien
cagagcaagtattgggccccagtta

SEQ ID NO: 3589486 - DNA, 25 bp, Homo sapien
gaaaatataggcaagtgttgttaaa

SEQ ID NO: 3589487 - DNA, 25 bp, Homo sapien
ccacattgtggggaacctcatgcag

SEQ ID NO: 3589488 - DNA, 25 bp, Homo sapien
tgcacgtgagtatttgtgggtattt

SEQ ID NO: 3589489 - DNA, 25 bp, Homo sapien
gtatttgtgggtatttgactgtgag

SEQ ID NO: 3589490 - DNA, 25 bp, Homo sapien
acgtgagtatttgtgggtatttgac

SEQ ID NO: 3589491 - DNA, 25 bp, Homo sapien
ggtatttgactgtgagtcttgttga

SEQ ID NO: 3589492 - DNA, 25 bp, Homo sapien
cttaggtttattaacagaatctatc

SEQ ID NO: 3589493 - DNA, 25 bp, Homo sapien
ttttctggtttgaaatgcccattca

SEQ ID NO: 3589494 - DNA, 25 bp, Homo sapien
tcaattgtacatggcatcttcagaa

SEQ ID NO: 3589495 - DNA, 25 bp, Homo sapien
ttaaaacttaatgccccactcagga

SEQ ID NO: 3589496 - DNA, 25 bp, Homo sapien
tataaatggactaaattctgcaatt

SEQ ID NO: 3589497 - DNA, 25 bp, Homo sapien
aatataaatggactaaattctgcaa

SEQ ID NO: 3589498 - DNA, 25 bp, Homo sapien
ttaaatataaatggactaaattctg

SEQ ID NO: 3589499 - DNA, 25 bp, Homo sapien
taaatataaatggactaaattctgc

SEQ ID NO: 3589500 - DNA, 25 bp, Homo sapien
gggctttctaagtacagtgggtcag

SEQ ID NO: 3589501 - DNA, 25 bp, Homo sapien
gaagggtttgcaatgagaacatcca

SEQ ID NO: 3589502 - DNA, 25 bp, Homo sapien
ggcttgccagtgtaccacgttgcct

SEQ ID NO: 3589503 - DNA, 25 bp, Homo sapien
gataagagatctgagggcttgccag

SEQ ID NO: 3589504 - DNA, 25 bp, Homo sapien
tgggtatgggagtagatgatctcaa

SEQ ID NO: 3589505 - DNA, 25 bp, Homo sapien
gctggtgacagtcaatcccatgaag

SEQ ID NO: 3589506 - DNA, 25 bp, Homo sapien
ttacatcttcatagattgtcactgc

SEQ ID NO: 3589507 - DNA, 25 bp, Homo sapien
gatctcaaagattccaacatggagg

SEQ ID NO: 3589508 - DNA, 25 bp, Homo sapien
ggagcagtacatgatgtctgatggc

SEQ ID NO: 3589509 - DNA, 25 bp, Homo sapien
ttttccctctcagggagcagtacat

SEQ ID NO: 3589510 - DNA, 25 bp, Homo sapien
ctctcagggagcagtacatgatgtc

SEQ ID NO: 3589511 - DNA, 25 bp, Homo sapien
agtgcagcagttttaattagattca

SEQ ID NO: 3589512 - DNA, 25 bp, Homo sapien
agccttgcgtcagccttgttattta

SEQ ID NO: 3589513 - DNA, 25 bp, Homo sapien
gagtatttccctagccttgcgtcag

SEQ ID NO: 3589514 - DNA, 25 bp, Homo sapien
tcatttcctggacggtttcggctgg

SEQ ID NO: 3589515 - DNA, 25 bp, Homo sapien
gtctggagtatttccctagccttgc

SEQ ID NO: 3589516 - DNA, 25 bp, Homo sapien
ggcctctgaccttgcagatgccaac

SEQ ID NO: 3589517 - DNA, 25 bp, Homo sapien
cttgtggacggattcagacctgaag

SEQ ID NO: 3589518 - DNA, 25 bp, Homo sapien
gaccttgcagatgccaaccactctg

SEQ ID NO: 3589519 - DNA, 25 bp, Homo sapien
gtggacggattcagacctgaagaat

SEQ ID NO: 3589520 - DNA, 25 bp, Homo sapien
aggctatttcacattccagcactga

SEQ ID NO: 3589521 - DNA, 25 bp, Homo sapien
taggctatttcacattccagcactg

SEQ ID NO: 3589522 - DNA, 25 bp, Homo sapien
ggctatttcacattccagcactgac

SEQ ID NO: 3589523 - DNA, 25 bp, Homo sapien
cacattccagcactgacaagtgctg

SEQ ID NO: 3589524 - DNA, 25 bp, Homo sapien
cctgtttgtggatgactagttggct

SEQ ID NO: 3589525 - DNA, 25 bp, Homo sapien
cattagatctgagggtgtgccaaac

SEQ ID NO: 3589526 - DNA, 25 bp, Homo sapien
ccagctcggaggcaaggctttgtca

SEQ ID NO: 3589527 - DNA, 25 bp, Homo sapien
ggtaaaaccaagatcattgggcctg

SEQ ID NO: 3589528 - DNA, 25 bp, Homo sapien
cggagctcatgctgcagaatgactc

SEQ ID NO: 3589529 - DNA, 25 bp, Homo sapien
cctgtgacggagctcatgctgcaga

SEQ ID NO: 3589530 - DNA, 25 bp, Homo sapien
agaaagagcccactcttcaaactgt

SEQ ID NO: 3589531 - DNA, 25 bp, Homo sapien
tgcagaatgactcccctacaaccac

SEQ ID NO: 3589532 - DNA, 25 bp, Homo sapien
accaacagcaacagattccctgtca

SEQ ID NO: 3589533 - DNA, 25 bp, Homo sapien
cgactctggtgacacagggaaccag

SEQ ID NO: 3589534 - DNA, 25 bp, Homo sapien
ccaacagcaacagattccctgtcat

SEQ ID NO: 3589535 - DNA, 25 bp, Homo sapien
ccgcaagggtgcaaatgatgctgct

SEQ ID NO: 3589536 - DNA, 25 bp, Homo sapien
aaactgtcagcatgagtcctcgtgg

SEQ ID NO: 3589537 - DNA, 25 bp, Homo sapien
cgtcttattgtcccagaacccactg

SEQ ID NO: 3589538 - DNA, 25 bp, Homo sapien
tgctccccgaggaaggggccacatc

SEQ ID NO: 3589539 - DNA, 25 bp, Homo sapien
gcaggggcccaatcacaaggacctt

SEQ ID NO: 3589540 - DNA, 25 bp, Homo sapien
tcttgtggcagacataagcaggggc

SEQ ID NO: 3589541 - DNA, 25 bp, Homo sapien
ttgtggcagacataagcaggggccc

SEQ ID NO: 3589542 - DNA, 25 bp, Homo sapien
cttcttgtggcagacataagcaggg

SEQ ID NO: 3589543 - DNA, 25 bp, Homo sapien
cagagtagtcaagtgtattagtaag

SEQ ID NO: 3589544 - DNA, 25 bp, Homo sapien
gtgtattagtaagaagggggagcaa

SEQ ID NO: 3589545 - DNA, 25 bp, Homo sapien
ggagcaaggaattcaatctgtgact

SEQ ID NO: 3589546 - DNA, 25 bp, Homo sapien
gaagggggagcaaggaattcaatct

SEQ ID NO: 3589547 - DNA, 25 bp, Homo sapien
tgtgccgatgggatcagacaccact

SEQ ID NO: 3589548 - DNA, 25 bp, Homo sapien
gaaaccctatttacgcgactctgag

SEQ ID NO: 3589549 - DNA, 25 bp, Homo sapien
ggacaacagcagtccgacactgaga

SEQ ID NO: 3589550 - DNA, 25 bp, Homo sapien
tgaggccgggcatcggaaaccctat

SEQ ID NO: 3589551 - DNA, 25 bp, Homo sapien
atgcccttgttaaagagcttgcctt

SEQ ID NO: 3589552 - DNA, 25 bp, Homo sapien
tgttgagtaggatgtttacaggatg

SEQ ID NO: 3589553 - DNA, 25 bp, Homo sapien
cttgctttggaatgttgagtaggat

SEQ ID NO: 3589554 - DNA, 25 bp, Homo sapien
cccttgttaaagagcttgccttgct

SEQ ID NO: 3589555 - DNA, 25 bp, Homo sapien
ggtcaaaaatcaggagacctaagct

SEQ ID NO: 3589556 - DNA, 25 bp, Homo sapien
gacagtctccgcagctctgacagca

SEQ ID NO: 3589557 - DNA, 25 bp, Homo sapien
tcaggagacctaagctcaagcccat

SEQ ID NO: 3589558 - DNA, 25 bp, Homo sapien
cagcagggtcaaaaatcaggagacc

SEQ ID NO: 3589559 - DNA, 25 bp, Homo sapien
ccaggaccaaccctacttagctccg

SEQ ID NO: 3589560 - DNA, 25 bp, Homo sapien
cagacgagatcgggtgctttcaggg

SEQ ID NO: 3589561 - DNA, 25 bp, Homo sapien
accaaccctacttagctccggagat

SEQ ID NO: 3589562 - DNA, 25 bp, Homo sapien
acgagatcgggtgctttcagggtgg

SEQ ID NO: 3589563 - DNA, 25 bp, Homo sapien
cataatcgaataagtattacccggt

SEQ ID NO: 3589564 - DNA, 25 bp, Homo sapien
tgaaagatgggtccataatcgaata

SEQ ID NO: 3589565 - DNA, 25 bp, Homo sapien
ttctttggtacctgatgaaagatgg

SEQ ID NO: 3589566 - DNA, 25 bp, Homo sapien
catatttgattggtccacctctccc

SEQ ID NO: 3589567 - DNA, 25 bp, Homo sapien
atatccacctggtaagtttgtactt

SEQ ID NO: 3589568 - DNA, 25 bp, Homo sapien
catccactccgatatccacctggta

SEQ ID NO: 3589569 - DNA, 25 bp, Homo sapien
acccacaccatccactccgatatcc

SEQ ID NO: 3589570 - DNA, 25 bp, Homo sapien
tccacctggtaagtttgtactttca

SEQ ID NO: 3589571 - DNA, 25 bp, Homo sapien
atttgtctctgtggacagcctgaga

SEQ ID NO: 3589572 - DNA, 25 bp, Homo sapien
tctgtggacagcctgagagcttttg

SEQ ID NO: 3589573 - DNA, 25 bp, Homo sapien
tggacagcctgagagcttttggcgt

SEQ ID NO: 3589574 - DNA, 25 bp, Homo sapien
catttggcaaaattgcatttgtctc

SEQ ID NO: 3589575 - DNA, 25 bp, Homo sapien
agtggactgagacggccaacccagc

SEQ ID NO: 3589576 - DNA, 25 bp, Homo sapien
gactgagacggccaacccagcattc

SEQ ID NO: 3589577 - DNA, 25 bp, Homo sapien
gacggccaacccagcattcccagtt

SEQ ID NO: 3589578 - DNA, 25 bp, Homo sapien
gcagtggactgagacggccaaccca

SEQ ID NO: 3589579 - DNA, 25 bp, Homo sapien
aaacatgcttggaaaggtccacgca

SEQ ID NO: 3589580 - DNA, 25 bp, Homo sapien
tgtgttctcttacggctataatttt

SEQ ID NO: 3589581 - DNA, 25 bp, Homo sapien
tgacaagggcgcatgggttctttct

SEQ ID NO: 3589582 - DNA, 25 bp, Homo sapien
aaaggtccacgcacatccatacaat

SEQ ID NO: 3589583 - DNA, 25 bp, Homo sapien
ttaaacatttccttggcccttgcca

SEQ ID NO: 3589584 - DNA, 25 bp, Homo sapien
ccttggcccttgccaatgctctttc

SEQ ID NO: 3589585 - DNA, 25 bp, Homo sapien
cttggcccttgccaatgctctttcc

SEQ ID NO: 3589586 - DNA, 25 bp, Homo sapien
aacatttccttggcccttgccaatg

SEQ ID NO: 3589587 - DNA, 25 bp, Homo sapien
catgtgataagcacaagccttgaga

SEQ ID NO: 3589588 - DNA, 25 bp, Homo sapien
ccaaattagcctccaaatgttatca

SEQ ID NO: 3589589 - DNA, 25 bp, Homo sapien
gccttgagagtcacttgtgtgtgta

SEQ ID NO: 3589590 - DNA, 25 bp, Homo sapien
taagagtatctcttctcacacactt

SEQ ID NO: 3589591 - DNA, 25 bp, Homo sapien
tgtacatatagttttgtcacctagg

SEQ ID NO: 3589592 - DNA, 25 bp, Homo sapien
agcagggcccggtgtctactattcc

SEQ ID NO: 3589593 - DNA, 25 bp, Homo sapien
tatgtgggtaaattaagtgtctctg

SEQ ID NO: 3589594 - DNA, 25 bp, Homo sapien
tacatgagaggtagcttttcaagcc

SEQ ID NO: 3589595 - DNA, 25 bp, Homo sapien
ttatttctccataatcactgagctg

SEQ ID NO: 3589596 - DNA, 25 bp, Homo sapien
ggccatgttgcatagagaatatcta

SEQ ID NO: 3589597 - DNA, 25 bp, Homo sapien
ttaagccaagggtctggaacaatgg

SEQ ID NO: 3589598 - DNA, 25 bp, Homo sapien
gaataagccacataagctacattgg

SEQ ID NO: 3589599 - DNA, 25 bp, Homo sapien
gagaggggcctgtttctgcgatgag

SEQ ID NO: 3589600 - DNA, 25 bp, Homo sapien
catgagaagttggttacaaaacagc

SEQ ID NO: 3589601 - DNA, 25 bp, Homo sapien
gcctgtttctgcgatgagagaaatc

SEQ ID NO: 3589602 - DNA, 25 bp, Homo sapien
ccatgagaagttggttacaaaacag

SEQ ID NO: 3589603 - DNA, 25 bp, Homo sapien
tgtttttcttcctccctcatcgtca

SEQ ID NO: 3589604 - DNA, 25 bp, Homo sapien
gtttttcttcctccctcatcgtcac

SEQ ID NO: 3589605 - DNA, 25 bp, Homo sapien
catgtttttcttcctccctcatcgt

SEQ ID NO: 3589606 - DNA, 25 bp, Homo sapien
tcatgtttttcttcctccctcatcg

SEQ ID NO: 3589607 - DNA, 25 bp, Homo sapien
ttccagtgactcattttgaaatcac

SEQ ID NO: 3589608 - DNA, 25 bp, Homo sapien
aaacacttgtttccagtgactcatt

SEQ ID NO: 3589609 - DNA, 25 bp, Homo sapien
gagatcaagaccacattgttttcac

SEQ ID NO: 3589610 - DNA, 25 bp, Homo sapien
aaagccaggaaaagagatcaagacc

SEQ ID NO: 3589611 - DNA, 25 bp, Homo sapien
taaatgactctcagatagtaggatt

SEQ ID NO: 3589612 - DNA, 25 bp, Homo sapien
taatctcaacgcatgggctggttcc

SEQ ID NO: 3589613 - DNA, 25 bp, Homo sapien
gtaggatttcaagtaggacctctct

SEQ ID NO: 3589614 - DNA, 25 bp, Homo sapien
gactgaagaggcaacagatcttgaa

SEQ ID NO: 3589615 - DNA, 25 bp, Homo sapien
atacatcttaggatctttctctgag

SEQ ID NO: 3589616 - DNA, 25 bp, Homo sapien
acatcttaggatctttctctgaggg

SEQ ID NO: 3589617 - DNA, 25 bp, Homo sapien
tcttaggatctttctctgagggatg

SEQ ID NO: 3589618 - DNA, 25 bp, Homo sapien
catcttaggatctttctctgaggga

SEQ ID NO: 3589619 - DNA, 25 bp, Homo sapien
tattgttgttgagggcagcttcttc

SEQ ID NO: 3589620 - DNA, 25 bp, Homo sapien
aaatattgttgttgagggcagcttc

SEQ ID NO: 3589621 - DNA, 25 bp, Homo sapien
tcagctacttcttaaaagatcagca

SEQ ID NO: 3589622 - DNA, 25 bp, Homo sapien
gctacttcttaaaagatcagcatgt

SEQ ID NO: 3589623 - DNA, 25 bp, Homo sapien
caagataagcttgcataatgtcttt

SEQ ID NO: 3589624 - DNA, 25 bp, Homo sapien
gccttcactcctcaaaacatcatga

SEQ ID NO: 3589625 - DNA, 25 bp, Homo sapien
agccttcactcctcaaaacatcatg

SEQ ID NO: 3589626 - DNA, 25 bp, Homo sapien
taatgtctttaggacacaaatttcc

SEQ ID NO: 3589627 - DNA, 25 bp, Homo sapien
caaacagtacacttatgataacctg

SEQ ID NO: 3589628 - DNA, 25 bp, Homo sapien
gtccagcagttgtccaaacagtaca

SEQ ID NO: 3589629 - DNA, 25 bp, Homo sapien
tacacttatgataacctgctcttcg

SEQ ID NO: 3589630 - DNA, 25 bp, Homo sapien
cagttgtccaaacagtacacttatg

SEQ ID NO: 3589631 - DNA, 25 bp, Homo sapien
tccctctggtttgacgcttgtgctc

SEQ ID NO: 3589632 - DNA, 25 bp, Homo sapien
atctccctctggtttgacgcttgtg

SEQ ID NO: 3589633 - DNA, 25 bp, Homo sapien
tctgcttcgattaaccagtgggaca

SEQ ID NO: 3589634 - DNA, 25 bp, Homo sapien
cttcgattaaccagtgggacatctc

SEQ ID NO: 3589635 - DNA, 25 bp, Homo sapien
tagacccagtggaacagtcagtcat

SEQ ID NO: 3589636 - DNA, 25 bp, Homo sapien
ctagacccagtggaacagtcagtca

SEQ ID NO: 3589637 - DNA, 25 bp, Homo sapien
aagcagagtcatcggctcgcagctg

SEQ ID NO: 3589638 - DNA, 25 bp, Homo sapien
ggtttggcttccaacagacagcagc

SEQ ID NO: 3589639 - DNA, 25 bp, Homo sapien
tgaaaaatccgctcatggtttggct

SEQ ID NO: 3589640 - DNA, 25 bp, Homo sapien
tttagaacaatcaaggccagctgtg

SEQ ID NO: 3589641 - DNA, 25 bp, Homo sapien
agtggttttggcacgatgagattgc

SEQ ID NO: 3589642 - DNA, 25 bp, Homo sapien
catcagtggttttggcacgatgaga

SEQ ID NO: 3589643 - DNA, 25 bp, Homo sapien
agctgcccgcatcagtggttttggc

SEQ ID NO: 3589644 - DNA, 25 bp, Homo sapien
cccgcatcagtggttttggcacgat

SEQ ID NO: 3589645 - DNA, 25 bp, Homo sapien
tctgcaactatcatggggtaaatgt

SEQ ID NO: 3589646 - DNA, 25 bp, Homo sapien
gggtaaatgtatggagggggctgga

SEQ ID NO: 3589647 - DNA, 25 bp, Homo sapien
gcctgcagggcacccatattctctg

SEQ ID NO: 3589648 - DNA, 25 bp, Homo sapien
ctggagcgtgaaggggttgtactgc

SEQ ID NO: 3589649 - DNA, 25 bp, Homo sapien
agtgctcgttcccacgcatctcttc

SEQ ID NO: 3589650 - DNA, 25 bp, Homo sapien
gttcccacgcatctcttctcccatg

SEQ ID NO: 3589651 - DNA, 25 bp, Homo sapien
aacatagataggatcctggaattca

SEQ ID NO: 3589652 - DNA, 25 bp, Homo sapien
ggattccccagtgctcgttcccacg

SEQ ID NO: 3589653 - DNA, 25 bp, Homo sapien
gccctcatccagcatgtccagtgtg

SEQ ID NO: 3589654 - DNA, 25 bp, Homo sapien
tcatccagcatgtccagtgtgtata

SEQ ID NO: 3589655 - DNA, 25 bp, Homo sapien
cctcatccagcatgtccagtgtgta

SEQ ID NO: 3589656 - DNA, 25 bp, Homo sapien
cagatggggactggaaggctgcccg

SEQ ID NO: 3589657 - DNA, 25 bp, Homo sapien
attctccaccatactctccatgacc

SEQ ID NO: 3589658 - DNA, 25 bp, Homo sapien
ttctccaccatactctccatgacca

SEQ ID NO: 3589659 - DNA, 25 bp, Homo sapien
tctccaccatactctccatgaccag

SEQ ID NO: 3589660 - DNA, 25 bp, Homo sapien
tggtggtgggacatcagaagcaaac

SEQ ID NO: 3589661 - DNA, 25 bp, Homo sapien
cactgagcccaagtccaatagaggg

SEQ ID NO: 3589662 - DNA, 25 bp, Homo sapien
gatacactgatatgaggctctccat

SEQ ID NO: 3589663 - DNA, 25 bp, Homo sapien
ctggtgctgcaactggatacactga

SEQ ID NO: 3589664 - DNA, 25 bp, Homo sapien
aagcctatctgatctgactctcctt

SEQ ID NO: 3589665 - DNA, 25 bp, Homo sapien
ctctggcacgtgaaggccatataga

SEQ ID NO: 3589666 - DNA, 25 bp, Homo sapien
gccatatagaggtgaggaacagaag

SEQ ID NO: 3589667 - DNA, 25 bp, Homo sapien
agcctatctgatctgactctccttc

SEQ ID NO: 3589668 - DNA, 25 bp, Homo sapien
ggagagtgttgcctttcaagtacat

SEQ ID NO: 3589669 - DNA, 25 bp, Homo sapien
agggagagtgttgcctttcaagtac

SEQ ID NO: 3589670 - DNA, 25 bp, Homo sapien
tgtgtagggagagtgttgcctttca

SEQ ID NO: 3589671 - DNA, 25 bp, Homo sapien
tgtagggagagtgttgcctttcaag

SEQ ID NO: 3589672 - DNA, 25 bp, Homo sapien
ccataactgaggactgctgtatgcc

SEQ ID NO: 3589673 - DNA, 25 bp, Homo sapien
tgctgtatgccagccatttgcagta

SEQ ID NO: 3589674 - DNA, 25 bp, Homo sapien
taactgaggactgctgtatgccagc

SEQ ID NO: 3589675 - DNA, 25 bp, Homo sapien
tgaggactgctgtatgccagccatt

SEQ ID NO: 3589676 - DNA, 25 bp, Homo sapien
agatgatcagaaattgtgggcccat

SEQ ID NO: 3589677 - DNA, 25 bp, Homo sapien
caggccacttcattgacatagatga

SEQ ID NO: 3589678 - DNA, 25 bp, Homo sapien
cacttcattgacatagatgatcaga

SEQ ID NO: 3589679 - DNA, 25 bp, Homo sapien
taggaaacaggccacttcattgaca

SEQ ID NO: 3589680 - DNA, 25 bp, Homo sapien
ttgacaagttttttattgtgaaata

SEQ ID NO: 3589681 - DNA, 25 bp, Homo sapien
tgacaagttttttattgtgaaatat

SEQ ID NO: 3589682 - DNA, 25 bp, Homo sapien
caagttttttattgtgaaatattgg

SEQ ID NO: 3589683 - DNA, 25 bp, Homo sapien
agttttttattgtgaaatattggat

SEQ ID NO: 3589684 - DNA, 25 bp, Homo sapien
taacaggttcactgcagaatgcata

SEQ ID NO: 3589685 - DNA, 25 bp, Homo sapien
tatgtcaaaacactacagagatcca

SEQ ID NO: 3589686 - DNA, 25 bp, Homo sapien
aattaggactaaatactgtgaagcc

SEQ ID NO: 3589687 - DNA, 25 bp, Homo sapien
catagtatctccttacaggtccaca

SEQ ID NO: 3589688 - DNA, 25 bp, Homo sapien
tagctaacactaaaactgaattacc

SEQ ID NO: 3589689 - DNA, 25 bp, Homo sapien
gttagctaacactaaaactgaatta

SEQ ID NO: 3589690 - DNA, 25 bp, Homo sapien
agctaacactaaaactgaattacct

SEQ ID NO: 3589691 - DNA, 25 bp, Homo sapien
ttagctaacactaaaactgaattac

SEQ ID NO: 3589692 - DNA, 25 bp, Homo sapien
tttcaggctgaaaaccgctggatca

SEQ ID NO: 3589693 - DNA, 25 bp, Homo sapien
cactgtggactgacaaatggctatg

SEQ ID NO: 3589694 - DNA, 25 bp, Homo sapien
gtagtttctccaacaaggtgtaaga

SEQ ID NO: 3589695 - DNA, 25 bp, Homo sapien
agtaaaaccataatgaccactgtgg

SEQ ID NO: 3589696 - DNA, 25 bp, Homo sapien
tgtatgtacaaaagatcagcattcc

SEQ ID NO: 3589697 - DNA, 25 bp, Homo sapien
cattaggtggcaaaaaggcacttgt

SEQ ID NO: 3589698 - DNA, 25 bp, Homo sapien
gcatgttgcgtttcataaagagcac

SEQ ID NO: 3589699 - DNA, 25 bp, Homo sapien
ccacacatagggaaagcagatacat

SEQ ID NO: 3589700 - DNA, 25 bp, Homo sapien
aaggagatgttagtatgcttccact

SEQ ID NO: 3589701 - DNA, 25 bp, Homo sapien
gcgacctgtttgagtagttctctgt

SEQ ID NO: 3589702 - DNA, 25 bp, Homo sapien
gataatgctgcgacctgtttgagta

SEQ ID NO: 3589703 - DNA, 25 bp, Homo sapien
cctttgataatgctgcgacctgttt

SEQ ID NO: 3589704 - DNA, 25 bp, Homo sapien
gctgcgacctgtttgagtagttctc

SEQ ID NO: 3589705 - DNA, 25 bp, Homo sapien
tgaaacttcaattaccaagaggagg

SEQ ID NO: 3589706 - DNA, 25 bp, Homo sapien
catatctgagcacctattgcagtta

SEQ ID NO: 3589707 - DNA, 25 bp, Homo sapien
cacataacccagtttttgcaacaag

SEQ ID NO: 3589708 - DNA, 25 bp, Homo sapien
agatatctatcaggctaagtcaaag

SEQ ID NO: 3589709 - DNA, 25 bp, Homo sapien
tcaaagatcaccaggtggaagattt

SEQ ID NO: 3589710 - DNA, 25 bp, Homo sapien
gatcaccaggtggaagattttgttc

SEQ ID NO: 3589711 - DNA, 25 bp, Homo sapien
ttgttccaggtaatcattcagcatt

SEQ ID NO: 3589712 - DNA, 25 bp, Homo sapien
tgttccaggtaatcattcagcatta

SEQ ID NO: 3589713 - DNA, 25 bp, Homo sapien
gacctgcttttcaccttagtttcat

SEQ ID NO: 3589714 - DNA, 25 bp, Homo sapien
tgattgctactgaagacctgctttt

SEQ ID NO: 3589715 - DNA, 25 bp, Homo sapien
tattaatgtgaggaatgattgctac

SEQ ID NO: 3589716 - DNA, 25 bp, Homo sapien
ttaatgtgaggaatgattgctactg

SEQ ID NO: 3589717 - DNA, 25 bp, Homo sapien
actgaaatgcaccaactatgcacaa

SEQ ID NO: 3589718 - DNA, 25 bp, Homo sapien
ttgaacacactccaatgataccctc

SEQ ID NO: 3589719 - DNA, 25 bp, Homo sapien
aagtcaatgaatgctattactcaag

SEQ ID NO: 3589720 - DNA, 25 bp, Homo sapien
atagggctaccaataacaatctaag

SEQ ID NO: 3589721 - DNA, 25 bp, Homo sapien
tgaagttgttccacagtttctttgt

SEQ ID NO: 3589722 - DNA, 25 bp, Homo sapien
ctgaagttgttccacagtttctttg

SEQ ID NO: 3589723 - DNA, 25 bp, Homo sapien
gaagttgttccacagtttctttgtg

SEQ ID NO: 3589724 - DNA, 25 bp, Homo sapien
gacaaaattgtctgttcccccacta

SEQ ID NO: 3589725 - DNA, 25 bp, Homo sapien
gtctctctgctgtaagagacgctta

SEQ ID NO: 3589726 - DNA, 25 bp, Homo sapien
taagagacgcttaagtgacatcact

SEQ ID NO: 3589727 - DNA, 25 bp, Homo sapien
tctttcaattgacttataaggacaa

SEQ ID NO: 3589728 - DNA, 25 bp, Homo sapien
aattagcaggtgttcaaattgcata

SEQ ID NO: 3589729 - DNA, 25 bp, Homo sapien
tccttaaggctaatgcaaaaaaata

SEQ ID NO: 3589730 - DNA, 25 bp, Homo sapien
tagacaattccacaaacatccttaa

SEQ ID NO: 3589731 - DNA, 25 bp, Homo sapien
ggtgttcaaattgcataaattagac

SEQ ID NO: 3589732 - DNA, 25 bp, Homo sapien
gaaatggatgcaactggcaaattac

SEQ ID NO: 3589733 - DNA, 25 bp, Homo sapien
aaatggatgcaactggcaaattacc

SEQ ID NO: 3589734 - DNA, 25 bp, Homo sapien
ggatgcaactggcaaattaccttac

SEQ ID NO: 3589735 - DNA, 25 bp, Homo sapien
atggatgcaactggcaaattacctt

SEQ ID NO: 3589736 - DNA, 25 bp, Homo sapien
taagggggtcaatacttctagtgta

SEQ ID NO: 3589737 - DNA, 25 bp, Homo sapien
agtaacatcagcaaacttttggcta

SEQ ID NO: 3589738 - DNA, 25 bp, Homo sapien
gtgtaaagcaataggcagccaattt

SEQ ID NO: 3589739 - DNA, 25 bp, Homo sapien
gcagccaatttgtacagtaacatca

SEQ ID NO: 3589740 - DNA, 25 bp, Homo sapien
tttttttatctagtaataactggca

SEQ ID NO: 3589741 - DNA, 25 bp, Homo sapien
caaccataactattcaactaagttg

SEQ ID NO: 3589742 - DNA, 25 bp, Homo sapien
tttcataacactaaaagaattcatt

SEQ ID NO: 3589743 - DNA, 25 bp, Homo sapien
gtaataactggcattcaaccataac

SEQ ID NO: 3589744 - DNA, 25 bp, Homo sapien
ttagatggcttagattccaatttgg

SEQ ID NO: 3589745 - DNA, 25 bp, Homo sapien
ccattagatggcttagattccaatt

SEQ ID NO: 3589746 - DNA, 25 bp, Homo sapien
tccattagatggcttagattccaat

SEQ ID NO: 3589747 - DNA, 25 bp, Homo sapien
cattagatggcttagattccaattt

SEQ ID NO: 3589748 - DNA, 25 bp, Homo sapien
ctgaattgttgcagaggatttatgg

SEQ ID NO: 3589749 - DNA, 25 bp, Homo sapien
cttcttctggacttagattgctgat

SEQ ID NO: 3589750 - DNA, 25 bp, Homo sapien
tagcaataattccatcaagtgagtt

SEQ ID NO: 3589751 - DNA, 25 bp, Homo sapien
caaatttcattataagcctaacaag

SEQ ID NO: 3589752 - DNA, 25 bp, Homo sapien
tcctattgaggaatgcagttgtccc

SEQ ID NO: 3589753 - DNA, 25 bp, Homo sapien
caaaccttaagactcagctgtaaac

SEQ ID NO: 3589754 - DNA, 25 bp, Homo sapien
tgacagaaacacttggaattcccat

SEQ ID NO: 3589755 - DNA, 25 bp, Homo sapien
gaataatcacattaatatcactgac

SEQ ID NO: 3589756 - DNA, 25 bp, Homo sapien
tcttatctttctgagggttgtccat

SEQ ID NO: 3589757 - DNA, 25 bp, Homo sapien
catatctcaaagttaagaataatca

SEQ ID NO: 3589758 - DNA, 25 bp, Homo sapien
gacccaccttagtgccacctggcaa

SEQ ID NO: 3589759 - DNA, 25 bp, Homo sapien
attcagacccaccttagtgccacct

SEQ ID NO: 3589760 - DNA, 25 bp, Homo sapien
caccttagtgccacctggcaaccac

SEQ ID NO: 3589761 - DNA, 25 bp, Homo sapien
ttagtgccacctggcaaccacatcc

SEQ ID NO: 3589762 - DNA, 25 bp, Homo sapien
tcactatctatcacaatatgaatgc

SEQ ID NO: 3589763 - DNA, 25 bp, Homo sapien
actatctatcacaatatgaatgctc

SEQ ID NO: 3589764 - DNA, 25 bp, Homo sapien
ctgccgatcactatctatcacaata

SEQ ID NO: 3589765 - DNA, 25 bp, Homo sapien
ccctgccgatcactatctatcacaa

SEQ ID NO: 3589766 - DNA, 25 bp, Homo sapien
tattgaacttaagataggaccctac

SEQ ID NO: 3589767 - DNA, 25 bp, Homo sapien
agataggaccctacaaagtaactgt

SEQ ID NO: 3589768 - DNA, 25 bp, Homo sapien
gtttgtatttcataagtaaccagaa

SEQ ID NO: 3589769 - DNA, 25 bp, Homo sapien
tcattctgatctattgaacttaaga

SEQ ID NO: 3589770 - DNA, 25 bp, Homo sapien
tgatggctactgctgtgacgatggt

SEQ ID NO: 3589771 - DNA, 25 bp, Homo sapien
tacgataaagtacagagccagcata

SEQ ID NO: 3589772 - DNA, 25 bp, Homo sapien
atttgaatgtgaagatcccaggctc

SEQ ID NO: 3589773 - DNA, 25 bp, Homo sapien
tggtctttctcagtaagagatgaag

SEQ ID NO: 3589774 - DNA, 25 bp, Homo sapien
ggcactcttagcactgttggccatg

SEQ ID NO: 3589775 - DNA, 25 bp, Homo sapien
aaaaggaaagctacgaaggctgtga

SEQ ID NO: 3589776 - DNA, 25 bp, Homo sapien
cattagggcctatcagatggtggag

SEQ ID NO: 3589777 - DNA, 25 bp, Homo sapien
tacataagttatgttcaggcactct

SEQ ID NO: 3589778 - DNA, 25 bp, Homo sapien
caaatatgagcctttatcaaaaggc

SEQ ID NO: 3589779 - DNA, 25 bp, Homo sapien
caaaaggcacaagagtaactgaatt

SEQ ID NO: 3589780 - DNA, 25 bp, Homo sapien
tatgtgccaatgtgccatcaggtat

SEQ ID NO: 3589781 - DNA, 25 bp, Homo sapien
ttttttcacaccagtgatgtcaagt

SEQ ID NO: 3589782 - DNA, 25 bp, Homo sapien
tcacaggtctgaggtggtccatact

SEQ ID NO: 3589783 - DNA, 25 bp, Homo sapien
cttccgatcaaaagcacattgctgt

SEQ ID NO: 3589784 - DNA, 25 bp, Homo sapien
tctgaatttgtgcaacgctgacact

SEQ ID NO: 3589785 - DNA, 25 bp, Homo sapien
tatgttacagtactgacaaggcttg

SEQ ID NO: 3589786 - DNA, 25 bp, Homo sapien
gcggcatagcatatacccagtgttg

SEQ ID NO: 3589787 - DNA, 25 bp, Homo sapien
gaaacgtccttctactaatatccta

SEQ ID NO: 3589788 - DNA, 25 bp, Homo sapien
tctgtcaagtttgttgccctgtcac

SEQ ID NO: 3589789 - DNA, 25 bp, Homo sapien
gccctgtcacatgcaataactttta

SEQ ID NO: 3589790 - DNA, 25 bp, Homo sapien
cttcacattttgagcacacttctta

SEQ ID NO: 3589791 - DNA, 25 bp, Homo sapien
attttgagcacacttcttacaaatt

SEQ ID NO: 3589792 - DNA, 25 bp, Homo sapien
acattttgagcacacttcttacaaa

SEQ ID NO: 3589793 - DNA, 25 bp, Homo sapien
cattttgagcacacttcttacaaat

SEQ ID NO: 3589794 - DNA, 25 bp, Homo sapien
ttagcaaggctgtacattttccatg

SEQ ID NO: 3589795 - DNA, 25 bp, Homo sapien
ttttttcgcaacattctctctccca

SEQ ID NO: 3589796 - DNA, 25 bp, Homo sapien
tctctcccaccatgtataaaaggtt

SEQ ID NO: 3589797 - DNA, 25 bp, Homo sapien
ccaccactggtttttttcgcaacat

SEQ ID NO: 3589798 - DNA, 25 bp, Homo sapien
gaaattctgatctgcagtaagtaca

SEQ ID NO: 3589799 - DNA, 25 bp, Homo sapien
tgttgaaattctgatctgcagtaag

SEQ ID NO: 3589800 - DNA, 25 bp, Homo sapien
tctcttgttgaaattctgatctgca

SEQ ID NO: 3589801 - DNA, 25 bp, Homo sapien
tcttgttgaaattctgatctgcagt

SEQ ID NO: 3589802 - DNA, 25 bp, Homo sapien
gctttatcatataagtggccaatca

SEQ ID NO: 3589803 - DNA, 25 bp, Homo sapien
tggccccaacgtaaagaactggatg

SEQ ID NO: 3589804 - DNA, 25 bp, Homo sapien
tacttattattttgcaccgttgctc

SEQ ID NO: 3589805 - DNA, 25 bp, Homo sapien
aaattaagaaagctgtcagggccta

SEQ ID NO: 3589806 - DNA, 25 bp, Homo sapien
ggtccgttcccagctaatgttcaag

SEQ ID NO: 3589807 - DNA, 25 bp, Homo sapien
cagtcgcttcgctttcctggacagg

SEQ ID NO: 3589808 - DNA, 25 bp, Homo sapien
tctctgcggcatagacaggtggctg

SEQ ID NO: 3589809 - DNA, 25 bp, Homo sapien
gcggcttcgggttcctagcaagaaa

SEQ ID NO: 3589810 - DNA, 25 bp, Homo sapien
cctcgaaaggataacgctgggtaca

SEQ ID NO: 3589811 - DNA, 25 bp, Homo sapien
aaaggataacgctgggtacacttgg

SEQ ID NO: 3589812 - DNA, 25 bp, Homo sapien
ctgggagagctcctcgaaaggataa

SEQ ID NO: 3589813 - DNA, 25 bp, Homo sapien
cttggtgcaggcgtacagggccgag

SEQ ID NO: 3589814 - DNA, 25 bp, Homo sapien
gccccgcggacgacgccaccgtctc

SEQ ID NO: 3589815 - DNA, 25 bp, Homo sapien
gccctacggagaacccgagagccgc

SEQ ID NO: 3589816 - DNA, 25 bp, Homo sapien
cagggccccgcggacgacgccaccg

SEQ ID NO: 3589817 - DNA, 25 bp, Homo sapien
ccagggcctcgccgcgagagcccag

SEQ ID NO: 3589818 - DNA, 25 bp, Homo sapien
ttaggccccgatagcggcggaggga

SEQ ID NO: 3589819 - DNA, 25 bp, Homo sapien
gtgacgccgtgccagccgctcccgc

SEQ ID NO: 3589820 - DNA, 25 bp, Homo sapien
cggcggagggagacgaagcgggtag

SEQ ID NO: 3589821 - DNA, 25 bp, Homo sapien
cgctcccgcttaggccccgatagcg

SEQ ID NO: 3589822 - DNA, 25 bp, Homo sapien
gctgtgcggccgtggatccgcttcc

SEQ ID NO: 3589823 - DNA, 25 bp, Homo sapien
tgtgcggccgtggatccgcttcctt

SEQ ID NO: 3589824 - DNA, 25 bp, Homo sapien
ttagctgtgcggccgtggatccgct

SEQ ID NO: 3589825 - DNA, 25 bp, Homo sapien
agctgtgcggccgtggatccgcttc

SEQ ID NO: 3589826 - DNA, 25 bp, Homo sapien
gaggcaaattcacgctctctccggc

SEQ ID NO: 3589827 - DNA, 25 bp, Homo sapien
taatccgagggaactcgtggagtgc

SEQ ID NO: 3589828 - DNA, 25 bp, Homo sapien
cgtggagtgctttaacttcgccttc

SEQ ID NO: 3589829 - DNA, 25 bp, Homo sapien
tactcgcccacgcttcttactggag

SEQ ID NO: 3589830 - DNA, 25 bp, Homo sapien
aattgagctgcactatgccaaggac

SEQ ID NO: 3589831 - DNA, 25 bp, Homo sapien
cattggcactgggatatagtcagct

SEQ ID NO: 3589832 - DNA, 25 bp, Homo sapien
gaagagggcttttcacggctctcaa

SEQ ID NO: 3589833 - DNA, 25 bp, Homo sapien
ttggaaacgctaagaaagcctggtc

SEQ ID NO: 3589834 - DNA, 25 bp, Homo sapien
tgtgaagggccaaataacagcatag

SEQ ID NO: 3589835 - DNA, 25 bp, Homo sapien
aataaatccctgctatcccagagca

SEQ ID NO: 3589836 - DNA, 25 bp, Homo sapien
tataacaaacttaccacaatgcagg

SEQ ID NO: 3589837 - DNA, 25 bp, Homo sapien
tccctagaaagagaacgacaacatg

SEQ ID NO: 3589838 - DNA, 25 bp, Homo sapien
caactccgtgtgttcccaatgcaag

SEQ ID NO: 3589839 - DNA, 25 bp, Homo sapien
taaactgtgtggtgtactacaacct

SEQ ID NO: 3589840 - DNA, 25 bp, Homo sapien
catttttcctagttgcagactggtc

SEQ ID NO: 3589841 - DNA, 25 bp, Homo sapien
ggttcaagacatagttatacagctg

SEQ ID NO: 3589842 - DNA, 25 bp, Homo sapien
gaaggtgagttggtcaaactccgga

SEQ ID NO: 3589843 - DNA, 25 bp, Homo sapien
tgcctttaccagtgtgtggatcaca

SEQ ID NO: 3589844 - DNA, 25 bp, Homo sapien
cattgatccctgaattaagtccctg

SEQ ID NO: 3589845 - DNA, 25 bp, Homo sapien
taacaagtactattaggagctggct

SEQ ID NO: 3589846 - DNA, 25 bp, Homo sapien
tataataaattagtggtgacaagca

SEQ ID NO: 3589847 - DNA, 25 bp, Homo sapien
ttgaacaacatgagtccgaactctg

SEQ ID NO: 3589848 - DNA, 25 bp, Homo sapien
tgtgggtctacttacaggcagattt

SEQ ID NO: 3589849 - DNA, 25 bp, Homo sapien
ttgcaaactatagcttagaaatatc

SEQ ID NO: 3589850 - DNA, 25 bp, Homo sapien
tcaagggttgggagtattcacttaa

SEQ ID NO: 3589851 - DNA, 25 bp, Homo sapien
attttgtagccaccttctgttgcca

SEQ ID NO: 3589852 - DNA, 25 bp, Homo sapien
gccattgtgatgagctcaagggttg

SEQ ID NO: 3589853 - DNA, 25 bp, Homo sapien
caatttgcacacagactacgtgacg

SEQ ID NO: 3589854 - DNA, 25 bp, Homo sapien
taaatgaatccagctgaaggcctat

SEQ ID NO: 3589855 - DNA, 25 bp, Homo sapien
ctactaatgatggtggaagtgctcc

SEQ ID NO: 3589856 - DNA, 25 bp, Homo sapien
tgaataatatcatgggacccatatc

SEQ ID NO: 3589857 - DNA, 25 bp, Homo sapien
aatgatcccggcatgttggcgtgca

SEQ ID NO: 3589858 - DNA, 25 bp, Homo sapien
gcttttgacttttacgacatcgacc

SEQ ID NO: 3589859 - DNA, 25 bp, Homo sapien
acttttacgacatcgacccttctat

SEQ ID NO: 3589860 - DNA, 25 bp, Homo sapien
tgcttttgacttttacgacatcgac

SEQ ID NO: 3589861 - DNA, 25 bp, Homo sapien
ttgacttttacgacatcgacccttc

SEQ ID NO: 3589862 - DNA, 25 bp, Homo sapien
tatagttctcagttacataagtggg

SEQ ID NO: 3589863 - DNA, 25 bp, Homo sapien
gactacatgggtggtcggtgcccct

SEQ ID NO: 3589864 - DNA, 25 bp, Homo sapien
aacaaacctgcgcatgtacgccaga

SEQ ID NO: 3589865 - DNA, 25 bp, Homo sapien
caagttacgagcaaaatagtggtta

SEQ ID NO: 3589866 - DNA, 25 bp, Homo sapien
gattacctggcagttttaaggaagc

SEQ ID NO: 3589867 - DNA, 25 bp, Homo sapien
tttatggagccaagtaagcccagcc

SEQ ID NO: 3589868 - DNA, 25 bp, Homo sapien
atgaacaatagtgtctaccacctgg

SEQ ID NO: 3589869 - DNA, 25 bp, Homo sapien
taccacctggatgtacactgtttaa

SEQ ID NO: 3589870 - DNA, 25 bp, Homo sapien
cacagtgccaagtgctctgagtata

SEQ ID NO: 3589871 - DNA, 25 bp, Homo sapien
tagatgtatcagaggtggtcagcaa

SEQ ID NO: 3589872 - DNA, 25 bp, Homo sapien
gccatatgatagacacacagtgcca

SEQ ID NO: 3589873 - DNA, 25 bp, Homo sapien
tagatgaggtagatgctaagccaca

SEQ ID NO: 3589874 - DNA, 25 bp, Homo sapien
ttaaatctccctggcatgaggtgcc

SEQ ID NO: 3589875 - DNA, 25 bp, Homo sapien
gatgagtttgctgtactgacgctgc

SEQ ID NO: 3589876 - DNA, 25 bp, Homo sapien
ggcagtgcttgcttgaaaagtctca

SEQ ID NO: 3589877 - DNA, 25 bp, Homo sapien
taaagcccgagaaaccacacataat

SEQ ID NO: 3589878 - DNA, 25 bp, Homo sapien
gaaagagagcccaagaatattagat

SEQ ID NO: 3589879 - DNA, 25 bp, Homo sapien
tagtacttagttgccacactcatgc

SEQ ID NO: 3589880 - DNA, 25 bp, Homo sapien
tttctaaataggaggacatcaatgt

SEQ ID NO: 3589881 - DNA, 25 bp, Homo sapien
cactcatgcttacatagaaagagag

SEQ ID NO: 3589882 - DNA, 25 bp, Homo sapien
tcactgcaagaccaagagggaggct

SEQ ID NO: 3589883 - DNA, 25 bp, Homo sapien
tatgtggtatcaggccaagataacc

SEQ ID NO: 3589884 - DNA, 25 bp, Homo sapien
cagagactaggtcgaaggaggctaa

SEQ ID NO: 3589885 - DNA, 25 bp, Homo sapien
tacatgaggcaattgtgaacagcag

SEQ ID NO: 3589886 - DNA, 25 bp, Homo sapien
cttgtagcaggtgaacagtgaagca

SEQ ID NO: 3589887 - DNA, 25 bp, Homo sapien
atcaaggcccaatatatgtgatgcc

SEQ ID NO: 3589888 - DNA, 25 bp, Homo sapien
caagcacatctataaggcctcccat

SEQ ID NO: 3589889 - DNA, 25 bp, Homo sapien
taatagaaacttgttcccactgtga

SEQ ID NO: 3589890 - DNA, 25 bp, Homo sapien
tagatgggttctaaattccgaagac

SEQ ID NO: 3589891 - DNA, 25 bp, Homo sapien
gactttctactcatagagctgccag

SEQ ID NO: 3589892 - DNA, 25 bp, Homo sapien
aatgatgcccctgatcttacagtcc

SEQ ID NO: 3589893 - DNA, 25 bp, Homo sapien
tcaagagtgtatagcaatgatgccc

SEQ ID NO: 3589894 - DNA, 25 bp, Homo sapien
tggacaggagtgacacactgtgcag

SEQ ID NO: 3589895 - DNA, 25 bp, Homo sapien
ctttgtatctgttgtgaataggttc

SEQ ID NO: 3589896 - DNA, 25 bp, Homo sapien
gaggttgatcggttagaaatctctc

SEQ ID NO: 3589897 - DNA, 25 bp, Homo sapien
tgaagctctgctcgtttagcaagaa

SEQ ID NO: 3589898 - DNA, 25 bp, Homo sapien
cccagagctctaggtggcgcatgct

SEQ ID NO: 3589899 - DNA, 25 bp, Homo sapien
gattggaatagctcccatagagagg

SEQ ID NO: 3589900 - DNA, 25 bp, Homo sapien
ggctgtttatgtaagaccacagtga

SEQ ID NO: 3589901 - DNA, 25 bp, Homo sapien
ggcgcatgctggctactggataaag

SEQ ID NO: 3589902 - DNA, 25 bp, Homo sapien
cattgaattcaaatgcggtaggaaa

SEQ ID NO: 3589903 - DNA, 25 bp, Homo sapien
tacagaggaatgttccgaataagca

SEQ ID NO: 3589904 - DNA, 25 bp, Homo sapien
taggtggtccaaaatggtaatgaga

SEQ ID NO: 3589905 - DNA, 25 bp, Homo sapien
gaataagcagctgtataggtggtcc

SEQ ID NO: 3589906 - DNA, 25 bp, Homo sapien
tccaaaatcagatgagatgggtgca

SEQ ID NO: 3589907 - DNA, 25 bp, Homo sapien
gtgcattcagggtggttggctatag

SEQ ID NO: 3589908 - DNA, 25 bp, Homo sapien
gcttccaaaatcagatgagatgggt

SEQ ID NO: 3589909 - DNA, 25 bp, Homo sapien
tgcattcagggtggttggctataga

SEQ ID NO: 3589910 - DNA, 25 bp, Homo sapien
aaaacaggcgatctgtctgcatctg

SEQ ID NO: 3589911 - DNA, 25 bp, Homo sapien
aagaaaaacaggcgatctgtctgca

SEQ ID NO: 3589912 - DNA, 25 bp, Homo sapien
gaaaaacaggcgatctgtctgcatc

SEQ ID NO: 3589913 - DNA, 25 bp, Homo sapien
aaacaggcgatctgtctgcatctgc

SEQ ID NO: 3589914 - DNA, 25 bp, Homo sapien
ccaacatgagcatggcaagggaagt

SEQ ID NO: 3589915 - DNA, 25 bp, Homo sapien
tgcaatgcactaccacagacgtctt

SEQ ID NO: 3589916 - DNA, 25 bp, Homo sapien
tgtgcgatcccaaccatcactgcaa

SEQ ID NO: 3589917 - DNA, 25 bp, Homo sapien
tgtcagcaatcctaagagcccctgc

SEQ ID NO: 3589918 - DNA, 25 bp, Homo sapien
tacagcttatcagggatcattattt

SEQ ID NO: 3589919 - DNA, 25 bp, Homo sapien
aatacagcttatcagggatcattat

SEQ ID NO: 3589920 - DNA, 25 bp, Homo sapien
tcttcaaaatttactaatacagctt

SEQ ID NO: 3589921 - DNA, 25 bp, Homo sapien
caaaatttactaatacagcttatca

SEQ ID NO: 3589922 - DNA, 25 bp, Homo sapien
tggttcgaattcagataggatggga

SEQ ID NO: 3589923 - DNA, 25 bp, Homo sapien
gaaatacaacataaccaaatgcaca

SEQ ID NO: 3589924 - DNA, 25 bp, Homo sapien
aaatggaaaaggatgcaatctggga

SEQ ID NO: 3589925 - DNA, 25 bp, Homo sapien
caatctgggaagaccttatggaaga

SEQ ID NO: 3589926 - DNA, 25 bp, Homo sapien
gtttagaaaggtaccttcatgttga

SEQ ID NO: 3589927 - DNA, 25 bp, Homo sapien
gaaaggtaccttcatgttgattgca

SEQ ID NO: 3589928 - DNA, 25 bp, Homo sapien
aacaaaggggtagagagagtctttg

SEQ ID NO: 3589929 - DNA, 25 bp, Homo sapien
ttgtttgggatatagtaacacacac

SEQ ID NO: 3589930 - DNA, 25 bp, Homo sapien
ttctagccaatgagtagattccaag

SEQ ID NO: 3589931 - DNA, 25 bp, Homo sapien
ttcgtaatgattctctcataacatg

SEQ ID NO: 3589932 - DNA, 25 bp, Homo sapien
ggtttcctcaatgttggggtacaca

SEQ ID NO: 3589933 - DNA, 25 bp, Homo sapien
aacatgaatattgtggatatccagg

SEQ ID NO: 3589934 - DNA, 25 bp, Homo sapien
tcactccaaccatgggctggctaca

SEQ ID NO: 3589935 - DNA, 25 bp, Homo sapien
ctacaccgagtgattgtggcttgac

SEQ ID NO: 3589936 - DNA, 25 bp, Homo sapien
tgtgagactgggcattggaatccat

SEQ ID NO: 3589937 - DNA, 25 bp, Homo sapien
tggaatccatgatagcttgaaggta

SEQ ID NO: 3589938 - DNA, 25 bp, Homo sapien
tgggatacggcctcttgatctgaag

SEQ ID NO: 3589939 - DNA, 25 bp, Homo sapien
tatcacaaagttcatatcgttcatt

SEQ ID NO: 3589940 - DNA, 25 bp, Homo sapien
catcaggaatatttgctggcacaac

SEQ ID NO: 3589941 - DNA, 25 bp, Homo sapien
gatctgaaggatgccactctcttta

SEQ ID NO: 3589942 - DNA, 25 bp, Homo sapien
cattttcagggaatacttctttgta

SEQ ID NO: 3589943 - DNA, 25 bp, Homo sapien
tatagcttccacccattttcaggga

SEQ ID NO: 3589944 - DNA, 25 bp, Homo sapien
ctgccttctatactctaaaagaggg

SEQ ID NO: 3589945 - DNA, 25 bp, Homo sapien
gccttctatactctaaaagagggtc

SEQ ID NO: 3589946 - DNA, 25 bp, Homo sapien
taactgtgcccttgagttaactgct

SEQ ID NO: 3589947 - DNA, 25 bp, Homo sapien
ctggagtcataagaccaacgttgat

SEQ ID NO: 3589948 - DNA, 25 bp, Homo sapien
aaatggtactcctactaactgtgcc

SEQ ID NO: 3589949 - DNA, 25 bp, Homo sapien
tgctttcatcgctaaacagggataa

SEQ ID NO: 3589950 - DNA, 25 bp, Homo sapien
gagcaaatcgtaaattcctaatatc

SEQ ID NO: 3589951 - DNA, 25 bp, Homo sapien
tcttgtccgcccctcaggtttatga

SEQ ID NO: 3589952 - DNA, 25 bp, Homo sapien
tatggatcttcttgtccgcccctca

SEQ ID NO: 3589953 - DNA, 25 bp, Homo sapien
gcccctcaggtttatgagcaaatcg

SEQ ID NO: 3589954 - DNA, 25 bp, Homo sapien
ctctatttatcacaccaagggaagc

SEQ ID NO: 3589955 - DNA, 25 bp, Homo sapien
tacacacagtttctagtccataaga

SEQ ID NO: 3589956 - DNA, 25 bp, Homo sapien
tcgactagaagcaccaccaattttt

SEQ ID NO: 3589957 - DNA, 25 bp, Homo sapien
ccataagaattttcacctcgactag

SEQ ID NO: 3589958 - DNA, 25 bp, Homo sapien
taacctataattcgtgacagtcaga

SEQ ID NO: 3589959 - DNA, 25 bp, Homo sapien
gaatggacatatataagttacatct

SEQ ID NO: 3589960 - DNA, 25 bp, Homo sapien
tgaaatataacctataattcgtgac

SEQ ID NO: 3589961 - DNA, 25 bp, Homo sapien
gacagtcagagttcctcgtacagcg

SEQ ID NO: 3589962 - DNA, 25 bp, Homo sapien
gagaagaggcaaagtataattcaat

SEQ ID NO: 3589963 - DNA, 25 bp, Homo sapien
acatacaaacagatgcaatggagat

SEQ ID NO: 3589964 - DNA, 25 bp, Homo sapien
tttatctaggcaactcaatatctga

SEQ ID NO: 3589965 - DNA, 25 bp, Homo sapien
catattataagtattaggctgggca

SEQ ID NO: 3589966 - DNA, 25 bp, Homo sapien
gactgcaggtaaagagttctgccag

SEQ ID NO: 3589967 - DNA, 25 bp, Homo sapien
aagatgctgagaagactgcaggtaa

SEQ ID NO: 3589968 - DNA, 25 bp, Homo sapien
tgagaagactgcaggtaaagagttc

SEQ ID NO: 3589969 - DNA, 25 bp, Homo sapien
gtaaagagttctgccagacaggagg

SEQ ID NO: 3589970 - DNA, 25 bp, Homo sapien
ctggaagcaagggtggttcttccat

SEQ ID NO: 3589971 - DNA, 25 bp, Homo sapien
gtctttaatattttctcctggaagc

SEQ ID NO: 3589972 - DNA, 25 bp, Homo sapien
ttctcctggaagcaagggtggttct

SEQ ID NO: 3589973 - DNA, 25 bp, Homo sapien
ccatgtctttaatattttctcctgg

SEQ ID NO: 3589974 - DNA, 25 bp, Homo sapien
ttctgctaacttgttagactccctc

SEQ ID NO: 3589975 - DNA, 25 bp, Homo sapien
tctgctaacttgttagactccctca

SEQ ID NO: 3589976 - DNA, 25 bp, Homo sapien
ctaacttgttagactccctcaggac

SEQ ID NO: 3589977 - DNA, 25 bp, Homo sapien
tgctaacttgttagactccctcagg

SEQ ID NO: 3589978 - DNA, 25 bp, Homo sapien
tgtctccaatcccattaattcctcc

SEQ ID NO: 3589979 - DNA, 25 bp, Homo sapien
gtctccaatcccattaattcctcca

SEQ ID NO: 3589980 - DNA, 25 bp, Homo sapien
gatggctaaccctcatgagcagcta

SEQ ID NO: 3589981 - DNA, 25 bp, Homo sapien
tgactggtatcctcacaagaagaca

SEQ ID NO: 3589982 - DNA, 25 bp, Homo sapien
gccaaagctggaaaacgttacatca

SEQ ID NO: 3589983 - DNA, 25 bp, Homo sapien
gttgaagtctaaccaccagtgcctt

SEQ ID NO: 3589984 - DNA, 25 bp, Homo sapien
tactatcgccaacaaatgggagctt

SEQ ID NO: 3589985 - DNA, 25 bp, Homo sapien
tcataccaaggagaatgagcccagt

SEQ ID NO: 3589986 - DNA, 25 bp, Homo sapien
gagatgacagctgaaaccacgaaga

SEQ ID NO: 3589987 - DNA, 25 bp, Homo sapien
gtgacatatatctcccaacagtggc

SEQ ID NO: 3589988 - DNA, 25 bp, Homo sapien
cctaggggatagagcgagactccct

SEQ ID NO: 3589989 - DNA, 25 bp, Homo sapien
gcctaggggatagagcgagactccc

SEQ ID NO: 3589990 - DNA, 25 bp, Homo sapien
tagctcccgaactggactgcatggg

SEQ ID NO: 3589991 - DNA, 25 bp, Homo sapien
tgagatgtgtaggaactatcacaca

SEQ ID NO: 3589992 - DNA, 25 bp, Homo sapien
tataatgagatgtgtaggaactatc

SEQ ID NO: 3589993 - DNA, 25 bp, Homo sapien
agtgtttaagtgacttagctcccga

SEQ ID NO: 3589994 - DNA, 25 bp, Homo sapien
ctggaacaccggcaatagaatttat

SEQ ID NO: 3589995 - DNA, 25 bp, Homo sapien
tattacttaatctctacaagttatt

SEQ ID NO: 3589996 - DNA, 25 bp, Homo sapien
ggaacaccggcaatagaatttatta

SEQ ID NO: 3589997 - DNA, 25 bp, Homo sapien
agaatttattagctatgagatcttg

SEQ ID NO: 3589998 - DNA, 25 bp, Homo sapien
aaagttgtcggcagaagttgaaatg

SEQ ID NO: 3589999 - DNA, 25 bp, Homo sapien
tacaacagaagctgattttgtatgc

SEQ ID NO: 3590000 - DNA, 25 bp, Homo sapien
gaaatggaatctgatgatacaacag

SEQ ID NO: 3590001 - DNA, 25 bp, Homo sapien
cctcaaatcaggagaaaagttgtcg

SEQ ID NO: 3590002 - DNA, 25 bp, Homo sapien
gtaagatcaatggtagaaaaacctc

SEQ ID NO: 3590003 - DNA, 25 bp, Homo sapien
tcattacaaacctgcctataacaag

SEQ ID NO: 3590004 - DNA, 25 bp, Homo sapien
ttacttatacaatgtgaaaatcacc

SEQ ID NO: 3590005 - DNA, 25 bp, Homo sapien
tatactattatacaaaaaagcagtc

SEQ ID NO: 3590006 - DNA, 25 bp, Homo sapien
ttgtgttcttctgtcatactggctc

SEQ ID NO: 3590007 - DNA, 25 bp, Homo sapien
tataacacacgctaatttccactgc

SEQ ID NO: 3590008 - DNA, 25 bp, Homo sapien
tgtagtcaccatggctactggtata

SEQ ID NO: 3590009 - DNA, 25 bp, Homo sapien
ccgtgggcacagtaggatgcatagt

SEQ ID NO: 3590010 - DNA, 25 bp, Homo sapien
aaacatcagctaggcccaacacagt

SEQ ID NO: 3590011 - DNA, 25 bp, Homo sapien
ctaggcccaacacagtgctcaatga

SEQ ID NO: 3590012 - DNA, 25 bp, Homo sapien
atcagctaggcccaacacagtgctc

SEQ ID NO: 3590013 - DNA, 25 bp, Homo sapien
attagaaacatcagctaggcccaac

SEQ ID NO: 3590014 - DNA, 25 bp, Homo sapien
taagcaaagcactaggccctaaaag

SEQ ID NO: 3590015 - DNA, 25 bp, Homo sapien
taagaaggcatccactaattaaatt

SEQ ID NO: 3590016 - DNA, 25 bp, Homo sapien
actgaactggtagaaagtgttcaac

SEQ ID NO: 3590017 - DNA, 25 bp, Homo sapien
caacaaatagcattgtggaaataca

SEQ ID NO: 3590018 - DNA, 25 bp, Homo sapien
tcttgtaagtaatgtcctgagcaca

SEQ ID NO: 3590019 - DNA, 25 bp, Homo sapien
gctgcatttctactgaccatagtca

SEQ ID NO: 3590020 - DNA, 25 bp, Homo sapien
caaatgcctctagaagatttaggag

SEQ ID NO: 3590021 - DNA, 25 bp, Homo sapien
catacacagcatgtttgcccaagaa

SEQ ID NO: 3590022 - DNA, 25 bp, Homo sapien
atgtcaatggctcttaacacattaa

SEQ ID NO: 3590023 - DNA, 25 bp, Homo sapien
aaatgtcaatggctcttaacacatt

SEQ ID NO: 3590024 - DNA, 25 bp, Homo sapien
tcaaatgtcaatggctcttaacaca

SEQ ID NO: 3590025 - DNA, 25 bp, Homo sapien
cttcaaatgtcaatggctcttaaca

SEQ ID NO: 3590026 - DNA, 25 bp, Homo sapien
gatctatgatgacctagaaggcata

SEQ ID NO: 3590027 - DNA, 25 bp, Homo sapien
cataactggagacaagagaactctg

SEQ ID NO: 3590028 - DNA, 25 bp, Homo sapien
gatacttagtaagactcatcacatg

SEQ ID NO: 3590029 - DNA, 25 bp, Homo sapien
aacagcctgtaatccaacttcaatg

SEQ ID NO: 3590030 - DNA, 25 bp, Homo sapien
ctctgcaaagctgcataaagtcctc

SEQ ID NO: 3590031 - DNA, 25 bp, Homo sapien
agtcctcctcaaaattccaggataa

SEQ ID NO: 3590032 - DNA, 25 bp, Homo sapien
tctctgcaaagctgcataaagtcct

SEQ ID NO: 3590033 - DNA, 25 bp, Homo sapien
caaaattccaggataaaattcccat

SEQ ID NO: 3590034 - DNA, 25 bp, Homo sapien
tcttaaacctatcactggggataaa

SEQ ID NO: 3590035 - DNA, 25 bp, Homo sapien
tttcttaaacctatcactggggata

SEQ ID NO: 3590036 - DNA, 25 bp, Homo sapien
ttcttaaacctatcactggggataa

SEQ ID NO: 3590037 - DNA, 25 bp, Homo sapien
aaccactcagattccttgatactga

SEQ ID NO: 3590038 - DNA, 25 bp, Homo sapien
gaattccggcgtagccttcagaaac

SEQ ID NO: 3590039 - DNA, 25 bp, Homo sapien
tcagaaaccagaatccgcgaattgg

SEQ ID NO: 3590040 - DNA, 25 bp, Homo sapien
ggaaggaattccggcgtagccttca

SEQ ID NO: 3590041 - DNA, 25 bp, Homo sapien
ccggcgtagccttcagaaaccagaa

SEQ ID NO: 3590042 - DNA, 25 bp, Homo sapien
agactctcgcagctcgagctcttct

SEQ ID NO: 3590043 - DNA, 25 bp, Homo sapien
caagactctcgcagctcgagctctt

SEQ ID NO: 3590044 - DNA, 25 bp, Homo sapien
gacaaggagtccacgctgggcggcc

SEQ ID NO: 3590045 - DNA, 25 bp, Homo sapien
ggagccaagactctcgcagctcgag

SEQ ID NO: 3590046 - DNA, 25 bp, Homo sapien
ggcagcacagggaaaggctgaagca

SEQ ID NO: 3590047 - DNA, 25 bp, Homo sapien
gcgcggcaggggcagcacagggaaa

SEQ ID NO: 3590048 - DNA, 25 bp, Homo sapien
gcggcaggggcagcacagggaaagg

SEQ ID NO: 3590049 - DNA, 25 bp, Homo sapien
cacagggaaaggctgaagcagtctt

SEQ ID NO: 3590050 - DNA, 25 bp, Homo sapien
gagaagcggagggcggagtgctacg

SEQ ID NO: 3590051 - DNA, 25 bp, Homo sapien
agaagcggagggcggagtgctacgg

SEQ ID NO: 3590052 - DNA, 25 bp, Homo sapien
aagcggagggcggagtgctacggac

SEQ ID NO: 3590053 - DNA, 25 bp, Homo sapien
gaagcggagggcggagtgctacgga

SEQ ID NO: 3590054 - DNA, 25 bp, Homo sapien
agtgcaccgcgcctgtaggctgctg

SEQ ID NO: 3590055 - DNA, 25 bp, Homo sapien
agggagaccggaagcggccatgttc

SEQ ID NO: 3590056 - DNA, 25 bp, Homo sapien
tgcgcagctcagacgccggcatcga

SEQ ID NO: 3590057 - DNA, 25 bp, Homo sapien
tccggccgcgcgacatctggtcttg

SEQ ID NO: 3590058 - DNA, 25 bp, Homo sapien
gagcccaagattgtcataaagagga

SEQ ID NO: 3590059 - DNA, 25 bp, Homo sapien
tatgcagaggattcaagggccagac

SEQ ID NO: 3590060 - DNA, 25 bp, Homo sapien
tagccacactcagaccccttgtgga

SEQ ID NO: 3590061 - DNA, 25 bp, Homo sapien
gaagttcatcatcgggacagatcga

SEQ ID NO: 3590062 - DNA, 25 bp, Homo sapien
cagaagatcaggtaggaatggatga

SEQ ID NO: 3590063 - DNA, 25 bp, Homo sapien
ctggattgtgttggttaaaattggg

SEQ ID NO: 3590064 - DNA, 25 bp, Homo sapien
tatacaactggattgtgttggttaa

SEQ ID NO: 3590065 - DNA, 25 bp, Homo sapien
atggatgatagtgggcatcctcttc

SEQ ID NO: 3590066 - DNA, 25 bp, Homo sapien
tggtggtaacctgctgatctatttt

SEQ ID NO: 3590067 - DNA, 25 bp, Homo sapien
catctcaagcatgccctagcctgtg

SEQ ID NO: 3590068 - DNA, 25 bp, Homo sapien
tgacacttatgtccagggattcata

SEQ ID NO: 3590069 - DNA, 25 bp, Homo sapien
cattactactatccaattttagggc

SEQ ID NO: 3590070 - DNA, 25 bp, Homo sapien
aatactacttctgcctacagggata

SEQ ID NO: 3590071 - DNA, 25 bp, Homo sapien
gttaaatctggaggttgtcaaccac

SEQ ID NO: 3590072 - DNA, 25 bp, Homo sapien
cactttgccaatataagagaagggc

SEQ ID NO: 3590073 - DNA, 25 bp, Homo sapien
cacacagttaggtcttttgaaagga

SEQ ID NO: 3590074 - DNA, 25 bp, Homo sapien
ttcactcagcttgggaacaaaccag

SEQ ID NO: 3590075 - DNA, 25 bp, Homo sapien
tatatacagtaacatggaggagcca

SEQ ID NO: 3590076 - DNA, 25 bp, Homo sapien
gaactagtacctcctcatgacatgg

SEQ ID NO: 3590077 - DNA, 25 bp, Homo sapien
gaagagtccatctagcatgtggcaa

SEQ ID NO: 3590078 - DNA, 25 bp, Homo sapien
tatcttcatgtagtccacctgaaca

SEQ ID NO: 3590079 - DNA, 25 bp, Homo sapien
catcaacagttcagcctctacagag

SEQ ID NO: 3590080 - DNA, 25 bp, Homo sapien
attacacattgacaccacagttctg

SEQ ID NO: 3590081 - DNA, 25 bp, Homo sapien
ctgtatcctggagtttagacaggga

SEQ ID NO: 3590082 - DNA, 25 bp, Homo sapien
tggtcagttccttgaaaagccctgg

SEQ ID NO: 3590083 - DNA, 25 bp, Homo sapien
gaagcggactcctgcagacgtcagg

SEQ ID NO: 3590084 - DNA, 25 bp, Homo sapien
ggttgatgcccgtcctcgactgatt

SEQ ID NO: 3590085 - DNA, 25 bp, Homo sapien
gggaaaattgctggctacctactgc

SEQ ID NO: 3590086 - DNA, 25 bp, Homo sapien
tcccgtgagaagtagacaggaggct

SEQ ID NO: 3590087 - DNA, 25 bp, Homo sapien
tagagtttaagcttattgtggatga

SEQ ID NO: 3590088 - DNA, 25 bp, Homo sapien
tgccaaagcctggttagagtttaag

SEQ ID NO: 3590089 - DNA, 25 bp, Homo sapien
taaaatggtgtgtgttgaaactggg

SEQ ID NO: 3590090 - DNA, 25 bp, Homo sapien
gaattttattagttcgtagcagcat

SEQ ID NO: 3590091 - DNA, 25 bp, Homo sapien
gagaattttattagttcgtagcagc

SEQ ID NO: 3590092 - DNA, 25 bp, Homo sapien
agaattttattagttcgtagcagca

SEQ ID NO: 3590093 - DNA, 25 bp, Homo sapien
aagagaattttattagttcgtagca

SEQ ID NO: 3590094 - DNA, 25 bp, Homo sapien
cagaatactgagcagttggttgcat

SEQ ID NO: 3590095 - DNA, 25 bp, Homo sapien
ccttgacaaatgtcggtttatctga

SEQ ID NO: 3590096 - DNA, 25 bp, Homo sapien
gccttgacaaatgtcggtttatctg

SEQ ID NO: 3590097 - DNA, 25 bp, Homo sapien
cttgacaaatgtcggtttatctgat

SEQ ID NO: 3590098 - DNA, 25 bp, Homo sapien
tggccttgacaaatgtcggtttatc

SEQ ID NO: 3590099 - DNA, 25 bp, Homo sapien
gatgtcaggagataaccaacaggta

SEQ ID NO: 3590100 - DNA, 25 bp, Homo sapien
tacttgttgcagcaagggagaacac

SEQ ID NO: 3590101 - DNA, 25 bp, Homo sapien
tttcctgacacacaatacgaggccc

SEQ ID NO: 3590102 - DNA, 25 bp, Homo sapien
caacaggtaccgatataggcactat

SEQ ID NO: 3590103 - DNA, 25 bp, Homo sapien
cacttccagtgtttggatttgagca

SEQ ID NO: 3590104 - DNA, 25 bp, Homo sapien
ggagttcatgtaaccacttccagtg

SEQ ID NO: 3590105 - DNA, 25 bp, Homo sapien
gattcaacagtgattgctgggagtt

SEQ ID NO: 3590106 - DNA, 25 bp, Homo sapien
tgtgttctggcctaccacagagtgt

SEQ ID NO: 3590107 - DNA, 25 bp, Homo sapien
tcagccagtcactgtggtccgtgct

SEQ ID NO: 3590108 - DNA, 25 bp, Homo sapien
tgaggctacagagctcaccagctgc

SEQ ID NO: 3590109 - DNA, 25 bp, Homo sapien
aattctaagggcgaccatccactga

SEQ ID NO: 3590110 - DNA, 25 bp, Homo sapien
taagtaagccacaagccgaaagcct

SEQ ID NO: 3590111 - DNA, 25 bp, Homo sapien
acagatgtggtgtgtttggccccca

SEQ ID NO: 3590112 - DNA, 25 bp, Homo sapien
cagatgtggtgtgtttggcccccat

SEQ ID NO: 3590113 - DNA, 25 bp, Homo sapien
tccaacataggtaactggtatcact

SEQ ID NO: 3590114 - DNA, 25 bp, Homo sapien
ggtatcacttggatcctgcgagaca

SEQ ID NO: 3590115 - DNA, 25 bp, Homo sapien
tacctgggagtacttattaatgtca

SEQ ID NO: 3590116 - DNA, 25 bp, Homo sapien
tagcatatataagcctgatagaaag

SEQ ID NO: 3590117 - DNA, 25 bp, Homo sapien
tgtttggttcagtgaactgtcctcc

SEQ ID NO: 3590118 - DNA, 25 bp, Homo sapien
ctcatgtagatagactgtttggttc

SEQ ID NO: 3590119 - DNA, 25 bp, Homo sapien
agaaatccgattgggtctctgtatc

SEQ ID NO: 3590120 - DNA, 25 bp, Homo sapien
tgactgatcatgagaacagacactg

SEQ ID NO: 3590121 - DNA, 25 bp, Homo sapien
caagaactgagggatgccatgtcct

SEQ ID NO: 3590122 - DNA, 25 bp, Homo sapien
tcatgaccccagcagatgaaagcct

SEQ ID NO: 3590123 - DNA, 25 bp, Homo sapien
cccatcgtgcacgtacagtgtaaga

SEQ ID NO: 3590124 - DNA, 25 bp, Homo sapien
taatgctagccacttgaggactcgc

SEQ ID NO: 3590125 - DNA, 25 bp, Homo sapien
tatctggtgctgtattctgtctgcc

SEQ ID NO: 3590126 - DNA, 25 bp, Homo sapien
gctgtattctgtctgccacaatgat

SEQ ID NO: 3590127 - DNA, 25 bp, Homo sapien
tattcccaagggttatctggtgctg

SEQ ID NO: 3590128 - DNA, 25 bp, Homo sapien
taacagtattcccaagggttatctg

SEQ ID NO: 3590129 - DNA, 25 bp, Homo sapien
tagtgagacgactgatgtggaatgt

SEQ ID NO: 3590130 - DNA, 25 bp, Homo sapien
acccagctagtgagacgactgatgt

SEQ ID NO: 3590131 - DNA, 25 bp, Homo sapien
tgtggaatgtgggttcatgttgtgg

SEQ ID NO: 3590132 - DNA, 25 bp, Homo sapien
cagctagtgagacgactgatgtgga

SEQ ID NO: 3590133 - DNA, 25 bp, Homo sapien
taagcattttaccacgttttcctca

SEQ ID NO: 3590134 - DNA, 25 bp, Homo sapien
cacatatgctgccatgtgccacagc

SEQ ID NO: 3590135 - DNA, 25 bp, Homo sapien
tcaaaacacatatgctgccatgtgc

SEQ ID NO: 3590136 - DNA, 25 bp, Homo sapien
cctcaaaacacatatgctgccatgt

SEQ ID NO: 3590137 - DNA, 25 bp, Homo sapien
ttccaaatgccaacatgtcgacatt

SEQ ID NO: 3590138 - DNA, 25 bp, Homo sapien
tagaattttgcttgccaattgcaaa

SEQ ID NO: 3590139 - DNA, 25 bp, Homo sapien
ggcatgacctacaagaaaataccca

SEQ ID NO: 3590140 - DNA, 25 bp, Homo sapien
caaattctttcgttgcacagatcta

SEQ ID NO: 3590141 - DNA, 25 bp, Homo sapien
tatgtatagctgagcgaccgtgggc

SEQ ID NO: 3590142 - DNA, 25 bp, Homo sapien
gaccgtgggcaagtgttgtaatctc

SEQ ID NO: 3590143 - DNA, 25 bp, Homo sapien
taaacctgactaaactcttggctcc

SEQ ID NO: 3590144 - DNA, 25 bp, Homo sapien
gaacacaggacataggatttggact

SEQ ID NO: 3590145 - DNA, 25 bp, Homo sapien
tcaaaagatccttaccggtgtggct

SEQ ID NO: 3590146 - DNA, 25 bp, Homo sapien
tcttggttgttgaagggaggacacc

SEQ ID NO: 3590147 - DNA, 25 bp, Homo sapien
gaggacaccgactggcaaatatggc

SEQ ID NO: 3590148 - DNA, 25 bp, Homo sapien
gacattggatgggtttttcaggcta

SEQ ID NO: 3590149 - DNA, 25 bp, Homo sapien
taaagagcagaagatccacaaatcc

SEQ ID NO: 3590150 - DNA, 25 bp, Homo sapien
ggtgcctactaccagcccatttttg

SEQ ID NO: 3590151 - DNA, 25 bp, Homo sapien
aaaggcataacaacccgtaattcag

SEQ ID NO: 3590152 - DNA, 25 bp, Homo sapien
tacggttccctgttaagtgcatcaa

SEQ ID NO: 3590153 - DNA, 25 bp, Homo sapien
tctcaataagcatgtagacactgca

SEQ ID NO: 3590154 - DNA, 25 bp, Homo sapien
taggagatttaactggtaatgccag

SEQ ID NO: 3590155 - DNA, 25 bp, Homo sapien
tgaagtgcaggtaaaaagttcacag

SEQ ID NO: 3590156 - DNA, 25 bp, Homo sapien
tcatattgcccagacattaggagat

SEQ ID NO: 3590157 - DNA, 25 bp, Homo sapien
ttgttagtttccatggcatatcagg

SEQ ID NO: 3590158 - DNA, 25 bp, Homo sapien
gagaagttcttgtaatatacccagg

SEQ ID NO: 3590159 - DNA, 25 bp, Homo sapien
tatacccaggatagcaattgttagt

SEQ ID NO: 3590160 - DNA, 25 bp, Homo sapien
cattttgcttgaactctaagtgtag

SEQ ID NO: 3590161 - DNA, 25 bp, Homo sapien
cacactgacattctgagggcacaag

SEQ ID NO: 3590162 - DNA, 25 bp, Homo sapien
gggctggcacacactgacattctga

SEQ ID NO: 3590163 - DNA, 25 bp, Homo sapien
tggggctggcacacactgacattct

SEQ ID NO: 3590164 - DNA, 25 bp, Homo sapien
actgacattctgagggcacaaggca

SEQ ID NO: 3590165 - DNA, 25 bp, Homo sapien
catctttattactccaaaggccttc

SEQ ID NO: 3590166 - DNA, 25 bp, Homo sapien
tttttcctccccagtccatcctgca

SEQ ID NO: 3590167 - DNA, 25 bp, Homo sapien
taaattctccagtcaccaaatctca

SEQ ID NO: 3590168 - DNA, 25 bp, Homo sapien
tcctccccagtccatcctgcatata

SEQ ID NO: 3590169 - DNA, 25 bp, Homo sapien
gaaatatagcaaatccatgtccgct

SEQ ID NO: 3590170 - DNA, 25 bp, Homo sapien
tgtaaaagtctgaggaccactcaac

SEQ ID NO: 3590171 - DNA, 25 bp, Homo sapien
cagagtggctaactgcttgcatgca

SEQ ID NO: 3590172 - DNA, 25 bp, Homo sapien
tatgttcgtctcaatgctttcaggc

SEQ ID NO: 3590173 - DNA, 25 bp, Homo sapien
caggcatggagacgcccaccggctg

SEQ ID NO: 3590174 - DNA, 25 bp, Homo sapien
atcaggcatggagacgcccaccggc

SEQ ID NO: 3590175 - DNA, 25 bp, Homo sapien
tcaggcatggagacgcccaccggct

SEQ ID NO: 3590176 - DNA, 25 bp, Homo sapien
cactcggatgggctgtggtccctga

SEQ ID NO: 3590177 - DNA, 25 bp, Homo sapien
agcaacttcctccactcggatgggc

SEQ ID NO: 3590178 - DNA, 25 bp, Homo sapien
cctcggcatctgaatttggcaggga

SEQ ID NO: 3590179 - DNA, 25 bp, Homo sapien
ctgagggaagcctcggcatctgaat

SEQ ID NO: 3590180 - DNA, 25 bp, Homo sapien
tcactcccaaggaacagcctgggga

SEQ ID NO: 3590181 - DNA, 25 bp, Homo sapien
ggaggttctcacacatttgcctctg

SEQ ID NO: 3590182 - DNA, 25 bp, Homo sapien
tcagggctgccctcactcccaagga

SEQ ID NO: 3590183 - DNA, 25 bp, Homo sapien
caaggaacagcctggggaggttctc

SEQ ID NO: 3590184 - DNA, 25 bp, Homo sapien
tataaatgaatgttagcagcacttt

SEQ ID NO: 3590185 - DNA, 25 bp, Homo sapien
ataaatgaatgttagcagcacttta

SEQ ID NO: 3590186 - DNA, 25 bp, Homo sapien
tatcaaaattgtccaagtgggacct

SEQ ID NO: 3590187 - DNA, 25 bp, Homo sapien
caaaattgtccaagtgggacctgac

SEQ ID NO: 3590188 - DNA, 25 bp, Homo sapien
taccggaacaggaacgaaatgctgc

SEQ ID NO: 3590189 - DNA, 25 bp, Homo sapien
catgctataaagaacccctgggaat

SEQ ID NO: 3590190 - DNA, 25 bp, Homo sapien
tcccaggtctgatgtggagtccaca

SEQ ID NO: 3590191 - DNA, 25 bp, Homo sapien
caaacagactttggataggctagca

SEQ ID NO: 3590192 - DNA, 25 bp, Homo sapien
catgcagtggtgtcggcagtagcac

SEQ ID NO: 3590193 - DNA, 25 bp, Homo sapien
tcatgcagtggtgtcggcagtagca

SEQ ID NO: 3590194 - DNA, 25 bp, Homo sapien
aaggtggagctgaacttaagagccc

SEQ ID NO: 3590195 - DNA, 25 bp, Homo sapien
tgtggactaccaagcaggacccagt

SEQ ID NO: 3590196 - DNA, 25 bp, Homo sapien
taagagcccgtgaaaagcaaactgt

SEQ ID NO: 3590197 - DNA, 25 bp, Homo sapien
aggacccagtaagctccctgtttat

SEQ ID NO: 3590198 - DNA, 25 bp, Homo sapien
cagcagcaaatcagcctagcaatag

SEQ ID NO: 3590199 - DNA, 25 bp, Homo sapien
taatctgggaacagaggtaccaaga

SEQ ID NO: 3590200 - DNA, 25 bp, Homo sapien
aattttacacttccattactgcacc

SEQ ID NO: 3590201 - DNA, 25 bp, Homo sapien
ttactgcaccacaatttcttatttg

SEQ ID NO: 3590202 - DNA, 25 bp, Homo sapien
ccaagggttgatatggtgtagagaa

SEQ ID NO: 3590203 - DNA, 25 bp, Homo sapien
tgtgcctgatttacaccaagggttg

SEQ ID NO: 3590204 - DNA, 25 bp, Homo sapien
gcagagaacattaggagatgtgcct

SEQ ID NO: 3590205 - DNA, 25 bp, Homo sapien
cattaggagatgtgcctgatttaca

SEQ ID NO: 3590206 - DNA, 25 bp, Homo sapien
tggtatcccattcctgcaatgggct

SEQ ID NO: 3590207 - DNA, 25 bp, Homo sapien
ggagacttggtatcccattcctgca

SEQ ID NO: 3590208 - DNA, 25 bp, Homo sapien
gtctctgttgttgggagacttggta

SEQ ID NO: 3590209 - DNA, 25 bp, Homo sapien
gttgggagacttggtatcccattcc

SEQ ID NO: 3590210 - DNA, 25 bp, Homo sapien
gctggcttggtagagattgggcagg

SEQ ID NO: 3590211 - DNA, 25 bp, Homo sapien
aaggctggcttggtagagattgggc

SEQ ID NO: 3590212 - DNA, 25 bp, Homo sapien
caaaggctggcttggtagagattgg

SEQ ID NO: 3590213 - DNA, 25 bp, Homo sapien
ggcaaaggtgaccttagcaaaggct

SEQ ID NO: 3590214 - DNA, 25 bp, Homo sapien
aagatggttgttgctgctgctgctg

SEQ ID NO: 3590215 - DNA, 25 bp, Homo sapien
ctgagaagatggttgttgctgctgc

SEQ ID NO: 3590216 - DNA, 25 bp, Homo sapien
gaagatggttgttgctgctgctgct

SEQ ID NO: 3590217 - DNA, 25 bp, Homo sapien
gctgttgggtgtagtgtaggagaga

SEQ ID NO: 3590218 - DNA, 25 bp, Homo sapien
aaggcatctgctggttcgcttgatc

SEQ ID NO: 3590219 - DNA, 25 bp, Homo sapien
agaaggcttgttctgggaaggcaaa

SEQ ID NO: 3590220 - DNA, 25 bp, Homo sapien
ctgttgttgagctgaaattgaactc

SEQ ID NO: 3590221 - DNA, 25 bp, Homo sapien
tttgctgcatgaggacatctaggtg

SEQ ID NO: 3590222 - DNA, 25 bp, Homo sapien
ggcttttgctgcatgaggacatcta

SEQ ID NO: 3590223 - DNA, 25 bp, Homo sapien
gttgttaataaaacttcgactgaga

SEQ ID NO: 3590224 - DNA, 25 bp, Homo sapien
aaacttcgactgagatcctgaggct

SEQ ID NO: 3590225 - DNA, 25 bp, Homo sapien
tctgctgaccaaaagaagggctggg

SEQ ID NO: 3590226 - DNA, 25 bp, Homo sapien
gtagttagccattactttcgactgg

SEQ ID NO: 3590227 - DNA, 25 bp, Homo sapien
ggccggccttgtacatgtagttagc

SEQ ID NO: 3590228 - DNA, 25 bp, Homo sapien
tggtgatggtccagcagaagagggc

SEQ ID NO: 3590229 - DNA, 25 bp, Homo sapien
gctatctgtttgagctgctgggcat

SEQ ID NO: 3590230 - DNA, 25 bp, Homo sapien
gaccagttggtaggctggtgctgct

SEQ ID NO: 3590231 - DNA, 25 bp, Homo sapien
gtgctgctgcatccgggcatgctgc

SEQ ID NO: 3590232 - DNA, 25 bp, Homo sapien
ccgggcatgctgctgacgattagca

SEQ ID NO: 3590233 - DNA, 25 bp, Homo sapien
tgttaaacaggccattgccaggaga

SEQ ID NO: 3590234 - DNA, 25 bp, Homo sapien
gcttggctcataggcaaggtccctg

SEQ ID NO: 3590235 - DNA, 25 bp, Homo sapien
gccctgagtcaagcccggtgagtat

SEQ ID NO: 3590236 - DNA, 25 bp, Homo sapien
cagttcaaggtcactcatgggaggc

SEQ ID NO: 3590237 - DNA, 25 bp, Homo sapien
ggtgtgaagcttcccctctccccac

SEQ ID NO: 3590238 - DNA, 25 bp, Homo sapien
ctgggtgtgaagcttcccctctccc

SEQ ID NO: 3590239 - DNA, 25 bp, Homo sapien
tgggtgtgaagcttcccctctcccc

SEQ ID NO: 3590240 - DNA, 25 bp, Homo sapien
tgtgaagcttcccctctccccacat

SEQ ID NO: 3590241 - DNA, 25 bp, Homo sapien
gattttcaacaagggaagtccagtc

SEQ ID NO: 3590242 - DNA, 25 bp, Homo sapien
ttttcactcccgtccttgttctcat

SEQ ID NO: 3590243 - DNA, 25 bp, Homo sapien
cctttcactggccatccgaggaagg

SEQ ID NO: 3590244 - DNA, 25 bp, Homo sapien
atttaatatcaccctttcactggcc

SEQ ID NO: 3590245 - DNA, 25 bp, Homo sapien
cacgagaatgtgaagccctgagaac

SEQ ID NO: 3590246 - DNA, 25 bp, Homo sapien
cccttcctgggtgaaagcactggag

SEQ ID NO: 3590247 - DNA, 25 bp, Homo sapien
cacaaagtgttgttgcccctcctga

SEQ ID NO: 3590248 - DNA, 25 bp, Homo sapien
gatgcaagttgaagccccatctgga

SEQ ID NO: 3590249 - DNA, 25 bp, Homo sapien
acagtatgatcattgttctggagac

SEQ ID NO: 3590250 - DNA, 25 bp, Homo sapien
tggagacttgagcatggccttattg

SEQ ID NO: 3590251 - DNA, 25 bp, Homo sapien
tcccttataatgaagtacccctcaa

SEQ ID NO: 3590252 - DNA, 25 bp, Homo sapien
ctgttagtggcagtgtaaacaaaac

SEQ ID NO: 3590253 - DNA, 25 bp, Homo sapien
gtgagaaatcagtctagaggtacca

SEQ ID NO: 3590254 - DNA, 25 bp, Homo sapien
ggaaatcctgaccattccttgatgg

SEQ ID NO: 3590255 - DNA, 25 bp, Homo sapien
gagggaaatcctgaccattccttga

SEQ ID NO: 3590256 - DNA, 25 bp, Homo sapien
cagtctagaggtaccagatttcagt

SEQ ID NO: 3590257 - DNA, 25 bp, Homo sapien
catcatgcttggctatgtatttatt

SEQ ID NO: 3590258 - DNA, 25 bp, Homo sapien
gggcgtctttgtaggttgcccaggc

SEQ ID NO: 3590259 - DNA, 25 bp, Homo sapien
agcaaatctcttgcctcagctgaag

SEQ ID NO: 3590260 - DNA, 25 bp, Homo sapien
agatcctcctgttttagcctaccaa

SEQ ID NO: 3590261 - DNA, 25 bp, Homo sapien
ggtaggcaggataatatcccctcca

SEQ ID NO: 3590262 - DNA, 25 bp, Homo sapien
tcacagtatccctattataaggaga

SEQ ID NO: 3590263 - DNA, 25 bp, Homo sapien
tgagtatgtccgatgaacagccttg

SEQ ID NO: 3590264 - DNA, 25 bp, Homo sapien
gagatggatccacaataatgaaggt

SEQ ID NO: 3590265 - DNA, 25 bp, Homo sapien
cagggactgtagttgactcatgggc

SEQ ID NO: 3590266 - DNA, 25 bp, Homo sapien
cctgatgggcatgatgagcaaggat

SEQ ID NO: 3590267 - DNA, 25 bp, Homo sapien
tgttggtgctggaacagcaggtcta

SEQ ID NO: 3590268 - DNA, 25 bp, Homo sapien
tctaatacccacttgcctgatgggc

SEQ ID NO: 3590269 - DNA, 25 bp, Homo sapien
gacattgctggcttttcctaaggga

SEQ ID NO: 3590270 - DNA, 25 bp, Homo sapien
taacacaagtgggtggctaccgctg

SEQ ID NO: 3590271 - DNA, 25 bp, Homo sapien
caaagactgtggttattcaagcagg

SEQ ID NO: 3590272 - DNA, 25 bp, Homo sapien
taggctgtgaggtccctgagccaca

SEQ ID NO: 3590273 - DNA, 25 bp, Homo sapien
agcaaagggcgtagattctggttgt

SEQ ID NO: 3590274 - DNA, 25 bp, Homo sapien
gctgagaagcaaagggcgtagattc

SEQ ID NO: 3590275 - DNA, 25 bp, Homo sapien
agaagcaaagggcgtagattctggt

SEQ ID NO: 3590276 - DNA, 25 bp, Homo sapien
tgctgagaagcaaagggcgtagatt

SEQ ID NO: 3590277 - DNA, 25 bp, Homo sapien
gaacaagagtggcaaagaggcccat

SEQ ID NO: 3590278 - DNA, 25 bp, Homo sapien
ctagtgggcagaacaagagtggcaa

SEQ ID NO: 3590279 - DNA, 25 bp, Homo sapien
gcagaacaagagtggcaaagaggcc

SEQ ID NO: 3590280 - DNA, 25 bp, Homo sapien
tagtgggcagaacaagagtggcaaa

SEQ ID NO: 3590281 - DNA, 25 bp, Homo sapien
taccttttgtgggattgtgctctca

SEQ ID NO: 3590282 - DNA, 25 bp, Homo sapien
ttatcaggtttacatggcatggtgc

SEQ ID NO: 3590283 - DNA, 25 bp, Homo sapien
cagctcaaatgtagagttagtgaca

SEQ ID NO: 3590284 - DNA, 25 bp, Homo sapien
tagtgacatgtttcatcacagggca

SEQ ID NO: 3590285 - DNA, 25 bp, Homo sapien
gacaaaaggcttaatccacctagaa

SEQ ID NO: 3590286 - DNA, 25 bp, Homo sapien
tctgtagcgagagtaatcacaacta

SEQ ID NO: 3590287 - DNA, 25 bp, Homo sapien
tactaggcatggaatgaggtacaaa

SEQ ID NO: 3590288 - DNA, 25 bp, Homo sapien
tacaccaattgtctaggaccatcca

SEQ ID NO: 3590289 - DNA, 25 bp, Homo sapien
tattagtagttacaggaatccatga

SEQ ID NO: 3590290 - DNA, 25 bp, Homo sapien
acttgttgtacacttgagaaaataa

SEQ ID NO: 3590291 - DNA, 25 bp, Homo sapien
tgaaaacaggaatatgaggagtgac

SEQ ID NO: 3590292 - DNA, 25 bp, Homo sapien
gactgctaagggacgtggagtttct

SEQ ID NO: 3590293 - DNA, 25 bp, Homo sapien
gatgaggagtatgagaatacaatag

SEQ ID NO: 3590294 - DNA, 25 bp, Homo sapien
tgtgtatattaccagataagaatgg

SEQ ID NO: 3590295 - DNA, 25 bp, Homo sapien
ttaaaggctgtgtatattaccagat

SEQ ID NO: 3590296 - DNA, 25 bp, Homo sapien
taccagataagaatggtttataggc

SEQ ID NO: 3590297 - DNA, 25 bp, Homo sapien
gattcttctggctcgctgctcaagg

SEQ ID NO: 3590298 - DNA, 25 bp, Homo sapien
ttttgtgctggaaatagataactga

SEQ ID NO: 3590299 - DNA, 25 bp, Homo sapien
atctttagaggagtgattcttctgg

SEQ ID NO: 3590300 - DNA, 25 bp, Homo sapien
tcaaggctgcattcttaattcctaa

SEQ ID NO: 3590301 - DNA, 25 bp, Homo sapien
cagaatgagccgcataattgcttca

SEQ ID NO: 3590302 - DNA, 25 bp, Homo sapien
gaagaaatccaagactataggtaga

SEQ ID NO: 3590303 - DNA, 25 bp, Homo sapien
cattaagtgaaaaccagcatggcac

SEQ ID NO: 3590304 - DNA, 25 bp, Homo sapien
gaggtgccagtgaactcaattatac

SEQ ID NO: 3590305 - DNA, 25 bp, Homo sapien
aattttccatgagttcaggcaggcc

SEQ ID NO: 3590306 - DNA, 25 bp, Homo sapien
ggcaggccaccaaacagatctcaaa

SEQ ID NO: 3590307 - DNA, 25 bp, Homo sapien
aaatagacaccactgtttttggcct

SEQ ID NO: 3590308 - DNA, 25 bp, Homo sapien
aaattaccttgcacttggttctggg

SEQ ID NO: 3590309 - DNA, 25 bp, Homo sapien
ataacaagtatggtattgtccacaa

SEQ ID NO: 3590310 - DNA, 25 bp, Homo sapien
aacaagtatggtattgtccacaaac

SEQ ID NO: 3590311 - DNA, 25 bp, Homo sapien
caagtatggtattgtccacaaactc

SEQ ID NO: 3590312 - DNA, 25 bp, Homo sapien
agtatggtattgtccacaaactcat

SEQ ID NO: 3590313 - DNA, 25 bp, Homo sapien
gctaattatatgaaagggtagtctc

SEQ ID NO: 3590314 - DNA, 25 bp, Homo sapien
tgtatacctcaagatcctccttttg

SEQ ID NO: 3590315 - DNA, 25 bp, Homo sapien
agctaacttggcgttattagggcca

SEQ ID NO: 3590316 - DNA, 25 bp, Homo sapien
gctaataagaacacaggattccggt

SEQ ID NO: 3590317 - DNA, 25 bp, Homo sapien
gctgatacctgtgtttgttggctga

SEQ ID NO: 3590318 - DNA, 25 bp, Homo sapien
ctgtcgtccatgctgatacctgtgt

SEQ ID NO: 3590319 - DNA, 25 bp, Homo sapien
tcgtccatgctgatacctgtgtttg

SEQ ID NO: 3590320 - DNA, 25 bp, Homo sapien
cctgtgtttgttggctgaatccctg

SEQ ID NO: 3590321 - DNA, 25 bp, Homo sapien
tgtggccaacattaccaacagggct

SEQ ID NO: 3590322 - DNA, 25 bp, Homo sapien
gggagcaccgtcagcttgaagctag

SEQ ID NO: 3590323 - DNA, 25 bp, Homo sapien
ctctgcaggtgctagcgggacgcat

SEQ ID NO: 3590324 - DNA, 25 bp, Homo sapien
ttgaagctaggaccgcctccatgtc

SEQ ID NO: 3590325 - DNA, 25 bp, Homo sapien
gaagatgttagcacaattgcactaa

SEQ ID NO: 3590326 - DNA, 25 bp, Homo sapien
tgttagcacaattgcactaagtatc

SEQ ID NO: 3590327 - DNA, 25 bp, Homo sapien
gatgttagcacaattgcactaagta

SEQ ID NO: 3590328 - DNA, 25 bp, Homo sapien
ttagcacaattgcactaagtatcat

SEQ ID NO: 3590329 - DNA, 25 bp, Homo sapien
aggtctggtagagaatgaaggaaca

SEQ ID NO: 3590330 - DNA, 25 bp, Homo sapien
aggaacaggacagcaattgaaatga

SEQ ID NO: 3590331 - DNA, 25 bp, Homo sapien
cctggagttcttgcttgggaggtct

SEQ ID NO: 3590332 - DNA, 25 bp, Homo sapien
gaaatgatgagtttataggagtcta

SEQ ID NO: 3590333 - DNA, 25 bp, Homo sapien
tcatcatggccagtactaaattgtc

SEQ ID NO: 3590334 - DNA, 25 bp, Homo sapien
gatccaccgccatgttcttaactgt

SEQ ID NO: 3590335 - DNA, 25 bp, Homo sapien
tacaaaagttattgccatcacagca

SEQ ID NO: 3590336 - DNA, 25 bp, Homo sapien
taactacttgttggatatcttcgcc

SEQ ID NO: 3590337 - DNA, 25 bp, Homo sapien
ggtggcaagttcactaagcccaggg

SEQ ID NO: 3590338 - DNA, 25 bp, Homo sapien
tagttcataggtgatcaatacatat

SEQ ID NO: 3590339 - DNA, 25 bp, Homo sapien
caagagggctgcttgcacttgaggc

SEQ ID NO: 3590340 - DNA, 25 bp, Homo sapien
gaaatgtagactcattcagcactca

SEQ ID NO: 3590341 - DNA, 25 bp, Homo sapien
tcagtattggttggtaaagaggccc

SEQ ID NO: 3590342 - DNA, 25 bp, Homo sapien
gaaggacccaggatattcacccaga

SEQ ID NO: 3590343 - DNA, 25 bp, Homo sapien
tagtaacgtgcagagagtgccatgg

SEQ ID NO: 3590344 - DNA, 25 bp, Homo sapien
caaactctcagaggtagcaggcact

SEQ ID NO: 3590345 - DNA, 25 bp, Homo sapien
gtatgactacttgagcagaacagcc

SEQ ID NO: 3590346 - DNA, 25 bp, Homo sapien
tgtggtttgaaccagagtccccgcc

SEQ ID NO: 3590347 - DNA, 25 bp, Homo sapien
tgaattctcattcgaacctggccga

SEQ ID NO: 3590348 - DNA, 25 bp, Homo sapien
tgtaaaacggacagaggaatctcgg

SEQ ID NO: 3590349 - DNA, 25 bp, Homo sapien
tatgctcccggaattgtagtaggtt

SEQ ID NO: 3590350 - DNA, 25 bp, Homo sapien
taaaaagctagttagatactcagag

SEQ ID NO: 3590351 - DNA, 25 bp, Homo sapien
tacctcgacatggtacaaaacaaag

SEQ ID NO: 3590352 - DNA, 25 bp, Homo sapien
ttccagaccagatctagcgattgct

SEQ ID NO: 3590353 - DNA, 25 bp, Homo sapien
ggttatgggtcagtctatctctgtg

SEQ ID NO: 3590354 - DNA, 25 bp, Homo sapien
gagatcatcttgtcaactctttcag

SEQ ID NO: 3590355 - DNA, 25 bp, Homo sapien
gctttcacaaatccaagctgcagga

SEQ ID NO: 3590356 - DNA, 25 bp, Homo sapien
aagcaagacccagagaatactaaag

SEQ ID NO: 3590357 - DNA, 25 bp, Homo sapien
tcctgttggcctgtgcggtagctca

SEQ ID NO: 3590358 - DNA, 25 bp, Homo sapien
aacaagtgtctctaatgggtcctcc

SEQ ID NO: 3590359 - DNA, 25 bp, Homo sapien
gatgctgatgataccaaacaccatg

SEQ ID NO: 3590360 - DNA, 25 bp, Homo sapien
taaagtctaatctggacactcgctg

SEQ ID NO: 3590361 - DNA, 25 bp, Homo sapien
ggtttcaagaggatacaggttcaga

SEQ ID NO: 3590362 - DNA, 25 bp, Homo sapien
tctcatcttcaccagagtaccagtg

SEQ ID NO: 3590363 - DNA, 25 bp, Homo sapien
tgtacattgtacagagggctccaca

SEQ ID NO: 3590364 - DNA, 25 bp, Homo sapien
tccactggttcagggcacatcatgt

SEQ ID NO: 3590365 - DNA, 25 bp, Homo sapien
cccacttgtctttcctctctcttac

SEQ ID NO: 3590366 - DNA, 25 bp, Homo sapien
tcccacttgtctttcctctctctta

SEQ ID NO: 3590367 - DNA, 25 bp, Homo sapien
ggttcccacttgtctttcctctctc

SEQ ID NO: 3590368 - DNA, 25 bp, Homo sapien
ttgagccctgggttcccacttgtct

SEQ ID NO: 3590369 - DNA, 25 bp, Homo sapien
tgtgagctgagaagaatacacactc

SEQ ID NO: 3590370 - DNA, 25 bp, Homo sapien
tccaaggtaattgatggtgggacca

SEQ ID NO: 3590371 - DNA, 25 bp, Homo sapien
tatgtgttatacctccccaagaccg

SEQ ID NO: 3590372 - DNA, 25 bp, Homo sapien
accgggcgcgttcttctctgtctta

SEQ ID NO: 3590373 - DNA, 25 bp, Homo sapien
gataaaccgaggtcggctgccatga

SEQ ID NO: 3590374 - DNA, 25 bp, Homo sapien
tttttaatgcccgtggagagagagc

SEQ ID NO: 3590375 - DNA, 25 bp, Homo sapien
ggagctgtacaaccaatcgcctaaa

SEQ ID NO: 3590376 - DNA, 25 bp, Homo sapien
gatgtgggcctcgactctgtgataa

SEQ ID NO: 3590377 - DNA, 25 bp, Homo sapien
cctcccaaactcttaatgatgtcaa

SEQ ID NO: 3590378 - DNA, 25 bp, Homo sapien
tcccaaactcttaatgatgtcaaga

SEQ ID NO: 3590379 - DNA, 25 bp, Homo sapien
cccaaactcttaatgatgtcaagat

SEQ ID NO: 3590380 - DNA, 25 bp, Homo sapien
cctcctcccaaactcttaatgatgt

SEQ ID NO: 3590381 - DNA, 25 bp, Homo sapien
tcgtgatccaaaagtgagacctcgg

SEQ ID NO: 3590382 - DNA, 25 bp, Homo sapien
taggattcgctcttgggcactaagt

SEQ ID NO: 3590383 - DNA, 25 bp, Homo sapien
tgtatgagtgagaaatggtccaccg

SEQ ID NO: 3590384 - DNA, 25 bp, Homo sapien
gattttattcatccaattggcaccc

SEQ ID NO: 3590385 - DNA, 25 bp, Homo sapien
cagaaataacaggactttggtggaa

SEQ ID NO: 3590386 - DNA, 25 bp, Homo sapien
tcagaaataacaggactttggtgga

SEQ ID NO: 3590387 - DNA, 25 bp, Homo sapien
ttacacgcagttgtcagaaataaca

SEQ ID NO: 3590388 - DNA, 25 bp, Homo sapien
tagcctgtttccaatatgttttcac

SEQ ID NO: 3590389 - DNA, 25 bp, Homo sapien
tcacaggtgctagcataggagggca

SEQ ID NO: 3590390 - DNA, 25 bp, Homo sapien
ctctttatagcctgtttccaatatg

SEQ ID NO: 3590391 - DNA, 25 bp, Homo sapien
gttttcacaggtgctagcataggag

SEQ ID NO: 3590392 - DNA, 25 bp, Homo sapien
ctagatgaacatgtgggccgcagac

SEQ ID NO: 3590393 - DNA, 25 bp, Homo sapien
tgagcgctgggtcttccacagaaaa

SEQ ID NO: 3590394 - DNA, 25 bp, Homo sapien
tggagtccagacttgggctttagaa

SEQ ID NO: 3590395 - DNA, 25 bp, Homo sapien
gctttagaaccttgtgtatgcatca

SEQ ID NO: 3590396 - DNA, 25 bp, Homo sapien
taccaatagttactcctagaagaga

SEQ ID NO: 3590397 - DNA, 25 bp, Homo sapien
tattcaccggccatatctagtttaa

SEQ ID NO: 3590398 - DNA, 25 bp, Homo sapien
gaaatgaccacctctgcacccatta

SEQ ID NO: 3590399 - DNA, 25 bp, Homo sapien
aataggacctaatctgacttctctg

SEQ ID NO: 3590400 - DNA, 25 bp, Homo sapien
gaaactatgagccagccctaaagag

SEQ ID NO: 3590401 - DNA, 25 bp, Homo sapien
gctgatgtctcccagtcttacagaa

SEQ ID NO: 3590402 - DNA, 25 bp, Homo sapien
actgagggcctattgtgaaagagac

SEQ ID NO: 3590403 - DNA, 25 bp, Homo sapien
cacaggtcacttatggtaaggcagg

SEQ ID NO: 3590404 - DNA, 25 bp, Homo sapien
gctactcctgtacaaatgctgcatg

SEQ ID NO: 3590405 - DNA, 25 bp, Homo sapien
tagtctatagaccaagaagcccctt

SEQ ID NO: 3590406 - DNA, 25 bp, Homo sapien
tgtggaatgttaagcatcaggaagc

SEQ ID NO: 3590407 - DNA, 25 bp, Homo sapien
ggtaaagacctgaattgctgcccca

SEQ ID NO: 3590408 - DNA, 25 bp, Homo sapien
aattatattaagtgctgggccaagg

SEQ ID NO: 3590409 - DNA, 25 bp, Homo sapien
tacagtctagctcaacaggcacatc

SEQ ID NO: 3590410 - DNA, 25 bp, Homo sapien
ggccaagggaggtaccagaagtcat

SEQ ID NO: 3590411 - DNA, 25 bp, Homo sapien
gatgtgtaggactcagccaggtgaa

SEQ ID NO: 3590412 - DNA, 25 bp, Homo sapien
tacttttggctggtcacataaccac

SEQ ID NO: 3590413 - DNA, 25 bp, Homo sapien
tttccagccactctagcagctaggg

SEQ ID NO: 3590414 - DNA, 25 bp, Homo sapien
ctacattttccagccactctagcag

SEQ ID NO: 3590415 - DNA, 25 bp, Homo sapien
gatttacctggaagtatcgtgtgtg

SEQ ID NO: 3590416 - DNA, 25 bp, Homo sapien
ctctgcttagtcgaaaaggtttctg

SEQ ID NO: 3590417 - DNA, 25 bp, Homo sapien
tgacaacattaattggcagaaagcc

SEQ ID NO: 3590418 - DNA, 25 bp, Homo sapien
aataccgtgatgtacgcagtctcgc

SEQ ID NO: 3590419 - DNA, 25 bp, Homo sapien
gactcatgtgaatatgcatcagagg

SEQ ID NO: 3590420 - DNA, 25 bp, Homo sapien
ggagcaccagaagcaaggcaatcag

SEQ ID NO: 3590421 - DNA, 25 bp, Homo sapien
gggacctatcctgtgcctaagagca

SEQ ID NO: 3590422 - DNA, 25 bp, Homo sapien
tcccacatttggtaaactaagagcc

SEQ ID NO: 3590423 - DNA, 25 bp, Homo sapien
taaggatctgactaaaaagggccac

SEQ ID NO: 3590424 - DNA, 25 bp, Homo sapien
tattggagtaaccaagtctacatga

SEQ ID NO: 3590425 - DNA, 25 bp, Homo sapien
gaaaagccatagagataggatccat

SEQ ID NO: 3590426 - DNA, 25 bp, Homo sapien
gatcaggaatgcgttaggaaagtgc

SEQ ID NO: 3590427 - DNA, 25 bp, Homo sapien
gcatggtcaccagttatggaatccc

SEQ ID NO: 3590428 - DNA, 25 bp, Homo sapien
aacaactcgatgtgtcagttatctg

SEQ ID NO: 3590429 - DNA, 25 bp, Homo sapien
tagagaaatgtaacttaccagtttg

SEQ ID NO: 3590430 - DNA, 25 bp, Homo sapien
cccaaagataacactagttcaccag

SEQ ID NO: 3590431 - DNA, 25 bp, Homo sapien
aatcatacaggatatgaatggaaaa

SEQ ID NO: 3590432 - DNA, 25 bp, Homo sapien
gccaacgtaatgtgttttctcacag

SEQ ID NO: 3590433 - DNA, 25 bp, Homo sapien
gaagcaactgattagaagccaacgt

SEQ ID NO: 3590434 - DNA, 25 bp, Homo sapien
gcgtgcagcccattgagagaagaaa

SEQ ID NO: 3590435 - DNA, 25 bp, Homo sapien
gaaagagactcagtccctgttctca

SEQ ID NO: 3590436 - DNA, 25 bp, Homo sapien
gtcttcacatagaagagtatttatg

SEQ ID NO: 3590437 - DNA, 25 bp, Homo sapien
aggtcttcacatagaagagtattta

SEQ ID NO: 3590438 - DNA, 25 bp, Homo sapien
attcctgactgggtaggttgccaaa

SEQ ID NO: 3590439 - DNA, 25 bp, Homo sapien
cctgactgggtaggttgccaaataa

SEQ ID NO: 3590440 - DNA, 25 bp, Homo sapien
gcaagttgttacaaaatgcaatgta

SEQ ID NO: 3590441 - DNA, 25 bp, Homo sapien
taagctaagtgggagtctgtttact

SEQ ID NO: 3590442 - DNA, 25 bp, Homo sapien
tgtttactgcaatctggagtcatac

SEQ ID NO: 3590443 - DNA, 25 bp, Homo sapien
catccttgggtatgcatgagcttga

SEQ ID NO: 3590444 - DNA, 25 bp, Homo sapien
tacaaatgctgctcagggatagcac

SEQ ID NO: 3590445 - DNA, 25 bp, Homo sapien
gaaaatttccaagctctcagagtac

SEQ ID NO: 3590446 - DNA, 25 bp, Homo sapien
gaagaacaaggtcagcacacatagg

SEQ ID NO: 3590447 - DNA, 25 bp, Homo sapien
cacgtggtcccatggaatgtggcgc

SEQ ID NO: 3590448 - DNA, 25 bp, Homo sapien
gattagtttaggtacaacacaattg

SEQ ID NO: 3590449 - DNA, 25 bp, Homo sapien
cagatagggataaaagtgtaagaga

SEQ ID NO: 3590450 - DNA, 25 bp, Homo sapien
aagctatggaatgtactctctcaat

SEQ ID NO: 3590451 - DNA, 25 bp, Homo sapien
ctctttctgaggcttatagtagtac

SEQ ID NO: 3590452 - DNA, 25 bp, Homo sapien
tatttatgtctctgtcgccatcgaa

SEQ ID NO: 3590453 - DNA, 25 bp, Homo sapien
ggctaactccccatggcatcagcta

SEQ ID NO: 3590454 - DNA, 25 bp, Homo sapien
aatcattacaaactcggccaggtgc

SEQ ID NO: 3590455 - DNA, 25 bp, Homo sapien
ggccacatcgggtttccagacattt

SEQ ID NO: 3590456 - DNA, 25 bp, Homo sapien
agcctcatgcgcctgaaggtcctgg

SEQ ID NO: 3590457 - DNA, 25 bp, Homo sapien
cagaccagaccagacaagcctcatg

SEQ ID NO: 3590458 - DNA, 25 bp, Homo sapien
accagacaagcctcatgcgcctgaa

SEQ ID NO: 3590459 - DNA, 25 bp, Homo sapien
catgcgcctgaaggtcctggctcct

SEQ ID NO: 3590460 - DNA, 25 bp, Homo sapien
gccaccttagtagctaggacaatag

SEQ ID NO: 3590461 - DNA, 25 bp, Homo sapien
gcttactgcaggcttaacctcctag

SEQ ID NO: 3590462 - DNA, 25 bp, Homo sapien
cagccaccttagtagctaggacaat

SEQ ID NO: 3590463 - DNA, 25 bp, Homo sapien
ctcagccaccttagtagctaggaca

SEQ ID NO: 3590464 - DNA, 25 bp, Homo sapien
cagtgtccaaaggagtaagtagcca

SEQ ID NO: 3590465 - DNA, 25 bp, Homo sapien
gtgtccaaaggagtaagtagccact

SEQ ID NO: 3590466 - DNA, 25 bp, Homo sapien
gtaagtagccactttgggtttcaga

SEQ ID NO: 3590467 - DNA, 25 bp, Homo sapien
agtagccactttgggtttcagaagt

SEQ ID NO: 3590468 - DNA, 25 bp, Homo sapien
ctatggctattttcgtcaatttcag

SEQ ID NO: 3590469 - DNA, 25 bp, Homo sapien
gagactgatagaaagcctatggcta

SEQ ID NO: 3590470 - DNA, 25 bp, Homo sapien
tagaaagcctatggctattttcgtc

SEQ ID NO: 3590471 - DNA, 25 bp, Homo sapien
ttcgtcaatttcagagtaaaggcag

SEQ ID NO: 3590472 - DNA, 25 bp, Homo sapien
caaagatttagtgctttagcagaga

SEQ ID NO: 3590473 - DNA, 25 bp, Homo sapien
tattttcactagttctgccacacag

SEQ ID NO: 3590474 - DNA, 25 bp, Homo sapien
aatgtgggaggctgacgactattcc

SEQ ID NO: 3590475 - DNA, 25 bp, Homo sapien
gccacacagtagtaccatacattgt

SEQ ID NO: 3590476 - DNA, 25 bp, Homo sapien
ctccaagaaggaagacccacatgtt

SEQ ID NO: 3590477 - DNA, 25 bp, Homo sapien
cagaaatcgggtggaaagctagcag

SEQ ID NO: 3590478 - DNA, 25 bp, Homo sapien
caaaacaatctgtgcgtgtccaggc

SEQ ID NO: 3590479 - DNA, 25 bp, Homo sapien
gaaagtgccttctgaacagtcatcc

SEQ ID NO: 3590480 - DNA, 25 bp, Homo sapien
ggatggtttgtcgtgatccgcccat

SEQ ID NO: 3590481 - DNA, 25 bp, Homo sapien
gtcaggatggtttgtcgtgatccgc

SEQ ID NO: 3590482 - DNA, 25 bp, Homo sapien
agtcaggatggtttgtcgtgatccg

SEQ ID NO: 3590483 - DNA, 25 bp, Homo sapien
cataggtactcaggtccgctggcct

SEQ ID NO: 3590484 - DNA, 25 bp, Homo sapien
tcatccttctttaaccacgacatag

SEQ ID NO: 3590485 - DNA, 25 bp, Homo sapien
ttccttcgcctaaaaatcgtgctgc

SEQ ID NO: 3590486 - DNA, 25 bp, Homo sapien
ttcagaggcggacctcaagtggctt

SEQ ID NO: 3590487 - DNA, 25 bp, Homo sapien
taatggctcaaaccgtgttccagat

SEQ ID NO: 3590488 - DNA, 25 bp, Homo sapien
attaataaaaacttggggctgtgcg

SEQ ID NO: 3590489 - DNA, 25 bp, Homo sapien
gcctaatggctcaaaccgtgttcca

SEQ ID NO: 3590490 - DNA, 25 bp, Homo sapien
gctcaaaccgtgttccagatgtttt

SEQ ID NO: 3590491 - DNA, 25 bp, Homo sapien
gaaattgtgccctaactcaagctat

SEQ ID NO: 3590492 - DNA, 25 bp, Homo sapien
tcctgagtatacagggcaaaagctt

SEQ ID NO: 3590493 - DNA, 25 bp, Homo sapien
taagagctcacatggaacttggtca

SEQ ID NO: 3590494 - DNA, 25 bp, Homo sapien
ctgaaatgcaccacgtttgctgact

SEQ ID NO: 3590495 - DNA, 25 bp, Homo sapien
ctggggacacaaagcaacatgaaac

SEQ ID NO: 3590496 - DNA, 25 bp, Homo sapien
acgtggaggcttatcatgtgctagg

SEQ ID NO: 3590497 - DNA, 25 bp, Homo sapien
acattcaacaaaaacgtggaggctt

SEQ ID NO: 3590498 - DNA, 25 bp, Homo sapien
tcaacaaaaacgtggaggcttatca

SEQ ID NO: 3590499 - DNA, 25 bp, Homo sapien
gggacatggttgaactacatacaaa

SEQ ID NO: 3590500 - DNA, 25 bp, Homo sapien
gattctgaagtataaggaggtgttt

SEQ ID NO: 3590501 - DNA, 25 bp, Homo sapien
gcatatcattcatcccttcaacagg

SEQ ID NO: 3590502 - DNA, 25 bp, Homo sapien
catcatatgcaaatccctgaagttc

SEQ ID NO: 3590503 - DNA, 25 bp, Homo sapien
gatggcatgcgatctacctcctcaa

SEQ ID NO: 3590504 - DNA, 25 bp, Homo sapien
cagtagagacagttcaggctgcact

SEQ ID NO: 3590505 - DNA, 25 bp, Homo sapien
gaaagccatttcaggtacactacag

SEQ ID NO: 3590506 - DNA, 25 bp, Homo sapien
taaaaccagtgagaagactcctgca

SEQ ID NO: 3590507 - DNA, 25 bp, Homo sapien
tgtagttacccatgttgactgttca

SEQ ID NO: 3590508 - DNA, 25 bp, Homo sapien
gttacccatgttgactgttcaatgt

SEQ ID NO: 3590509 - DNA, 25 bp, Homo sapien
tgcagtatcatacccaggattgtag

SEQ ID NO: 3590510 - DNA, 25 bp, Homo sapien
catacccaggattgtagttacccat

SEQ ID NO: 3590511 - DNA, 25 bp, Homo sapien
tacacttaattggacagggctactt

SEQ ID NO: 3590512 - DNA, 25 bp, Homo sapien
tcagcatcgttagtctcactggaaa

SEQ ID NO: 3590513 - DNA, 25 bp, Homo sapien
ttgtccactttgcagacgcccactg

SEQ ID NO: 3590514 - DNA, 25 bp, Homo sapien
caaatgggccaatggtgctataccc

SEQ ID NO: 3590515 - DNA, 25 bp, Homo sapien
tgcttttcagagagccagtttacca

SEQ ID NO: 3590516 - DNA, 25 bp, Homo sapien
agtgttagcactctgttcaaacgcc

SEQ ID NO: 3590517 - DNA, 25 bp, Homo sapien
ccaggacaccactgattgaaagtca

SEQ ID NO: 3590518 - DNA, 25 bp, Homo sapien
gcccttgcgcatgaattccagctta

SEQ ID NO: 3590519 - DNA, 25 bp, Homo sapien
cacatgattggtgatctacggtacc

SEQ ID NO: 3590520 - DNA, 25 bp, Homo sapien
tactaaagatggtagagtacaggca

SEQ ID NO: 3590521 - DNA, 25 bp, Homo sapien
tcacagcatgtgctatgaatcacac

SEQ ID NO: 3590522 - DNA, 25 bp, Homo sapien
tacccagtgaaaatcatgtcccgca

SEQ ID NO: 3590523 - DNA, 25 bp, Homo sapien
atacaaaccctttcaacaccagacg

SEQ ID NO: 3590524 - DNA, 25 bp, Homo sapien
accagacggagtagcaaagacactc

SEQ ID NO: 3590525 - DNA, 25 bp, Homo sapien
tggcctggctaatttccaattgggt

SEQ ID NO: 3590526 - DNA, 25 bp, Homo sapien
ccgcgcccagtcaatacaaaccctt

SEQ ID NO: 3590527 - DNA, 25 bp, Homo sapien
cataggatactgtgactgctccaga

SEQ ID NO: 3590528 - DNA, 25 bp, Homo sapien
gatcgaccactaaaatcttctgagg

SEQ ID NO: 3590529 - DNA, 25 bp, Homo sapien
tgccggacgtgagaaaaacacactc

SEQ ID NO: 3590530 - DNA, 25 bp, Homo sapien
caaaacatcctttgttgccggacgt

SEQ ID NO: 3590531 - DNA, 25 bp, Homo sapien
aattaaaagtcgttccagagcaaag

SEQ ID NO: 3590532 - DNA, 25 bp, Homo sapien
tctcactgtgctaaggataaagaca

SEQ ID NO: 3590533 - DNA, 25 bp, Homo sapien
gacaaaaggacgttgatattctggc

SEQ ID NO: 3590534 - DNA, 25 bp, Homo sapien
cagagcaaagatgggtaagcaaagc

SEQ ID NO: 3590535 - DNA, 25 bp, Homo sapien
agccacaggctacgaatgcagagca

SEQ ID NO: 3590536 - DNA, 25 bp, Homo sapien
tgtgttctggcctatgacacccagg

SEQ ID NO: 3590537 - DNA, 25 bp, Homo sapien
tcctcaacgggccattgtgcctggg

SEQ ID NO: 3590538 - DNA, 25 bp, Homo sapien
gacacccaggtagaattccaacaga

SEQ ID NO: 3590539 - DNA, 25 bp, Homo sapien
ctctggatctgcactattggaacac

SEQ ID NO: 3590540 - DNA, 25 bp, Homo sapien
gaaagtgggaatcttgtgactccaa

SEQ ID NO: 3590541 - DNA, 25 bp, Homo sapien
aatgctacaagaaaaccgccagtgg

SEQ ID NO: 3590542 - DNA, 25 bp, Homo sapien
ggaacactctcttgtcaccctgcaa

SEQ ID NO: 3590543 - DNA, 25 bp, Homo sapien
tttctggtattctctctttactgtg

SEQ ID NO: 3590544 - DNA, 25 bp, Homo sapien
cccatttctggtattctctctttac

SEQ ID NO: 3590545 - DNA, 25 bp, Homo sapien
gacgagaaggacttactagtaacag

SEQ ID NO: 3590546 - DNA, 25 bp, Homo sapien
tatggcctgttcaaatattacaact

SEQ ID NO: 3590547 - DNA, 25 bp, Homo sapien
tttaccgtgataggtttgtggctct

SEQ ID NO: 3590548 - DNA, 25 bp, Homo sapien
gatggtgaggactggaataacaact

SEQ ID NO: 3590549 - DNA, 25 bp, Homo sapien
gagcaacttattgtggaggccaaat

SEQ ID NO: 3590550 - DNA, 25 bp, Homo sapien
taaatcacctatgagcagagaggcc

SEQ ID NO: 3590551 - DNA, 25 bp, Homo sapien
gagagccaatgggagtcagccagta

SEQ ID NO: 3590552 - DNA, 25 bp, Homo sapien
gccagtgtgcttagaagttgccaga

SEQ ID NO: 3590553 - DNA, 25 bp, Homo sapien
tataatcctcggaacacctgtgcca

SEQ ID NO: 3590554 - DNA, 25 bp, Homo sapien
attattctttcaaacaggctgggag

SEQ ID NO: 3590555 - DNA, 25 bp, Homo sapien
acattttataatcctcggaacacct

SEQ ID NO: 3590556 - DNA, 25 bp, Homo sapien
atgaaggttggactgtgtgaatgcc

SEQ ID NO: 3590557 - DNA, 25 bp, Homo sapien
cagcttttctgataagaggaacacc

SEQ ID NO: 3590558 - DNA, 25 bp, Homo sapien
ttccggccaataagatggacatctg

SEQ ID NO: 3590559 - DNA, 25 bp, Homo sapien
gcttttgggacactttcagcttttc

SEQ ID NO: 3590560 - DNA, 25 bp, Homo sapien
tcttggaatggaggtgcagcatagt

SEQ ID NO: 3590561 - DNA, 25 bp, Homo sapien
tgagtatttgaggatggaacccaga

SEQ ID NO: 3590562 - DNA, 25 bp, Homo sapien
taaagttcgaggaccactaatctgg

SEQ ID NO: 3590563 - DNA, 25 bp, Homo sapien
aaattactttgactacctgagctcc

SEQ ID NO: 3590564 - DNA, 25 bp, Homo sapien
tctggaaataggtgtcactgagaca

SEQ ID NO: 3590565 - DNA, 25 bp, Homo sapien
agtgctgggataatttaatccattt

SEQ ID NO: 3590566 - DNA, 25 bp, Homo sapien
aaagtgctgggataatttaatccat

SEQ ID NO: 3590567 - DNA, 25 bp, Homo sapien
aagtgctgggataatttaatccatt

SEQ ID NO: 3590568 - DNA, 25 bp, Homo sapien
ttttcaatcctatcatccattaata

SEQ ID NO: 3590569 - DNA, 25 bp, Homo sapien
ttcaatcctatcatccattaataaa

SEQ ID NO: 3590570 - DNA, 25 bp, Homo sapien
ttattttcaatcctatcatccatta

SEQ ID NO: 3590571 - DNA, 25 bp, Homo sapien
tattttcaatcctatcatccattaa

SEQ ID NO: 3590572 - DNA, 25 bp, Homo sapien
tacagtacatcctctagccacaagg

SEQ ID NO: 3590573 - DNA, 25 bp, Homo sapien
caagagacccaaatgtatgtttccc

SEQ ID NO: 3590574 - DNA, 25 bp, Homo sapien
gctggtgggaccacaatgacccctt

SEQ ID NO: 3590575 - DNA, 25 bp, Homo sapien
tccaaaggtaaagctaagatagttc

SEQ ID NO: 3590576 - DNA, 25 bp, Homo sapien
cagctacttggactttcagggaaaa

SEQ ID NO: 3590577 - DNA, 25 bp, Homo sapien
tgtagcctgctgaggaacagtatgt

SEQ ID NO: 3590578 - DNA, 25 bp, Homo sapien
tatagatgcttaattcggccaacac

SEQ ID NO: 3590579 - DNA, 25 bp, Homo sapien
gaaaacaatagtggagtcagtgcca

SEQ ID NO: 3590580 - DNA, 25 bp, Homo sapien
taggttcattattaacgggctggtg

SEQ ID NO: 3590581 - DNA, 25 bp, Homo sapien
attttcacttcacattctaggttca

SEQ ID NO: 3590582 - DNA, 25 bp, Homo sapien
ctaggttcattattaacgggctggt

SEQ ID NO: 3590583 - DNA, 25 bp, Homo sapien
tgattttcacttcacattctaggtt

SEQ ID NO: 3590584 - DNA, 25 bp, Homo sapien
aacaagtaaggagatagccagcctc

SEQ ID NO: 3590585 - DNA, 25 bp, Homo sapien
tattgcaagttattctccatagtgc

SEQ ID NO: 3590586 - DNA, 25 bp, Homo sapien
gcaagctattttatgactgtgggac

SEQ ID NO: 3590587 - DNA, 25 bp, Homo sapien
tgtgatataaggcaagatgcttgcc

SEQ ID NO: 3590588 - DNA, 25 bp, Homo sapien
cagaaatattaaattaggtattaat

SEQ ID NO: 3590589 - DNA, 25 bp, Homo sapien
taattaattaaactattactaatga

SEQ ID NO: 3590590 - DNA, 25 bp, Homo sapien
actcttgctgactgataactctgaa

SEQ ID NO: 3590591 - DNA, 25 bp, Homo sapien
tcaaagcagctaccggtttcctggt

SEQ ID NO: 3590592 - DNA, 25 bp, Homo sapien
tgttgtaggtaaaactgcctgaagc

SEQ ID NO: 3590593 - DNA, 25 bp, Homo sapien
tgtcgttagctcttcactatgggta

SEQ ID NO: 3590594 - DNA, 25 bp, Homo sapien
tgtgcctttaaaacaccaatcaggt

SEQ ID NO: 3590595 - DNA, 25 bp, Homo sapien
gtcgaagtggcttgcgaaaaggcta

SEQ ID NO: 3590596 - DNA, 25 bp, Homo sapien
aatggatccacacattgaaatggca

SEQ ID NO: 3590597 - DNA, 25 bp, Homo sapien
gatccacgtagttaaatggatccac

SEQ ID NO: 3590598 - DNA, 25 bp, Homo sapien
tatctgtgggtatcacttcatgtct

SEQ ID NO: 3590599 - DNA, 25 bp, Homo sapien
tattgttgctaagtacaatcactgt

SEQ ID NO: 3590600 - DNA, 25 bp, Homo sapien
tacacgcacagaatgagagatgatc

SEQ ID NO: 3590601 - DNA, 25 bp, Homo sapien
tattagaacttactgtccaggcgcg

SEQ ID NO: 3590602 - DNA, 25 bp, Homo sapien
gttaaaacagaatgctaagccccat

SEQ ID NO: 3590603 - DNA, 25 bp, Homo sapien
tgccctaagcctatcagaactggtt

SEQ ID NO: 3590604 - DNA, 25 bp, Homo sapien
tcttggaagcacaccttgagaacca

SEQ ID NO: 3590605 - DNA, 25 bp, Homo sapien
taagcctgggtagtaacttcccatg

SEQ ID NO: 3590606 - DNA, 25 bp, Homo sapien
cagtgcataaactcacaggctgtcc

SEQ ID NO: 3590607 - DNA, 25 bp, Homo sapien
tatgggacgttaccacggagactgc

SEQ ID NO: 3590608 - DNA, 25 bp, Homo sapien
ccattgctggagtgggtcatttgca

SEQ ID NO: 3590609 - DNA, 25 bp, Homo sapien
cattcaagtggaaaggccattaggc

SEQ ID NO: 3590610 - DNA, 25 bp, Homo sapien
taccacagggtcaattcaagtctaa

SEQ ID NO: 3590611 - DNA, 25 bp, Homo sapien
aactagctgtgtatctctcatggaa

SEQ ID NO: 3590612 - DNA, 25 bp, Homo sapien
ttattccaggtgtgaactgctatgc

SEQ ID NO: 3590613 - DNA, 25 bp, Homo sapien
gaaaacgcagggatcttgaaactgt

SEQ ID NO: 3590614 - DNA, 25 bp, Homo sapien
gctcttttccacaggtgagatttgg

SEQ ID NO: 3590615 - DNA, 25 bp, Homo sapien
gagctcctactgtgtaagaccagaa

SEQ ID NO: 3590616 - DNA, 25 bp, Homo sapien
caggaatattagcaaccgcagttta

SEQ ID NO: 3590617 - DNA, 25 bp, Homo sapien
ctgatggtgctaaagtaactgtgac

SEQ ID NO: 3590618 - DNA, 25 bp, Homo sapien
gcagctagcacttatcagatgggaa

SEQ ID NO: 3590619 - DNA, 25 bp, Homo sapien
tacatggtcaccatatcagccggtg

SEQ ID NO: 3590620 - DNA, 25 bp, Homo sapien
gcctgatgcgctgctctagagatga

SEQ ID NO: 3590621 - DNA, 25 bp, Homo sapien
caatatattcacgagagagcagcct

SEQ ID NO: 3590622 - DNA, 25 bp, Homo sapien
ggcagactcttattgtcaaggaaca

SEQ ID NO: 3590623 - DNA, 25 bp, Homo sapien
gcttagaatcttcgtaggcacttca

SEQ ID NO: 3590624 - DNA, 25 bp, Homo sapien
tacgactgggaaaaagactattgtg

SEQ ID NO: 3590625 - DNA, 25 bp, Homo sapien
tatagtcttcaaggataactgtgct

SEQ ID NO: 3590626 - DNA, 25 bp, Homo sapien
tcaattgacaggctagcccagaagc

SEQ ID NO: 3590627 - DNA, 25 bp, Homo sapien
gcccagaagcattgagtagccaaac

SEQ ID NO: 3590628 - DNA, 25 bp, Homo sapien
tagcagtgtactttctagaggtgaa

SEQ ID NO: 3590629 - DNA, 25 bp, Homo sapien
tgttgtaaagtggtgaggctcccaa

SEQ ID NO: 3590630 - DNA, 25 bp, Homo sapien
tcctccctgcttcttagttatagtc

SEQ ID NO: 3590631 - DNA, 25 bp, Homo sapien
aagtaacgtccagatgaggtaaatc

SEQ ID NO: 3590632 - DNA, 25 bp, Homo sapien
gcgcccggccttcataagcctttgt

SEQ ID NO: 3590633 - DNA, 25 bp, Homo sapien
tttaggaaaagtaacgtccagatga

SEQ ID NO: 3590634 - DNA, 25 bp, Homo sapien
caccaatcctatggagtgtatgcta

SEQ ID NO: 3590635 - DNA, 25 bp, Homo sapien
catccttggatagaactcagctaag

SEQ ID NO: 3590636 - DNA, 25 bp, Homo sapien
tattgaatacagcagcatatgatgg

SEQ ID NO: 3590637 - DNA, 25 bp, Homo sapien
cactttggatagcaggaatatgcag

SEQ ID NO: 3590638 - DNA, 25 bp, Homo sapien
tatatggctatcattatggtaggca

SEQ ID NO: 3590639 - DNA, 25 bp, Homo sapien
aaggcagccctagaccacaaaagag

SEQ ID NO: 3590640 - DNA, 25 bp, Homo sapien
gcaaagtctagctgtctcacagaag

SEQ ID NO: 3590641 - DNA, 25 bp, Homo sapien
cctttattcctttcagggcattgct

SEQ ID NO: 3590642 - DNA, 25 bp, Homo sapien
cattgacctcaatgaccacttcagc

SEQ ID NO: 3590643 - DNA, 25 bp, Homo sapien
tggcttaagagcatcattgacctca

SEQ ID NO: 3590644 - DNA, 25 bp, Homo sapien
cataggtactgtcagccatgtttgg

SEQ ID NO: 3590645 - DNA, 25 bp, Homo sapien
ccacttcagcttgggaaaggctgca

SEQ ID NO: 3590646 - DNA, 25 bp, Homo sapien
gggtacttctgtataaatcctggcc

SEQ ID NO: 3590647 - DNA, 25 bp, Homo sapien
acacctggcgcccacaaaaggctgg

SEQ ID NO: 3590648 - DNA, 25 bp, Homo sapien
ctgcccaagctacacctggcgccca

SEQ ID NO: 3590649 - DNA, 25 bp, Homo sapien
agcaggtcaggcatgctgcccaagc

SEQ ID NO: 3590650 - DNA, 25 bp, Homo sapien
tgatctttgatcatcacagaatctg

SEQ ID NO: 3590651 - DNA, 25 bp, Homo sapien
ccttctcgaattcagcaccgtttga

SEQ ID NO: 3590652 - DNA, 25 bp, Homo sapien
ttcagcaccgtttgatctttgatca

SEQ ID NO: 3590653 - DNA, 25 bp, Homo sapien
gaattcagcaccgtttgatctttga

SEQ ID NO: 3590654 - DNA, 25 bp, Homo sapien
tgattacgtgaaaaggaaattcttc

SEQ ID NO: 3590655 - DNA, 25 bp, Homo sapien
tggccttcagaagtgattggattac

SEQ ID NO: 3590656 - DNA, 25 bp, Homo sapien
tgatgacatatagggagcatacttg

SEQ ID NO: 3590657 - DNA, 25 bp, Homo sapien
acggcttactgaggtcccgacctct

SEQ ID NO: 3590658 - DNA, 25 bp, Homo sapien
tgattgtccaagctccaagctgagg

SEQ ID NO: 3590659 - DNA, 25 bp, Homo sapien
tagagatggcggtacctagatagga

SEQ ID NO: 3590660 - DNA, 25 bp, Homo sapien
tagaagaagctggatagtcacactc

SEQ ID NO: 3590661 - DNA, 25 bp, Homo sapien
ggttcgaaacacagtcttacatgca

SEQ ID NO: 3590662 - DNA, 25 bp, Homo sapien
aaggtgtttttaggaagtgatctag

SEQ ID NO: 3590663 - DNA, 25 bp, Homo sapien
taagccaatcctacaaggctttggt

SEQ ID NO: 3590664 - DNA, 25 bp, Homo sapien
gcagatattagggttttacagcaga

SEQ ID NO: 3590665 - DNA, 25 bp, Homo sapien
tacccatcctcatgaaggtcctcat

SEQ ID NO: 3590666 - DNA, 25 bp, Homo sapien
cagtatacccaagcactctggtggg

SEQ ID NO: 3590667 - DNA, 25 bp, Homo sapien
taagtcagggtacttgcttgcccat

SEQ ID NO: 3590668 - DNA, 25 bp, Homo sapien
tactctaaagggagtgatagaccag

SEQ ID NO: 3590669 - DNA, 25 bp, Homo sapien
taaggctaccattcatgttgagatc

SEQ ID NO: 3590670 - DNA, 25 bp, Homo sapien
gatgttcctcggtgtcctgttcctg

SEQ ID NO: 3590671 - DNA, 25 bp, Homo sapien
gcctgtggaaggagtaaattgttcc

SEQ ID NO: 3590672 - DNA, 25 bp, Homo sapien
ccttcagcttcaggcctgcattcca

SEQ ID NO: 3590673 - DNA, 25 bp, Homo sapien
cctgcttgcattcactgaaatggtg

SEQ ID NO: 3590674 - DNA, 25 bp, Homo sapien
tccgtacattctgaaggccaactct

SEQ ID NO: 3590675 - DNA, 25 bp, Homo sapien
attttttattgcaacaagcactagg

SEQ ID NO: 3590676 - DNA, 25 bp, Homo sapien
taggatgccaatgagcataccacag

SEQ ID NO: 3590677 - DNA, 25 bp, Homo sapien
cacagtccgtacattctgaaggcca

SEQ ID NO: 3590678 - DNA, 25 bp, Homo sapien
tctcctgtgctggaatataagaatt

SEQ ID NO: 3590679 - DNA, 25 bp, Homo sapien
tagccaacctctgagcacagttgcc

SEQ ID NO: 3590680 - DNA, 25 bp, Homo sapien
tatacttcccacttcacaaatgtag

SEQ ID NO: 3590681 - DNA, 25 bp, Homo sapien
aatgctaaatcctcttggaaagctg

SEQ ID NO: 3590682 - DNA, 25 bp, Homo sapien
caagaagttccccacaatgacaagg

SEQ ID NO: 3590683 - DNA, 25 bp, Homo sapien
gcctggagtgcaccgctaataataa

SEQ ID NO: 3590684 - DNA, 25 bp, Homo sapien
cagtgttgctatgaaaggcccgaga

SEQ ID NO: 3590685 - DNA, 25 bp, Homo sapien
caaaatatgaactctagcagcctgg

SEQ ID NO: 3590686 - DNA, 25 bp, Homo sapien
aaagaggaacaatattctccttcac

SEQ ID NO: 3590687 - DNA, 25 bp, Homo sapien
agatgctgacaagaccaccttcttc

SEQ ID NO: 3590688 - DNA, 25 bp, Homo sapien
agctccaaggcacagaagatgctga

SEQ ID NO: 3590689 - DNA, 25 bp, Homo sapien
aatagctccaaggcacagaagatgc

SEQ ID NO: 3590690 - DNA, 25 bp, Homo sapien
gatgctgacaagaccaccttcttcc

SEQ ID NO: 3590691 - DNA, 25 bp, Homo sapien
gccaaagtagcacacagcctgggcc

SEQ ID NO: 3590692 - DNA, 25 bp, Homo sapien
agcctgggccaaaaagaccactgtg

SEQ ID NO: 3590693 - DNA, 25 bp, Homo sapien
tgtcggaatcaacatttcacacaga

SEQ ID NO: 3590694 - DNA, 25 bp, Homo sapien
cttggagcagccacgggcacagaaa

SEQ ID NO: 3590695 - DNA, 25 bp, Homo sapien
agccaggtatggtgtgatgggcccc

SEQ ID NO: 3590696 - DNA, 25 bp, Homo sapien
aggtatggtgtgatgggcccctgta

SEQ ID NO: 3590697 - DNA, 25 bp, Homo sapien
ccaggtatggtgtgatgggcccctg

SEQ ID NO: 3590698 - DNA, 25 bp, Homo sapien
gtatggtgtgatgggcccctgtaat

SEQ ID NO: 3590699 - DNA, 25 bp, Homo sapien
tggctggaccttgtcccccacataa

SEQ ID NO: 3590700 - DNA, 25 bp, Homo sapien
tccttactgctacaaaacattgcca

SEQ ID NO: 3590701 - DNA, 25 bp, Homo sapien
acataacttcagaccctccttactg

SEQ ID NO: 3590702 - DNA, 25 bp, Homo sapien
cattgccaattttgtcactgctcct

SEQ ID NO: 3590703 - DNA, 25 bp, Homo sapien
gaagatcaggttcccaaggagaaaa

SEQ ID NO: 3590704 - DNA, 25 bp, Homo sapien
ctgggagctcgctctctcagaaaga

SEQ ID NO: 3590705 - DNA, 25 bp, Homo sapien
gggactgagcctgcaaacagatcca

SEQ ID NO: 3590706 - DNA, 25 bp, Homo sapien
tattgttgcctagtctatggaagat

SEQ ID NO: 3590707 - DNA, 25 bp, Homo sapien
atgcctgcactcagcgaccccaatc

SEQ ID NO: 3590708 - DNA, 25 bp, Homo sapien
ctgcactcagcgaccccaatcccac

SEQ ID NO: 3590709 - DNA, 25 bp, Homo sapien
tgcctgcactcagcgaccccaatcc

SEQ ID NO: 3590710 - DNA, 25 bp, Homo sapien
ctaaagtctgctccaagtggttaga

SEQ ID NO: 3590711 - DNA, 25 bp, Homo sapien
tagaaatgcagatctgctcaaagcc

SEQ ID NO: 3590712 - DNA, 25 bp, Homo sapien
aaagccctataatccgggccctctg

SEQ ID NO: 3590713 - DNA, 25 bp, Homo sapien
ctggctgagtaagggctgtagaatt

SEQ ID NO: 3590714 - DNA, 25 bp, Homo sapien
cagacatagaatccagaagtcccat

SEQ ID NO: 3590715 - DNA, 25 bp, Homo sapien
gggttctaccttccaccagaggcca

SEQ ID NO: 3590716 - DNA, 25 bp, Homo sapien
agaagtcccatggagctccaaaagg

SEQ ID NO: 3590717 - DNA, 25 bp, Homo sapien
gacatagaatccagaagtcccatgg

SEQ ID NO: 3590718 - DNA, 25 bp, Homo sapien
caaagctggaggatccatgagatag

SEQ ID NO: 3590719 - DNA, 25 bp, Homo sapien
cttgggggcctaatcagagctggct

SEQ ID NO: 3590720 - DNA, 25 bp, Homo sapien
agctggaggatccatgagatagaac

SEQ ID NO: 3590721 - DNA, 25 bp, Homo sapien
ggccagctgggctgataaatgcttt

SEQ ID NO: 3590722 - DNA, 25 bp, Homo sapien
tagcctcttcttttataagatgtgg

SEQ ID NO: 3590723 - DNA, 25 bp, Homo sapien
aactcaggcttcttatcagttaagg

SEQ ID NO: 3590724 - DNA, 25 bp, Homo sapien
ttcttttataagatgtggaccccag

SEQ ID NO: 3590725 - DNA, 25 bp, Homo sapien
gatcttgccagctggtagcctcttc

SEQ ID NO: 3590726 - DNA, 25 bp, Homo sapien
ccatgctgtacaaggctcaggagct

SEQ ID NO: 3590727 - DNA, 25 bp, Homo sapien
ggctgagttcctctggtcccctggg

SEQ ID NO: 3590728 - DNA, 25 bp, Homo sapien
ttctctttcccggtctgagctctcg

SEQ ID NO: 3590729 - DNA, 25 bp, Homo sapien
cggtggccttggtgtgtttgccagc

SEQ ID NO: 3590730 - DNA, 25 bp, Homo sapien
acagcgatccgagcccggaggcgct

SEQ ID NO: 3590731 - DNA, 25 bp, Homo sapien
catatcgtccttcacagctcaggtg

SEQ ID NO: 3590732 - DNA, 25 bp, Homo sapien
ggcgctccacgatagcactgtgcac

SEQ ID NO: 3590733 - DNA, 25 bp, Homo sapien
tcaggtggtgttggcggcagacagc

SEQ ID NO: 3590734 - DNA, 25 bp, Homo sapien
ttaccggacacaatgattgctgcct

SEQ ID NO: 3590735 - DNA, 25 bp, Homo sapien
cttaccggacacaatgattgctgcc

SEQ ID NO: 3590736 - DNA, 25 bp, Homo sapien
gaggtattaatagagaggactcccc

SEQ ID NO: 3590737 - DNA, 25 bp, Homo sapien
gaaagaggctactgctggctattgc

SEQ ID NO: 3590738 - DNA, 25 bp, Homo sapien
gacaatgtgagctcagtgttcaggg

SEQ ID NO: 3590739 - DNA, 25 bp, Homo sapien
ggtactttgtaaacacacgatctgg

SEQ ID NO: 3590740 - DNA, 25 bp, Homo sapien
ctagttgtttccgacaattctttat

SEQ ID NO: 3590741 - DNA, 25 bp, Homo sapien
agttgtttccgacaattctttatgg

SEQ ID NO: 3590742 - DNA, 25 bp, Homo sapien
ccgacaattctttatggggatgttt

SEQ ID NO: 3590743 - DNA, 25 bp, Homo sapien
ttccgacaattctttatggggatgt

SEQ ID NO: 3590744 - DNA, 25 bp, Homo sapien
tcgctagccactgagagagatcctt

SEQ ID NO: 3590745 - DNA, 25 bp, Homo sapien
aaattgcaccgagtcatgtccagcc

SEQ ID NO: 3590746 - DNA, 25 bp, Homo sapien
gagtcacggcgatacacaggctttc

SEQ ID NO: 3590747 - DNA, 25 bp, Homo sapien
tctggactcgcaataagcaatctgg

SEQ ID NO: 3590748 - DNA, 25 bp, Homo sapien
gaaaaaagcattcctctacttagaa

SEQ ID NO: 3590749 - DNA, 25 bp, Homo sapien
gactctagaggcctgaaatctattt

SEQ ID NO: 3590750 - DNA, 25 bp, Homo sapien
gaatgtgagggttgaaagactctag

SEQ ID NO: 3590751 - DNA, 25 bp, Homo sapien
aatgatatatgaggtttcttccatg

SEQ ID NO: 3590752 - DNA, 25 bp, Homo sapien
caacagctcattcacttgacagtca

SEQ ID NO: 3590753 - DNA, 25 bp, Homo sapien
gacagtcatctgttataaagccatt

SEQ ID NO: 3590754 - DNA, 25 bp, Homo sapien
taaactgacaggatatcaacagctc

SEQ ID NO: 3590755 - DNA, 25 bp, Homo sapien
gacaggaattccgtaaaaatacatg

SEQ ID NO: 3590756 - DNA, 25 bp, Homo sapien
gtacatcagataaaagtttaattag

SEQ ID NO: 3590757 - DNA, 25 bp, Homo sapien
aaagtttaattagagtgtagagtgc

SEQ ID NO: 3590758 - DNA, 25 bp, Homo sapien
gtttaattagagtgtagagtgccac

SEQ ID NO: 3590759 - DNA, 25 bp, Homo sapien
tttaattagagtgtagagtgccact

SEQ ID NO: 3590760 - DNA, 25 bp, Homo sapien
ccatgaagatatagataaaatgtac

SEQ ID NO: 3590761 - DNA, 25 bp, Homo sapien
taaaatgtacaaacatgtcacatga

SEQ ID NO: 3590762 - DNA, 25 bp, Homo sapien
tacaaacatgtcacatgatacagaa

SEQ ID NO: 3590763 - DNA, 25 bp, Homo sapien
aaaatattttgccatgaagatatag

SEQ ID NO: 3590764 - DNA, 25 bp, Homo sapien
tctcttcttgaaagtaatccgcaaa

SEQ ID NO: 3590765 - DNA, 25 bp, Homo sapien
cttgaaagtaatccgcaaaattgag

SEQ ID NO: 3590766 - DNA, 25 bp, Homo sapien
agtaatccgcaaaattgagatattc

SEQ ID NO: 3590767 - DNA, 25 bp, Homo sapien
ccgcaaaattgagatattcttcaag

SEQ ID NO: 3590768 - DNA, 25 bp, Homo sapien
aaggctctgctaatgactgtctagg

SEQ ID NO: 3590769 - DNA, 25 bp, Homo sapien
taataagtgccaaagaggtacagac

SEQ ID NO: 3590770 - DNA, 25 bp, Homo sapien
agagctaagactgaaccaaagaggc

SEQ ID NO: 3590771 - DNA, 25 bp, Homo sapien
tgcccctaaggagaatacagttcag

SEQ ID NO: 3590772 - DNA, 25 bp, Homo sapien
agggttggcaacacttaaaggcatc

SEQ ID NO: 3590773 - DNA, 25 bp, Homo sapien
ccaggcaatggatctcaagttaggc

SEQ ID NO: 3590774 - DNA, 25 bp, Homo sapien
tttgcagttccactagagggttggc

SEQ ID NO: 3590775 - DNA, 25 bp, Homo sapien
tcattatctagactgggagacctcc

SEQ ID NO: 3590776 - DNA, 25 bp, Homo sapien
cagactggcaccaggtgcttcttca

SEQ ID NO: 3590777 - DNA, 25 bp, Homo sapien
gactggcaccaggtgcttcttcact

SEQ ID NO: 3590778 - DNA, 25 bp, Homo sapien
tcagactggcaccaggtgcttcttc

SEQ ID NO: 3590779 - DNA, 25 bp, Homo sapien
ctggcaccaggtgcttcttcactct

SEQ ID NO: 3590780 - DNA, 25 bp, Homo sapien
cttcttctgtcattgcaatggtgca

SEQ ID NO: 3590781 - DNA, 25 bp, Homo sapien
gcaatggtgcaacattcctggtata

SEQ ID NO: 3590782 - DNA, 25 bp, Homo sapien
ggtacggctggcacaaattctgcca

SEQ ID NO: 3590783 - DNA, 25 bp, Homo sapien
cattttcttttgaccgcctgaaaat

SEQ ID NO: 3590784 - DNA, 25 bp, Homo sapien
tatctgacaacgaatatatatcctt

SEQ ID NO: 3590785 - DNA, 25 bp, Homo sapien
taaagattgttatctgacaacgaat

SEQ ID NO: 3590786 - DNA, 25 bp, Homo sapien
gattgttatctgacaacgaatatat

SEQ ID NO: 3590787 - DNA, 25 bp, Homo sapien
aataaagattgttatctgacaacga

SEQ ID NO: 3590788 - DNA, 25 bp, Homo sapien
cctaagttcactaatgggttatgct

SEQ ID NO: 3590789 - DNA, 25 bp, Homo sapien
gggttatgctttcatgagtactagt

SEQ ID NO: 3590790 - DNA, 25 bp, Homo sapien
ctgaggccacactgcaaggaaacat

SEQ ID NO: 3590791 - DNA, 25 bp, Homo sapien
gatatggtcaatcttactctcatgg

SEQ ID NO: 3590792 - DNA, 25 bp, Homo sapien
tcagtatgaaccaagtgatcgcaca

SEQ ID NO: 3590793 - DNA, 25 bp, Homo sapien
acctatatggaagggcatcactgct

SEQ ID NO: 3590794 - DNA, 25 bp, Homo sapien
gactggcccactatgcacggttaag

SEQ ID NO: 3590795 - DNA, 25 bp, Homo sapien
ctcttatttataggcagaggagcca

SEQ ID NO: 3590796 - DNA, 25 bp, Homo sapien
tttaatgctctggatcataactagg

SEQ ID NO: 3590797 - DNA, 25 bp, Homo sapien
aaatttttgtaagtcattcttcact

SEQ ID NO: 3590798 - DNA, 25 bp, Homo sapien
cattgtattgaagtaggatgtaaga

SEQ ID NO: 3590799 - DNA, 25 bp, Homo sapien
aatcacactctcttaacatacccaa

SEQ ID NO: 3590800 - DNA, 25 bp, Homo sapien
ttacagtagcgatgcagtccacaag

SEQ ID NO: 3590801 - DNA, 25 bp, Homo sapien
tgcatggtcctggtgttatacaact

SEQ ID NO: 3590802 - DNA, 25 bp, Homo sapien
caactctcctgataaatgcactgaa

SEQ ID NO: 3590803 - DNA, 25 bp, Homo sapien
tggcaggaacagttttcaggattct

SEQ ID NO: 3590804 - DNA, 25 bp, Homo sapien
caaagcggttatccaaataatgaag

SEQ ID NO: 3590805 - DNA, 25 bp, Homo sapien
tctagacgaggctgaacaaagcggt

SEQ ID NO: 3590806 - DNA, 25 bp, Homo sapien
tgcatatgatttttgccttgtgcca

SEQ ID NO: 3590807 - DNA, 25 bp, Homo sapien
tattgctctttccaacgacttctag

SEQ ID NO: 3590808 - DNA, 25 bp, Homo sapien
ttttacatgaatggagttttgatgt

SEQ ID NO: 3590809 - DNA, 25 bp, Homo sapien
gaatggagttttgatgtagttgatc

SEQ ID NO: 3590810 - DNA, 25 bp, Homo sapien
catatctcagataatgaacactaac

SEQ ID NO: 3590811 - DNA, 25 bp, Homo sapien
cagataatgaacactaacaagcatt

SEQ ID NO: 3590812 - DNA, 25 bp, Homo sapien
aagcgttgatcagaagagccttcac

SEQ ID NO: 3590813 - DNA, 25 bp, Homo sapien
aaagattcatctaaagcgttgatca

SEQ ID NO: 3590814 - DNA, 25 bp, Homo sapien
taatgttcccagaaaagattcatct

SEQ ID NO: 3590815 - DNA, 25 bp, Homo sapien
tgagtatagtggtcactaaaagaat

SEQ ID NO: 3590816 - DNA, 25 bp, Homo sapien
gagaagtcttgtccctaaccataag

SEQ ID NO: 3590817 - DNA, 25 bp, Homo sapien
caacaagcctgtgggatactaccat

SEQ ID NO: 3590818 - DNA, 25 bp, Homo sapien
tgaatgtccttatgcccagtgctac

SEQ ID NO: 3590819 - DNA, 25 bp, Homo sapien
gctgctctatttcaaagaccctgag

SEQ ID NO: 3590820 - DNA, 25 bp, Homo sapien
aggtactaaaaaatgagccctgttg

SEQ ID NO: 3590821 - DNA, 25 bp, Homo sapien
agccctgttgtgaagtatgaactac

SEQ ID NO: 3590822 - DNA, 25 bp, Homo sapien
cagggcattttgaggacaatgaaac

SEQ ID NO: 3590823 - DNA, 25 bp, Homo sapien
aaacatcagtgattcagaggaggga

SEQ ID NO: 3590824 - DNA, 25 bp, Homo sapien
gatagtgcccaagtccatttaagga

SEQ ID NO: 3590825 - DNA, 25 bp, Homo sapien
accttgttcctaccagagctgtaaa

SEQ ID NO: 3590826 - DNA, 25 bp, Homo sapien
tcaaagtgtttgtccgcagacccct

SEQ ID NO: 3590827 - DNA, 25 bp, Homo sapien
catgtaagtaacgtcctatctctga

SEQ ID NO: 3590828 - DNA, 25 bp, Homo sapien
taaaagcagtgatgggtaaggcagc

SEQ ID NO: 3590829 - DNA, 25 bp, Homo sapien
gaacaattcggtgttttgtcgccaa

SEQ ID NO: 3590830 - DNA, 25 bp, Homo sapien
tccagctacctgtgtgaggcaaaat

SEQ ID NO: 3590831 - DNA, 25 bp, Homo sapien
gcagctggccccttaacttgaatca

SEQ ID NO: 3590832 - DNA, 25 bp, Homo sapien
tgaaacattttcttaatattgaact

SEQ ID NO: 3590833 - DNA, 25 bp, Homo sapien
caattcatgaaacattttcttaata

SEQ ID NO: 3590834 - DNA, 25 bp, Homo sapien
catgaaacattttcttaatattgaa

SEQ ID NO: 3590835 - DNA, 25 bp, Homo sapien
tcatgaaacattttcttaatattga

SEQ ID NO: 3590836 - DNA, 25 bp, Homo sapien
caaagtcatcgataatataatcatc

SEQ ID NO: 3590837 - DNA, 25 bp, Homo sapien
tcatcttgcactacaaagtcatcga

SEQ ID NO: 3590838 - DNA, 25 bp, Homo sapien
tcctcatcaacttcatcactgcttg

SEQ ID NO: 3590839 - DNA, 25 bp, Homo sapien
gcactacaaagtcatcgataatata

SEQ ID NO: 3590840 - DNA, 25 bp, Homo sapien
taactaggatatcgctgtcatcact

SEQ ID NO: 3590841 - DNA, 25 bp, Homo sapien
tagttcgcctccaatcaactcgaga

SEQ ID NO: 3590842 - DNA, 25 bp, Homo sapien
cgagatttctgctcaggcacgtgac

SEQ ID NO: 3590843 - DNA, 25 bp, Homo sapien
tcatatgttgaaccgttgccagagt

SEQ ID NO: 3590844 - DNA, 25 bp, Homo sapien
gaaaaatcatggtgctgtccttcag

SEQ ID NO: 3590845 - DNA, 25 bp, Homo sapien
cagggagatcagtaaggcaagtgct

SEQ ID NO: 3590846 - DNA, 25 bp, Homo sapien
gctgcaagggatacatagaaaaatc

SEQ ID NO: 3590847 - DNA, 25 bp, Homo sapien
tcaggcaagtaatatggtaagggca

SEQ ID NO: 3590848 - DNA, 25 bp, Homo sapien
ttctgaaggtaattacaaaaattca

SEQ ID NO: 3590849 - DNA, 25 bp, Homo sapien
attttttgagcaatgggaatcttac

SEQ ID NO: 3590850 - DNA, 25 bp, Homo sapien
tcggttataaggacctgttagcagc

SEQ ID NO: 3590851 - DNA, 25 bp, Homo sapien
tcaaaaaatgtgctgcgaattctga

SEQ ID NO: 3590852 - DNA, 25 bp, Homo sapien
cagctttccaagaggattacttttt

SEQ ID NO: 3590853 - DNA, 25 bp, Homo sapien
ggactatgtttccagctttccaaga

SEQ ID NO: 3590854 - DNA, 25 bp, Homo sapien
ttccagctttccaagaggattactt

SEQ ID NO: 3590855 - DNA, 25 bp, Homo sapien
cggactatgtttccagctttccaag

SEQ ID NO: 3590856 - DNA, 25 bp, Homo sapien
ttacccttgggttgcatcttacaaa

SEQ ID NO: 3590857 - DNA, 25 bp, Homo sapien
ttttgtgtacactatactgcgttac

SEQ ID NO: 3590858 - DNA, 25 bp, Homo sapien
gggctcaagcgatatgtttcgattt

SEQ ID NO: 3590859 - DNA, 25 bp, Homo sapien
gcatgagccattgcccaaagtataa

SEQ ID NO: 3590860 - DNA, 25 bp, Homo sapien
cgggtctcttgattccccgtccagt

SEQ ID NO: 3590861 - DNA, 25 bp, Homo sapien
cccgtccagtgccacacaatgacgg

SEQ ID NO: 3590862 - DNA, 25 bp, Homo sapien
cagggattagaaaccgggtctcttg

SEQ ID NO: 3590863 - DNA, 25 bp, Homo sapien
cgaagatcacgcagcttgttagtga

SEQ ID NO: 3590864 - DNA, 25 bp, Homo sapien
tatgtaaccgaattttactgcacga

SEQ ID NO: 3590865 - DNA, 25 bp, Homo sapien
ctgcacgagttaggccagaaacttc

SEQ ID NO: 3590866 - DNA, 25 bp, Homo sapien
agtatttgcagacttccctcttatc

SEQ ID NO: 3590867 - DNA, 25 bp, Homo sapien
cattcatgctgtattttagtttcag

SEQ ID NO: 3590868 - DNA, 25 bp, Homo sapien
tcagaagaaatatagttccttctaa

SEQ ID NO: 3590869 - DNA, 25 bp, Homo sapien
aatatagttccttctaaactttgag

SEQ ID NO: 3590870 - DNA, 25 bp, Homo sapien
ttgaaaggcagtggaaccccaggtc

SEQ ID NO: 3590871 - DNA, 25 bp, Homo sapien
tgaaattctaccaggagggatccat

SEQ ID NO: 3590872 - DNA, 25 bp, Homo sapien
tgctgtataaacaatgcaggtggta

SEQ ID NO: 3590873 - DNA, 25 bp, Homo sapien
gggtgtaaaacatcactcctcttcg

SEQ ID NO: 3590874 - DNA, 25 bp, Homo sapien
taatacacgatttgagggctacagt

SEQ ID NO: 3590875 - DNA, 25 bp, Homo sapien
tgctaggaactgtgctgccaccatt

SEQ ID NO: 3590876 - DNA, 25 bp, Homo sapien
tctgatgaaattactagggacacca

SEQ ID NO: 3590877 - DNA, 25 bp, Homo sapien
tatctaccaaaatgcaagcacctgc

SEQ ID NO: 3590878 - DNA, 25 bp, Homo sapien
ttagaatcacagtccaacagtccac

SEQ ID NO: 3590879 - DNA, 25 bp, Homo sapien
cgttaacaatgaaggttaatgcagc

SEQ ID NO: 3590880 - DNA, 25 bp, Homo sapien
gagtggtagacagtggaatagatcc

SEQ ID NO: 3590881 - DNA, 25 bp, Homo sapien
cacaatttcgcaaagtggatcctgc

SEQ ID NO: 3590882 - DNA, 25 bp, Homo sapien
ctctttggcgggacgcaggaaccca

SEQ ID NO: 3590883 - DNA, 25 bp, Homo sapien
tctttggcgggacgcaggaacccag

SEQ ID NO: 3590884 - DNA, 25 bp, Homo sapien
acccagcgcccgctagcccactagt

SEQ ID NO: 3590885 - DNA, 25 bp, Homo sapien
tagcccactagtccgtcactctgcc

SEQ ID NO: 3590886 - DNA, 25 bp, Homo sapien
tcataaaccattagcaccgggagcg

SEQ ID NO: 3590887 - DNA, 25 bp, Homo sapien
gaaaggccagaaacccgagaaatca

SEQ ID NO: 3590888 - DNA, 25 bp, Homo sapien
aagcttcgcgatgacgcgcgcagga

SEQ ID NO: 3590889 - DNA, 25 bp, Homo sapien
aatttttctcttagtccgcgaggag

SEQ ID NO: 3590890 - DNA, 25 bp, Homo sapien
ccctgccccggcaaccagctcagga

SEQ ID NO: 3590891 - DNA, 25 bp, Homo sapien
gccccggcaaccagctcaggacaag

SEQ ID NO: 3590892 - DNA, 25 bp, Homo sapien
ctgccccggcaaccagctcaggaca

SEQ ID NO: 3590893 - DNA, 25 bp, Homo sapien
tgccccggcaaccagctcaggacaa

SEQ ID NO: 3590894 - DNA, 25 bp, Homo sapien
gctgatctataaagaggcattctga

SEQ ID NO: 3590895 - DNA, 25 bp, Homo sapien
tctcttacatttgtgtgggttgcaa

SEQ ID NO: 3590896 - DNA, 25 bp, Homo sapien
gatatgagctcccaccttatatggg

SEQ ID NO: 3590897 - DNA, 25 bp, Homo sapien
tatacaaagggaataaataggctga

SEQ ID NO: 3590898 - DNA, 25 bp, Homo sapien
aaaattaatcatgtcagcccaatgc

SEQ ID NO: 3590899 - DNA, 25 bp, Homo sapien
aaattaatcatgtcagcccaatgca

SEQ ID NO: 3590900 - DNA, 25 bp, Homo sapien
taaaattaatcatgtcagcccaatg

SEQ ID NO: 3590901 - DNA, 25 bp, Homo sapien
tttaaaattaatcatgtcagcccaa

SEQ ID NO: 3590902 - DNA, 25 bp, Homo sapien
taatcagggagcctgtaaaagccca

SEQ ID NO: 3590903 - DNA, 25 bp, Homo sapien
aagcaggcttgcagctacacaggga

SEQ ID NO: 3590904 - DNA, 25 bp, Homo sapien
tcaggaagcatggattcagacggct

SEQ ID NO: 3590905 - DNA, 25 bp, Homo sapien
caggactgacttccatgggtgccaa

SEQ ID NO: 3590906 - DNA, 25 bp, Homo sapien
tttccgaccaagacacaagcattgc

SEQ ID NO: 3590907 - DNA, 25 bp, Homo sapien
gatgatcgctacaatgttaactgtc

SEQ ID NO: 3590908 - DNA, 25 bp, Homo sapien
cagcttgccggcgtggtgtactttg

SEQ ID NO: 3590909 - DNA, 25 bp, Homo sapien
ccctctgtttggcaagatgatcgct

SEQ ID NO: 3590910 - DNA, 25 bp, Homo sapien
cagtggcccagctgtactcggaatc

SEQ ID NO: 3590911 - DNA, 25 bp, Homo sapien
gctgtactcggaatcgactctcttt

SEQ ID NO: 3590912 - DNA, 25 bp, Homo sapien
cttctggctcattgacaggctgtcc

SEQ ID NO: 3590913 - DNA, 25 bp, Homo sapien
tctgttagccccttctggctcattg

SEQ ID NO: 3590914 - DNA, 25 bp, Homo sapien
gaggttgagtctacagcgagctgag

SEQ ID NO: 3590915 - DNA, 25 bp, Homo sapien
ggaggttgagtctacagcgagctga

SEQ ID NO: 3590916 - DNA, 25 bp, Homo sapien
ttccaggatcagatgggatcaggtg

SEQ ID NO: 3590917 - DNA, 25 bp, Homo sapien
ggatcagatgggatcaggtgtattc

SEQ ID NO: 3590918 - DNA, 25 bp, Homo sapien
ccaggatcagatgggatcaggtgta

SEQ ID NO: 3590919 - DNA, 25 bp, Homo sapien
caggtgtattcagggtggtacagcc

SEQ ID NO: 3590920 - DNA, 25 bp, Homo sapien
cagtgaccagatttagaggaaaccc

SEQ ID NO: 3590921 - DNA, 25 bp, Homo sapien
tacttaagccttggtcagaatccag

SEQ ID NO: 3590922 - DNA, 25 bp, Homo sapien
ggctcaaagctgaatcgaatggcta

SEQ ID NO: 3590923 - DNA, 25 bp, Homo sapien
ttaggactccttgagcgctccctga

SEQ ID NO: 3590924 - DNA, 25 bp, Homo sapien
gaagagctttttcatccctagataa

SEQ ID NO: 3590925 - DNA, 25 bp, Homo sapien
tatcttctaagggtgaatgactcac

SEQ ID NO: 3590926 - DNA, 25 bp, Homo sapien
tcttgacacctgtttagcttgaggt

SEQ ID NO: 3590927 - DNA, 25 bp, Homo sapien
gatttcagtgacttaagcagctcaa

SEQ ID NO: 3590928 - DNA, 25 bp, Homo sapien
gaaggatatcaaaatattctcagtg

SEQ ID NO: 3590929 - DNA, 25 bp, Homo sapien
tatcgtgatgatagcaccaagagag

SEQ ID NO: 3590930 - DNA, 25 bp, Homo sapien
cagatttgctacaatgatgagatat

SEQ ID NO: 3590931 - DNA, 25 bp, Homo sapien
catatatccctctgcattagtccat

SEQ ID NO: 3590932 - DNA, 25 bp, Homo sapien
cagggcttggcgaactccattaaaa

SEQ ID NO: 3590933 - DNA, 25 bp, Homo sapien
cattaaaaccgaatgccgtattcac

SEQ ID NO: 3590934 - DNA, 25 bp, Homo sapien
ctcctcgagacaccactctggatgt

SEQ ID NO: 3590935 - DNA, 25 bp, Homo sapien
cactctggatgtctcgtctggaacc

SEQ ID NO: 3590936 - DNA, 25 bp, Homo sapien
tccaccaagtccggtatcagcgcct

SEQ ID NO: 3590937 - DNA, 25 bp, Homo sapien
accaagtccggtatcagcgcctcca

SEQ ID NO: 3590938 - DNA, 25 bp, Homo sapien
caagtccggtatcagcgcctccagg

SEQ ID NO: 3590939 - DNA, 25 bp, Homo sapien
cccttgtccaggcagccacctagaa

SEQ ID NO: 3590940 - DNA, 25 bp, Homo sapien
taaacaatggacagcatcctggatg

SEQ ID NO: 3590941 - DNA, 25 bp, Homo sapien
catcctggatgatgagtgagtttac

SEQ ID NO: 3590942 - DNA, 25 bp, Homo sapien
cctggatgatgagtgagtttacttc

SEQ ID NO: 3590943 - DNA, 25 bp, Homo sapien
agcccaagggcctaggtaaacaatg

SEQ ID NO: 3590944 - DNA, 25 bp, Homo sapien
gttttgctgcagtgtcacacagagt

SEQ ID NO: 3590945 - DNA, 25 bp, Homo sapien
gaagggtatctaatggtcttcttta

SEQ ID NO: 3590946 - DNA, 25 bp, Homo sapien
ggttaatgaagggtatctaatggtc

SEQ ID NO: 3590947 - DNA, 25 bp, Homo sapien
tgtaaagtagatggtaaggctgctg

SEQ ID NO: 3590948 - DNA, 25 bp, Homo sapien
ttcttcttggttaatgaagggtatc

SEQ ID NO: 3590949 - DNA, 25 bp, Homo sapien
cagtgatagtcacagtattggaccc

SEQ ID NO: 3590950 - DNA, 25 bp, Homo sapien
tccaaggttcaagctgagtctcctg

SEQ ID NO: 3590951 - DNA, 25 bp, Homo sapien
gggcaaggagaacgcttcagattac

SEQ ID NO: 3590952 - DNA, 25 bp, Homo sapien
tcatcccttacagcttaaaactggg

SEQ ID NO: 3590953 - DNA, 25 bp, Homo sapien
aacagctctcacgtacatatgccag

SEQ ID NO: 3590954 - DNA, 25 bp, Homo sapien
cagagatccttagagtgttggcaat

SEQ ID NO: 3590955 - DNA, 25 bp, Homo sapien
tttgtatctccaagcagagatggcc

SEQ ID NO: 3590956 - DNA, 25 bp, Homo sapien
gaaagtgtgtgtggatcatctcaaa

SEQ ID NO: 3590957 - DNA, 25 bp, Homo sapien
ttatattcccacctacactgtaaaa

SEQ ID NO: 3590958 - DNA, 25 bp, Homo sapien
atttatattcccacctacactgtaa

SEQ ID NO: 3590959 - DNA, 25 bp, Homo sapien
tatattcccacctacactgtaaaag

SEQ ID NO: 3590960 - DNA, 25 bp, Homo sapien
tattcccacctacactgtaaaagca

SEQ ID NO: 3590961 - DNA, 25 bp, Homo sapien
gagactgtctagtgtgagcttcagc

SEQ ID NO: 3590962 - DNA, 25 bp, Homo sapien
gcaggcaactgaggaagaattttct

SEQ ID NO: 3590963 - DNA, 25 bp, Homo sapien
cttgacgtatttgtctccccacggg

SEQ ID NO: 3590964 - DNA, 25 bp, Homo sapien
tttcctttagcatcaggagactgtc

SEQ ID NO: 3590965 - DNA, 25 bp, Homo sapien
gatggtgccatggttcagtgaatct

SEQ ID NO: 3590966 - DNA, 25 bp, Homo sapien
ggtgccatggttcagtgaatcttcc

SEQ ID NO: 3590967 - DNA, 25 bp, Homo sapien
ttgatggtgccatggttcagtgaat

SEQ ID NO: 3590968 - DNA, 25 bp, Homo sapien
tgccatggttcagtgaatcttccat

SEQ ID NO: 3590969 - DNA, 25 bp, Homo sapien
tgtaaccgaacaatcagcttgaagc

SEQ ID NO: 3590970 - DNA, 25 bp, Homo sapien
tttgggccgcagaagtcatcatgac

SEQ ID NO: 3590971 - DNA, 25 bp, Homo sapien
tcatcatgacagacgtagttcctac

SEQ ID NO: 3590972 - DNA, 25 bp, Homo sapien
tttgcccagacatgagaagactatc

SEQ ID NO: 3590973 - DNA, 25 bp, Homo sapien
ctatatccgatataaaacctggttt

SEQ ID NO: 3590974 - DNA, 25 bp, Homo sapien
tatttctcatgtcgacaccatcttg

SEQ ID NO: 3590975 - DNA, 25 bp, Homo sapien
atccctgacttggatatatttcttt

SEQ ID NO: 3590976 - DNA, 25 bp, Homo sapien
tacactatatccgatataaaacctg

SEQ ID NO: 3590977 - DNA, 25 bp, Homo sapien
tcttcagcttcatatggtatccaca

SEQ ID NO: 3590978 - DNA, 25 bp, Homo sapien
tcagcttcatatggtatccacaggg

SEQ ID NO: 3590979 - DNA, 25 bp, Homo sapien
tatggtatccacagggtcacatcca

SEQ ID NO: 3590980 - DNA, 25 bp, Homo sapien
ttcatatggtatccacagggtcaca

SEQ ID NO: 3590981 - DNA, 25 bp, Homo sapien
ctctgccacaaggtattgatattag

SEQ ID NO: 3590982 - DNA, 25 bp, Homo sapien
gattttagttgcacaagtcctgtta

SEQ ID NO: 3590983 - DNA, 25 bp, Homo sapien
cacatgtaacacctgctgatggaat

SEQ ID NO: 3590984 - DNA, 25 bp, Homo sapien
tgatattagaggtgaaatcatgctc

SEQ ID NO: 3590985 - DNA, 25 bp, Homo sapien
ttccctgatgtttctggcacaggtg

SEQ ID NO: 3590986 - DNA, 25 bp, Homo sapien
caggcagctgtattggataggtgca

SEQ ID NO: 3590987 - DNA, 25 bp, Homo sapien
caatatttaggatagatcactacca

SEQ ID NO: 3590988 - DNA, 25 bp, Homo sapien
catagcttctgccttagattctggc

SEQ ID NO: 3590989 - DNA, 25 bp, Homo sapien
caagtagagactcaactttagcgag

SEQ ID NO: 3590990 - DNA, 25 bp, Homo sapien
cgagaagcgtacataaaacttaggc

SEQ ID NO: 3590991 - DNA, 25 bp, Homo sapien
gactcaactttagcgagaagcgtac

SEQ ID NO: 3590992 - DNA, 25 bp, Homo sapien
tgtagtgtccaagaggtccaagtag

SEQ ID NO: 3590993 - DNA, 25 bp, Homo sapien
ttaataacagggaaaggcatggagg

SEQ ID NO: 3590994 - DNA, 25 bp, Homo sapien
tggagggatgagcatcatactgagc

SEQ ID NO: 3590995 - DNA, 25 bp, Homo sapien
caaagcgcagtcatgccagtggagc

SEQ ID NO: 3590996 - DNA, 25 bp, Homo sapien
gcttggtagccttgacagagaacag

SEQ ID NO: 3590997 - DNA, 25 bp, Homo sapien
gactatagatcttctgtaggtggct

SEQ ID NO: 3590998 - DNA, 25 bp, Homo sapien
ctatagatcttctgtaggtggcttc

SEQ ID NO: 3590999 - DNA, 25 bp, Homo sapien
actatagatcttctgtaggtggctt

SEQ ID NO: 3591000 - DNA, 25 bp, Homo sapien
tatagatcttctgtaggtggcttca

SEQ ID NO: 3591001 - DNA, 25 bp, Homo sapien
tatgaacttggtcaggctccagatg

SEQ ID NO: 3591002 - DNA, 25 bp, Homo sapien
ggttatgaacttggtcaggctccag

SEQ ID NO: 3591003 - DNA, 25 bp, Homo sapien
gttatgaacttggtcaggctccaga

SEQ ID NO: 3591004 - DNA, 25 bp, Homo sapien
atgaacttggtcaggctccagatgc

SEQ ID NO: 3591005 - DNA, 25 bp, Homo sapien
agcgtgtgttgggtatgcatgaata

SEQ ID NO: 3591006 - DNA, 25 bp, Homo sapien
ggtatgcatgaataattcgcaccat

SEQ ID NO: 3591007 - DNA, 25 bp, Homo sapien
gagagaggcagcgtgtgttgggtat

SEQ ID NO: 3591008 - DNA, 25 bp, Homo sapien
taatgggagggtcatgcaggaggag

SEQ ID NO: 3591009 - DNA, 25 bp, Homo sapien
cctggtagtatgctagacaccgtca

SEQ ID NO: 3591010 - DNA, 25 bp, Homo sapien
tcactaatggttggacattcagacc

SEQ ID NO: 3591011 - DNA, 25 bp, Homo sapien
tcttctccttttcactaatggttgg

SEQ ID NO: 3591012 - DNA, 25 bp, Homo sapien
cattcagacctggtagtatgctaga

SEQ ID NO: 3591013 - DNA, 25 bp, Homo sapien
cctccatgacagttgctctggctct

SEQ ID NO: 3591014 - DNA, 25 bp, Homo sapien
tggctctgagtatggtatccagaaa

SEQ ID NO: 3591015 - DNA, 25 bp, Homo sapien
tgctctggctctgagtatggtatcc

SEQ ID NO: 3591016 - DNA, 25 bp, Homo sapien
ctccatgacagttgctctggctctg

SEQ ID NO: 3591017 - DNA, 25 bp, Homo sapien
ctgtgcagtgtcataaaagtccaga

SEQ ID NO: 3591018 - DNA, 25 bp, Homo sapien
ccaactgtgcagtgtcataaaagtc

SEQ ID NO: 3591019 - DNA, 25 bp, Homo sapien
gtttaacattggtgataacaaatac

SEQ ID NO: 3591020 - DNA, 25 bp, Homo sapien
aactgtgcagtgtcataaaagtcca

SEQ ID NO: 3591021 - DNA, 25 bp, Homo sapien
attaagtttcctgtgtagcaaagaa

SEQ ID NO: 3591022 - DNA, 25 bp, Homo sapien
tcatttgggctgttattaagattct

SEQ ID NO: 3591023 - DNA, 25 bp, Homo sapien
aagaattaagtttcctgtgtagcaa

SEQ ID NO: 3591024 - DNA, 25 bp, Homo sapien
ttggtgttgatatcatttgggctgt

SEQ ID NO: 3591025 - DNA, 25 bp, Homo sapien
acaagctgagaattgtgtaagttac

SEQ ID NO: 3591026 - DNA, 25 bp, Homo sapien
agtatacaagctgagaattgtgtaa

SEQ ID NO: 3591027 - DNA, 25 bp, Homo sapien
aagctgagaattgtgtaagttactg

SEQ ID NO: 3591028 - DNA, 25 bp, Homo sapien
catagtatacaagctgagaattgtg

SEQ ID NO: 3591029 - DNA, 25 bp, Homo sapien
tttcagggactggtttgttaccaga

SEQ ID NO: 3591030 - DNA, 25 bp, Homo sapien
tgtcgtttcagggactggtttgtta

SEQ ID NO: 3591031 - DNA, 25 bp, Homo sapien
ttcagggactggtttgttaccagaa

SEQ ID NO: 3591032 - DNA, 25 bp, Homo sapien
ctattgtcgtttcagggactggttt

SEQ ID NO: 3591033 - DNA, 25 bp, Homo sapien
tgtgaccgactcatgaaatatgtgc

SEQ ID NO: 3591034 - DNA, 25 bp, Homo sapien
ccgactcatgaaatatgtgcttgcc

SEQ ID NO: 3591035 - DNA, 25 bp, Homo sapien
cattatttcctgtgaccgactcatg

SEQ ID NO: 3591036 - DNA, 25 bp, Homo sapien
tcctgtgaccgactcatgaaatatg

SEQ ID NO: 3591037 - DNA, 25 bp, Homo sapien
ctgtgttccattgttaggctgtgcc

SEQ ID NO: 3591038 - DNA, 25 bp, Homo sapien
tgctgtgttccattgttaggctgtg

SEQ ID NO: 3591039 - DNA, 25 bp, Homo sapien
cagctgctgtgttccattgttaggc

SEQ ID NO: 3591040 - DNA, 25 bp, Homo sapien
gctgctgtgttccattgttaggctg

SEQ ID NO: 3591041 - DNA, 25 bp, Homo sapien
tggaattcatgcacaggaagcatag

SEQ ID NO: 3591042 - DNA, 25 bp, Homo sapien
ccacatgcgttgtttctgaataaag

SEQ ID NO: 3591043 - DNA, 25 bp, Homo sapien
tattgtccacatgcgttgtttctga

SEQ ID NO: 3591044 - DNA, 25 bp, Homo sapien
gaataaagtgtctgctgctacctgg

SEQ ID NO: 3591045 - DNA, 25 bp, Homo sapien
gcataagttgttgcaatgtcaaata

SEQ ID NO: 3591046 - DNA, 25 bp, Homo sapien
agcacttggcataagttgttgcaat

SEQ ID NO: 3591047 - DNA, 25 bp, Homo sapien
cttggcataagttgttgcaatgtca

SEQ ID NO: 3591048 - DNA, 25 bp, Homo sapien
tggcataagttgttgcaatgtcaaa

SEQ ID NO: 3591049 - DNA, 25 bp, Homo sapien
tttaatgtcatacacgtcttgaatc

SEQ ID NO: 3591050 - DNA, 25 bp, Homo sapien
gtcatacacgtcttgaatcagaaaa

SEQ ID NO: 3591051 - DNA, 25 bp, Homo sapien
gaaaagcatgagtgtataatttctc

SEQ ID NO: 3591052 - DNA, 25 bp, Homo sapien
catttttaatgtcatacacgtcttg

SEQ ID NO: 3591053 - DNA, 25 bp, Homo sapien
acttttgtgtataactttctattca

SEQ ID NO: 3591054 - DNA, 25 bp, Homo sapien
cttttgtgtataactttctattcat

SEQ ID NO: 3591055 - DNA, 25 bp, Homo sapien
tatctagtcgaaggacgaaccaact

SEQ ID NO: 3591056 - DNA, 25 bp, Homo sapien
ctagtcgaaggacgaaccaacttat

SEQ ID NO: 3591057 - DNA, 25 bp, Homo sapien
tctagtcgaaggacgaaccaactta

SEQ ID NO: 3591058 - DNA, 25 bp, Homo sapien
atatctagtcgaaggacgaaccaac

SEQ ID NO: 3591059 - DNA, 25 bp, Homo sapien
cttttgttccataccaggaagtggg

SEQ ID NO: 3591060 - DNA, 25 bp, Homo sapien
cttcgcaatactgcacatgggtaat

SEQ ID NO: 3591061 - DNA, 25 bp, Homo sapien
ggaaactgcccagatggatcataca

SEQ ID NO: 3591062 - DNA, 25 bp, Homo sapien
tctgggattctgatatgaggtacgt

SEQ ID NO: 3591063 - DNA, 25 bp, Homo sapien
tgaagcacaaactgtcagaatccag

SEQ ID NO: 3591064 - DNA, 25 bp, Homo sapien
aaagctttccttggtgcgcatgcct

SEQ ID NO: 3591065 - DNA, 25 bp, Homo sapien
aatccaggggaaatgacgctgtgca

SEQ ID NO: 3591066 - DNA, 25 bp, Homo sapien
tgttccacgtctgccagcttgtctg

SEQ ID NO: 3591067 - DNA, 25 bp, Homo sapien
tctttcgggccttcttgatccagtt

SEQ ID NO: 3591068 - DNA, 25 bp, Homo sapien
ctttcgggccttcttgatccagttt

SEQ ID NO: 3591069 - DNA, 25 bp, Homo sapien
tagctttatcatcagacaaataatt

SEQ ID NO: 3591070 - DNA, 25 bp, Homo sapien
ttagctttatcatcagacaaataat

SEQ ID NO: 3591071 - DNA, 25 bp, Homo sapien
gtcagcattaacatctttgatgcct

SEQ ID NO: 3591072 - DNA, 25 bp, Homo sapien
attgtcagcattaacatctttgatg

SEQ ID NO: 3591073 - DNA, 25 bp, Homo sapien
ttgtcagcattaacatctttgatgc

SEQ ID NO: 3591074 - DNA, 25 bp, Homo sapien
tgtcagcattaacatctttgatgcc

SEQ ID NO: 3591075 - DNA, 25 bp, Homo sapien
tctggaccagcacatcttttcctgt

SEQ ID NO: 3591076 - DNA, 25 bp, Homo sapien
ggaccagcacatcttttcctgtaat

SEQ ID NO: 3591077 - DNA, 25 bp, Homo sapien
tggaccagcacatcttttcctgtaa

SEQ ID NO: 3591078 - DNA, 25 bp, Homo sapien
ttctggaccagcacatcttttcctg

SEQ ID NO: 3591079 - DNA, 25 bp, Homo sapien
cataaggtctattacaattcccacc

SEQ ID NO: 3591080 - DNA, 25 bp, Homo sapien
tcaccctccataaggtctattacaa

SEQ ID NO: 3591081 - DNA, 25 bp, Homo sapien
tcttcaccctccataaggtctatta

SEQ ID NO: 3591082 - DNA, 25 bp, Homo sapien
ccctccataaggtctattacaattc

SEQ ID NO: 3591083 - DNA, 25 bp, Homo sapien
aaatgcagaggtcatcttgaggggc

SEQ ID NO: 3591084 - DNA, 25 bp, Homo sapien
agaaatgcagaggtcatcttgaggg

SEQ ID NO: 3591085 - DNA, 25 bp, Homo sapien
atgcagaggtcatcttgaggggcca

SEQ ID NO: 3591086 - DNA, 25 bp, Homo sapien
ctagaaatgcagaggtcatcttgag

SEQ ID NO: 3591087 - DNA, 25 bp, Homo sapien
taaagaaactgaagatccgaaaata

SEQ ID NO: 3591088 - DNA, 25 bp, Homo sapien
caatatggtttaaacgtctgtacta

SEQ ID NO: 3591089 - DNA, 25 bp, Homo sapien
tgtactacccaaaactatctataga

SEQ ID NO: 3591090 - DNA, 25 bp, Homo sapien
tagtaaagttgcacagtacaagatc

SEQ ID NO: 3591091 - DNA, 25 bp, Homo sapien
tgttataacctgaagactccactga

SEQ ID NO: 3591092 - DNA, 25 bp, Homo sapien
caatgattgatgctgtattgaagtc

SEQ ID NO: 3591093 - DNA, 25 bp, Homo sapien
gatgtgcttgatgagagagtggtgc

SEQ ID NO: 3591094 - DNA, 25 bp, Homo sapien
agtctatggttagaagctgatgagg

SEQ ID NO: 3591095 - DNA, 25 bp, Homo sapien
tctatggttagaagctgatgagggc

SEQ ID NO: 3591096 - DNA, 25 bp, Homo sapien
cagaaacagtcaatttatggaggct

SEQ ID NO: 3591097 - DNA, 25 bp, Homo sapien
tgaccatcacaactagtaacctcct

SEQ ID NO: 3591098 - DNA, 25 bp, Homo sapien
caaaattgacacttaattgaactag

SEQ ID NO: 3591099 - DNA, 25 bp, Homo sapien
taattgaactagtctgtgatgtgca

SEQ ID NO: 3591100 - DNA, 25 bp, Homo sapien
tcttagcttgcctatgagttacgcc

SEQ ID NO: 3591101 - DNA, 25 bp, Homo sapien
gaattcaggagcaaccatttggcca

SEQ ID NO: 3591102 - DNA, 25 bp, Homo sapien
gagttacgccatcacagtcaagaag

SEQ ID NO: 3591103 - DNA, 25 bp, Homo sapien
catacatggtcatgatgtgcagcca

SEQ ID NO: 3591104 - DNA, 25 bp, Homo sapien
cgtttagcttagttggtgtcataca

SEQ ID NO: 3591105 - DNA, 25 bp, Homo sapien
taagagtgataaagcggattgtgca

SEQ ID NO: 3591106 - DNA, 25 bp, Homo sapien
taaagcggattgtgcacgtttagct

SEQ ID NO: 3591107 - DNA, 25 bp, Homo sapien
ggtgtcatacagtacctggtaattt

SEQ ID NO: 3591108 - DNA, 25 bp, Homo sapien
aggaagaagagctccaattctcctg

SEQ ID NO: 3591109 - DNA, 25 bp, Homo sapien
attagaggaactagctactaaggag

SEQ ID NO: 3591110 - DNA, 25 bp, Homo sapien
tgcattagaggaactagctactaag

SEQ ID NO: 3591111 - DNA, 25 bp, Homo sapien
ctatttgcccaatgcattagaggaa

SEQ ID NO: 3591112 - DNA, 25 bp, Homo sapien
tcaaagttacggtcatctttctcca

SEQ ID NO: 3591113 - DNA, 25 bp, Homo sapien
cttcaaagttacggtcatctttctc

SEQ ID NO: 3591114 - DNA, 25 bp, Homo sapien
ttcaaagttacggtcatctttctcc

SEQ ID NO: 3591115 - DNA, 25 bp, Homo sapien
tagtcctggcttgaaaactcttcga

SEQ ID NO: 3591116 - DNA, 25 bp, Homo sapien
tcaaggtggcacagtacatctaggc

SEQ ID NO: 3591117 - DNA, 25 bp, Homo sapien
catttgtgggagtaaaaggatgcct

SEQ ID NO: 3591118 - DNA, 25 bp, Homo sapien
tgctggattttacacagaatggcca

SEQ ID NO: 3591119 - DNA, 25 bp, Homo sapien
taaagatttatactcctttactgcc

SEQ ID NO: 3591120 - DNA, 25 bp, Homo sapien
tcctttactgcctgacttataccaa

SEQ ID NO: 3591121 - DNA, 25 bp, Homo sapien
gactctcctaaagatttatactcct

SEQ ID NO: 3591122 - DNA, 25 bp, Homo sapien
gacttataccaattgggccatctcc

SEQ ID NO: 3591123 - DNA, 25 bp, Homo sapien
ggcccagagtgtaacaatagtgttc

SEQ ID NO: 3591124 - DNA, 25 bp, Homo sapien
tgtaacaatagtgttcttggtggcc

SEQ ID NO: 3591125 - DNA, 25 bp, Homo sapien
gcccagagtgtaacaatagtgttct

SEQ ID NO: 3591126 - DNA, 25 bp, Homo sapien
taacaatagtgttcttggtggccat

SEQ ID NO: 3591127 - DNA, 25 bp, Homo sapien
tcaagccttgaggtagttataactg

SEQ ID NO: 3591128 - DNA, 25 bp, Homo sapien
ggtagttataactgctcacatatcc

SEQ ID NO: 3591129 - DNA, 25 bp, Homo sapien
tataactgctcacatatccatcaaa

SEQ ID NO: 3591130 - DNA, 25 bp, Homo sapien
ccttgaggtagttataactgctcac

SEQ ID NO: 3591131 - DNA, 25 bp, Homo sapien
caacggtgagtagttcaatttgatc

SEQ ID NO: 3591132 - DNA, 25 bp, Homo sapien
tgttctacaacggtgagtagttcaa

SEQ ID NO: 3591133 - DNA, 25 bp, Homo sapien
gttcaatttgatcagaatgtaaaca

SEQ ID NO: 3591134 - DNA, 25 bp, Homo sapien
tgagatgaatgttctacaacggtga

SEQ ID NO: 3591135 - DNA, 25 bp, Homo sapien
ttttcctagattgggagccgataca

SEQ ID NO: 3591136 - DNA, 25 bp, Homo sapien
cctagattgggagccgatacaggca

SEQ ID NO: 3591137 - DNA, 25 bp, Homo sapien
ttcctagattgggagccgatacagg

SEQ ID NO: 3591138 - DNA, 25 bp, Homo sapien
cttttcctagattgggagccgatac

SEQ ID NO: 3591139 - DNA, 25 bp, Homo sapien
gatttggtaagtaacagcagcaaca

SEQ ID NO: 3591140 - DNA, 25 bp, Homo sapien
tctgcccttgttccaagagatttgg

SEQ ID NO: 3591141 - DNA, 25 bp, Homo sapien
caattaaacagtacatttgcgtgct

SEQ ID NO: 3591142 - DNA, 25 bp, Homo sapien
tgagcggtggaacatctccagcaca

SEQ ID NO: 3591143 - DNA, 25 bp, Homo sapien
agcattgctgttggtcagtgtatct

SEQ ID NO: 3591144 - DNA, 25 bp, Homo sapien
cagcattgctgttggtcagtgtatc

SEQ ID NO: 3591145 - DNA, 25 bp, Homo sapien
gcagcattgctgttggtcagtgtat

SEQ ID NO: 3591146 - DNA, 25 bp, Homo sapien
gcagaggcattccacggtgctagat

SEQ ID NO: 3591147 - DNA, 25 bp, Homo sapien
cagaggcattccacggtgctagatg

SEQ ID NO: 3591148 - DNA, 25 bp, Homo sapien
gaggcattccacggtgctagatgaa

SEQ ID NO: 3591149 - DNA, 25 bp, Homo sapien
agaggcattccacggtgctagatga

SEQ ID NO: 3591150 - DNA, 25 bp, Homo sapien
gaagttggttgagttttcatggacg

SEQ ID NO: 3591151 - DNA, 25 bp, Homo sapien
gtgtctgtacggttgcagaaaaaca

SEQ ID NO: 3591152 - DNA, 25 bp, Homo sapien
cagaaaaacattcaccatgggtaac

SEQ ID NO: 3591153 - DNA, 25 bp, Homo sapien
aacattcaccatgggtaacagagag

SEQ ID NO: 3591154 - DNA, 25 bp, Homo sapien
tgcatgtcactcgagacattatttg

SEQ ID NO: 3591155 - DNA, 25 bp, Homo sapien
gatagaccacttgtgaaaagtcatt

SEQ ID NO: 3591156 - DNA, 25 bp, Homo sapien
caagatgatatgaaggttctttatg

SEQ ID NO: 3591157 - DNA, 25 bp, Homo sapien
gaggattttgatcattgcatgtcac

SEQ ID NO: 3591158 - DNA, 25 bp, Homo sapien
aaatcatttgtctgacaagtctcca

SEQ ID NO: 3591159 - DNA, 25 bp, Homo sapien
aaaatcatttgtctgacaagtctcc

SEQ ID NO: 3591160 - DNA, 25 bp, Homo sapien
taaaatcatttgtctgacaagtctc

SEQ ID NO: 3591161 - DNA, 25 bp, Homo sapien
tcttatcaagtgtctcaataacaat

SEQ ID NO: 3591162 - DNA, 25 bp, Homo sapien
ctgtcatggaaagagacatcttatc

SEQ ID NO: 3591163 - DNA, 25 bp, Homo sapien
gacatcttatcaagtgtctcaataa

SEQ ID NO: 3591164 - DNA, 25 bp, Homo sapien
ggaaagagacatcttatcaagtgtc

SEQ ID NO: 3591165 - DNA, 25 bp, Homo sapien
gccacagaatctcgaaagccagatt

SEQ ID NO: 3591166 - DNA, 25 bp, Homo sapien
tgtaagccacagaatctcgaaagcc

SEQ ID NO: 3591167 - DNA, 25 bp, Homo sapien
catagctattcgcattgtaagccac

SEQ ID NO: 3591168 - DNA, 25 bp, Homo sapien
ttccttcatagctattcgcattgta

SEQ ID NO: 3591169 - DNA, 25 bp, Homo sapien
tctgcagacccactggaaatctcca

SEQ ID NO: 3591170 - DNA, 25 bp, Homo sapien
cttcctctgcagacccactggaaat

SEQ ID NO: 3591171 - DNA, 25 bp, Homo sapien
cctctgcagacccactggaaatctc

SEQ ID NO: 3591172 - DNA, 25 bp, Homo sapien
ctgcagacccactggaaatctccat

SEQ ID NO: 3591173 - DNA, 25 bp, Homo sapien
cttctcttgctacaccataggccat

SEQ ID NO: 3591174 - DNA, 25 bp, Homo sapien
tcttccatccttagttcctcaactt

SEQ ID NO: 3591175 - DNA, 25 bp, Homo sapien
catccttagttcctcaacttcactg

SEQ ID NO: 3591176 - DNA, 25 bp, Homo sapien
tagttcctcaacttcactgccagtg

SEQ ID NO: 3591177 - DNA, 25 bp, Homo sapien
tcctcttccatccttagttcctcaa

SEQ ID NO: 3591178 - DNA, 25 bp, Homo sapien
cataataaaaagttgcatcacacca

SEQ ID NO: 3591179 - DNA, 25 bp, Homo sapien
aaaagttgcatcacaccaaaatccc

SEQ ID NO: 3591180 - DNA, 25 bp, Homo sapien
aagttgcatcacaccaaaatcccac

SEQ ID NO: 3591181 - DNA, 25 bp, Homo sapien
taataaaaagttgcatcacaccaaa

SEQ ID NO: 3591182 - DNA, 25 bp, Homo sapien
tgtctagcgcaaatgaagactgtcc

SEQ ID NO: 3591183 - DNA, 25 bp, Homo sapien
cagtgagaggagatgagtgaaaaaa

SEQ ID NO: 3591184 - DNA, 25 bp, Homo sapien
tgtaatctctgaattcccagaacat

SEQ ID NO: 3591185 - DNA, 25 bp, Homo sapien
aagaagagtgggtccattcaaggaa

SEQ ID NO: 3591186 - DNA, 25 bp, Homo sapien
caagggtcagccatggtccatggat

SEQ ID NO: 3591187 - DNA, 25 bp, Homo sapien
tatgtggctttaggccaagggtcag

SEQ ID NO: 3591188 - DNA, 25 bp, Homo sapien
cagatcacagatgggtcaaatccat

SEQ ID NO: 3591189 - DNA, 25 bp, Homo sapien
ttcataggcctggatatgtggcttt

SEQ ID NO: 3591190 - DNA, 25 bp, Homo sapien
tgtatttagggcttttgattcactg

SEQ ID NO: 3591191 - DNA, 25 bp, Homo sapien
ggtgatgacttacattttattctaa

SEQ ID NO: 3591192 - DNA, 25 bp, Homo sapien
taactaataaatgattgcctggtcc

SEQ ID NO: 3591193 - DNA, 25 bp, Homo sapien
tgcctggtccaaggtggtgatgact

SEQ ID NO: 3591194 - DNA, 25 bp, Homo sapien
cttgagcattcctagaattcagaga

SEQ ID NO: 3591195 - DNA, 25 bp, Homo sapien
acttgatgccctagatttcccaagg

SEQ ID NO: 3591196 - DNA, 25 bp, Homo sapien
gcagaccctgttttaggacttgcag

SEQ ID NO: 3591197 - DNA, 25 bp, Homo sapien
agatctgatttgtactccctggctc

SEQ ID NO: 3591198 - DNA, 25 bp, Homo sapien
caggtttaagatctgatttgtactc

SEQ ID NO: 3591199 - DNA, 25 bp, Homo sapien
gagagtccttgggtatcactatggg

SEQ ID NO: 3591200 - DNA, 25 bp, Homo sapien
tagtgagggtgatagccttattggc

SEQ ID NO: 3591201 - DNA, 25 bp, Homo sapien
gccttattggcaacttgatgccaca

SEQ ID NO: 3591202 - DNA, 25 bp, Homo sapien
tatgggttctatagtgagggtgata

SEQ ID NO: 3591203 - DNA, 25 bp, Homo sapien
cagcgtaatttgttgtcagagtttc

SEQ ID NO: 3591204 - DNA, 25 bp, Homo sapien
gctctgttggtaatttaaatgcacc

SEQ ID NO: 3591205 - DNA, 25 bp, Homo sapien
cattatagccacctcatgatgggca

SEQ ID NO: 3591206 - DNA, 25 bp, Homo sapien
gcttcagtcacagcgtaatttgttg

SEQ ID NO: 3591207 - DNA, 25 bp, Homo sapien
tcaacatactggataatgctatgtc

SEQ ID NO: 3591208 - DNA, 25 bp, Homo sapien
gattctctatcaagtaattcaacat

SEQ ID NO: 3591209 - DNA, 25 bp, Homo sapien
catggaaatcttggatataggacaa

SEQ ID NO: 3591210 - DNA, 25 bp, Homo sapien
aaacttccagcccttatctattaca

SEQ ID NO: 3591211 - DNA, 25 bp, Homo sapien
gtggctccccacttctgatgaaaat

SEQ ID NO: 3591212 - DNA, 25 bp, Homo sapien
gatgaaaatgttccttttataccca

SEQ ID NO: 3591213 - DNA, 25 bp, Homo sapien
gctgtggtgtggctccccacttctg

SEQ ID NO: 3591214 - DNA, 25 bp, Homo sapien
ctgatgaaaatgttccttttatacc

SEQ ID NO: 3591215 - DNA, 25 bp, Homo sapien
ttacccgaactatgggagaaagcaa

SEQ ID NO: 3591216 - DNA, 25 bp, Homo sapien
aaccatccggatggccagatgagcc

SEQ ID NO: 3591217 - DNA, 25 bp, Homo sapien
cattatgttctttacccgaactatg

SEQ ID NO: 3591218 - DNA, 25 bp, Homo sapien
caaaaaaccttcaaccatccggatg

SEQ ID NO: 3591219 - DNA, 25 bp, Homo sapien
cctgaattagcccatagactctcat

SEQ ID NO: 3591220 - DNA, 25 bp, Homo sapien
ccctgaattagcccatagactctca

SEQ ID NO: 3591221 - DNA, 25 bp, Homo sapien
tattttgaccatacttctttttagc

SEQ ID NO: 3591222 - DNA, 25 bp, Homo sapien
ttgtaaatattaagttctatgtatg

SEQ ID NO: 3591223 - DNA, 25 bp, Homo sapien
atattttgaccatacttctttttag

SEQ ID NO: 3591224 - DNA, 25 bp, Homo sapien
taaatattaagttctatgtatgtga

SEQ ID NO: 3591225 - DNA, 25 bp, Homo sapien
tagatgatgggtaaagctgcattcc

SEQ ID NO: 3591226 - DNA, 25 bp, Homo sapien
caaccccactgatgattaagaggac

SEQ ID NO: 3591227 - DNA, 25 bp, Homo sapien
ggtaacaaaccattccatgaagagg

SEQ ID NO: 3591228 - DNA, 25 bp, Homo sapien
gctgtgtgtgagacgagactgccaa

SEQ ID NO: 3591229 - DNA, 25 bp, Homo sapien
tgactcattttgctggcccgctttg

SEQ ID NO: 3591230 - DNA, 25 bp, Homo sapien
ccgctttggggacaccgtatttcat

SEQ ID NO: 3591231 - DNA, 25 bp, Homo sapien
gtggaaacttcccaggacttctgtc

SEQ ID NO: 3591232 - DNA, 25 bp, Homo sapien
acttcccaggacttctgtccctgaa

SEQ ID NO: 3591233 - DNA, 25 bp, Homo sapien
gctgatacaggttagacaaacttgg

SEQ ID NO: 3591234 - DNA, 25 bp, Homo sapien
taattggaatgccttagcaaaccca

SEQ ID NO: 3591235 - DNA, 25 bp, Homo sapien
gcaaacccaaaaggattttcagtca

SEQ ID NO: 3591236 - DNA, 25 bp, Homo sapien
cttggatcacaagtcttaagggtta

SEQ ID NO: 3591237 - DNA, 25 bp, Homo sapien
aaattcagtctccatacagtgtgag

SEQ ID NO: 3591238 - DNA, 25 bp, Homo sapien
caaattcagtctccatacagtgtga

SEQ ID NO: 3591239 - DNA, 25 bp, Homo sapien
aattcagtctccatacagtgtgaga

SEQ ID NO: 3591240 - DNA, 25 bp, Homo sapien
gcaatttaaatcgaggtctaggaag

SEQ ID NO: 3591241 - DNA, 25 bp, Homo sapien
caatttaaatcgaggtctaggaaga

SEQ ID NO: 3591242 - DNA, 25 bp, Homo sapien
gtgcaatttaaatcgaggtctagga

SEQ ID NO: 3591243 - DNA, 25 bp, Homo sapien
tgcaatttaaatcgaggtctaggaa

SEQ ID NO: 3591244 - DNA, 25 bp, Homo sapien
ccaattcgttttcctgagatgaatc

SEQ ID NO: 3591245 - DNA, 25 bp, Homo sapien
tagctcggagacctttagtacttaa

SEQ ID NO: 3591246 - DNA, 25 bp, Homo sapien
ctgtttggtctgttgatagctcgga

SEQ ID NO: 3591247 - DNA, 25 bp, Homo sapien
cctgagatgaatctaatctgtttgg

SEQ ID NO: 3591248 - DNA, 25 bp, Homo sapien
aaagtgactacttgaggctgacgca

SEQ ID NO: 3591249 - DNA, 25 bp, Homo sapien
caaacctgagataccttttggcaga

SEQ ID NO: 3591250 - DNA, 25 bp, Homo sapien
gattagcatatattccagctgcagc

SEQ ID NO: 3591251 - DNA, 25 bp, Homo sapien
catggccttttggatgtaagagcta

SEQ ID NO: 3591252 - DNA, 25 bp, Homo sapien
tcttctcttcgctacctttggaaac

SEQ ID NO: 3591253 - DNA, 25 bp, Homo sapien
ttcttctcttcgctacctttggaaa

SEQ ID NO: 3591254 - DNA, 25 bp, Homo sapien
tctcttcgctacctttggaaacaaa

SEQ ID NO: 3591255 - DNA, 25 bp, Homo sapien
ttctcttcgctacctttggaaacaa

SEQ ID NO: 3591256 - DNA, 25 bp, Homo sapien
agtagcaagaaatatttctgtgcac

SEQ ID NO: 3591257 - DNA, 25 bp, Homo sapien
ctagtagcaagaaatatttctgtgc

SEQ ID NO: 3591258 - DNA, 25 bp, Homo sapien
tactagtagcaagaaatatttctgt

SEQ ID NO: 3591259 - DNA, 25 bp, Homo sapien
gatactagtagcaagaaatatttct

SEQ ID NO: 3591260 - DNA, 25 bp, Homo sapien
ttttgacgctctattgtagcacggc

SEQ ID NO: 3591261 - DNA, 25 bp, Homo sapien
gagatcttttgacgctctattgtag

SEQ ID NO: 3591262 - DNA, 25 bp, Homo sapien
tcagaggccttgacaagctgtgata

SEQ ID NO: 3591263 - DNA, 25 bp, Homo sapien
tgacaagctgtgatacgctctttgg

SEQ ID NO: 3591264 - DNA, 25 bp, Homo sapien
cccagaatattcttcaaggtttggc

SEQ ID NO: 3591265 - DNA, 25 bp, Homo sapien
tcggtggaagttacaccagccgcgg

SEQ ID NO: 3591266 - DNA, 25 bp, Homo sapien
cctggagcaactcggtggaagttac

SEQ ID NO: 3591267 - DNA, 25 bp, Homo sapien
ttggctttgcctggagcaactcggt

SEQ ID NO: 3591268 - DNA, 25 bp, Homo sapien
gcattttctaatgtgcaaggggcct

SEQ ID NO: 3591269 - DNA, 25 bp, Homo sapien
tgcattttctaatgtgcaaggggcc

SEQ ID NO: 3591270 - DNA, 25 bp, Homo sapien
tcacttcatagcttcctcacatcca

SEQ ID NO: 3591271 - DNA, 25 bp, Homo sapien
ttggttgcaccaactgatggtcctc

SEQ ID NO: 3591272 - DNA, 25 bp, Homo sapien
ctgttggttgcaccaactgatggtc

SEQ ID NO: 3591273 - DNA, 25 bp, Homo sapien
ggttgcaccaactgatggtcctcat

SEQ ID NO: 3591274 - DNA, 25 bp, Homo sapien
tgttggttgcaccaactgatggtcc

SEQ ID NO: 3591275 - DNA, 25 bp, Homo sapien
gaataaggacggcatatgattttat

SEQ ID NO: 3591276 - DNA, 25 bp, Homo sapien
tgattttatggtcttgggttggaca

SEQ ID NO: 3591277 - DNA, 25 bp, Homo sapien
aaaatctgcatgaataaggacggca

SEQ ID NO: 3591278 - DNA, 25 bp, Homo sapien
gattttatggtcttgggttggacaa

SEQ ID NO: 3591279 - DNA, 25 bp, Homo sapien
cttccacttatctccccagggcaac

SEQ ID NO: 3591280 - DNA, 25 bp, Homo sapien
aaagagatactagaattgatcttag

SEQ ID NO: 3591281 - DNA, 25 bp, Homo sapien
aaattgatagaaagagatactagaa

SEQ ID NO: 3591282 - DNA, 25 bp, Homo sapien
gaaagagatactagaattgatctta

SEQ ID NO: 3591283 - DNA, 25 bp, Homo sapien
agaaagagatactagaattgatctt

SEQ ID NO: 3591284 - DNA, 25 bp, Homo sapien
tcaaggtgaagtttgattcagttcc

SEQ ID NO: 3591285 - DNA, 25 bp, Homo sapien
caaggtgaagtttgattcagttcct

SEQ ID NO: 3591286 - DNA, 25 bp, Homo sapien
tatgtttatagtaaaccagcagtgc

SEQ ID NO: 3591287 - DNA, 25 bp, Homo sapien
ccagcagtgctgatcgcttaaacat

SEQ ID NO: 3591288 - DNA, 25 bp, Homo sapien
gtgaattcagtgtctcctactgccc

SEQ ID NO: 3591289 - DNA, 25 bp, Homo sapien
tcatatgtcaaggtactcaacgtgt

SEQ ID NO: 3591290 - DNA, 25 bp, Homo sapien
tccccctttgcgctttttagtctga

SEQ ID NO: 3591291 - DNA, 25 bp, Homo sapien
gaattcttctcgtttgtatcttctc

SEQ ID NO: 3591292 - DNA, 25 bp, Homo sapien
aattcttctcgtttgtatcttctct

SEQ ID NO: 3591293 - DNA, 25 bp, Homo sapien
ctctggggttgttcctgaacaacct

SEQ ID NO: 3591294 - DNA, 25 bp, Homo sapien
gggttgttcctgaacaacctctcta

SEQ ID NO: 3591295 - DNA, 25 bp, Homo sapien
tgaacaacctctctaactcgggcat

SEQ ID NO: 3591296 - DNA, 25 bp, Homo sapien
ttcctgaacaacctctctaactcgg

SEQ ID NO: 3591297 - DNA, 25 bp, Homo sapien
taggaaggacaatccacgtgagagc

SEQ ID NO: 3591298 - DNA, 25 bp, Homo sapien
ttggcatggccagaaaagaaaacct

SEQ ID NO: 3591299 - DNA, 25 bp, Homo sapien
ggttactggacaaggcatagcggat

SEQ ID NO: 3591300 - DNA, 25 bp, Homo sapien
ggcaccgatgataatttgtttggca

SEQ ID NO: 3591301 - DNA, 25 bp, Homo sapien
gaagcattttctagtttgccgtcta

SEQ ID NO: 3591302 - DNA, 25 bp, Homo sapien
tgtggcgactgtaggaagcattttc

SEQ ID NO: 3591303 - DNA, 25 bp, Homo sapien
tttttatgtggcgactgtaggaagc

SEQ ID NO: 3591304 - DNA, 25 bp, Homo sapien
gccgtctaataaagtggatgcatcc

SEQ ID NO: 3591305 - DNA, 25 bp, Homo sapien
gggcaaggagacagaattggaacat

SEQ ID NO: 3591306 - DNA, 25 bp, Homo sapien
tgcttggaacgctaacagctgctca

SEQ ID NO: 3591307 - DNA, 25 bp, Homo sapien
cagctgctcattaggagtaggttgc

SEQ ID NO: 3591308 - DNA, 25 bp, Homo sapien
catagggtcctcatagttgagaaca

SEQ ID NO: 3591309 - DNA, 25 bp, Homo sapien
tatcttgattgcagagctgtagcct

SEQ ID NO: 3591310 - DNA, 25 bp, Homo sapien
tcttgattgcagagctgtagccttc

SEQ ID NO: 3591311 - DNA, 25 bp, Homo sapien
cttagtggaatgatggccttgctga

SEQ ID NO: 3591312 - DNA, 25 bp, Homo sapien
ttgtgttgttctaagcctccaagtt

SEQ ID NO: 3591313 - DNA, 25 bp, Homo sapien
aggtttactgcttgacctgttagtg

SEQ ID NO: 3591314 - DNA, 25 bp, Homo sapien
aaggtttactgcttgacctgttagt

SEQ ID NO: 3591315 - DNA, 25 bp, Homo sapien
ggtttactgcttgacctgttagtgt

SEQ ID NO: 3591316 - DNA, 25 bp, Homo sapien
tcaagttcattaccataaaggggac

SEQ ID NO: 3591317 - DNA, 25 bp, Homo sapien
caagttcattaccataaaggggact

SEQ ID NO: 3591318 - DNA, 25 bp, Homo sapien
tctcacagtagtatgaatgcgaaca

SEQ ID NO: 3591319 - DNA, 25 bp, Homo sapien
tttttgattgactgctattccctga

SEQ ID NO: 3591320 - DNA, 25 bp, Homo sapien
taagggtatcgtttatatgaggacc

SEQ ID NO: 3591321 - DNA, 25 bp, Homo sapien
tgaggaccaagtatgccatctaatt

SEQ ID NO: 3591322 - DNA, 25 bp, Homo sapien
ccagggtgacagtcatttggtcaat

SEQ ID NO: 3591323 - DNA, 25 bp, Homo sapien
gacagtcatttggtcaatttgcaag

SEQ ID NO: 3591324 - DNA, 25 bp, Homo sapien
ggtgacagtcatttggtcaatttgc

SEQ ID NO: 3591325 - DNA, 25 bp, Homo sapien
cagtcatttggtcaatttgcaagga

SEQ ID NO: 3591326 - DNA, 25 bp, Homo sapien
agtgaatattctgttccgactctgc

SEQ ID NO: 3591327 - DNA, 25 bp, Homo sapien
cagaggcaaacttgtagaacataac

SEQ ID NO: 3591328 - DNA, 25 bp, Homo sapien
aacttgtagaacataacacagccca

SEQ ID NO: 3591329 - DNA, 25 bp, Homo sapien
tattctgttccgactctgccttcaa

SEQ ID NO: 3591330 - DNA, 25 bp, Homo sapien
ttaattttttctgcagcggtattga

SEQ ID NO: 3591331 - DNA, 25 bp, Homo sapien
gcagcggtattgataaacctattta

SEQ ID NO: 3591332 - DNA, 25 bp, Homo sapien
tcttccacaggtaacacattaccca

SEQ ID NO: 3591333 - DNA, 25 bp, Homo sapien
ttatatctccacgatcaacctggac

SEQ ID NO: 3591334 - DNA, 25 bp, Homo sapien
gaatagctaaacctgaatccagatt

SEQ ID NO: 3591335 - DNA, 25 bp, Homo sapien
acctgaatccagatttccaatataa

SEQ ID NO: 3591336 - DNA, 25 bp, Homo sapien
ttaattcttcgaattcattctctct

SEQ ID NO: 3591337 - DNA, 25 bp, Homo sapien
ctagtttagaatagctaaacctgaa

SEQ ID NO: 3591338 - DNA, 25 bp, Homo sapien
tacttggcttaatctgaccagaaaa

SEQ ID NO: 3591339 - DNA, 25 bp, Homo sapien
tcaaggctttgagttaagttcattt

SEQ ID NO: 3591340 - DNA, 25 bp, Homo sapien
attttacttggcttaatctgaccag

SEQ ID NO: 3591341 - DNA, 25 bp, Homo sapien
ctgtcttcaaggctttgagttaagt

SEQ ID NO: 3591342 - DNA, 25 bp, Homo sapien
catcttcaagctggtattcagcatt

SEQ ID NO: 3591343 - DNA, 25 bp, Homo sapien
atcttcaagctggtattcagcattt

SEQ ID NO: 3591344 - DNA, 25 bp, Homo sapien
tcatcttcaagctggtattcagcat

SEQ ID NO: 3591345 - DNA, 25 bp, Homo sapien
tctacttctacgagtctaagccaaa

SEQ ID NO: 3591346 - DNA, 25 bp, Homo sapien
cactgatagtgattatagggattat

SEQ ID NO: 3591347 - DNA, 25 bp, Homo sapien
ttctacgagtctaagccaaagaatt

SEQ ID NO: 3591348 - DNA, 25 bp, Homo sapien
tataaattctgagttgtcaaaacat

SEQ ID NO: 3591349 - DNA, 25 bp, Homo sapien
gacataggtccatccatattcttcc

SEQ ID NO: 3591350 - DNA, 25 bp, Homo sapien
ttgaatatagtggaagggtagacct

SEQ ID NO: 3591351 - DNA, 25 bp, Homo sapien
gagattggatgaaaagtggcagaca

SEQ ID NO: 3591352 - DNA, 25 bp, Homo sapien
tagccattgcagtgacgtccttcct

SEQ ID NO: 3591353 - DNA, 25 bp, Homo sapien
cattcatccctgtcactgacactgt

SEQ ID NO: 3591354 - DNA, 25 bp, Homo sapien
gtctatagtgatgttattgccacac

SEQ ID NO: 3591355 - DNA, 25 bp, Homo sapien
tcatcacatccacactgacattcat

SEQ ID NO: 3591356 - DNA, 25 bp, Homo sapien
tattgccacactgacattgccgctc

SEQ ID NO: 3591357 - DNA, 25 bp, Homo sapien
gaattttccaaaccgatctatatcc

SEQ ID NO: 3591358 - DNA, 25 bp, Homo sapien
tttagaagcaaaatgatatgattct

SEQ ID NO: 3591359 - DNA, 25 bp, Homo sapien
agaagcaaaatgatatgattctgca

SEQ ID NO: 3591360 - DNA, 25 bp, Homo sapien
tgaattttccaaaccgatctatatc

SEQ ID NO: 3591361 - DNA, 25 bp, Homo sapien
tctctacaacaacaggtctttatac

SEQ ID NO: 3591362 - DNA, 25 bp, Homo sapien
ttattgttgcatgacttctgactaa

SEQ ID NO: 3591363 - DNA, 25 bp, Homo sapien
ccacattctctacaacaacaggtct

SEQ ID NO: 3591364 - DNA, 25 bp, Homo sapien
gggtttttcaatgtacattgaggta

SEQ ID NO: 3591365 - DNA, 25 bp, Homo sapien
tatggttactccctagtgtgatttc

SEQ ID NO: 3591366 - DNA, 25 bp, Homo sapien
tagtacacccatatggttactccct

SEQ ID NO: 3591367 - DNA, 25 bp, Homo sapien
cccatatggttactccctagtgtga

SEQ ID NO: 3591368 - DNA, 25 bp, Homo sapien
cacagttagtacacccatatggtta

SEQ ID NO: 3591369 - DNA, 25 bp, Homo sapien
cttattaaatggcacagcagttcca

SEQ ID NO: 3591370 - DNA, 25 bp, Homo sapien
tgtgtaccccttacctgacagtgat

SEQ ID NO: 3591371 - DNA, 25 bp, Homo sapien
atactctcttgcgtttgtcccagga

SEQ ID NO: 3591372 - DNA, 25 bp, Homo sapien
catttcagggagtgttaacagagca

SEQ ID NO: 3591373 - DNA, 25 bp, Homo sapien
tgatttctgcagtcttcaattagac

SEQ ID NO: 3591374 - DNA, 25 bp, Homo sapien
gcagtcttcaattagaccatctaca

SEQ ID NO: 3591375 - DNA, 25 bp, Homo sapien
caggtggagatattttagatctgat

SEQ ID NO: 3591376 - DNA, 25 bp, Homo sapien
tttagatctgatatcactaacccat

SEQ ID NO: 3591377 - DNA, 25 bp, Homo sapien
tgttgttgcttccactgcctgacgc

SEQ ID NO: 3591378 - DNA, 25 bp, Homo sapien
tgcttccactgcctgacgcaggtcc

SEQ ID NO: 3591379 - DNA, 25 bp, Homo sapien
cttccactgcctgacgcaggtccat

SEQ ID NO: 3591380 - DNA, 25 bp, Homo sapien
ttgttgcttccactgcctgacgcag

SEQ ID NO: 3591381 - DNA, 25 bp, Homo sapien
cctgctagatttataggaagctctt

SEQ ID NO: 3591382 - DNA, 25 bp, Homo sapien
ctagatttataggaagctctttgac

SEQ ID NO: 3591383 - DNA, 25 bp, Homo sapien
ttttcctgctagatttataggaagc

SEQ ID NO: 3591384 - DNA, 25 bp, Homo sapien
gctagatttataggaagctctttga

SEQ ID NO: 3591385 - DNA, 25 bp, Homo sapien
cgcttattttatctggaccatcttc

SEQ ID NO: 3591386 - DNA, 25 bp, Homo sapien
aaaccgcttattttatctggaccat

SEQ ID NO: 3591387 - DNA, 25 bp, Homo sapien
cagagctttataaccactgaaagaa

SEQ ID NO: 3591388 - DNA, 25 bp, Homo sapien
ttcttgattaatatcatccagagct

SEQ ID NO: 3591389 - DNA, 25 bp, Homo sapien
tgttacatgaataagccggagatga

SEQ ID NO: 3591390 - DNA, 25 bp, Homo sapien
tagctccgatttagtaactgggccg

SEQ ID NO: 3591391 - DNA, 25 bp, Homo sapien
ttacatgaataagccggagatgact

SEQ ID NO: 3591392 - DNA, 25 bp, Homo sapien
ctgggccgtggaaggctttaacatt

SEQ ID NO: 3591393 - DNA, 25 bp, Homo sapien
aggaattcgccaattatttttacag

SEQ ID NO: 3591394 - DNA, 25 bp, Homo sapien
gaggaattcgccaattatttttaca

SEQ ID NO: 3591395 - DNA, 25 bp, Homo sapien
gtgaggaattcgccaattattttta

SEQ ID NO: 3591396 - DNA, 25 bp, Homo sapien
cagtgaggaattcgccaattatttt

SEQ ID NO: 3591397 - DNA, 25 bp, Homo sapien
catctacctggcagctgaaacaggt

SEQ ID NO: 3591398 - DNA, 25 bp, Homo sapien
gtgatctcattgacagttcctggac

SEQ ID NO: 3591399 - DNA, 25 bp, Homo sapien
aaaatgtaggcctcaagaacctttg

SEQ ID NO: 3591400 - DNA, 25 bp, Homo sapien
tgaaacaggtgtatagcagagccca

SEQ ID NO: 3591401 - DNA, 25 bp, Homo sapien
catcatatctctttgggctctcttt

SEQ ID NO: 3591402 - DNA, 25 bp, Homo sapien
ttccaagataccaactaagaatatc

SEQ ID NO: 3591403 - DNA, 25 bp, Homo sapien
cacattacatctaatcatcatatct

SEQ ID NO: 3591404 - DNA, 25 bp, Homo sapien
tgatgatcttgactattttgagtac

SEQ ID NO: 3591405 - DNA, 25 bp, Homo sapien
ctcagcctggtcgtatgaagaataa

SEQ ID NO: 3591406 - DNA, 25 bp, Homo sapien
tgttcagagtgctacatggcttctc

SEQ ID NO: 3591407 - DNA, 25 bp, Homo sapien
tagggccttaagcagaatggtatcc

SEQ ID NO: 3591408 - DNA, 25 bp, Homo sapien
gaagccagaagctattcatcaagac

SEQ ID NO: 3591409 - DNA, 25 bp, Homo sapien
cttctgagctcttttgagtagcagc

SEQ ID NO: 3591410 - DNA, 25 bp, Homo sapien
ttctgagctcttttgagtagcagca

SEQ ID NO: 3591411 - DNA, 25 bp, Homo sapien
tcttttgagtagcagcaaggggcat

SEQ ID NO: 3591412 - DNA, 25 bp, Homo sapien
agctcttttgagtagcagcaagggg

SEQ ID NO: 3591413 - DNA, 25 bp, Homo sapien
ggacatgaataccacgaacttggga

SEQ ID NO: 3591414 - DNA, 25 bp, Homo sapien
tttttgtaaggaagctacaggtctc

SEQ ID NO: 3591415 - DNA, 25 bp, Homo sapien
gcctggactgtggtcatgtctgata

SEQ ID NO: 3591416 - DNA, 25 bp, Homo sapien
gaagaggatcatacaaggacatgaa

SEQ ID NO: 3591417 - DNA, 25 bp, Homo sapien
tagaatcaattggatgctgaaactg

SEQ ID NO: 3591418 - DNA, 25 bp, Homo sapien
tttgagattatccttgcccacaaga

SEQ ID NO: 3591419 - DNA, 25 bp, Homo sapien
tgttatttacctgagaataggcact

SEQ ID NO: 3591420 - DNA, 25 bp, Homo sapien
cactgcaattggatggcaggtgcca

SEQ ID NO: 3591421 - DNA, 25 bp, Homo sapien
tgatcagcatttgcttgaatttgca

SEQ ID NO: 3591422 - DNA, 25 bp, Homo sapien
gaggatccacagacgctgacatcca

SEQ ID NO: 3591423 - DNA, 25 bp, Homo sapien
gggctgacttaagagacgaggatcc

SEQ ID NO: 3591424 - DNA, 25 bp, Homo sapien
taagagacgaggatccacagacgct

SEQ ID NO: 3591425 - DNA, 25 bp, Homo sapien
tctggttactcaaggatttcattct

SEQ ID NO: 3591426 - DNA, 25 bp, Homo sapien
gcaacccgattgttcataaaaaagc

SEQ ID NO: 3591427 - DNA, 25 bp, Homo sapien
tcctgttaacagtagagggtgtcca

SEQ ID NO: 3591428 - DNA, 25 bp, Homo sapien
aaaaacacacaacgatggtgactga

SEQ ID NO: 3591429 - DNA, 25 bp, Homo sapien
ccaggagtggaaagtgtgtcttcac

SEQ ID NO: 3591430 - DNA, 25 bp, Homo sapien
taagtatttggcagttgacacactc

SEQ ID NO: 3591431 - DNA, 25 bp, Homo sapien
cacttgggcccagtgtctttaagta

SEQ ID NO: 3591432 - DNA, 25 bp, Homo sapien
cacaaaagttgtggcttccgtcatg

SEQ ID NO: 3591433 - DNA, 25 bp, Homo sapien
catatggacaaatttttagtctggt

SEQ ID NO: 3591434 - DNA, 25 bp, Homo sapien
tcacatatggacaaatttttagtct

SEQ ID NO: 3591435 - DNA, 25 bp, Homo sapien
cacatatggacaaatttttagtctg

SEQ ID NO: 3591436 - DNA, 25 bp, Homo sapien
tatggacaaatttttagtctggtac

SEQ ID NO: 3591437 - DNA, 25 bp, Homo sapien
cactgatgtttgagttgccacaaaa

SEQ ID NO: 3591438 - DNA, 25 bp, Homo sapien
cacagtcgccgcactagtagggttt

SEQ ID NO: 3591439 - DNA, 25 bp, Homo sapien
aaggcatttccacagtcgccgcact

SEQ ID NO: 3591440 - DNA, 25 bp, Homo sapien
acactgatgtttgagttgccacaaa

SEQ ID NO: 3591441 - DNA, 25 bp, Homo sapien
tcctgtatgacatctctcacattgt

SEQ ID NO: 3591442 - DNA, 25 bp, Homo sapien
gagccatattttctggctgaaggct

SEQ ID NO: 3591443 - DNA, 25 bp, Homo sapien
atatttgtgtgaataggattttcca

SEQ ID NO: 3591444 - DNA, 25 bp, Homo sapien
tacaaagggattctttcctgtatga

SEQ ID NO: 3591445 - DNA, 25 bp, Homo sapien
acgtcattgcattcataaggttttt

SEQ ID NO: 3591446 - DNA, 25 bp, Homo sapien
cgtcattgcattcataaggtttttc

SEQ ID NO: 3591447 - DNA, 25 bp, Homo sapien
cacgtcattgcattcataaggtttt

SEQ ID NO: 3591448 - DNA, 25 bp, Homo sapien
tcattgcattcataaggtttttctc

SEQ ID NO: 3591449 - DNA, 25 bp, Homo sapien
tgagttcggtgatgtataataagag

SEQ ID NO: 3591450 - DNA, 25 bp, Homo sapien
taataagagtgcactttgtggtgaa

SEQ ID NO: 3591451 - DNA, 25 bp, Homo sapien
ataagagtgcactttgtggtgaaac

SEQ ID NO: 3591452 - DNA, 25 bp, Homo sapien
tgatgtataataagagtgcactttg

SEQ ID NO: 3591453 - DNA, 25 bp, Homo sapien
cactgatgtataatgcgagtgcgtt

SEQ ID NO: 3591454 - DNA, 25 bp, Homo sapien
actgatgtataatgcgagtgcgttt

SEQ ID NO: 3591455 - DNA, 25 bp, Homo sapien
ttccacattagctgcatatataaga

SEQ ID NO: 3591456 - DNA, 25 bp, Homo sapien
ccacattagctgcatatataagatt

SEQ ID NO: 3591457 - DNA, 25 bp, Homo sapien
acattagctgcatatataagatttt

SEQ ID NO: 3591458 - DNA, 25 bp, Homo sapien
ttttccacattagctgcatatataa

SEQ ID NO: 3591459 - DNA, 25 bp, Homo sapien
ctgtacgggagcactgatgtacaat

SEQ ID NO: 3591460 - DNA, 25 bp, Homo sapien
tgtacgggagcactgatgtacaatg

SEQ ID NO: 3591461 - DNA, 25 bp, Homo sapien
cgcttctgggtgaagccttttctac

SEQ ID NO: 3591462 - DNA, 25 bp, Homo sapien
cttctgggtgaagccttttctacat

SEQ ID NO: 3591463 - DNA, 25 bp, Homo sapien
tgtacaacaaggtagcgcttctggg

SEQ ID NO: 3591464 - DNA, 25 bp, Homo sapien
tacaacaaggtagcgcttctgggtg

SEQ ID NO: 3591465 - DNA, 25 bp, Homo sapien
acaatgagattgatcttcacagtga

SEQ ID NO: 3591466 - DNA, 25 bp, Homo sapien
ttcactgatgtacaatgagattgat

SEQ ID NO: 3591467 - DNA, 25 bp, Homo sapien
atgagattgatcttcacagtgaaac

SEQ ID NO: 3591468 - DNA, 25 bp, Homo sapien
tgtacaatgagattgatcttcacag

SEQ ID NO: 3591469 - DNA, 25 bp, Homo sapien
tataagtttgttgatgtgcaatgag

SEQ ID NO: 3591470 - DNA, 25 bp, Homo sapien
taagtttgttgatgtgcaatgagaa

SEQ ID NO: 3591471 - DNA, 25 bp, Homo sapien
gtataagtttgttgatgtgcaatga

SEQ ID NO: 3591472 - DNA, 25 bp, Homo sapien
aagtttgttgatgtgcaatgagaat

SEQ ID NO: 3591473 - DNA, 25 bp, Homo sapien
atacagattttgtcccctatattag

SEQ ID NO: 3591474 - DNA, 25 bp, Homo sapien
tatacagattttgtcccctatatta

SEQ ID NO: 3591475 - DNA, 25 bp, Homo sapien
tacagattttgtcccctatattagt

SEQ ID NO: 3591476 - DNA, 25 bp, Homo sapien
tgtgaatgttctcgtggtaaatgag

SEQ ID NO: 3591477 - DNA, 25 bp, Homo sapien
atgtgaatgttctcgtggtaaatga

SEQ ID NO: 3591478 - DNA, 25 bp, Homo sapien
ctatgtgaatgttctcgtggtaaat

SEQ ID NO: 3591479 - DNA, 25 bp, Homo sapien
tatgtgaatgttctcgtggtaaatg

SEQ ID NO: 3591480 - DNA, 25 bp, Homo sapien
catctgttttcaatggttcccatcc

SEQ ID NO: 3591481 - DNA, 25 bp, Homo sapien
tggttcccatccatgcgccaacttg

SEQ ID NO: 3591482 - DNA, 25 bp, Homo sapien
catccatgcgccaacttggagagtg

SEQ ID NO: 3591483 - DNA, 25 bp, Homo sapien
gcatctgttttcaatggttcccatc

SEQ ID NO: 3591484 - DNA, 25 bp, Homo sapien
ggataacatagactatacatctttg

SEQ ID NO: 3591485 - DNA, 25 bp, Homo sapien
ggtcagtgattctgggtcttgatca

SEQ ID NO: 3591486 - DNA, 25 bp, Homo sapien
cagaaaatagtggataacatagact

SEQ ID NO: 3591487 - DNA, 25 bp, Homo sapien
cagggtcagtgattctgggtcttga

SEQ ID NO: 3591488 - DNA, 25 bp, Homo sapien
gatatccaaggccagcaacctcctt

SEQ ID NO: 3591489 - DNA, 25 bp, Homo sapien
tgatatccaaggccagcaacctcct

SEQ ID NO: 3591490 - DNA, 25 bp, Homo sapien
gctagtccgggatcgcgagttcgac

SEQ ID NO: 3591491 - DNA, 25 bp, Homo sapien
cagagtaccggacaggagcggctat

SEQ ID NO: 3591492 - DNA, 25 bp, Homo sapien
cggctataatggctgtggaaatcac

SEQ ID NO: 3591493 - DNA, 25 bp, Homo sapien
tgaggcgtggaccacagagctagtc

SEQ ID NO: 3591494 - DNA, 25 bp, Homo sapien
gacaggtacctgcaggcttgctggt

SEQ ID NO: 3591495 - DNA, 25 bp, Homo sapien
gccaccagtgtaggcagatgggctc

SEQ ID NO: 3591496 - DNA, 25 bp, Homo sapien
ttggctggaagattgtgaaactcgc

SEQ ID NO: 3591497 - DNA, 25 bp, Homo sapien
cgcgtcatagatcctctgctgttgg

SEQ ID NO: 3591498 - DNA, 25 bp, Homo sapien
agttgggtaagactgtctgggtcct

SEQ ID NO: 3591499 - DNA, 25 bp, Homo sapien
gttgggtaagactgtctgggtcctg

SEQ ID NO: 3591500 - DNA, 25 bp, Homo sapien
ttgggtaagactgtctgggtcctgg

SEQ ID NO: 3591501 - DNA, 25 bp, Homo sapien
taaggcttgctaagacttgaagaca

SEQ ID NO: 3591502 - DNA, 25 bp, Homo sapien
aagacagagcaggagtaaccgtaga

SEQ ID NO: 3591503 - DNA, 25 bp, Homo sapien
tgtaaggcttgctaagacttgaaga

SEQ ID NO: 3591504 - DNA, 25 bp, Homo sapien
gtaaccgtagaaggccagatgtctt

SEQ ID NO: 3591505 - DNA, 25 bp, Homo sapien
taataacctgtgctgaattataaat

SEQ ID NO: 3591506 - DNA, 25 bp, Homo sapien
gttacaaacataagttatcataatg

SEQ ID NO: 3591507 - DNA, 25 bp, Homo sapien
ctataacgttaagcatgcatttcct

SEQ ID NO: 3591508 - DNA, 25 bp, Homo sapien
aacacactacaattttcatagacaa

SEQ ID NO: 3591509 - DNA, 25 bp, Homo sapien
aaattctccatatctctgttggtct

SEQ ID NO: 3591510 - DNA, 25 bp, Homo sapien
catgactttgtagtaaaattctcca

SEQ ID NO: 3591511 - DNA, 25 bp, Homo sapien
aaaattctccatatctctgttggtc

SEQ ID NO: 3591512 - DNA, 25 bp, Homo sapien
gattcaacatccactggaaaactct

SEQ ID NO: 3591513 - DNA, 25 bp, Homo sapien
catccactggaaaactctaggctga

SEQ ID NO: 3591514 - DNA, 25 bp, Homo sapien
ccctgaaacttgaacgtcatcttct

SEQ ID NO: 3591515 - DNA, 25 bp, Homo sapien
aattccttgactgtcttatgatttg

SEQ ID NO: 3591516 - DNA, 25 bp, Homo sapien
ttcttaaggtactgcgacttctggc

SEQ ID NO: 3591517 - DNA, 25 bp, Homo sapien
gcaggtatcaaggagctccgcatta

SEQ ID NO: 3591518 - DNA, 25 bp, Homo sapien
tcatttccctaaaaggttgacataa

SEQ ID NO: 3591519 - DNA, 25 bp, Homo sapien
ttgacacatattttacatcctcagt

SEQ ID NO: 3591520 - DNA, 25 bp, Homo sapien
ggttctgggtcactgtctgatgcat

SEQ ID NO: 3591521 - DNA, 25 bp, Homo sapien
tgggatgtggcccatttttgggttc

SEQ ID NO: 3591522 - DNA, 25 bp, Homo sapien
gattctgatcctgggttatgcacaa

SEQ ID NO: 3591523 - DNA, 25 bp, Homo sapien
ctcacacaaatatgtgtttcatttc

SEQ ID NO: 3591524 - DNA, 25 bp, Homo sapien
atcactgactttcatgtgtgagtca

SEQ ID NO: 3591525 - DNA, 25 bp, Homo sapien
cactgactttcatgtgtgagtcact

SEQ ID NO: 3591526 - DNA, 25 bp, Homo sapien
tcactgactttcatgtgtgagtcac

SEQ ID NO: 3591527 - DNA, 25 bp, Homo sapien
agttctcatcacctagtgcctgtcc

SEQ ID NO: 3591528 - DNA, 25 bp, Homo sapien
tcatcacctagtgcctgtcctgttc

SEQ ID NO: 3591529 - DNA, 25 bp, Homo sapien
aagttctcatcacctagtgcctgtc

SEQ ID NO: 3591530 - DNA, 25 bp, Homo sapien
tctcatcacctagtgcctgtcctgt

SEQ ID NO: 3591531 - DNA, 25 bp, Homo sapien
gcttgttaccacaggtatggaattc

SEQ ID NO: 3591532 - DNA, 25 bp, Homo sapien
tggaattcttcactagttctaggct

SEQ ID NO: 3591533 - DNA, 25 bp, Homo sapien
agttctaggctctcctctaggctca

SEQ ID NO: 3591534 - DNA, 25 bp, Homo sapien
tgtgccattttgtggtctgacagct

SEQ ID NO: 3591535 - DNA, 25 bp, Homo sapien
gtagacacacatttgttgctgttat

SEQ ID NO: 3591536 - DNA, 25 bp, Homo sapien
ttcaaagtagacacacatttgttgc

SEQ ID NO: 3591537 - DNA, 25 bp, Homo sapien
ttgctgttatttgggggaaaatcca

SEQ ID NO: 3591538 - DNA, 25 bp, Homo sapien
cctccattcaaagtagacacacatt

SEQ ID NO: 3591539 - DNA, 25 bp, Homo sapien
aaacagcgcaactttttcacatttc

SEQ ID NO: 3591540 - DNA, 25 bp, Homo sapien
cagagtggttctgtggatactgacg

SEQ ID NO: 3591541 - DNA, 25 bp, Homo sapien
gatactgacggcctgaatccaaaga

SEQ ID NO: 3591542 - DNA, 25 bp, Homo sapien
acagaaattgaggaatgaaaattgg

SEQ ID NO: 3591543 - DNA, 25 bp, Homo sapien
agagagtccgatatactgtgtagac

SEQ ID NO: 3591544 - DNA, 25 bp, Homo sapien
agtttgtatatcagactcatagcag

SEQ ID NO: 3591545 - DNA, 25 bp, Homo sapien
cagtttgtatatcagactcatagca

SEQ ID NO: 3591546 - DNA, 25 bp, Homo sapien
cacaaaaccataaccgacagaaaat

SEQ ID NO: 3591547 - DNA, 25 bp, Homo sapien
gaaagttcttgtctttagagtatat

SEQ ID NO: 3591548 - DNA, 25 bp, Homo sapien
ccataaccgacagaaaatattcaac

SEQ ID NO: 3591549 - DNA, 25 bp, Homo sapien
ctttagagtatatcaataactctga

SEQ ID NO: 3591550 - DNA, 25 bp, Homo sapien
ccatggtaattgtgtcagcagtgtt

SEQ ID NO: 3591551 - DNA, 25 bp, Homo sapien
ccaacatgaacacccatggtaattg

SEQ ID NO: 3591552 - DNA, 25 bp, Homo sapien
cccatggtaattgtgtcagcagtgt

SEQ ID NO: 3591553 - DNA, 25 bp, Homo sapien
gctccaacatgaacacccatggtaa

SEQ ID NO: 3591554 - DNA, 25 bp, Homo sapien
ttcctcagagggcttaacaggtttc

SEQ ID NO: 3591555 - DNA, 25 bp, Homo sapien
cataagggtggttaacagtcagtcc

SEQ ID NO: 3591556 - DNA, 25 bp, Homo sapien
taacctgacgttacatcacagagtg

SEQ ID NO: 3591557 - DNA, 25 bp, Homo sapien
ctctggagccagaactacttgagat

SEQ ID NO: 3591558 - DNA, 25 bp, Homo sapien
tgttaaccctgtctaaaagatggca

SEQ ID NO: 3591559 - DNA, 25 bp, Homo sapien
gtgccatgggcatgaaatttcatta

SEQ ID NO: 3591560 - DNA, 25 bp, Homo sapien
tgccatgggcatgaaatttcattaa

SEQ ID NO: 3591561 - DNA, 25 bp, Homo sapien
ccagcatagtcacggatctcaccat

SEQ ID NO: 3591562 - DNA, 25 bp, Homo sapien
ggtctccttgccgatattttgtgga

SEQ ID NO: 3591563 - DNA, 25 bp, Homo sapien
ttttgtggacccagcatagtcacgg

SEQ ID NO: 3591564 - DNA, 25 bp, Homo sapien
cggatctcaccattctttactgact

SEQ ID NO: 3591565 - DNA, 25 bp, Homo sapien
aagggcaagctaaatgaatgttgtc

SEQ ID NO: 3591566 - DNA, 25 bp, Homo sapien
gaaaaccccttatggtctaatcatc

SEQ ID NO: 3591567 - DNA, 25 bp, Homo sapien
gagtcttgatcccattaacaaggga

SEQ ID NO: 3591568 - DNA, 25 bp, Homo sapien
tctagaggctgttaaattcaagatc

SEQ ID NO: 3591569 - DNA, 25 bp, Homo sapien
catatagaagaggatctatagttct

SEQ ID NO: 3591570 - DNA, 25 bp, Homo sapien
gatgtccacggccaattaaacatat

SEQ ID NO: 3591571 - DNA, 25 bp, Homo sapien
ggatctatagttctgattagaacac

SEQ ID NO: 3591572 - DNA, 25 bp, Homo sapien
tgatatattgatgtccacggccaat

SEQ ID NO: 3591573 - DNA, 25 bp, Homo sapien
tgtagattcgaatggaagccagaaa

SEQ ID NO: 3591574 - DNA, 25 bp, Homo sapien
tagatttagcgaaactgacagccag

SEQ ID NO: 3591575 - DNA, 25 bp, Homo sapien
tgacagccagcataaggactattct

SEQ ID NO: 3591576 - DNA, 25 bp, Homo sapien
tagagtacgaaagtgagacaagata

SEQ ID NO: 3591577 - DNA, 25 bp, Homo sapien
tgtgttcctacactagcctgagggt

SEQ ID NO: 3591578 - DNA, 25 bp, Homo sapien
tgcatgatctccatgaagcgctcct

SEQ ID NO: 3591579 - DNA, 25 bp, Homo sapien
aggagcacggcgttcaccgtgtgtt

SEQ ID NO: 3591580 - DNA, 25 bp, Homo sapien
tcctcccctccatgcatgttgagga

SEQ ID NO: 3591581 - DNA, 25 bp, Homo sapien
tatagagcccttactctccaagcag

SEQ ID NO: 3591582 - DNA, 25 bp, Homo sapien
agcccttactctccaagcagaaaat

SEQ ID NO: 3591583 - DNA, 25 bp, Homo sapien
ccttactctccaagcagaaaattgt

SEQ ID NO: 3591584 - DNA, 25 bp, Homo sapien
ctgatctatagagcccttactctcc

SEQ ID NO: 3591585 - DNA, 25 bp, Homo sapien
tgggaattggaaaacgactcaaaga

SEQ ID NO: 3591586 - DNA, 25 bp, Homo sapien
catcagcccaatcgtgggaattgga

SEQ ID NO: 3591587 - DNA, 25 bp, Homo sapien
caatcgtgggaattggaaaacgact

SEQ ID NO: 3591588 - DNA, 25 bp, Homo sapien
cagcccaatcgtgggaattggaaaa

SEQ ID NO: 3591589 - DNA, 25 bp, Homo sapien
aggaagggactctcgcctggatctc

SEQ ID NO: 3591590 - DNA, 25 bp, Homo sapien
cacagttcgttaagcccagggacat

SEQ ID NO: 3591591 - DNA, 25 bp, Homo sapien
taagtgaacgcgtcagtctgtgctg

SEQ ID NO: 3591592 - DNA, 25 bp, Homo sapien
gaaaatgccggttgactagtgagac

SEQ ID NO: 3591593 - DNA, 25 bp, Homo sapien
aagctggaggattccctctgaatga

SEQ ID NO: 3591594 - DNA, 25 bp, Homo sapien
ggacccgaggaaccgctctctctga

SEQ ID NO: 3591595 - DNA, 25 bp, Homo sapien
ccgtctgctgcgagaggcagggcaa

SEQ ID NO: 3591596 - DNA, 25 bp, Homo sapien
taagaactccgcaattcgcctctgc

SEQ ID NO: 3591597 - DNA, 25 bp, Homo sapien
tctgttctgcaaagccatcctttct

SEQ ID NO: 3591598 - DNA, 25 bp, Homo sapien
tctgcaaagccatcctttcttgcca

SEQ ID NO: 3591599 - DNA, 25 bp, Homo sapien
gttctgcaaagccatcctttcttgc

SEQ ID NO: 3591600 - DNA, 25 bp, Homo sapien
ctgcaaagccatcctttcttgccat

SEQ ID NO: 3591601 - DNA, 25 bp, Homo sapien
tagaaacactggaggaacagaaatg

SEQ ID NO: 3591602 - DNA, 25 bp, Homo sapien
ctgtaaaagactgtagaaacactgg

SEQ ID NO: 3591603 - DNA, 25 bp, Homo sapien
gaaacactggaggaacagaaatggt

SEQ ID NO: 3591604 - DNA, 25 bp, Homo sapien
tgtagaaacactggaggaacagaaa

SEQ ID NO: 3591605 - DNA, 25 bp, Homo sapien
tgtgtcgttcaatccctctaccctt

SEQ ID NO: 3591606 - DNA, 25 bp, Homo sapien
gctgtgtcgttcaatccctctaccc

SEQ ID NO: 3591607 - DNA, 25 bp, Homo sapien
tgctgtgtcgttcaatccctctacc

SEQ ID NO: 3591608 - DNA, 25 bp, Homo sapien
gctgctgtgtcgttcaatccctcta

SEQ ID NO: 3591609 - DNA, 25 bp, Homo sapien
taattgtagcaattgacttaacttc

SEQ ID NO: 3591610 - DNA, 25 bp, Homo sapien
aattaatttaacttgagcaattgac

SEQ ID NO: 3591611 - DNA, 25 bp, Homo sapien
gaagttgacttgtgaaattaattta

SEQ ID NO: 3591612 - DNA, 25 bp, Homo sapien
taacttgagcaattgacgtaattgt

SEQ ID NO: 3591613 - DNA, 25 bp, Homo sapien
tctgtatgagattttaagggcctcg

SEQ ID NO: 3591614 - DNA, 25 bp, Homo sapien
tgttgcctttgggttgtctccttcg

SEQ ID NO: 3591615 - DNA, 25 bp, Homo sapien
ttcctgtttcacgctccagtaacat

SEQ ID NO: 3591616 - DNA, 25 bp, Homo sapien
tcggtttcaatttcaaggcttgcat

SEQ ID NO: 3591617 - DNA, 25 bp, Homo sapien
ccccaccttgtctggcatcattcat

SEQ ID NO: 3591618 - DNA, 25 bp, Homo sapien
tgtgttagccacagttccaggagag

SEQ ID NO: 3591619 - DNA, 25 bp, Homo sapien
agttccaggagagatttccccacct

SEQ ID NO: 3591620 - DNA, 25 bp, Homo sapien
agccacagttccaggagagatttcc

SEQ ID NO: 3591621 - DNA, 25 bp, Homo sapien
ggcttcctgacgaccacttagtccg

SEQ ID NO: 3591622 - DNA, 25 bp, Homo sapien
aacttcctcaggtgtaggggacaga

SEQ ID NO: 3591623 - DNA, 25 bp, Homo sapien
cttccgataatgaggtctgcgttgc

SEQ ID NO: 3591624 - DNA, 25 bp, Homo sapien
agagctccctcttccgataatgagg

SEQ ID NO: 3591625 - DNA, 25 bp, Homo sapien
tccataaacataaagcgtaggcaga

SEQ ID NO: 3591626 - DNA, 25 bp, Homo sapien
cataaacataaagcgtaggcagatg

SEQ ID NO: 3591627 - DNA, 25 bp, Homo sapien
acataaagcgtaggcagatgtgtag

SEQ ID NO: 3591628 - DNA, 25 bp, Homo sapien
taaacataaagcgtaggcagatgtg

SEQ ID NO: 3591629 - DNA, 25 bp, Homo sapien
ctttggcagagaaacttgcaaacac

SEQ ID NO: 3591630 - DNA, 25 bp, Homo sapien
gctttggcagagaaacttgcaaaca

SEQ ID NO: 3591631 - DNA, 25 bp, Homo sapien
tttggcagagaaacttgcaaacaca

SEQ ID NO: 3591632 - DNA, 25 bp, Homo sapien
ggctttggcagagaaacttgcaaac

SEQ ID NO: 3591633 - DNA, 25 bp, Homo sapien
tgtgtgtcatcaacaaggcctgagg

SEQ ID NO: 3591634 - DNA, 25 bp, Homo sapien
tgtgtcatcaacaaggcctgaggat

SEQ ID NO: 3591635 - DNA, 25 bp, Homo sapien
tcttgtgtgtcatcaacaaggcctg

SEQ ID NO: 3591636 - DNA, 25 bp, Homo sapien
tgtcatcaacaaggcctgaggatgt

SEQ ID NO: 3591637 - DNA, 25 bp, Homo sapien
cttcatatcacactgaccagctatc

SEQ ID NO: 3591638 - DNA, 25 bp, Homo sapien
gcaatttccaagattgacttagacc

SEQ ID NO: 3591639 - DNA, 25 bp, Homo sapien
cactgaccagctatcattagaaaga

SEQ ID NO: 3591640 - DNA, 25 bp, Homo sapien
tccaagattgacttagacccgtcat

SEQ ID NO: 3591641 - DNA, 25 bp, Homo sapien
cgccattgcacccagcctgggccac

SEQ ID NO: 3591642 - DNA, 25 bp, Homo sapien
attgcgccattgcacccagcctggg

SEQ ID NO: 3591643 - DNA, 25 bp, Homo sapien
gccattgcacccagcctgggccaca

SEQ ID NO: 3591644 - DNA, 25 bp, Homo sapien
tgcgccattgcacccagcctgggcc

SEQ ID NO: 3591645 - DNA, 25 bp, Homo sapien
attaattaagaagtatgtgacagga

SEQ ID NO: 3591646 - DNA, 25 bp, Homo sapien
taattaagaagtatgtgacaggaat

SEQ ID NO: 3591647 - DNA, 25 bp, Homo sapien
ttaattaagaagtatgtgacaggaa

SEQ ID NO: 3591648 - DNA, 25 bp, Homo sapien
aattaagaagtatgtgacaggaata

SEQ ID NO: 3591649 - DNA, 25 bp, Homo sapien
tcctgtttccttgtagtttgttaga

SEQ ID NO: 3591650 - DNA, 25 bp, Homo sapien
ccttgtagtttgttagatgatgaat

SEQ ID NO: 3591651 - DNA, 25 bp, Homo sapien
gttagatgatgaatttctgagtcag

SEQ ID NO: 3591652 - DNA, 25 bp, Homo sapien
tttccttgtagtttgttagatgatg

SEQ ID NO: 3591653 - DNA, 25 bp, Homo sapien
cactcatgtctgtgcacaggcgagg

SEQ ID NO: 3591654 - DNA, 25 bp, Homo sapien
ccactcatgtctgtgcacaggcgag

SEQ ID NO: 3591655 - DNA, 25 bp, Homo sapien
gccactcatgtctgtgcacaggcga

SEQ ID NO: 3591656 - DNA, 25 bp, Homo sapien
tttcactaaagatgtccttaggctt

SEQ ID NO: 3591657 - DNA, 25 bp, Homo sapien
tcactaaagatgtccttaggcttct

SEQ ID NO: 3591658 - DNA, 25 bp, Homo sapien
cttaggcttctagaagcaacaccat

SEQ ID NO: 3591659 - DNA, 25 bp, Homo sapien
aagcaacaccataacattttctcat

SEQ ID NO: 3591660 - DNA, 25 bp, Homo sapien
ctggaggtactgagatgttcaggag

SEQ ID NO: 3591661 - DNA, 25 bp, Homo sapien
tggaggtactgagatgttcaggagc

SEQ ID NO: 3591662 - DNA, 25 bp, Homo sapien
tctacgtgtatccagtgataaatcc

SEQ ID NO: 3591663 - DNA, 25 bp, Homo sapien
tctccaaaattctacgtgtatccag

SEQ ID NO: 3591664 - DNA, 25 bp, Homo sapien
aaattctacgtgtatccagtgataa

SEQ ID NO: 3591665 - DNA, 25 bp, Homo sapien
tccaaaattctacgtgtatccagtg

SEQ ID NO: 3591666 - DNA, 25 bp, Homo sapien
tgttctgatataggacagccatttc

SEQ ID NO: 3591667 - DNA, 25 bp, Homo sapien
gttctgatataggacagccatttcc

SEQ ID NO: 3591668 - DNA, 25 bp, Homo sapien
ctgttctgatataggacagccattt

SEQ ID NO: 3591669 - DNA, 25 bp, Homo sapien
taataaactgcgcttcaaattcact

SEQ ID NO: 3591670 - DNA, 25 bp, Homo sapien
taaactgcgcttcaaattcacttat

SEQ ID NO: 3591671 - DNA, 25 bp, Homo sapien
cagtagtaataaactgcgcttcaaa

SEQ ID NO: 3591672 - DNA, 25 bp, Homo sapien
aaagtcagtagtaataaactgcgct

SEQ ID NO: 3591673 - DNA, 25 bp, Homo sapien
gcttcgtatcttctggctctgtacc

SEQ ID NO: 3591674 - DNA, 25 bp, Homo sapien
caatcaactgtgcaattaccttgcg

SEQ ID NO: 3591675 - DNA, 25 bp, Homo sapien
taccttgcgcttcgtatcttctggc

SEQ ID NO: 3591676 - DNA, 25 bp, Homo sapien
tgtgcaattaccttgcgcttcgtat

SEQ ID NO: 3591677 - DNA, 25 bp, Homo sapien
tctatctacaaaatcaggtccatca

SEQ ID NO: 3591678 - DNA, 25 bp, Homo sapien
gctttcagggctatctctggcctga

SEQ ID NO: 3591679 - DNA, 25 bp, Homo sapien
caaaatcaggtccatcagcttgttt

SEQ ID NO: 3591680 - DNA, 25 bp, Homo sapien
ttcagggctatctctggcctgactg

SEQ ID NO: 3591681 - DNA, 25 bp, Homo sapien
gattatggcagtatattccagcagc

SEQ ID NO: 3591682 - DNA, 25 bp, Homo sapien
ccaaatagtaaactcgagtgtgaaa

SEQ ID NO: 3591683 - DNA, 25 bp, Homo sapien
tacctccaaaggctatgtgcaggat

SEQ ID NO: 3591684 - DNA, 25 bp, Homo sapien
caaaattgaagctatgattgtccat

SEQ ID NO: 3591685 - DNA, 25 bp, Homo sapien
gacaagcctattgcacttaacagag

SEQ ID NO: 3591686 - DNA, 25 bp, Homo sapien
tgcacttaacagagatcactttaga

SEQ ID NO: 3591687 - DNA, 25 bp, Homo sapien
cacttaacagagatcactttagaac

SEQ ID NO: 3591688 - DNA, 25 bp, Homo sapien
cttaacagagatcactttagaacaa

SEQ ID NO: 3591689 - DNA, 25 bp, Homo sapien
tgtgttgttcttcaaagctctgcat

SEQ ID NO: 3591690 - DNA, 25 bp, Homo sapien
ttgtgttgttcttcaaagctctgca

SEQ ID NO: 3591691 - DNA, 25 bp, Homo sapien
ctttgtgttgttcttcaaagctctg

SEQ ID NO: 3591692 - DNA, 25 bp, Homo sapien
tttgtgttgttcttcaaagctctgc

SEQ ID NO: 3591693 - DNA, 25 bp, Homo sapien
actgtggccctattatttggtgctc

SEQ ID NO: 3591694 - DNA, 25 bp, Homo sapien
ctgtggccctattatttggtgctct

SEQ ID NO: 3591695 - DNA, 25 bp, Homo sapien
tagtccaagtgctctggcatcttgg

SEQ ID NO: 3591696 - DNA, 25 bp, Homo sapien
ttagtccaagtgctctggcatcttg

SEQ ID NO: 3591697 - DNA, 25 bp, Homo sapien
agtccaagtgctctggcatcttgga

SEQ ID NO: 3591698 - DNA, 25 bp, Homo sapien
tcgtgtacgtttgtatcctgtgctc

SEQ ID NO: 3591699 - DNA, 25 bp, Homo sapien
gtgtacgtttgtatcctgtgctcat

SEQ ID NO: 3591700 - DNA, 25 bp, Homo sapien
agtcgtgtacgtttgtatcctgtgc

SEQ ID NO: 3591701 - DNA, 25 bp, Homo sapien
cagtcgtgtacgtttgtatcctgtg

SEQ ID NO: 3591702 - DNA, 25 bp, Homo sapien
gatgccaatcaaaagtaacgcagct

SEQ ID NO: 3591703 - DNA, 25 bp, Homo sapien
tcagtaattacaggtggctcggtgc

SEQ ID NO: 3591704 - DNA, 25 bp, Homo sapien
ttcaatctccacgataatattgtgc

SEQ ID NO: 3591705 - DNA, 25 bp, Homo sapien
tattgtgcaattttgtgaggatgcc

SEQ ID NO: 3591706 - DNA, 25 bp, Homo sapien
caggaatcctgtgagatttcatgag

SEQ ID NO: 3591707 - DNA, 25 bp, Homo sapien
ttccatcagccacgggtatctggat

SEQ ID NO: 3591708 - DNA, 25 bp, Homo sapien
ttcatgaggagggaacattgattca

SEQ ID NO: 3591709 - DNA, 25 bp, Homo sapien
gccacgggtatctggatacagcagg

SEQ ID NO: 3591710 - DNA, 25 bp, Homo sapien
accaaagtgatttaaggctactaga

SEQ ID NO: 3591711 - DNA, 25 bp, Homo sapien
aaacacaagtactcaccaaagtgat

SEQ ID NO: 3591712 - DNA, 25 bp, Homo sapien
taaggctactagaaattttctgtgg

SEQ ID NO: 3591713 - DNA, 25 bp, Homo sapien
ggtcccacaaaattgagtaaacaca

SEQ ID NO: 3591714 - DNA, 25 bp, Homo sapien
ctgcaggtaacatagacagaggtgg

SEQ ID NO: 3591715 - DNA, 25 bp, Homo sapien
gcaggtaacatagacagaggtggtg

SEQ ID NO: 3591716 - DNA, 25 bp, Homo sapien
tgcaggtaacatagacagaggtggt

SEQ ID NO: 3591717 - DNA, 25 bp, Homo sapien
tagaagaaagtataggactcctttg

SEQ ID NO: 3591718 - DNA, 25 bp, Homo sapien
ggctctaataacatgcactgctgca

SEQ ID NO: 3591719 - DNA, 25 bp, Homo sapien
tatgattcctggctctaataacatg

SEQ ID NO: 3591720 - DNA, 25 bp, Homo sapien
taaggaataatttatgattcctggc

SEQ ID NO: 3591721 - DNA, 25 bp, Homo sapien
aaaagctaatttactgtcaggataa

SEQ ID NO: 3591722 - DNA, 25 bp, Homo sapien
tggaagtcgtattcactggcaccag

SEQ ID NO: 3591723 - DNA, 25 bp, Homo sapien
atagacatgcttgaaacaataatgg

SEQ ID NO: 3591724 - DNA, 25 bp, Homo sapien
aaacaataatggacattcagtgtat

SEQ ID NO: 3591725 - DNA, 25 bp, Homo sapien
tatcagcaaagccaaatagacatgc

SEQ ID NO: 3591726 - DNA, 25 bp, Homo sapien
ttctgtgccatcattagccacctgc

SEQ ID NO: 3591727 - DNA, 25 bp, Homo sapien
tcttgtcgttcctttcttctgtgcc

SEQ ID NO: 3591728 - DNA, 25 bp, Homo sapien
gccgggcggtgaatctcttgtcgtt

SEQ ID NO: 3591729 - DNA, 25 bp, Homo sapien
tcaggctctcccttataccacagat

SEQ ID NO: 3591730 - DNA, 25 bp, Homo sapien
caactctcgaaattgattcttgtag

SEQ ID NO: 3591731 - DNA, 25 bp, Homo sapien
cagtgaatactgctcacaggccaaa

SEQ ID NO: 3591732 - DNA, 25 bp, Homo sapien
ccaaagacccagctgagttcagtga

SEQ ID NO: 3591733 - DNA, 25 bp, Homo sapien
ccatcagtgtgtatcgccaaagacc

SEQ ID NO: 3591734 - DNA, 25 bp, Homo sapien
tctactttgatcaccgttacatcat

SEQ ID NO: 3591735 - DNA, 25 bp, Homo sapien
tttgatcaccgttacatcattatta

SEQ ID NO: 3591736 - DNA, 25 bp, Homo sapien
actttgatcaccgttacatcattat

SEQ ID NO: 3591737 - DNA, 25 bp, Homo sapien
tttttctactttgatcaccgttaca

SEQ ID NO: 3591738 - DNA, 25 bp, Homo sapien
ttcatctgatgctcctcgagggctg

SEQ ID NO: 3591739 - DNA, 25 bp, Homo sapien
ggctgagagaaaaatcgtagtctcc

SEQ ID NO: 3591740 - DNA, 25 bp, Homo sapien
ctcgagggctgagagaaaaatcgta

SEQ ID NO: 3591741 - DNA, 25 bp, Homo sapien
tcatctgatgctcctcgagggctga

SEQ ID NO: 3591742 - DNA, 25 bp, Homo sapien
ctttttactggcttctcattcccca

SEQ ID NO: 3591743 - DNA, 25 bp, Homo sapien
cattcatttgttagcctttttactg

SEQ ID NO: 3591744 - DNA, 25 bp, Homo sapien
gttagcctttttactggcttctcat

SEQ ID NO: 3591745 - DNA, 25 bp, Homo sapien
tcatttgttagcctttttactggct

SEQ ID NO: 3591746 - DNA, 25 bp, Homo sapien
tgaatttgtaaaatccatgctttag

SEQ ID NO: 3591747 - DNA, 25 bp, Homo sapien
tcctgcaataaaggctagaacaaag

SEQ ID NO: 3591748 - DNA, 25 bp, Homo sapien
ttgtgaatacgcatgaatatgtctg

SEQ ID NO: 3591749 - DNA, 25 bp, Homo sapien
ctgtgactcctgcaataaaggctag

SEQ ID NO: 3591750 - DNA, 25 bp, Homo sapien
ttaatcttcctctgcaatctgtttc

SEQ ID NO: 3591751 - DNA, 25 bp, Homo sapien
taatcttcctctgcaatctgtttcc

SEQ ID NO: 3591752 - DNA, 25 bp, Homo sapien
actgccgtaggtttgtcgtttctgg

SEQ ID NO: 3591753 - DNA, 25 bp, Homo sapien
ggcaattgtcaaggtgtatgttttt

SEQ ID NO: 3591754 - DNA, 25 bp, Homo sapien
caggtaagaactgccgtaggtttgt

SEQ ID NO: 3591755 - DNA, 25 bp, Homo sapien
tttcttatgcaggtaagaactgccg

SEQ ID NO: 3591756 - DNA, 25 bp, Homo sapien
ctccaaagccactactgagcgggaa

SEQ ID NO: 3591757 - DNA, 25 bp, Homo sapien
tccaaagccactactgagcgggaag

SEQ ID NO: 3591758 - DNA, 25 bp, Homo sapien
aagccactactgagcgggaagagag

SEQ ID NO: 3591759 - DNA, 25 bp, Homo sapien
caaagccactactgagcgggaagag

SEQ ID NO: 3591760 - DNA, 25 bp, Homo sapien
taatgtgccatgcatgctcttagtg

SEQ ID NO: 3591761 - DNA, 25 bp, Homo sapien
agagatcatatttaccccttgagtc

SEQ ID NO: 3591762 - DNA, 25 bp, Homo sapien
ggtgagctctatctgaatccagctg

SEQ ID NO: 3591763 - DNA, 25 bp, Homo sapien
tcttagtgttgagatatcttaaata

SEQ ID NO: 3591764 - DNA, 25 bp, Homo sapien
gacttaaatcggagaatgtaatgaa

SEQ ID NO: 3591765 - DNA, 25 bp, Homo sapien
ttatgaggacttaaatcggagaatg

SEQ ID NO: 3591766 - DNA, 25 bp, Homo sapien
tgaggacttaaatcggagaatgtaa

SEQ ID NO: 3591767 - DNA, 25 bp, Homo sapien
aatcggagaatgtaatgaattactc

SEQ ID NO: 3591768 - DNA, 25 bp, Homo sapien
tggttaggcaatgtagcctgcagag

SEQ ID NO: 3591769 - DNA, 25 bp, Homo sapien
acttcaacaatgtgaactctagctg

SEQ ID NO: 3591770 - DNA, 25 bp, Homo sapien
cgccaacagccttacatacactggt

SEQ ID NO: 3591771 - DNA, 25 bp, Homo sapien
tacactggtctatatgatggatggt

SEQ ID NO: 3591772 - DNA, 25 bp, Homo sapien
cgtagtaatcgaccaaatttagaag

SEQ ID NO: 3591773 - DNA, 25 bp, Homo sapien
tccgtagtaatcgaccaaatttaga

SEQ ID NO: 3591774 - DNA, 25 bp, Homo sapien
tttgcaaaagattgatattctctga

SEQ ID NO: 3591775 - DNA, 25 bp, Homo sapien
gagtacaagcagtcattaatttgca

SEQ ID NO: 3591776 - DNA, 25 bp, Homo sapien
ttactgagcgcatgctgatgtttgc

SEQ ID NO: 3591777 - DNA, 25 bp, Homo sapien
taggttggatgttagatgagtacaa

SEQ ID NO: 3591778 - DNA, 25 bp, Homo sapien
cagggaacccaatgcctaaaggttg

SEQ ID NO: 3591779 - DNA, 25 bp, Homo sapien
gaggcactcagccataaagataccg

SEQ ID NO: 3591780 - DNA, 25 bp, Homo sapien
catttagtccgaaatatgtgtggta

SEQ ID NO: 3591781 - DNA, 25 bp, Homo sapien
taaagataccgctgttcactggtgg

SEQ ID NO: 3591782 - DNA, 25 bp, Homo sapien
ccacaggcagcacggttattaagct

SEQ ID NO: 3591783 - DNA, 25 bp, Homo sapien
catttgagcagtttagaagctgtcc

SEQ ID NO: 3591784 - DNA, 25 bp, Homo sapien
taatcctccttatcagatgaggtgg

SEQ ID NO: 3591785 - DNA, 25 bp, Homo sapien
tgtctgatggtgatacactgttgca

SEQ ID NO: 3591786 - DNA, 25 bp, Homo sapien
caccacgtcagtcccaagtcagctt

SEQ ID NO: 3591787 - DNA, 25 bp, Homo sapien
acggagttttatcttgcttcccagg

SEQ ID NO: 3591788 - DNA, 25 bp, Homo sapien
ccacgtcagtcccaagtcagctttt

SEQ ID NO: 3591789 - DNA, 25 bp, Homo sapien
cggagttttatcttgcttcccaggc

SEQ ID NO: 3591790 - DNA, 25 bp, Homo sapien
aatggcaagccaccccatcttagga

SEQ ID NO: 3591791 - DNA, 25 bp, Homo sapien
gggccaagaactacctgaacagtga

SEQ ID NO: 3591792 - DNA, 25 bp, Homo sapien
aatgtgtagtgaaccggaaattcct

SEQ ID NO: 3591793 - DNA, 25 bp, Homo sapien
tcctggaagttcacgggtggagaaa

SEQ ID NO: 3591794 - DNA, 25 bp, Homo sapien
cgatgtatcttgtaacaaaacacaa

SEQ ID NO: 3591795 - DNA, 25 bp, Homo sapien
cgcgcctggcctagagtacgatgta

SEQ ID NO: 3591796 - DNA, 25 bp, Homo sapien
taatcattctcctatatggtggttg

SEQ ID NO: 3591797 - DNA, 25 bp, Homo sapien
aaaacctcaccttagaagaagagca

SEQ ID NO: 3591798 - DNA, 25 bp, Homo sapien
accagggcttgttagcgggtggcga

SEQ ID NO: 3591799 - DNA, 25 bp, Homo sapien
cttgttagcgggtggcgagtgaggg

SEQ ID NO: 3591800 - DNA, 25 bp, Homo sapien
cagggcttgttagcgggtggcgagt

SEQ ID NO: 3591801 - DNA, 25 bp, Homo sapien
cacaccagggcttgttagcgggtgg

SEQ ID NO: 3591802 - DNA, 25 bp, Homo sapien
tggagtggtgattctcgtatccttc

SEQ ID NO: 3591803 - DNA, 25 bp, Homo sapien
agaagtgctgaccagcgcccatggg

SEQ ID NO: 3591804 - DNA, 25 bp, Homo sapien
gactcagtggatgtcagtcctggag

SEQ ID NO: 3591805 - DNA, 25 bp, Homo sapien
ccttcttgtctatcataagggaaga

SEQ ID NO: 3591806 - DNA, 25 bp, Homo sapien
tgttgtagtagccaccaaaatctcg

SEQ ID NO: 3591807 - DNA, 25 bp, Homo sapien
ttaattcattgttgtagtagccacc

SEQ ID NO: 3591808 - DNA, 25 bp, Homo sapien
agtagccaccaaaatctcggagttt

SEQ ID NO: 3591809 - DNA, 25 bp, Homo sapien
gccaccaaaatctcggagttttcca

SEQ ID NO: 3591810 - DNA, 25 bp, Homo sapien
tccttgctaatccattggttttgtt

SEQ ID NO: 3591811 - DNA, 25 bp, Homo sapien
catcttccttgctaatccattggtt

SEQ ID NO: 3591812 - DNA, 25 bp, Homo sapien
tccaaacgcaaagctgtttttgcca

SEQ ID NO: 3591813 - DNA, 25 bp, Homo sapien
ctatgtatccattcacattcatctt

SEQ ID NO: 3591814 - DNA, 25 bp, Homo sapien
tactgttgtagcattaagtgagtta

SEQ ID NO: 3591815 - DNA, 25 bp, Homo sapien
actgttgtagcattaagtgagttaa

SEQ ID NO: 3591816 - DNA, 25 bp, Homo sapien
ccaaaattggagttggccttggatg

SEQ ID NO: 3591817 - DNA, 25 bp, Homo sapien
ctaaaagacggtgagtagtgaccat

SEQ ID NO: 3591818 - DNA, 25 bp, Homo sapien
caccaaaattggagttggccttgga

SEQ ID NO: 3591819 - DNA, 25 bp, Homo sapien
cggtgagtagtgaccatgagtcacc

SEQ ID NO: 3591820 - DNA, 25 bp, Homo sapien
cagcagaaatgctataggcttctta

SEQ ID NO: 3591821 - DNA, 25 bp, Homo sapien
agcagaaatgctataggcttcttac

SEQ ID NO: 3591822 - DNA, 25 bp, Homo sapien
tcagcttctttgtggtgtttggagt

SEQ ID NO: 3591823 - DNA, 25 bp, Homo sapien
gtaaaatgctatctgaatctggaca

SEQ ID NO: 3591824 - DNA, 25 bp, Homo sapien
ggatttcagataaatttcccctgga

SEQ ID NO: 3591825 - DNA, 25 bp, Homo sapien
tcagtggcccagtcttaggatttca

SEQ ID NO: 3591826 - DNA, 25 bp, Homo sapien
catgtgggttaaaaggacaatcagc

SEQ ID NO: 3591827 - DNA, 25 bp, Homo sapien
tgcattccccattgagtctccctat

SEQ ID NO: 3591828 - DNA, 25 bp, Homo sapien
tgatagcccaaatctatgccagtgt

SEQ ID NO: 3591829 - DNA, 25 bp, Homo sapien
tactttcaaagtggtaggcagacag

SEQ ID NO: 3591830 - DNA, 25 bp, Homo sapien
gatgtaaaagcttcatgcattcccc

SEQ ID NO: 3591831 - DNA, 25 bp, Homo sapien
cttaactgatgaccctgagtcgacc

SEQ ID NO: 3591832 - DNA, 25 bp, Homo sapien
taaatgcgaacgtttaaagttgcta

SEQ ID NO: 3591833 - DNA, 25 bp, Homo sapien
ctgatgaccctgagtcgaccattgg

SEQ ID NO: 3591834 - DNA, 25 bp, Homo sapien
cgtttaaagttgctatctgagtatg

SEQ ID NO: 3591835 - DNA, 25 bp, Homo sapien
cttgtatcccttaatgagagctagg

SEQ ID NO: 3591836 - DNA, 25 bp, Homo sapien
gggtctacagacttgaaggcagttc

SEQ ID NO: 3591837 - DNA, 25 bp, Homo sapien
taggaggcctacattgtctctccaa

SEQ ID NO: 3591838 - DNA, 25 bp, Homo sapien
tctacagacttgaaggcagttctcg

SEQ ID NO: 3591839 - DNA, 25 bp, Homo sapien
tctgtatcttcctcatatagaaagt

SEQ ID NO: 3591840 - DNA, 25 bp, Homo sapien
tcaggtgatctcttccagtttgtac

SEQ ID NO: 3591841 - DNA, 25 bp, Homo sapien
tacgattttccgtgatgttacctat

SEQ ID NO: 3591842 - DNA, 25 bp, Homo sapien
tgaattcctccattaatgaatactg

SEQ ID NO: 3591843 - DNA, 25 bp, Homo sapien
aggggaagtagtgtgctttcataaa

SEQ ID NO: 3591844 - DNA, 25 bp, Homo sapien
ggggaagtagtgtgctttcataaac

SEQ ID NO: 3591845 - DNA, 25 bp, Homo sapien
caggggaagtagtgtgctttcataa

SEQ ID NO: 3591846 - DNA, 25 bp, Homo sapien
ttttgcatcctctctataacctcct

SEQ ID NO: 3591847 - DNA, 25 bp, Homo sapien
gcatcataccttgttatattgtagc

SEQ ID NO: 3591848 - DNA, 25 bp, Homo sapien
ttgtagcaatttttatgcagaaaat

SEQ ID NO: 3591849 - DNA, 25 bp, Homo sapien
gaaagtttgggacgagatctttgaa

SEQ ID NO: 3591850 - DNA, 25 bp, Homo sapien
caatccctcttcacccttcccacaa

SEQ ID NO: 3591851 - DNA, 25 bp, Homo sapien
catctttgtatagataggtggtcac

SEQ ID NO: 3591852 - DNA, 25 bp, Homo sapien
caacatctttgtatagataggtggt

SEQ ID NO: 3591853 - DNA, 25 bp, Homo sapien
cctcttcacccttcccacaacatct

SEQ ID NO: 3591854 - DNA, 25 bp, Homo sapien
tgaagagtgcatccagcatgttgtc

SEQ ID NO: 3591855 - DNA, 25 bp, Homo sapien
caagttggttcccaactttgaagag

SEQ ID NO: 3591856 - DNA, 25 bp, Homo sapien
gaagagtgcatccagcatgttgtca

SEQ ID NO: 3591857 - DNA, 25 bp, Homo sapien
tcccaactttgaagagtgcatccag

SEQ ID NO: 3591858 - DNA, 25 bp, Homo sapien
tctagtcttgatcccaggctcccct

SEQ ID NO: 3591859 - DNA, 25 bp, Homo sapien
ctgatatctggaaattgatgttcta

SEQ ID NO: 3591860 - DNA, 25 bp, Homo sapien
ctttgtactgatatatgcccctgat

SEQ ID NO: 3591861 - DNA, 25 bp, Homo sapien
tcattggttaactgtgttcccttcc

SEQ ID NO: 3591862 - DNA, 25 bp, Homo sapien
tgtgagttggacatgcatctgcact

SEQ ID NO: 3591863 - DNA, 25 bp, Homo sapien
gttggacatgcatctgcactttctc

SEQ ID NO: 3591864 - DNA, 25 bp, Homo sapien
tcatgtgagttggacatgcatctgc

SEQ ID NO: 3591865 - DNA, 25 bp, Homo sapien
ctttatgttcatgtgagttggacat

SEQ ID NO: 3591866 - DNA, 25 bp, Homo sapien
gccaagatttccaccgtggttttga

SEQ ID NO: 3591867 - DNA, 25 bp, Homo sapien
gcagtcaataacataactgccaaga

SEQ ID NO: 3591868 - DNA, 25 bp, Homo sapien
caataacataactgccaagatttcc

SEQ ID NO: 3591869 - DNA, 25 bp, Homo sapien
ttccctaaggcagtcaataacataa

SEQ ID NO: 3591870 - DNA, 25 bp, Homo sapien
atctcccgttcccacctagtaggtg

SEQ ID NO: 3591871 - DNA, 25 bp, Homo sapien
ttctggagccaaatatattgctcat

SEQ ID NO: 3591872 - DNA, 25 bp, Homo sapien
agtaggtggtatataggtttttctg

SEQ ID NO: 3591873 - DNA, 25 bp, Homo sapien
ccacctagtaggtggtatataggtt

SEQ ID NO: 3591874 - DNA, 25 bp, Homo sapien
gatctttctcgtcctcactttctaa

SEQ ID NO: 3591875 - DNA, 25 bp, Homo sapien
cactttctaagaagcaaggtttaag

SEQ ID NO: 3591876 - DNA, 25 bp, Homo sapien
cacagactgttccttgtttatgatg

SEQ ID NO: 3591877 - DNA, 25 bp, Homo sapien
tcacatttcaacctggtgcttcatt

SEQ ID NO: 3591878 - DNA, 25 bp, Homo sapien
catcagtgctactgcccaaagtcac

SEQ ID NO: 3591879 - DNA, 25 bp, Homo sapien
atcaccatcagtgctactgcccaaa

SEQ ID NO: 3591880 - DNA, 25 bp, Homo sapien
gtatttttcttgacatgccccaagc

SEQ ID NO: 3591881 - DNA, 25 bp, Homo sapien
ttttcttgacatgccccaagcattt

SEQ ID NO: 3591882 - DNA, 25 bp, Homo sapien
tcccctggctgatcactgcggtcat

SEQ ID NO: 3591883 - DNA, 25 bp, Homo sapien
catcccctggctgatcactgcggtc

SEQ ID NO: 3591884 - DNA, 25 bp, Homo sapien
tcatcccctggctgatcactgcggt

SEQ ID NO: 3591885 - DNA, 25 bp, Homo sapien
atcccctggctgatcactgcggtca

SEQ ID NO: 3591886 - DNA, 25 bp, Homo sapien
agaagtagctgataggccctctgtg

SEQ ID NO: 3591887 - DNA, 25 bp, Homo sapien
aagtagctgataggccctctgtgat

SEQ ID NO: 3591888 - DNA, 25 bp, Homo sapien
agctgataggccctctgtgatcaca

SEQ ID NO: 3591889 - DNA, 25 bp, Homo sapien
ctgataggccctctgtgatcacagc

SEQ ID NO: 3591890 - DNA, 25 bp, Homo sapien
cgtaagatcagcaactatctggatg

SEQ ID NO: 3591891 - DNA, 25 bp, Homo sapien
cctctgggatgatcgtaagatcagc

SEQ ID NO: 3591892 - DNA, 25 bp, Homo sapien
agtttcttcctctgggatgatcgta

SEQ ID NO: 3591893 - DNA, 25 bp, Homo sapien
gatgatcgtaagatcagcaactatc

SEQ ID NO: 3591894 - DNA, 25 bp, Homo sapien
tcctggatggtttccatatcacact

SEQ ID NO: 3591895 - DNA, 25 bp, Homo sapien
tggatggtttccatatcacactcag

SEQ ID NO: 3591896 - DNA, 25 bp, Homo sapien
tggtttccatatcacactcagattc

SEQ ID NO: 3591897 - DNA, 25 bp, Homo sapien
tgtcctggatggtttccatatcaca

SEQ ID NO: 3591898 - DNA, 25 bp, Homo sapien
attggcatcattatcgacctctgcc

SEQ ID NO: 3591899 - DNA, 25 bp, Homo sapien
ggcatcattatcgacctctgccaaa

SEQ ID NO: 3591900 - DNA, 25 bp, Homo sapien
cattggcatcattatcgacctctgc

SEQ ID NO: 3591901 - DNA, 25 bp, Homo sapien
catcattatcgacctctgccaaatc

SEQ ID NO: 3591902 - DNA, 25 bp, Homo sapien
catgtcactttctaccagcatatta

SEQ ID NO: 3591903 - DNA, 25 bp, Homo sapien
gatcaatctacctggcatgtcactt

SEQ ID NO: 3591904 - DNA, 25 bp, Homo sapien
tagtctgcatattctaccacggaga

SEQ ID NO: 3591905 - DNA, 25 bp, Homo sapien
ccagcatattagtctgctctaaaac

SEQ ID NO: 3591906 - DNA, 25 bp, Homo sapien
gccattcttcaaacattccacgtat

SEQ ID NO: 3591907 - DNA, 25 bp, Homo sapien
gctttgtgattagtctttctctttc

SEQ ID NO: 3591908 - DNA, 25 bp, Homo sapien
cacgtattttaatgtttatgaatgc

SEQ ID NO: 3591909 - DNA, 25 bp, Homo sapien
tcaaacattccacgtattttaatgt

SEQ ID NO: 3591910 - DNA, 25 bp, Homo sapien
catcattatctcctctgagctcctg

SEQ ID NO: 3591911 - DNA, 25 bp, Homo sapien
gatgtaggccccagttgaagaattc

SEQ ID NO: 3591912 - DNA, 25 bp, Homo sapien
gagctcctgggagacttggcccata

SEQ ID NO: 3591913 - DNA, 25 bp, Homo sapien
gacttggcccatattttgatcgcca

SEQ ID NO: 3591914 - DNA, 25 bp, Homo sapien
atcagaagtcggttttcccacaaag

SEQ ID NO: 3591915 - DNA, 25 bp, Homo sapien
caaagggcgattcagggactgcaga

SEQ ID NO: 3591916 - DNA, 25 bp, Homo sapien
ggtgctgctgttatctctacatcaa

SEQ ID NO: 3591917 - DNA, 25 bp, Homo sapien
gttcaaaccagtgctgctgatcaga

SEQ ID NO: 3591918 - DNA, 25 bp, Homo sapien
attatgccgataattgttaagggcg

SEQ ID NO: 3591919 - DNA, 25 bp, Homo sapien
tgccgataattgttaagggcgcaac

SEQ ID NO: 3591920 - DNA, 25 bp, Homo sapien
tatgccgataattgttaagggcgca

SEQ ID NO: 3591921 - DNA, 25 bp, Homo sapien
aacgattatgccgataattgttaag

SEQ ID NO: 3591922 - DNA, 25 bp, Homo sapien
cttggtaaactatcagtttctcaga

SEQ ID NO: 3591923 - DNA, 25 bp, Homo sapien
ttggtaaactatcagtttctcagat

SEQ ID NO: 3591924 - DNA, 25 bp, Homo sapien
tggtaaactatcagtttctcagatt

SEQ ID NO: 3591925 - DNA, 25 bp, Homo sapien
gtggaagctccatgggtgtccccat

SEQ ID NO: 3591926 - DNA, 25 bp, Homo sapien
ctgactgtggaagctccatgggtgt

SEQ ID NO: 3591927 - DNA, 25 bp, Homo sapien
gactgtggaagctccatgggtgtcc

SEQ ID NO: 3591928 - DNA, 25 bp, Homo sapien
actgtggaagctccatgggtgtccc

SEQ ID NO: 3591929 - DNA, 25 bp, Homo sapien
ctccatcttgagcactgatctgctt

SEQ ID NO: 3591930 - DNA, 25 bp, Homo sapien
ggttctggtatttcttactccatct

SEQ ID NO: 3591931 - DNA, 25 bp, Homo sapien
tgggttctggtatttcttactccat

SEQ ID NO: 3591932 - DNA, 25 bp, Homo sapien
ccatcttgagcactgatctgctttg

SEQ ID NO: 3591933 - DNA, 25 bp, Homo sapien
tatatttctggttttctcgcattaa

SEQ ID NO: 3591934 - DNA, 25 bp, Homo sapien
tatttctggttttctcgcattaagg

SEQ ID NO: 3591935 - DNA, 25 bp, Homo sapien
ttctggttttctcgcattaaggaaa

SEQ ID NO: 3591936 - DNA, 25 bp, Homo sapien
tgtatatttctggttttctcgcatt

SEQ ID NO: 3591937 - DNA, 25 bp, Homo sapien
tttcttgtgctcttcattagtagct

SEQ ID NO: 3591938 - DNA, 25 bp, Homo sapien
catctgttctctggatcatgaaccc

SEQ ID NO: 3591939 - DNA, 25 bp, Homo sapien
taccataaggagaatagcagctctt

SEQ ID NO: 3591940 - DNA, 25 bp, Homo sapien
ggatcatgaaccctttatcaatgca

SEQ ID NO: 3591941 - DNA, 25 bp, Homo sapien
tagtgatcctttataatagcattgt

SEQ ID NO: 3591942 - DNA, 25 bp, Homo sapien
ttagtgatcctttataatagcattg

SEQ ID NO: 3591943 - DNA, 25 bp, Homo sapien
gtgatcctttataatagcattgtcc

SEQ ID NO: 3591944 - DNA, 25 bp, Homo sapien
agtgatcctttataatagcattgtc

SEQ ID NO: 3591945 - DNA, 25 bp, Homo sapien
ggatagtaattgttgaggaaataac

SEQ ID NO: 3591946 - DNA, 25 bp, Homo sapien
gcagctgacaaccacagcccaatct

SEQ ID NO: 3591947 - DNA, 25 bp, Homo sapien
taaccgaaagtacggccacactgtc

SEQ ID NO: 3591948 - DNA, 25 bp, Homo sapien
ctgggatagtaattgttgaggaaat

SEQ ID NO: 3591949 - DNA, 25 bp, Homo sapien
tccaaaacgcaccattaattgcagc

SEQ ID NO: 3591950 - DNA, 25 bp, Homo sapien
ggaaagcctgatgaggagctgtcca

SEQ ID NO: 3591951 - DNA, 25 bp, Homo sapien
agctattggcagaggcatgctgtcc

SEQ ID NO: 3591952 - DNA, 25 bp, Homo sapien
ccttcatggtgctagggctatcact

SEQ ID NO: 3591953 - DNA, 25 bp, Homo sapien
tagcttttggcgaatggtgcctggc

SEQ ID NO: 3591954 - DNA, 25 bp, Homo sapien
cctaggcggatccagaggtgccatt

SEQ ID NO: 3591955 - DNA, 25 bp, Homo sapien
aagtgacataagtaccctggtggcc

SEQ ID NO: 3591956 - DNA, 25 bp, Homo sapien
tgctgtcaaagagtcaactcctggg

SEQ ID NO: 3591957 - DNA, 25 bp, Homo sapien
cctgatagagttccctttgtaaatg

SEQ ID NO: 3591958 - DNA, 25 bp, Homo sapien
tctttagcattgaacctgggtagtc

SEQ ID NO: 3591959 - DNA, 25 bp, Homo sapien
gggtacttagactgtttccattcaa

SEQ ID NO: 3591960 - DNA, 25 bp, Homo sapien
gctgaaaagtctgttaacctgatag

SEQ ID NO: 3591961 - DNA, 25 bp, Homo sapien
tcctgtttctcacatgggtcagaaa

SEQ ID NO: 3591962 - DNA, 25 bp, Homo sapien
ttcctgtttctcacatgggtcagaa

SEQ ID NO: 3591963 - DNA, 25 bp, Homo sapien
tgtactctacgggatcaaaaaccat

SEQ ID NO: 3591964 - DNA, 25 bp, Homo sapien
gagcgtgtactctacgggatcaaaa

SEQ ID NO: 3591965 - DNA, 25 bp, Homo sapien
catggcaagccctttgagcgtgtac

SEQ ID NO: 3591966 - DNA, 25 bp, Homo sapien
cctttgagcgtgtactctacgggat

SEQ ID NO: 3591967 - DNA, 25 bp, Homo sapien
aatgtaacataatcatcaatatcca

SEQ ID NO: 3591968 - DNA, 25 bp, Homo sapien
taatcatcaatatccagtgccacct

SEQ ID NO: 3591969 - DNA, 25 bp, Homo sapien
cataatcatcaatatccagtgccac

SEQ ID NO: 3591970 - DNA, 25 bp, Homo sapien
taacataatcatcaatatccagtgc

SEQ ID NO: 3591971 - DNA, 25 bp, Homo sapien
tgtaaattgctagactttgaatctg

SEQ ID NO: 3591972 - DNA, 25 bp, Homo sapien
cactgtggggtatgcagcgttcaca

SEQ ID NO: 3591973 - DNA, 25 bp, Homo sapien
tttgctttctatccagaaacagctg

SEQ ID NO: 3591974 - DNA, 25 bp, Homo sapien
tcttccatgtaaattgctagacttt

SEQ ID NO: 3591975 - DNA, 25 bp, Homo sapien
cactgtccaaaaaaggtgaatccag

SEQ ID NO: 3591976 - DNA, 25 bp, Homo sapien
aaggtgaatccagagatcaactctt

SEQ ID NO: 3591977 - DNA, 25 bp, Homo sapien
tccagagatcaactctttcagaagt

SEQ ID NO: 3591978 - DNA, 25 bp, Homo sapien
agatcaactctttcagaagttctgt

SEQ ID NO: 3591979 - DNA, 25 bp, Homo sapien
ctggttaattggatatggggtgtcc

SEQ ID NO: 3591980 - DNA, 25 bp, Homo sapien
ggttaattggatatggggtgtccat

SEQ ID NO: 3591981 - DNA, 25 bp, Homo sapien
tggttaattggatatggggtgtcca

SEQ ID NO: 3591982 - DNA, 25 bp, Homo sapien
gccctttggcatgcgaactttcctg

SEQ ID NO: 3591983 - DNA, 25 bp, Homo sapien
ttggcatgcgaactttcctgctgtt

SEQ ID NO: 3591984 - DNA, 25 bp, Homo sapien
actgccctttggcatgcgaactttc

SEQ ID NO: 3591985 - DNA, 25 bp, Homo sapien
ctttggcatgcgaactttcctgctg

SEQ ID NO: 3591986 - DNA, 25 bp, Homo sapien
tcaatgtgagctcctttagaggaac

SEQ ID NO: 3591987 - DNA, 25 bp, Homo sapien
aattacttccaatactttatcaatg

SEQ ID NO: 3591988 - DNA, 25 bp, Homo sapien
ctggttgattccctatttgttgtaa

SEQ ID NO: 3591989 - DNA, 25 bp, Homo sapien
gtaatgcagagcttgacccagaaaa

SEQ ID NO: 3591990 - DNA, 25 bp, Homo sapien
attttgttggatcttgaagactgtg

SEQ ID NO: 3591991 - DNA, 25 bp, Homo sapien
ttgttggatcttgaagactgtgggt

SEQ ID NO: 3591992 - DNA, 25 bp, Homo sapien
tcttgaagactgtgggtgttattgc

SEQ ID NO: 3591993 - DNA, 25 bp, Homo sapien
tggatcttgaagactgtgggtgtta

SEQ ID NO: 3591994 - DNA, 25 bp, Homo sapien
tgatcacatctgcatatgaaagtat

SEQ ID NO: 3591995 - DNA, 25 bp, Homo sapien
aaagtattggtgcaagaccatcaaa

SEQ ID NO: 3591996 - DNA, 25 bp, Homo sapien
gaaagtattggtgcaagaccatcaa

SEQ ID NO: 3591997 - DNA, 25 bp, Homo sapien
tggagtctcaccaggtactgctatg

SEQ ID NO: 3591998 - DNA, 25 bp, Homo sapien
actgctgactattagactagaactg

SEQ ID NO: 3591999 - DNA, 25 bp, Homo sapien
ttcagaactactgctgactattaga

SEQ ID NO: 3592000 - DNA, 25 bp, Homo sapien
aactggtaaaaactctggagtctca

SEQ ID NO: 3592001 - DNA, 25 bp, Homo sapien
gagcaatgggttcattcatagtcat

SEQ ID NO: 3592002 - DNA, 25 bp, Homo sapien
tgtgtagccataccctcctttccat

SEQ ID NO: 3592003 - DNA, 25 bp, Homo sapien
tccctcttgtgttagagcaatgggt

SEQ ID NO: 3592004 - DNA, 25 bp, Homo sapien
tcattcttctcacacgatcttttcc

SEQ ID NO: 3592005 - DNA, 25 bp, Homo sapien
gaaatcatggcctgtaattggtacg

SEQ ID NO: 3592006 - DNA, 25 bp, Homo sapien
gattgtcttctagtaccacctgaag

SEQ ID NO: 3592007 - DNA, 25 bp, Homo sapien
ggaaattggagagaccacctaggca

SEQ ID NO: 3592008 - DNA, 25 bp, Homo sapien
tgtccccaccggtagctagcatggt

SEQ ID NO: 3592009 - DNA, 25 bp, Homo sapien
caatactgaccagcacaagagtttc

SEQ ID NO: 3592010 - DNA, 25 bp, Homo sapien
tgttgatgtcaattttagtgcggac

SEQ ID NO: 3592011 - DNA, 25 bp, Homo sapien
ttcgatgtgctccattgttgacctg

SEQ ID NO: 3592012 - DNA, 25 bp, Homo sapien
tcaagatggagtgcggtggattttc

SEQ ID NO: 3592013 - DNA, 25 bp, Homo sapien
cgtttcgtatctcagcagtttggca

SEQ ID NO: 3592014 - DNA, 25 bp, Homo sapien
aataatatttgcgaagcttaccacg

SEQ ID NO: 3592015 - DNA, 25 bp, Homo sapien
tactgagtacatacgaagtgccagg

SEQ ID NO: 3592016 - DNA, 25 bp, Homo sapien
gagaactgcttgaggtcacggataa

SEQ ID NO: 3592017 - DNA, 25 bp, Homo sapien
gaactgccggaagtgtctgcgcgcc

SEQ ID NO: 3592018 - DNA, 25 bp, Homo sapien
gacgatgcgtccagatgacaacaac

SEQ ID NO: 3592019 - DNA, 25 bp, Homo sapien
tctgcgcgccgtgagagaaactttc

SEQ ID NO: 3592020 - DNA, 25 bp, Homo sapien
cgccgacgactgtcaagagagttgg

SEQ ID NO: 3592021 - DNA, 25 bp, Homo sapien
gcgattcctacttggacagcccaga

SEQ ID NO: 3592022 - DNA, 25 bp, Homo sapien
cagtgtcacgagattgagctggagc

SEQ ID NO: 3592023 - DNA, 25 bp, Homo sapien
ccagatttcagggagcgcttgcagt

SEQ ID NO: 3592024 - DNA, 25 bp, Homo sapien
gctcattaaggacggctctctgctc

SEQ ID NO: 3592025 - DNA, 25 bp, Homo sapien
ggaggaactgcagtcagcgtgtctt

SEQ ID NO: 3592026 - DNA, 25 bp, Homo sapien
cgagggagatatctactgatgggat

SEQ ID NO: 3592027 - DNA, 25 bp, Homo sapien
tctactgatgggattggtgtaggaa

SEQ ID NO: 3592028 - DNA, 25 bp, Homo sapien
cagcgtgtcttcgagggagatatct

SEQ ID NO: 3592029 - DNA, 25 bp, Homo sapien
gatcttcaagcatatcaactgactt

SEQ ID NO: 3592030 - DNA, 25 bp, Homo sapien
aagtaggtacaaacagccgttcatg

SEQ ID NO: 3592031 - DNA, 25 bp, Homo sapien
tatatgggccttcgattgcaagtag

SEQ ID NO: 3592032 - DNA, 25 bp, Homo sapien
ctgacttctcgggtggagccttatt

SEQ ID NO: 3592033 - DNA, 25 bp, Homo sapien
tacatctccgttttccacagtagcc

SEQ ID NO: 3592034 - DNA, 25 bp, Homo sapien
tttacatctccgttttccacagtag

SEQ ID NO: 3592035 - DNA, 25 bp, Homo sapien
tttatatggatgcatgccgggggct

SEQ ID NO: 3592036 - DNA, 25 bp, Homo sapien
gggcttcccgatgatcacttgagga

SEQ ID NO: 3592037 - DNA, 25 bp, Homo sapien
ttggtggaaatccccctgagctgcc

SEQ ID NO: 3592038 - DNA, 25 bp, Homo sapien
gctgccttcctggaataaacctggg

SEQ ID NO: 3592039 - DNA, 25 bp, Homo sapien
ctggtgagacagagaacttggtgga

SEQ ID NO: 3592040 - DNA, 25 bp, Homo sapien
acctgggttgagaaatcttggggct

SEQ ID NO: 3592041 - DNA, 25 bp, Homo sapien
cgttcgcaggtattccagatggcct

SEQ ID NO: 3592042 - DNA, 25 bp, Homo sapien
tccatgagatagaggtgtcttggtt

SEQ ID NO: 3592043 - DNA, 25 bp, Homo sapien
catgagatagaggtgtcttggttca

SEQ ID NO: 3592044 - DNA, 25 bp, Homo sapien
tttcaacgttcgcaggtattccaga

SEQ ID NO: 3592045 - DNA, 25 bp, Homo sapien
gaagtgagcactagcgttcttttat

SEQ ID NO: 3592046 - DNA, 25 bp, Homo sapien
tttgctgagtaaacacttgggcact

SEQ ID NO: 3592047 - DNA, 25 bp, Homo sapien
aaagacctggtcatgctatggcctc

SEQ ID NO: 3592048 - DNA, 25 bp, Homo sapien
cagtgaagtctaaaatgctaagacc

SEQ ID NO: 3592049 - DNA, 25 bp, Homo sapien
gggatgtagtcaacctgcagtgatc

SEQ ID NO: 3592050 - DNA, 25 bp, Homo sapien
ccagttatttcacagtcatggatga

SEQ ID NO: 3592051 - DNA, 25 bp, Homo sapien
tgatccagaaaggttatctataggt

SEQ ID NO: 3592052 - DNA, 25 bp, Homo sapien
accaagctccagtgagagaagcccc

SEQ ID NO: 3592053 - DNA, 25 bp, Homo sapien
tggaatacggacagtttgactgtga

SEQ ID NO: 3592054 - DNA, 25 bp, Homo sapien
aatacggacagtttgactgtgatga

SEQ ID NO: 3592055 - DNA, 25 bp, Homo sapien
cttttggaatacggacagtttgact

SEQ ID NO: 3592056 - DNA, 25 bp, Homo sapien
tttggaatacggacagtttgactgt

SEQ ID NO: 3592057 - DNA, 25 bp, Homo sapien
caagaactgtgcttgtgaaaaaggt

SEQ ID NO: 3592058 - DNA, 25 bp, Homo sapien
acctgttatgtgacaagaactgtgc

SEQ ID NO: 3592059 - DNA, 25 bp, Homo sapien
aaaggtggtccaaattttgctctca

SEQ ID NO: 3592060 - DNA, 25 bp, Homo sapien
aaaggcttatttcagggaggtggat

SEQ ID NO: 3592061 - DNA, 25 bp, Homo sapien
aagacacaagctgtaaactgtagga

SEQ ID NO: 3592062 - DNA, 25 bp, Homo sapien
gatggtggaccatagcatagtttca

SEQ ID NO: 3592063 - DNA, 25 bp, Homo sapien
ctttatagcaaagcggatggtggac

SEQ ID NO: 3592064 - DNA, 25 bp, Homo sapien
aataataggttcagccaggttctgc

SEQ ID NO: 3592065 - DNA, 25 bp, Homo sapien
gatcggttcctcagaagcttatgtc

SEQ ID NO: 3592066 - DNA, 25 bp, Homo sapien
agtttttgatcggttcctcagaagc

SEQ ID NO: 3592067 - DNA, 25 bp, Homo sapien
cagtagagtttttgatcggttcctc

SEQ ID NO: 3592068 - DNA, 25 bp, Homo sapien
cctcagaagcttatgtccagggttc

SEQ ID NO: 3592069 - DNA, 25 bp, Homo sapien
taatgccagtaggatgggaaacctc

SEQ ID NO: 3592070 - DNA, 25 bp, Homo sapien
gtcattttctacaagggtaatgcca

SEQ ID NO: 3592071 - DNA, 25 bp, Homo sapien
tggaggcctactaaggaagtaagtc

SEQ ID NO: 3592072 - DNA, 25 bp, Homo sapien
cattggcaaagtcatagttgtggag

SEQ ID NO: 3592073 - DNA, 25 bp, Homo sapien
gcaggtgaaggactgctgcctatca

SEQ ID NO: 3592074 - DNA, 25 bp, Homo sapien
ttctctccttcaccacatgggagtg

SEQ ID NO: 3592075 - DNA, 25 bp, Homo sapien
gagcaggtgaaggactgctgcctat

SEQ ID NO: 3592076 - DNA, 25 bp, Homo sapien
atttcctaagtgttcagaaaagcca

SEQ ID NO: 3592077 - DNA, 25 bp, Homo sapien
tttgttcaaggaaactacctcattg

SEQ ID NO: 3592078 - DNA, 25 bp, Homo sapien
aaagtaattttgcacgtttggctgc

SEQ ID NO: 3592079 - DNA, 25 bp, Homo sapien
tgcccaggatgcacaactagtgaat

SEQ ID NO: 3592080 - DNA, 25 bp, Homo sapien
taaagtgaggcccaacagttgccac

SEQ ID NO: 3592081 - DNA, 25 bp, Homo sapien
gctcggcctaccttaccattttgta

SEQ ID NO: 3592082 - DNA, 25 bp, Homo sapien
gcccttttgctagatgaaatgtcaa

SEQ ID NO: 3592083 - DNA, 25 bp, Homo sapien
gagctttggaaatgactcatgagaa

SEQ ID NO: 3592084 - DNA, 25 bp, Homo sapien
gacttggccaagattatgcagttag

SEQ ID NO: 3592085 - DNA, 25 bp, Homo sapien
catcatgaacaatcagcccttttgc

SEQ ID NO: 3592086 - DNA, 25 bp, Homo sapien
gcatacacttaaatatagctcctac

SEQ ID NO: 3592087 - DNA, 25 bp, Homo sapien
cttaaatatagctcctacattcacc

SEQ ID NO: 3592088 - DNA, 25 bp, Homo sapien
tacacttaaatatagctcctacatt

SEQ ID NO: 3592089 - DNA, 25 bp, Homo sapien
gagcatacacttaaatatagctcct

SEQ ID NO: 3592090 - DNA, 25 bp, Homo sapien
ctattgaaggttgtggagagatgat

SEQ ID NO: 3592091 - DNA, 25 bp, Homo sapien
ccttctctattgaaggttgtggaga

SEQ ID NO: 3592092 - DNA, 25 bp, Homo sapien
aaaggaagtccttctctattgaagg

SEQ ID NO: 3592093 - DNA, 25 bp, Homo sapien
ggaagtccttctctattgaaggttg

SEQ ID NO: 3592094 - DNA, 25 bp, Homo sapien
gcttgaaaatgcattagtcgaccca

SEQ ID NO: 3592095 - DNA, 25 bp, Homo sapien
ctgatatttgaagcttgaaaatgca

SEQ ID NO: 3592096 - DNA, 25 bp, Homo sapien
tgcattagtcgacccatggatggag

SEQ ID NO: 3592097 - DNA, 25 bp, Homo sapien
catggatggagtgtagagtgttttc

SEQ ID NO: 3592098 - DNA, 25 bp, Homo sapien
tacgcatcgtgataagtgcaggaga

SEQ ID NO: 3592099 - DNA, 25 bp, Homo sapien
tatgaactgaaagtaattcaagcca

SEQ ID NO: 3592100 - DNA, 25 bp, Homo sapien
gaagaatcttaaacagcctcatagc

SEQ ID NO: 3592101 - DNA, 25 bp, Homo sapien
tcaaatgtctcaagctgtctggaag

SEQ ID NO: 3592102 - DNA, 25 bp, Homo sapien
aactggcccatagtttatgaccaga

SEQ ID NO: 3592103 - DNA, 25 bp, Homo sapien
aaggcttttgacagctgtacagtgt

SEQ ID NO: 3592104 - DNA, 25 bp, Homo sapien
taagaaaggcttttgacagctgtac

SEQ ID NO: 3592105 - DNA, 25 bp, Homo sapien
ttgggtaagaaaggcttttgacagc

SEQ ID NO: 3592106 - DNA, 25 bp, Homo sapien
aatatcccaatgagtcacacatatt

SEQ ID NO: 3592107 - DNA, 25 bp, Homo sapien
tgtatatacgtagcttccttggaga

SEQ ID NO: 3592108 - DNA, 25 bp, Homo sapien
cagtagcctcttaagtgtgcaataa

SEQ ID NO: 3592109 - DNA, 25 bp, Homo sapien
gcaataatagtgttatgtcaacaaa

SEQ ID NO: 3592110 - DNA, 25 bp, Homo sapien
gcctttagtgagttgcattcatttt

SEQ ID NO: 3592111 - DNA, 25 bp, Homo sapien
actaaaataggctaacaattatctg

SEQ ID NO: 3592112 - DNA, 25 bp, Homo sapien
gcctcataggttgactctttctttc

SEQ ID NO: 3592113 - DNA, 25 bp, Homo sapien
tattttctggagtgtgcgatattgc

SEQ ID NO: 3592114 - DNA, 25 bp, Homo sapien
tggagtgtgcgatattgctttttga

SEQ ID NO: 3592115 - DNA, 25 bp, Homo sapien
tgaagtttgcctcataggttgactc

SEQ ID NO: 3592116 - DNA, 25 bp, Homo sapien
gccttatcacgtaagtatatggaat

SEQ ID NO: 3592117 - DNA, 25 bp, Homo sapien
gtattcacaaggaatagattctatc

SEQ ID NO: 3592118 - DNA, 25 bp, Homo sapien
tcaaacactgcttctgccttatcac

SEQ ID NO: 3592119 - DNA, 25 bp, Homo sapien
gcttctgccttatcacgtaagtata

SEQ ID NO: 3592120 - DNA, 25 bp, Homo sapien
gtgatcaaccctcttgaatgagagt

SEQ ID NO: 3592121 - DNA, 25 bp, Homo sapien
catttttcagtgatcaaccctcttg

SEQ ID NO: 3592122 - DNA, 25 bp, Homo sapien
tctgtaatagatccagttactttta

SEQ ID NO: 3592123 - DNA, 25 bp, Homo sapien
accctcttgaatgagagtccagcct

SEQ ID NO: 3592124 - DNA, 25 bp, Homo sapien
ctcgggcctgtgtcagatcgcaaag

SEQ ID NO: 3592125 - DNA, 25 bp, Homo sapien
tggagcccccgtattttccatggag

SEQ ID NO: 3592126 - DNA, 25 bp, Homo sapien
aaaggtctttgactgtaagctccca

SEQ ID NO: 3592127 - DNA, 25 bp, Homo sapien
taagctcccactgaataccatcaag

SEQ ID NO: 3592128 - DNA, 25 bp, Homo sapien
gatctgggtcatgttatcaggtaac

SEQ ID NO: 3592129 - DNA, 25 bp, Homo sapien
ccacagtaggcaataggcagggttg

SEQ ID NO: 3592130 - DNA, 25 bp, Homo sapien
tatcaggtaaccaaggccagtcttt

SEQ ID NO: 3592131 - DNA, 25 bp, Homo sapien
gtcttttggactttgccacagtagg

SEQ ID NO: 3592132 - DNA, 25 bp, Homo sapien
tagcaaatgtttagacggagaggga

SEQ ID NO: 3592133 - DNA, 25 bp, Homo sapien
aatgtaccacagaaatgcaagatgc

SEQ ID NO: 3592134 - DNA, 25 bp, Homo sapien
gaatgtgtagcacaaaaactgagcc

SEQ ID NO: 3592135 - DNA, 25 bp, Homo sapien
aactgagccctaatgtatactatgg

SEQ ID NO: 3592136 - DNA, 25 bp, Homo sapien
tcagtagggcgtctttcaaaattgg

SEQ ID NO: 3592137 - DNA, 25 bp, Homo sapien
tgcctcgatgttggtagctgctaac

SEQ ID NO: 3592138 - DNA, 25 bp, Homo sapien
taaactacagcctatagctacaggc

SEQ ID NO: 3592139 - DNA, 25 bp, Homo sapien
aactgatcagcatggtggttactga

SEQ ID NO: 3592140 - DNA, 25 bp, Homo sapien
gaagcagggttcaactttgtgagaa

SEQ ID NO: 3592141 - DNA, 25 bp, Homo sapien
gaatgtgagttcagcgtaaacacct

SEQ ID NO: 3592142 - DNA, 25 bp, Homo sapien
gagaaaatgcattcaagctgtggaa

SEQ ID NO: 3592143 - DNA, 25 bp, Homo sapien
gttgagtcataaaggcccagtgaac

SEQ ID NO: 3592144 - DNA, 25 bp, Homo sapien
tttgcatatagtgacagaggttggg

SEQ ID NO: 3592145 - DNA, 25 bp, Homo sapien
tgtaccctggtttgcaaagcctcca

SEQ ID NO: 3592146 - DNA, 25 bp, Homo sapien
tcttgttaaggatgggtgtaccctg

SEQ ID NO: 3592147 - DNA, 25 bp, Homo sapien
gatggtgaagctatagttggttgcc

SEQ ID NO: 3592148 - DNA, 25 bp, Homo sapien
agttcttcaccagcagactatgtag

SEQ ID NO: 3592149 - DNA, 25 bp, Homo sapien
caagggaagctatgccttctgaagt

SEQ ID NO: 3592150 - DNA, 25 bp, Homo sapien
ggatcagcccactaagtgaaaacag

SEQ ID NO: 3592151 - DNA, 25 bp, Homo sapien
tgtcgcttccgtagcaattgtagag

SEQ ID NO: 3592152 - DNA, 25 bp, Homo sapien
ataggtatttactgtccacttatat

SEQ ID NO: 3592153 - DNA, 25 bp, Homo sapien
agagcatagtaataggtatttactg

SEQ ID NO: 3592154 - DNA, 25 bp, Homo sapien
tactgtccacttatatatatcagca

SEQ ID NO: 3592155 - DNA, 25 bp, Homo sapien
tttcagtgaatttgtagagcatagt

SEQ ID NO: 3592156 - DNA, 25 bp, Homo sapien
cacaggaactggtctaagaacactg

SEQ ID NO: 3592157 - DNA, 25 bp, Homo sapien
tttttgcagagaacgatccccacag

SEQ ID NO: 3592158 - DNA, 25 bp, Homo sapien
taccaccacatatcaaaggttggga

SEQ ID NO: 3592159 - DNA, 25 bp, Homo sapien
atatctgcccgtgtaccctcaactg

SEQ ID NO: 3592160 - DNA, 25 bp, Homo sapien
ggtaaaaatgagcacactggtagca

SEQ ID NO: 3592161 - DNA, 25 bp, Homo sapien
aaaatgagcacactggtagcatgag

SEQ ID NO: 3592162 - DNA, 25 bp, Homo sapien
agcacactggtagcatgagggccag

SEQ ID NO: 3592163 - DNA, 25 bp, Homo sapien
gagcacactggtagcatgagggcca

SEQ ID NO: 3592164 - DNA, 25 bp, Homo sapien
aggctgtggccggaatgtctttcag

SEQ ID NO: 3592165 - DNA, 25 bp, Homo sapien
tgtctttcagaagcaagtatccact

SEQ ID NO: 3592166 - DNA, 25 bp, Homo sapien
gaagtactaaatggctgctgcatac

SEQ ID NO: 3592167 - DNA, 25 bp, Homo sapien
tgcatacagagtggctagaggctgt

SEQ ID NO: 3592168 - DNA, 25 bp, Homo sapien
gccttttgactcaagaaggtctgtg

SEQ ID NO: 3592169 - DNA, 25 bp, Homo sapien
gtataagccgcttgtctttttcctc

SEQ ID NO: 3592170 - DNA, 25 bp, Homo sapien
tttcctcatacaacaacaataggag

SEQ ID NO: 3592171 - DNA, 25 bp, Homo sapien
caagaaggtctgtgtataagccgct

SEQ ID NO: 3592172 - DNA, 25 bp, Homo sapien
catgtcattcaaaagttccatacag

SEQ ID NO: 3592173 - DNA, 25 bp, Homo sapien
tacatcctttagcagtacatgttct

SEQ ID NO: 3592174 - DNA, 25 bp, Homo sapien
ataaatatatcagagctagcaatgc

SEQ ID NO: 3592175 - DNA, 25 bp, Homo sapien
acagatcaaaacatagtgactttca

SEQ ID NO: 3592176 - DNA, 25 bp, Homo sapien
gaggagttagttgatatgtttctta

SEQ ID NO: 3592177 - DNA, 25 bp, Homo sapien
aactatttcttgacattgatccatc

SEQ ID NO: 3592178 - DNA, 25 bp, Homo sapien
tttctcaagtttagtgaggagttag

SEQ ID NO: 3592179 - DNA, 25 bp, Homo sapien
atataaatattgcatagcagtttcc

SEQ ID NO: 3592180 - DNA, 25 bp, Homo sapien
gactttgaggttggacagacatgca

SEQ ID NO: 3592181 - DNA, 25 bp, Homo sapien
catggatagatgaagagtctcaccc

SEQ ID NO: 3592182 - DNA, 25 bp, Homo sapien
taagctcggagaagacgggaacact

SEQ ID NO: 3592183 - DNA, 25 bp, Homo sapien
tcttacccgtgtgtatagacctgga

SEQ ID NO: 3592184 - DNA, 25 bp, Homo sapien
tctacaatggaagagtgataggctc

SEQ ID NO: 3592185 - DNA, 25 bp, Homo sapien
tcattacaaagcacttgggaaaggc

SEQ ID NO: 3592186 - DNA, 25 bp, Homo sapien
gacattccatggctacttacaaggc

SEQ ID NO: 3592187 - DNA, 25 bp, Homo sapien
gaaaggcaggtttaatcagagcagt

SEQ ID NO: 3592188 - DNA, 25 bp, Homo sapien
gaatctatttcagtaaccttcaagt

SEQ ID NO: 3592189 - DNA, 25 bp, Homo sapien
gagctaccagaaagaacacgacatg

SEQ ID NO: 3592190 - DNA, 25 bp, Homo sapien
taatggagacattagtagataggac

SEQ ID NO: 3592191 - DNA, 25 bp, Homo sapien
cacacaattgtcacataactactga

SEQ ID NO: 3592192 - DNA, 25 bp, Homo sapien
caaaatggcaggtaaactctaggag

SEQ ID NO: 3592193 - DNA, 25 bp, Homo sapien
actctaggagaaggcaaattactgc

SEQ ID NO: 3592194 - DNA, 25 bp, Homo sapien
gagtccatcacttaagcataaaggg

SEQ ID NO: 3592195 - DNA, 25 bp, Homo sapien
ggagagatctcacaaagtaggaagc

SEQ ID NO: 3592196 - DNA, 25 bp, Homo sapien
cattagaggacaattctctccccaa

SEQ ID NO: 3592197 - DNA, 25 bp, Homo sapien
gaaagttatgaatttcctcctcaca

SEQ ID NO: 3592198 - DNA, 25 bp, Homo sapien
taattgacacaaagggagttaccta

SEQ ID NO: 3592199 - DNA, 25 bp, Homo sapien
ccactcgcaatacctcattagagga

SEQ ID NO: 3592200 - DNA, 25 bp, Homo sapien
caatatcttgggtaattgtgcagca

SEQ ID NO: 3592201 - DNA, 25 bp, Homo sapien
cagacatcatttctggaaattcaac

SEQ ID NO: 3592202 - DNA, 25 bp, Homo sapien
gaaattcaacactcagtgcccggga

SEQ ID NO: 3592203 - DNA, 25 bp, Homo sapien
caagcagtacagatgaagttgtttg

SEQ ID NO: 3592204 - DNA, 25 bp, Homo sapien
gctctctaatgtagcttgacctcat

SEQ ID NO: 3592205 - DNA, 25 bp, Homo sapien
ccaattgccttgatgagctctctaa

SEQ ID NO: 3592206 - DNA, 25 bp, Homo sapien
gtgagctcgacacaactcctttttg

SEQ ID NO: 3592207 - DNA, 25 bp, Homo sapien
taagttgatagaaacgctgtgagct

SEQ ID NO: 3592208 - DNA, 25 bp, Homo sapien
tgggtttgacttcgtagcccttcca

SEQ ID NO: 3592209 - DNA, 25 bp, Homo sapien
ttggctaacttgaagcttgacaaac

SEQ ID NO: 3592210 - DNA, 25 bp, Homo sapien
ttcttggctaacttgaagcttgaca

SEQ ID NO: 3592211 - DNA, 25 bp, Homo sapien
gctaacttgaagcttgacaaactcc

SEQ ID NO: 3592212 - DNA, 25 bp, Homo sapien
taacttgaagcttgacaaactcctg

SEQ ID NO: 3592213 - DNA, 25 bp, Homo sapien
taaggcataatgaatagaatgatga

SEQ ID NO: 3592214 - DNA, 25 bp, Homo sapien
gcataatgaatagaatgatgattct

SEQ ID NO: 3592215 - DNA, 25 bp, Homo sapien
ggtaaggcataatgaatagaatgat

SEQ ID NO: 3592216 - DNA, 25 bp, Homo sapien
gaatgatgattctttcatccgctgt

SEQ ID NO: 3592217 - DNA, 25 bp, Homo sapien
ggtgtaggagttgagaatgtgaagc

SEQ ID NO: 3592218 - DNA, 25 bp, Homo sapien
tgtgcaattaaataggagaagtcag

SEQ ID NO: 3592219 - DNA, 25 bp, Homo sapien
cagaggtgtaggagttgagaatgtg

SEQ ID NO: 3592220 - DNA, 25 bp, Homo sapien
tttgtgtgcaattaaataggagaag

SEQ ID NO: 3592221 - DNA, 25 bp, Homo sapien
catttagtattagatcaggtgcaaa

SEQ ID NO: 3592222 - DNA, 25 bp, Homo sapien
tcatttagtattagatcaggtgcaa

SEQ ID NO: 3592223 - DNA, 25 bp, Homo sapien
ttagtattagatcaggtgcaaaata

SEQ ID NO: 3592224 - DNA, 25 bp, Homo sapien
tttagtattagatcaggtgcaaaat

SEQ ID NO: 3592225 - DNA, 25 bp, Homo sapien
tccatcctagaccaaacaccattaa

SEQ ID NO: 3592226 - DNA, 25 bp, Homo sapien
tagaccaaacaccattaagctcatc

SEQ ID NO: 3592227 - DNA, 25 bp, Homo sapien
agttatctggtcatcaatatgtaag

SEQ ID NO: 3592228 - DNA, 25 bp, Homo sapien
agagttatctggtcatcaatatgta

SEQ ID NO: 3592229 - DNA, 25 bp, Homo sapien
gaatcctggtttactcaggtgcaga

SEQ ID NO: 3592230 - DNA, 25 bp, Homo sapien
ttatttttaatactggcatccaaga

SEQ ID NO: 3592231 - DNA, 25 bp, Homo sapien
ggtgcagaaagactctctaactaag

SEQ ID NO: 3592232 - DNA, 25 bp, Homo sapien
acgtgtcttcaagtataggtctaca

SEQ ID NO: 3592233 - DNA, 25 bp, Homo sapien
aaactgtaagcttatttcaagtcaa

SEQ ID NO: 3592234 - DNA, 25 bp, Homo sapien
tatacatgtgtccatccaagtcctt

SEQ ID NO: 3592235 - DNA, 25 bp, Homo sapien
tttctcagaggtcaaatagtcactc

SEQ ID NO: 3592236 - DNA, 25 bp, Homo sapien
tagtcactctagctcactgaccatt

SEQ ID NO: 3592237 - DNA, 25 bp, Homo sapien
tgcagcattaaaaaagttgccacca

SEQ ID NO: 3592238 - DNA, 25 bp, Homo sapien
aaaaaagttgccaccaaattcaatg

SEQ ID NO: 3592239 - DNA, 25 bp, Homo sapien
attattctgatttactacacaaaaa

SEQ ID NO: 3592240 - DNA, 25 bp, Homo sapien
ggtaatactagtgttgccattattc

SEQ ID NO: 3592241 - DNA, 25 bp, Homo sapien
tagaccacttgactactgaaagaag

SEQ ID NO: 3592242 - DNA, 25 bp, Homo sapien
aagaagttgcctctcgcctagttga

SEQ ID NO: 3592243 - DNA, 25 bp, Homo sapien
caactgtatgtcttgacctggtgaa

SEQ ID NO: 3592244 - DNA, 25 bp, Homo sapien
tttcatttggaacgcccactggctg

SEQ ID NO: 3592245 - DNA, 25 bp, Homo sapien
cagagaagaaaaaaaagaaattcat

SEQ ID NO: 3592246 - DNA, 25 bp, Homo sapien
tcatgtaaatatatataaactccat

SEQ ID NO: 3592247 - DNA, 25 bp, Homo sapien
aaaagaaattcatgtaaatatatat

SEQ ID NO: 3592248 - DNA, 25 bp, Homo sapien
agagaagaaaaaaaagaaattcatg

SEQ ID NO: 3592249 - DNA, 25 bp, Homo sapien
tggtagttcacagacgccttgagga

SEQ ID NO: 3592250 - DNA, 25 bp, Homo sapien
tgtgccaggcaagggctacttatca

SEQ ID NO: 3592251 - DNA, 25 bp, Homo sapien
caaactggtggtacgccaatggtct

SEQ ID NO: 3592252 - DNA, 25 bp, Homo sapien
gaccagaattatgagaccatccgtg

SEQ ID NO: 3592253 - DNA, 25 bp, Homo sapien
ttttttccagtgtcttttggcaata

SEQ ID NO: 3592254 - DNA, 25 bp, Homo sapien
tttttccagtgtcttttggcaatac

SEQ ID NO: 3592255 - DNA, 25 bp, Homo sapien
ttttccagtgtcttttggcaataca

SEQ ID NO: 3592256 - DNA, 25 bp, Homo sapien
tttccagtgtcttttggcaatacat

SEQ ID NO: 3592257 - DNA, 25 bp, Homo sapien
taactatcttcccactcagtgctgt

SEQ ID NO: 3592258 - DNA, 25 bp, Homo sapien
tcagtgctgtacagcagtgaactaa

SEQ ID NO: 3592259 - DNA, 25 bp, Homo sapien
gatatattatcatccttaagggtgt

SEQ ID NO: 3592260 - DNA, 25 bp, Homo sapien
aactaaagcaaaagttcactgtgac

SEQ ID NO: 3592261 - DNA, 25 bp, Homo sapien
cctcctgtgtagagatcttggtgca

SEQ ID NO: 3592262 - DNA, 25 bp, Homo sapien
tccaagcttcaggtctgtgtacaac

SEQ ID NO: 3592263 - DNA, 25 bp, Homo sapien
ggtggccacccactggattcttcct

SEQ ID NO: 3592264 - DNA, 25 bp, Homo sapien
gcctcccatgcagagaatttgcagc

SEQ ID NO: 3592265 - DNA, 25 bp, Homo sapien
cagcactttctaaggcgacatgctg

SEQ ID NO: 3592266 - DNA, 25 bp, Homo sapien
tttctaaggcgacatgctgggcagt

SEQ ID NO: 3592267 - DNA, 25 bp, Homo sapien
gcggattttatcaacgatgcagtca

SEQ ID NO: 3592268 - DNA, 25 bp, Homo sapien
ttttttctgcggattttatcaacga

SEQ ID NO: 3592269 - DNA, 25 bp, Homo sapien
aataaagggtaactgtgaagcctca

SEQ ID NO: 3592270 - DNA, 25 bp, Homo sapien
taataaagggtaactgtgaagcctc

SEQ ID NO: 3592271 - DNA, 25 bp, Homo sapien
ctaataaagggtaactgtgaagcct

SEQ ID NO: 3592272 - DNA, 25 bp, Homo sapien
ttgcttttgtccttcaaacaattcc

SEQ ID NO: 3592273 - DNA, 25 bp, Homo sapien
tgcttttgtccttcaaacaattcct

SEQ ID NO: 3592274 - DNA, 25 bp, Homo sapien
tttgcttttgtccttcaaacaattc

SEQ ID NO: 3592275 - DNA, 25 bp, Homo sapien
gcttgaagcaacatgagctggtcca

SEQ ID NO: 3592276 - DNA, 25 bp, Homo sapien
caaacttaactggactctgcagtga

SEQ ID NO: 3592277 - DNA, 25 bp, Homo sapien
catatgagggcaatctttctaccac

SEQ ID NO: 3592278 - DNA, 25 bp, Homo sapien
tatggtatgacccacaagtcacggg

SEQ ID NO: 3592279 - DNA, 25 bp, Homo sapien
cacagaatatactggctagagaaca

SEQ ID NO: 3592280 - DNA, 25 bp, Homo sapien
acagaatatactggctagagaacag

SEQ ID NO: 3592281 - DNA, 25 bp, Homo sapien
ctaaatagtctttggactggaatct

SEQ ID NO: 3592282 - DNA, 25 bp, Homo sapien
aatagtctttggactggaatctaag

SEQ ID NO: 3592283 - DNA, 25 bp, Homo sapien
ccatcatcagcaagctaacacaaga

SEQ ID NO: 3592284 - DNA, 25 bp, Homo sapien
caccgcattgtctcactgataagtg

SEQ ID NO: 3592285 - DNA, 25 bp, Homo sapien
tggaaaccatcatcagcaagctaac

SEQ ID NO: 3592286 - DNA, 25 bp, Homo sapien
aaacaccgcattgtctcactgataa

SEQ ID NO: 3592287 - DNA, 25 bp, Homo sapien
tctgccagtactactattaattggg

SEQ ID NO: 3592288 - DNA, 25 bp, Homo sapien
aaacgtttcttaattactgtctctg

SEQ ID NO: 3592289 - DNA, 25 bp, Homo sapien
tactagctcaataaactaccttttc

SEQ ID NO: 3592290 - DNA, 25 bp, Homo sapien
ggctttgaataaatcttactagctc

SEQ ID NO: 3592291 - DNA, 25 bp, Homo sapien
ggagtcactcgaataaatacttgat

SEQ ID NO: 3592292 - DNA, 25 bp, Homo sapien
cgaataaatacttgattgagatcta

SEQ ID NO: 3592293 - DNA, 25 bp, Homo sapien
aacttcttaggagtcactcgaataa

SEQ ID NO: 3592294 - DNA, 25 bp, Homo sapien
tcttaggagtcactcgaataaatac

SEQ ID NO: 3592295 - DNA, 25 bp, Homo sapien
ccagcacaagcaacttttaaatgta

SEQ ID NO: 3592296 - DNA, 25 bp, Homo sapien
gaatcaaatcatcttagcagcaggt

SEQ ID NO: 3592297 - DNA, 25 bp, Homo sapien
ggtagaaagctaatcatctagttca

SEQ ID NO: 3592298 - DNA, 25 bp, Homo sapien
tatatgaacaatagagcttcaagtc

SEQ ID NO: 3592299 - DNA, 25 bp, Homo sapien
cctctggctcttgtagtggtattaa

SEQ ID NO: 3592300 - DNA, 25 bp, Homo sapien
gctggatgatctgtgcactacaaaa

SEQ ID NO: 3592301 - DNA, 25 bp, Homo sapien
cagttattagcactagcacgcatgg

SEQ ID NO: 3592302 - DNA, 25 bp, Homo sapien
caatgattcagtggccagaacagga

SEQ ID NO: 3592303 - DNA, 25 bp, Homo sapien
gactggcaggtcatgattacttcct

SEQ ID NO: 3592304 - DNA, 25 bp, Homo sapien
catcataccaggttagtagtctgca

SEQ ID NO: 3592305 - DNA, 25 bp, Homo sapien
gctgtcactgagtaaagcatccaaa

SEQ ID NO: 3592306 - DNA, 25 bp, Homo sapien
gctggttactgtgtactggcaaaga

SEQ ID NO: 3592307 - DNA, 25 bp, Homo sapien
taaataaaggtgcttcacttctagt

SEQ ID NO: 3592308 - DNA, 25 bp, Homo sapien
aatgtagttcataatcttgttctag

SEQ ID NO: 3592309 - DNA, 25 bp, Homo sapien
gtaattactgctaaataaaggtgct

SEQ ID NO: 3592310 - DNA, 25 bp, Homo sapien
ggtgcttcacttctagtactcaaga

SEQ ID NO: 3592311 - DNA, 25 bp, Homo sapien
gccggagtccaacaaatgctttcta

SEQ ID NO: 3592312 - DNA, 25 bp, Homo sapien
cttcgtctacagttttggatgctat

SEQ ID NO: 3592313 - DNA, 25 bp, Homo sapien
ttctaagagtacatttggaaagact

SEQ ID NO: 3592314 - DNA, 25 bp, Homo sapien
tgccaacagccggagtccaacaaat

SEQ ID NO: 3592315 - DNA, 25 bp, Homo sapien
tgcttttctgcttgtaaggagaggg

SEQ ID NO: 3592316 - DNA, 25 bp, Homo sapien
ctgcttttctgcttgtaaggagagg

SEQ ID NO: 3592317 - DNA, 25 bp, Homo sapien
taaagaagaccttacagctcccaca

SEQ ID NO: 3592318 - DNA, 25 bp, Homo sapien
tcccacaggtaaggacaccataatg

SEQ ID NO: 3592319 - DNA, 25 bp, Homo sapien
gtaaggacaccataatgacagcctg

SEQ ID NO: 3592320 - DNA, 25 bp, Homo sapien
ttccattgccctcttaaagaagacc

SEQ ID NO: 3592321 - DNA, 25 bp, Homo sapien
tctgaggtaatgactcgaagctgta

SEQ ID NO: 3592322 - DNA, 25 bp, Homo sapien
taaacaaatcttctgaggtaatgac

SEQ ID NO: 3592323 - DNA, 25 bp, Homo sapien
taatgactcgaagctgtattgtggg

SEQ ID NO: 3592324 - DNA, 25 bp, Homo sapien
cgaagctgtattgtgggctctggct

SEQ ID NO: 3592325 - DNA, 25 bp, Homo sapien
ccgctactcccggacgcgctgggcg

SEQ ID NO: 3592326 - DNA, 25 bp, Homo sapien
gctactcccggacgcgctgggcgtg

SEQ ID NO: 3592327 - DNA, 25 bp, Homo sapien
actcccggacgcgctgggcgtgccc

SEQ ID NO: 3592328 - DNA, 25 bp, Homo sapien
ctactcccggacgcgctgggcgtgc

SEQ ID NO: 3592329 - DNA, 25 bp, Homo sapien
agacctgcggcaggccctccttgag

SEQ ID NO: 3592330 - DNA, 25 bp, Homo sapien
tcaggtagttgagatagggcgggta

SEQ ID NO: 3592331 - DNA, 25 bp, Homo sapien
ttgagcacggcggcctggtagccga

SEQ ID NO: 3592332 - DNA, 25 bp, Homo sapien
gagatagggcgggtagacctgcggc

SEQ ID NO: 3592333 - DNA, 25 bp, Homo sapien
cgcgcccggcgccttgcagggcggc

SEQ ID NO: 3592334 - DNA, 25 bp, Homo sapien
gagcccgttgaggccgagtgcaggg

SEQ ID NO: 3592335 - DNA, 25 bp, Homo sapien
ttgaggccgagtgcagggtagagcg

SEQ ID NO: 3592336 - DNA, 25 bp, Homo sapien
agggcaggccgtcccgcgggagcag

SEQ ID NO: 3592337 - DNA, 25 bp, Homo sapien
aggatgcactccagggtcgaccccg

SEQ ID NO: 3592338 - DNA, 25 bp, Homo sapien
cgcgccctccgctttgtacaggatg

SEQ ID NO: 3592339 - DNA, 25 bp, Homo sapien
gaggacgcagacgagactgaggcac

SEQ ID NO: 3592340 - DNA, 25 bp, Homo sapien
cactccagggtcgaccccgaggagg

SEQ ID NO: 3592341 - DNA, 25 bp, Homo sapien
cctttatctttagagcgggcggctg

SEQ ID NO: 3592342 - DNA, 25 bp, Homo sapien
ccaataaggcgtgattgagaggcag

SEQ ID NO: 3592343 - DNA, 25 bp, Homo sapien
cgtaactttcgtcttccagcagctg

SEQ ID NO: 3592344 - DNA, 25 bp, Homo sapien
gctatagagagggtacgcgtcgtcc

SEQ ID NO: 3592345 - DNA, 25 bp, Homo sapien
cagccggtggatcttcgggaagttc

SEQ ID NO: 3592346 - DNA, 25 bp, Homo sapien
taggtatggccgaaacttcaggcaa

SEQ ID NO: 3592347 - DNA, 25 bp, Homo sapien
ggatgaaatccatcaccgtggtggc

SEQ ID NO: 3592348 - DNA, 25 bp, Homo sapien
ctgagggcgccaacagagtgtccaa

SEQ ID NO: 3592349 - DNA, 25 bp, Homo sapien
caaactcgtgcatgctgtgaagctc

SEQ ID NO: 3592350 - DNA, 25 bp, Homo sapien
tagccgcctcgggttgtagatttca

SEQ ID NO: 3592351 - DNA, 25 bp, Homo sapien
ggcaatttagtgacacgcggctcct

SEQ ID NO: 3592352 - DNA, 25 bp, Homo sapien
aagatctcagatcccagtagtgcgg

SEQ ID NO: 3592353 - DNA, 25 bp, Homo sapien
tagctttgcaaattacctggtttcc

SEQ ID NO: 3592354 - DNA, 25 bp, Homo sapien
ctagggttatagctttgcaaattac

SEQ ID NO: 3592355 - DNA, 25 bp, Homo sapien
cacatcattgtctagggttatagct

SEQ ID NO: 3592356 - DNA, 25 bp, Homo sapien
tgcaaattacctggtttcccctcat

SEQ ID NO: 3592357 - DNA, 25 bp, Homo sapien
tcactgagttcttttcctagctccc

SEQ ID NO: 3592358 - DNA, 25 bp, Homo sapien
cactgagttcttttcctagctccca

SEQ ID NO: 3592359 - DNA, 25 bp, Homo sapien
actgagttcttttcctagctcccat

SEQ ID NO: 3592360 - DNA, 25 bp, Homo sapien
tcatcatcatcagatgttcgttgag

SEQ ID NO: 3592361 - DNA, 25 bp, Homo sapien
tgttcgttgagttaaactgatgtga

SEQ ID NO: 3592362 - DNA, 25 bp, Homo sapien
cagctccttgtacataagtggaccc

SEQ ID NO: 3592363 - DNA, 25 bp, Homo sapien
gatgtgatgtatggagcaaactttt

SEQ ID NO: 3592364 - DNA, 25 bp, Homo sapien
gatgaagtacagaatccgtaggcct

SEQ ID NO: 3592365 - DNA, 25 bp, Homo sapien
ccaagggatacactgatgaagtaca

SEQ ID NO: 3592366 - DNA, 25 bp, Homo sapien
tacagaatccgtaggccttgctggc

SEQ ID NO: 3592367 - DNA, 25 bp, Homo sapien
aggtcataaagagggtagaaccaag

SEQ ID NO: 3592368 - DNA, 25 bp, Homo sapien
ggaagtgaattctgaactatgacat

SEQ ID NO: 3592369 - DNA, 25 bp, Homo sapien
ttctgaactatgacatttttatgat

SEQ ID NO: 3592370 - DNA, 25 bp, Homo sapien
ttggaggaagtgaattctgaactat

SEQ ID NO: 3592371 - DNA, 25 bp, Homo sapien
gtgaattctgaactatgacattttt

SEQ ID NO: 3592372 - DNA, 25 bp, Homo sapien
taacttattggccaaaagactgcag

SEQ ID NO: 3592373 - DNA, 25 bp, Homo sapien
tggccaaaagactgcagcgaatttt

SEQ ID NO: 3592374 - DNA, 25 bp, Homo sapien
gagacttctaaggacactaaatttg

SEQ ID NO: 3592375 - DNA, 25 bp, Homo sapien
acctctgaggaagcattctaactta

SEQ ID NO: 3592376 - DNA, 25 bp, Homo sapien
tgccctgcatttccgggctgtggcc

SEQ ID NO: 3592377 - DNA, 25 bp, Homo sapien
cttaatgcacaagcttcccttggag

SEQ ID NO: 3592378 - DNA, 25 bp, Homo sapien
atctgccctgcatttccgggctgtg

SEQ ID NO: 3592379 - DNA, 25 bp, Homo sapien
cttcttaatgcacaagcttcccttg

SEQ ID NO: 3592380 - DNA, 25 bp, Homo sapien
aggcttaattacaccctgtgctgct

SEQ ID NO: 3592381 - DNA, 25 bp, Homo sapien
gaaagggtcaggctaccactgtgct

SEQ ID NO: 3592382 - DNA, 25 bp, Homo sapien
ggttgaaagcaagatttgcatactt

SEQ ID NO: 3592383 - DNA, 25 bp, Homo sapien
aaatggtgttgctctcagctctcga

SEQ ID NO: 3592384 - DNA, 25 bp, Homo sapien
cactgtgctgtgtaaggttgaaagc

SEQ ID NO: 3592385 - DNA, 25 bp, Homo sapien
tattctgtaagtatgcaagtccttc

SEQ ID NO: 3592386 - DNA, 25 bp, Homo sapien
gattctcattgcctgctaacgaaga

SEQ ID NO: 3592387 - DNA, 25 bp, Homo sapien
taagcttagatcaatgtggacacaa

SEQ ID NO: 3592388 - DNA, 25 bp, Homo sapien
ggtactcgttctgccttaagcttag

SEQ ID NO: 3592389 - DNA, 25 bp, Homo sapien
ggagtaagtcttcgaccacaggcaa

SEQ ID NO: 3592390 - DNA, 25 bp, Homo sapien
catgatcatagagctggcagacagc

SEQ ID NO: 3592391 - DNA, 25 bp, Homo sapien
cgaaacgaggctccttgataaggtt

SEQ ID NO: 3592392 - DNA, 25 bp, Homo sapien
cagcagggaccagatctgtagcagc

SEQ ID NO: 3592393 - DNA, 25 bp, Homo sapien
gatgctgaccgaaaatccaatcatt

SEQ ID NO: 3592394 - DNA, 25 bp, Homo sapien
tttatgtaatgtgtaagtgctctga

SEQ ID NO: 3592395 - DNA, 25 bp, Homo sapien
gtaatgtgtaagtgctctgatagtc

SEQ ID NO: 3592396 - DNA, 25 bp, Homo sapien
gggatgctgaccgaaaatccaatca

SEQ ID NO: 3592397 - DNA, 25 bp, Homo sapien
tccctgaggctcctatattgtgaat

SEQ ID NO: 3592398 - DNA, 25 bp, Homo sapien
ttccctgaggctcctatattgtgaa

SEQ ID NO: 3592399 - DNA, 25 bp, Homo sapien
gaggctcctatattgtgaattttta

SEQ ID NO: 3592400 - DNA, 25 bp, Homo sapien
cctgaggctcctatattgtgaattt

SEQ ID NO: 3592401 - DNA, 25 bp, Homo sapien
gcgtttcttcgtgaattgattgcac

SEQ ID NO: 3592402 - DNA, 25 bp, Homo sapien
gattgcacgtgaatcttgttctagg

SEQ ID NO: 3592403 - DNA, 25 bp, Homo sapien
aatcttgttctagggtctccttctg

SEQ ID NO: 3592404 - DNA, 25 bp, Homo sapien
tttcttgggagcgtttcttcgtgaa

SEQ ID NO: 3592405 - DNA, 25 bp, Homo sapien
gatctgaatactcgtgtcctctccg

SEQ ID NO: 3592406 - DNA, 25 bp, Homo sapien
aatcctaaccgccaatgtgagggca

SEQ ID NO: 3592407 - DNA, 25 bp, Homo sapien
gatgaaagccttgtgacttccaggg

SEQ ID NO: 3592408 - DNA, 25 bp, Homo sapien
aatgcagggacgtgaaattccagac

SEQ ID NO: 3592409 - DNA, 25 bp, Homo sapien
tcattaaatccatcccaggaaagtg

SEQ ID NO: 3592410 - DNA, 25 bp, Homo sapien
catacagttggtcagtgtctctagc

SEQ ID NO: 3592411 - DNA, 25 bp, Homo sapien
tcagcgttccaggtaacattatact

SEQ ID NO: 3592412 - DNA, 25 bp, Homo sapien
tatgagccactatttctatgatcca

SEQ ID NO: 3592413 - DNA, 25 bp, Homo sapien
taattacccggtcttgtagagagtc

SEQ ID NO: 3592414 - DNA, 25 bp, Homo sapien
gctacttgaaaatatggcaccccag

SEQ ID NO: 3592415 - DNA, 25 bp, Homo sapien
caagatgactggcatgacgctcaca

SEQ ID NO: 3592416 - DNA, 25 bp, Homo sapien
gcatgcttagaacgtgccacctgga

SEQ ID NO: 3592417 - DNA, 25 bp, Homo sapien
ttcaggcagacactacatggcaatg

SEQ ID NO: 3592418 - DNA, 25 bp, Homo sapien
ggagtaacgtgggtcagcccctgtc

SEQ ID NO: 3592419 - DNA, 25 bp, Homo sapien
tagccacaaactagggcaagtactt

SEQ ID NO: 3592420 - DNA, 25 bp, Homo sapien
aaatttcagagctgggagtccccag

SEQ ID NO: 3592421 - DNA, 25 bp, Homo sapien
aattagatactagggctccagatga

SEQ ID NO: 3592422 - DNA, 25 bp, Homo sapien
tccagatgataggatggcccaagtt

SEQ ID NO: 3592423 - DNA, 25 bp, Homo sapien
tctacagcctttaccctgaacaatg

SEQ ID NO: 3592424 - DNA, 25 bp, Homo sapien
gggcccattggcacttaagaaaata

SEQ ID NO: 3592425 - DNA, 25 bp, Homo sapien
ttcatagcggagacttgagatgtcc

SEQ ID NO: 3592426 - DNA, 25 bp, Homo sapien
aaggagttcatagcggagacttgag

SEQ ID NO: 3592427 - DNA, 25 bp, Homo sapien
tctctaataagttctgctaggtctt

SEQ ID NO: 3592428 - DNA, 25 bp, Homo sapien
ttcttcaaggagttcatagcggaga

SEQ ID NO: 3592429 - DNA, 25 bp, Homo sapien
ttccccttgaagttcactctccctg

SEQ ID NO: 3592430 - DNA, 25 bp, Homo sapien
gaagttcactctccctgtacgcatc

SEQ ID NO: 3592431 - DNA, 25 bp, Homo sapien
tcctgactcacattcaggggctgat

SEQ ID NO: 3592432 - DNA, 25 bp, Homo sapien
tctccctgtacgcatctctgcagct

SEQ ID NO: 3592433 - DNA, 25 bp, Homo sapien
ttcgttcacttcatcactctcctta

SEQ ID NO: 3592434 - DNA, 25 bp, Homo sapien
tcatcactctccttatctatctggg

SEQ ID NO: 3592435 - DNA, 25 bp, Homo sapien
tctatctgggcctgcagtacatatc

SEQ ID NO: 3592436 - DNA, 25 bp, Homo sapien
gcagtacatatcttttaatgagcct

SEQ ID NO: 3592437 - DNA, 25 bp, Homo sapien
tatttagatggaaatcttctgagct

SEQ ID NO: 3592438 - DNA, 25 bp, Homo sapien
tacttggttgtttattgtgcccaac

SEQ ID NO: 3592439 - DNA, 25 bp, Homo sapien
agatggaaatcttctgagctcctta

SEQ ID NO: 3592440 - DNA, 25 bp, Homo sapien
gtcttggaggattattgaaactatt

SEQ ID NO: 3592441 - DNA, 25 bp, Homo sapien
tgtcatgagaatcacgcgttaacct

SEQ ID NO: 3592442 - DNA, 25 bp, Homo sapien
ggtgatctcagaagtccattgatgg

SEQ ID NO: 3592443 - DNA, 25 bp, Homo sapien
tgcatggtagagaaagagtcaaaca

SEQ ID NO: 3592444 - DNA, 25 bp, Homo sapien
ggctgccaatcacgttgtcatgaga

SEQ ID NO: 3592445 - DNA, 25 bp, Homo sapien
attaactaagacatccacacctgaa

SEQ ID NO: 3592446 - DNA, 25 bp, Homo sapien
ttaactaagacatccacacctgaag

SEQ ID NO: 3592447 - DNA, 25 bp, Homo sapien
gattaactaagacatccacacctga

SEQ ID NO: 3592448 - DNA, 25 bp, Homo sapien
taggttcccaaaacgagcacttgaa

SEQ ID NO: 3592449 - DNA, 25 bp, Homo sapien
tgaaggaagtggtctacctagtttc

SEQ ID NO: 3592450 - DNA, 25 bp, Homo sapien
caagctagccatggaacagaggcaa

SEQ ID NO: 3592451 - DNA, 25 bp, Homo sapien
acctcaaggataaataccatctggc

SEQ ID NO: 3592452 - DNA, 25 bp, Homo sapien
taacttacttactcatagccactgg

SEQ ID NO: 3592453 - DNA, 25 bp, Homo sapien
tttgtagatcataaatgggagttag

SEQ ID NO: 3592454 - DNA, 25 bp, Homo sapien
aacatatggacatggagggtggact

SEQ ID NO: 3592455 - DNA, 25 bp, Homo sapien
tctctagtacttacaatgctcgata

SEQ ID NO: 3592456 - DNA, 25 bp, Homo sapien
tttccttctgtacattcacgcattc

SEQ ID NO: 3592457 - DNA, 25 bp, Homo sapien
tttggaggtaagctatttcatattc

SEQ ID NO: 3592458 - DNA, 25 bp, Homo sapien
ccctttatctttctgtctgtacacc

SEQ ID NO: 3592459 - DNA, 25 bp, Homo sapien
ccttctgtacattcacgcattcttt

SEQ ID NO: 3592460 - DNA, 25 bp, Homo sapien
ggcttgttcgatttatctgttgata

SEQ ID NO: 3592461 - DNA, 25 bp, Homo sapien
cgcaccaggtgagaatatgttcttt

SEQ ID NO: 3592462 - DNA, 25 bp, Homo sapien
ttcttagttttttcgcaccaggtga

SEQ ID NO: 3592463 - DNA, 25 bp, Homo sapien
ctttggcttgttcgatttatctgtt

SEQ ID NO: 3592464 - DNA, 25 bp, Homo sapien
gaaaggtcttcatgacttcctaaaa

SEQ ID NO: 3592465 - DNA, 25 bp, Homo sapien
cttttttatggccctggaacagctc

SEQ ID NO: 3592466 - DNA, 25 bp, Homo sapien
ccttttttatggccctggaacagct

SEQ ID NO: 3592467 - DNA, 25 bp, Homo sapien
caatgaccatcgtaacattatagac

SEQ ID NO: 3592468 - DNA, 25 bp, Homo sapien
aatgaactgttgatcatggcaatta

SEQ ID NO: 3592469 - DNA, 25 bp, Homo sapien
gaacagtgtcttaaaactctcttca

SEQ ID NO: 3592470 - DNA, 25 bp, Homo sapien
gactccataaagaacgtaaccaatg

SEQ ID NO: 3592471 - DNA, 25 bp, Homo sapien
gcaattgcataaagaccttcagata

SEQ ID NO: 3592472 - DNA, 25 bp, Homo sapien
ggtaaaatataagctatcctagaga

SEQ ID NO: 3592473 - DNA, 25 bp, Homo sapien
aaactacagcaattgcataaagacc

SEQ ID NO: 3592474 - DNA, 25 bp, Homo sapien
tgttcttccaagtgatatctgcaga

SEQ ID NO: 3592475 - DNA, 25 bp, Homo sapien
gaaaaagcaaagacaaagagttgtg

SEQ ID NO: 3592476 - DNA, 25 bp, Homo sapien
ctaggaaaaagcaaagacaaagagt

SEQ ID NO: 3592477 - DNA, 25 bp, Homo sapien
aaaagcaaagacaaagagttgtgtg

SEQ ID NO: 3592478 - DNA, 25 bp, Homo sapien
caaagacaaagagttgtgtgagttt

SEQ ID NO: 3592479 - DNA, 25 bp, Homo sapien
tctttttgtgaggaggactgccctg

SEQ ID NO: 3592480 - DNA, 25 bp, Homo sapien
gggaattctcctctggtcctccatg

SEQ ID NO: 3592481 - DNA, 25 bp, Homo sapien
cacttgatcgggcacttgctgccat

SEQ ID NO: 3592482 - DNA, 25 bp, Homo sapien
cttctctctcttgggaattctcctc

SEQ ID NO: 3592483 - DNA, 25 bp, Homo sapien
aaatgccatgaatctcgcaatgaat

SEQ ID NO: 3592484 - DNA, 25 bp, Homo sapien
tgacatataaatgctcagtgaaaag

SEQ ID NO: 3592485 - DNA, 25 bp, Homo sapien
tgaacatgtccgttgtgccaagtac

SEQ ID NO: 3592486 - DNA, 25 bp, Homo sapien
taaactatgagacatgggcttttag

SEQ ID NO: 3592487 - DNA, 25 bp, Homo sapien
ttagtttaacaagataaaggccatg

SEQ ID NO: 3592488 - DNA, 25 bp, Homo sapien
tgtcctgccttagaagtgatacaaa

SEQ ID NO: 3592489 - DNA, 25 bp, Homo sapien
tgtataactgatgtgtgaaagaatc

SEQ ID NO: 3592490 - DNA, 25 bp, Homo sapien
tatcatgctgcatacatttgtataa

SEQ ID NO: 3592491 - DNA, 25 bp, Homo sapien
aatcagtgtcattcagtccaactgc

SEQ ID NO: 3592492 - DNA, 25 bp, Homo sapien
tgatgtgtggtgcactgtatcatgc

SEQ ID NO: 3592493 - DNA, 25 bp, Homo sapien
tacaaacttcatgaatggtccacgc

SEQ ID NO: 3592494 - DNA, 25 bp, Homo sapien
tgcattcatgactagcagtcccaga

SEQ ID NO: 3592495 - DNA, 25 bp, Homo sapien
taatgagcatctccatccatgagaa

SEQ ID NO: 3592496 - DNA, 25 bp, Homo sapien
ggaggctgcgtgtgctacaaacttc

SEQ ID NO: 3592497 - DNA, 25 bp, Homo sapien
tgctgcatggagcaaaccagtaaat

SEQ ID NO: 3592498 - DNA, 25 bp, Homo sapien
ggaccacaaggaacttgaccgccat

SEQ ID NO: 3592499 - DNA, 25 bp, Homo sapien
gaccgccattgtctgctgtcgtaaa

SEQ ID NO: 3592500 - DNA, 25 bp, Homo sapien
tcataccaaatggagagaagttgct

SEQ ID NO: 3592501 - DNA, 25 bp, Homo sapien
gaaaaattgggaggagacatgttta

SEQ ID NO: 3592502 - DNA, 25 bp, Homo sapien
actggaaaaattgggaggagacatg

SEQ ID NO: 3592503 - DNA, 25 bp, Homo sapien
aatataacaatggttcattattctc

SEQ ID NO: 3592504 - DNA, 25 bp, Homo sapien
tcagaactggaaaaattgggaggag

SEQ ID NO: 3592505 - DNA, 25 bp, Homo sapien
atcccagcttaatctaacaatatca

SEQ ID NO: 3592506 - DNA, 25 bp, Homo sapien
taacaatatcaaccctttatcctta

SEQ ID NO: 3592507 - DNA, 25 bp, Homo sapien
gcttaatctaacaatatcaaccctt

SEQ ID NO: 3592508 - DNA, 25 bp, Homo sapien
tctaacaatatcaaccctttatcct

SEQ ID NO: 3592509 - DNA, 25 bp, Homo sapien
cgtgatcaccactctggagcgtttc

SEQ ID NO: 3592510 - DNA, 25 bp, Homo sapien
ttaaacggctgagatttgggcgacc

SEQ ID NO: 3592511 - DNA, 25 bp, Homo sapien
ggagcgtttcaacatccccattcag

SEQ ID NO: 3592512 - DNA, 25 bp, Homo sapien
cagaatggcctcgacttcttcagtg

SEQ ID NO: 3592513 - DNA, 25 bp, Homo sapien
ctgttgattcggaagaaatataacc

SEQ ID NO: 3592514 - DNA, 25 bp, Homo sapien
tgttgattcggaagaaatataacca

SEQ ID NO: 3592515 - DNA, 25 bp, Homo sapien
catctggagggccatgtgcacatgc

SEQ ID NO: 3592516 - DNA, 25 bp, Homo sapien
ttcctctttctcagtgtcagcagca

SEQ ID NO: 3592517 - DNA, 25 bp, Homo sapien
gcagaggcatctggagggccatgtg

SEQ ID NO: 3592518 - DNA, 25 bp, Homo sapien
ccatgtgcacatgcatgagcagacc

SEQ ID NO: 3592519 - DNA, 25 bp, Homo sapien
acaagagttagtgtcccagtagcca

SEQ ID NO: 3592520 - DNA, 25 bp, Homo sapien
gacaccaacttctctattcctgtaa

SEQ ID NO: 3592521 - DNA, 25 bp, Homo sapien
tctattcctgtaaggtcccactctg

SEQ ID NO: 3592522 - DNA, 25 bp, Homo sapien
atgctgggacaagagttagtgtccc

SEQ ID NO: 3592523 - DNA, 25 bp, Homo sapien
cctccttctagcctttctggataga

SEQ ID NO: 3592524 - DNA, 25 bp, Homo sapien
tactggggtgaaacatcagtgacag

SEQ ID NO: 3592525 - DNA, 25 bp, Homo sapien
ttctggatagactggacctgaggat

SEQ ID NO: 3592526 - DNA, 25 bp, Homo sapien
tagacacatgacatctgatactggg

SEQ ID NO: 3592527 - DNA, 25 bp, Homo sapien
aactgtgacttccttaagcttattc

SEQ ID NO: 3592528 - DNA, 25 bp, Homo sapien
tattcttctttctgacctcaacagc

SEQ ID NO: 3592529 - DNA, 25 bp, Homo sapien
gtcaactgtgacttccttaagctta

SEQ ID NO: 3592530 - DNA, 25 bp, Homo sapien
ctagtcaactgtgacttccttaagc

SEQ ID NO: 3592531 - DNA, 25 bp, Homo sapien
tctggagtggctaaacgagtcatgc

SEQ ID NO: 3592532 - DNA, 25 bp, Homo sapien
aaagcatccccaactcgagagaggt

SEQ ID NO: 3592533 - DNA, 25 bp, Homo sapien
ccttccgcaggagggtatgcacaat

SEQ ID NO: 3592534 - DNA, 25 bp, Homo sapien
ctagacaatgacaggtaagccggac

SEQ ID NO: 3592535 - DNA, 25 bp, Homo sapien
ggtcctcgattagctaaccttctcc

SEQ ID NO: 3592536 - DNA, 25 bp, Homo sapien
ctgccgccggtgagccagtctgttg

SEQ ID NO: 3592537 - DNA, 25 bp, Homo sapien
tatgctggtcctcgattagctaacc

SEQ ID NO: 3592538 - DNA, 25 bp, Homo sapien
ttctccccttctcacggagaactgt

SEQ ID NO: 3592539 - DNA, 25 bp, Homo sapien
agcagctagccgagtagccagcagg

SEQ ID NO: 3592540 - DNA, 25 bp, Homo sapien
accatgaatttcatcctgggaacgc

SEQ ID NO: 3592541 - DNA, 25 bp, Homo sapien
ctgcagcagctagccgagtagccag

SEQ ID NO: 3592542 - DNA, 25 bp, Homo sapien
tgggaacgcagggttcctcagagct

SEQ ID NO: 3592543 - DNA, 25 bp, Homo sapien
taggagtaaggctgtcaatcaaggt

SEQ ID NO: 3592544 - DNA, 25 bp, Homo sapien
ctgtcaatcaaggttttttgccatg

SEQ ID NO: 3592545 - DNA, 25 bp, Homo sapien
cttccacattgcctttaggagtaag

SEQ ID NO: 3592546 - DNA, 25 bp, Homo sapien
cctcactgaactcttccacattgcc

SEQ ID NO: 3592547 - DNA, 25 bp, Homo sapien
aactgggagcggacaatgtagtgaa

SEQ ID NO: 3592548 - DNA, 25 bp, Homo sapien
gtggaagtaactgggagcggacaat

SEQ ID NO: 3592549 - DNA, 25 bp, Homo sapien
gcatggcctgttcatcaggactgtc

SEQ ID NO: 3592550 - DNA, 25 bp, Homo sapien
tcactcatagcatggcatgagaaca

SEQ ID NO: 3592551 - DNA, 25 bp, Homo sapien
tttatcacgctcaattttgactcca

SEQ ID NO: 3592552 - DNA, 25 bp, Homo sapien
tccaaccctcactgtgaggtctagt

SEQ ID NO: 3592553 - DNA, 25 bp, Homo sapien
catcatctttatcacgctcaatttt

SEQ ID NO: 3592554 - DNA, 25 bp, Homo sapien
caattttgactccaaccctcactgt

SEQ ID NO: 3592555 - DNA, 25 bp, Homo sapien
tatttgcttgcctatgatgttcaac

SEQ ID NO: 3592556 - DNA, 25 bp, Homo sapien
gatgttcaacttgttccgttctgtg

SEQ ID NO: 3592557 - DNA, 25 bp, Homo sapien
tatttacacgtgtagcatttctggt

SEQ ID NO: 3592558 - DNA, 25 bp, Homo sapien
tggttttcacacagatgggcccttc

SEQ ID NO: 3592559 - DNA, 25 bp, Homo sapien
ttagcacaagccctatcaattacgt

SEQ ID NO: 3592560 - DNA, 25 bp, Homo sapien
gcgcatttagcacaagccctatcaa

SEQ ID NO: 3592561 - DNA, 25 bp, Homo sapien
caagccctatcaattacgtcaacca

SEQ ID NO: 3592562 - DNA, 25 bp, Homo sapien
actccccgcgcatttagcacaagcc

SEQ ID NO: 3592563 - DNA, 25 bp, Homo sapien
attcactgcacattttccactgggc

SEQ ID NO: 3592564 - DNA, 25 bp, Homo sapien
tcactgcacattttccactgggcag

SEQ ID NO: 3592565 - DNA, 25 bp, Homo sapien
cactgcacattttccactgggcagc

SEQ ID NO: 3592566 - DNA, 25 bp, Homo sapien
cattcactgcacattttccactggg

SEQ ID NO: 3592567 - DNA, 25 bp, Homo sapien
tggataagctcctctattttattca

SEQ ID NO: 3592568 - DNA, 25 bp, Homo sapien
ctactgagaacttagcatacactgg

SEQ ID NO: 3592569 - DNA, 25 bp, Homo sapien
cacatgtatggataagctcctctat

SEQ ID NO: 3592570 - DNA, 25 bp, Homo sapien
tacactggatcacattcactaagaa

SEQ ID NO: 3592571 - DNA, 25 bp, Homo sapien
gagccaacgtgtggctttccaaatt

SEQ ID NO: 3592572 - DNA, 25 bp, Homo sapien
cagagccaacgtgtggctttccaaa

SEQ ID NO: 3592573 - DNA, 25 bp, Homo sapien
tcagtagatcagagccaacgtgtgg

SEQ ID NO: 3592574 - DNA, 25 bp, Homo sapien
tagatcagagccaacgtgtggcttt

SEQ ID NO: 3592575 - DNA, 25 bp, Homo sapien
tatttggaaatacctcgtactgctg

SEQ ID NO: 3592576 - DNA, 25 bp, Homo sapien
catgttctgatgtgactgccccttt

SEQ ID NO: 3592577 - DNA, 25 bp, Homo sapien
gttctgatgtgactgcccctttggg

SEQ ID NO: 3592578 - DNA, 25 bp, Homo sapien
gggtcagagagtaaagccacacttc

SEQ ID NO: 3592579 - DNA, 25 bp, Homo sapien
caggtcacccaaaaccctcttgaag

SEQ ID NO: 3592580 - DNA, 25 bp, Homo sapien
ctgggaattcaaactctggatctta

SEQ ID NO: 3592581 - DNA, 25 bp, Homo sapien
ttcaggtcacccaaaaccctcttga

SEQ ID NO: 3592582 - DNA, 25 bp, Homo sapien
tcttaaactgggaattcaaactctg

SEQ ID NO: 3592583 - DNA, 25 bp, Homo sapien
ggcttgcgggcagccgtcttctccc

SEQ ID NO: 3592584 - DNA, 25 bp, Homo sapien
gtagtagccgtagcaaggcagcggg

SEQ ID NO: 3592585 - DNA, 25 bp, Homo sapien
gatagtcctggctctcgttgcgccg

SEQ ID NO: 3592586 - DNA, 25 bp, Homo sapien
agctccgagtccatgagcagatagt

SEQ ID NO: 3592587 - DNA, 25 bp, Homo sapien
gacccggtgcggagggttcgcgtca

SEQ ID NO: 3592588 - DNA, 25 bp, Homo sapien
ggagccgagtgggcagttccagcgg

SEQ ID NO: 3592589 - DNA, 25 bp, Homo sapien
gcgtcagcggccgaactggacctgg

SEQ ID NO: 3592590 - DNA, 25 bp, Homo sapien
gacctgggcagaccggtgcccaggg

SEQ ID NO: 3592591 - DNA, 25 bp, Homo sapien
gttactatgtcaacagagactctcc

SEQ ID NO: 3592592 - DNA, 25 bp, Homo sapien
tagcgaagcgtaagagcggagagca

SEQ ID NO: 3592593 - DNA, 25 bp, Homo sapien
aagaggatcttgacctgagcaggtc

SEQ ID NO: 3592594 - DNA, 25 bp, Homo sapien
gagaccccgcgaggatgcgtctggg

SEQ ID NO: 3592595 - DNA, 25 bp, Homo sapien
tccgagcgacgttctagaaagcagc

SEQ ID NO: 3592596 - DNA, 25 bp, Homo sapien
gcagccaaagcctgtcctgtagcca

SEQ ID NO: 3592597 - DNA, 25 bp, Homo sapien
ttaaagggatccgagcgacgttcta

SEQ ID NO: 3592598 - DNA, 25 bp, Homo sapien
caactttcaggaggcggtatgagcc

SEQ ID NO: 3592599 - DNA, 25 bp, Homo sapien
cttaaaagggacacgagcctcttct

SEQ ID NO: 3592600 - DNA, 25 bp, Homo sapien
tataccgttgggcatccagctacga

SEQ ID NO: 3592601 - DNA, 25 bp, Homo sapien
caggatataccgttgggcatccagc

SEQ ID NO: 3592602 - DNA, 25 bp, Homo sapien
atccagctacgatgatgccctcaag

SEQ ID NO: 3592603 - DNA, 25 bp, Homo sapien
cgttgggcatccagctacgatgatg

SEQ ID NO: 3592604 - DNA, 25 bp, Homo sapien
atgcacctaaactagtatcaccagc

SEQ ID NO: 3592605 - DNA, 25 bp, Homo sapien
taaactagtatcaccagctgttcta

SEQ ID NO: 3592606 - DNA, 25 bp, Homo sapien
aaactagtatcaccagctgttctac

SEQ ID NO: 3592607 - DNA, 25 bp, Homo sapien
gcacctaaactagtatcaccagctg

SEQ ID NO: 3592608 - DNA, 25 bp, Homo sapien
cagccatagatcatagagaagctca

SEQ ID NO: 3592609 - DNA, 25 bp, Homo sapien
tcaagcatgaagttagttccagcca

SEQ ID NO: 3592610 - DNA, 25 bp, Homo sapien
aaatgtgaacaaggtccagacggtg

SEQ ID NO: 3592611 - DNA, 25 bp, Homo sapien
gatctgctccaaacaaggacctggc

SEQ ID NO: 3592612 - DNA, 25 bp, Homo sapien
gaaaaatggtgatgttgtggccaca

SEQ ID NO: 3592613 - DNA, 25 bp, Homo sapien
gacaaatgggagatgacgggaaaaa

SEQ ID NO: 3592614 - DNA, 25 bp, Homo sapien
agagcttcacgttttagtgaagtca

SEQ ID NO: 3592615 - DNA, 25 bp, Homo sapien
cttcgacgacgcataatgaggacaa

SEQ ID NO: 3592616 - DNA, 25 bp, Homo sapien
tgggcagaacatccaatcaagttgt

SEQ ID NO: 3592617 - DNA, 25 bp, Homo sapien
aaccagcgactgaaagttgggcaga

SEQ ID NO: 3592618 - DNA, 25 bp, Homo sapien
gccctgagtgcagcaactgagagct

SEQ ID NO: 3592619 - DNA, 25 bp, Homo sapien
actgagagctggcatcattaagaga

SEQ ID NO: 3592620 - DNA, 25 bp, Homo sapien
ctacagaggtggagagcagggcaaa

SEQ ID NO: 3592621 - DNA, 25 bp, Homo sapien
acagaggtggagagcagggcaaaat

SEQ ID NO: 3592622 - DNA, 25 bp, Homo sapien
tacagaggtggagagcagggcaaaa

SEQ ID NO: 3592623 - DNA, 25 bp, Homo sapien
ttggtcatagttcttgtcattagtc

SEQ ID NO: 3592624 - DNA, 25 bp, Homo sapien
cttggtcatagttcttgtcattagt

SEQ ID NO: 3592625 - DNA, 25 bp, Homo sapien
tggtcatagttcttgtcattagtca

SEQ ID NO: 3592626 - DNA, 25 bp, Homo sapien
ggtcatagttcttgtcattagtcat

SEQ ID NO: 3592627 - DNA, 25 bp, Homo sapien
tattcagagctaagtttagccttta

SEQ ID NO: 3592628 - DNA, 25 bp, Homo sapien
ctattcagagctaagtttagccttt

SEQ ID NO: 3592629 - DNA, 25 bp, Homo sapien
attcagagctaagtttagcctttaa

SEQ ID NO: 3592630 - DNA, 25 bp, Homo sapien
ttcagagctaagtttagcctttaaa

SEQ ID NO: 3592631 - DNA, 25 bp, Homo sapien
cccctcattgaacttgtgccctcca

SEQ ID NO: 3592632 - DNA, 25 bp, Homo sapien
cctcattgaacttgtgccctccagc

SEQ ID NO: 3592633 - DNA, 25 bp, Homo sapien
ggctctcccctcattgaacttgtgc

SEQ ID NO: 3592634 - DNA, 25 bp, Homo sapien
tcattgaacttgtgccctccagccc

SEQ ID NO: 3592635 - DNA, 25 bp, Homo sapien
aattagtgagtaaaacagattctcc

SEQ ID NO: 3592636 - DNA, 25 bp, Homo sapien
tggtaaaattagtgagtaaaacaga

SEQ ID NO: 3592637 - DNA, 25 bp, Homo sapien
ccatgaatgttgctgagcctctcca

SEQ ID NO: 3592638 - DNA, 25 bp, Homo sapien
cagattctccatgaatgttgctgag

SEQ ID NO: 3592639 - DNA, 25 bp, Homo sapien
ccatactgctagctggtgctgcttt

SEQ ID NO: 3592640 - DNA, 25 bp, Homo sapien
gaggatccatactgctagctggtgc

SEQ ID NO: 3592641 - DNA, 25 bp, Homo sapien
gtgaggatccatactgctagctggt

SEQ ID NO: 3592642 - DNA, 25 bp, Homo sapien
gatccatactgctagctggtgctgc

SEQ ID NO: 3592643 - DNA, 25 bp, Homo sapien
ctctctgtacatcgatggctagcac

SEQ ID NO: 3592644 - DNA, 25 bp, Homo sapien
ttatttttgcttagccaaacttcca

SEQ ID NO: 3592645 - DNA, 25 bp, Homo sapien
tatttttgcttagccaaacttccat

SEQ ID NO: 3592646 - DNA, 25 bp, Homo sapien
caatgcatatatctgggcactgatc

SEQ ID NO: 3592647 - DNA, 25 bp, Homo sapien
tatatctgggcactgatctcacaac

SEQ ID NO: 3592648 - DNA, 25 bp, Homo sapien
catttttggtttcgcttccacaagg

SEQ ID NO: 3592649 - DNA, 25 bp, Homo sapien
cacaaggtcaacacgcaatgcatat

SEQ ID NO: 3592650 - DNA, 25 bp, Homo sapien
cagctgccataaccaatgccagaat

SEQ ID NO: 3592651 - DNA, 25 bp, Homo sapien
caatgccaacgaaggagaatttggt

SEQ ID NO: 3592652 - DNA, 25 bp, Homo sapien
catttaggtcctgccaagcaatgcc

SEQ ID NO: 3592653 - DNA, 25 bp, Homo sapien
taaccaatgccagaataaatgttga

SEQ ID NO: 3592654 - DNA, 25 bp, Homo sapien
tgcaccagttctgaaatgtcctctc

SEQ ID NO: 3592655 - DNA, 25 bp, Homo sapien
cttgtgtaggcatggatagatatta

SEQ ID NO: 3592656 - DNA, 25 bp, Homo sapien
tcattattatctaacttgtgtaggc

SEQ ID NO: 3592657 - DNA, 25 bp, Homo sapien
gctctctccctccaataagtttata

SEQ ID NO: 3592658 - DNA, 25 bp, Homo sapien
ctgaaaccacatctgcaggagtaac

SEQ ID NO: 3592659 - DNA, 25 bp, Homo sapien
aaaccacatctgcaggagtaacaaa

SEQ ID NO: 3592660 - DNA, 25 bp, Homo sapien
taagtttaggatggcctgaaaccac

SEQ ID NO: 3592661 - DNA, 25 bp, Homo sapien
ctaaattaagtttaggatggcctga

SEQ ID NO: 3592662 - DNA, 25 bp, Homo sapien
ggactgaaaagtccatattcccagt

SEQ ID NO: 3592663 - DNA, 25 bp, Homo sapien
tagggtcaatttgtgtaagcagatg

SEQ ID NO: 3592664 - DNA, 25 bp, Homo sapien
cttatgaaatcctgaagatggactg

SEQ ID NO: 3592665 - DNA, 25 bp, Homo sapien
tgaaaataggctcttgaatccttac

SEQ ID NO: 3592666 - DNA, 25 bp, Homo sapien
gcggcgagctttttattaatggctc

SEQ ID NO: 3592667 - DNA, 25 bp, Homo sapien
ttttcagaaagagtgaaagcggcga

SEQ ID NO: 3592668 - DNA, 25 bp, Homo sapien
gaaagcggcgagctttttattaatg

SEQ ID NO: 3592669 - DNA, 25 bp, Homo sapien
cagaaagagtgaaagcggcgagctt

SEQ ID NO: 3592670 - DNA, 25 bp, Homo sapien
cttcttggattcagtgggcaagagc

SEQ ID NO: 3592671 - DNA, 25 bp, Homo sapien
ttcttggattcagtgggcaagagca

SEQ ID NO: 3592672 - DNA, 25 bp, Homo sapien
gcttcttggattcagtgggcaagag

SEQ ID NO: 3592673 - DNA, 25 bp, Homo sapien
tggtctgagacattctgggttgtga

SEQ ID NO: 3592674 - DNA, 25 bp, Homo sapien
tcccaatatgatatgctggtactgc

SEQ ID NO: 3592675 - DNA, 25 bp, Homo sapien
caaaagaggtatattgccattccca

SEQ ID NO: 3592676 - DNA, 25 bp, Homo sapien
cactagttgtctaacaaaatttgga

SEQ ID NO: 3592677 - DNA, 25 bp, Homo sapien
gttctatggaatgcagcattatatt

SEQ ID NO: 3592678 - DNA, 25 bp, Homo sapien
ttatattcacagtgcgacaaattcc

SEQ ID NO: 3592679 - DNA, 25 bp, Homo sapien
ctatggaatgcagcattatattcac

SEQ ID NO: 3592680 - DNA, 25 bp, Homo sapien
ttcacagtgcgacaaattcccaaat

SEQ ID NO: 3592681 - DNA, 25 bp, Homo sapien
actctacattcaagatgcattttta

SEQ ID NO: 3592682 - DNA, 25 bp, Homo sapien
ctctacattcaagatgcatttttac

SEQ ID NO: 3592683 - DNA, 25 bp, Homo sapien
tctacattcaagatgcatttttact

SEQ ID NO: 3592684 - DNA, 25 bp, Homo sapien
ggactttcacatatagtctttaccc

SEQ ID NO: 3592685 - DNA, 25 bp, Homo sapien
gagaatcaaccaatactagagcaga

SEQ ID NO: 3592686 - DNA, 25 bp, Homo sapien
ctgagaatcaaccaatactagagca

SEQ ID NO: 3592687 - DNA, 25 bp, Homo sapien
gtctttacccatccatgcagcatga

SEQ ID NO: 3592688 - DNA, 25 bp, Homo sapien
tggcatcacctagaaatagtaaggt

SEQ ID NO: 3592689 - DNA, 25 bp, Homo sapien
gccatctacagttaaattttgccta

SEQ ID NO: 3592690 - DNA, 25 bp, Homo sapien
gaagacaagttgtagttcacttgaa

SEQ ID NO: 3592691 - DNA, 25 bp, Homo sapien
tatcattgtagaacttgcattacaa

SEQ ID NO: 3592692 - DNA, 25 bp, Homo sapien
cacgtgccccattgaattccagttg

SEQ ID NO: 3592693 - DNA, 25 bp, Homo sapien
tcttgttatggaggtgactgcagct

SEQ ID NO: 3592694 - DNA, 25 bp, Homo sapien
tgagttgtttttggtccacgtgccc

SEQ ID NO: 3592695 - DNA, 25 bp, Homo sapien
gatttgctagaccacactcgttaaa

SEQ ID NO: 3592696 - DNA, 25 bp, Homo sapien
accaggcatgcagggcgacacccat

SEQ ID NO: 3592697 - DNA, 25 bp, Homo sapien
ttcttttttgagaccccggaatgca

SEQ ID NO: 3592698 - DNA, 25 bp, Homo sapien
catgcagggcgacacccatcattat

SEQ ID NO: 3592699 - DNA, 25 bp, Homo sapien
tcttttttgagaccccggaatgcat

SEQ ID NO: 3592700 - DNA, 25 bp, Homo sapien
gccaaaaattatcatatgatgcata

SEQ ID NO: 3592701 - DNA, 25 bp, Homo sapien
catatgatgcataagcaagagtgtc

SEQ ID NO: 3592702 - DNA, 25 bp, Homo sapien
cctgaataccgtcctaagtgcattt

SEQ ID NO: 3592703 - DNA, 25 bp, Homo sapien
cagcatttcctgaataccgtcctaa

SEQ ID NO: 3592704 - DNA, 25 bp, Homo sapien
attcttttctgtatcacagtccgtc

SEQ ID NO: 3592705 - DNA, 25 bp, Homo sapien
caattcttttctgtatcacagtccg

SEQ ID NO: 3592706 - DNA, 25 bp, Homo sapien
tcttttctgtatcacagtccgtcca

SEQ ID NO: 3592707 - DNA, 25 bp, Homo sapien
tttctgtatcacagtccgtccacct

SEQ ID NO: 3592708 - DNA, 25 bp, Homo sapien
gcccacataatacgggaaaacttca

SEQ ID NO: 3592709 - DNA, 25 bp, Homo sapien
cacataatacgggaaaacttcaaat

SEQ ID NO: 3592710 - DNA, 25 bp, Homo sapien
tggtgacagagccaatggtatcctt

SEQ ID NO: 3592711 - DNA, 25 bp, Homo sapien
tgaattatgtataaaccactcggtg

SEQ ID NO: 3592712 - DNA, 25 bp, Homo sapien
aaccactcggtgttttggtgacaga

SEQ ID NO: 3592713 - DNA, 25 bp, Homo sapien
ctcaaatgggtagctagatccttct

SEQ ID NO: 3592714 - DNA, 25 bp, Homo sapien
ctgtgaggaaaaggatccagctgtt

SEQ ID NO: 3592715 - DNA, 25 bp, Homo sapien
tgtgactgaacaggtctgtgaggaa

SEQ ID NO: 3592716 - DNA, 25 bp, Homo sapien
catgtgactgaacaggtctgtgagg

SEQ ID NO: 3592717 - DNA, 25 bp, Homo sapien
aggaaaaggatccagctgttttcta

SEQ ID NO: 3592718 - DNA, 25 bp, Homo sapien
tagtcaaaaggagaactctattcat

SEQ ID NO: 3592719 - DNA, 25 bp, Homo sapien
acttcttgtgtaggaaacaatagaa

SEQ ID NO: 3592720 - DNA, 25 bp, Homo sapien
tcttgtgtaggaaacaatagaattt

SEQ ID NO: 3592721 - DNA, 25 bp, Homo sapien
cttcttgtgtaggaaacaatagaat

SEQ ID NO: 3592722 - DNA, 25 bp, Homo sapien
ttcttgtgtaggaaacaatagaatt

SEQ ID NO: 3592723 - DNA, 25 bp, Homo sapien
cacagtcttccttacaaacagtatc

SEQ ID NO: 3592724 - DNA, 25 bp, Homo sapien
catcacatgattcctcacagtcttc

SEQ ID NO: 3592725 - DNA, 25 bp, Homo sapien
ctacaatgttaactactgaagagtc

SEQ ID NO: 3592726 - DNA, 25 bp, Homo sapien
tagttttaacatcacatgattcctc

SEQ ID NO: 3592727 - DNA, 25 bp, Homo sapien
tagaatgatgtacacagttaccttg

SEQ ID NO: 3592728 - DNA, 25 bp, Homo sapien
cgtagaatgatgtacacagttacct

SEQ ID NO: 3592729 - DNA, 25 bp, Homo sapien
tgtacacagttaccttgtacagctt

SEQ ID NO: 3592730 - DNA, 25 bp, Homo sapien
tacacagttaccttgtacagcttct

SEQ ID NO: 3592731 - DNA, 25 bp, Homo sapien
gaaagaactacagagcatagagtct

SEQ ID NO: 3592732 - DNA, 25 bp, Homo sapien
caaatatcagtcagctctttgtgga

SEQ ID NO: 3592733 - DNA, 25 bp, Homo sapien
tggatagatgaaaacacttcttcaa

SEQ ID NO: 3592734 - DNA, 25 bp, Homo sapien
aaatatcagtcagctctttgtggaa

SEQ ID NO: 3592735 - DNA, 25 bp, Homo sapien
agccaataaactagtgtctcaaaaa

SEQ ID NO: 3592736 - DNA, 25 bp, Homo sapien
aaactgtcacttgcatagccaataa

SEQ ID NO: 3592737 - DNA, 25 bp, Homo sapien
tccaatctgggaatttttccaagaa

SEQ ID NO: 3592738 - DNA, 25 bp, Homo sapien
tgcatttacattaggctccaacaat

SEQ ID NO: 3592739 - DNA, 25 bp, Homo sapien
tcttcccaagagattgctagttttg

SEQ ID NO: 3592740 - DNA, 25 bp, Homo sapien
ccaaaaccatttcaatgcgatgatc

SEQ ID NO: 3592741 - DNA, 25 bp, Homo sapien
attaggaggctttgaaatgtagacc

SEQ ID NO: 3592742 - DNA, 25 bp, Homo sapien
cagcaatgcgagaaccattaggagg

SEQ ID NO: 3592743 - DNA, 25 bp, Homo sapien
tcgtcactgtcggtactgccacaaa

SEQ ID NO: 3592744 - DNA, 25 bp, Homo sapien
gatgatgatgccacagaaagactca

SEQ ID NO: 3592745 - DNA, 25 bp, Homo sapien
gccagaagcattaccgagtggatga

SEQ ID NO: 3592746 - DNA, 25 bp, Homo sapien
caaggaagacgactgcagagggaat

SEQ ID NO: 3592747 - DNA, 25 bp, Homo sapien
ccacccgccgctcgaagctggaggg

SEQ ID NO: 3592748 - DNA, 25 bp, Homo sapien
ctcgcgcaacaacccgggtccctag

SEQ ID NO: 3592749 - DNA, 25 bp, Homo sapien
agggatgcttgggttgccacccgcc

SEQ ID NO: 3592750 - DNA, 25 bp, Homo sapien
tgcttcgggcacatcgtcccgcccc

SEQ ID NO: 3592751 - DNA, 25 bp, Homo sapien
tacaggcaccagtgccgctgcgcgg

SEQ ID NO: 3592752 - DNA, 25 bp, Homo sapien
cgcgccgtcggttgttgtcaagatg

SEQ ID NO: 3592753 - DNA, 25 bp, Homo sapien
tttccgttgtcaaggacgcgccgtc

SEQ ID NO: 3592754 - DNA, 25 bp, Homo sapien
ccatctgctattgcccggcgaggtc

SEQ ID NO: 3592755 - DNA, 25 bp, Homo sapien
gtagcgatgttgaaaacggggccca

SEQ ID NO: 3592756 - DNA, 25 bp, Homo sapien
gctgccagggtagcgatgttgaaaa

SEQ ID NO: 3592757 - DNA, 25 bp, Homo sapien
ccagggtagcgatgttgaaaacggg

SEQ ID NO: 3592758 - DNA, 25 bp, Homo sapien
tagcgatgttgaaaacggggcccat

SEQ ID NO: 3592759 - DNA, 25 bp, Homo sapien
caacaatttgtattgagtgcctgct

SEQ ID NO: 3592760 - DNA, 25 bp, Homo sapien
caaaatggtagcttgcaatagctgc

SEQ ID NO: 3592761 - DNA, 25 bp, Homo sapien
cagtcttgtcagagatgagtgtctt

SEQ ID NO: 3592762 - DNA, 25 bp, Homo sapien
tgctctttggctgactctgttctag

SEQ ID NO: 3592763 - DNA, 25 bp, Homo sapien
ttataagcacccacaataacacctg

SEQ ID NO: 3592764 - DNA, 25 bp, Homo sapien
attataagcacccacaataacacct

SEQ ID NO: 3592765 - DNA, 25 bp, Homo sapien
ctttttgtatggtgaagggaggcct

SEQ ID NO: 3592766 - DNA, 25 bp, Homo sapien
tacatggcactttggcataccgaaa

SEQ ID NO: 3592767 - DNA, 25 bp, Homo sapien
catgaatcaagccagggccgttggc

SEQ ID NO: 3592768 - DNA, 25 bp, Homo sapien
tgtacaattacatcgattcttccaa

SEQ ID NO: 3592769 - DNA, 25 bp, Homo sapien
ctcctaatgctgtccctcctgcctc

SEQ ID NO: 3592770 - DNA, 25 bp, Homo sapien
ctaatgctgtccctcctgcctccct

SEQ ID NO: 3592771 - DNA, 25 bp, Homo sapien
ctgcctccctccaccccacgacagg

SEQ ID NO: 3592772 - DNA, 25 bp, Homo sapien
tttctcctaatgctgtccctcctgc

SEQ ID NO: 3592773 - DNA, 25 bp, Homo sapien
cctgggtccctagagacgtgtggcc

SEQ ID NO: 3592774 - DNA, 25 bp, Homo sapien
cccagccgagagcacgatggctact

SEQ ID NO: 3592775 - DNA, 25 bp, Homo sapien
ggacttgggtggctactacttcagg

SEQ ID NO: 3592776 - DNA, 25 bp, Homo sapien
gtctccatggaaacggcccaggcat

SEQ ID NO: 3592777 - DNA, 25 bp, Homo sapien
gacaatatgccgacatcataacaag

SEQ ID NO: 3592778 - DNA, 25 bp, Homo sapien
gtcagactgacaatatgccgacatc

SEQ ID NO: 3592779 - DNA, 25 bp, Homo sapien
gactgacaatatgccgacatcataa

SEQ ID NO: 3592780 - DNA, 25 bp, Homo sapien
cagactgacaatatgccgacatcat

SEQ ID NO: 3592781 - DNA, 25 bp, Homo sapien
taatcagagccatgtatcacagtgt

SEQ ID NO: 3592782 - DNA, 25 bp, Homo sapien
tgaaataagtgctcaaccctctccc

SEQ ID NO: 3592783 - DNA, 25 bp, Homo sapien
tcttttgggaagtgaaccagttcta

SEQ ID NO: 3592784 - DNA, 25 bp, Homo sapien
agaaagtgatgatggaacctccttc

SEQ ID NO: 3592785 - DNA, 25 bp, Homo sapien
catcaatgccggctcacggtatcta

SEQ ID NO: 3592786 - DNA, 25 bp, Homo sapien
gctgaaaacaatggatctttattaa

SEQ ID NO: 3592787 - DNA, 25 bp, Homo sapien
gctcacggtatctattttaactcca

SEQ ID NO: 3592788 - DNA, 25 bp, Homo sapien
attaacatcaatgccggctcacggt

SEQ ID NO: 3592789 - DNA, 25 bp, Homo sapien
tatcctcgcggctttaagctcgcac

SEQ ID NO: 3592790 - DNA, 25 bp, Homo sapien
ctatcctcgcggctttaagctcgca

SEQ ID NO: 3592791 - DNA, 25 bp, Homo sapien
gagcggagcggaagaacttcctgca

SEQ ID NO: 3592792 - DNA, 25 bp, Homo sapien
gaggaggtgggttcgcacatcctct

SEQ ID NO: 3592793 - DNA, 25 bp, Homo sapien
ggcgaactggaagcgcctttcccga

SEQ ID NO: 3592794 - DNA, 25 bp, Homo sapien
gttctccgcagacaccacagttcgg

SEQ ID NO: 3592795 - DNA, 25 bp, Homo sapien
ggttcgcggggcagaatacggggca

SEQ ID NO: 3592796 - DNA, 25 bp, Homo sapien
cggggcagaatacggggcacgcttc

SEQ ID NO: 3592797 - DNA, 25 bp, Homo sapien
cgtttgcggttcgcggggcagaata

SEQ ID NO: 3592798 - DNA, 25 bp, Homo sapien
tttgcggttcgcggggcagaatacg

SEQ ID NO: 3592799 - DNA, 25 bp, Homo sapien
ccgcgggccgggagtgtgcaggaat

SEQ ID NO: 3592800 - DNA, 25 bp, Homo sapien
gccgcgggccgggagtgtgcaggaa

SEQ ID NO: 3592801 - DNA, 25 bp, Homo sapien
gagtttctctctgcggttgcagccc

SEQ ID NO: 3592802 - DNA, 25 bp, Homo sapien
gcgaagtggaactggagtcgtccac

SEQ ID NO: 3592803 - DNA, 25 bp, Homo sapien
gtgggcttgcacaatgcgcgcgcct

SEQ ID NO: 3592804 - DNA, 25 bp, Homo sapien
gccgagtttgtgaagttgagccctg

SEQ ID NO: 3592805 - DNA, 25 bp, Homo sapien
atttgcaggcctgttgtatagtctc

SEQ ID NO: 3592806 - DNA, 25 bp, Homo sapien
tgcaatgtagttagcccactcggga

SEQ ID NO: 3592807 - DNA, 25 bp, Homo sapien
taaacttcagcataggaactttgcc

SEQ ID NO: 3592808 - DNA, 25 bp, Homo sapien
tgagtggaaagaagagttaccgccc

SEQ ID NO: 3592809 - DNA, 25 bp, Homo sapien
tgactccacagcatgttcgagctca

SEQ ID NO: 3592810 - DNA, 25 bp, Homo sapien
cactggagtagtctctggcccagca

SEQ ID NO: 3592811 - DNA, 25 bp, Homo sapien
cagctcagcatcttcgacagtcttc

SEQ ID NO: 3592812 - DNA, 25 bp, Homo sapien
ctgggacactgacccccactggagt

SEQ ID NO: 3592813 - DNA, 25 bp, Homo sapien
catggttctggttgctcaagtgctg

SEQ ID NO: 3592814 - DNA, 25 bp, Homo sapien
gctgtagcaccaagtttcctgggaa

SEQ ID NO: 3592815 - DNA, 25 bp, Homo sapien
gcacttttatttacgtagggcttga

SEQ ID NO: 3592816 - DNA, 25 bp, Homo sapien
tgggaacaagtactgccaccgtgga

SEQ ID NO: 3592817 - DNA, 25 bp, Homo sapien
ttctctgaaatctgaataatcgatt

SEQ ID NO: 3592818 - DNA, 25 bp, Homo sapien
tgccagtctggagagcaccagtggt

SEQ ID NO: 3592819 - DNA, 25 bp, Homo sapien
taggactgaataccagtgttcttgg

SEQ ID NO: 3592820 - DNA, 25 bp, Homo sapien
tgctctcagctatgtcatgtgtttg

SEQ ID NO: 3592821 - DNA, 25 bp, Homo sapien
aaaactacgcatgatagcaacacac

SEQ ID NO: 3592822 - DNA, 25 bp, Homo sapien
aacaaaactacgcatgatagcaaca

SEQ ID NO: 3592823 - DNA, 25 bp, Homo sapien
taatctgtttcagtaccccccatgc

SEQ ID NO: 3592824 - DNA, 25 bp, Homo sapien
cccatgccaacaaaactacgcatga

SEQ ID NO: 3592825 - DNA, 25 bp, Homo sapien
tgttttggtgtctttataaagcttc

SEQ ID NO: 3592826 - DNA, 25 bp, Homo sapien
gtgtctttataaagcttcagcacca

SEQ ID NO: 3592827 - DNA, 25 bp, Homo sapien
ctgttttggtgtctttataaagctt

SEQ ID NO: 3592828 - DNA, 25 bp, Homo sapien
ttggtgtctttataaagcttcagca

SEQ ID NO: 3592829 - DNA, 25 bp, Homo sapien
tagaacgatgacctacagattaagg

SEQ ID NO: 3592830 - DNA, 25 bp, Homo sapien
agattaaggtccatagcctggcccc

SEQ ID NO: 3592831 - DNA, 25 bp, Homo sapien
ttgacccagatagtaaagatagatc

SEQ ID NO: 3592832 - DNA, 25 bp, Homo sapien
tacttggacaagtcatagaacgatg

SEQ ID NO: 3592833 - DNA, 25 bp, Homo sapien
tctgcaacttcctgaacaggcatgt

SEQ ID NO: 3592834 - DNA, 25 bp, Homo sapien
gcaacttcctgaacaggcatgtttt

SEQ ID NO: 3592835 - DNA, 25 bp, Homo sapien
aatctgcaacttcctgaacaggcat

SEQ ID NO: 3592836 - DNA, 25 bp, Homo sapien
tcaatctgcaacttcctgaacaggc

SEQ ID NO: 3592837 - DNA, 25 bp, Homo sapien
tatggagacctgctgatcaagtgct

SEQ ID NO: 3592838 - DNA, 25 bp, Homo sapien
gataatatctttacagcacatgcct

SEQ ID NO: 3592839 - DNA, 25 bp, Homo sapien
ggctttttaaaacatccgcaacaca

SEQ ID NO: 3592840 - DNA, 25 bp, Homo sapien
gcaacacatcgattctaggagtcag

SEQ ID NO: 3592841 - DNA, 25 bp, Homo sapien
cttgaggtgaatgtcctttgaaagt

SEQ ID NO: 3592842 - DNA, 25 bp, Homo sapien
tacttgaggtgaatgtcctttgaaa

SEQ ID NO: 3592843 - DNA, 25 bp, Homo sapien
ttacttgaggtgaatgtcctttgaa

SEQ ID NO: 3592844 - DNA, 25 bp, Homo sapien
gaggtgaatgtcctttgaaagttaa

SEQ ID NO: 3592845 - DNA, 25 bp, Homo sapien
gcaaaaaggccactgcagcatgaac

SEQ ID NO: 3592846 - DNA, 25 bp, Homo sapien
cataacacaacagcccgttcagagg

SEQ ID NO: 3592847 - DNA, 25 bp, Homo sapien
gccaagacttctttagggaggttca

SEQ ID NO: 3592848 - DNA, 25 bp, Homo sapien
aattgacgtcttttgagcagagatc

SEQ ID NO: 3592849 - DNA, 25 bp, Homo sapien
tactcttaggcaatgcggaatatca

SEQ ID NO: 3592850 - DNA, 25 bp, Homo sapien
tgtaagtcagcctacacagccagac

SEQ ID NO: 3592851 - DNA, 25 bp, Homo sapien
taaagtcttgctgtcctatcctcaa

SEQ ID NO: 3592852 - DNA, 25 bp, Homo sapien
ccagttttgttatgtggtgactcca

SEQ ID NO: 3592853 - DNA, 25 bp, Homo sapien
gtaagttaaatagctgcttattaaa

SEQ ID NO: 3592854 - DNA, 25 bp, Homo sapien
tattaaatgtacaagccgtagagaa

SEQ ID NO: 3592855 - DNA, 25 bp, Homo sapien
tcacacagaccattgaagaataaca

SEQ ID NO: 3592856 - DNA, 25 bp, Homo sapien
cacagaccattgaagaataacagct

SEQ ID NO: 3592857 - DNA, 25 bp, Homo sapien
gatctaaggagacacatgcaccgga

SEQ ID NO: 3592858 - DNA, 25 bp, Homo sapien
gatgaacaaacgtccagcaagatac

SEQ ID NO: 3592859 - DNA, 25 bp, Homo sapien
tgagcctgtttggatgatggatgcc

SEQ ID NO: 3592860 - DNA, 25 bp, Homo sapien
gaaatttccataagccagttgcagt

SEQ ID NO: 3592861 - DNA, 25 bp, Homo sapien
gaatctgttaatagttgtagcttgg

SEQ ID NO: 3592862 - DNA, 25 bp, Homo sapien
tgtagcttgggatggttattgtagt

SEQ ID NO: 3592863 - DNA, 25 bp, Homo sapien
caaatgaccatattagtgaatctgt

SEQ ID NO: 3592864 - DNA, 25 bp, Homo sapien
taccaccttatttaaatctcgatta

SEQ ID NO: 3592865 - DNA, 25 bp, Homo sapien
attttcaagggttcataacaggcat

SEQ ID NO: 3592866 - DNA, 25 bp, Homo sapien
tattttaagtactttcagtgctcaa

SEQ ID NO: 3592867 - DNA, 25 bp, Homo sapien
taacaggcataaaatctcttctcct

SEQ ID NO: 3592868 - DNA, 25 bp, Homo sapien
taatagttcataggttgatcactca

SEQ ID NO: 3592869 - DNA, 25 bp, Homo sapien
gcctataatttgccagtagccacag

SEQ ID NO: 3592870 - DNA, 25 bp, Homo sapien
tcagcagattagctttagcttaggg

SEQ ID NO: 3592871 - DNA, 25 bp, Homo sapien
gccagtagccacagattaagattat

SEQ ID NO: 3592872 - DNA, 25 bp, Homo sapien
gaattacatagcatgttgttgggat

SEQ ID NO: 3592873 - DNA, 25 bp, Homo sapien
ctttctctttaataaagacttgtct

SEQ ID NO: 3592874 - DNA, 25 bp, Homo sapien
tctttctctttaataaagacttgtc

SEQ ID NO: 3592875 - DNA, 25 bp, Homo sapien
gaatcatagccttgatgtggtctct

SEQ ID NO: 3592876 - DNA, 25 bp, Homo sapien
tgacctgaaggagacctaagagtcc

SEQ ID NO: 3592877 - DNA, 25 bp, Homo sapien
tatgtccttgttcctaatgtaaaag

SEQ ID NO: 3592878 - DNA, 25 bp, Homo sapien
ggtagcattgggataagattttaac

SEQ ID NO: 3592879 - DNA, 25 bp, Homo sapien
cacattgatttggagtttcagatct

SEQ ID NO: 3592880 - DNA, 25 bp, Homo sapien
agatcttccaaagcactatttgttg

SEQ ID NO: 3592881 - DNA, 25 bp, Homo sapien
ttatggttgatggagcacattgatt

SEQ ID NO: 3592882 - DNA, 25 bp, Homo sapien
gatcttccaaagcactatttgttgt

SEQ ID NO: 3592883 - DNA, 25 bp, Homo sapien
gaattgtgggtgtgcctatcataac

SEQ ID NO: 3592884 - DNA, 25 bp, Homo sapien
ggattttatcctcgcaagcatgttg

SEQ ID NO: 3592885 - DNA, 25 bp, Homo sapien
gccttctatatggaacatggcagaa

SEQ ID NO: 3592886 - DNA, 25 bp, Homo sapien
aatgaacacagggaagtgactttgc

SEQ ID NO: 3592887 - DNA, 25 bp, Homo sapien
tagtgtctaagcagaactgcgtctg

SEQ ID NO: 3592888 - DNA, 25 bp, Homo sapien
cactacatgtgacggcacagaggac

SEQ ID NO: 3592889 - DNA, 25 bp, Homo sapien
tcatccgtggtagtgtctaagcaga

SEQ ID NO: 3592890 - DNA, 25 bp, Homo sapien
gattcttaaatgacttcactacatg

SEQ ID NO: 3592891 - DNA, 25 bp, Homo sapien
ttttgtcagatggtgtgaagcccag

SEQ ID NO: 3592892 - DNA, 25 bp, Homo sapien
gtgcttgttgctccacggtggtaca

SEQ ID NO: 3592893 - DNA, 25 bp, Homo sapien
gaagcccagtaatgtgaatctgcct

SEQ ID NO: 3592894 - DNA, 25 bp, Homo sapien
ccacggtggtacactttttgtcaga

SEQ ID NO: 3592895 - DNA, 25 bp, Homo sapien
tccctgcttctgtaatcatcagttt

SEQ ID NO: 3592896 - DNA, 25 bp, Homo sapien
tattgcgggtaaattcctggctccg

SEQ ID NO: 3592897 - DNA, 25 bp, Homo sapien
tgtgctaacgctgttggaatcaaca

SEQ ID NO: 3592898 - DNA, 25 bp, Homo sapien
gggttccacatgtgctaacgctgtt

SEQ ID NO: 3592899 - DNA, 25 bp, Homo sapien
caaaaacacaacttgccgtgacagt

SEQ ID NO: 3592900 - DNA, 25 bp, Homo sapien
caccctcggactttaatgacaggca

SEQ ID NO: 3592901 - DNA, 25 bp, Homo sapien
tcattgtttacagcctggcggagtt

SEQ ID NO: 3592902 - DNA, 25 bp, Homo sapien
cagttggagtttataaccaccctcg

SEQ ID NO: 3592903 - DNA, 25 bp, Homo sapien
ttccacggcatttccggaatgccag

SEQ ID NO: 3592904 - DNA, 25 bp, Homo sapien
catttccggaatgccagggcatgcc

SEQ ID NO: 3592905 - DNA, 25 bp, Homo sapien
acggcatttccggaatgccagggca

SEQ ID NO: 3592906 - DNA, 25 bp, Homo sapien
cagggcatgccctgtcaatcctgca

SEQ ID NO: 3592907 - DNA, 25 bp, Homo sapien
gaaattcctgatcaaagccatgtgt

SEQ ID NO: 3592908 - DNA, 25 bp, Homo sapien
gatcaaagccatgtgtcagcttctc

SEQ ID NO: 3592909 - DNA, 25 bp, Homo sapien
ctgagaaattcctgatcaaagccat

SEQ ID NO: 3592910 - DNA, 25 bp, Homo sapien
ttcctgatcaaagccatgtgtcagc

SEQ ID NO: 3592911 - DNA, 25 bp, Homo sapien
aatgtttcactagggaagagacttc

SEQ ID NO: 3592912 - DNA, 25 bp, Homo sapien
tcaattaatgaggtctacactaccg

SEQ ID NO: 3592913 - DNA, 25 bp, Homo sapien
gcttgggacttgtctgtccctggtt

SEQ ID NO: 3592914 - DNA, 25 bp, Homo sapien
aatgaggtctacactaccgctatgg

SEQ ID NO: 3592915 - DNA, 25 bp, Homo sapien
gtttcactccccgataagctgtaag

SEQ ID NO: 3592916 - DNA, 25 bp, Homo sapien
tctgcaaatcgactaggtctgccat

SEQ ID NO: 3592917 - DNA, 25 bp, Homo sapien
gtaaggatcccttgctttctgcaaa

SEQ ID NO: 3592918 - DNA, 25 bp, Homo sapien
ccgataagctgtaaggatcccttgc

SEQ ID NO: 3592919 - DNA, 25 bp, Homo sapien
tgtttccacagaacgatgaagtctc

SEQ ID NO: 3592920 - DNA, 25 bp, Homo sapien
gttaccctggtacggatggctctca

SEQ ID NO: 3592921 - DNA, 25 bp, Homo sapien
taaacaagaggatgcctcagctcag

SEQ ID NO: 3592922 - DNA, 25 bp, Homo sapien
cagctcagtccaattgcgtgcagaa

SEQ ID NO: 3592923 - DNA, 25 bp, Homo sapien
aacaaagcattgaagtctgcagttg

SEQ ID NO: 3592924 - DNA, 25 bp, Homo sapien
aagtctgcagttgaaaagcccaacg

SEQ ID NO: 3592925 - DNA, 25 bp, Homo sapien
aagcccaacgtctgtgagatccagg

SEQ ID NO: 3592926 - DNA, 25 bp, Homo sapien
ggaaataattgttggtaatgagatg

SEQ ID NO: 3592927 - DNA, 25 bp, Homo sapien
ggtccatgactagcaaaagccaagg

SEQ ID NO: 3592928 - DNA, 25 bp, Homo sapien
tcaacgggcaaagagcgtcaacttc

SEQ ID NO: 3592929 - DNA, 25 bp, Homo sapien
taacattggaacagtagacctcctg

SEQ ID NO: 3592930 - DNA, 25 bp, Homo sapien
aagcaagcatcggattcaacgggca

SEQ ID NO: 3592931 - DNA, 25 bp, Homo sapien
gagagggcacaaaccgcaaggtgaa

SEQ ID NO: 3592932 - DNA, 25 bp, Homo sapien
gccagatcataaccctgaggtgaca

SEQ ID NO: 3592933 - DNA, 25 bp, Homo sapien
gtgactcccgatgagcgtccagttg

SEQ ID NO: 3592934 - DNA, 25 bp, Homo sapien
caccgagttgatacggatagtcccc

SEQ ID NO: 3592935 - DNA, 25 bp, Homo sapien
ggaagaaagtcaacatgatgctgca

SEQ ID NO: 3592936 - DNA, 25 bp, Homo sapien
tacaaccctgaagaatctccctatc

SEQ ID NO: 3592937 - DNA, 25 bp, Homo sapien
aatcccattatggagatctcgaaac

SEQ ID NO: 3592938 - DNA, 25 bp, Homo sapien
catcaagcactatagcaggcacagg

SEQ ID NO: 3592939 - DNA, 25 bp, Homo sapien
gaatctggtttcagctagtctggga

SEQ ID NO: 3592940 - DNA, 25 bp, Homo sapien
tgtggcctgatgctggataactgga

SEQ ID NO: 3592941 - DNA, 25 bp, Homo sapien
tgggatccacctctaagaatacgtc

SEQ ID NO: 3592942 - DNA, 25 bp, Homo sapien
tcccaccttggaacatagtagcttg

SEQ ID NO: 3592943 - DNA, 25 bp, Homo sapien
gttcctcatgttagtggaaaagctg

SEQ ID NO: 3592944 - DNA, 25 bp, Homo sapien
cttgtctcgttcctcatgttagtgg

SEQ ID NO: 3592945 - DNA, 25 bp, Homo sapien
cgtggcaagagtaagcacccttgtc

SEQ ID NO: 3592946 - DNA, 25 bp, Homo sapien
tggctaacccttccagtattatatt

SEQ ID NO: 3592947 - DNA, 25 bp, Homo sapien
taatatgggcataggtcagtgttcc

SEQ ID NO: 3592948 - DNA, 25 bp, Homo sapien
ggctgatgtctcctagtctgctgtc

SEQ ID NO: 3592949 - DNA, 25 bp, Homo sapien
aactttcagtctgcggcttttcatt

SEQ ID NO: 3592950 - DNA, 25 bp, Homo sapien
gctgattgggctagtgagttcttcc

SEQ ID NO: 3592951 - DNA, 25 bp, Homo sapien
tttggctcactggaagctccacccg

SEQ ID NO: 3592952 - DNA, 25 bp, Homo sapien
cactggaagctccacccgccgggtt

SEQ ID NO: 3592953 - DNA, 25 bp, Homo sapien
ctggaagctccacccgccgggttca

SEQ ID NO: 3592954 - DNA, 25 bp, Homo sapien
gctcactggaagctccacccgccgg

SEQ ID NO: 3592955 - DNA, 25 bp, Homo sapien
aacagttgtgagatatcatgatttt

SEQ ID NO: 3592956 - DNA, 25 bp, Homo sapien
gtggcatgatgtcggtcaactgcaa

SEQ ID NO: 3592957 - DNA, 25 bp, Homo sapien
ccagctgatgatagccaattttaac

SEQ ID NO: 3592958 - DNA, 25 bp, Homo sapien
tgatgatagccaattttaacagttg

SEQ ID NO: 3592959 - DNA, 25 bp, Homo sapien
cactaatggatgtgtaactgattta

SEQ ID NO: 3592960 - DNA, 25 bp, Homo sapien
gtagattttctaccattagtatacc

SEQ ID NO: 3592961 - DNA, 25 bp, Homo sapien
aactgatttatctagagaatggtag

SEQ ID NO: 3592962 - DNA, 25 bp, Homo sapien
gaatcacatggtagagtcattaaaa

SEQ ID NO: 3592963 - DNA, 25 bp, Homo sapien
tgtgattcactttggccctctgaga

SEQ ID NO: 3592964 - DNA, 25 bp, Homo sapien
tttaggaccttcagaaactggtgtg

SEQ ID NO: 3592965 - DNA, 25 bp, Homo sapien
cagtcagggccaagttagtaacata

SEQ ID NO: 3592966 - DNA, 25 bp, Homo sapien
caggtcggtctacgaagttctgact

SEQ ID NO: 3592967 - DNA, 25 bp, Homo sapien
cagctctgaaaagcactgaagttct

SEQ ID NO: 3592968 - DNA, 25 bp, Homo sapien
ttatgtgagctacaaaagataccca

SEQ ID NO: 3592969 - DNA, 25 bp, Homo sapien
gatacccaaaatcctgagtgctgtg

SEQ ID NO: 3592970 - DNA, 25 bp, Homo sapien
ccctaacagggctaagcaaagctat

SEQ ID NO: 3592971 - DNA, 25 bp, Homo sapien
catatttacgtaatacactgtacat

SEQ ID NO: 3592972 - DNA, 25 bp, Homo sapien
taattgatagggcagcatcaatctg

SEQ ID NO: 3592973 - DNA, 25 bp, Homo sapien
tgtacattatatgcatggcctgttt

SEQ ID NO: 3592974 - DNA, 25 bp, Homo sapien
tcaatctgtattccatccttggtcc

SEQ ID NO: 3592975 - DNA, 25 bp, Homo sapien
ttaaatgatggcatcatgttcatct

SEQ ID NO: 3592976 - DNA, 25 bp, Homo sapien
gcaatcatagacacagacatagctt

SEQ ID NO: 3592977 - DNA, 25 bp, Homo sapien
atcccagaactctaggaggtcagaa

SEQ ID NO: 3592978 - DNA, 25 bp, Homo sapien
ttagcctggtgtggcattgcatgct

SEQ ID NO: 3592979 - DNA, 25 bp, Homo sapien
tatactgtagtggttaaagatctgg

SEQ ID NO: 3592980 - DNA, 25 bp, Homo sapien
tatttagtaccacaacagacacaga

SEQ ID NO: 3592981 - DNA, 25 bp, Homo sapien
catactaagtcaaaagcctgctggg

SEQ ID NO: 3592982 - DNA, 25 bp, Homo sapien
ttttcagggataatgaggctgtcag

SEQ ID NO: 3592983 - DNA, 25 bp, Homo sapien
tgtctttgtcgtggaaaacaaaagc

SEQ ID NO: 3592984 - DNA, 25 bp, Homo sapien
gataaaactcccagcgttaatacaa

SEQ ID NO: 3592985 - DNA, 25 bp, Homo sapien
caccaacaaagctcccagtatcaaa

SEQ ID NO: 3592986 - DNA, 25 bp, Homo sapien
tgagtaatacattttgcatccaatg

SEQ ID NO: 3592987 - DNA, 25 bp, Homo sapien
ccagcgttaatacaataccaccaac

SEQ ID NO: 3592988 - DNA, 25 bp, Homo sapien
tgcttcagaatgcatagttgttgtg

SEQ ID NO: 3592989 - DNA, 25 bp, Homo sapien
gcttcagaatgcatagttgttgtga

SEQ ID NO: 3592990 - DNA, 25 bp, Homo sapien
taatgacttaaatgtggcatttaac

SEQ ID NO: 3592991 - DNA, 25 bp, Homo sapien
gcatttaactacttgcagcatagga

SEQ ID NO: 3592992 - DNA, 25 bp, Homo sapien
aagggaaatctaggcatataaagtt

SEQ ID NO: 3592993 - DNA, 25 bp, Homo sapien
ttttgccagacagaataatgactta

SEQ ID NO: 3592994 - DNA, 25 bp, Homo sapien
cactgaactattgtgggttacggtc

SEQ ID NO: 3592995 - DNA, 25 bp, Homo sapien
tacggtcattgtggatgttgatatc

SEQ ID NO: 3592996 - DNA, 25 bp, Homo sapien
catatttgttgagaccatccctggt

SEQ ID NO: 3592997 - DNA, 25 bp, Homo sapien
tattagatgccgctgtaggtttcat

SEQ ID NO: 3592998 - DNA, 25 bp, Homo sapien
tggtgaccgttgtattactggagtc

SEQ ID NO: 3592999 - DNA, 25 bp, Homo sapien
tggtggtttcacagtactgttggaa

SEQ ID NO: 3593000 - DNA, 25 bp, Homo sapien
actggagtctgaggcaactgaagtt

SEQ ID NO: 3593001 - DNA, 25 bp, Homo sapien
tgtatggtcagaaggcacatgttgg

SEQ ID NO: 3593002 - DNA, 25 bp, Homo sapien
gctttgaggacaataaatcagtagc

SEQ ID NO: 3593003 - DNA, 25 bp, Homo sapien
gaggacaataaatcagtagctgcat

SEQ ID NO: 3593004 - DNA, 25 bp, Homo sapien
ttccaaggggctttgaggacaataa

SEQ ID NO: 3593005 - DNA, 25 bp, Homo sapien
cttccaaggggctttgaggacaata

SEQ ID NO: 3593006 - DNA, 25 bp, Homo sapien
attccgtttccacagactcaatcca

SEQ ID NO: 3593007 - DNA, 25 bp, Homo sapien
cgtttccacagactcaatccacaat

SEQ ID NO: 3593008 - DNA, 25 bp, Homo sapien
ttccacagactcaatccacaataac

SEQ ID NO: 3593009 - DNA, 25 bp, Homo sapien
ttccattccgtttccacagactcaa

SEQ ID NO: 3593010 - DNA, 25 bp, Homo sapien
caagaaccagtctatacatcatatt

SEQ ID NO: 3593011 - DNA, 25 bp, Homo sapien
aggcccaagggaggcgaatcatctg

SEQ ID NO: 3593012 - DNA, 25 bp, Homo sapien
accagtctatacatcatattaaagg

SEQ ID NO: 3593013 - DNA, 25 bp, Homo sapien
ggaggcccaagggaggcgaatcatc

SEQ ID NO: 3593014 - DNA, 25 bp, Homo sapien
ggctcctagatctgattaacaattt

SEQ ID NO: 3593015 - DNA, 25 bp, Homo sapien
gcccaagggctcctagatctgatta

SEQ ID NO: 3593016 - DNA, 25 bp, Homo sapien
gagaaagtcaaactctctctttgca

SEQ ID NO: 3593017 - DNA, 25 bp, Homo sapien
gaagtcctaggcagtcagacaagag

SEQ ID NO: 3593018 - DNA, 25 bp, Homo sapien
ttttcagaagcacactcttggtcaa

SEQ ID NO: 3593019 - DNA, 25 bp, Homo sapien
ctccagaacacccaatgctgtactg

SEQ ID NO: 3593020 - DNA, 25 bp, Homo sapien
actacagccagaatgaatgttccct

SEQ ID NO: 3593021 - DNA, 25 bp, Homo sapien
tactgattgcatgctcactgagcaa

SEQ ID NO: 3593022 - DNA, 25 bp, Homo sapien
ccacttcacccacccgagaagctga

SEQ ID NO: 3593023 - DNA, 25 bp, Homo sapien
ttcacccacccgagaagctgaggct

SEQ ID NO: 3593024 - DNA, 25 bp, Homo sapien
acttcacccacccgagaagctgagg

SEQ ID NO: 3593025 - DNA, 25 bp, Homo sapien
tcccacttcacccacccgagaagct

SEQ ID NO: 3593026 - DNA, 25 bp, Homo sapien
tacaaagtgctcatcgtaaaagatt

SEQ ID NO: 3593027 - DNA, 25 bp, Homo sapien
gctttgagctaactagtagacttac

SEQ ID NO: 3593028 - DNA, 25 bp, Homo sapien
aattttccctgcttaaagaggctgc

SEQ ID NO: 3593029 - DNA, 25 bp, Homo sapien
cagcctggagtagatgtgggtcctc

SEQ ID NO: 3593030 - DNA, 25 bp, Homo sapien
tttacaaccaagtaaggtatgcaaa

SEQ ID NO: 3593031 - DNA, 25 bp, Homo sapien
tgctgctgtttaacaatgaaagcaa

SEQ ID NO: 3593032 - DNA, 25 bp, Homo sapien
ttgctgctgtttaacaatgaaagca

SEQ ID NO: 3593033 - DNA, 25 bp, Homo sapien
agtttacaaccaagtaaggtatgca

SEQ ID NO: 3593034 - DNA, 25 bp, Homo sapien
ccacaactggctattcagttgataa

SEQ ID NO: 3593035 - DNA, 25 bp, Homo sapien
aagatacagattgaataaactcatg

SEQ ID NO: 3593036 - DNA, 25 bp, Homo sapien
gctcaaaatccacaactggctattc

SEQ ID NO: 3593037 - DNA, 25 bp, Homo sapien
gatacagattgaataaactcatggc

SEQ ID NO: 3593038 - DNA, 25 bp, Homo sapien
tgaactcgatcagtcttcagtctta

SEQ ID NO: 3593039 - DNA, 25 bp, Homo sapien
atgaactcgatcagtcttcagtctt

SEQ ID NO: 3593040 - DNA, 25 bp, Homo sapien
caggtctctgctgaagtagcacatg

SEQ ID NO: 3593041 - DNA, 25 bp, Homo sapien
aggtctctgctgaagtagcacatgc

SEQ ID NO: 3593042 - DNA, 25 bp, Homo sapien
ccaggatggacaacagttaacacag

SEQ ID NO: 3593043 - DNA, 25 bp, Homo sapien
gacagcaggtgtccaacaagtcctt

SEQ ID NO: 3593044 - DNA, 25 bp, Homo sapien
gaaggtctttggcactctgctaacc

SEQ ID NO: 3593045 - DNA, 25 bp, Homo sapien
tcagatgtagccagactcactgcaa

SEQ ID NO: 3593046 - DNA, 25 bp, Homo sapien
taccctcttttatgtcagcagaagc

SEQ ID NO: 3593047 - DNA, 25 bp, Homo sapien
tgaacaacccgagcatctccagaag

SEQ ID NO: 3593048 - DNA, 25 bp, Homo sapien
agcctgtgcgatgggagcaccacac

SEQ ID NO: 3593049 - DNA, 25 bp, Homo sapien
cagcaggaagactggtggcaagcat

SEQ ID NO: 3593050 - DNA, 25 bp, Homo sapien
tacccatagcgtgaattgtgtggcc

SEQ ID NO: 3593051 - DNA, 25 bp, Homo sapien
aaccgtacaacaacaaggactggtg

SEQ ID NO: 3593052 - DNA, 25 bp, Homo sapien
catgcacattaggttagatacaacg

SEQ ID NO: 3593053 - DNA, 25 bp, Homo sapien
gaaactgttcgaaacttgactgtgg

SEQ ID NO: 3593054 - DNA, 25 bp, Homo sapien
atattgatgacatcagcctggttct

SEQ ID NO: 3593055 - DNA, 25 bp, Homo sapien
cttgatgatttactactgatattga

SEQ ID NO: 3593056 - DNA, 25 bp, Homo sapien
ttgatgacatcagcctggttcttgc

SEQ ID NO: 3593057 - DNA, 25 bp, Homo sapien
gatgatttactactgatattgatga

SEQ ID NO: 3593058 - DNA, 25 bp, Homo sapien
ctgttgagttagcactggagttgtg

SEQ ID NO: 3593059 - DNA, 25 bp, Homo sapien
tgtggaagcccagaattctctatgt

SEQ ID NO: 3593060 - DNA, 25 bp, Homo sapien
agttgtgtggaagcccagaattctc

SEQ ID NO: 3593061 - DNA, 25 bp, Homo sapien
tggagttgtgtggaagcccagaatt

SEQ ID NO: 3593062 - DNA, 25 bp, Homo sapien
tcctggtttcatccaaaaagggctg

SEQ ID NO: 3593063 - DNA, 25 bp, Homo sapien
ttcatccaaaaagggctgtttgaag

SEQ ID NO: 3593064 - DNA, 25 bp, Homo sapien
cctggtttcatccaaaaagggctgt

SEQ ID NO: 3593065 - DNA, 25 bp, Homo sapien
cagctgtgcccttaacgctgcgcag

SEQ ID NO: 3593066 - DNA, 25 bp, Homo sapien
acgacaagggccaccggcgaccgtg

SEQ ID NO: 3593067 - DNA, 25 bp, Homo sapien
tcatcctgttacgaccttactagcg

SEQ ID NO: 3593068 - DNA, 25 bp, Homo sapien
ccttactagcgacgacaagggccac

SEQ ID NO: 3593069 - DNA, 25 bp, Homo sapien
tgcgaccgccgcatccaaaaagcga

SEQ ID NO: 3593070 - DNA, 25 bp, Homo sapien
taactcaacaggttatgcgcacccg

SEQ ID NO: 3593071 - DNA, 25 bp, Homo sapien
ccgccgcatccaaaaagcgagaggg

SEQ ID NO: 3593072 - DNA, 25 bp, Homo sapien
gaagcaccaggcaatttcctcagca

SEQ ID NO: 3593073 - DNA, 25 bp, Homo sapien
gccatggctgcgctttcatgggcgg

SEQ ID NO: 3593074 - DNA, 25 bp, Homo sapien
catggctgcgctttcatgggcggcc

SEQ ID NO: 3593075 - DNA, 25 bp, Homo sapien
tggctgcgctttcatgggcggcccc

SEQ ID NO: 3593076 - DNA, 25 bp, Homo sapien
ccgccatggctgcgctttcatgggc

SEQ ID NO: 3593077 - DNA, 25 bp, Homo sapien
ggcccaagcacctcgcgcgccgagt

SEQ ID NO: 3593078 - DNA, 25 bp, Homo sapien
agcgcggcccaagcacctcgcgcgc

SEQ ID NO: 3593079 - DNA, 25 bp, Homo sapien
gcggcccaagcacctcgcgcgccga

SEQ ID NO: 3593080 - DNA, 25 bp, Homo sapien
agcagcgcggcccaagcacctcgcg

SEQ ID NO: 3593081 - DNA, 25 bp, Homo sapien
cctttctcttcggaaatggcagttt

SEQ ID NO: 3593082 - DNA, 25 bp, Homo sapien
aatgaccaaatagggcgcaggagcg

SEQ ID NO: 3593083 - DNA, 25 bp, Homo sapien
tggatgaaggcgagcgccgctgcct

SEQ ID NO: 3593084 - DNA, 25 bp, Homo sapien
gatgcggcagcctcgtgggctccca

SEQ ID NO: 3593085 - DNA, 25 bp, Homo sapien
gctacctgtggctaatgcatgagaa

SEQ ID NO: 3593086 - DNA, 25 bp, Homo sapien
tgggaaccctcagctgaagtagaag

SEQ ID NO: 3593087 - DNA, 25 bp, Homo sapien
cacgggttccctgtatctctgatta

SEQ ID NO: 3593088 - DNA, 25 bp, Homo sapien
tcatcacataaaggccacattgcag

SEQ ID NO: 3593089 - DNA, 25 bp, Homo sapien
catctcccacatcagtcaatgctga

SEQ ID NO: 3593090 - DNA, 25 bp, Homo sapien
agtttccgtgacatatttaggacac

SEQ ID NO: 3593091 - DNA, 25 bp, Homo sapien
cagtttccgtgacatatttaggaca

SEQ ID NO: 3593092 - DNA, 25 bp, Homo sapien
atctcccacatcagtcaatgctgac

SEQ ID NO: 3593093 - DNA, 25 bp, Homo sapien
ttacgtttcatgacagccttctata

SEQ ID NO: 3593094 - DNA, 25 bp, Homo sapien
tacgtttcatgacagccttctatac

SEQ ID NO: 3593095 - DNA, 25 bp, Homo sapien
acgtttcatgacagccttctatact

SEQ ID NO: 3593096 - DNA, 25 bp, Homo sapien
gaaactaatgtggtcaccagggtca

SEQ ID NO: 3593097 - DNA, 25 bp, Homo sapien
tgtaaagcactagatctgaattccc

SEQ ID NO: 3593098 - DNA, 25 bp, Homo sapien
caccagggtcatggtctttagattc

SEQ ID NO: 3593099 - DNA, 25 bp, Homo sapien
tcacgtcatctggagtgtaaagcac

SEQ ID NO: 3593100 - DNA, 25 bp, Homo sapien
atctctgggtgatgtgctgtcctct

SEQ ID NO: 3593101 - DNA, 25 bp, Homo sapien
tgcatccatctccaagtccaggatc

SEQ ID NO: 3593102 - DNA, 25 bp, Homo sapien
caacaacccaaagtcctgtctgggt

SEQ ID NO: 3593103 - DNA, 25 bp, Homo sapien
aaagtcctgtctgggtgctgcatcc

SEQ ID NO: 3593104 - DNA, 25 bp, Homo sapien
gtcacaccataaaggagtttatcct

SEQ ID NO: 3593105 - DNA, 25 bp, Homo sapien
acagtcacaccataaaggagtttat

SEQ ID NO: 3593106 - DNA, 25 bp, Homo sapien
ttattgacatctacccactgcaagt

SEQ ID NO: 3593107 - DNA, 25 bp, Homo sapien
cactgcaagtatagatgaataagac

SEQ ID NO: 3593108 - DNA, 25 bp, Homo sapien
ggagtggaggaacagtgcttatcaa

SEQ ID NO: 3593109 - DNA, 25 bp, Homo sapien
tgaatggatgttctgcctgaagttt

SEQ ID NO: 3593110 - DNA, 25 bp, Homo sapien
tctgattgtgcaacaatgatataca

SEQ ID NO: 3593111 - DNA, 25 bp, Homo sapien
caatgatatacaatccaatgaatga

SEQ ID NO: 3593112 - DNA, 25 bp, Homo sapien
ttctttcttgaattacttctctttc

SEQ ID NO: 3593113 - DNA, 25 bp, Homo sapien
ctatttctttcttgaattacttctc

SEQ ID NO: 3593114 - DNA, 25 bp, Homo sapien
atttctttcttgaattacttctctt

SEQ ID NO: 3593115 - DNA, 25 bp, Homo sapien
tatttctttcttgaattacttctct

SEQ ID NO: 3593116 - DNA, 25 bp, Homo sapien
tagtttctgaatgcctttaatatca

SEQ ID NO: 3593117 - DNA, 25 bp, Homo sapien
tatagtttctgaatgcctttaatat

SEQ ID NO: 3593118 - DNA, 25 bp, Homo sapien
catatagtttctgaatgcctttaat

SEQ ID NO: 3593119 - DNA, 25 bp, Homo sapien
gtttctgaatgcctttaatatcatc

SEQ ID NO: 3593120 - DNA, 25 bp, Homo sapien
gttcatgagttgcagcatacaggaa

SEQ ID NO: 3593121 - DNA, 25 bp, Homo sapien
gggatctccatttccataggttgga

SEQ ID NO: 3593122 - DNA, 25 bp, Homo sapien
ccaagttcatgagttgcagcataca

SEQ ID NO: 3593123 - DNA, 25 bp, Homo sapien
atacatcactgcattaggatcagag

SEQ ID NO: 3593124 - DNA, 25 bp, Homo sapien
cagcaatactctgcagtggaaagca

SEQ ID NO: 3593125 - DNA, 25 bp, Homo sapien
tagcccacggtagcttacttatttg

SEQ ID NO: 3593126 - DNA, 25 bp, Homo sapien
tacaaccgaagaagtgacaaacagt

SEQ ID NO: 3593127 - DNA, 25 bp, Homo sapien
ctacttactagctggacaactctgg

SEQ ID NO: 3593128 - DNA, 25 bp, Homo sapien
aggtgtgagcccgtgcgtttgagga

SEQ ID NO: 3593129 - DNA, 25 bp, Homo sapien
cctgagctctggtggcgttgcattg

SEQ ID NO: 3593130 - DNA, 25 bp, Homo sapien
tgttctccctcatactcattgaaag

SEQ ID NO: 3593131 - DNA, 25 bp, Homo sapien
attgaaaggctttgcaagtatgtgg

SEQ ID NO: 3593132 - DNA, 25 bp, Homo sapien
tcctcatcgaagtgagcatctcctc

SEQ ID NO: 3593133 - DNA, 25 bp, Homo sapien
tcaaatgggtaggagtccccatgag

SEQ ID NO: 3593134 - DNA, 25 bp, Homo sapien
tgtcccaggcgcaaaggcatgagcc

SEQ ID NO: 3593135 - DNA, 25 bp, Homo sapien
agcgtgtttcctggcccatcaaatg

SEQ ID NO: 3593136 - DNA, 25 bp, Homo sapien
ccactgtaatatgcggtaagtctcg

SEQ ID NO: 3593137 - DNA, 25 bp, Homo sapien
aaagcctttgacactaatcgatcca

SEQ ID NO: 3593138 - DNA, 25 bp, Homo sapien
tcctcgcgcaaagccaatcatgatg

SEQ ID NO: 3593139 - DNA, 25 bp, Homo sapien
aatcatgatgtcagcagttccccat

SEQ ID NO: 3593140 - DNA, 25 bp, Homo sapien
taacattccagttataggtaggcca

SEQ ID NO: 3593141 - DNA, 25 bp, Homo sapien
tatgacgcgggagtttaacattcca

SEQ ID NO: 3593142 - DNA, 25 bp, Homo sapien
tgtaggtgaccactttggaagtcca

SEQ ID NO: 3593143 - DNA, 25 bp, Homo sapien
tataggtaggccaaagaatttttgc

SEQ ID NO: 3593144 - DNA, 25 bp, Homo sapien
tttgtttctgagtcatagagataaa

SEQ ID NO: 3593145 - DNA, 25 bp, Homo sapien
ctccttgagtttggcttctaaactg

SEQ ID NO: 3593146 - DNA, 25 bp, Homo sapien
gcttctaaactgttggcattttttg

SEQ ID NO: 3593147 - DNA, 25 bp, Homo sapien
gtcatagagataaaatctcttgaga

SEQ ID NO: 3593148 - DNA, 25 bp, Homo sapien
acagcacacagcacggtgagtcgca

SEQ ID NO: 3593149 - DNA, 25 bp, Homo sapien
cagcacacagcacggtgagtcgcat

SEQ ID NO: 3593150 - DNA, 25 bp, Homo sapien
tgtagctcactcatgcctcccgcct

SEQ ID NO: 3593151 - DNA, 25 bp, Homo sapien
gagcctgttcccactgtagctcact

SEQ ID NO: 3593152 - DNA, 25 bp, Homo sapien
agctgccgtccagagacaattgttc

SEQ ID NO: 3593153 - DNA, 25 bp, Homo sapien
ttcttggacctatggttgatttggt

SEQ ID NO: 3593154 - DNA, 25 bp, Homo sapien
gctgccgtccagagacaattgttct

SEQ ID NO: 3593155 - DNA, 25 bp, Homo sapien
acaattgttcttggacctatggttg

SEQ ID NO: 3593156 - DNA, 25 bp, Homo sapien
tctgcttggtaaatacaaaactcca

SEQ ID NO: 3593157 - DNA, 25 bp, Homo sapien
ttctgcttggtaaatacaaaactcc

SEQ ID NO: 3593158 - DNA, 25 bp, Homo sapien
catgtgtagcctcatcacagattgc

SEQ ID NO: 3593159 - DNA, 25 bp, Homo sapien
ccaacctgcatgtgtagcctcatca

SEQ ID NO: 3593160 - DNA, 25 bp, Homo sapien
tgtggtcacctcaaggcctgtttgg

SEQ ID NO: 3593161 - DNA, 25 bp, Homo sapien
tcagggtatttcacaaggctgcagt

SEQ ID NO: 3593162 - DNA, 25 bp, Homo sapien
ctcaggtccgtacagaagtctgtcc

SEQ ID NO: 3593163 - DNA, 25 bp, Homo sapien
tgttggaatgatgacctcaggtccg

SEQ ID NO: 3593164 - DNA, 25 bp, Homo sapien
ctctggttggctgcataactcattc

SEQ ID NO: 3593165 - DNA, 25 bp, Homo sapien
taactctagtggaatgcttacaagg

SEQ ID NO: 3593166 - DNA, 25 bp, Homo sapien
tggaatgcttacaaggtacctgtgt

SEQ ID NO: 3593167 - DNA, 25 bp, Homo sapien
tctagtggaatgcttacaaggtacc

SEQ ID NO: 3593168 - DNA, 25 bp, Homo sapien
taatggctaactctagtggaatgct

SEQ ID NO: 3593169 - DNA, 25 bp, Homo sapien
ggtaaaagatagtttcactgaggct

SEQ ID NO: 3593170 - DNA, 25 bp, Homo sapien
ccgggtctgtgtacttatgatgtta

SEQ ID NO: 3593171 - DNA, 25 bp, Homo sapien
tataggtacacaggatgtgtgggta

SEQ ID NO: 3593172 - DNA, 25 bp, Homo sapien
tgtgggtagccaattaaagtattat

SEQ ID NO: 3593173 - DNA, 25 bp, Homo sapien
tgaaggcctttggaagaatccctct

SEQ ID NO: 3593174 - DNA, 25 bp, Homo sapien
cattgcttgagaagactaggctttt

SEQ ID NO: 3593175 - DNA, 25 bp, Homo sapien
tagtccttaagatccagttagaggc

SEQ ID NO: 3593176 - DNA, 25 bp, Homo sapien
taatggtgtctaactgcagagtgca

SEQ ID NO: 3593177 - DNA, 25 bp, Homo sapien
aggaactagatttcaccacactaac

SEQ ID NO: 3593178 - DNA, 25 bp, Homo sapien
tagcaaccaatccaggaactagatt

SEQ ID NO: 3593179 - DNA, 25 bp, Homo sapien
gcaaccaatccaggaactagatttc

SEQ ID NO: 3593180 - DNA, 25 bp, Homo sapien
ttagcaaccaatccaggaactagat

SEQ ID NO: 3593181 - DNA, 25 bp, Homo sapien
ttccttctctgtgtcatacttgtat

SEQ ID NO: 3593182 - DNA, 25 bp, Homo sapien
ccttctctgtgtcatacttgtatgt

SEQ ID NO: 3593183 - DNA, 25 bp, Homo sapien
ctgtgtcatacttgtatgtttttgg

SEQ ID NO: 3593184 - DNA, 25 bp, Homo sapien
gtgtcatacttgtatgtttttggtc

SEQ ID NO: 3593185 - DNA, 25 bp, Homo sapien
catttaattctacagcagcatcgat

SEQ ID NO: 3593186 - DNA, 25 bp, Homo sapien
cgatttggccatttactcctgaaaa

SEQ ID NO: 3593187 - DNA, 25 bp, Homo sapien
catcgatttggccatttactcctga

SEQ ID NO: 3593188 - DNA, 25 bp, Homo sapien
agcagcatcgatttggccatttact

SEQ ID NO: 3593189 - DNA, 25 bp, Homo sapien
gctaaaaagtgttggaggcagtcca

SEQ ID NO: 3593190 - DNA, 25 bp, Homo sapien
caagataatatttgcggtggtaggc

SEQ ID NO: 3593191 - DNA, 25 bp, Homo sapien
taagatgaagtaggtctgctggtgt

SEQ ID NO: 3593192 - DNA, 25 bp, Homo sapien
ggcagtccagagaaccaagtcagag

SEQ ID NO: 3593193 - DNA, 25 bp, Homo sapien
tataggtctgtaggagctataggag

SEQ ID NO: 3593194 - DNA, 25 bp, Homo sapien
ataggtctgtaggagctataggagc

SEQ ID NO: 3593195 - DNA, 25 bp, Homo sapien
tgttgtataggtctgtaggagctat

SEQ ID NO: 3593196 - DNA, 25 bp, Homo sapien
tgtataggtctgtaggagctatagg

SEQ ID NO: 3593197 - DNA, 25 bp, Homo sapien
cagttggaaaggtacagtacgattt

SEQ ID NO: 3593198 - DNA, 25 bp, Homo sapien
agaggcccagttggaaaggtacagt

SEQ ID NO: 3593199 - DNA, 25 bp, Homo sapien
gcccagttggaaaggtacagtacga

SEQ ID NO: 3593200 - DNA, 25 bp, Homo sapien
cccagttggaaaggtacagtacgat

SEQ ID NO: 3593201 - DNA, 25 bp, Homo sapien
cccagtggccgagaagagtcaacgg

SEQ ID NO: 3593202 - DNA, 25 bp, Homo sapien
ggttccatatcttgaagacagtcaa

SEQ ID NO: 3593203 - DNA, 25 bp, Homo sapien
atctgtaaatcgcaccccagtggcc

SEQ ID NO: 3593204 - DNA, 25 bp, Homo sapien
tcaacgggcctatcgcaaacttgct

SEQ ID NO: 3593205 - DNA, 25 bp, Homo sapien
catctatttgctgcacgtgccttgg

SEQ ID NO: 3593206 - DNA, 25 bp, Homo sapien
agcagcatctatttgctgcacgtgc

SEQ ID NO: 3593207 - DNA, 25 bp, Homo sapien
cagcatctatttgctgcacgtgcct

SEQ ID NO: 3593208 - DNA, 25 bp, Homo sapien
tctatttgctgcacgtgccttggaa

SEQ ID NO: 3593209 - DNA, 25 bp, Homo sapien
ggaatcctcttgttatccagtagtg

SEQ ID NO: 3593210 - DNA, 25 bp, Homo sapien
tggaatcctcttgttatccagtagt

SEQ ID NO: 3593211 - DNA, 25 bp, Homo sapien
ttggaatcctcttgttatccagtag

SEQ ID NO: 3593212 - DNA, 25 bp, Homo sapien
atttggaatcctcttgttatccagt

SEQ ID NO: 3593213 - DNA, 25 bp, Homo sapien
tcctgtccgcaagtgaacctgccgt

SEQ ID NO: 3593214 - DNA, 25 bp, Homo sapien
gaagaagtaagcagtgcccctctca

SEQ ID NO: 3593215 - DNA, 25 bp, Homo sapien
tctcagccacttcgtaagctgcatc

SEQ ID NO: 3593216 - DNA, 25 bp, Homo sapien
tggtaatagtgctgggccgaattcc

SEQ ID NO: 3593217 - DNA, 25 bp, Homo sapien
tgatacactccaggtggtgggattc

SEQ ID NO: 3593218 - DNA, 25 bp, Homo sapien
agctcctgcagactgatacactcca

SEQ ID NO: 3593219 - DNA, 25 bp, Homo sapien
aatactttgttactttctctctgtg

SEQ ID NO: 3593220 - DNA, 25 bp, Homo sapien
tgcagactgatacactccaggtggt

SEQ ID NO: 3593221 - DNA, 25 bp, Homo sapien
tgatcttcatacaaggcagcaacaa

SEQ ID NO: 3593222 - DNA, 25 bp, Homo sapien
tgcatgatcttcatacaaggcagca

SEQ ID NO: 3593223 - DNA, 25 bp, Homo sapien
ctgctgcataggacagcatttctgc

SEQ ID NO: 3593224 - DNA, 25 bp, Homo sapien
cttctgctgcataggacagcatttc

SEQ ID NO: 3593225 - DNA, 25 bp, Homo sapien
tcaaaggatgagctggagtcacaga

SEQ ID NO: 3593226 - DNA, 25 bp, Homo sapien
cagcgtcaaaggatgagctggagtc

SEQ ID NO: 3593227 - DNA, 25 bp, Homo sapien
ttgtcacagcgtcaaaggatgagct

SEQ ID NO: 3593228 - DNA, 25 bp, Homo sapien
cagcattgtcacagcgtcaaaggat

SEQ ID NO: 3593229 - DNA, 25 bp, Homo sapien
cctgtaaagcaggtagcagagtgct

SEQ ID NO: 3593230 - DNA, 25 bp, Homo sapien
ctgtaaagcaggtagcagagtgctt

SEQ ID NO: 3593231 - DNA, 25 bp, Homo sapien
tgtaaagcaggtagcagagtgcttg

SEQ ID NO: 3593232 - DNA, 25 bp, Homo sapien
gtgccaaaatatgtgctttgcctcc

SEQ ID NO: 3593233 - DNA, 25 bp, Homo sapien
gagtgacagtggccatccgaaggca

SEQ ID NO: 3593234 - DNA, 25 bp, Homo sapien
tttccagggcacaaggacctccaaa

SEQ ID NO: 3593235 - DNA, 25 bp, Homo sapien
ctgtgtcataatagctgtgccaaaa

SEQ ID NO: 3593236 - DNA, 25 bp, Homo sapien
cctagcaccccaggaagctgttggg

SEQ ID NO: 3593237 - DNA, 25 bp, Homo sapien
gaagctgttgggggatctgggtctc

SEQ ID NO: 3593238 - DNA, 25 bp, Homo sapien
atcccctggggccagattcctagca

SEQ ID NO: 3593239 - DNA, 25 bp, Homo sapien
gttgggggatctgggtctctaggca

SEQ ID NO: 3593240 - DNA, 25 bp, Homo sapien
taatgcctggatccctttcacatca

SEQ ID NO: 3593241 - DNA, 25 bp, Homo sapien
gtacttataagttgggtacatcagt

SEQ ID NO: 3593242 - DNA, 25 bp, Homo sapien
tcatgagcagcaacggtaaacaaat

SEQ ID NO: 3593243 - DNA, 25 bp, Homo sapien
gaggtggaatccatagggattcttg

SEQ ID NO: 3593244 - DNA, 25 bp, Homo sapien
aaaacagtatcaacacaggtttttg

SEQ ID NO: 3593245 - DNA, 25 bp, Homo sapien
gagagaaaaaaacagtatcaacaca

SEQ ID NO: 3593246 - DNA, 25 bp, Homo sapien
tagacaatatgagagagaaaaaaac

SEQ ID NO: 3593247 - DNA, 25 bp, Homo sapien
agaaaaaaacagtatcaacacaggt

SEQ ID NO: 3593248 - DNA, 25 bp, Homo sapien
aatgtagcccatttccaagaataag

SEQ ID NO: 3593249 - DNA, 25 bp, Homo sapien
ttgaaggaaacgagagcagtgcgtt

SEQ ID NO: 3593250 - DNA, 25 bp, Homo sapien
cataaatactaggttgttgaaggaa

SEQ ID NO: 3593251 - DNA, 25 bp, Homo sapien
gaagatttccagatgacctgtatga

SEQ ID NO: 3593252 - DNA, 25 bp, Homo sapien
ccccgaggcccatcgaatggatagg

SEQ ID NO: 3593253 - DNA, 25 bp, Homo sapien
cagcattgtcgaaatgtgtatctcc

SEQ ID NO: 3593254 - DNA, 25 bp, Homo sapien
ttcgttcccatagtccacttctcag

SEQ ID NO: 3593255 - DNA, 25 bp, Homo sapien
cttctccaggagcaaatgcatgggc

SEQ ID NO: 3593256 - DNA, 25 bp, Homo sapien
agtggggagaaaggccaacaagatt

SEQ ID NO: 3593257 - DNA, 25 bp, Homo sapien
gaaaggccaacaagattgagtcctt

SEQ ID NO: 3593258 - DNA, 25 bp, Homo sapien
gagaaaggccaacaagattgagtcc

SEQ ID NO: 3593259 - DNA, 25 bp, Homo sapien
gggagaaaggccaacaagattgagt

SEQ ID NO: 3593260 - DNA, 25 bp, Homo sapien
tgtgggcaagacagaaacgatactt

SEQ ID NO: 3593261 - DNA, 25 bp, Homo sapien
gaatctactctacagctgtgtctga

SEQ ID NO: 3593262 - DNA, 25 bp, Homo sapien
tctgcaagaatttgtcccctagtgg

SEQ ID NO: 3593263 - DNA, 25 bp, Homo sapien
tggctaacgggaaagcaaaatctgc

SEQ ID NO: 3593264 - DNA, 25 bp, Homo sapien
aagatatcataatatccgcttctcc

SEQ ID NO: 3593265 - DNA, 25 bp, Homo sapien
agctcagagggacggcgctactcca

SEQ ID NO: 3593266 - DNA, 25 bp, Homo sapien
agggacggcgctactccaggcctgc

SEQ ID NO: 3593267 - DNA, 25 bp, Homo sapien
tcagagggacggcgctactccaggc

SEQ ID NO: 3593268 - DNA, 25 bp, Homo sapien
ctcatggaaggtgtgtatttagata

SEQ ID NO: 3593269 - DNA, 25 bp, Homo sapien
gaactcatggaaggtgtgtatttag

SEQ ID NO: 3593270 - DNA, 25 bp, Homo sapien
tgtccacctcgacagaactcatgga

SEQ ID NO: 3593271 - DNA, 25 bp, Homo sapien
cactgctttgtccacctcgacagaa

SEQ ID NO: 3593272 - DNA, 25 bp, Homo sapien
ctgtgaaaacggaaggaacatgttt

SEQ ID NO: 3593273 - DNA, 25 bp, Homo sapien
cacgctctagttgcccttcaggctg

SEQ ID NO: 3593274 - DNA, 25 bp, Homo sapien
tctccttagaaaactccttacatgt

SEQ ID NO: 3593275 - DNA, 25 bp, Homo sapien
cttgacatcacgctctagttgccct

SEQ ID NO: 3593276 - DNA, 25 bp, Homo sapien
gctgcccatcaacatgccagtctgt

SEQ ID NO: 3593277 - DNA, 25 bp, Homo sapien
tgtatgtcaaagtattttttttcca

SEQ ID NO: 3593278 - DNA, 25 bp, Homo sapien
taacttcccggtgacttggaggcca

SEQ ID NO: 3593279 - DNA, 25 bp, Homo sapien
ttggaggccaaagaacgcttgtagc

SEQ ID NO: 3593280 - DNA, 25 bp, Homo sapien
tccacagcgaggcttcttgatcacg

SEQ ID NO: 3593281 - DNA, 25 bp, Homo sapien
cttgatcacgttcattgtggtctgg

SEQ ID NO: 3593282 - DNA, 25 bp, Homo sapien
ctcaccaatctggtgtccttcttta

SEQ ID NO: 3593283 - DNA, 25 bp, Homo sapien
gtagatttttgggtcaattatcagg

SEQ ID NO: 3593284 - DNA, 25 bp, Homo sapien
ggtcaattatcaggtggtcctctct

SEQ ID NO: 3593285 - DNA, 25 bp, Homo sapien
ttgggtcaattatcaggtggtcctc

SEQ ID NO: 3593286 - DNA, 25 bp, Homo sapien
gatttttgggtcaattatcaggtgg

SEQ ID NO: 3593287 - DNA, 25 bp, Homo sapien
gaggctgcaactagggagggggctg

SEQ ID NO: 3593288 - DNA, 25 bp, Homo sapien
gggaggctgcaactagggagggggc

SEQ ID NO: 3593289 - DNA, 25 bp, Homo sapien
ctgtgcgaggcggtagttgttcctc

SEQ ID NO: 3593290 - DNA, 25 bp, Homo sapien
tgcgaggcggtagttgttcctccag

SEQ ID NO: 3593291 - DNA, 25 bp, Homo sapien
gatgaggaagacagcaaggccagat

SEQ ID NO: 3593292 - DNA, 25 bp, Homo sapien
gaggaagacagcaaggccagatgca

SEQ ID NO: 3593293 - DNA, 25 bp, Homo sapien
ggccagatgcagggagcaccttcat

SEQ ID NO: 3593294 - DNA, 25 bp, Homo sapien
agcaaggccagatgcagggagcacc

SEQ ID NO: 3593295 - DNA, 25 bp, Homo sapien
ttcctattaaaagaatcaggcagct

SEQ ID NO: 3593296 - DNA, 25 bp, Homo sapien
tgaaataggcttaaagtacagtcag

SEQ ID NO: 3593297 - DNA, 25 bp, Homo sapien
aagtacagtcagagatttttgtttc

SEQ ID NO: 3593298 - DNA, 25 bp, Homo sapien
tttggatatttagaactaggaccag

SEQ ID NO: 3593299 - DNA, 25 bp, Homo sapien
atttatattaaaagacctgttgagg

SEQ ID NO: 3593300 - DNA, 25 bp, Homo sapien
gcaaatgaacaataccaaaaataaa

SEQ ID NO: 3593301 - DNA, 25 bp, Homo sapien
cagcaaatgaacaataccaaaaata

SEQ ID NO: 3593302 - DNA, 25 bp, Homo sapien
tacaatatctttatgcctcctgaat

SEQ ID NO: 3593303 - DNA, 25 bp, Homo sapien
ttttccttgttgatatcaaaaccaa

SEQ ID NO: 3593304 - DNA, 25 bp, Homo sapien
ttcaaattgctttgatccacggctg

SEQ ID NO: 3593305 - DNA, 25 bp, Homo sapien
gatccacggctgaaaaagaagaatc

SEQ ID NO: 3593306 - DNA, 25 bp, Homo sapien
catgattcgggtaatattctttgtc

SEQ ID NO: 3593307 - DNA, 25 bp, Homo sapien
agtattagttctcatgattcgggta

SEQ ID NO: 3593308 - DNA, 25 bp, Homo sapien
gcatcaacacggatactgattccag

SEQ ID NO: 3593309 - DNA, 25 bp, Homo sapien
caacacggatactgattccaggaaa

SEQ ID NO: 3593310 - DNA, 25 bp, Homo sapien
ccaggaaagtgttttaccactctct

SEQ ID NO: 3593311 - DNA, 25 bp, Homo sapien
tctgcgggaaccctttgtccatggt

SEQ ID NO: 3593312 - DNA, 25 bp, Homo sapien
cctggaaaacctaatgtatggatgg

SEQ ID NO: 3593313 - DNA, 25 bp, Homo sapien
ttcttgtggtcttatcacagacggc

SEQ ID NO: 3593314 - DNA, 25 bp, Homo sapien
tctattttcttcacacgtcctggaa

SEQ ID NO: 3593315 - DNA, 25 bp, Homo sapien
tggcaagacagcatatcctctgatc

SEQ ID NO: 3593316 - DNA, 25 bp, Homo sapien
tggggttctcgtatgcagcttgcag

SEQ ID NO: 3593317 - DNA, 25 bp, Homo sapien
tatcataatagatcctccataggtg

SEQ ID NO: 3593318 - DNA, 25 bp, Homo sapien
ggccagaatgaagcaattaattcaa

SEQ ID NO: 3593319 - DNA, 25 bp, Homo sapien
tcaaactcaacatccgtgatatcat

SEQ ID NO: 3593320 - DNA, 25 bp, Homo sapien
tatagtgggttcctttggcttagca

SEQ ID NO: 3593321 - DNA, 25 bp, Homo sapien
cattacttctctgcggaaagttgtg

SEQ ID NO: 3593322 - DNA, 25 bp, Homo sapien
aaagtcaagtcagggtcacaggcat

SEQ ID NO: 3593323 - DNA, 25 bp, Homo sapien
aaagttgtgatagcgtcaaaagtca

SEQ ID NO: 3593324 - DNA, 25 bp, Homo sapien
atattgagatttataattttgctca

SEQ ID NO: 3593325 - DNA, 25 bp, Homo sapien
tatattgagatttataattttgctc

SEQ ID NO: 3593326 - DNA, 25 bp, Homo sapien
tattgagatttataattttgctcac

SEQ ID NO: 3593327 - DNA, 25 bp, Homo sapien
aagtgggtattttctgggatccagg

SEQ ID NO: 3593328 - DNA, 25 bp, Homo sapien
ttgatcattggagtgagagagcccc

SEQ ID NO: 3593329 - DNA, 25 bp, Homo sapien
gagccccagtgcatgaccaaattca

SEQ ID NO: 3593330 - DNA, 25 bp, Homo sapien
cagggagacataatttgggaacatc

SEQ ID NO: 3593331 - DNA, 25 bp, Homo sapien
taacagggaaaacacgagcacatga

SEQ ID NO: 3593332 - DNA, 25 bp, Homo sapien
gataataacagggaaaacacgagca

SEQ ID NO: 3593333 - DNA, 25 bp, Homo sapien
taataacagggaaaacacgagcaca

SEQ ID NO: 3593334 - DNA, 25 bp, Homo sapien
cttgataataacagggaaaacacga

SEQ ID NO: 3593335 - DNA, 25 bp, Homo sapien
aaatagcgaggacaccgaccatgga

SEQ ID NO: 3593336 - DNA, 25 bp, Homo sapien
caagcactcccaagggaccatcaaa

SEQ ID NO: 3593337 - DNA, 25 bp, Homo sapien
gggaccatcaaaatagcgaggacac

SEQ ID NO: 3593338 - DNA, 25 bp, Homo sapien
gcatggccaagcactcccaagggac

SEQ ID NO: 3593339 - DNA, 25 bp, Homo sapien
gagtcctaaaggcaatcatgatgtc

SEQ ID NO: 3593340 - DNA, 25 bp, Homo sapien
caatcccctttgaaatcttggtgaa

SEQ ID NO: 3593341 - DNA, 25 bp, Homo sapien
taaaccttcttggatagcctcatcc

SEQ ID NO: 3593342 - DNA, 25 bp, Homo sapien
ggagtgactttgctccacacttcta

SEQ ID NO: 3593343 - DNA, 25 bp, Homo sapien
cagggagggtgtagccatactggcc

SEQ ID NO: 3593344 - DNA, 25 bp, Homo sapien
gcatttcccgaattttgtcatctat

SEQ ID NO: 3593345 - DNA, 25 bp, Homo sapien
cttgctttgaacaagatgattccct

SEQ ID NO: 3593346 - DNA, 25 bp, Homo sapien
tatgagactcctattcttgctttga

SEQ ID NO: 3593347 - DNA, 25 bp, Homo sapien
tgatctcaagggtgtttgagtccag

SEQ ID NO: 3593348 - DNA, 25 bp, Homo sapien
ctgagccagttgcatattttcttca

SEQ ID NO: 3593349 - DNA, 25 bp, Homo sapien
ttttcttcattttccgtcatccgga

SEQ ID NO: 3593350 - DNA, 25 bp, Homo sapien
tgagccagttgcatattttcttcat

SEQ ID NO: 3593351 - DNA, 25 bp, Homo sapien
atattttcttcattttccgtcatcc

SEQ ID NO: 3593352 - DNA, 25 bp, Homo sapien
aaaacagaagcagaaggcgcttcat

SEQ ID NO: 3593353 - DNA, 25 bp, Homo sapien
gggaaatgcagaagaaaatgttata

SEQ ID NO: 3593354 - DNA, 25 bp, Homo sapien
ctaagggaaatgcagaagaaaatgt

SEQ ID NO: 3593355 - DNA, 25 bp, Homo sapien
gaacaaaaacagaagcagaaggcgc

SEQ ID NO: 3593356 - DNA, 25 bp, Homo sapien
cattatatatctgcacaacatctaa

SEQ ID NO: 3593357 - DNA, 25 bp, Homo sapien
attatatatctgcacaacatctaaa

SEQ ID NO: 3593358 - DNA, 25 bp, Homo sapien
gcccatttgggtttggactctagga

SEQ ID NO: 3593359 - DNA, 25 bp, Homo sapien
tgatatctggactcgctagacttgg

SEQ ID NO: 3593360 - DNA, 25 bp, Homo sapien
tgacgaacatcagatccaactggcc

SEQ ID NO: 3593361 - DNA, 25 bp, Homo sapien
caagttatctatagtgtgtgccctc

SEQ ID NO: 3593362 - DNA, 25 bp, Homo sapien
tgtcagcagggtcacacttgaaggc

SEQ ID NO: 3593363 - DNA, 25 bp, Homo sapien
tctgtaaaggccaagggtactgtct

SEQ ID NO: 3593364 - DNA, 25 bp, Homo sapien
aagtccgaattctgcaggtgtcagc

SEQ ID NO: 3593365 - DNA, 25 bp, Homo sapien
acttgaaggctattggagggaatcc

SEQ ID NO: 3593366 - DNA, 25 bp, Homo sapien
tgtgtaagaactgaataagcctctg

SEQ ID NO: 3593367 - DNA, 25 bp, Homo sapien
gcctctgcaaatagtggaatattcc

SEQ ID NO: 3593368 - DNA, 25 bp, Homo sapien
cacaatgtaacgaaaatgcttgctg

SEQ ID NO: 3593369 - DNA, 25 bp, Homo sapien
cacggaggacaggtagaatggatac

SEQ ID NO: 3593370 - DNA, 25 bp, Homo sapien
gagcaataagatcaaatgcgtaata

SEQ ID NO: 3593371 - DNA, 25 bp, Homo sapien
catttattgcctcttgcaactctgg

SEQ ID NO: 3593372 - DNA, 25 bp, Homo sapien
atcaaatgcgtaatatcttggtcca

SEQ ID NO: 3593373 - DNA, 25 bp, Homo sapien
tctgagcaataagatcaaatgcgta

SEQ ID NO: 3593374 - DNA, 25 bp, Homo sapien
aaaggcacctgatatgcttttggga

SEQ ID NO: 3593375 - DNA, 25 bp, Homo sapien
cacctgatatgcttttgggataacc

SEQ ID NO: 3593376 - DNA, 25 bp, Homo sapien
aaaactgcatcaactttactctcta

SEQ ID NO: 3593377 - DNA, 25 bp, Homo sapien
actgcatcaactttactctctattc

SEQ ID NO: 3593378 - DNA, 25 bp, Homo sapien
gaaaacagctgcgtcaattgcttgg

SEQ ID NO: 3593379 - DNA, 25 bp, Homo sapien
tatccttgggataaccttgcagaat

SEQ ID NO: 3593380 - DNA, 25 bp, Homo sapien
ccactcagagcccagtattggttgc

SEQ ID NO: 3593381 - DNA, 25 bp, Homo sapien
tgcagaatatcatagccactcagag

SEQ ID NO: 3593382 - DNA, 25 bp, Homo sapien
gtcaaaatcttcataagcagcctgt

SEQ ID NO: 3593383 - DNA, 25 bp, Homo sapien
taaataggaaaatgaggtctctgtc

SEQ ID NO: 3593384 - DNA, 25 bp, Homo sapien
gaagggatggccagaatagagaaat

SEQ ID NO: 3593385 - DNA, 25 bp, Homo sapien
aattcatttcgactctttgtagctg

SEQ ID NO: 3593386 - DNA, 25 bp, Homo sapien
caaatgtcaaactggggtcacaggg

SEQ ID NO: 3593387 - DNA, 25 bp, Homo sapien
tccagtaggttggatagggttgctt

SEQ ID NO: 3593388 - DNA, 25 bp, Homo sapien
gtcacagggtttgggtgtgcttggt

SEQ ID NO: 3593389 - DNA, 25 bp, Homo sapien
aagtatttctccacggagtgtggtg

SEQ ID NO: 3593390 - DNA, 25 bp, Homo sapien
catcgatgtcatcttgagggagtga

SEQ ID NO: 3593391 - DNA, 25 bp, Homo sapien
cctgaaagcatagttgggatacatc

SEQ ID NO: 3593392 - DNA, 25 bp, Homo sapien
catagatggcctgaatgccatcgat

SEQ ID NO: 3593393 - DNA, 25 bp, Homo sapien
gatacatcaaggcaccagggtcaga

SEQ ID NO: 3593394 - DNA, 25 bp, Homo sapien
gctgaaaggcatgagcaaggattcc

SEQ ID NO: 3593395 - DNA, 25 bp, Homo sapien
ccattgggtccatcaaatggagaat

SEQ ID NO: 3593396 - DNA, 25 bp, Homo sapien
ccaataccttggcctggctgaaagg

SEQ ID NO: 3593397 - DNA, 25 bp, Homo sapien
tgtttcttcggcatcaaaatgagca

SEQ ID NO: 3593398 - DNA, 25 bp, Homo sapien
cagctgtggggtatagtttcgaatc

SEQ ID NO: 3593399 - DNA, 25 bp, Homo sapien
ccttgatagctctttctacctcagc

SEQ ID NO: 3593400 - DNA, 25 bp, Homo sapien
caaaggcatccttgatagctctttc

SEQ ID NO: 3593401 - DNA, 25 bp, Homo sapien
tgagaggtgatgcaacactccagag

SEQ ID NO: 3593402 - DNA, 25 bp, Homo sapien
gcttttcaacgatcacattagtgcc

SEQ ID NO: 3593403 - DNA, 25 bp, Homo sapien
tgtaggtcaagttagtgcgttccca

SEQ ID NO: 3593404 - DNA, 25 bp, Homo sapien
cattcaacccaaaaaatcgctgcat

SEQ ID NO: 3593405 - DNA, 25 bp, Homo sapien
tccttgtagactgatactggttgct

SEQ ID NO: 3593406 - DNA, 25 bp, Homo sapien
tgctgtgaaaggacctccagttctc

SEQ ID NO: 3593407 - DNA, 25 bp, Homo sapien
agacaagcacataggggtcttgctg

SEQ ID NO: 3593408 - DNA, 25 bp, Homo sapien
aaagacaagcacataggggtcttgc

SEQ ID NO: 3593409 - DNA, 25 bp, Homo sapien
tgtgaaaggacctccagttctctgg

SEQ ID NO: 3593410 - DNA, 25 bp, Homo sapien
tgaggtatttgttgcatcagtgcag

SEQ ID NO: 3593411 - DNA, 25 bp, Homo sapien
ttcactactgtagaaaaggcttatt

SEQ ID NO: 3593412 - DNA, 25 bp, Homo sapien
aattgacttctcttgaggtatttgt

SEQ ID NO: 3593413 - DNA, 25 bp, Homo sapien
ttgttgcatcagtgcagttcctctt

SEQ ID NO: 3593414 - DNA, 25 bp, Homo sapien
catctggttggcttctgagatggcc

SEQ ID NO: 3593415 - DNA, 25 bp, Homo sapien
caggtggctgcatctggttggcttc

SEQ ID NO: 3593416 - DNA, 25 bp, Homo sapien
atcaggtggctgcatctggttggct

SEQ ID NO: 3593417 - DNA, 25 bp, Homo sapien
ggctgcatctggttggcttctgaga

SEQ ID NO: 3593418 - DNA, 25 bp, Homo sapien
gaattaactgtgagcacttggccac

SEQ ID NO: 3593419 - DNA, 25 bp, Homo sapien
tgagcacttggccacattatttatc

SEQ ID NO: 3593420 - DNA, 25 bp, Homo sapien
cagatcacacgctttggaatcagac

SEQ ID NO: 3593421 - DNA, 25 bp, Homo sapien
ctctgccatgaattaactgtgagca

SEQ ID NO: 3593422 - DNA, 25 bp, Homo sapien
tcccaactaggggtaactctacagc

SEQ ID NO: 3593423 - DNA, 25 bp, Homo sapien
gcagtattttcccagcctttaaaga

SEQ ID NO: 3593424 - DNA, 25 bp, Homo sapien
gggtaactctacagcagtattttcc

SEQ ID NO: 3593425 - DNA, 25 bp, Homo sapien
gtaactctacagcagtattttccca

SEQ ID NO: 3593426 - DNA, 25 bp, Homo sapien
taaaaggagatgttcaatctcaaac

SEQ ID NO: 3593427 - DNA, 25 bp, Homo sapien
caaacatcacctaactgatagttca

SEQ ID NO: 3593428 - DNA, 25 bp, Homo sapien
agcaaatcaaacatcacctaactga

SEQ ID NO: 3593429 - DNA, 25 bp, Homo sapien
tctcaaactaatcacccaaataatt

SEQ ID NO: 3593430 - DNA, 25 bp, Homo sapien
tctgcacatggagtaagagcagaaa

SEQ ID NO: 3593431 - DNA, 25 bp, Homo sapien
tgcacatggagtaagagcagaaatg

SEQ ID NO: 3593432 - DNA, 25 bp, Homo sapien
gcacatggagtaagagcagaaatgg

SEQ ID NO: 3593433 - DNA, 25 bp, Homo sapien
aatctgcacatggagtaagagcaga

SEQ ID NO: 3593434 - DNA, 25 bp, Homo sapien
gtagggcccttccctggcgagcacc

SEQ ID NO: 3593435 - DNA, 25 bp, Homo sapien
ctgggactgagttctctcaggctct

SEQ ID NO: 3593436 - DNA, 25 bp, Homo sapien
tgggactgagttctctcaggctctc

SEQ ID NO: 3593437 - DNA, 25 bp, Homo sapien
cctgggactgagttctctcaggctc

SEQ ID NO: 3593438 - DNA, 25 bp, Homo sapien
tactaattccggggaggtcatcaat

SEQ ID NO: 3593439 - DNA, 25 bp, Homo sapien
cctgcatccacggactgcatatttt

SEQ ID NO: 3593440 - DNA, 25 bp, Homo sapien
ataacctgcatccacggactgcata

SEQ ID NO: 3593441 - DNA, 25 bp, Homo sapien
catccacggactgcatattttcatc

SEQ ID NO: 3593442 - DNA, 25 bp, Homo sapien
ggtagccactcagcagttgatcctc

SEQ ID NO: 3593443 - DNA, 25 bp, Homo sapien
aagacaaaggagctgtagacgtccc

SEQ ID NO: 3593444 - DNA, 25 bp, Homo sapien
gacaaaggagctgtagacgtccctg

SEQ ID NO: 3593445 - DNA, 25 bp, Homo sapien
ttgatcctcctgaacgacccagtgc

SEQ ID NO: 3593446 - DNA, 25 bp, Homo sapien
catgtccataaaagggagaattgtc

SEQ ID NO: 3593447 - DNA, 25 bp, Homo sapien
tgagcaagacaaccatcatgtccat

SEQ ID NO: 3593448 - DNA, 25 bp, Homo sapien
tctcctccgatacctggtccaggtg

SEQ ID NO: 3593449 - DNA, 25 bp, Homo sapien
ccaggtgggaatgcatgagcaagac

SEQ ID NO: 3593450 - DNA, 25 bp, Homo sapien
agagttcaaaggctttcccagtggc

SEQ ID NO: 3593451 - DNA, 25 bp, Homo sapien
cctcttgaggcagatttggcatgta

SEQ ID NO: 3593452 - DNA, 25 bp, Homo sapien
ccagagttcaaaggctttcccagtg

SEQ ID NO: 3593453 - DNA, 25 bp, Homo sapien
cagtggcacggtccacatcctcttg

SEQ ID NO: 3593454 - DNA, 25 bp, Homo sapien
ttctcaagcactgggctactgtctc

SEQ ID NO: 3593455 - DNA, 25 bp, Homo sapien
tcttcaagttgtagtagcagttttc

SEQ ID NO: 3593456 - DNA, 25 bp, Homo sapien
ccaatttgattgatttcactcttca

SEQ ID NO: 3593457 - DNA, 25 bp, Homo sapien
tcaagcactgggctactgtctctct

SEQ ID NO: 3593458 - DNA, 25 bp, Homo sapien
aaaatgggaacacgctgctcttgca

SEQ ID NO: 3593459 - DNA, 25 bp, Homo sapien
gaaaaatgggaacacgctgctcttg

SEQ ID NO: 3593460 - DNA, 25 bp, Homo sapien
tgggaacacgctgctcttgcattac

SEQ ID NO: 3593461 - DNA, 25 bp, Homo sapien
aacacgctgctcttgcattactggc

SEQ ID NO: 3593462 - DNA, 25 bp, Homo sapien
ctggactatctctgcatcttgttct

SEQ ID NO: 3593463 - DNA, 25 bp, Homo sapien
gcatcttgttcttgtgtttctggag

SEQ ID NO: 3593464 - DNA, 25 bp, Homo sapien
tggagtcgctgggaagctgtgcaac

SEQ ID NO: 3593465 - DNA, 25 bp, Homo sapien
gctgggaagctgtgcaaccccacac

SEQ ID NO: 3593466 - DNA, 25 bp, Homo sapien
catactcccaattttctgaacaaaa

SEQ ID NO: 3593467 - DNA, 25 bp, Homo sapien
tgcaggcatactcccaattttctga

SEQ ID NO: 3593468 - DNA, 25 bp, Homo sapien
ggcatactcccaattttctgaacaa

SEQ ID NO: 3593469 - DNA, 25 bp, Homo sapien
caggcatactcccaattttctgaac

SEQ ID NO: 3593470 - DNA, 25 bp, Homo sapien
attcctgagacatctgacattgctc

SEQ ID NO: 3593471 - DNA, 25 bp, Homo sapien
aaatttcaatccatccactaaagac

SEQ ID NO: 3593472 - DNA, 25 bp, Homo sapien
ctgaagattactgcaaatcccttgg

SEQ ID NO: 3593473 - DNA, 25 bp, Homo sapien
gacatctgacattgctccttttgct

SEQ ID NO: 3593474 - DNA, 25 bp, Homo sapien
aattcagacgttcacgtttcagtgc

SEQ ID NO: 3593475 - DNA, 25 bp, Homo sapien
gtgcagttcccaggatctttataga

SEQ ID NO: 3593476 - DNA, 25 bp, Homo sapien
cacaattgttacttagtgcagttcc

SEQ ID NO: 3593477 - DNA, 25 bp, Homo sapien
tatgttatacagttgatgccattgc

SEQ ID NO: 3593478 - DNA, 25 bp, Homo sapien
aagtgtttgatgaggctcgaacatc

SEQ ID NO: 3593479 - DNA, 25 bp, Homo sapien
tgaggctcgaacatcccaatccagt

SEQ ID NO: 3593480 - DNA, 25 bp, Homo sapien
catctctatggtagccagacttaaa

SEQ ID NO: 3593481 - DNA, 25 bp, Homo sapien
tacaaggaacatctctatggtagcc

SEQ ID NO: 3593482 - DNA, 25 bp, Homo sapien
gccatttctgaatgccgcgccagtc

SEQ ID NO: 3593483 - DNA, 25 bp, Homo sapien
aaggctcatactttgtcttacttct

SEQ ID NO: 3593484 - DNA, 25 bp, Homo sapien
ctgaatgccgcgccagtcgtccggg

SEQ ID NO: 3593485 - DNA, 25 bp, Homo sapien
ttctgaatgccgcgccagtcgtccg

SEQ ID NO: 3593486 - DNA, 25 bp, Homo sapien
gctgctttaaaaccgcatctagaag

SEQ ID NO: 3593487 - DNA, 25 bp, Homo sapien
aaccgtgttgtacacccggagatct

SEQ ID NO: 3593488 - DNA, 25 bp, Homo sapien
accgcatctagaaggcagtgtctgc

SEQ ID NO: 3593489 - DNA, 25 bp, Homo sapien
gatctgaccccatcattcaccgtag

SEQ ID NO: 3593490 - DNA, 25 bp, Homo sapien
gaagtaataacacatctatgaaaat

SEQ ID NO: 3593491 - DNA, 25 bp, Homo sapien
catgcagatatctgcaaggctcatc

SEQ ID NO: 3593492 - DNA, 25 bp, Homo sapien
ccattttggctcataatacattaga

SEQ ID NO: 3593493 - DNA, 25 bp, Homo sapien
cacctattgcacatgagtatttctt

SEQ ID NO: 3593494 - DNA, 25 bp, Homo sapien
ccagctgttactctttaatatgtgt

SEQ ID NO: 3593495 - DNA, 25 bp, Homo sapien
caaactgtgatgatccactgaagaa

SEQ ID NO: 3593496 - DNA, 25 bp, Homo sapien
aaactcaaactgtgatgatccactg

SEQ ID NO: 3593497 - DNA, 25 bp, Homo sapien
tgtgatgatccactgaagaagtaga

SEQ ID NO: 3593498 - DNA, 25 bp, Homo sapien
ggggtcaaactcaaactgtgatgat

SEQ ID NO: 3593499 - DNA, 25 bp, Homo sapien
cctggagattcctgcatgacaatga

SEQ ID NO: 3593500 - DNA, 25 bp, Homo sapien
tgcatgacaatgaaataagggtctt

SEQ ID NO: 3593501 - DNA, 25 bp, Homo sapien
tttgaaatcataaaaatgcctggag

SEQ ID NO: 3593502 - DNA, 25 bp, Homo sapien
gacaatgaaataagggtcttcttac

SEQ ID NO: 3593503 - DNA, 25 bp, Homo sapien
ttagtctagggaagccttgctccat

SEQ ID NO: 3593504 - DNA, 25 bp, Homo sapien
tcatcagctattagtctagggaagc

SEQ ID NO: 3593505 - DNA, 25 bp, Homo sapien
gctattagtctagggaagccttgct

SEQ ID NO: 3593506 - DNA, 25 bp, Homo sapien
aaagtcatcagctattagtctaggg

SEQ ID NO: 3593507 - DNA, 25 bp, Homo sapien
gaggaaaacccagggtatggatgcc

SEQ ID NO: 3593508 - DNA, 25 bp, Homo sapien
tggatgcctcttggataacctgctt

SEQ ID NO: 3593509 - DNA, 25 bp, Homo sapien
agtatttgtccgctgcaaagaagta

SEQ ID NO: 3593510 - DNA, 25 bp, Homo sapien
ggataacctgcttgtacctcatttc

SEQ ID NO: 3593511 - DNA, 25 bp, Homo sapien
tattgaaaaaataaatccaagacat

SEQ ID NO: 3593512 - DNA, 25 bp, Homo sapien
attgaaaaaataaatccaagacatt

SEQ ID NO: 3593513 - DNA, 25 bp, Homo sapien
ctattgaaaaaataaatccaagaca

SEQ ID NO: 3593514 - DNA, 25 bp, Homo sapien
ccctgctgttaacttcatatgcagc

SEQ ID NO: 3593515 - DNA, 25 bp, Homo sapien
acttcatatgcagcatccaaatatg

SEQ ID NO: 3593516 - DNA, 25 bp, Homo sapien
ttcaggttcagggttccagtgggat

SEQ ID NO: 3593517 - DNA, 25 bp, Homo sapien
tgttaacttcatatgcagcatccaa

SEQ ID NO: 3593518 - DNA, 25 bp, Homo sapien
atattctcccctcagagtgctgatg

SEQ ID NO: 3593519 - DNA, 25 bp, Homo sapien
gatggcatcgaaggacaaagcagga

SEQ ID NO: 3593520 - DNA, 25 bp, Homo sapien
gatattctcccctcagagtgctgat

SEQ ID NO: 3593521 - DNA, 25 bp, Homo sapien
gcaccaggggttcctcagtagaggc

SEQ ID NO: 3593522 - DNA, 25 bp, Homo sapien
aacagattttgtgggcaccaggggt

SEQ ID NO: 3593523 - DNA, 25 bp, Homo sapien
ctcagatcccgaaggaacagatttt

SEQ ID NO: 3593524 - DNA, 25 bp, Homo sapien
ggcatctcagatcccgaaggaacag

SEQ ID NO: 3593525 - DNA, 25 bp, Homo sapien
tgccattcacatcatcttgcgaaag

SEQ ID NO: 3593526 - DNA, 25 bp, Homo sapien
cgtagagagactgaatgccattcac

SEQ ID NO: 3593527 - DNA, 25 bp, Homo sapien
aactgggcgagctctgtgaatgagt

SEQ ID NO: 3593528 - DNA, 25 bp, Homo sapien
catcttgcgaaaggcggaactgggc

SEQ ID NO: 3593529 - DNA, 25 bp, Homo sapien
tcatgagcagcaacgaggaataaat

SEQ ID NO: 3593530 - DNA, 25 bp, Homo sapien
tatctccataaagcccaggtccagg

SEQ ID NO: 3593531 - DNA, 25 bp, Homo sapien
gtgtcctgggccatcaaaagagtaa

SEQ ID NO: 3593532 - DNA, 25 bp, Homo sapien
gatgcatcttctgtccatttttcat

SEQ ID NO: 3593533 - DNA, 25 bp, Homo sapien
aggtccaggtgggtaggcatgagcc

SEQ ID NO: 3593534 - DNA, 25 bp, Homo sapien
ggcaaatctggtgtataattcacaa

SEQ ID NO: 3593535 - DNA, 25 bp, Homo sapien
cttcatacagcctggagaatgtgag

SEQ ID NO: 3593536 - DNA, 25 bp, Homo sapien
gcaaatctggtgtataattcacaat

SEQ ID NO: 3593537 - DNA, 25 bp, Homo sapien
caaatctggtgtataattcacaatc

SEQ ID NO: 3593538 - DNA, 25 bp, Homo sapien
cacatccttttcgaggttgtagtac

SEQ ID NO: 3593539 - DNA, 25 bp, Homo sapien
taacaatgagattactgtcctttct

SEQ ID NO: 3593540 - DNA, 25 bp, Homo sapien
agtgtcagtgtctagcttccctgtc

SEQ ID NO: 3593541 - DNA, 25 bp, Homo sapien
gttttcctccacttcggcatgccag

SEQ ID NO: 3593542 - DNA, 25 bp, Homo sapien
ccactcagaggataggcagagcaga

SEQ ID NO: 3593543 - DNA, 25 bp, Homo sapien
tgccccactcagaggataggcagag

SEQ ID NO: 3593544 - DNA, 25 bp, Homo sapien
ccccactcagaggataggcagagca

SEQ ID NO: 3593545 - DNA, 25 bp, Homo sapien
tgctgccccactcagaggataggca

SEQ ID NO: 3593546 - DNA, 25 bp, Homo sapien
agacacaacagcacaaggaatgcaa

SEQ ID NO: 3593547 - DNA, 25 bp, Homo sapien
cacaacagcacaaggaatgcaagat

SEQ ID NO: 3593548 - DNA, 25 bp, Homo sapien
ctggcagacacaacagcacaaggaa

SEQ ID NO: 3593549 - DNA, 25 bp, Homo sapien
acagcacaaggaatgcaagatgcat

SEQ ID NO: 3593550 - DNA, 25 bp, Homo sapien
tcactgcccttaccttctttgtcta

SEQ ID NO: 3593551 - DNA, 25 bp, Homo sapien
actgcccttaccttctttgtctact

SEQ ID NO: 3593552 - DNA, 25 bp, Homo sapien
cactgcccttaccttctttgtctac

SEQ ID NO: 3593553 - DNA, 25 bp, Homo sapien
tctcactgcccttaccttctttgtc

SEQ ID NO: 3593554 - DNA, 25 bp, Homo sapien
tgtgttagaagagttatcccttgcc

SEQ ID NO: 3593555 - DNA, 25 bp, Homo sapien
tctgggatcaacgtcagagttgcat

SEQ ID NO: 3593556 - DNA, 25 bp, Homo sapien
gcaactctggcctatatgaatccat

SEQ ID NO: 3593557 - DNA, 25 bp, Homo sapien
ccttgcctatccagggtgacaccag

SEQ ID NO: 3593558 - DNA, 25 bp, Homo sapien
ttcctgcagttgaaccagctattag

SEQ ID NO: 3593559 - DNA, 25 bp, Homo sapien
tcaatttttcctgcagttgaaccag

SEQ ID NO: 3593560 - DNA, 25 bp, Homo sapien
tttttcctgcagttgaaccagctat

SEQ ID NO: 3593561 - DNA, 25 bp, Homo sapien
tgcagttgaaccagctattagcttt

SEQ ID NO: 3593562 - DNA, 25 bp, Homo sapien
ggccaattccaggaaagtcatgtgc

SEQ ID NO: 3593563 - DNA, 25 bp, Homo sapien
atgtgctatcattttgggataacct

SEQ ID NO: 3593564 - DNA, 25 bp, Homo sapien
catctttcatgaaaactgcatcaac

SEQ ID NO: 3593565 - DNA, 25 bp, Homo sapien
ggataacctggatccatagatcgtt

SEQ ID NO: 3593566 - DNA, 25 bp, Homo sapien
cagaccttttgctaaacatgtgcac

SEQ ID NO: 3593567 - DNA, 25 bp, Homo sapien
ctggtcagaaaagagttaagagtgt

SEQ ID NO: 3593568 - DNA, 25 bp, Homo sapien
gtcagaaaagagttaagagtgtcag

SEQ ID NO: 3593569 - DNA, 25 bp, Homo sapien
gttaagagtgtcagaccttttgcta

SEQ ID NO: 3593570 - DNA, 25 bp, Homo sapien
cgatatgcttcacagttctagggaa

SEQ ID NO: 3593571 - DNA, 25 bp, Homo sapien
tgtccctgaacagcccagtacttat

SEQ ID NO: 3593572 - DNA, 25 bp, Homo sapien
gggtatccgtgtagcacattctgtc

SEQ ID NO: 3593573 - DNA, 25 bp, Homo sapien
aagccaaaggagctgtagatgtcct

SEQ ID NO: 3593574 - DNA, 25 bp, Homo sapien
aaattcgtaagcagcttcaagccca

SEQ ID NO: 3593575 - DNA, 25 bp, Homo sapien
aattgagctcaacttccgggtagaa

SEQ ID NO: 3593576 - DNA, 25 bp, Homo sapien
gcccatttggcagttgtggccagaa

SEQ ID NO: 3593577 - DNA, 25 bp, Homo sapien
gaaaaaccggacttcatctctgtcg

SEQ ID NO: 3593578 - DNA, 25 bp, Homo sapien
acttctccccgaatcgtagttatag

SEQ ID NO: 3593579 - DNA, 25 bp, Homo sapien
cgtagttatagcatcaaaggttagc

SEQ ID NO: 3593580 - DNA, 25 bp, Homo sapien
tccccgaatcgtagttatagcatca

SEQ ID NO: 3593581 - DNA, 25 bp, Homo sapien
gaatcgtagttatagcatcaaaggt

SEQ ID NO: 3593582 - DNA, 25 bp, Homo sapien
ggtttgtgggccgatgggctggaca

SEQ ID NO: 3593583 - DNA, 25 bp, Homo sapien
tgtcacacgcttttggggtttgtgg

SEQ ID NO: 3593584 - DNA, 25 bp, Homo sapien
gggccgatgggctggacaggatttt

SEQ ID NO: 3593585 - DNA, 25 bp, Homo sapien
tgggctggacaggattttgggaacg

SEQ ID NO: 3593586 - DNA, 25 bp, Homo sapien
tccgtaatgtttttccccatactca

SEQ ID NO: 3593587 - DNA, 25 bp, Homo sapien
caatgtcatcctgagctagctgaac

SEQ ID NO: 3593588 - DNA, 25 bp, Homo sapien
caaagccccgatatcagtagaatgg

SEQ ID NO: 3593589 - DNA, 25 bp, Homo sapien
gagtccaagagaatggccgagttca

SEQ ID NO: 3593590 - DNA, 25 bp, Homo sapien
tcatgagctgcaacacgatgtaagt

SEQ ID NO: 3593591 - DNA, 25 bp, Homo sapien
gaaattgttggtccacctttcatct

SEQ ID NO: 3593592 - DNA, 25 bp, Homo sapien
atcccctccaatacctgggcctggt

SEQ ID NO: 3593593 - DNA, 25 bp, Homo sapien
gggcctggttgaaaagcatgagcaa

SEQ ID NO: 3593594 - DNA, 25 bp, Homo sapien
ggtccatcaaaaggagagttgtccc

SEQ ID NO: 3593595 - DNA, 25 bp, Homo sapien
gaggtgtgacattactccagagttg

SEQ ID NO: 3593596 - DNA, 25 bp, Homo sapien
ttggaaggctttctcaatggcatgg

SEQ ID NO: 3593597 - DNA, 25 bp, Homo sapien
ccttggtgaatgtcagaggtgtgac

SEQ ID NO: 3593598 - DNA, 25 bp, Homo sapien
caaatctggcgtgtaattttcaatc

SEQ ID NO: 3593599 - DNA, 25 bp, Homo sapien
ccagcgagggttcccctcagtgagg

SEQ ID NO: 3593600 - DNA, 25 bp, Homo sapien
cccagcgagggttcccctcagtgag

SEQ ID NO: 3593601 - DNA, 25 bp, Homo sapien
ggtttcccagtcactttcagcccaa

SEQ ID NO: 3593602 - DNA, 25 bp, Homo sapien
ttcatcaccttcagggtttcagcat

SEQ ID NO: 3593603 - DNA, 25 bp, Homo sapien
cagtcactttcagcccaaagaattc

SEQ ID NO: 3593604 - DNA, 25 bp, Homo sapien
gggtttcagcatctggtttcccagt

SEQ ID NO: 3593605 - DNA, 25 bp, Homo sapien
caatttttcaaccactgggccacta

SEQ ID NO: 3593606 - DNA, 25 bp, Homo sapien
actatttctccgcttttcaacttgc

SEQ ID NO: 3593607 - DNA, 25 bp, Homo sapien
ggccactatttctccgcttttcaac

SEQ ID NO: 3593608 - DNA, 25 bp, Homo sapien
ttttcaaccactgggccactatttc

SEQ ID NO: 3593609 - DNA, 25 bp, Homo sapien
ctgacaaaagaaaattatcgaaaca

SEQ ID NO: 3593610 - DNA, 25 bp, Homo sapien
ctgcatgggaaatctttctcattat

SEQ ID NO: 3593611 - DNA, 25 bp, Homo sapien
tgcatgggaaatctttctcattatt

SEQ ID NO: 3593612 - DNA, 25 bp, Homo sapien
tggactaagtccacatcttgctctt

SEQ ID NO: 3593613 - DNA, 25 bp, Homo sapien
ctggactaagtccacatcttgctct

SEQ ID NO: 3593614 - DNA, 25 bp, Homo sapien
tgagacaccacaccccagaacagca

SEQ ID NO: 3593615 - DNA, 25 bp, Homo sapien
gcagcagtggaggaaagctgtgcat

SEQ ID NO: 3593616 - DNA, 25 bp, Homo sapien
agcagcagcagtggaggaaagctgt

SEQ ID NO: 3593617 - DNA, 25 bp, Homo sapien
acaccacaccccagaacagcagcag

SEQ ID NO: 3593618 - DNA, 25 bp, Homo sapien
gtgcaaggtaagtgatggcttccca

SEQ ID NO: 3593619 - DNA, 25 bp, Homo sapien
cagcctcttgctgctccaatatccc

SEQ ID NO: 3593620 - DNA, 25 bp, Homo sapien
cagtgcaaggtaagtgatggcttcc

SEQ ID NO: 3593621 - DNA, 25 bp, Homo sapien
tttctcagtgcaaggtaagtgatgg

SEQ ID NO: 3593622 - DNA, 25 bp, Homo sapien
gcgattatagtttaagcacatggca

SEQ ID NO: 3593623 - DNA, 25 bp, Homo sapien
tgcggaatagctgtctgagatacac

SEQ ID NO: 3593624 - DNA, 25 bp, Homo sapien
tgtctgagatacacctcatccggga

SEQ ID NO: 3593625 - DNA, 25 bp, Homo sapien
tcatccgggacttcctcaaagtgta

SEQ ID NO: 3593626 - DNA, 25 bp, Homo sapien
tcccggaaggtctatgactggtaca

SEQ ID NO: 3593627 - DNA, 25 bp, Homo sapien
cagtggtgtccaatacctttaggga

SEQ ID NO: 3593628 - DNA, 25 bp, Homo sapien
tttttcctgatcataccacggtatg

SEQ ID NO: 3593629 - DNA, 25 bp, Homo sapien
cacagtatgcgttgccttgtcctgc

SEQ ID NO: 3593630 - DNA, 25 bp, Homo sapien
aattcggccttggatccgctgctgc

SEQ ID NO: 3593631 - DNA, 25 bp, Homo sapien
gaggccaagtccagacgcctctgag

SEQ ID NO: 3593632 - DNA, 25 bp, Homo sapien
acatggaacacggaggcctccctca

SEQ ID NO: 3593633 - DNA, 25 bp, Homo sapien
gctgctgctcgccatcctaagagat

SEQ ID NO: 3593634 - DNA, 25 bp, Homo sapien
actatcattcctgttaccatctggg

SEQ ID NO: 3593635 - DNA, 25 bp, Homo sapien
aactgttgcaattcagccaggtaca

SEQ ID NO: 3593636 - DNA, 25 bp, Homo sapien
gggcagagcattcaactgttgcaat

SEQ ID NO: 3593637 - DNA, 25 bp, Homo sapien
cattcaactgttgcaattcagccag

SEQ ID NO: 3593638 - DNA, 25 bp, Homo sapien
tcaactagagccatactggtgaggt

SEQ ID NO: 3593639 - DNA, 25 bp, Homo sapien
ttctaattctgggaaagagcacatg

SEQ ID NO: 3593640 - DNA, 25 bp, Homo sapien
gagcacatgacaggctctgctttat

SEQ ID NO: 3593641 - DNA, 25 bp, Homo sapien
caaacattattgtctaggtctgcca

SEQ ID NO: 3593642 - DNA, 25 bp, Homo sapien
gggactgaataagctgcgtatttct

SEQ ID NO: 3593643 - DNA, 25 bp, Homo sapien
aataaacaggagctcgcagagtccc

SEQ ID NO: 3593644 - DNA, 25 bp, Homo sapien
tatttcttcctttgagcgcagctgg

SEQ ID NO: 3593645 - DNA, 25 bp, Homo sapien
gaggtccgacgaatcgggctctgct

SEQ ID NO: 3593646 - DNA, 25 bp, Homo sapien
ctgggaggcgactcttcggattcaa

SEQ ID NO: 3593647 - DNA, 25 bp, Homo sapien
gaggcgactcttcggattcaagatg

SEQ ID NO: 3593648 - DNA, 25 bp, Homo sapien
gactcttcggattcaagatgaccaa

SEQ ID NO: 3593649 - DNA, 25 bp, Homo sapien
gattcaagatgaccaacaaaaaacc

SEQ ID NO: 3593650 - DNA, 25 bp, Homo sapien
gtggcccagcgtggcccgatcaaca

SEQ ID NO: 3593651 - DNA, 25 bp, Homo sapien
tagaccgagccatcaacctgttttc

SEQ ID NO: 3593652 - DNA, 25 bp, Homo sapien
tccagcaaatctgtggcccagcgtg

SEQ ID NO: 3593653 - DNA, 25 bp, Homo sapien
cgatcaacaatggtagaccgagcca

SEQ ID NO: 3593654 - DNA, 25 bp, Homo sapien
ttgcttcagaagcctggtagacttg

SEQ ID NO: 3593655 - DNA, 25 bp, Homo sapien
caatgaaccttgcacttcagttctt

SEQ ID NO: 3593656 - DNA, 25 bp, Homo sapien
gacttgcactatcccaaagaagcgg

SEQ ID NO: 3593657 - DNA, 25 bp, Homo sapien
gggaacatgtggatacttgagaaat

SEQ ID NO: 3593658 - DNA, 25 bp, Homo sapien
tctatgtgacaaggtgcaagctaag

SEQ ID NO: 3593659 - DNA, 25 bp, Homo sapien
gcagcagcccatttgaatgccctgt

SEQ ID NO: 3593660 - DNA, 25 bp, Homo sapien
gaccggcaagatacagattcacgct

SEQ ID NO: 3593661 - DNA, 25 bp, Homo sapien
caggcaggagaaaacgaacatttca

SEQ ID NO: 3593662 - DNA, 25 bp, Homo sapien
tgcatttgggtcaaactccaactgt

SEQ ID NO: 3593663 - DNA, 25 bp, Homo sapien
taatctgaaagtcgagcttgactcc

SEQ ID NO: 3593664 - DNA, 25 bp, Homo sapien
gactggcatgggcaatgactgacaa

SEQ ID NO: 3593665 - DNA, 25 bp, Homo sapien
gcttgactccacatgttagctcgag

SEQ ID NO: 3593666 - DNA, 25 bp, Homo sapien
tccctgggaattagtagcagcaata

SEQ ID NO: 3593667 - DNA, 25 bp, Homo sapien
cttcagctatttgcttgggaaagcc

SEQ ID NO: 3593668 - DNA, 25 bp, Homo sapien
caaaaacagcatcaatctttgagtc

SEQ ID NO: 3593669 - DNA, 25 bp, Homo sapien
ctggaaagtcttcagctatttgctt

SEQ ID NO: 3593670 - DNA, 25 bp, Homo sapien
acagcatcaatctttgagtcaatcc

SEQ ID NO: 3593671 - DNA, 25 bp, Homo sapien
gaaacctagggtgtggatgcctctt

SEQ ID NO: 3593672 - DNA, 25 bp, Homo sapien
cctctgatagcccagaattgatttc

SEQ ID NO: 3593673 - DNA, 25 bp, Homo sapien
tgcatcgattttcctcacggttgga

SEQ ID NO: 3593674 - DNA, 25 bp, Homo sapien
tcttgggtatccagctcgtacctca

SEQ ID NO: 3593675 - DNA, 25 bp, Homo sapien
ctgttaaatataaataattcagagt

SEQ ID NO: 3593676 - DNA, 25 bp, Homo sapien
gttaaatataaataattcagagtca

SEQ ID NO: 3593677 - DNA, 25 bp, Homo sapien
ttaaatataaataattcagagtcat

SEQ ID NO: 3593678 - DNA, 25 bp, Homo sapien
tgttaaatataaataattcagagtc

SEQ ID NO: 3593679 - DNA, 25 bp, Homo sapien
ccttgctagtaacttcatatgcggc

SEQ ID NO: 3593680 - DNA, 25 bp, Homo sapien
gtaacttcatatgcggcatccacgc

SEQ ID NO: 3593681 - DNA, 25 bp, Homo sapien
aaaatgaaaacgaggtccttgctag

SEQ ID NO: 3593682 - DNA, 25 bp, Homo sapien
aacgaggtccttgctagtaacttca

SEQ ID NO: 3593683 - DNA, 25 bp, Homo sapien
gaagagatcaaatgcaattcaggtt

SEQ ID NO: 3593684 - DNA, 25 bp, Homo sapien
atgaagagatcaaatgcaattcagg

SEQ ID NO: 3593685 - DNA, 25 bp, Homo sapien
ggaagagatggccaaaatgaagaga

SEQ ID NO: 3593686 - DNA, 25 bp, Homo sapien
aggaagagatggccaaaatgaagag

SEQ ID NO: 3593687 - DNA, 25 bp, Homo sapien
tgacagcatcaaaggacaaagcagg

SEQ ID NO: 3593688 - DNA, 25 bp, Homo sapien
gacagcatcaaaggacaaagcagga

SEQ ID NO: 3593689 - DNA, 25 bp, Homo sapien
gctggcgtcccaggttctggaggga

SEQ ID NO: 3593690 - DNA, 25 bp, Homo sapien
tctggagggacaggttccgtgggta

SEQ ID NO: 3593691 - DNA, 25 bp, Homo sapien
tggcgtcccaggttctggagggaca

SEQ ID NO: 3593692 - DNA, 25 bp, Homo sapien
ggctggcgtcccaggttctggaggg

SEQ ID NO: 3593693 - DNA, 25 bp, Homo sapien
tatcatcttgagacaggcggaaccg

SEQ ID NO: 3593694 - DNA, 25 bp, Homo sapien
acaggcggaaccgagtcaggtctgt

SEQ ID NO: 3593695 - DNA, 25 bp, Homo sapien
tttatatcatcttgagacaggcgga

SEQ ID NO: 3593696 - DNA, 25 bp, Homo sapien
gagtgagtgatagagtgggtacatc

SEQ ID NO: 3593697 - DNA, 25 bp, Homo sapien
tcatgagcagcaacgagaaataaat

SEQ ID NO: 3593698 - DNA, 25 bp, Homo sapien
taattgaacaattgactaattacac

SEQ ID NO: 3593699 - DNA, 25 bp, Homo sapien
gttaattgaacaattgactaattac

SEQ ID NO: 3593700 - DNA, 25 bp, Homo sapien
tgaacaattgactaattacacactt

SEQ ID NO: 3593701 - DNA, 25 bp, Homo sapien
attgaacaattgactaattacacac

SEQ ID NO: 3593702 - DNA, 25 bp, Homo sapien
tcaaagtgggcatctccattaatcc

SEQ ID NO: 3593703 - DNA, 25 bp, Homo sapien
catcaaagtgggcatctccattaat

SEQ ID NO: 3593704 - DNA, 25 bp, Homo sapien
aagtgggcatctccattaatccctg

SEQ ID NO: 3593705 - DNA, 25 bp, Homo sapien
atcatcaaagtgggcatctccatta

SEQ ID NO: 3593706 - DNA, 25 bp, Homo sapien
ggcaaatctggtgtataattcacaa

SEQ ID NO: 3593707 - DNA, 25 bp, Homo sapien
cttcatacagcctggagaatgtgag

SEQ ID NO: 3593708 - DNA, 25 bp, Homo sapien
gcaaatctggtgtataattcacaat

SEQ ID NO: 3593709 - DNA, 25 bp, Homo sapien
caaatctggtgtataattcacaatc

SEQ ID NO: 3593710 - DNA, 25 bp, Homo sapien
gttttcctccacttcgggatgccag

SEQ ID NO: 3593711 - DNA, 25 bp, Homo sapien
catcttttttgaggtcgtagtagtt

SEQ ID NO: 3593712 - DNA, 25 bp, Homo sapien
ctttctcctaacaaactgtttcaca

SEQ ID NO: 3593713 - DNA, 25 bp, Homo sapien
cacctccagagtgtcggagtccagc

SEQ ID NO: 3593714 - DNA, 25 bp, Homo sapien
gaggtcgtagtagttttctagatat

SEQ ID NO: 3593715 - DNA, 25 bp, Homo sapien
ttgcagctccatccaatggataggc

SEQ ID NO: 3593716 - DNA, 25 bp, Homo sapien
tgcagctccatccaatggataggct

SEQ ID NO: 3593717 - DNA, 25 bp, Homo sapien
gcagctccatccaatggataggctg

SEQ ID NO: 3593718 - DNA, 25 bp, Homo sapien
tgccacgcacagcaacagtaggatt

SEQ ID NO: 3593719 - DNA, 25 bp, Homo sapien
ctgccacgcacagcaacagtaggat

SEQ ID NO: 3593720 - DNA, 25 bp, Homo sapien
gccacgcacagcaacagtaggattg

SEQ ID NO: 3593721 - DNA, 25 bp, Homo sapien
ccacgcacagcaacagtaggattgg

SEQ ID NO: 3593722 - DNA, 25 bp, Homo sapien
gcctgcctccttgtaggtccaacct

SEQ ID NO: 3593723 - DNA, 25 bp, Homo sapien
tctctatgccttgctgtcttgcctg

SEQ ID NO: 3593724 - DNA, 25 bp, Homo sapien
tccactggctttacttagctctatg

SEQ ID NO: 3593725 - DNA, 25 bp, Homo sapien
gctctatgttgtctctatgccttgc

SEQ ID NO: 3593726 - DNA, 25 bp, Homo sapien
ctctaagtagtggtacactgaggac

SEQ ID NO: 3593727 - DNA, 25 bp, Homo sapien
ttaggaagcaacttacagagcatgc

SEQ ID NO: 3593728 - DNA, 25 bp, Homo sapien
tagtagagtcaagcaagaatggaca

SEQ ID NO: 3593729 - DNA, 25 bp, Homo sapien
aatttctcagtccaaggatgttagg

SEQ ID NO: 3593730 - DNA, 25 bp, Homo sapien
catattcaaattggttagatccttg

SEQ ID NO: 3593731 - DNA, 25 bp, Homo sapien
ttttggtgatacgttggagtaggaa

SEQ ID NO: 3593732 - DNA, 25 bp, Homo sapien
tagatccttggaagaaatagtagta

SEQ ID NO: 3593733 - DNA, 25 bp, Homo sapien
caaaccagctattgcttttcagtgt

SEQ ID NO: 3593734 - DNA, 25 bp, Homo sapien
actccaagtggaggactcatgaaac

SEQ ID NO: 3593735 - DNA, 25 bp, Homo sapien
taccaacagccagtcatactccaag

SEQ ID NO: 3593736 - DNA, 25 bp, Homo sapien
gactcatgaaacaggatattggacc

SEQ ID NO: 3593737 - DNA, 25 bp, Homo sapien
caggatattggacccagctagggca

SEQ ID NO: 3593738 - DNA, 25 bp, Homo sapien
tgagggcctatcagggcagaaggga

SEQ ID NO: 3593739 - DNA, 25 bp, Homo sapien
acccacccgcagtccccagtccatg

SEQ ID NO: 3593740 - DNA, 25 bp, Homo sapien
tccatgagggcctatcagggcagaa

SEQ ID NO: 3593741 - DNA, 25 bp, Homo sapien
taacccacccgcagtccccagtcca

SEQ ID NO: 3593742 - DNA, 25 bp, Homo sapien
ccttggaagttcttggtaatcagtt

SEQ ID NO: 3593743 - DNA, 25 bp, Homo sapien
ttgggataaccagggtccatcatct

SEQ ID NO: 3593744 - DNA, 25 bp, Homo sapien
catcaattttaggcccgattccttg

SEQ ID NO: 3593745 - DNA, 25 bp, Homo sapien
taaccagggtccatcatctgtctcc

SEQ ID NO: 3593746 - DNA, 25 bp, Homo sapien
tggtcttaaattgctaattaaccag

SEQ ID NO: 3593747 - DNA, 25 bp, Homo sapien
aaacgtgggttaaaaacagctgcat

SEQ ID NO: 3593748 - DNA, 25 bp, Homo sapien
tcttgggataatttggctctggtct

SEQ ID NO: 3593749 - DNA, 25 bp, Homo sapien
tggttatctacaaagaagtaggtcc

SEQ ID NO: 3593750 - DNA, 25 bp, Homo sapien
cagcttcaatgccagatggcaaggt

SEQ ID NO: 3593751 - DNA, 25 bp, Homo sapien
cagatggcaaggttggccataagga

SEQ ID NO: 3593752 - DNA, 25 bp, Homo sapien
tgccagatggcaaggttggccataa

SEQ ID NO: 3593753 - DNA, 25 bp, Homo sapien
tcaatgccagatggcaaggttggcc

SEQ ID NO: 3593754 - DNA, 25 bp, Homo sapien
accaacatctgcttcagtctgtgtt

SEQ ID NO: 3593755 - DNA, 25 bp, Homo sapien
caccaacatctgcttcagtctgtgt

SEQ ID NO: 3593756 - DNA, 25 bp, Homo sapien
ctgcttcaaaacctttaagatctcc

SEQ ID NO: 3593757 - DNA, 25 bp, Homo sapien
ctgtctcctgcttcaaaacctttaa

SEQ ID NO: 3593758 - DNA, 25 bp, Homo sapien
tgtctcctgcttcaaaacctttaag

SEQ ID NO: 3593759 - DNA, 25 bp, Homo sapien
cttcaaaacctttaagatctcctca

SEQ ID NO: 3593760 - DNA, 25 bp, Homo sapien
ccaagttcctgcttacaagtttcat

SEQ ID NO: 3593761 - DNA, 25 bp, Homo sapien
acagaatcgagtccaagttcctgct

SEQ ID NO: 3593762 - DNA, 25 bp, Homo sapien
caagttcctgcttacaagtttcatc

SEQ ID NO: 3593763 - DNA, 25 bp, Homo sapien
tccaagttcctgcttacaagtttca

SEQ ID NO: 3593764 - DNA, 25 bp, Homo sapien
tcttatttcccacggtagtgacagc

SEQ ID NO: 3593765 - DNA, 25 bp, Homo sapien
atttcccacggtagtgacagcatca

SEQ ID NO: 3593766 - DNA, 25 bp, Homo sapien
aaagatcttatttcccacggtagtg

SEQ ID NO: 3593767 - DNA, 25 bp, Homo sapien
gatcttatttcccacggtagtgaca

SEQ ID NO: 3593768 - DNA, 25 bp, Homo sapien
gagagctggttctgaattgtcagga

SEQ ID NO: 3593769 - DNA, 25 bp, Homo sapien
ttggcaagcgttggttctcttttgg

SEQ ID NO: 3593770 - DNA, 25 bp, Homo sapien
ttgtcaggatttggcaagcgttggt

SEQ ID NO: 3593771 - DNA, 25 bp, Homo sapien
caggatttggcaagcgttggttctc

SEQ ID NO: 3593772 - DNA, 25 bp, Homo sapien
tcatcagcagagaggcgaaatgtgt

SEQ ID NO: 3593773 - DNA, 25 bp, Homo sapien
gaacattacggcctttggatcacta

SEQ ID NO: 3593774 - DNA, 25 bp, Homo sapien
tgatgtcaacatatttgtaggtggg

SEQ ID NO: 3593775 - DNA, 25 bp, Homo sapien
tgaatgccacgtatgtcatcagcag

SEQ ID NO: 3593776 - DNA, 25 bp, Homo sapien
ccaatctcgtgaacagcagtgagga

SEQ ID NO: 3593777 - DNA, 25 bp, Homo sapien
tggccaatctcgtgaacagcagtga

SEQ ID NO: 3593778 - DNA, 25 bp, Homo sapien
gaatggccaatctcgtgaacagcag

SEQ ID NO: 3593779 - DNA, 25 bp, Homo sapien
ctaaggaatggccaatctcgtgaac

SEQ ID NO: 3593780 - DNA, 25 bp, Homo sapien
gaattcgtcctcatcgaaatgtgca

SEQ ID NO: 3593781 - DNA, 25 bp, Homo sapien
ggattccacctttgccatcaaaagc

SEQ ID NO: 3593782 - DNA, 25 bp, Homo sapien
caaaagcatgggctaggattccacc

SEQ ID NO: 3593783 - DNA, 25 bp, Homo sapien
tgaatgtgtagtccagaattcgtcc

SEQ ID NO: 3593784 - DNA, 25 bp, Homo sapien
aagaaaattagtccttctatacatc

SEQ ID NO: 3593785 - DNA, 25 bp, Homo sapien
aaagaaaattagtccttctatacat

SEQ ID NO: 3593786 - DNA, 25 bp, Homo sapien
gaaagaaaattagtccttctataca

SEQ ID NO: 3593787 - DNA, 25 bp, Homo sapien
ccatgcctgtgttaatcttgctgaa

SEQ ID NO: 3593788 - DNA, 25 bp, Homo sapien
gaaagctttccggattgcgtagtca

SEQ ID NO: 3593789 - DNA, 25 bp, Homo sapien
acattactccatacttggaaagctt

SEQ ID NO: 3593790 - DNA, 25 bp, Homo sapien
acatcctcacggttcatgtcaggtg

SEQ ID NO: 3593791 - DNA, 25 bp, Homo sapien
gaaatgatggacatcggggactcca

SEQ ID NO: 3593792 - DNA, 25 bp, Homo sapien
tcgaggtgcgtgcatcatctccagg

SEQ ID NO: 3593793 - DNA, 25 bp, Homo sapien
tctccagggtagatgtgtccagttg

SEQ ID NO: 3593794 - DNA, 25 bp, Homo sapien
agttgcccggtcactttcagaccca

SEQ ID NO: 3593795 - DNA, 25 bp, Homo sapien
tccttcattaagtttccactatatt

SEQ ID NO: 3593796 - DNA, 25 bp, Homo sapien
ccttcattaagtttccactatattt

SEQ ID NO: 3593797 - DNA, 25 bp, Homo sapien
tcattaagtttccactatatttcat

SEQ ID NO: 3593798 - DNA, 25 bp, Homo sapien
tttccttcattaagtttccactata

SEQ ID NO: 3593799 - DNA, 25 bp, Homo sapien
tttgtcactggaagtttgtttatct

SEQ ID NO: 3593800 - DNA, 25 bp, Homo sapien
gcctgcaggagcagtattagaagaa

SEQ ID NO: 3593801 - DNA, 25 bp, Homo sapien
cctgcaggagcagtattagaagaaa

SEQ ID NO: 3593802 - DNA, 25 bp, Homo sapien
ctgcaggagcagtattagaagaaac

SEQ ID NO: 3593803 - DNA, 25 bp, Homo sapien
ggcctgcaggagcagtattagaaga

SEQ ID NO: 3593804 - DNA, 25 bp, Homo sapien
tctaaacggatcaattcagtttact

SEQ ID NO: 3593805 - DNA, 25 bp, Homo sapien
aacggatcaattcagtttactgtgt

SEQ ID NO: 3593806 - DNA, 25 bp, Homo sapien
tgtaaacttctaaacggatcaattc

SEQ ID NO: 3593807 - DNA, 25 bp, Homo sapien
taaacttctaaacggatcaattcag

SEQ ID NO: 3593808 - DNA, 25 bp, Homo sapien
aaacagtctgctggctgcttgagtg

SEQ ID NO: 3593809 - DNA, 25 bp, Homo sapien
ctcagtggcctgggaaacagtctgc

SEQ ID NO: 3593810 - DNA, 25 bp, Homo sapien
ggaaacagtctgctggctgcttgag

SEQ ID NO: 3593811 - DNA, 25 bp, Homo sapien
acagtctgctggctgcttgagtgag

SEQ ID NO: 3593812 - DNA, 25 bp, Homo sapien
tcctggcacctgcaagagcaaaggg

SEQ ID NO: 3593813 - DNA, 25 bp, Homo sapien
tgctaccacccttgggaacccagat

SEQ ID NO: 3593814 - DNA, 25 bp, Homo sapien
tactcatagaacttggaagggtggc

SEQ ID NO: 3593815 - DNA, 25 bp, Homo sapien
gagccctagcagctgaagtcacctt

SEQ ID NO: 3593816 - DNA, 25 bp, Homo sapien
cagacttagatgcacgatgttttcc

SEQ ID NO: 3593817 - DNA, 25 bp, Homo sapien
ggctgcagacttagatgcacgatgt

SEQ ID NO: 3593818 - DNA, 25 bp, Homo sapien
agatgcacgatgttttcctctcggg

SEQ ID NO: 3593819 - DNA, 25 bp, Homo sapien
atctggctgcagacttagatgcacg

SEQ ID NO: 3593820 - DNA, 25 bp, Homo sapien
atgcccttgctgcatggatgctgct

SEQ ID NO: 3593821 - DNA, 25 bp, Homo sapien
tgctgctgctttaaaccttggatga

SEQ ID NO: 3593822 - DNA, 25 bp, Homo sapien
ctctgtccccaaacgctgaccatgc

SEQ ID NO: 3593823 - DNA, 25 bp, Homo sapien
gctttaaaccttggatgaacttcac

SEQ ID NO: 3593824 - DNA, 25 bp, Homo sapien
ccctagacattcaccaaaaaatgtg

SEQ ID NO: 3593825 - DNA, 25 bp, Homo sapien
ttccctagacattcaccaaaaaatg

SEQ ID NO: 3593826 - DNA, 25 bp, Homo sapien
tcttccctagacattcaccaaaaaa

SEQ ID NO: 3593827 - DNA, 25 bp, Homo sapien
tccctagacattcaccaaaaaatgt

SEQ ID NO: 3593828 - DNA, 25 bp, Homo sapien
gcaaggaacttccttgtttctaata

SEQ ID NO: 3593829 - DNA, 25 bp, Homo sapien
caagtccatcagatgattagtaagc

SEQ ID NO: 3593830 - DNA, 25 bp, Homo sapien
aagtccatcagatgattagtaagcc

SEQ ID NO: 3593831 - DNA, 25 bp, Homo sapien
tgggattttccaacccaagtcagct

SEQ ID NO: 3593832 - DNA, 25 bp, Homo sapien
cggcacaccgacctagagggcacga

SEQ ID NO: 3593833 - DNA, 25 bp, Homo sapien
tcgtgccctctaggtcggtgtgccg

SEQ ID NO: 3593834 - DNA, 25 bp, Homo sapien
acaatctgatatctggtcttctaga

SEQ ID NO: 3593835 - DNA, 25 bp, Homo sapien
cttcattaacaatctgatatctggt

SEQ ID NO: 3593836 - DNA, 25 bp, Homo sapien
tctggtcttctagattttttctcct

SEQ ID NO: 3593837 - DNA, 25 bp, Homo sapien
taacaatctgatatctggtcttcta

SEQ ID NO: 3593838 - DNA, 25 bp, Homo sapien
cttctgtgtagcaaaggaagccatc

SEQ ID NO: 3593839 - DNA, 25 bp, Homo sapien
ggatatgaccctaaaaccacaggca

SEQ ID NO: 3593840 - DNA, 25 bp, Homo sapien
gtaaaaatagacgagtgagacacca

SEQ ID NO: 3593841 - DNA, 25 bp, Homo sapien
cagagtcaacttatggaatgggaga

SEQ ID NO: 3593842 - DNA, 25 bp, Homo sapien
gtctctgagcacaatagttcttccc

SEQ ID NO: 3593843 - DNA, 25 bp, Homo sapien
tcaagggatcacaatctagtagact

SEQ ID NO: 3593844 - DNA, 25 bp, Homo sapien
tattcaataagtgccaagcaccctc

SEQ ID NO: 3593845 - DNA, 25 bp, Homo sapien
ctccccaagtatcaataggcactgt

SEQ ID NO: 3593846 - DNA, 25 bp, Homo sapien
ttatgaaaaagggatgccatggcct

SEQ ID NO: 3593847 - DNA, 25 bp, Homo sapien
gaagggcacatacatctgaatatcc

SEQ ID NO: 3593848 - DNA, 25 bp, Homo sapien
tgtcttatatgagagcagactttga

SEQ ID NO: 3593849 - DNA, 25 bp, Homo sapien
tcatgctatacaagtctttagaaaa

SEQ ID NO: 3593850 - DNA, 25 bp, Homo sapien
tatgctctcattgacagaccatgtg

SEQ ID NO: 3593851 - DNA, 25 bp, Homo sapien
tggttccagccacgcatagtcatat

SEQ ID NO: 3593852 - DNA, 25 bp, Homo sapien
tgtgggaagtatcatcaaccattgc

SEQ ID NO: 3593853 - DNA, 25 bp, Homo sapien
ttgtacagcaacaagaatcagatgc

SEQ ID NO: 3593854 - DNA, 25 bp, Homo sapien
caatacggttactccagatgctgta

SEQ ID NO: 3593855 - DNA, 25 bp, Homo sapien
gacgcgaacaatacggttactccag

SEQ ID NO: 3593856 - DNA, 25 bp, Homo sapien
atggaatttgctggcatgacgcgaa

SEQ ID NO: 3593857 - DNA, 25 bp, Homo sapien
ctggcatgacgcgaacaatacggtt

SEQ ID NO: 3593858 - DNA, 25 bp, Homo sapien
ctgtatgggtccgttgaaaaaatag

SEQ ID NO: 3593859 - DNA, 25 bp, Homo sapien
tcaaactgtatgggtccgttgaaaa

SEQ ID NO: 3593860 - DNA, 25 bp, Homo sapien
tatgggtccgttgaaaaaatagata

SEQ ID NO: 3593861 - DNA, 25 bp, Homo sapien
atgggtccgttgaaaaaatagatat

SEQ ID NO: 3593862 - DNA, 25 bp, Homo sapien
ctcagattgcgacaatgaactccag

SEQ ID NO: 3593863 - DNA, 25 bp, Homo sapien
cgagctcagattgcgacaatgaact

SEQ ID NO: 3593864 - DNA, 25 bp, Homo sapien
cagcgagctcagattgcgacaatga

SEQ ID NO: 3593865 - DNA, 25 bp, Homo sapien
tgcagcgagctcagattgcgacaat

SEQ ID NO: 3593866 - DNA, 25 bp, Homo sapien
tcttctattagtctcggatagtctt

SEQ ID NO: 3593867 - DNA, 25 bp, Homo sapien
tattagtctcggatagtctttatcc

SEQ ID NO: 3593868 - DNA, 25 bp, Homo sapien
cttcttctattagtctcggatagtc

SEQ ID NO: 3593869 - DNA, 25 bp, Homo sapien
agtcttcttctattagtctcggata

SEQ ID NO: 3593870 - DNA, 25 bp, Homo sapien
ttggaagacccagttcagatatttt

SEQ ID NO: 3593871 - DNA, 25 bp, Homo sapien
cacttatcttcttaacttcttttgg

SEQ ID NO: 3593872 - DNA, 25 bp, Homo sapien
acaggagagtcttgcctgtatcctc

SEQ ID NO: 3593873 - DNA, 25 bp, Homo sapien
ctgtatcctcaaagtgaacagctgc

SEQ ID NO: 3593874 - DNA, 25 bp, Homo sapien
gttctggccaaaatgatttcgttaa

SEQ ID NO: 3593875 - DNA, 25 bp, Homo sapien
catatgcagcatcaatacggttggg

SEQ ID NO: 3593876 - DNA, 25 bp, Homo sapien
acagctccgcatcaacctgctgagg

SEQ ID NO: 3593877 - DNA, 25 bp, Homo sapien
catgagaagggtgctcatatgcagc

SEQ ID NO: 3593878 - DNA, 25 bp, Homo sapien
ttaaagatcattgtttctcctcgga

SEQ ID NO: 3593879 - DNA, 25 bp, Homo sapien
tgtctggcgtttttggatgtttagg

SEQ ID NO: 3593880 - DNA, 25 bp, Homo sapien
taatggcatcaagggataaggaagg

SEQ ID NO: 3593881 - DNA, 25 bp, Homo sapien
taaggaagggtcacatttgtctggc

SEQ ID NO: 3593882 - DNA, 25 bp, Homo sapien
cagtccctgagtcataacaatgtag

SEQ ID NO: 3593883 - DNA, 25 bp, Homo sapien
caaatacgaggagttatagtctgca

SEQ ID NO: 3593884 - DNA, 25 bp, Homo sapien
acaggccacttgagaggtttctact

SEQ ID NO: 3593885 - DNA, 25 bp, Homo sapien
gctacttaaactctacagggctttg

SEQ ID NO: 3593886 - DNA, 25 bp, Homo sapien
cataaagtggcttttgccggtgtag

SEQ ID NO: 3593887 - DNA, 25 bp, Homo sapien
tagataggaaacatgagtgctccag

SEQ ID NO: 3593888 - DNA, 25 bp, Homo sapien
tcaagacctaaggagtggccgaact

SEQ ID NO: 3593889 - DNA, 25 bp, Homo sapien
tacatcgtcatcaggaagcataaag

SEQ ID NO: 3593890 - DNA, 25 bp, Homo sapien
tgggcatctcctccataatttggcc

SEQ ID NO: 3593891 - DNA, 25 bp, Homo sapien
atcaaatgggtagaagtcgccatgc

SEQ ID NO: 3593892 - DNA, 25 bp, Homo sapien
tcaaatgggtagaagtcgccatgct

SEQ ID NO: 3593893 - DNA, 25 bp, Homo sapien
tttggaactacttgtccaggtttca

SEQ ID NO: 3593894 - DNA, 25 bp, Homo sapien
aaattcagaggagttacatcggacc

SEQ ID NO: 3593895 - DNA, 25 bp, Homo sapien
tgaatgccttttcgacttcagaatg

SEQ ID NO: 3593896 - DNA, 25 bp, Homo sapien
ttccaaaagagatcatgatgtcagc

SEQ ID NO: 3593897 - DNA, 25 bp, Homo sapien
gcaatgccatcgtgaagtctggtaa

SEQ ID NO: 3593898 - DNA, 25 bp, Homo sapien
tcaggaaccccgcatcttggctttt

SEQ ID NO: 3593899 - DNA, 25 bp, Homo sapien
tctcggagcctctcagtcatggagc

SEQ ID NO: 3593900 - DNA, 25 bp, Homo sapien
taaggtgttatcgtcaagtttgcca

SEQ ID NO: 3593901 - DNA, 25 bp, Homo sapien
agtttgccagtcacctctaagccga

SEQ ID NO: 3593902 - DNA, 25 bp, Homo sapien
catcaggattggcaagatactctac

SEQ ID NO: 3593903 - DNA, 25 bp, Homo sapien
cgcatcatcaggattggcaagatac

SEQ ID NO: 3593904 - DNA, 25 bp, Homo sapien
atcatcaggattggcaagatactct

SEQ ID NO: 3593905 - DNA, 25 bp, Homo sapien
catcatcaggattggcaagatactc

SEQ ID NO: 3593906 - DNA, 25 bp, Homo sapien
aactggaggtcttcctcagacaaat

SEQ ID NO: 3593907 - DNA, 25 bp, Homo sapien
ctggaggtcttcctcagacaaatca

SEQ ID NO: 3593908 - DNA, 25 bp, Homo sapien
ctctgcaaactggaggtcttcctca

SEQ ID NO: 3593909 - DNA, 25 bp, Homo sapien
gaggtcttcctcagacaaatcatct

SEQ ID NO: 3593910 - DNA, 25 bp, Homo sapien
ggcagggcccgacaatgagtccagc

SEQ ID NO: 3593911 - DNA, 25 bp, Homo sapien
agggcccgacaatgagtccagctca

SEQ ID NO: 3593912 - DNA, 25 bp, Homo sapien
cgacaatgagtccagctcaagaaga

SEQ ID NO: 3593913 - DNA, 25 bp, Homo sapien
ggcccgacaatgagtccagctcaag

SEQ ID NO: 3593914 - DNA, 25 bp, Homo sapien
cttgaatggtgatgcctggggactg

SEQ ID NO: 3593915 - DNA, 25 bp, Homo sapien
gaatggtgatgcctggggactgttg

SEQ ID NO: 3593916 - DNA, 25 bp, Homo sapien
tgaatggtgatgcctggggactgtt

SEQ ID NO: 3593917 - DNA, 25 bp, Homo sapien
ttgaatggtgatgcctggggactgt

SEQ ID NO: 3593918 - DNA, 25 bp, Homo sapien
tgtacataaactggacaaagcaatt

SEQ ID NO: 3593919 - DNA, 25 bp, Homo sapien
ttgaccactcttcaagttcaatgac

SEQ ID NO: 3593920 - DNA, 25 bp, Homo sapien
tctttgcctttggaatcatttgtcc

SEQ ID NO: 3593921 - DNA, 25 bp, Homo sapien
gagatttctgtaactttgaccactc

SEQ ID NO: 3593922 - DNA, 25 bp, Homo sapien
taaaagggcccatcaaatggggaga

SEQ ID NO: 3593923 - DNA, 25 bp, Homo sapien
gagaaaaggcatgagctggctgtct

SEQ ID NO: 3593924 - DNA, 25 bp, Homo sapien
gcatgagctggctgtctaaaagggc

SEQ ID NO: 3593925 - DNA, 25 bp, Homo sapien
ggctgtctaaaagggcccatcaaat

SEQ ID NO: 3593926 - DNA, 25 bp, Homo sapien
cttgaatgctgcttggacggtaagg

SEQ ID NO: 3593927 - DNA, 25 bp, Homo sapien
tgtaattcactattctgaccgacat

SEQ ID NO: 3593928 - DNA, 25 bp, Homo sapien
cacagtttcagagggtaaatctggc

SEQ ID NO: 3593929 - DNA, 25 bp, Homo sapien
ttggacggtaaggtccacagtttca

SEQ ID NO: 3593930 - DNA, 25 bp, Homo sapien
caccgctgcacgcatgcctcttctg

SEQ ID NO: 3593931 - DNA, 25 bp, Homo sapien
tgcctgaattgaccctccactctcc

SEQ ID NO: 3593932 - DNA, 25 bp, Homo sapien
ctgcctgaattgaccctccactctc

SEQ ID NO: 3593933 - DNA, 25 bp, Homo sapien
tagcctggggtcaccgctgcacgca

SEQ ID NO: 3593934 - DNA, 25 bp, Homo sapien
gcaagcctataacggtcacctttgg

SEQ ID NO: 3593935 - DNA, 25 bp, Homo sapien
taaccagtgtgtaaggagtcactcc

SEQ ID NO: 3593936 - DNA, 25 bp, Homo sapien
tgcataaagctttctggcaagccta

SEQ ID NO: 3593937 - DNA, 25 bp, Homo sapien
gatgttacagtggtcaacagacacg

SEQ ID NO: 3593938 - DNA, 25 bp, Homo sapien
taaaccactcatgacctgagtcttc

SEQ ID NO: 3593939 - DNA, 25 bp, Homo sapien
aaccactcatgacctgagtcttcac

SEQ ID NO: 3593940 - DNA, 25 bp, Homo sapien
aaataaaccactcatgacctgagtc

SEQ ID NO: 3593941 - DNA, 25 bp, Homo sapien
ccttttagttttgctgtctgccata

SEQ ID NO: 3593942 - DNA, 25 bp, Homo sapien
caggtaggaaagtcacctaactgaa

SEQ ID NO: 3593943 - DNA, 25 bp, Homo sapien
cagttcctgttagtggccactctgt

SEQ ID NO: 3593944 - DNA, 25 bp, Homo sapien
tttgacccagttcctgttagtggcc

SEQ ID NO: 3593945 - DNA, 25 bp, Homo sapien
gattcatccggccaccaggtaggaa

SEQ ID NO: 3593946 - DNA, 25 bp, Homo sapien
tgtcatccaccaaacaggtgatttc

SEQ ID NO: 3593947 - DNA, 25 bp, Homo sapien
acatgaccaccaaaggattaattcc

SEQ ID NO: 3593948 - DNA, 25 bp, Homo sapien
cccactggtcaaagtggagagggaa

SEQ ID NO: 3593949 - DNA, 25 bp, Homo sapien
ccaccaaaggattaattccacccag

SEQ ID NO: 3593950 - DNA, 25 bp, Homo sapien
taggaaagctctaacaaggagtgga

SEQ ID NO: 3593951 - DNA, 25 bp, Homo sapien
tgagtaggaaagctctaacaaggag

SEQ ID NO: 3593952 - DNA, 25 bp, Homo sapien
gaaggatgagtaggaaagctctaac

SEQ ID NO: 3593953 - DNA, 25 bp, Homo sapien
gaatggggtgcaaggtaccaggaaa

SEQ ID NO: 3593954 - DNA, 25 bp, Homo sapien
tatgtattgcctttgaggtgtctat

SEQ ID NO: 3593955 - DNA, 25 bp, Homo sapien
catgaatatgtattgcctttgaggt

SEQ ID NO: 3593956 - DNA, 25 bp, Homo sapien
tgaatatgtattgcctttgaggtgt

SEQ ID NO: 3593957 - DNA, 25 bp, Homo sapien
tgcatgaatatgtattgcctttgag

SEQ ID NO: 3593958 - DNA, 25 bp, Homo sapien
tcaccaaaataacgaatgcaaaagg

SEQ ID NO: 3593959 - DNA, 25 bp, Homo sapien
cctgcttggccggaactgccatctt

SEQ ID NO: 3593960 - DNA, 25 bp, Homo sapien
ggaaataacattctagcctgcttgg

SEQ ID NO: 3593961 - DNA, 25 bp, Homo sapien
ataggttgaaaaaggagtgcccaca

SEQ ID NO: 3593962 - DNA, 25 bp, Homo sapien
ccagtgttcctccgcatgccgttgg

SEQ ID NO: 3593963 - DNA, 25 bp, Homo sapien
gtcccagtgttcctccgcatgccgt

SEQ ID NO: 3593964 - DNA, 25 bp, Homo sapien
agtgttcctccgcatgccgttggca

SEQ ID NO: 3593965 - DNA, 25 bp, Homo sapien
gtgttcctccgcatgccgttggcat

SEQ ID NO: 3593966 - DNA, 25 bp, Homo sapien
agagagaagtacctgggttcaggtg

SEQ ID NO: 3593967 - DNA, 25 bp, Homo sapien
aagagagaagtacctgggttcaggt

SEQ ID NO: 3593968 - DNA, 25 bp, Homo sapien
aaagagagaagtacctgggttcagg

SEQ ID NO: 3593969 - DNA, 25 bp, Homo sapien
tctccatgatgggtaaggaaagggt

SEQ ID NO: 3593970 - DNA, 25 bp, Homo sapien
ggtgctgcaacttctggacataaag

SEQ ID NO: 3593971 - DNA, 25 bp, Homo sapien
tactgtaatatggtgttatcagcac

SEQ ID NO: 3593972 - DNA, 25 bp, Homo sapien
gcagtagagatcttgggcattccag

SEQ ID NO: 3593973 - DNA, 25 bp, Homo sapien
catacattggaagttcaagaaccag

SEQ ID NO: 3593974 - DNA, 25 bp, Homo sapien
caccaattcatacattggaagttca

SEQ ID NO: 3593975 - DNA, 25 bp, Homo sapien
caattcatacattggaagttcaaga

SEQ ID NO: 3593976 - DNA, 25 bp, Homo sapien
catcaccaattcatacattggaagt

SEQ ID NO: 3593977 - DNA, 25 bp, Homo sapien
ttcacctgtgacataactttggagt

SEQ ID NO: 3593978 - DNA, 25 bp, Homo sapien
cttctgacaaggcagcaaccttaga

SEQ ID NO: 3593979 - DNA, 25 bp, Homo sapien
actttggagtctcatgggagttcca

SEQ ID NO: 3593980 - DNA, 25 bp, Homo sapien
taacattggactagtcaacatacca

SEQ ID NO: 3593981 - DNA, 25 bp, Homo sapien
caaactcaatttgcaggccatgaga

SEQ ID NO: 3593982 - DNA, 25 bp, Homo sapien
acactgtgcccggttatgtgagact

SEQ ID NO: 3593983 - DNA, 25 bp, Homo sapien
catcgcgtctcatctgctctgaaaa

SEQ ID NO: 3593984 - DNA, 25 bp, Homo sapien
tttgacaacctaccatgagtcaggc

SEQ ID NO: 3593985 - DNA, 25 bp, Homo sapien
tagagtccttcctatgaagtcaaac

SEQ ID NO: 3593986 - DNA, 25 bp, Homo sapien
tacttggtgccaactacactgtaaa

SEQ ID NO: 3593987 - DNA, 25 bp, Homo sapien
taagacctggtgttcgatatatcag

SEQ ID NO: 3593988 - DNA, 25 bp, Homo sapien
tcactatactgcctacaaagaaagc

SEQ ID NO: 3593989 - DNA, 25 bp, Homo sapien
actgctcttgaggaatggggttaaa

SEQ ID NO: 3593990 - DNA, 25 bp, Homo sapien
gaatggggttaaagtctgcttgaag

SEQ ID NO: 3593991 - DNA, 25 bp, Homo sapien
tttagacgtgttaataggaaaagca

SEQ ID NO: 3593992 - DNA, 25 bp, Homo sapien
ctctctatggctgccaataactgct

SEQ ID NO: 3593993 - DNA, 25 bp, Homo sapien
tgctgtaagatgctacaacaaagct

SEQ ID NO: 3593994 - DNA, 25 bp, Homo sapien
tcatatatgtggtggaagaccctct

SEQ ID NO: 3593995 - DNA, 25 bp, Homo sapien
gccacgctcatataataatacccag

SEQ ID NO: 3593996 - DNA, 25 bp, Homo sapien
caaagcttatttaggcagggactat

SEQ ID NO: 3593997 - DNA, 25 bp, Homo sapien
ttccaagaataaagtgacactccct

SEQ ID NO: 3593998 - DNA, 25 bp, Homo sapien
aaacatagtagatggcaaacctgtc

SEQ ID NO: 3593999 - DNA, 25 bp, Homo sapien
gcaagcctgccctctagtgctaaaa

SEQ ID NO: 3594000 - DNA, 25 bp, Homo sapien
gaaaaagaaactagcactccagatg

SEQ ID NO: 3594001 - DNA, 25 bp, Homo sapien
tatcaatctcctgcgtataccaagg

SEQ ID NO: 3594002 - DNA, 25 bp, Homo sapien
tattaagaattattggccccgagga

SEQ ID NO: 3594003 - DNA, 25 bp, Homo sapien
taaagcaagcgtggcctcagtggta

SEQ ID NO: 3594004 - DNA, 25 bp, Homo sapien
gggatgcgacacctacatacacggg

SEQ ID NO: 3594005 - DNA, 25 bp, Homo sapien
tctaagaagaggtgtggctcaatgc

SEQ ID NO: 3594006 - DNA, 25 bp, Homo sapien
tacacgtgggaattgaaaggtttgc

SEQ ID NO: 3594007 - DNA, 25 bp, Homo sapien
ggctcaatgcccatcacatgtaaca

SEQ ID NO: 3594008 - DNA, 25 bp, Homo sapien
tatgagaagtctttcatatgaatga

SEQ ID NO: 3594009 - DNA, 25 bp, Homo sapien
tgacggactttttgccactcaacaa

SEQ ID NO: 3594010 - DNA, 25 bp, Homo sapien
ttgccactcaacaaattcatcaaga

SEQ ID NO: 3594011 - DNA, 25 bp, Homo sapien
ctgacggactttttgccactcaaca

SEQ ID NO: 3594012 - DNA, 25 bp, Homo sapien
gccactcaacaaattcatcaagaag

SEQ ID NO: 3594013 - DNA, 25 bp, Homo sapien
aaaacaaactccccacgagctctgc

SEQ ID NO: 3594014 - DNA, 25 bp, Homo sapien
taaaacaaactccccacgagctctg

SEQ ID NO: 3594015 - DNA, 25 bp, Homo sapien
agaggaatgacccttcctttctttg

SEQ ID NO: 3594016 - DNA, 25 bp, Homo sapien
cagaggaatgacccttcctttcttt

SEQ ID NO: 3594017 - DNA, 25 bp, Homo sapien
tgttcataacacgatactttgattg

SEQ ID NO: 3594018 - DNA, 25 bp, Homo sapien
tgtaccattgatctttgttcataac

SEQ ID NO: 3594019 - DNA, 25 bp, Homo sapien
catagttactaagatcagcatggac

SEQ ID NO: 3594020 - DNA, 25 bp, Homo sapien
ttctaatacattgtaccattgatct

SEQ ID NO: 3594021 - DNA, 25 bp, Homo sapien
gtgagaactataccaataaccctag

SEQ ID NO: 3594022 - DNA, 25 bp, Homo sapien
ggaaaaagcatctgtattcaagata

SEQ ID NO: 3594023 - DNA, 25 bp, Homo sapien
cgcccagctgatatcactgtcttgt

SEQ ID NO: 3594024 - DNA, 25 bp, Homo sapien
gggaagcagctataagcaatgtgct

SEQ ID NO: 3594025 - DNA, 25 bp, Homo sapien
gaatcactgcctatagtagttgcta

SEQ ID NO: 3594026 - DNA, 25 bp, Homo sapien
gttgctatgataaaccttctaaaag

SEQ ID NO: 3594027 - DNA, 25 bp, Homo sapien
tttcagcttaagaccctgtgtaaca

SEQ ID NO: 3594028 - DNA, 25 bp, Homo sapien
gaacacgtcatcatttcagcttaca

SEQ ID NO: 3594029 - DNA, 25 bp, Homo sapien
tcccaagcagaagagctaacataga

SEQ ID NO: 3594030 - DNA, 25 bp, Homo sapien
caatatcaaggcttctctgatcttt

SEQ ID NO: 3594031 - DNA, 25 bp, Homo sapien
gatttagcagtatcaatatcaaggc

SEQ ID NO: 3594032 - DNA, 25 bp, Homo sapien
cagaagagctaacatagatttagca

SEQ ID NO: 3594033 - DNA, 25 bp, Homo sapien
gtggtctcaagatgaaaagctatta

SEQ ID NO: 3594034 - DNA, 25 bp, Homo sapien
gtgtggtctcaagatgaaaagctat

SEQ ID NO: 3594035 - DNA, 25 bp, Homo sapien
tgtggtctcaagatgaaaagctatt

SEQ ID NO: 3594036 - DNA, 25 bp, Homo sapien
tggtctcaagatgaaaagctattaa

SEQ ID NO: 3594037 - DNA, 25 bp, Homo sapien
aatatcattcaactgtgagcgcaaa

SEQ ID NO: 3594038 - DNA, 25 bp, Homo sapien
tatcattcaactgtgagcgcaaaaa

SEQ ID NO: 3594039 - DNA, 25 bp, Homo sapien
attcaactgtgagcgcaaaaagtca

SEQ ID NO: 3594040 - DNA, 25 bp, Homo sapien
tcattcaactgtgagcgcaaaaagt

SEQ ID NO: 3594041 - DNA, 25 bp, Homo sapien
aaaagtgagcgcatttatgaagtta

SEQ ID NO: 3594042 - DNA, 25 bp, Homo sapien
gaaagttcactccaattactttgct

SEQ ID NO: 3594043 - DNA, 25 bp, Homo sapien
tgccctgcatctaccaatgcaataa

SEQ ID NO: 3594044 - DNA, 25 bp, Homo sapien
gagcaaatgaaactaatcacgcctt

SEQ ID NO: 3594045 - DNA, 25 bp, Homo sapien
gccactgccatacttcagcacccat

SEQ ID NO: 3594046 - DNA, 25 bp, Homo sapien
cattcccaaatgccactgccatact

SEQ ID NO: 3594047 - DNA, 25 bp, Homo sapien
aatgccactgccatacttcagcacc

SEQ ID NO: 3594048 - DNA, 25 bp, Homo sapien
attcccaaatgccactgccatactt

SEQ ID NO: 3594049 - DNA, 25 bp, Homo sapien
tctgagagaccatctgactcccttt

SEQ ID NO: 3594050 - DNA, 25 bp, Homo sapien
tagcatctgtccaaactcaggtgag

SEQ ID NO: 3594051 - DNA, 25 bp, Homo sapien
tatgtaaccctggaattagcatctg

SEQ ID NO: 3594052 - DNA, 25 bp, Homo sapien
caaaggcctataatgtgtagtaaca

SEQ ID NO: 3594053 - DNA, 25 bp, Homo sapien
cacgatcatacattttgcgggaaca

SEQ ID NO: 3594054 - DNA, 25 bp, Homo sapien
aaagataactgttgagtactaggct

SEQ ID NO: 3594055 - DNA, 25 bp, Homo sapien
tatatgacaccttgacaagaactgt

SEQ ID NO: 3594056 - DNA, 25 bp, Homo sapien
tacaccatggtatatgtacactatg

SEQ ID NO: 3594057 - DNA, 25 bp, Homo sapien
tcagtaaaagcgtagtgggaaccca

SEQ ID NO: 3594058 - DNA, 25 bp, Homo sapien
tggcagtaataaggtggcagccctg

SEQ ID NO: 3594059 - DNA, 25 bp, Homo sapien
cagtggtaacaaggcactcctatcc

SEQ ID NO: 3594060 - DNA, 25 bp, Homo sapien
cctgcccagcagtcacaagggatat

SEQ ID NO: 3594061 - DNA, 25 bp, Homo sapien
caagacagaccaatccggagacata

SEQ ID NO: 3594062 - DNA, 25 bp, Homo sapien
cggagacataaaccccttaacagag

SEQ ID NO: 3594063 - DNA, 25 bp, Homo sapien
tccatcagaaagacatagcaatcct

SEQ ID NO: 3594064 - DNA, 25 bp, Homo sapien
gactactccattcgaagacaacaga

SEQ ID NO: 3594065 - DNA, 25 bp, Homo sapien
ggtttatggttacagcaaggtgccc

SEQ ID NO: 3594066 - DNA, 25 bp, Homo sapien
tacatgtgcctcttaatgggaacga

SEQ ID NO: 3594067 - DNA, 25 bp, Homo sapien
tgagcataattaccagcctgtggcc

SEQ ID NO: 3594068 - DNA, 25 bp, Homo sapien
gcaggcgagtgagccagcatatcca

SEQ ID NO: 3594069 - DNA, 25 bp, Homo sapien
gtactgtagcctggcgacaaagcaa

SEQ ID NO: 3594070 - DNA, 25 bp, Homo sapien
actgtactgtagcctggcgacaaag

SEQ ID NO: 3594071 - DNA, 25 bp, Homo sapien
cgggcgtggaggcacacgcccgtag

SEQ ID NO: 3594072 - DNA, 25 bp, Homo sapien
agccgggcgtggaggcacacgcccg

SEQ ID NO: 3594073 - DNA, 25 bp, Homo sapien
cttccttggtaaaaaatcccatgct

SEQ ID NO: 3594074 - DNA, 25 bp, Homo sapien
tgtaatgaagtcattccctttaacc

SEQ ID NO: 3594075 - DNA, 25 bp, Homo sapien
tgaagtcattccctttaaccattct

SEQ ID NO: 3594076 - DNA, 25 bp, Homo sapien
cattccctttaaccattcttccttg

SEQ ID NO: 3594077 - DNA, 25 bp, Homo sapien
atttccacgctaaaactaacataat

SEQ ID NO: 3594078 - DNA, 25 bp, Homo sapien
caatttccacgctaaaactaacata

SEQ ID NO: 3594079 - DNA, 25 bp, Homo sapien
ttccacgctaaaactaacataataa

SEQ ID NO: 3594080 - DNA, 25 bp, Homo sapien
tccaatttccacgctaaaactaaca

SEQ ID NO: 3594081 - DNA, 25 bp, Homo sapien
attttcaggttcaacaccaatgtct

SEQ ID NO: 3594082 - DNA, 25 bp, Homo sapien
tctggccctacaacttcatcaggac

SEQ ID NO: 3594083 - DNA, 25 bp, Homo sapien
tcaggttcaacaccaatgtcttcac

SEQ ID NO: 3594084 - DNA, 25 bp, Homo sapien
tccattccttctggccctacaactt

SEQ ID NO: 3594085 - DNA, 25 bp, Homo sapien
gtttttggtagagagagtgtttcac

SEQ ID NO: 3594086 - DNA, 25 bp, Homo sapien
aggcgtggtggcacatgcctatatt

SEQ ID NO: 3594087 - DNA, 25 bp, Homo sapien
cacacccggctgaaaccccatttct

SEQ ID NO: 3594088 - DNA, 25 bp, Homo sapien
agtgtttcaccatgttaaccaggat

SEQ ID NO: 3594089 - DNA, 25 bp, Homo sapien
gattccaacagtaaagttactgccc

SEQ ID NO: 3594090 - DNA, 25 bp, Homo sapien
tacctcaagttcaaagtatactact

SEQ ID NO: 3594091 - DNA, 25 bp, Homo sapien
tctggtctagaaagaatctgttctg

SEQ ID NO: 3594092 - DNA, 25 bp, Homo sapien
aaattgtactttgggatcactcagc

SEQ ID NO: 3594093 - DNA, 25 bp, Homo sapien
agcatatgactagtatcttcttata

SEQ ID NO: 3594094 - DNA, 25 bp, Homo sapien
tttaaagcatatgactagtatcttc

SEQ ID NO: 3594095 - DNA, 25 bp, Homo sapien
taaagcatatgactagtatcttctt

SEQ ID NO: 3594096 - DNA, 25 bp, Homo sapien
ttttaaagcatatgactagtatctt

SEQ ID NO: 3594097 - DNA, 25 bp, Homo sapien
cacttattagtctagcagggggttg

SEQ ID NO: 3594098 - DNA, 25 bp, Homo sapien
acttattagtctagcagggggttgg

SEQ ID NO: 3594099 - DNA, 25 bp, Homo sapien
ctctccacttattagtctagcaggg

SEQ ID NO: 3594100 - DNA, 25 bp, Homo sapien
ttcctctccacttattagtctagca

SEQ ID NO: 3594101 - DNA, 25 bp, Homo sapien
tatcagtaagttatttccgcacatt

SEQ ID NO: 3594102 - DNA, 25 bp, Homo sapien
cataagaattatcggctaacaaaac

SEQ ID NO: 3594103 - DNA, 25 bp, Homo sapien
tagaaaacacacagacgcctaagat

SEQ ID NO: 3594104 - DNA, 25 bp, Homo sapien
tgcaacttgaaacagtagtctatac

SEQ ID NO: 3594105 - DNA, 25 bp, Homo sapien
gactcttaacgtgggcggctcttct

SEQ ID NO: 3594106 - DNA, 25 bp, Homo sapien
tagtctctccataaacgccagcgtg

SEQ ID NO: 3594107 - DNA, 25 bp, Homo sapien
cctgcagggcacgtagactcttaac

SEQ ID NO: 3594108 - DNA, 25 bp, Homo sapien
gagactcgcggtgttcggcacctac

SEQ ID NO: 3594109 - DNA, 25 bp, Homo sapien
cagcccggcaggccgggcccgactc

SEQ ID NO: 3594110 - DNA, 25 bp, Homo sapien
tcctccagttgtccagcaaaggagg

SEQ ID NO: 3594111 - DNA, 25 bp, Homo sapien
ccagcccggcaggccgggcccgact

SEQ ID NO: 3594112 - DNA, 25 bp, Homo sapien
ttttcctccagttgtccagcaaagg

SEQ ID NO: 3594113 - DNA, 25 bp, Homo sapien
cactttttgaggcctccgtcttccg

SEQ ID NO: 3594114 - DNA, 25 bp, Homo sapien
tttttgaggcctccgtcttccgcta

SEQ ID NO: 3594115 - DNA, 25 bp, Homo sapien
ttgaggcctccgtcttccgctactg

SEQ ID NO: 3594116 - DNA, 25 bp, Homo sapien
tacactttttgaggcctccgtcttc

SEQ ID NO: 3594117 - DNA, 25 bp, Homo sapien
agacagcagcaagcggaggagcaga

SEQ ID NO: 3594118 - DNA, 25 bp, Homo sapien
cgctcccaggtatcctcgtcgtctt

SEQ ID NO: 3594119 - DNA, 25 bp, Homo sapien
agcccctcagcgctggcacccagtt

SEQ ID NO: 3594120 - DNA, 25 bp, Homo sapien
tccgctggaagcccctcagcgctgg

SEQ ID NO: 3594121 - DNA, 25 bp, Homo sapien
cctcgccggtggacactgcggttcg

SEQ ID NO: 3594122 - DNA, 25 bp, Homo sapien
ccggtggacactgcggttcgttctc

SEQ ID NO: 3594123 - DNA, 25 bp, Homo sapien
tcgccggtggacactgcggttcgtt

SEQ ID NO: 3594124 - DNA, 25 bp, Homo sapien
gacagggctggctcctcgccggtgg

SEQ ID NO: 3594125 - DNA, 25 bp, Homo sapien
ataacgcggacagcgcggcagctcc

SEQ ID NO: 3594126 - DNA, 25 bp, Homo sapien
agataacgcggacagcgcggcagct

SEQ ID NO: 3594127 - DNA, 25 bp, Homo sapien
aagcaagaggctcagcctaacccgg

SEQ ID NO: 3594128 - DNA, 25 bp, Homo sapien
ggctcagcctaacccggaggcgaat

SEQ ID NO: 3594129 - DNA, 25 bp, Homo sapien
ccaattactctcacaaaggggcata

SEQ ID NO: 3594130 - DNA, 25 bp, Homo sapien
aaaggggcatattgatagccttgct

SEQ ID NO: 3594131 - DNA, 25 bp, Homo sapien
ccattcccaaaagttggctcttcat

SEQ ID NO: 3594132 - DNA, 25 bp, Homo sapien
tccattcccaaaagttggctcttca

SEQ ID NO: 3594133 - DNA, 25 bp, Homo sapien
ctgacagtgatagtgttggtgtctc

SEQ ID NO: 3594134 - DNA, 25 bp, Homo sapien
cagtgatagtgttggtgtctcttga

SEQ ID NO: 3594135 - DNA, 25 bp, Homo sapien
ctctcgtctctgacagtgatagtgt

SEQ ID NO: 3594136 - DNA, 25 bp, Homo sapien
cgtctctgacagtgatagtgttggt

SEQ ID NO: 3594137 - DNA, 25 bp, Homo sapien
ttacaatcgatgaccgcagggagcc

SEQ ID NO: 3594138 - DNA, 25 bp, Homo sapien
gactgcggacgttcggaagctcttc

SEQ ID NO: 3594139 - DNA, 25 bp, Homo sapien
tccaatcatggcgaacgggactgcg

SEQ ID NO: 3594140 - DNA, 25 bp, Homo sapien
tggatgacggcaaccagatgctcct

SEQ ID NO: 3594141 - DNA, 25 bp, Homo sapien
caggaccaccccagattctttgatt

SEQ ID NO: 3594142 - DNA, 25 bp, Homo sapien
tattacggtgaatgcatacaaagca

SEQ ID NO: 3594143 - DNA, 25 bp, Homo sapien
gagggtgtacttattttttgcagca

SEQ ID NO: 3594144 - DNA, 25 bp, Homo sapien
caggtacgaacttctaagagtcttc

SEQ ID NO: 3594145 - DNA, 25 bp, Homo sapien
tcttagggttttgctgaaaatcctc

SEQ ID NO: 3594146 - DNA, 25 bp, Homo sapien
ctatgattgcctctctgtaatacca

SEQ ID NO: 3594147 - DNA, 25 bp, Homo sapien
gatgcttctacttactaattgccca

SEQ ID NO: 3594148 - DNA, 25 bp, Homo sapien
gagctccagagtggcttaaagtatt

SEQ ID NO: 3594149 - DNA, 25 bp, Homo sapien
gctggtaaacgtgagctatggctct

SEQ ID NO: 3594150 - DNA, 25 bp, Homo sapien
tctagactgagatctggccagattc

SEQ ID NO: 3594151 - DNA, 25 bp, Homo sapien
gatcacacccaattcccaggaaaag

SEQ ID NO: 3594152 - DNA, 25 bp, Homo sapien
gactgcagtcatgtttgagcacaaa

SEQ ID NO: 3594153 - DNA, 25 bp, Homo sapien
tcctattgatcacgtcacccagata

SEQ ID NO: 3594154 - DNA, 25 bp, Homo sapien
tagtggacatagtatccaagaggaa

SEQ ID NO: 3594155 - DNA, 25 bp, Homo sapien
gaggaagttttttagcctgcgatcc

SEQ ID NO: 3594156 - DNA, 25 bp, Homo sapien
tgtttaacaagcgtatattgcatga

SEQ ID NO: 3594157 - DNA, 25 bp, Homo sapien
ttttggaaatgtgacatctttctat

SEQ ID NO: 3594158 - DNA, 25 bp, Homo sapien
tttggactagtatttacatggtata

SEQ ID NO: 3594159 - DNA, 25 bp, Homo sapien
tctatcaatttacacagctagcccc

SEQ ID NO: 3594160 - DNA, 25 bp, Homo sapien
taacatatctatcaatttacacagc

SEQ ID NO: 3594161 - DNA, 25 bp, Homo sapien
tttctgtcgtaaagcaaattaacat

SEQ ID NO: 3594162 - DNA, 25 bp, Homo sapien
caagtggtacgtccgtctcaacctc

SEQ ID NO: 3594163 - DNA, 25 bp, Homo sapien
tctggtctcaagtggtacgtccgtc

SEQ ID NO: 3594164 - DNA, 25 bp, Homo sapien
tctcaagtggtacgtccgtctcaac

SEQ ID NO: 3594165 - DNA, 25 bp, Homo sapien
ggtctcaagtggtacgtccgtctca

SEQ ID NO: 3594166 - DNA, 25 bp, Homo sapien
tatcaatgtctatggagtgctgcga

SEQ ID NO: 3594167 - DNA, 25 bp, Homo sapien
ggcaaccagatatagggccaaaaga

SEQ ID NO: 3594168 - DNA, 25 bp, Homo sapien
gatttattggtacaggtaggcaacc

SEQ ID NO: 3594169 - DNA, 25 bp, Homo sapien
gctgcgatgtgattgagcaacaccg

SEQ ID NO: 3594170 - DNA, 25 bp, Homo sapien
caattagtttactgactccagtgga

SEQ ID NO: 3594171 - DNA, 25 bp, Homo sapien
gataatctgaggaccatagactgac

SEQ ID NO: 3594172 - DNA, 25 bp, Homo sapien
tctgttcttgaacctagagactaca

SEQ ID NO: 3594173 - DNA, 25 bp, Homo sapien
tttgggctcagtaataattagcaat

SEQ ID NO: 3594174 - DNA, 25 bp, Homo sapien
tgattttggctgtcttgtacctgga

SEQ ID NO: 3594175 - DNA, 25 bp, Homo sapien
gaaatgtgctgccagacatacggag

SEQ ID NO: 3594176 - DNA, 25 bp, Homo sapien
tctatgctaggcaagttctctgtta

SEQ ID NO: 3594177 - DNA, 25 bp, Homo sapien
tcatggcatgtgagggttccactga

SEQ ID NO: 3594178 - DNA, 25 bp, Homo sapien
tacttcaagattggtgactggtacc

SEQ ID NO: 3594179 - DNA, 25 bp, Homo sapien
cacagccttggtggaccttaggaag

SEQ ID NO: 3594180 - DNA, 25 bp, Homo sapien
tgagagggctttctaggaatccaaa

SEQ ID NO: 3594181 - DNA, 25 bp, Homo sapien
gaaccctaagcccaagaactctatg

SEQ ID NO: 3594182 - DNA, 25 bp, Homo sapien
tatttcatctccaggtcaaatgaca

SEQ ID NO: 3594183 - DNA, 25 bp, Homo sapien
catggcacataacctttcttactga

SEQ ID NO: 3594184 - DNA, 25 bp, Homo sapien
gacacttttcagagaggttcttaag

SEQ ID NO: 3594185 - DNA, 25 bp, Homo sapien
gaatatcagaacctttgcacttgct

SEQ ID NO: 3594186 - DNA, 25 bp, Homo sapien
tgaaggacatggtcttgctccagct

SEQ ID NO: 3594187 - DNA, 25 bp, Homo sapien
caggtaatttttcgatcctccctct

SEQ ID NO: 3594188 - DNA, 25 bp, Homo sapien
tagtttgcttatgaaaatgatctcc

SEQ ID NO: 3594189 - DNA, 25 bp, Homo sapien
gtttattggccgtatgtatgtcttc

SEQ ID NO: 3594190 - DNA, 25 bp, Homo sapien
gataggccggccatacgctttctgg

SEQ ID NO: 3594191 - DNA, 25 bp, Homo sapien
tcgcaggcacgttcttgggagtaga

SEQ ID NO: 3594192 - DNA, 25 bp, Homo sapien
gcttcagtccaatagatggcgctta

SEQ ID NO: 3594193 - DNA, 25 bp, Homo sapien
tctgacaggctgcatccgggagata

SEQ ID NO: 3594194 - DNA, 25 bp, Homo sapien
taaataaacgtaggacagacttcag

SEQ ID NO: 3594195 - DNA, 25 bp, Homo sapien
tatgttagttcgaattgcccatgca

SEQ ID NO: 3594196 - DNA, 25 bp, Homo sapien
gattgattgctaggaaggatgaaac

SEQ ID NO: 3594197 - DNA, 25 bp, Homo sapien
taatttaggaagtttgacactgacc

SEQ ID NO: 3594198 - DNA, 25 bp, Homo sapien
aatttgatagagaaatctggtctaa

SEQ ID NO: 3594199 - DNA, 25 bp, Homo sapien
ttttgggcagatccataacagctgg

SEQ ID NO: 3594200 - DNA, 25 bp, Homo sapien
cagatccataacagctggttccaaa

SEQ ID NO: 3594201 - DNA, 25 bp, Homo sapien
aaatctggtctaatgaactttctcc

SEQ ID NO: 3594202 - DNA, 25 bp, Homo sapien
ccaggttagtagtggaatattcttc

SEQ ID NO: 3594203 - DNA, 25 bp, Homo sapien
aaccaggttagtagtggaatattct

SEQ ID NO: 3594204 - DNA, 25 bp, Homo sapien
ctaaaccaggttagtagtggaatat

SEQ ID NO: 3594205 - DNA, 25 bp, Homo sapien
aggttagtagtggaatattcttctg

SEQ ID NO: 3594206 - DNA, 25 bp, Homo sapien
tcctccccacagtctccacagagcc

SEQ ID NO: 3594207 - DNA, 25 bp, Homo sapien
cccacagtctccacagagccagctg

SEQ ID NO: 3594208 - DNA, 25 bp, Homo sapien
gagccagctgtgagagggagggcat

SEQ ID NO: 3594209 - DNA, 25 bp, Homo sapien
cagagccagctgtgagagggagggc

SEQ ID NO: 3594210 - DNA, 25 bp, Homo sapien
tgttttttggcttgggattgacttg

SEQ ID NO: 3594211 - DNA, 25 bp, Homo sapien
ttctgtcagttgcctgttctctctg

SEQ ID NO: 3594212 - DNA, 25 bp, Homo sapien
cagctttgttttttggcttgggatt

SEQ ID NO: 3594213 - DNA, 25 bp, Homo sapien
agttgcctgttctctctgatggtaa

SEQ ID NO: 3594214 - DNA, 25 bp, Homo sapien
tgtgttcctttggaagggaagaggc

SEQ ID NO: 3594215 - DNA, 25 bp, Homo sapien
ttggaagggaagaggcgctctgatt

SEQ ID NO: 3594216 - DNA, 25 bp, Homo sapien
agaagtttgattgtttgaagcctac

SEQ ID NO: 3594217 - DNA, 25 bp, Homo sapien
tcatcacgtagttcttatgccctgg

SEQ ID NO: 3594218 - DNA, 25 bp, Homo sapien
ggctttctaagaatcagtcatgcac

SEQ ID NO: 3594219 - DNA, 25 bp, Homo sapien
ggctccacccctatcttattggctt

SEQ ID NO: 3594220 - DNA, 25 bp, Homo sapien
gcacataaaccacaccaaaaggcat

SEQ ID NO: 3594221 - DNA, 25 bp, Homo sapien
ttcagtgtaagtcaattttggaaaa

SEQ ID NO: 3594222 - DNA, 25 bp, Homo sapien
agaggtgtagacccctcagtcttta

SEQ ID NO: 3594223 - DNA, 25 bp, Homo sapien
ttcactgcagagaggtgtagacccc

SEQ ID NO: 3594224 - DNA, 25 bp, Homo sapien
gttaaagctaagtagctttacagtg

SEQ ID NO: 3594225 - DNA, 25 bp, Homo sapien
aggttaaagctaagtagctttacag

SEQ ID NO: 3594226 - DNA, 25 bp, Homo sapien
gttatgtaatgattttactagtatc

SEQ ID NO: 3594227 - DNA, 25 bp, Homo sapien
aagttatgtaatgattttactagta

SEQ ID NO: 3594228 - DNA, 25 bp, Homo sapien
taagacatacagggtttaacctata

SEQ ID NO: 3594229 - DNA, 25 bp, Homo sapien
tatgtaatgattttactagtatctt

SEQ ID NO: 3594230 - DNA, 25 bp, Homo sapien
tgtcaggtgccccagttatcagagg

SEQ ID NO: 3594231 - DNA, 25 bp, Homo sapien
agattaatacaaatgcgtgggttgt

SEQ ID NO: 3594232 - DNA, 25 bp, Homo sapien
gggaaatgccatgtcaggtgcccca

SEQ ID NO: 3594233 - DNA, 25 bp, Homo sapien
aatacaaatgcgtgggttgtaacaa

SEQ ID NO: 3594234 - DNA, 25 bp, Homo sapien
tgaaggctcttggtcttatttaacc

SEQ ID NO: 3594235 - DNA, 25 bp, Homo sapien
ggctttgaaggctcttggtcttatt

SEQ ID NO: 3594236 - DNA, 25 bp, Homo sapien
tacttactaagggctttgaaggctc

SEQ ID NO: 3594237 - DNA, 25 bp, Homo sapien
acttactaagggctttgaaggctct

SEQ ID NO: 3594238 - DNA, 25 bp, Homo sapien
tacaggaaggagataaccagcattt

SEQ ID NO: 3594239 - DNA, 25 bp, Homo sapien
acaggaaggagataaccagcatttt

SEQ ID NO: 3594240 - DNA, 25 bp, Homo sapien
tactctatcaaagtcattcttttat

SEQ ID NO: 3594241 - DNA, 25 bp, Homo sapien
tctatcaaagtcattcttttatcag

SEQ ID NO: 3594242 - DNA, 25 bp, Homo sapien
atcaaagtcattcttttatcagaca

SEQ ID NO: 3594243 - DNA, 25 bp, Homo sapien
gatttaaaccttgtttactctatca

SEQ ID NO: 3594244 - DNA, 25 bp, Homo sapien
gcaattaccgggctctaccatctta

SEQ ID NO: 3594245 - DNA, 25 bp, Homo sapien
caattaccgggctctaccatcttaa

SEQ ID NO: 3594246 - DNA, 25 bp, Homo sapien
tttatgcaattaccgggctctacca

SEQ ID NO: 3594247 - DNA, 25 bp, Homo sapien
agttttatgcaattaccgggctcta

SEQ ID NO: 3594248 - DNA, 25 bp, Homo sapien
taagctgggtactttggattaagct

SEQ ID NO: 3594249 - DNA, 25 bp, Homo sapien
agctgggtactttggattaagctac

SEQ ID NO: 3594250 - DNA, 25 bp, Homo sapien
aagctgggtactttggattaagcta

SEQ ID NO: 3594251 - DNA, 25 bp, Homo sapien
gcaaacccatctagacattttcagt

SEQ ID NO: 3594252 - DNA, 25 bp, Homo sapien
ctgtttatggggttgtgcaaaccca

SEQ ID NO: 3594253 - DNA, 25 bp, Homo sapien
cagtgtcttcctttaaataattaag

SEQ ID NO: 3594254 - DNA, 25 bp, Homo sapien
cattttcagtgtcttcctttaaata

SEQ ID NO: 3594255 - DNA, 25 bp, Homo sapien
taggatctccacaaccaagctggtc

SEQ ID NO: 3594256 - DNA, 25 bp, Homo sapien
gaacatctatgttagcttggaagac

SEQ ID NO: 3594257 - DNA, 25 bp, Homo sapien
gaaattagtgcgactgcctcagtaa

SEQ ID NO: 3594258 - DNA, 25 bp, Homo sapien
tctagccttgctggattaggatctc

SEQ ID NO: 3594259 - DNA, 25 bp, Homo sapien
caaataaggtaagactgacttgggt

SEQ ID NO: 3594260 - DNA, 25 bp, Homo sapien
gctactttattctagaccctgtgtg

SEQ ID NO: 3594261 - DNA, 25 bp, Homo sapien
aatagcactatttaacctagaaggg

SEQ ID NO: 3594262 - DNA, 25 bp, Homo sapien
gattaatactttcctggtgccaaac

SEQ ID NO: 3594263 - DNA, 25 bp, Homo sapien
tctgaaaaagagctatgtgacattt

SEQ ID NO: 3594264 - DNA, 25 bp, Homo sapien
tggctgtcacagttatgagtagact

SEQ ID NO: 3594265 - DNA, 25 bp, Homo sapien
atataaagttctgtatatccagtga

SEQ ID NO: 3594266 - DNA, 25 bp, Homo sapien
ttattatgaggatctctgaaaatat

SEQ ID NO: 3594267 - DNA, 25 bp, Homo sapien
gattgccctagcaacacttcgagtg

SEQ ID NO: 3594268 - DNA, 25 bp, Homo sapien
ggctgctgagcacatacgggtacta

SEQ ID NO: 3594269 - DNA, 25 bp, Homo sapien
gtagctctgcatggaacggtcaatt

SEQ ID NO: 3594270 - DNA, 25 bp, Homo sapien
gagtgctcagtagccatatgcggta

SEQ ID NO: 3594271 - DNA, 25 bp, Homo sapien
ggtctatggagggaaaatactgctc

SEQ ID NO: 3594272 - DNA, 25 bp, Homo sapien
tatccacgagatctgcagtatccca

SEQ ID NO: 3594273 - DNA, 25 bp, Homo sapien
tgctcaagatgaacctagaatccaa

SEQ ID NO: 3594274 - DNA, 25 bp, Homo sapien
gaaatagcctgactccttagatgct

SEQ ID NO: 3594275 - DNA, 25 bp, Homo sapien
gatatagctagaggattttacccag

SEQ ID NO: 3594276 - DNA, 25 bp, Homo sapien
ccagttccagttcggtgcagtattt

SEQ ID NO: 3594277 - DNA, 25 bp, Homo sapien
aagaccagtctcagtgatgcccttc

SEQ ID NO: 3594278 - DNA, 25 bp, Homo sapien
catagtatgatttggtcaacactgc

SEQ ID NO: 3594279 - DNA, 25 bp, Homo sapien
aacatgtggtcagtctacatttgaa

SEQ ID NO: 3594280 - DNA, 25 bp, Homo sapien
acattgattctttaagctttaaatc

SEQ ID NO: 3594281 - DNA, 25 bp, Homo sapien
caaacatgtggtcagtctacatttg

SEQ ID NO: 3594282 - DNA, 25 bp, Homo sapien
cagctctattcctaaaaaatcagta

SEQ ID NO: 3594283 - DNA, 25 bp, Homo sapien
aaaacagagtattcttttgacaaca

SEQ ID NO: 3594284 - DNA, 25 bp, Homo sapien
tatttctgtgagaaagttcactttt

SEQ ID NO: 3594285 - DNA, 25 bp, Homo sapien
gtgagaaagttcacttttccagtgg

SEQ ID NO: 3594286 - DNA, 25 bp, Homo sapien
aataaatattttggctgtcatttgt

SEQ ID NO: 3594287 - DNA, 25 bp, Homo sapien
tcagcaaggttgacatcattggact

SEQ ID NO: 3594288 - DNA, 25 bp, Homo sapien
ttggactgcgcctccatgtgatcac

SEQ ID NO: 3594289 - DNA, 25 bp, Homo sapien
ccatcattgaggatagttggagaag

SEQ ID NO: 3594290 - DNA, 25 bp, Homo sapien
ggttgacatcattggactgcgcctc

SEQ ID NO: 3594291 - DNA, 25 bp, Homo sapien
caaacagaaggattagtgagcttga

SEQ ID NO: 3594292 - DNA, 25 bp, Homo sapien
gaattttggagctaaaaatgcaact

SEQ ID NO: 3594293 - DNA, 25 bp, Homo sapien
tctatcaaattcaataaggagattg

SEQ ID NO: 3594294 - DNA, 25 bp, Homo sapien
caactggcataatgaataatacagc

SEQ ID NO: 3594295 - DNA, 25 bp, Homo sapien
gtcagtatccaagtacaaggttgta

SEQ ID NO: 3594296 - DNA, 25 bp, Homo sapien
aaaaggtcagtatccaagtacaagg

SEQ ID NO: 3594297 - DNA, 25 bp, Homo sapien
atccaagtacaaggttgtagaacac

SEQ ID NO: 3594298 - DNA, 25 bp, Homo sapien
tcaaaggttagtaacagagaaattc

SEQ ID NO: 3594299 - DNA, 25 bp, Homo sapien
gggtaagcgccaaatcctaaagatg

SEQ ID NO: 3594300 - DNA, 25 bp, Homo sapien
caacctttggaagtgagacctgaga

SEQ ID NO: 3594301 - DNA, 25 bp, Homo sapien
ttctcaaaggtgtctgcaggttcag

SEQ ID NO: 3594302 - DNA, 25 bp, Homo sapien
tactacatagactggagagcctcag

SEQ ID NO: 3594303 - DNA, 25 bp, Homo sapien
ttcagtgcaactacggccatgtgtc

SEQ ID NO: 3594304 - DNA, 25 bp, Homo sapien
caatgtcatgcgtcctcaaggctaa

SEQ ID NO: 3594305 - DNA, 25 bp, Homo sapien
taggtcaccgctggcttctaaacaa

SEQ ID NO: 3594306 - DNA, 25 bp, Homo sapien
gacccggtagagagagtatcagctg

SEQ ID NO: 3594307 - DNA, 25 bp, Homo sapien
aaagtttgatatgctcattgtgccc

SEQ ID NO: 3594308 - DNA, 25 bp, Homo sapien
gcccttagcacaagacttctggttt

SEQ ID NO: 3594309 - DNA, 25 bp, Homo sapien
attgtggttctagaatgaggcaaca

SEQ ID NO: 3594310 - DNA, 25 bp, Homo sapien
ggcctggcgcagaaggctaattcaa

SEQ ID NO: 3594311 - DNA, 25 bp, Homo sapien
tatcttttgccatatgaaaagtttt

SEQ ID NO: 3594312 - DNA, 25 bp, Homo sapien
ctagtgtagtcatgctatgaaccct

SEQ ID NO: 3594313 - DNA, 25 bp, Homo sapien
tctagtgtagtcatgctatgaaccc

SEQ ID NO: 3594314 - DNA, 25 bp, Homo sapien
cccaatctatcttttggttttggct

SEQ ID NO: 3594315 - DNA, 25 bp, Homo sapien
tcagcgtagagtccctgtgaagaga

SEQ ID NO: 3594316 - DNA, 25 bp, Homo sapien
atgtgtccccgaaattttcatttgc

SEQ ID NO: 3594317 - DNA, 25 bp, Homo sapien
ttagggtaagataaggatgtcagcg

SEQ ID NO: 3594318 - DNA, 25 bp, Homo sapien
cctcaaaccttgctaggctttaaat

SEQ ID NO: 3594319 - DNA, 25 bp, Homo sapien
aagcctgttgtaatctaactgctga

SEQ ID NO: 3594320 - DNA, 25 bp, Homo sapien
gccctgcattaatcaaagcctgttg

SEQ ID NO: 3594321 - DNA, 25 bp, Homo sapien
ctaactgctgattgttttgaaagat

SEQ ID NO: 3594322 - DNA, 25 bp, Homo sapien
tctgtgttccagtgaatcccatgca

SEQ ID NO: 3594323 - DNA, 25 bp, Homo sapien
aacaatgatgcctgatttgaatagc

SEQ ID NO: 3594324 - DNA, 25 bp, Homo sapien
acaatgatgcctgatttgaatagca

SEQ ID NO: 3594325 - DNA, 25 bp, Homo sapien
caatgatgcctgatttgaatagcat

SEQ ID NO: 3594326 - DNA, 25 bp, Homo sapien
gaagataacagcacctaacctagga

SEQ ID NO: 3594327 - DNA, 25 bp, Homo sapien
gcagcaaaactaaaggtctacctat

SEQ ID NO: 3594328 - DNA, 25 bp, Homo sapien
tgatacaatagaatggcagcaaaac

SEQ ID NO: 3594329 - DNA, 25 bp, Homo sapien
ggaacgatattgtaagtcttggtca

SEQ ID NO: 3594330 - DNA, 25 bp, Homo sapien
gccttcattcggatgctctctccag

SEQ ID NO: 3594331 - DNA, 25 bp, Homo sapien
gagtgtatgccttcattcggatgct

SEQ ID NO: 3594332 - DNA, 25 bp, Homo sapien
aaacaggaggtcctcttgagtgtat

SEQ ID NO: 3594333 - DNA, 25 bp, Homo sapien
cctcttgagtgtatgccttcattcg

SEQ ID NO: 3594334 - DNA, 25 bp, Homo sapien
gctaaacgctagactcagataccaa

SEQ ID NO: 3594335 - DNA, 25 bp, Homo sapien
acagccctgcttaggtgtctaacag

SEQ ID NO: 3594336 - DNA, 25 bp, Homo sapien
tacaactcggtaagtggtgcctgtg

SEQ ID NO: 3594337 - DNA, 25 bp, Homo sapien
taaatgaatgactcccaaacctaga

SEQ ID NO: 3594338 - DNA, 25 bp, Homo sapien
gattcgatagaatcttccaaattgg

SEQ ID NO: 3594339 - DNA, 25 bp, Homo sapien
taatagtctcttttataggctggcc

SEQ ID NO: 3594340 - DNA, 25 bp, Homo sapien
atttggactgatgggcctaactcag

SEQ ID NO: 3594341 - DNA, 25 bp, Homo sapien
gctcttggcagtcttgtggtttgga

SEQ ID NO: 3594342 - DNA, 25 bp, Homo sapien
ccattctccaagttagttagcaggg

SEQ ID NO: 3594343 - DNA, 25 bp, Homo sapien
tttttcctgcttggatgagcctcca

SEQ ID NO: 3594344 - DNA, 25 bp, Homo sapien
agcctccattctccaagttagttag

SEQ ID NO: 3594345 - DNA, 25 bp, Homo sapien
tggatgagcctccattctccaagtt

SEQ ID NO: 3594346 - DNA, 25 bp, Homo sapien
tcaaaaacctcttaagcggctccat

SEQ ID NO: 3594347 - DNA, 25 bp, Homo sapien
gcagctgtgtcagtgttgtttggct

SEQ ID NO: 3594348 - DNA, 25 bp, Homo sapien
gctctaaacggcagagggtgccaaa

SEQ ID NO: 3594349 - DNA, 25 bp, Homo sapien
cagagggtgccaaactgaagcagct

SEQ ID NO: 3594350 - DNA, 25 bp, Homo sapien
aacacttggctctaaacggcagagg

SEQ ID NO: 3594351 - DNA, 25 bp, Homo sapien
gacaacaggccactggatggctaat

SEQ ID NO: 3594352 - DNA, 25 bp, Homo sapien
ggatggctaatgtggtgggctgctc

SEQ ID NO: 3594353 - DNA, 25 bp, Homo sapien
gaaagccgcacaagctggacaacag

SEQ ID NO: 3594354 - DNA, 25 bp, Homo sapien
gagaaagccgcacaagctggacaac

SEQ ID NO: 3594355 - DNA, 25 bp, Homo sapien
tagggaaatgggcaaggaggcgagc

SEQ ID NO: 3594356 - DNA, 25 bp, Homo sapien
gaaatgggcaaggaggcgagcttga

SEQ ID NO: 3594357 - DNA, 25 bp, Homo sapien
ggcaaggaggcgagcttgaaattct

SEQ ID NO: 3594358 - DNA, 25 bp, Homo sapien
aatgggcaaggaggcgagcttgaaa

SEQ ID NO: 3594359 - DNA, 25 bp, Homo sapien
tatccagcttattcccgagagacat

SEQ ID NO: 3594360 - DNA, 25 bp, Homo sapien
tggatatccagcttattcccgagag

SEQ ID NO: 3594361 - DNA, 25 bp, Homo sapien
ttattcccgagagacatcaaccatc

SEQ ID NO: 3594362 - DNA, 25 bp, Homo sapien
catcccccaaaacattggatatcca

SEQ ID NO: 3594363 - DNA, 25 bp, Homo sapien
ggagacatttaaaggcttagctcta

SEQ ID NO: 3594364 - DNA, 25 bp, Homo sapien
agacatttaaaggcttagctctaga

SEQ ID NO: 3594365 - DNA, 25 bp, Homo sapien
gagacatttaaaggcttagctctag

SEQ ID NO: 3594366 - DNA, 25 bp, Homo sapien
attgcttcaggtgctcttctccttc

SEQ ID NO: 3594367 - DNA, 25 bp, Homo sapien
gattgcttcaggtgctcttctcctt

SEQ ID NO: 3594368 - DNA, 25 bp, Homo sapien
agattgcttcaggtgctcttctcct

SEQ ID NO: 3594369 - DNA, 25 bp, Homo sapien
cagattgcttcaggtgctcttctcc

SEQ ID NO: 3594370 - DNA, 25 bp, Homo sapien
gtccttttcagcacgagtagcacag

SEQ ID NO: 3594371 - DNA, 25 bp, Homo sapien
ctggaagataccacccgtcatgcgc

SEQ ID NO: 3594372 - DNA, 25 bp, Homo sapien
gactgtaacacggaaagagcctttc

SEQ ID NO: 3594373 - DNA, 25 bp, Homo sapien
ccaaatcgtgggaaatgactgtaac

SEQ ID NO: 3594374 - DNA, 25 bp, Homo sapien
tgttcagtgtgattattataatctc

SEQ ID NO: 3594375 - DNA, 25 bp, Homo sapien
acaaatgttcagtgtgattattata

SEQ ID NO: 3594376 - DNA, 25 bp, Homo sapien
tcagtgtgattattataatctccac

SEQ ID NO: 3594377 - DNA, 25 bp, Homo sapien
attataatctccaccaacagagttg

SEQ ID NO: 3594378 - DNA, 25 bp, Homo sapien
ggccaagttcttggctagccttctc

SEQ ID NO: 3594379 - DNA, 25 bp, Homo sapien
cgttgagattgcacatttacacatc

SEQ ID NO: 3594380 - DNA, 25 bp, Homo sapien
tgatgttgtaaatcgttgagattgc

SEQ ID NO: 3594381 - DNA, 25 bp, Homo sapien
agaactgtggcaaatgatgataaaa

SEQ ID NO: 3594382 - DNA, 25 bp, Homo sapien
acttgctgatctacactgtcccaga

SEQ ID NO: 3594383 - DNA, 25 bp, Homo sapien
ttttcctgcaactcccacttgctga

SEQ ID NO: 3594384 - DNA, 25 bp, Homo sapien
gaaaacacctctcccctgctactct

SEQ ID NO: 3594385 - DNA, 25 bp, Homo sapien
cagagccacctgaaaacacctctcc

SEQ ID NO: 3594386 - DNA, 25 bp, Homo sapien
gaaagatgggagagccatcttctcc

SEQ ID NO: 3594387 - DNA, 25 bp, Homo sapien
acaccaagtgcttgggtgctgggtg

SEQ ID NO: 3594388 - DNA, 25 bp, Homo sapien
gcctctaataccacaatgtctcggg

SEQ ID NO: 3594389 - DNA, 25 bp, Homo sapien
cagtgcctctaataccacaatgtct

SEQ ID NO: 3594390 - DNA, 25 bp, Homo sapien
gatgcccttactctgcctgtttcct

SEQ ID NO: 3594391 - DNA, 25 bp, Homo sapien
gaagatatcgattccttttcctggc

SEQ ID NO: 3594392 - DNA, 25 bp, Homo sapien
ggggcttgaagatatcgattccttt

SEQ ID NO: 3594393 - DNA, 25 bp, Homo sapien
tctcctttacctccaggggcttgaa

SEQ ID NO: 3594394 - DNA, 25 bp, Homo sapien
cttgaagatatcgattccttttcct

SEQ ID NO: 3594395 - DNA, 25 bp, Homo sapien
ctctcgtagtccttaagatactttg

SEQ ID NO: 3594396 - DNA, 25 bp, Homo sapien
cctctcgtagtccttaagatacttt

SEQ ID NO: 3594397 - DNA, 25 bp, Homo sapien
tgagggttggcaacttagaacttgg

SEQ ID NO: 3594398 - DNA, 25 bp, Homo sapien
tgtccaaaaattgtaagtggactcg

SEQ ID NO: 3594399 - DNA, 25 bp, Homo sapien
catgtgctatctttggtgagggttg

SEQ ID NO: 3594400 - DNA, 25 bp, Homo sapien
gactcgttctgaccttttctggccc

SEQ ID NO: 3594401 - DNA, 25 bp, Homo sapien
taagatgtaacactggacttttccc

SEQ ID NO: 3594402 - DNA, 25 bp, Homo sapien
gatgtaacactggacttttcccatc

SEQ ID NO: 3594403 - DNA, 25 bp, Homo sapien
tttctaagatgtaacactggacttt

SEQ ID NO: 3594404 - DNA, 25 bp, Homo sapien
gtaacactggacttttcccatcagc

SEQ ID NO: 3594405 - DNA, 25 bp, Homo sapien
tctggcatcattcgtagcaaaggca

SEQ ID NO: 3594406 - DNA, 25 bp, Homo sapien
tggcatcattcgtagcaaaggcagg

SEQ ID NO: 3594407 - DNA, 25 bp, Homo sapien
ggcatcattcgtagcaaaggcaggg

SEQ ID NO: 3594408 - DNA, 25 bp, Homo sapien
cattctggcatcattcgtagcaaag

SEQ ID NO: 3594409 - DNA, 25 bp, Homo sapien
catgttcagactcatgcaatgctca

SEQ ID NO: 3594410 - DNA, 25 bp, Homo sapien
tgctcatccaggagagtggaaaagc

SEQ ID NO: 3594411 - DNA, 25 bp, Homo sapien
cagactcatgcaatgctcatccagg

SEQ ID NO: 3594412 - DNA, 25 bp, Homo sapien
catccaggagagtggaaaagcactt

SEQ ID NO: 3594413 - DNA, 25 bp, Homo sapien
gcactgaattgacatatctgtattg

SEQ ID NO: 3594414 - DNA, 25 bp, Homo sapien
tttgcactgaattgacatatctgta

SEQ ID NO: 3594415 - DNA, 25 bp, Homo sapien
ttgcactgaattgacatatctgtat

SEQ ID NO: 3594416 - DNA, 25 bp, Homo sapien
actgaattgacatatctgtattgct

SEQ ID NO: 3594417 - DNA, 25 bp, Homo sapien
tcatactacctatacgacaactgcc

SEQ ID NO: 3594418 - DNA, 25 bp, Homo sapien
ctatacgacaactgccagccgtcat

SEQ ID NO: 3594419 - DNA, 25 bp, Homo sapien
cattcctgcgattactactgctgtc

SEQ ID NO: 3594420 - DNA, 25 bp, Homo sapien
gattactactgctgtcatactacct

SEQ ID NO: 3594421 - DNA, 25 bp, Homo sapien
gggtattaagtcttatgtcaagctg

SEQ ID NO: 3594422 - DNA, 25 bp, Homo sapien
tattaagtcttatgtcaagctgaag

SEQ ID NO: 3594423 - DNA, 25 bp, Homo sapien
ggtattaagtcttatgtcaagctga

SEQ ID NO: 3594424 - DNA, 25 bp, Homo sapien
ctgggtattaagtcttatgtcaagc

SEQ ID NO: 3594425 - DNA, 25 bp, Homo sapien
tgctcatccacaaacagaatgcgag

SEQ ID NO: 3594426 - DNA, 25 bp, Homo sapien
tagatgctcatccacaaacagaatg

SEQ ID NO: 3594427 - DNA, 25 bp, Homo sapien
gcttagatgctcatccacaaacaga

SEQ ID NO: 3594428 - DNA, 25 bp, Homo sapien
tttgcttagatgctcatccacaaac

SEQ ID NO: 3594429 - DNA, 25 bp, Homo sapien
ttggactggctgcaggtgactgcat

SEQ ID NO: 3594430 - DNA, 25 bp, Homo sapien
caggtgactgcatgctgagcatcag

SEQ ID NO: 3594431 - DNA, 25 bp, Homo sapien
gactggctgcaggtgactgcatgct

SEQ ID NO: 3594432 - DNA, 25 bp, Homo sapien
ctgcaggtgactgcatgctgagcat

SEQ ID NO: 3594433 - DNA, 25 bp, Homo sapien
gagagtccaggaatttctaccagtg

SEQ ID NO: 3594434 - DNA, 25 bp, Homo sapien
tcagcaagccatcacattaggaaat

SEQ ID NO: 3594435 - DNA, 25 bp, Homo sapien
ggaaatcactaaccagtttgcactg

SEQ ID NO: 3594436 - DNA, 25 bp, Homo sapien
tgtggaagaaagctctaccctgaga

SEQ ID NO: 3594437 - DNA, 25 bp, Homo sapien
agaagcgggcaaggcaatcagtgaa

SEQ ID NO: 3594438 - DNA, 25 bp, Homo sapien
gcgggcaaggcaatcagtgaaatat

SEQ ID NO: 3594439 - DNA, 25 bp, Homo sapien
gggcctttgagaagcgggcaaggca

SEQ ID NO: 3594440 - DNA, 25 bp, Homo sapien
ttgagaagcgggcaaggcaatcagt

SEQ ID NO: 3594441 - DNA, 25 bp, Homo sapien
ctggtccaggatactggcttaaaat

SEQ ID NO: 3594442 - DNA, 25 bp, Homo sapien
cttgattatgagctccaaaccagga

SEQ ID NO: 3594443 - DNA, 25 bp, Homo sapien
aaggctgacttgattatgagctcca

SEQ ID NO: 3594444 - DNA, 25 bp, Homo sapien
caggatactggcttaaaatgagccc

SEQ ID NO: 3594445 - DNA, 25 bp, Homo sapien
tcaaatggtaaacctggcactccca

SEQ ID NO: 3594446 - DNA, 25 bp, Homo sapien
tccctccactgagaagaaattgctt

SEQ ID NO: 3594447 - DNA, 25 bp, Homo sapien
gatttggttaacataagccagaccg

SEQ ID NO: 3594448 - DNA, 25 bp, Homo sapien
ccatgggtgcttatgagagttttga

SEQ ID NO: 3594449 - DNA, 25 bp, Homo sapien
gaagctaccacagtctcagtctaga

SEQ ID NO: 3594450 - DNA, 25 bp, Homo sapien
gcccaagggctgagaattgctcact

SEQ ID NO: 3594451 - DNA, 25 bp, Homo sapien
cccaggcagctaggtgaatacaaca

SEQ ID NO: 3594452 - DNA, 25 bp, Homo sapien
ccttggaagtgctggtacatcaacc

SEQ ID NO: 3594453 - DNA, 25 bp, Homo sapien
cacttccctgagtgtagccaggtct

SEQ ID NO: 3594454 - DNA, 25 bp, Homo sapien
agccagttctgagtggtgtcagtgt

SEQ ID NO: 3594455 - DNA, 25 bp, Homo sapien
gtagccaggtctgggtggtagccag

SEQ ID NO: 3594456 - DNA, 25 bp, Homo sapien
ttctgagtggtgtcagtgtaggaaa

SEQ ID NO: 3594457 - DNA, 25 bp, Homo sapien
gcacgtgggtaaaagatgtcacgaa

SEQ ID NO: 3594458 - DNA, 25 bp, Homo sapien
aagatgtcacgaaaggcagggatga

SEQ ID NO: 3594459 - DNA, 25 bp, Homo sapien
tgggtaaaagatgtcacgaaaggca

SEQ ID NO: 3594460 - DNA, 25 bp, Homo sapien
ctgaagagcacgtgggtaaaagatg

SEQ ID NO: 3594461 - DNA, 25 bp, Homo sapien
agatacaactatccttcttgctggt

SEQ ID NO: 3594462 - DNA, 25 bp, Homo sapien
tatagttccaacagtcattgtatcc

SEQ ID NO: 3594463 - DNA, 25 bp, Homo sapien
cacttttcccaacagtaaggagatg

SEQ ID NO: 3594464 - DNA, 25 bp, Homo sapien
gctggctatgtcaatgactcccaaa

SEQ ID NO: 3594465 - DNA, 25 bp, Homo sapien
tacaccttgaatcctggagccatgc

SEQ ID NO: 3594466 - DNA, 25 bp, Homo sapien
ccaaaatggccgtgtgaaagtctca

SEQ ID NO: 3594467 - DNA, 25 bp, Homo sapien
tacctccttggatacaaagacctct

SEQ ID NO: 3594468 - DNA, 25 bp, Homo sapien
tgagaagaggcacccttacaccttg

SEQ ID NO: 3594469 - DNA, 25 bp, Homo sapien
aggcctgaccaagagcgtgtgctcc

SEQ ID NO: 3594470 - DNA, 25 bp, Homo sapien
gcctgaccaagagcgtgtgctccag

SEQ ID NO: 3594471 - DNA, 25 bp, Homo sapien
ggcctgaccaagagcgtgtgctcca

SEQ ID NO: 3594472 - DNA, 25 bp, Homo sapien
ttttgctcatataccacggtcggtc

SEQ ID NO: 3594473 - DNA, 25 bp, Homo sapien
gggtgcaagtgagtggcagtattct

SEQ ID NO: 3594474 - DNA, 25 bp, Homo sapien
gctcatataccacggtcggtcatgt

SEQ ID NO: 3594475 - DNA, 25 bp, Homo sapien
catataccacggtcggtcatgtggg

SEQ ID NO: 3594476 - DNA, 25 bp, Homo sapien
atagggcaggaatttggggccatca

SEQ ID NO: 3594477 - DNA, 25 bp, Homo sapien
aagaacaggtgatagggcaggaatt

SEQ ID NO: 3594478 - DNA, 25 bp, Homo sapien
caaggcgcaagtgtggcgtagagga

SEQ ID NO: 3594479 - DNA, 25 bp, Homo sapien
gcaagtgtggcgtagaggaagaaca

SEQ ID NO: 3594480 - DNA, 25 bp, Homo sapien
accatgcagttgatctcctcgactg

SEQ ID NO: 3594481 - DNA, 25 bp, Homo sapien
ttcccaaagcagatattgatcctga

SEQ ID NO: 3594482 - DNA, 25 bp, Homo sapien
tttgaagactgacaagtagaggcag

SEQ ID NO: 3594483 - DNA, 25 bp, Homo sapien
tcctcgactgatctatctcctgtct

SEQ ID NO: 3594484 - DNA, 25 bp, Homo sapien
tagcatgtttgactagggctgccaa

SEQ ID NO: 3594485 - DNA, 25 bp, Homo sapien
tctatgaggaacctaggagagtatc

SEQ ID NO: 3594486 - DNA, 25 bp, Homo sapien
cattaagtggttagttgcttatccc

SEQ ID NO: 3594487 - DNA, 25 bp, Homo sapien
tatttgagagatatcccagttgtgc

SEQ ID NO: 3594488 - DNA, 25 bp, Homo sapien
gataagaggcatattacattcgcta

SEQ ID NO: 3594489 - DNA, 25 bp, Homo sapien
aaagctgcatgttaccgatatgaca

SEQ ID NO: 3594490 - DNA, 25 bp, Homo sapien
gaacatattcaataaaaggcattat

SEQ ID NO: 3594491 - DNA, 25 bp, Homo sapien
tattacattcgctatagaaaatgct

SEQ ID NO: 3594492 - DNA, 25 bp, Homo sapien
taggtcactcatctaacactgggac

SEQ ID NO: 3594493 - DNA, 25 bp, Homo sapien
aataactgggaagaattgcactgct

SEQ ID NO: 3594494 - DNA, 25 bp, Homo sapien
tgaaatgtaatttgtacggccagct

SEQ ID NO: 3594495 - DNA, 25 bp, Homo sapien
ggacctgagagcaccatacttagaa

SEQ ID NO: 3594496 - DNA, 25 bp, Homo sapien
gaatttcggtgtttctctcttaagc

SEQ ID NO: 3594497 - DNA, 25 bp, Homo sapien
gatgatgaatcatttcctactcctg

SEQ ID NO: 3594498 - DNA, 25 bp, Homo sapien
aatgtagttctctgttagcagtccc

SEQ ID NO: 3594499 - DNA, 25 bp, Homo sapien
tagcagtccctgagctatctgaatt

SEQ ID NO: 3594500 - DNA, 25 bp, Homo sapien
ggttcatacagaatgcccatgccat

SEQ ID NO: 3594501 - DNA, 25 bp, Homo sapien
gctgagactcagcaaccacttgtgt

SEQ ID NO: 3594502 - DNA, 25 bp, Homo sapien
tgtgttaccacaattgacaactggc

SEQ ID NO: 3594503 - DNA, 25 bp, Homo sapien
ccatggcattaacaaagcaaggctg

SEQ ID NO: 3594504 - DNA, 25 bp, Homo sapien
gagccatggtcttagctctacccct

SEQ ID NO: 3594505 - DNA, 25 bp, Homo sapien
gatccaactggatgtcaactagagc

SEQ ID NO: 3594506 - DNA, 25 bp, Homo sapien
gcagatacaatcacatcgttcatgg

SEQ ID NO: 3594507 - DNA, 25 bp, Homo sapien
tacccctcctcttgatgtggccagg

SEQ ID NO: 3594508 - DNA, 25 bp, Homo sapien
tcaaagctttcagatcatgtaatag

SEQ ID NO: 3594509 - DNA, 25 bp, Homo sapien
tagtcttaggttcaggtacacagca

SEQ ID NO: 3594510 - DNA, 25 bp, Homo sapien
tggcggttataggttatctggtcac

SEQ ID NO: 3594511 - DNA, 25 bp, Homo sapien
caaggctgatttgagggcatgtaga

SEQ ID NO: 3594512 - DNA, 25 bp, Homo sapien
gcatttcttaacacctatgggtgca

SEQ ID NO: 3594513 - DNA, 25 bp, Homo sapien
aaatggggatcttgactcctctcca

SEQ ID NO: 3594514 - DNA, 25 bp, Homo sapien
accagcatttcttaacacctatggg

SEQ ID NO: 3594515 - DNA, 25 bp, Homo sapien
cttaacacctatgggtgcaaatggg

SEQ ID NO: 3594516 - DNA, 25 bp, Homo sapien
gagtctggttcttgtttattgagaa

SEQ ID NO: 3594517 - DNA, 25 bp, Homo sapien
caggcagaaaagctatctgctgagt

SEQ ID NO: 3594518 - DNA, 25 bp, Homo sapien
gttgccaataaacgtctgaataaat

SEQ ID NO: 3594519 - DNA, 25 bp, Homo sapien
ccaataaacgtctgaataaatcttc

SEQ ID NO: 3594520 - DNA, 25 bp, Homo sapien
gcaagtttgccgctttggcaggaag

SEQ ID NO: 3594521 - DNA, 25 bp, Homo sapien
gtttgccgctttggcaggaaggcct

SEQ ID NO: 3594522 - DNA, 25 bp, Homo sapien
ccccatgtggcaagtttgccgcttt

SEQ ID NO: 3594523 - DNA, 25 bp, Homo sapien
tgtggcaagtttgccgctttggcag

SEQ ID NO: 3594524 - DNA, 25 bp, Homo sapien
taggacacatgtcttaaagagatgc

SEQ ID NO: 3594525 - DNA, 25 bp, Homo sapien
gagtgtttgttccaggtaagcagtt

SEQ ID NO: 3594526 - DNA, 25 bp, Homo sapien
gagtgattttatagagctttgcaga

SEQ ID NO: 3594527 - DNA, 25 bp, Homo sapien
ctttagatacagtttcaaaggatgc

SEQ ID NO: 3594528 - DNA, 25 bp, Homo sapien
gagattgtgccgtcatatcctgtaa

SEQ ID NO: 3594529 - DNA, 25 bp, Homo sapien
gcttggcaaacctagtgtgggtaga

SEQ ID NO: 3594530 - DNA, 25 bp, Homo sapien
tctgctcctaatcaaaccctggctg

SEQ ID NO: 3594531 - DNA, 25 bp, Homo sapien
aaacagtgccttcgtcaggatagga

SEQ ID NO: 3594532 - DNA, 25 bp, Homo sapien
tatattgaccgagtaattcctggga

SEQ ID NO: 3594533 - DNA, 25 bp, Homo sapien
gcaggacctccagttgacagttcca

SEQ ID NO: 3594534 - DNA, 25 bp, Homo sapien
gcatcatcattgagcctatccaggt

SEQ ID NO: 3594535 - DNA, 25 bp, Homo sapien
tcctgggagtgcaactgtaacgctt

SEQ ID NO: 3594536 - DNA, 25 bp, Homo sapien
ggatatccacaaagacggacaactg

SEQ ID NO: 3594537 - DNA, 25 bp, Homo sapien
gatgaggggaataactttgataatg

SEQ ID NO: 3594538 - DNA, 25 bp, Homo sapien
gggttaggatatccacaaagacgga

SEQ ID NO: 3594539 - DNA, 25 bp, Homo sapien
tatccacaaagacggacaactgcgt

SEQ ID NO: 3594540 - DNA, 25 bp, Homo sapien
tgtccagagcatccgcaatcagagt

SEQ ID NO: 3594541 - DNA, 25 bp, Homo sapien
ggtatgacctgcctcgataccgagg

SEQ ID NO: 3594542 - DNA, 25 bp, Homo sapien
tgccatgactctggattgaagtact

SEQ ID NO: 3594543 - DNA, 25 bp, Homo sapien
ctgatggagagttataggatacccc

SEQ ID NO: 3594544 - DNA, 25 bp, Homo sapien
tgtacgaatctactctggagacatt

SEQ ID NO: 3594545 - DNA, 25 bp, Homo sapien
aaatttagcactttcaccaacttat

SEQ ID NO: 3594546 - DNA, 25 bp, Homo sapien
tacaggtcacctggcattgcagatg

SEQ ID NO: 3594547 - DNA, 25 bp, Homo sapien
taattccactctcccactgttaagt

SEQ ID NO: 3594548 - DNA, 25 bp, Homo sapien
tacaatctagaggtaaatgagccat

SEQ ID NO: 3594549 - DNA, 25 bp, Homo sapien
cccttgtacaatctagaggtaaatg

SEQ ID NO: 3594550 - DNA, 25 bp, Homo sapien
ttcactaacccttgtacaatctaga

SEQ ID NO: 3594551 - DNA, 25 bp, Homo sapien
taacccttgtacaatctagaggtaa

SEQ ID NO: 3594552 - DNA, 25 bp, Homo sapien
tctgttcaggtgtatccaggtaata

SEQ ID NO: 3594553 - DNA, 25 bp, Homo sapien
tatccaggtaataatgatcatttat

SEQ ID NO: 3594554 - DNA, 25 bp, Homo sapien
actctgtattctgttcaggtgtatc

SEQ ID NO: 3594555 - DNA, 25 bp, Homo sapien
tgtattctgttcaggtgtatccagg

SEQ ID NO: 3594556 - DNA, 25 bp, Homo sapien
gaagctgctgcgggttggaaatctt

SEQ ID NO: 3594557 - DNA, 25 bp, Homo sapien
aagctgctgcgggttggaaatcttc

SEQ ID NO: 3594558 - DNA, 25 bp, Homo sapien
ttgtgacagattcccagttggtctc

SEQ ID NO: 3594559 - DNA, 25 bp, Homo sapien
gagcttgtgacagattcccagttgg

SEQ ID NO: 3594560 - DNA, 25 bp, Homo sapien
aatttattcactacccatatttggc

SEQ ID NO: 3594561 - DNA, 25 bp, Homo sapien
ctgggtatcaggcaacttatttatt

SEQ ID NO: 3594562 - DNA, 25 bp, Homo sapien
catgaatgttaaaaagtcctgggta

SEQ ID NO: 3594563 - DNA, 25 bp, Homo sapien
aaaatacagattctagtagcaataa

SEQ ID NO: 3594564 - DNA, 25 bp, Homo sapien
ggcataactagaagtcagggcatga

SEQ ID NO: 3594565 - DNA, 25 bp, Homo sapien
taggctctgtatctacaaagttttc

SEQ ID NO: 3594566 - DNA, 25 bp, Homo sapien
gcttttaggagagtcatgtgtttta

SEQ ID NO: 3594567 - DNA, 25 bp, Homo sapien
accccattgctgtgacagagagtat

SEQ ID NO: 3594568 - DNA, 25 bp, Homo sapien
cttcctctttttcatctccagcatt

SEQ ID NO: 3594569 - DNA, 25 bp, Homo sapien
tattcttcctctttttcatctccag

SEQ ID NO: 3594570 - DNA, 25 bp, Homo sapien
ttcttcctctttttcatctccagca

SEQ ID NO: 3594571 - DNA, 25 bp, Homo sapien
ttattcttcctctttttcatctcca

SEQ ID NO: 3594572 - DNA, 25 bp, Homo sapien
ggtgaaaggcacaatcttgagtgga

SEQ ID NO: 3594573 - DNA, 25 bp, Homo sapien
taggacagttgttttcaaggctgga

SEQ ID NO: 3594574 - DNA, 25 bp, Homo sapien
ggatgagtcctgtctctttgattga

SEQ ID NO: 3594575 - DNA, 25 bp, Homo sapien
gaggttagccttaatctgtcacatt

SEQ ID NO: 3594576 - DNA, 25 bp, Homo sapien
gcttcttgtatcttttgcctagtag

SEQ ID NO: 3594577 - DNA, 25 bp, Homo sapien
ggtttagccacaaagtagtcatcgg

SEQ ID NO: 3594578 - DNA, 25 bp, Homo sapien
tactggtttcggatatatcttcaac

SEQ ID NO: 3594579 - DNA, 25 bp, Homo sapien
tagtcatcggacttgaatgtgattt

SEQ ID NO: 3594580 - DNA, 25 bp, Homo sapien
tccacaccatcgtcctctaataatg

SEQ ID NO: 3594581 - DNA, 25 bp, Homo sapien
gaaaaatctgagctggttaaaccag

SEQ ID NO: 3594582 - DNA, 25 bp, Homo sapien
accagggtgtgaatgagcttaagac

SEQ ID NO: 3594583 - DNA, 25 bp, Homo sapien
ttaagaccataagttcacctctggc

SEQ ID NO: 3594584 - DNA, 25 bp, Homo sapien
cacctctggcattggtcggagaaac

SEQ ID NO: 3594585 - DNA, 25 bp, Homo sapien
gatggtctcatctcttcggtacaag

SEQ ID NO: 3594586 - DNA, 25 bp, Homo sapien
caaactgattgtcaaacactagctg

SEQ ID NO: 3594587 - DNA, 25 bp, Homo sapien
gaatctaggactctgcacgtagccg

SEQ ID NO: 3594588 - DNA, 25 bp, Homo sapien
cacgtagccgtttcctttcacctgg

SEQ ID NO: 3594589 - DNA, 25 bp, Homo sapien
ctttgactgcctttgacagtctcac

SEQ ID NO: 3594590 - DNA, 25 bp, Homo sapien
ttgactgcctttgacagtctcaccc

SEQ ID NO: 3594591 - DNA, 25 bp, Homo sapien
tttgactgcctttgacagtctcacc

SEQ ID NO: 3594592 - DNA, 25 bp, Homo sapien
tgactgcctttgacagtctcacccc

SEQ ID NO: 3594593 - DNA, 25 bp, Homo sapien
agcatcaggcttgacttgtcttttt

SEQ ID NO: 3594594 - DNA, 25 bp, Homo sapien
ttcccatatataaaagcatcaggct

SEQ ID NO: 3594595 - DNA, 25 bp, Homo sapien
tatataaaagcatcaggcttgactt

SEQ ID NO: 3594596 - DNA, 25 bp, Homo sapien
aagcatcaggcttgacttgtctttt

SEQ ID NO: 3594597 - DNA, 25 bp, Homo sapien
taacaccttgggtacaggcatagag

SEQ ID NO: 3594598 - DNA, 25 bp, Homo sapien
tatgagtagcacattcaggcaggtg

SEQ ID NO: 3594599 - DNA, 25 bp, Homo sapien
tagaacagcaccttccaaagcttgg

SEQ ID NO: 3594600 - DNA, 25 bp, Homo sapien
cctagtgtaggcctgtcaaactcga

SEQ ID NO: 3594601 - DNA, 25 bp, Homo sapien
ccactctggcgcaccctgcatggct

SEQ ID NO: 3594602 - DNA, 25 bp, Homo sapien
ccccaacatccctcaccatcttctt

SEQ ID NO: 3594603 - DNA, 25 bp, Homo sapien
tgcatggctgactccttgtcatctt

SEQ ID NO: 3594604 - DNA, 25 bp, Homo sapien
tctaaacccagttctttcaggatgt

SEQ ID NO: 3594605 - DNA, 25 bp, Homo sapien
ttctatttctcctgcattcaaagaa

SEQ ID NO: 3594606 - DNA, 25 bp, Homo sapien
tctatttctcctgcattcaaagaaa

SEQ ID NO: 3594607 - DNA, 25 bp, Homo sapien
ttctcctgcattcaaagaaactctg

SEQ ID NO: 3594608 - DNA, 25 bp, Homo sapien
tatttctcctgcattcaaagaaact

SEQ ID NO: 3594609 - DNA, 25 bp, Homo sapien
gatggatgttgtttgagataagcag

SEQ ID NO: 3594610 - DNA, 25 bp, Homo sapien
tttcaagattaccagcaacagattc

SEQ ID NO: 3594611 - DNA, 25 bp, Homo sapien
gattctgctgcagttaaaccagaag

SEQ ID NO: 3594612 - DNA, 25 bp, Homo sapien
gaaaatcactagtgtgatagccatg

SEQ ID NO: 3594613 - DNA, 25 bp, Homo sapien
aatcagtgccaacattcctagttat

SEQ ID NO: 3594614 - DNA, 25 bp, Homo sapien
ttaatcagtgccaacattcctagtt

SEQ ID NO: 3594615 - DNA, 25 bp, Homo sapien
caacattcctagttattctttgaac

SEQ ID NO: 3594616 - DNA, 25 bp, Homo sapien
attcctagttattctttgaacttgc

SEQ ID NO: 3594617 - DNA, 25 bp, Homo sapien
tctgcaagggattggcctaaatggg

SEQ ID NO: 3594618 - DNA, 25 bp, Homo sapien
gatttagcttctgcaagggattggc

SEQ ID NO: 3594619 - DNA, 25 bp, Homo sapien
tcactgtatgggagatttagcttct

SEQ ID NO: 3594620 - DNA, 25 bp, Homo sapien
ctgtatgggagatttagcttctgca

SEQ ID NO: 3594621 - DNA, 25 bp, Homo sapien
gcttctctggaccaggtagctggcc

SEQ ID NO: 3594622 - DNA, 25 bp, Homo sapien
tatgcttgggtgtaatgtctgactc

SEQ ID NO: 3594623 - DNA, 25 bp, Homo sapien
tgtctgactcatgtggcttcctctt

SEQ ID NO: 3594624 - DNA, 25 bp, Homo sapien
tcagcaactcagagaggttccaggt

SEQ ID NO: 3594625 - DNA, 25 bp, Homo sapien
aactggagtaaaatatacatcacaa

SEQ ID NO: 3594626 - DNA, 25 bp, Homo sapien
ttaaccactttaagtgtacaactca

SEQ ID NO: 3594627 - DNA, 25 bp, Homo sapien
aataccacataactcattcatttaa

SEQ ID NO: 3594628 - DNA, 25 bp, Homo sapien
caaccatcatcaccaactatttcta

SEQ ID NO: 3594629 - DNA, 25 bp, Homo sapien
tcacgtttcgtggaatgtttcataa

SEQ ID NO: 3594630 - DNA, 25 bp, Homo sapien
ttctcacgtttcgtggaatgtttca

SEQ ID NO: 3594631 - DNA, 25 bp, Homo sapien
tcccctctagtcaagcctaagcttt

SEQ ID NO: 3594632 - DNA, 25 bp, Homo sapien
ttcataattgagacaccatcccctc

SEQ ID NO: 3594633 - DNA, 25 bp, Homo sapien
tcctgggatatttctcaaccctgtt

SEQ ID NO: 3594634 - DNA, 25 bp, Homo sapien
ccagcattccagttacaaccttggg

SEQ ID NO: 3594635 - DNA, 25 bp, Homo sapien
ctttctctgcatgtcgtaagatctg

SEQ ID NO: 3594636 - DNA, 25 bp, Homo sapien
tctgcatgtcgtaagatctggctct

SEQ ID NO: 3594637 - DNA, 25 bp, Homo sapien
tgatatatgctgactggaatcataa

SEQ ID NO: 3594638 - DNA, 25 bp, Homo sapien
cagagcttttgatatatgctgactg

SEQ ID NO: 3594639 - DNA, 25 bp, Homo sapien
gcttttgatatatgctgactggaat

SEQ ID NO: 3594640 - DNA, 25 bp, Homo sapien
tttgatatatgctgactggaatcat

SEQ ID NO: 3594641 - DNA, 25 bp, Homo sapien
tctatccaaagtatcagcaaacata

SEQ ID NO: 3594642 - DNA, 25 bp, Homo sapien
cttgatcttccattagtaagataac

SEQ ID NO: 3594643 - DNA, 25 bp, Homo sapien
ctcttgatcttccattagtaagata

SEQ ID NO: 3594644 - DNA, 25 bp, Homo sapien
ctttctatccaaagtatcagcaaac

SEQ ID NO: 3594645 - DNA, 25 bp, Homo sapien
cagggaggtcaagaagatactaagg

SEQ ID NO: 3594646 - DNA, 25 bp, Homo sapien
catgactggtgacaagcctggagac

SEQ ID NO: 3594647 - DNA, 25 bp, Homo sapien
ctaaggtcaaccagggtagagatga

SEQ ID NO: 3594648 - DNA, 25 bp, Homo sapien
gcagtgtaagtagaaatagagagca

SEQ ID NO: 3594649 - DNA, 25 bp, Homo sapien
agacatgtcccaagtccgctcttgt

SEQ ID NO: 3594650 - DNA, 25 bp, Homo sapien
tgagctagggcgtgatccatgctgc

SEQ ID NO: 3594651 - DNA, 25 bp, Homo sapien
cagtgtcctctattgaccacaggtc

SEQ ID NO: 3594652 - DNA, 25 bp, Homo sapien
aatatgctggttatgccactggtcc

SEQ ID NO: 3594653 - DNA, 25 bp, Homo sapien
ggttgtgtaatgggaaacttctcca

SEQ ID NO: 3594654 - DNA, 25 bp, Homo sapien
caattatggcacaatgcatgcagcc

SEQ ID NO: 3594655 - DNA, 25 bp, Homo sapien
gagtcactacatctagcctcttctg

SEQ ID NO: 3594656 - DNA, 25 bp, Homo sapien
gcttaagtgatattaccacctcggt

SEQ ID NO: 3594657 - DNA, 25 bp, Homo sapien
caatgttatacagaactgggcaagc

SEQ ID NO: 3594658 - DNA, 25 bp, Homo sapien
aacgcttattcagctttacgtgaca

SEQ ID NO: 3594659 - DNA, 25 bp, Homo sapien
ggtgatggctcatataattcagctg

SEQ ID NO: 3594660 - DNA, 25 bp, Homo sapien
tacgtgacatttttctcggtgtgga

SEQ ID NO: 3594661 - DNA, 25 bp, Homo sapien
tattctgtatagaggtgatggctca

SEQ ID NO: 3594662 - DNA, 25 bp, Homo sapien
atttccaaaatgacagtaggaaaat

SEQ ID NO: 3594663 - DNA, 25 bp, Homo sapien
tttccaaaatgacagtaggaaaata

SEQ ID NO: 3594664 - DNA, 25 bp, Homo sapien
ttccaaaatgacagtaggaaaataa

SEQ ID NO: 3594665 - DNA, 25 bp, Homo sapien
tccaaaatgacagtaggaaaataat

SEQ ID NO: 3594666 - DNA, 25 bp, Homo sapien
taagtcacggtaaaacaggtcagat

SEQ ID NO: 3594667 - DNA, 25 bp, Homo sapien
ttaggttctggacaacttaggcaat

SEQ ID NO: 3594668 - DNA, 25 bp, Homo sapien
aattaagcacggttataagtcacgg

SEQ ID NO: 3594669 - DNA, 25 bp, Homo sapien
gaggcaaattttaggcacatgtttc

SEQ ID NO: 3594670 - DNA, 25 bp, Homo sapien
gatgttgccatgtccaaatcgaagc

SEQ ID NO: 3594671 - DNA, 25 bp, Homo sapien
ttaagtcagaacattgggctggcat

SEQ ID NO: 3594672 - DNA, 25 bp, Homo sapien
gagagcttactctgcattggcaagg

SEQ ID NO: 3594673 - DNA, 25 bp, Homo sapien
tttagctagacagtatagtgggcac

SEQ ID NO: 3594674 - DNA, 25 bp, Homo sapien
tagcagcacgaatcccgtgcccata

SEQ ID NO: 3594675 - DNA, 25 bp, Homo sapien
ggagttcagaaagaccttcagggat

SEQ ID NO: 3594676 - DNA, 25 bp, Homo sapien
tcagggatacaaggccctctagcag

SEQ ID NO: 3594677 - DNA, 25 bp, Homo sapien
gcacaggaagccttggtgatacagc

SEQ ID NO: 3594678 - DNA, 25 bp, Homo sapien
tacacacttggagttgtctagcaca

SEQ ID NO: 3594679 - DNA, 25 bp, Homo sapien
tgtgacaaatgctctagttctctgc

SEQ ID NO: 3594680 - DNA, 25 bp, Homo sapien
taacttcctatggtaagtagcacag

SEQ ID NO: 3594681 - DNA, 25 bp, Homo sapien
tctagcacaagagatgaagatgccc

SEQ ID NO: 3594682 - DNA, 25 bp, Homo sapien
aacttgacctatgttatgaagacga

SEQ ID NO: 3594683 - DNA, 25 bp, Homo sapien
caacaggcccacttaatacccagat

SEQ ID NO: 3594684 - DNA, 25 bp, Homo sapien
gacacacccttatatgtaatgcagt

SEQ ID NO: 3594685 - DNA, 25 bp, Homo sapien
gcttacaaggctatctctgcagcag

SEQ ID NO: 3594686 - DNA, 25 bp, Homo sapien
agctggtaaggaattgtagaacaac

SEQ ID NO: 3594687 - DNA, 25 bp, Homo sapien
gcattatggagtaagaaagctggta

SEQ ID NO: 3594688 - DNA, 25 bp, Homo sapien
tatttccaatttacagataactcag

SEQ ID NO: 3594689 - DNA, 25 bp, Homo sapien
catagggtacagtatggagtctcat

SEQ ID NO: 3594690 - DNA, 25 bp, Homo sapien
tggtagtgcatgtccgcgaaggttt

SEQ ID NO: 3594691 - DNA, 25 bp, Homo sapien
gattaaatgttacgatgcctccagg

SEQ ID NO: 3594692 - DNA, 25 bp, Homo sapien
gcgaaggtttcaaagccgcctgcat

SEQ ID NO: 3594693 - DNA, 25 bp, Homo sapien
tgattagaacaagggagagggtttc

SEQ ID NO: 3594694 - DNA, 25 bp, Homo sapien
tatcaggtactattccaggagccag

SEQ ID NO: 3594695 - DNA, 25 bp, Homo sapien
tcaataacaccagagtcacactgtg

SEQ ID NO: 3594696 - DNA, 25 bp, Homo sapien
gaaaagtgccctctgaataaaatgt

SEQ ID NO: 3594697 - DNA, 25 bp, Homo sapien
taagtgagcttggtacacaccaggc

SEQ ID NO: 3594698 - DNA, 25 bp, Homo sapien
gagtggccaactaactggtcctgta

SEQ ID NO: 3594699 - DNA, 25 bp, Homo sapien
caagctggatgcgtaaatagtacaa

SEQ ID NO: 3594700 - DNA, 25 bp, Homo sapien
tgtttactgccatccagtggtcaaa

SEQ ID NO: 3594701 - DNA, 25 bp, Homo sapien
tttaggaatgtcctgcaagtcagag

SEQ ID NO: 3594702 - DNA, 25 bp, Homo sapien
tctcgcctgaggttggcgttgcgca

SEQ ID NO: 3594703 - DNA, 25 bp, Homo sapien
tgtcccgacagctgcaaaagtttgc

SEQ ID NO: 3594704 - DNA, 25 bp, Homo sapien
tgcgcagattagagtgtagacaaag

SEQ ID NO: 3594705 - DNA, 25 bp, Homo sapien
cgttgcgcaaagctttgatggatgc

SEQ ID NO: 3594706 - DNA, 25 bp, Homo sapien
ttgggatcagcgactagagacagcg

SEQ ID NO: 3594707 - DNA, 25 bp, Homo sapien
tgacgggacaaacaacaggttgacg

SEQ ID NO: 3594708 - DNA, 25 bp, Homo sapien
cgctccaagaaaaagccgggttctg

SEQ ID NO: 3594709 - DNA, 25 bp, Homo sapien
ctgaactttccgagcgcgtgtgggt

SEQ ID NO: 3594710 - DNA, 25 bp, Homo sapien
cggcccctgagaggcgcgcactcgg

SEQ ID NO: 3594711 - DNA, 25 bp, Homo sapien
cccctgagaggcgcgcactcgggct

SEQ ID NO: 3594712 - DNA, 25 bp, Homo sapien
aggcgagcggagcagcagcgttctc

SEQ ID NO: 3594713 - DNA, 25 bp, Homo sapien
ggcccctgagaggcgcgcactcggg

SEQ ID NO: 3594714 - DNA, 25 bp, Homo sapien
ttgccttcacagtccataggaagag

SEQ ID NO: 3594715 - DNA, 25 bp, Homo sapien
tgccttcacagtccataggaagagg

SEQ ID NO: 3594716 - DNA, 25 bp, Homo sapien
gccttcacagtccataggaagaggc

SEQ ID NO: 3594717 - DNA, 25 bp, Homo sapien
tctggtttacatcgtgtgtctgtct

SEQ ID NO: 3594718 - DNA, 25 bp, Homo sapien
gcctctggtttacatcgtgtgtctg

SEQ ID NO: 3594719 - DNA, 25 bp, Homo sapien
cagcagttgaaaggggctgcctctg

SEQ ID NO: 3594720 - DNA, 25 bp, Homo sapien
gctgcctctggtttacatcgtgtgt

SEQ ID NO: 3594721 - DNA, 25 bp, Homo sapien
catctttaggttgtgagagatctcc

SEQ ID NO: 3594722 - DNA, 25 bp, Homo sapien
ctgtgtacagttggtcaacaagtac

SEQ ID NO: 3594723 - DNA, 25 bp, Homo sapien
tactgaaggtacatgaaactgcagc

SEQ ID NO: 3594724 - DNA, 25 bp, Homo sapien
taggttgtgagagatctccactgtg

SEQ ID NO: 3594725 - DNA, 25 bp, Homo sapien
tgcagaagggacattaaaaccataa

SEQ ID NO: 3594726 - DNA, 25 bp, Homo sapien
tctcattgattatccctggaaccat

SEQ ID NO: 3594727 - DNA, 25 bp, Homo sapien
ttctcattgattatccctggaacca

SEQ ID NO: 3594728 - DNA, 25 bp, Homo sapien
ttcttctcattgattatccctggaa

SEQ ID NO: 3594729 - DNA, 25 bp, Homo sapien
tcttctcattgattatccctggaac

SEQ ID NO: 3594730 - DNA, 25 bp, Homo sapien
tctccactctgtgatggctgccata

SEQ ID NO: 3594731 - DNA, 25 bp, Homo sapien
ggtggctctccactctgtgatggct

SEQ ID NO: 3594732 - DNA, 25 bp, Homo sapien
ctccactctgtgatggctgccatag

SEQ ID NO: 3594733 - DNA, 25 bp, Homo sapien
catggtggctctccactctgtgatg

SEQ ID NO: 3594734 - DNA, 25 bp, Homo sapien
tttccctctactttggcatagtaca

SEQ ID NO: 3594735 - DNA, 25 bp, Homo sapien
ggcatagtacacattctgctcattc

SEQ ID NO: 3594736 - DNA, 25 bp, Homo sapien
tgtggatcaggttggtgaggttttg

SEQ ID NO: 3594737 - DNA, 25 bp, Homo sapien
tgttcatccactttctcgccctttc

SEQ ID NO: 3594738 - DNA, 25 bp, Homo sapien
tctcctttgccaagtattttggaag

SEQ ID NO: 3594739 - DNA, 25 bp, Homo sapien
ttgccaagtattttggaagatcaaa

SEQ ID NO: 3594740 - DNA, 25 bp, Homo sapien
cctttgccaagtattttggaagatc

SEQ ID NO: 3594741 - DNA, 25 bp, Homo sapien
tcaaagatgttttcctcaaaattgc

SEQ ID NO: 3594742 - DNA, 25 bp, Homo sapien
ggtctcctaatgcattgacagtcat

SEQ ID NO: 3594743 - DNA, 25 bp, Homo sapien
tgctgttgatcttggtctcctaatg

SEQ ID NO: 3594744 - DNA, 25 bp, Homo sapien
taaaattgtctaaaatctgctgttg

SEQ ID NO: 3594745 - DNA, 25 bp, Homo sapien
ctaaacgtctttgttgcttcagttg

SEQ ID NO: 3594746 - DNA, 25 bp, Homo sapien
ttatgtatcataaggcaccagcaga

SEQ ID NO: 3594747 - DNA, 25 bp, Homo sapien
tatgtatcataaggcaccagcagat

SEQ ID NO: 3594748 - DNA, 25 bp, Homo sapien
gtatcataaggcaccagcagattaa

SEQ ID NO: 3594749 - DNA, 25 bp, Homo sapien
tcataaggcaccagcagattaagtg

SEQ ID NO: 3594750 - DNA, 25 bp, Homo sapien
gaattaaacagacagtctttagggc

SEQ ID NO: 3594751 - DNA, 25 bp, Homo sapien
tcatcaacaaattgctggcctggtt

SEQ ID NO: 3594752 - DNA, 25 bp, Homo sapien
ggcaaaattccacagcagcaattgc

SEQ ID NO: 3594753 - DNA, 25 bp, Homo sapien
tgggtacaaagtgcaatattctggc

SEQ ID NO: 3594754 - DNA, 25 bp, Homo sapien
cagatagaaggtattgtctttgagg

SEQ ID NO: 3594755 - DNA, 25 bp, Homo sapien
gcttccatttacagggctaatggca

SEQ ID NO: 3594756 - DNA, 25 bp, Homo sapien
cctctttaggaagaccacggtgact

SEQ ID NO: 3594757 - DNA, 25 bp, Homo sapien
cccagcttccatttacagggctaat

SEQ ID NO: 3594758 - DNA, 25 bp, Homo sapien
gaagagatgttggtaatatatggtg

SEQ ID NO: 3594759 - DNA, 25 bp, Homo sapien
gttggtaatatatggtggttctgca

SEQ ID NO: 3594760 - DNA, 25 bp, Homo sapien
caacaaagttagcagaagagatgtt

SEQ ID NO: 3594761 - DNA, 25 bp, Homo sapien
acaaagttagcagaagagatgttgg

SEQ ID NO: 3594762 - DNA, 25 bp, Homo sapien
tagagtcaggaaactgttggaagaa

SEQ ID NO: 3594763 - DNA, 25 bp, Homo sapien
ggacggcaactctgacttgatttaa

SEQ ID NO: 3594764 - DNA, 25 bp, Homo sapien
ctttaattccttggtagcttggacg

SEQ ID NO: 3594765 - DNA, 25 bp, Homo sapien
tcaggaaactgttggaagaaatcct

SEQ ID NO: 3594766 - DNA, 25 bp, Homo sapien
ttatttccaatcttgttaccaccat

SEQ ID NO: 3594767 - DNA, 25 bp, Homo sapien
tattctcatgatcacctaatgacaa

SEQ ID NO: 3594768 - DNA, 25 bp, Homo sapien
catgatcacctaatgacaacaagat

SEQ ID NO: 3594769 - DNA, 25 bp, Homo sapien
cacctaatgacaacaagatggcagt

SEQ ID NO: 3594770 - DNA, 25 bp, Homo sapien
cagcttaatcatcgccatccccatc

SEQ ID NO: 3594771 - DNA, 25 bp, Homo sapien
tcagcttaatcatcgccatccccat

SEQ ID NO: 3594772 - DNA, 25 bp, Homo sapien
tctcagcttaatcatcgccatcccc

SEQ ID NO: 3594773 - DNA, 25 bp, Homo sapien
ctcagcttaatcatcgccatcccca

SEQ ID NO: 3594774 - DNA, 25 bp, Homo sapien
tattcttgttaggactggagtcaca

SEQ ID NO: 3594775 - DNA, 25 bp, Homo sapien
ctcctagagcactgtttttcttctt

SEQ ID NO: 3594776 - DNA, 25 bp, Homo sapien
gtagccactggtattgcaattttgc

SEQ ID NO: 3594777 - DNA, 25 bp, Homo sapien
ggagtcacatccacacctgtcagac

SEQ ID NO: 3594778 - DNA, 25 bp, Homo sapien
agcaatataatttgacttgttaatc

SEQ ID NO: 3594779 - DNA, 25 bp, Homo sapien
ctggagcaatataatttgacttgtt

SEQ ID NO: 3594780 - DNA, 25 bp, Homo sapien
ggagcaatataatttgacttgttaa

SEQ ID NO: 3594781 - DNA, 25 bp, Homo sapien
caatataatttgacttgttaatcat

SEQ ID NO: 3594782 - DNA, 25 bp, Homo sapien
caaacagtaattcacgtgtttcctt

SEQ ID NO: 3594783 - DNA, 25 bp, Homo sapien
cagtaattcacgtgtttcctttcct

SEQ ID NO: 3594784 - DNA, 25 bp, Homo sapien
tttcattcgtccagccgtcttcatc

SEQ ID NO: 3594785 - DNA, 25 bp, Homo sapien
cctttcctttcattcgtccagccgt

SEQ ID NO: 3594786 - DNA, 25 bp, Homo sapien
ccagtaatgctgtatgtaggttttc

SEQ ID NO: 3594787 - DNA, 25 bp, Homo sapien
gtaatgctgtatgtaggttttctta

SEQ ID NO: 3594788 - DNA, 25 bp, Homo sapien
aatgctgtatgtaggttttcttaag

SEQ ID NO: 3594789 - DNA, 25 bp, Homo sapien
cagtaatgctgtatgtaggttttct

SEQ ID NO: 3594790 - DNA, 25 bp, Homo sapien
catttgtctacattcgtaaatcatg

SEQ ID NO: 3594791 - DNA, 25 bp, Homo sapien
tctcccatcatttgtctacattcgt

SEQ ID NO: 3594792 - DNA, 25 bp, Homo sapien
tgtctacattcgtaaatcatgttaa

SEQ ID NO: 3594793 - DNA, 25 bp, Homo sapien
cattcgtaaatcatgttaaatgtta

SEQ ID NO: 3594794 - DNA, 25 bp, Homo sapien
ggtgtgaaatattaggaacataaat

SEQ ID NO: 3594795 - DNA, 25 bp, Homo sapien
gatacacttgcaaggggtgtgaaat

SEQ ID NO: 3594796 - DNA, 25 bp, Homo sapien
gaatattctgatacacttgcaaggg

SEQ ID NO: 3594797 - DNA, 25 bp, Homo sapien
ggggtgtgaaatattaggaacataa

SEQ ID NO: 3594798 - DNA, 25 bp, Homo sapien
ataatcagagagttgtcttcacaaa

SEQ ID NO: 3594799 - DNA, 25 bp, Homo sapien
ttttttgaagacttccgtcttgata

SEQ ID NO: 3594800 - DNA, 25 bp, Homo sapien
ccgtcttgataaatctgttgattgt

SEQ ID NO: 3594801 - DNA, 25 bp, Homo sapien
atcagagagttgtcttcacaaacac

SEQ ID NO: 3594802 - DNA, 25 bp, Homo sapien
tcccaaaaagggcatttaattgcag

SEQ ID NO: 3594803 - DNA, 25 bp, Homo sapien
caaaaagggcatttaattgcagcaa

SEQ ID NO: 3594804 - DNA, 25 bp, Homo sapien
tctagatattctcccaaaaagggca

SEQ ID NO: 3594805 - DNA, 25 bp, Homo sapien
aaaaagggcatttaattgcagcaag

SEQ ID NO: 3594806 - DNA, 25 bp, Homo sapien
tgacaggtttgcctctagttccgcc

SEQ ID NO: 3594807 - DNA, 25 bp, Homo sapien
ctgacaggtttgcctctagttccgc

SEQ ID NO: 3594808 - DNA, 25 bp, Homo sapien
gacaggtttgcctctagttccgccc

SEQ ID NO: 3594809 - DNA, 25 bp, Homo sapien
ctgctgtagctccactatatccttc

SEQ ID NO: 3594810 - DNA, 25 bp, Homo sapien
ctgttggagtagacttgatggtgct

SEQ ID NO: 3594811 - DNA, 25 bp, Homo sapien
cttgatggtgctaagaaactgaggg

SEQ ID NO: 3594812 - DNA, 25 bp, Homo sapien
taactccacaactgttggagtagac

SEQ ID NO: 3594813 - DNA, 25 bp, Homo sapien
ggagtagacttgatggtgctaagaa

SEQ ID NO: 3594814 - DNA, 25 bp, Homo sapien
caaataagaaacactgacactggcc

SEQ ID NO: 3594815 - DNA, 25 bp, Homo sapien
aataagaaacactgacactggcctc

SEQ ID NO: 3594816 - DNA, 25 bp, Homo sapien
ctgcaaataagaaacactgacactg

SEQ ID NO: 3594817 - DNA, 25 bp, Homo sapien
tgcaaataagaaacactgacactgg

SEQ ID NO: 3594818 - DNA, 25 bp, Homo sapien
aactaagtccaatccctttgcttgg

SEQ ID NO: 3594819 - DNA, 25 bp, Homo sapien
catctcctctgaaacaccttgatcc

SEQ ID NO: 3594820 - DNA, 25 bp, Homo sapien
gccttgagtgactccctttccatct

SEQ ID NO: 3594821 - DNA, 25 bp, Homo sapien
tcctctgaaacaccttgatccatca

SEQ ID NO: 3594822 - DNA, 25 bp, Homo sapien
cctgcaggagcaataattaaaggtt

SEQ ID NO: 3594823 - DNA, 25 bp, Homo sapien
gaatcagtgactgttataatccatt

SEQ ID NO: 3594824 - DNA, 25 bp, Homo sapien
tactaattcttccatgaggcatctc

SEQ ID NO: 3594825 - DNA, 25 bp, Homo sapien
ctctccttcattgaatcagtgactg

SEQ ID NO: 3594826 - DNA, 25 bp, Homo sapien
aatgagaataatagggcacgtcacc

SEQ ID NO: 3594827 - DNA, 25 bp, Homo sapien
catgctatgggtatgctggaagtca

SEQ ID NO: 3594828 - DNA, 25 bp, Homo sapien
taagatagacgcgtacttttcgctc

SEQ ID NO: 3594829 - DNA, 25 bp, Homo sapien
cctcgagtaagggaaggctatcatc

SEQ ID NO: 3594830 - DNA, 25 bp, Homo sapien
tcactactgcatggtcttgaagtag

SEQ ID NO: 3594831 - DNA, 25 bp, Homo sapien
cactactgcatggtcttgaagtaga

SEQ ID NO: 3594832 - DNA, 25 bp, Homo sapien
ctcactactgcatggtcttgaagta

SEQ ID NO: 3594833 - DNA, 25 bp, Homo sapien
ggtcaacccttgactgacctccatt

SEQ ID NO: 3594834 - DNA, 25 bp, Homo sapien
gttcttccatcaacatctctgtctc

SEQ ID NO: 3594835 - DNA, 25 bp, Homo sapien
gcagcattttcagactagtttatca

SEQ ID NO: 3594836 - DNA, 25 bp, Homo sapien
gaatgggctgaatcatggtatcttc

SEQ ID NO: 3594837 - DNA, 25 bp, Homo sapien
tgctgactcatagttgttagccaac

SEQ ID NO: 3594838 - DNA, 25 bp, Homo sapien
tgtatacctcctgttcactgtgttc

SEQ ID NO: 3594839 - DNA, 25 bp, Homo sapien
ctgtaaaacacaaatacggagaatc

SEQ ID NO: 3594840 - DNA, 25 bp, Homo sapien
gttagccaactctgtatacctcctg

SEQ ID NO: 3594841 - DNA, 25 bp, Homo sapien
tcaaatatctctctatgatgagcag

SEQ ID NO: 3594842 - DNA, 25 bp, Homo sapien
gtccttccaatgattagagccttca

SEQ ID NO: 3594843 - DNA, 25 bp, Homo sapien
aactccacagcactggaacccttgt

SEQ ID NO: 3594844 - DNA, 25 bp, Homo sapien
ggaacccttgtattatacaagacaa

SEQ ID NO: 3594845 - DNA, 25 bp, Homo sapien
aaggttaaggtaggaagagccaatg

SEQ ID NO: 3594846 - DNA, 25 bp, Homo sapien
ctagtggtagtttatagctgtcctc

SEQ ID NO: 3594847 - DNA, 25 bp, Homo sapien
cttcttgagaactaaactctagtgg

SEQ ID NO: 3594848 - DNA, 25 bp, Homo sapien
gaaatgcaagaggttaatccaggga

SEQ ID NO: 3594849 - DNA, 25 bp, Homo sapien
ggacatggatgaagctggaaaccat

SEQ ID NO: 3594850 - DNA, 25 bp, Homo sapien
aatgatgagttcatgtcttttgcag

SEQ ID NO: 3594851 - DNA, 25 bp, Homo sapien
catagaatactgtggagccataaaa

SEQ ID NO: 3594852 - DNA, 25 bp, Homo sapien
gctggaaaccatcattctcggcaaa

SEQ ID NO: 3594853 - DNA, 25 bp, Homo sapien
caagggtacgaagacccatgggaga

SEQ ID NO: 3594854 - DNA, 25 bp, Homo sapien
tcttttagtagtcccagtgcaagta

SEQ ID NO: 3594855 - DNA, 25 bp, Homo sapien
tctgatgagactccacatagttctg

SEQ ID NO: 3594856 - DNA, 25 bp, Homo sapien
atctcctgacccaagggtacgaaga

SEQ ID NO: 3594857 - DNA, 25 bp, Homo sapien
agaatcaacagaaatactcagaagt

SEQ ID NO: 3594858 - DNA, 25 bp, Homo sapien
cacaaagtaaatacacgaaagtcaa

SEQ ID NO: 3594859 - DNA, 25 bp, Homo sapien
tgtataccagtaaggaacattcaga

SEQ ID NO: 3594860 - DNA, 25 bp, Homo sapien
taacaaggttacagggcacaaagta

SEQ ID NO: 3594861 - DNA, 25 bp, Homo sapien
gaggaatacaaggactgacagggct

SEQ ID NO: 3594862 - DNA, 25 bp, Homo sapien
tatatttacttggtcctcacagggt

SEQ ID NO: 3594863 - DNA, 25 bp, Homo sapien
caagtcctctgtacccaataggtgc

SEQ ID NO: 3594864 - DNA, 25 bp, Homo sapien
tgtgagcgagattacaggagatgat

SEQ ID NO: 3594865 - DNA, 25 bp, Homo sapien
tcacatcataactctgacatcacat

SEQ ID NO: 3594866 - DNA, 25 bp, Homo sapien
ggctattatgagttcatttccctta

SEQ ID NO: 3594867 - DNA, 25 bp, Homo sapien
gaaatcacagcaacaaattgggcct

SEQ ID NO: 3594868 - DNA, 25 bp, Homo sapien
gacttgagtctagagcctttcacca

SEQ ID NO: 3594869 - DNA, 25 bp, Homo sapien
tccatcatgacctctcagggcactt

SEQ ID NO: 3594870 - DNA, 25 bp, Homo sapien
aagctctgaagctcttgacagtcta

SEQ ID NO: 3594871 - DNA, 25 bp, Homo sapien
cccaccaggttctggctttgttttg

SEQ ID NO: 3594872 - DNA, 25 bp, Homo sapien
gttttgtaagcatccctcccaccag

SEQ ID NO: 3594873 - DNA, 25 bp, Homo sapien
ctgggtagtttcaaagatgagttca

SEQ ID NO: 3594874 - DNA, 25 bp, Homo sapien
agatgagttcagggatagagttgca

SEQ ID NO: 3594875 - DNA, 25 bp, Homo sapien
tgagttcagggatagagttgcagct

SEQ ID NO: 3594876 - DNA, 25 bp, Homo sapien
ctctgggtagtttcaaagatgagtt

SEQ ID NO: 3594877 - DNA, 25 bp, Homo sapien
ataatcgtggttcttgtttaggcaa

SEQ ID NO: 3594878 - DNA, 25 bp, Homo sapien
acataatcgtggttcttgtttaggc

SEQ ID NO: 3594879 - DNA, 25 bp, Homo sapien
ctttacataatcgtggttcttgttt

SEQ ID NO: 3594880 - DNA, 25 bp, Homo sapien
ttacataatcgtggttcttgtttag

SEQ ID NO: 3594881 - DNA, 25 bp, Homo sapien
acatagtactgtagacacagcccat

SEQ ID NO: 3594882 - DNA, 25 bp, Homo sapien
agtactgtagacacagcccattggc

SEQ ID NO: 3594883 - DNA, 25 bp, Homo sapien
tagtactgtagacacagcccattgg

SEQ ID NO: 3594884 - DNA, 25 bp, Homo sapien
catagtactgtagacacagcccatt

SEQ ID NO: 3594885 - DNA, 25 bp, Homo sapien
atttacccaaaagattgttcatgtg

SEQ ID NO: 3594886 - DNA, 25 bp, Homo sapien
aatttacccaaaagattgttcatgt

SEQ ID NO: 3594887 - DNA, 25 bp, Homo sapien
tttacccaaaagattgttcatgtga

SEQ ID NO: 3594888 - DNA, 25 bp, Homo sapien
aaatttacccaaaagattgttcatg

SEQ ID NO: 3594889 - DNA, 25 bp, Homo sapien
tcaagccatatgtgttgccatgaca

SEQ ID NO: 3594890 - DNA, 25 bp, Homo sapien
gacgacaagatcatgattcaagcca

SEQ ID NO: 3594891 - DNA, 25 bp, Homo sapien
tgtaaaatttgattccctgtgccga

SEQ ID NO: 3594892 - DNA, 25 bp, Homo sapien
gaaggactggttaagttgagatgaa

SEQ ID NO: 3594893 - DNA, 25 bp, Homo sapien
tgcagtaaaggtagtcgttattaat

SEQ ID NO: 3594894 - DNA, 25 bp, Homo sapien
gcagtaaaggtagtcgttattaatc

SEQ ID NO: 3594895 - DNA, 25 bp, Homo sapien
tttgcagtaaaggtagtcgttatta

SEQ ID NO: 3594896 - DNA, 25 bp, Homo sapien
cagtaaaggtagtcgttattaatca

SEQ ID NO: 3594897 - DNA, 25 bp, Homo sapien
cagctgttgctcattaactaaaatc

SEQ ID NO: 3594898 - DNA, 25 bp, Homo sapien
aaatctgcagtagaactttttcctt

SEQ ID NO: 3594899 - DNA, 25 bp, Homo sapien
ggatgcagttgcagactgttgtctg

SEQ ID NO: 3594900 - DNA, 25 bp, Homo sapien
tctgctacttcactctttgcttgga

SEQ ID NO: 3594901 - DNA, 25 bp, Homo sapien
caagctcttcaaacattttaaccag

SEQ ID NO: 3594902 - DNA, 25 bp, Homo sapien
catacctatctccttcaagctcttc

SEQ ID NO: 3594903 - DNA, 25 bp, Homo sapien
ctgatccatacctatctccttcaag

SEQ ID NO: 3594904 - DNA, 25 bp, Homo sapien
gctcttcaaacattttaaccaggta

SEQ ID NO: 3594905 - DNA, 25 bp, Homo sapien
tactatttactctattaacatggtg

SEQ ID NO: 3594906 - DNA, 25 bp, Homo sapien
tgtggttttactatttactctatta

SEQ ID NO: 3594907 - DNA, 25 bp, Homo sapien
catggtggactacattagttaattt

SEQ ID NO: 3594908 - DNA, 25 bp, Homo sapien
tactctattaacatggtggactaca

SEQ ID NO: 3594909 - DNA, 25 bp, Homo sapien
gattgaagggagacacctgcttgca

SEQ ID NO: 3594910 - DNA, 25 bp, Homo sapien
gtcccattcgctagtttatccccag

SEQ ID NO: 3594911 - DNA, 25 bp, Homo sapien
caggcaaaatagtccaccttaaggg

SEQ ID NO: 3594912 - DNA, 25 bp, Homo sapien
tccacaaagttagtgtgccagaggg

SEQ ID NO: 3594913 - DNA, 25 bp, Homo sapien
caagtgaggttcactagtccgaacc

SEQ ID NO: 3594914 - DNA, 25 bp, Homo sapien
catctcttgtacaagtgaggttcac

SEQ ID NO: 3594915 - DNA, 25 bp, Homo sapien
cattttggcgtcttttggcaaggtc

SEQ ID NO: 3594916 - DNA, 25 bp, Homo sapien
ggcaaggtcacactgagtttataca

SEQ ID NO: 3594917 - DNA, 25 bp, Homo sapien
cctctcttcaatgttccattcctgg

SEQ ID NO: 3594918 - DNA, 25 bp, Homo sapien
ctctcttcaatgttccattcctgga

SEQ ID NO: 3594919 - DNA, 25 bp, Homo sapien
caatgttccattcctggagaggaaa

SEQ ID NO: 3594920 - DNA, 25 bp, Homo sapien
cttcaatgttccattcctggagagg

SEQ ID NO: 3594921 - DNA, 25 bp, Homo sapien
gataccatctgaccatagaggaatt

SEQ ID NO: 3594922 - DNA, 25 bp, Homo sapien
atattgattagtgagcacaaatatt

SEQ ID NO: 3594923 - DNA, 25 bp, Homo sapien
aatattagattactctagaaatttg

SEQ ID NO: 3594924 - DNA, 25 bp, Homo sapien
aaatattgattagtgagcacaaata

SEQ ID NO: 3594925 - DNA, 25 bp, Homo sapien
tattagattactctagaaatttgat

SEQ ID NO: 3594926 - DNA, 25 bp, Homo sapien
attgaaaaaacatgtgacatgctga

SEQ ID NO: 3594927 - DNA, 25 bp, Homo sapien
tgggtcatggcatatcaaaggatca

SEQ ID NO: 3594928 - DNA, 25 bp, Homo sapien
ctgttgggtcatggcatatcaaagg

SEQ ID NO: 3594929 - DNA, 25 bp, Homo sapien
ggtcatggcatatcaaaggatcatc

SEQ ID NO: 3594930 - DNA, 25 bp, Homo sapien
tcatggcatatcaaaggatcatcaa

SEQ ID NO: 3594931 - DNA, 25 bp, Homo sapien
taataatggagcatcaacttggcaa

SEQ ID NO: 3594932 - DNA, 25 bp, Homo sapien
ggtaataatggagcatcaacttggc

SEQ ID NO: 3594933 - DNA, 25 bp, Homo sapien
gtaataatggagcatcaacttggca

SEQ ID NO: 3594934 - DNA, 25 bp, Homo sapien
aataatggagcatcaacttggcaac

SEQ ID NO: 3594935 - DNA, 25 bp, Homo sapien
ctttgagcctcacccagcattctcc

SEQ ID NO: 3594936 - DNA, 25 bp, Homo sapien
tcattgaagctctttgagcctcacc

SEQ ID NO: 3594937 - DNA, 25 bp, Homo sapien
gaagctctttgagcctcacccagca

SEQ ID NO: 3594938 - DNA, 25 bp, Homo sapien
tctttgagcctcacccagcattctc

SEQ ID NO: 3594939 - DNA, 25 bp, Homo sapien
tatttgatgtggcagccagtctgct

SEQ ID NO: 3594940 - DNA, 25 bp, Homo sapien
ccagtctgctgctaactgcaacctg

SEQ ID NO: 3594941 - DNA, 25 bp, Homo sapien
agagctgatatttgatgtggcagcc

SEQ ID NO: 3594942 - DNA, 25 bp, Homo sapien
tctgctgctaactgcaacctggctt

SEQ ID NO: 3594943 - DNA, 25 bp, Homo sapien
cttctgttgtatggaaagcctagcc

SEQ ID NO: 3594944 - DNA, 25 bp, Homo sapien
aaagcctagcctgatgtttgtatgt

SEQ ID NO: 3594945 - DNA, 25 bp, Homo sapien
tcttctgttgtatggaaagcctagc

SEQ ID NO: 3594946 - DNA, 25 bp, Homo sapien
agatcttctgttgtatggaaagcct

SEQ ID NO: 3594947 - DNA, 25 bp, Homo sapien
tgtactcacatatattttattggcc

SEQ ID NO: 3594948 - DNA, 25 bp, Homo sapien
gtgcagggtgtactcacatatattt

SEQ ID NO: 3594949 - DNA, 25 bp, Homo sapien
gggtgtactcacatatattttattg

SEQ ID NO: 3594950 - DNA, 25 bp, Homo sapien
gcagggtgtactcacatatatttta

SEQ ID NO: 3594951 - DNA, 25 bp, Homo sapien
gttgaagtttcttagttgcgtattc

SEQ ID NO: 3594952 - DNA, 25 bp, Homo sapien
gatttgttgaaacctgaatcaaaaa

SEQ ID NO: 3594953 - DNA, 25 bp, Homo sapien
cttagttgggacaccaatgtttatt

SEQ ID NO: 3594954 - DNA, 25 bp, Homo sapien
tattcatagaagagtgatgatttgt

SEQ ID NO: 3594955 - DNA, 25 bp, Homo sapien
caaacagatggagagcattcaggca

SEQ ID NO: 3594956 - DNA, 25 bp, Homo sapien
tgtgccacatggtaccaaacagatg

SEQ ID NO: 3594957 - DNA, 25 bp, Homo sapien
gctgggtcgagccaagatgtgctcc

SEQ ID NO: 3594958 - DNA, 25 bp, Homo sapien
catagtctcccttcgcatacagcag

SEQ ID NO: 3594959 - DNA, 25 bp, Homo sapien
aattgggttattggcattcacgcta

SEQ ID NO: 3594960 - DNA, 25 bp, Homo sapien
ggatgtgacctgttgaattgggtta

SEQ ID NO: 3594961 - DNA, 25 bp, Homo sapien
cacgctattggataagtaagtagaa

SEQ ID NO: 3594962 - DNA, 25 bp, Homo sapien
ggcattcacgctattggataagtaa

SEQ ID NO: 3594963 - DNA, 25 bp, Homo sapien
ccttgaagtattcctggggtgtagt

SEQ ID NO: 3594964 - DNA, 25 bp, Homo sapien
cctggggtgtagtcagtggtttata

SEQ ID NO: 3594965 - DNA, 25 bp, Homo sapien
gggtgtagtcagtggtttataacaa

SEQ ID NO: 3594966 - DNA, 25 bp, Homo sapien
cagtggtttataacaaagaaatgga

SEQ ID NO: 3594967 - DNA, 25 bp, Homo sapien
ggtgcatttacggacccaaccatca

SEQ ID NO: 3594968 - DNA, 25 bp, Homo sapien
tacggacccaaccatcaaactcaaa

SEQ ID NO: 3594969 - DNA, 25 bp, Homo sapien
aaacaacagcactgccaagcagagc

SEQ ID NO: 3594970 - DNA, 25 bp, Homo sapien
actgacttcgtggtgcatttacgga

SEQ ID NO: 3594971 - DNA, 25 bp, Homo sapien
tatgtgggaaattgccttgatgcag

SEQ ID NO: 3594972 - DNA, 25 bp, Homo sapien
cccagaggtcgaggaacagaaaggc

SEQ ID NO: 3594973 - DNA, 25 bp, Homo sapien
cagtggaagcactaactggtgagct

SEQ ID NO: 3594974 - DNA, 25 bp, Homo sapien
ttcacttagagaggtgcaaacaggg

SEQ ID NO: 3594975 - DNA, 25 bp, Homo sapien
gaccttttctaatagcagattcata

SEQ ID NO: 3594976 - DNA, 25 bp, Homo sapien
aaaggtggacagctgagcagtttgg

SEQ ID NO: 3594977 - DNA, 25 bp, Homo sapien
taagcatgacttaatttatgacaaa

SEQ ID NO: 3594978 - DNA, 25 bp, Homo sapien
tttctcctataagcatgacttaatt

SEQ ID NO: 3594979 - DNA, 25 bp, Homo sapien
gcctcagcatagatttagcagctag

SEQ ID NO: 3594980 - DNA, 25 bp, Homo sapien
ggacatatggtacaggaaagcctca

SEQ ID NO: 3594981 - DNA, 25 bp, Homo sapien
gacttttgggtgaagagagacaaac

SEQ ID NO: 3594982 - DNA, 25 bp, Homo sapien
tacaaaagggctacggatctgtcat

SEQ ID NO: 3594983 - DNA, 25 bp, Homo sapien
atagtctttcaatggtgggcagctg

SEQ ID NO: 3594984 - DNA, 25 bp, Homo sapien
gaaatatcgtgtcatggatagtctt

SEQ ID NO: 3594985 - DNA, 25 bp, Homo sapien
gggtcagtatatttggggtctcaaa

SEQ ID NO: 3594986 - DNA, 25 bp, Homo sapien
ttggggtctcaaatgaatgttgaac

SEQ ID NO: 3594987 - DNA, 25 bp, Homo sapien
atgactccaagaatactctctgaag

SEQ ID NO: 3594988 - DNA, 25 bp, Homo sapien
gatgactccaagaatactctctgaa

SEQ ID NO: 3594989 - DNA, 25 bp, Homo sapien
tgatgactccaagaatactctctga

SEQ ID NO: 3594990 - DNA, 25 bp, Homo sapien
atgatgactccaagaatactctctg

SEQ ID NO: 3594991 - DNA, 25 bp, Homo sapien
gaagatttgaaagcaatgaagtcct

SEQ ID NO: 3594992 - DNA, 25 bp, Homo sapien
caatgaagtccttttccacatgagc

SEQ ID NO: 3594993 - DNA, 25 bp, Homo sapien
gtggtgtggaagatttgaaagcaat

SEQ ID NO: 3594994 - DNA, 25 bp, Homo sapien
agcaatgaagtccttttccacatga

SEQ ID NO: 3594995 - DNA, 25 bp, Homo sapien
gtaacagcatcattacagatgttac

SEQ ID NO: 3594996 - DNA, 25 bp, Homo sapien
tttgtaacagcatcattacagatgt

SEQ ID NO: 3594997 - DNA, 25 bp, Homo sapien
tgtaacagcatcattacagatgtta

SEQ ID NO: 3594998 - DNA, 25 bp, Homo sapien
ctttgtaacagcatcattacagatg

SEQ ID NO: 3594999 - DNA, 25 bp, Homo sapien
gcaagagccgaccatgagtatctgc

SEQ ID NO: 3595000 - DNA, 25 bp, Homo sapien
tgcaagagccgaccatgagtatctg

SEQ ID NO: 3595001 - DNA, 25 bp, Homo sapien
cttgcaagagccgaccatgagtatc

SEQ ID NO: 3595002 - DNA, 25 bp, Homo sapien
ttgcaagagccgaccatgagtatct

SEQ ID NO: 3595003 - DNA, 25 bp, Homo sapien
ctcggcaggcttgcatgatgatgac

SEQ ID NO: 3595004 - DNA, 25 bp, Homo sapien
gcctcggcaggcttgcatgatgatg

SEQ ID NO: 3595005 - DNA, 25 bp, Homo sapien
tgcctcggcaggcttgcatgatgat

SEQ ID NO: 3595006 - DNA, 25 bp, Homo sapien
cctcggcaggcttgcatgatgatga

SEQ ID NO: 3595007 - DNA, 25 bp, Homo sapien
gatgctatgtgacataaacaccagg

SEQ ID NO: 3595008 - DNA, 25 bp, Homo sapien
ctggcagttacggttgttgaaaatt

SEQ ID NO: 3595009 - DNA, 25 bp, Homo sapien
tcttgatcccagtgcttggtcccac

SEQ ID NO: 3595010 - DNA, 25 bp, Homo sapien
ctctgggtgagcagcaaactgcctt

SEQ ID NO: 3595011 - DNA, 25 bp, Homo sapien
cttttataaccactgagtatccaag

SEQ ID NO: 3595012 - DNA, 25 bp, Homo sapien
tctcttttataaccactgagtatcc

SEQ ID NO: 3595013 - DNA, 25 bp, Homo sapien
ttttataaccactgagtatccaagg

SEQ ID NO: 3595014 - DNA, 25 bp, Homo sapien
tcttttataaccactgagtatccaa

SEQ ID NO: 3595015 - DNA, 25 bp, Homo sapien
gaggccaggcatgttcgcctctctt

SEQ ID NO: 3595016 - DNA, 25 bp, Homo sapien
cccaaaaggtcaagttcagaaccat

SEQ ID NO: 3595017 - DNA, 25 bp, Homo sapien
gccaggcatgttcgcctctctttct

SEQ ID NO: 3595018 - DNA, 25 bp, Homo sapien
cagaaccatttcgattatgaagata

SEQ ID NO: 3595019 - DNA, 25 bp, Homo sapien
catggaagtgagcatgaggacaaag

SEQ ID NO: 3595020 - DNA, 25 bp, Homo sapien
ggacaaagctttaacttgccactgg

SEQ ID NO: 3595021 - DNA, 25 bp, Homo sapien
tgtctttagttcatggaagtgagca

SEQ ID NO: 3595022 - DNA, 25 bp, Homo sapien
cactgggttgggcaccctggatttc

SEQ ID NO: 3595023 - DNA, 25 bp, Homo sapien
caccatgtggaccagaacaccgttg

SEQ ID NO: 3595024 - DNA, 25 bp, Homo sapien
catcaaaaatgccatctagaaaggt

SEQ ID NO: 3595025 - DNA, 25 bp, Homo sapien
gaaaggtcttgatcagcaacttcac

SEQ ID NO: 3595026 - DNA, 25 bp, Homo sapien
cagtgatatcatcaaccaggttttc

SEQ ID NO: 3595027 - DNA, 25 bp, Homo sapien
ggcttctcctgctccccggacagga

SEQ ID NO: 3595028 - DNA, 25 bp, Homo sapien
gcttctcctgctccccggacaggaa

SEQ ID NO: 3595029 - DNA, 25 bp, Homo sapien
ctcctgctccccggacaggaaaaag

SEQ ID NO: 3595030 - DNA, 25 bp, Homo sapien
ttctcctgctccccggacaggaaaa

SEQ ID NO: 3595031 - DNA, 25 bp, Homo sapien
aacaatttcaacaggcttgctctcc

SEQ ID NO: 3595032 - DNA, 25 bp, Homo sapien
acataacaaagtgaacagaatgaaa

SEQ ID NO: 3595033 - DNA, 25 bp, Homo sapien
gtggaccagcttgttgatattaccc

SEQ ID NO: 3595034 - DNA, 25 bp, Homo sapien
gactctgatctcgtgtataactgct

SEQ ID NO: 3595035 - DNA, 25 bp, Homo sapien
aatgttaagcattcaatctgtacta

SEQ ID NO: 3595036 - DNA, 25 bp, Homo sapien
caaaatgttaagcattcaatctgta

SEQ ID NO: 3595037 - DNA, 25 bp, Homo sapien
gcattcaatctgtactagtaaaggt

SEQ ID NO: 3595038 - DNA, 25 bp, Homo sapien
taagcattcaatctgtactagtaaa

SEQ ID NO: 3595039 - DNA, 25 bp, Homo sapien
ccaacaactctcaatgcttaaccat

SEQ ID NO: 3595040 - DNA, 25 bp, Homo sapien
ctttcatttatttcatacaccacca

SEQ ID NO: 3595041 - DNA, 25 bp, Homo sapien
tatttcatacaccaccaacaactct

SEQ ID NO: 3595042 - DNA, 25 bp, Homo sapien
tacaccaccaacaactctcaatgct

SEQ ID NO: 3595043 - DNA, 25 bp, Homo sapien
ggactgttgcctccggactttcaaa

SEQ ID NO: 3595044 - DNA, 25 bp, Homo sapien
actcgttctatggtgggcatttgga

SEQ ID NO: 3595045 - DNA, 25 bp, Homo sapien
aatatcttgtcatggacactcgttc

SEQ ID NO: 3595046 - DNA, 25 bp, Homo sapien
agaaatatcttgtcatggacactcg

SEQ ID NO: 3595047 - DNA, 25 bp, Homo sapien
gagagtttgcaggtttcataggacc

SEQ ID NO: 3595048 - DNA, 25 bp, Homo sapien
tagatgagatacgactcttttcaag

SEQ ID NO: 3595049 - DNA, 25 bp, Homo sapien
agtcctggaatgaagagagtttgca

SEQ ID NO: 3595050 - DNA, 25 bp, Homo sapien
tcataggaccaagcccatgggtatt

SEQ ID NO: 3595051 - DNA, 25 bp, Homo sapien
caggagtcatactgttctctacagg

SEQ ID NO: 3595052 - DNA, 25 bp, Homo sapien
tataaacaaccacactatactgtgt

SEQ ID NO: 3595053 - DNA, 25 bp, Homo sapien
ttgtcttccattgctaaagcagtcc

SEQ ID NO: 3595054 - DNA, 25 bp, Homo sapien
aattggccctcttcggcctctcaaa

SEQ ID NO: 3595055 - DNA, 25 bp, Homo sapien
gagttgtgtgatgaagatggagccc

SEQ ID NO: 3595056 - DNA, 25 bp, Homo sapien
atctctggaagcatgcgatgagttg

SEQ ID NO: 3595057 - DNA, 25 bp, Homo sapien
aaatacttcctctaggtggcagcgc

SEQ ID NO: 3595058 - DNA, 25 bp, Homo sapien
aggtggcagcgccaggaatatctct

SEQ ID NO: 3595059 - DNA, 25 bp, Homo sapien
tggtgacgatttcaggagtgcatac

SEQ ID NO: 3595060 - DNA, 25 bp, Homo sapien
gattatgccatgctgtctttcacca

SEQ ID NO: 3595061 - DNA, 25 bp, Homo sapien
ggccactaggctcccaagttgtttg

SEQ ID NO: 3595062 - DNA, 25 bp, Homo sapien
tctactgtacaggatggtgccaata

SEQ ID NO: 3595063 - DNA, 25 bp, Homo sapien
atcattcaaaggtagcctcaggccc

SEQ ID NO: 3595064 - DNA, 25 bp, Homo sapien
cagtgttccccaagattagacgtaa

SEQ ID NO: 3595065 - DNA, 25 bp, Homo sapien
gacatgactcccaaagatgctggac

SEQ ID NO: 3595066 - DNA, 25 bp, Homo sapien
gagagcacacaacattccctcggat

SEQ ID NO: 3595067 - DNA, 25 bp, Homo sapien
aagtgtcattcaacagtgtgcctag

SEQ ID NO: 3595068 - DNA, 25 bp, Homo sapien
gctcccaagagctatgaatcaattg

SEQ ID NO: 3595069 - DNA, 25 bp, Homo sapien
gcccatctgggtttgcctcatcatg

SEQ ID NO: 3595070 - DNA, 25 bp, Homo sapien
tacagtatggctatcagaatcccct

SEQ ID NO: 3595071 - DNA, 25 bp, Homo sapien
tccttacctaccaagagtcatgtgt

SEQ ID NO: 3595072 - DNA, 25 bp, Homo sapien
tcatggcgcttcacatagtgcttac

SEQ ID NO: 3595073 - DNA, 25 bp, Homo sapien
tagtcggagaagcatcacaattaat

SEQ ID NO: 3595074 - DNA, 25 bp, Homo sapien
tctctggctgacacaccgtcttctt

SEQ ID NO: 3595075 - DNA, 25 bp, Homo sapien
tggtagtccagtccaacccctgtgt

SEQ ID NO: 3595076 - DNA, 25 bp, Homo sapien
tcctccaaacttgagtcatactggt

SEQ ID NO: 3595077 - DNA, 25 bp, Homo sapien
cacaggtagcttctcgtactttgaa

SEQ ID NO: 3595078 - DNA, 25 bp, Homo sapien
ctgcattcatgtctctccaaggttg

SEQ ID NO: 3595079 - DNA, 25 bp, Homo sapien
ttcagccaacccaagaacatttttc

SEQ ID NO: 3595080 - DNA, 25 bp, Homo sapien
tcagccaacccaagaacatttttcc

SEQ ID NO: 3595081 - DNA, 25 bp, Homo sapien
ctttttcagccaacccaagaacatt

SEQ ID NO: 3595082 - DNA, 25 bp, Homo sapien
cagccaacccaagaacatttttcct

SEQ ID NO: 3595083 - DNA, 25 bp, Homo sapien
ttgcttataacttcactgtttctct

SEQ ID NO: 3595084 - DNA, 25 bp, Homo sapien
gttttgcttataacttcactgtttc

SEQ ID NO: 3595085 - DNA, 25 bp, Homo sapien
tcttgtcactcttatgtagacacac

SEQ ID NO: 3595086 - DNA, 25 bp, Homo sapien
tccgttttgcttataacttcactgt

SEQ ID NO: 3595087 - DNA, 25 bp, Homo sapien
tagatggatgccgactgggaacttc

SEQ ID NO: 3595088 - DNA, 25 bp, Homo sapien
tttacagacctactcccaatgctag

SEQ ID NO: 3595089 - DNA, 25 bp, Homo sapien
tcagaaatgtgaaaactcgtgccaa

SEQ ID NO: 3595090 - DNA, 25 bp, Homo sapien
tcaccagactttgaatctcaatcag

SEQ ID NO: 3595091 - DNA, 25 bp, Homo sapien
aaccaggcgtatgcggtcctttctc

SEQ ID NO: 3595092 - DNA, 25 bp, Homo sapien
gagaaccaggcgtatgcggtccttt

SEQ ID NO: 3595093 - DNA, 25 bp, Homo sapien
tgagaaccaggcgtatgcggtcctt

SEQ ID NO: 3595094 - DNA, 25 bp, Homo sapien
gcagatggtcaaactctttattgca

SEQ ID NO: 3595095 - DNA, 25 bp, Homo sapien
ccttcttgtttgtctactactgtct

SEQ ID NO: 3595096 - DNA, 25 bp, Homo sapien
gtttgtctactactgtctgtgtatc

SEQ ID NO: 3595097 - DNA, 25 bp, Homo sapien
tccttcaagtctcagattagacagc

SEQ ID NO: 3595098 - DNA, 25 bp, Homo sapien
tctcagattagacagcacttttttc

SEQ ID NO: 3595099 - DNA, 25 bp, Homo sapien
tctcaggtagacgatagctgtccag

SEQ ID NO: 3595100 - DNA, 25 bp, Homo sapien
gatggcttggcactgagacctgaag

SEQ ID NO: 3595101 - DNA, 25 bp, Homo sapien
gcataagcaaagtgtgtctcaggta

SEQ ID NO: 3595102 - DNA, 25 bp, Homo sapien
cccttggacaactggcggctggtct

SEQ ID NO: 3595103 - DNA, 25 bp, Homo sapien
taacagcctccgtcctttcttacag

SEQ ID NO: 3595104 - DNA, 25 bp, Homo sapien
ccatagataacagcctccgtccttt

SEQ ID NO: 3595105 - DNA, 25 bp, Homo sapien
gccatagataacagcctccgtcctt

SEQ ID NO: 3595106 - DNA, 25 bp, Homo sapien
tagataacagcctccgtcctttctt

SEQ ID NO: 3595107 - DNA, 25 bp, Homo sapien
tgtatttctcaattctcttagctaa

SEQ ID NO: 3595108 - DNA, 25 bp, Homo sapien
caatagtaagctctgggatttggga

SEQ ID NO: 3595109 - DNA, 25 bp, Homo sapien
acaaatatgcagatcttgttcatgg

SEQ ID NO: 3595110 - DNA, 25 bp, Homo sapien
tcttagctaaaggtacaaatatgca

SEQ ID NO: 3595111 - DNA, 25 bp, Homo sapien
ctctcctgctaagttctaaattctt

SEQ ID NO: 3595112 - DNA, 25 bp, Homo sapien
ccatctctcctgctaagttctaaat

SEQ ID NO: 3595113 - DNA, 25 bp, Homo sapien
ggtacctgctgtaatttatatctgt

SEQ ID NO: 3595114 - DNA, 25 bp, Homo sapien
tacctgctgtaatttatatctgtgt

SEQ ID NO: 3595115 - DNA, 25 bp, Homo sapien
atctgaaacctagttctgtcaactt

SEQ ID NO: 3595116 - DNA, 25 bp, Homo sapien
cttccttttgatgggttcgaacgtg

SEQ ID NO: 3595117 - DNA, 25 bp, Homo sapien
tgaaacctagttctgtcaacttgtg

SEQ ID NO: 3595118 - DNA, 25 bp, Homo sapien
ttgatgggttcgaacgtgctccttt

SEQ ID NO: 3595119 - DNA, 25 bp, Homo sapien
gagtttcagtactcctctccaacct

SEQ ID NO: 3595120 - DNA, 25 bp, Homo sapien
cttgaccagaatggagtttcagtac

SEQ ID NO: 3595121 - DNA, 25 bp, Homo sapien
tacacatcggcccacaggcattcat

SEQ ID NO: 3595122 - DNA, 25 bp, Homo sapien
cattcatacagcctacttcttttaa

SEQ ID NO: 3595123 - DNA, 25 bp, Homo sapien
caatgtgttggatactctttactga

SEQ ID NO: 3595124 - DNA, 25 bp, Homo sapien
ataagtcctgttaaagatgtaagtc

SEQ ID NO: 3595125 - DNA, 25 bp, Homo sapien
tttttccacatgcttgactgattga

SEQ ID NO: 3595126 - DNA, 25 bp, Homo sapien
tctggagaactttaccccaatgtgt

SEQ ID NO: 3595127 - DNA, 25 bp, Homo sapien
tattctctattagaaaaagacacag

SEQ ID NO: 3595128 - DNA, 25 bp, Homo sapien
attatattctctattagaaaaagac

SEQ ID NO: 3595129 - DNA, 25 bp, Homo sapien
tatattctctattagaaaaagacac

SEQ ID NO: 3595130 - DNA, 25 bp, Homo sapien
cattttcattgagattatattctct

SEQ ID NO: 3595131 - DNA, 25 bp, Homo sapien
aaatgttaaatatgcaagctgtact

SEQ ID NO: 3595132 - DNA, 25 bp, Homo sapien
aatgttaaatatgcaagctgtacta

SEQ ID NO: 3595133 - DNA, 25 bp, Homo sapien
taatgaaggtgctccttgaagttga

SEQ ID NO: 3595134 - DNA, 25 bp, Homo sapien
gctgtactaatgaaggtgctccttg

SEQ ID NO: 3595135 - DNA, 25 bp, Homo sapien
tagtgcattgctatcccagggcatt

SEQ ID NO: 3595136 - DNA, 25 bp, Homo sapien
cccactggatggattaggcactgaa

SEQ ID NO: 3595137 - DNA, 25 bp, Homo sapien
tacatgggagcttgaaggaacttct

SEQ ID NO: 3595138 - DNA, 25 bp, Homo sapien
gataacatagaaccacgcgatctgg

SEQ ID NO: 3595139 - DNA, 25 bp, Homo sapien
gcccttggagtttcaaatgattgct

SEQ ID NO: 3595140 - DNA, 25 bp, Homo sapien
tatggtgggcatttgagctttggcc

SEQ ID NO: 3595141 - DNA, 25 bp, Homo sapien
gaaatatcttgtcatggacagtcgt

SEQ ID NO: 3595142 - DNA, 25 bp, Homo sapien
agtcgttctatggtgggcatttgag

SEQ ID NO: 3595143 - DNA, 25 bp, Homo sapien
gctctgtctcaatttatgctgcatt

SEQ ID NO: 3595144 - DNA, 25 bp, Homo sapien
atctttaagacccaaacactgaaca

SEQ ID NO: 3595145 - DNA, 25 bp, Homo sapien
ccagccccagtatcttatctttaag

SEQ ID NO: 3595146 - DNA, 25 bp, Homo sapien
tgcatcaactaattggtaagtctac

SEQ ID NO: 3595147 - DNA, 25 bp, Homo sapien
tacaggttccagtcaatatgcccgg

SEQ ID NO: 3595148 - DNA, 25 bp, Homo sapien
aattgaatatctgctacgtgccagg

SEQ ID NO: 3595149 - DNA, 25 bp, Homo sapien
gctttcttctataaacgccagaggt

SEQ ID NO: 3595150 - DNA, 25 bp, Homo sapien
aaatccctgccatcacgaagtttgc

SEQ ID NO: 3595151 - DNA, 25 bp, Homo sapien
cagaaactgggtacctctctacttt

SEQ ID NO: 3595152 - DNA, 25 bp, Homo sapien
tagataggattacgtcatgtaggcc

SEQ ID NO: 3595153 - DNA, 25 bp, Homo sapien
cacgaaaatgtgagtcctagatagg

SEQ ID NO: 3595154 - DNA, 25 bp, Homo sapien
tgacctagcagaccacccagatttt

SEQ ID NO: 3595155 - DNA, 25 bp, Homo sapien
tgagttgtgtgatgaagatagagcc

SEQ ID NO: 3595156 - DNA, 25 bp, Homo sapien
gatgagttgtgtgatgaagatagag

SEQ ID NO: 3595157 - DNA, 25 bp, Homo sapien
tagagcccattgtgctgtctctcca

SEQ ID NO: 3595158 - DNA, 25 bp, Homo sapien
agagcccattgtgctgtctctccag

SEQ ID NO: 3595159 - DNA, 25 bp, Homo sapien
agggtatccacagttctagcagggc

SEQ ID NO: 3595160 - DNA, 25 bp, Homo sapien
tatacttctcacacgcagtcacgga

SEQ ID NO: 3595161 - DNA, 25 bp, Homo sapien
catgtatcgggttgctttaggaatc

SEQ ID NO: 3595162 - DNA, 25 bp, Homo sapien
aatctattgtacagggtggtgccag

SEQ ID NO: 3595163 - DNA, 25 bp, Homo sapien
gtggcgttgaagagcagaaagcaat

SEQ ID NO: 3595164 - DNA, 25 bp, Homo sapien
ttgaagagcagaaagcaatgaagtc

SEQ ID NO: 3595165 - DNA, 25 bp, Homo sapien
tggcgttgaagagcagaaagcaatg

SEQ ID NO: 3595166 - DNA, 25 bp, Homo sapien
gcgttgaagagcagaaagcaatgaa

SEQ ID NO: 3595167 - DNA, 25 bp, Homo sapien
ctccacgtgggtcttgtaaacagca

SEQ ID NO: 3595168 - DNA, 25 bp, Homo sapien
tgggtcttgtaaacagcatcttcct

SEQ ID NO: 3595169 - DNA, 25 bp, Homo sapien
cgtgggtcttgtaaacagcatcttc

SEQ ID NO: 3595170 - DNA, 25 bp, Homo sapien
cacgtgggtcttgtaaacagcatct

SEQ ID NO: 3595171 - DNA, 25 bp, Homo sapien
ggagcaaagtggcactgcaacattc

SEQ ID NO: 3595172 - DNA, 25 bp, Homo sapien
tgttataccagacccttaggtagag

SEQ ID NO: 3595173 - DNA, 25 bp, Homo sapien
catgaggcaattgaatctttggagc

SEQ ID NO: 3595174 - DNA, 25 bp, Homo sapien
gacattaactttctgcacactgctg

SEQ ID NO: 3595175 - DNA, 25 bp, Homo sapien
agcagcacatctggttttttctcat

SEQ ID NO: 3595176 - DNA, 25 bp, Homo sapien
aagcagcacatctggttttttctca

SEQ ID NO: 3595177 - DNA, 25 bp, Homo sapien
accttgggtttgtccttcagactga

SEQ ID NO: 3595178 - DNA, 25 bp, Homo sapien
gcagcacatctggttttttctcatc

SEQ ID NO: 3595179 - DNA, 25 bp, Homo sapien
taacctagatgaatgctggctggga

SEQ ID NO: 3595180 - DNA, 25 bp, Homo sapien
caggtggcgtctcctactttgaagg

SEQ ID NO: 3595181 - DNA, 25 bp, Homo sapien
tccaggtcgtggtgcttcacttagt

SEQ ID NO: 3595182 - DNA, 25 bp, Homo sapien
cacatatgcacacctggtgcttgaa

SEQ ID NO: 3595183 - DNA, 25 bp, Homo sapien
aggcgtgtgcggttgtttctctcct

SEQ ID NO: 3595184 - DNA, 25 bp, Homo sapien
gcagatggtcaaactctgtattgca

SEQ ID NO: 3595185 - DNA, 25 bp, Homo sapien
tagtccagaccctcaagtagctcct

SEQ ID NO: 3595186 - DNA, 25 bp, Homo sapien
caaagtcagctccattcctcggagg

SEQ ID NO: 3595187 - DNA, 25 bp, Homo sapien
gaaatggtgcactgaaggaaagcaa

SEQ ID NO: 3595188 - DNA, 25 bp, Homo sapien
ccccaatcatttagtgctgtaagaa

SEQ ID NO: 3595189 - DNA, 25 bp, Homo sapien
gatctgcatcatggattgagaaagg

SEQ ID NO: 3595190 - DNA, 25 bp, Homo sapien
gaagtcacataatctttcccttagt

SEQ ID NO: 3595191 - DNA, 25 bp, Homo sapien
catgaggacaaagcttgagggcatc

SEQ ID NO: 3595192 - DNA, 25 bp, Homo sapien
cttcatgaggacaaagcttgagggc

SEQ ID NO: 3595193 - DNA, 25 bp, Homo sapien
gggcatctgtagattctcctgactc

SEQ ID NO: 3595194 - DNA, 25 bp, Homo sapien
gaggacaaagcttgagggcatctgt

SEQ ID NO: 3595195 - DNA, 25 bp, Homo sapien
aggatattgcagaacataaattgtg

SEQ ID NO: 3595196 - DNA, 25 bp, Homo sapien
gcaggatattgcagaacataaattg

SEQ ID NO: 3595197 - DNA, 25 bp, Homo sapien
ctgcaggatattgcagaacataaat

SEQ ID NO: 3595198 - DNA, 25 bp, Homo sapien
caggatattgcagaacataaattgt

SEQ ID NO: 3595199 - DNA, 25 bp, Homo sapien
cacagtgatatatgaccttcggtcc

SEQ ID NO: 3595200 - DNA, 25 bp, Homo sapien
taaagccagccagtctgagctctgg

SEQ ID NO: 3595201 - DNA, 25 bp, Homo sapien
tctgccaatgtgaagacatgctgga

SEQ ID NO: 3595202 - DNA, 25 bp, Homo sapien
tccctgtgcaaattgtaaagccagc

SEQ ID NO: 3595203 - DNA, 25 bp, Homo sapien
gaagacactgcttaggccttggagt

SEQ ID NO: 3595204 - DNA, 25 bp, Homo sapien
taattcgcagaagtaagtaagcact

SEQ ID NO: 3595205 - DNA, 25 bp, Homo sapien
tgttgctagagctaaatgatcctgg

SEQ ID NO: 3595206 - DNA, 25 bp, Homo sapien
gcaacttacaggatgtcacataggt

SEQ ID NO: 3595207 - DNA, 25 bp, Homo sapien
gccatacgttgcttctcttgcatag

SEQ ID NO: 3595208 - DNA, 25 bp, Homo sapien
tacgttgcttctcttgcatagagtc

SEQ ID NO: 3595209 - DNA, 25 bp, Homo sapien
aagcatttgtcctgccatacgttgc

SEQ ID NO: 3595210 - DNA, 25 bp, Homo sapien
gtcctgccatacgttgcttctcttg

SEQ ID NO: 3595211 - DNA, 25 bp, Homo sapien
aagttatccaaaacaccagtgagga

SEQ ID NO: 3595212 - DNA, 25 bp, Homo sapien
ttgttccaccaagttatccaaaaca

SEQ ID NO: 3595213 - DNA, 25 bp, Homo sapien
tcagttttagcatcgtaatatttct

SEQ ID NO: 3595214 - DNA, 25 bp, Homo sapien
caacaccttaagtggcttttttctg

SEQ ID NO: 3595215 - DNA, 25 bp, Homo sapien
agaatgtagacaagatatttaaggg

SEQ ID NO: 3595216 - DNA, 25 bp, Homo sapien
tgcattccaacaggtgagatcacaa

SEQ ID NO: 3595217 - DNA, 25 bp, Homo sapien
gaaaacattagtgcattccaacagg

SEQ ID NO: 3595218 - DNA, 25 bp, Homo sapien
acaggtgagatcacaaaggcttctg

SEQ ID NO: 3595219 - DNA, 25 bp, Homo sapien
gaccagagcaattcgccaacaaaaa

SEQ ID NO: 3595220 - DNA, 25 bp, Homo sapien
tgaaatggtcttatatacggaaaac

SEQ ID NO: 3595221 - DNA, 25 bp, Homo sapien
tagttctgaccagagcaattcgcca

SEQ ID NO: 3595222 - DNA, 25 bp, Homo sapien
tcaagaaaattgcaggataaaaaaa

SEQ ID NO: 3595223 - DNA, 25 bp, Homo sapien
ggtagagaagatttgcaaaccatac

SEQ ID NO: 3595224 - DNA, 25 bp, Homo sapien
taaactgatttagaaataagcaaag

SEQ ID NO: 3595225 - DNA, 25 bp, Homo sapien
ttcataacattggtctagacagtga

SEQ ID NO: 3595226 - DNA, 25 bp, Homo sapien
ataagcaaaggaccagaataaacac

SEQ ID NO: 3595227 - DNA, 25 bp, Homo sapien
caatatctctaacaccaggtcccat

SEQ ID NO: 3595228 - DNA, 25 bp, Homo sapien
ctccgtcaatatctctaacaccagg

SEQ ID NO: 3595229 - DNA, 25 bp, Homo sapien
cgtcaatatctctaacaccaggtcc

SEQ ID NO: 3595230 - DNA, 25 bp, Homo sapien
gtcaatatctctaacaccaggtccc

SEQ ID NO: 3595231 - DNA, 25 bp, Homo sapien
tttacagcgttggaaagagcctcag

SEQ ID NO: 3595232 - DNA, 25 bp, Homo sapien
tgtatttccttattgcaaagggcgg

SEQ ID NO: 3595233 - DNA, 25 bp, Homo sapien
ctcattatcaggaagtgccttgtca

SEQ ID NO: 3595234 - DNA, 25 bp, Homo sapien
caaattggcatccaattactggaat

SEQ ID NO: 3595235 - DNA, 25 bp, Homo sapien
cagctcccggaactctagtgaggca

SEQ ID NO: 3595236 - DNA, 25 bp, Homo sapien
gattagaatccccactagccagcat

SEQ ID NO: 3595237 - DNA, 25 bp, Homo sapien
gaagcctgcaagcttagatccgctg

SEQ ID NO: 3595238 - DNA, 25 bp, Homo sapien
cattactgcagctctagtcagcggt

SEQ ID NO: 3595239 - DNA, 25 bp, Homo sapien
taggtgggaccgggatccatccctc

SEQ ID NO: 3595240 - DNA, 25 bp, Homo sapien
aactccacctagagtttacagacag

SEQ ID NO: 3595241 - DNA, 25 bp, Homo sapien
tcctctcccggcaagaaatgcttgc

SEQ ID NO: 3595242 - DNA, 25 bp, Homo sapien
tgggcagcagtcttcacagtgcagc

SEQ ID NO: 3595243 - DNA, 25 bp, Homo sapien
tttgtccttcaaacttggacagttc

SEQ ID NO: 3595244 - DNA, 25 bp, Homo sapien
gaaagtgctgtcagaggtcctgtgc

SEQ ID NO: 3595245 - DNA, 25 bp, Homo sapien
aatgccttcagctctgtagtcatct

SEQ ID NO: 3595246 - DNA, 25 bp, Homo sapien
tgggcaatgagcaaatgccttcagc

SEQ ID NO: 3595247 - DNA, 25 bp, Homo sapien
tcccaaataccatgagacgtgaaca

SEQ ID NO: 3595248 - DNA, 25 bp, Homo sapien
atccacgctataccccagagattct

SEQ ID NO: 3595249 - DNA, 25 bp, Homo sapien
ttcattcacatccacgctatacccc

SEQ ID NO: 3595250 - DNA, 25 bp, Homo sapien
taaaacttactgaagcagtgacatt

SEQ ID NO: 3595251 - DNA, 25 bp, Homo sapien
tgataaaacttactgaagcagtgac

SEQ ID NO: 3595252 - DNA, 25 bp, Homo sapien
gacctttgcttcaaccctgtaacag

SEQ ID NO: 3595253 - DNA, 25 bp, Homo sapien
tatgtttagcttgcatctttctgaa

SEQ ID NO: 3595254 - DNA, 25 bp, Homo sapien
tccacactctttaatttgacacaag

SEQ ID NO: 3595255 - DNA, 25 bp, Homo sapien
gacacaaggtaaccccaattatatg

SEQ ID NO: 3595256 - DNA, 25 bp, Homo sapien
aataccaaatattgactatgcaagc

SEQ ID NO: 3595257 - DNA, 25 bp, Homo sapien
caagctatactggtaaatgtgctct

SEQ ID NO: 3595258 - DNA, 25 bp, Homo sapien
tattgactatgcaagctatactggt

SEQ ID NO: 3595259 - DNA, 25 bp, Homo sapien
tgtgctctttgatgttgacagagga

SEQ ID NO: 3595260 - DNA, 25 bp, Homo sapien
tctgtgagtctaatttctcatggtc

SEQ ID NO: 3595261 - DNA, 25 bp, Homo sapien
ttctcatggtcgtgtgacaaggacc

SEQ ID NO: 3595262 - DNA, 25 bp, Homo sapien
tcagattgtctgtgagtctaatttc

SEQ ID NO: 3595263 - DNA, 25 bp, Homo sapien
tctaatttctcatggtcgtgtgaca

SEQ ID NO: 3595264 - DNA, 25 bp, Homo sapien
ctcttgtcaaggttgctcgttctat

SEQ ID NO: 3595265 - DNA, 25 bp, Homo sapien
tgtcaaggttgctcgttctatggtg

SEQ ID NO: 3595266 - DNA, 25 bp, Homo sapien
gtcaaggttgctcgttctatggtgg

SEQ ID NO: 3595267 - DNA, 25 bp, Homo sapien
cttgtcaaggttgctcgttctatgg

SEQ ID NO: 3595268 - DNA, 25 bp, Homo sapien
tgtggaacttcaaatgatttctgta

SEQ ID NO: 3595269 - DNA, 25 bp, Homo sapien
ctgtggaacttcaaatgatttctgt

SEQ ID NO: 3595270 - DNA, 25 bp, Homo sapien
ctgggctttagcctgtggaacttca

SEQ ID NO: 3595271 - DNA, 25 bp, Homo sapien
ggctttagcctgtggaacttcaaat

SEQ ID NO: 3595272 - DNA, 25 bp, Homo sapien
cgaaatatttccattaggtggcagc

SEQ ID NO: 3595273 - DNA, 25 bp, Homo sapien
gaaatatttccattaggtggcagca

SEQ ID NO: 3595274 - DNA, 25 bp, Homo sapien
aaatatttccattaggtggcagcag

SEQ ID NO: 3595275 - DNA, 25 bp, Homo sapien
tgaagatggagccccttgtgcggtc

SEQ ID NO: 3595276 - DNA, 25 bp, Homo sapien
tgatgagttccgtaatgaagatgga

SEQ ID NO: 3595277 - DNA, 25 bp, Homo sapien
gatggagccccttgtgcggtctctc

SEQ ID NO: 3595278 - DNA, 25 bp, Homo sapien
catgtgatgagttccgtaatgaaga

SEQ ID NO: 3595279 - DNA, 25 bp, Homo sapien
cagcctggtatgccttgggctacga

SEQ ID NO: 3595280 - DNA, 25 bp, Homo sapien
acagcctggtatgccttgggctacg

SEQ ID NO: 3595281 - DNA, 25 bp, Homo sapien
cacacccttgcagaatgatgataat

SEQ ID NO: 3595282 - DNA, 25 bp, Homo sapien
tggacctcatgttcattcactttgc

SEQ ID NO: 3595283 - DNA, 25 bp, Homo sapien
gattgcaccatgatgtctttcacca

SEQ ID NO: 3595284 - DNA, 25 bp, Homo sapien
taccgtcgggctccaagattgttta

SEQ ID NO: 3595285 - DNA, 25 bp, Homo sapien
ttgaagaacagaaagcaatgaagtc

SEQ ID NO: 3595286 - DNA, 25 bp, Homo sapien
tggtgttgaagaacagaaagcaatg

SEQ ID NO: 3595287 - DNA, 25 bp, Homo sapien
tgttgaagaacagaaagcaatgaag

SEQ ID NO: 3595288 - DNA, 25 bp, Homo sapien
gtggtgttgaagaacagaaagcaat

SEQ ID NO: 3595289 - DNA, 25 bp, Homo sapien
cttctcctcgtggatcttgcaaaca

SEQ ID NO: 3595290 - DNA, 25 bp, Homo sapien
gtctctgacccagagttccccatgt

SEQ ID NO: 3595291 - DNA, 25 bp, Homo sapien
tgaagagatgagtgccaaggatgct

SEQ ID NO: 3595292 - DNA, 25 bp, Homo sapien
ttctcctcgtggatcttgcaaacag

SEQ ID NO: 3595293 - DNA, 25 bp, Homo sapien
tttttctttttatgcgcagttccgc

SEQ ID NO: 3595294 - DNA, 25 bp, Homo sapien
tcataaagcagcacatccggttttt

SEQ ID NO: 3595295 - DNA, 25 bp, Homo sapien
cagttccgcagattccctctaggat

SEQ ID NO: 3595296 - DNA, 25 bp, Homo sapien
gtgtcataaagcagcacatccggtt

SEQ ID NO: 3595297 - DNA, 25 bp, Homo sapien
atagtgagccccattccttgcaggc

SEQ ID NO: 3595298 - DNA, 25 bp, Homo sapien
tcttttcgtcaaccacagtgtagcc

SEQ ID NO: 3595299 - DNA, 25 bp, Homo sapien
ccttgcaggcaggtgatcaaacttt

SEQ ID NO: 3595300 - DNA, 25 bp, Homo sapien
tgaagcagccttttcatccccacga

SEQ ID NO: 3595301 - DNA, 25 bp, Homo sapien
actcaggtggtccagcctcgatttg

SEQ ID NO: 3595302 - DNA, 25 bp, Homo sapien
aaagtttgagtatatttgtagattc

SEQ ID NO: 3595303 - DNA, 25 bp, Homo sapien
ttcttcacgaggacaaagtttgagt

SEQ ID NO: 3595304 - DNA, 25 bp, Homo sapien
tggtccagcctcgatttgcagaaga

SEQ ID NO: 3595305 - DNA, 25 bp, Homo sapien
ctatgtgccaggatctccattaatt

SEQ ID NO: 3595306 - DNA, 25 bp, Homo sapien
atgtgccaggatctccattaattac

SEQ ID NO: 3595307 - DNA, 25 bp, Homo sapien
cttggtgcatgttacttctttttac

SEQ ID NO: 3595308 - DNA, 25 bp, Homo sapien
ccagttacattctggtagcagaaac

SEQ ID NO: 3595309 - DNA, 25 bp, Homo sapien
ggtgcctggcattacaatgtttctg

SEQ ID NO: 3595310 - DNA, 25 bp, Homo sapien
tgtgatgccagtgaaacactggagc

SEQ ID NO: 3595311 - DNA, 25 bp, Homo sapien
agagtcctgaatgagagctggtatc

SEQ ID NO: 3595312 - DNA, 25 bp, Homo sapien
tatatgccgctagagctaaatgagt

SEQ ID NO: 3595313 - DNA, 25 bp, Homo sapien
caaagagtctaccaagatcagggcc

SEQ ID NO: 3595314 - DNA, 25 bp, Homo sapien
catctttgcccaggtattccaacat

SEQ ID NO: 3595315 - DNA, 25 bp, Homo sapien
caatgtcagaacatcgtgttttgcc

SEQ ID NO: 3595316 - DNA, 25 bp, Homo sapien
ggtaaacatttgatgagccacgcga

SEQ ID NO: 3595317 - DNA, 25 bp, Homo sapien
ctagggtctggatagatgtttgtcc

SEQ ID NO: 3595318 - DNA, 25 bp, Homo sapien
gatccgtattaggtactagggtctg

SEQ ID NO: 3595319 - DNA, 25 bp, Homo sapien
acgaagttatccaatccactctgaa

SEQ ID NO: 3595320 - DNA, 25 bp, Homo sapien
ccactctgaaggatacctttgaaca

SEQ ID NO: 3595321 - DNA, 25 bp, Homo sapien
ctctgtctctttgtacagcactgga

SEQ ID NO: 3595322 - DNA, 25 bp, Homo sapien
tagcacccagtacatagtttttcgg

SEQ ID NO: 3595323 - DNA, 25 bp, Homo sapien
aggattcagtcagtaatgggatgct

SEQ ID NO: 3595324 - DNA, 25 bp, Homo sapien
cattccatagtagcagtgtaccaca

SEQ ID NO: 3595325 - DNA, 25 bp, Homo sapien
tacctaggtagtgagaatagcaccc

SEQ ID NO: 3595326 - DNA, 25 bp, Homo sapien
tctaccagatttattatttcaaaaa

SEQ ID NO: 3595327 - DNA, 25 bp, Homo sapien
tcagcagacataattccaaaaacct

SEQ ID NO: 3595328 - DNA, 25 bp, Homo sapien
tagtcttacggccacttctaggcca

SEQ ID NO: 3595329 - DNA, 25 bp, Homo sapien
ggattctcagcctgtaaacctagag

SEQ ID NO: 3595330 - DNA, 25 bp, Homo sapien
tctaggccaatatcagatgaatctc

SEQ ID NO: 3595331 - DNA, 25 bp, Homo sapien
tcatgtgggcgctcacacagtgttg

SEQ ID NO: 3595332 - DNA, 25 bp, Homo sapien
cccacagacattcatacagtttcct

SEQ ID NO: 3595333 - DNA, 25 bp, Homo sapien
cagacattcatacagtttccttatt

SEQ ID NO: 3595334 - DNA, 25 bp, Homo sapien
cacagacattcatacagtttcctta

SEQ ID NO: 3595335 - DNA, 25 bp, Homo sapien
ctgcccacagacattcatacagttt

SEQ ID NO: 3595336 - DNA, 25 bp, Homo sapien
ggtagaaacatcttgtcaaagtcac

SEQ ID NO: 3595337 - DNA, 25 bp, Homo sapien
tctgcgctctaccatctggctgctc

SEQ ID NO: 3595338 - DNA, 25 bp, Homo sapien
catctgcgctctaccatctggctgc

SEQ ID NO: 3595339 - DNA, 25 bp, Homo sapien
tgcgctctaccatctggctgctcaa

SEQ ID NO: 3595340 - DNA, 25 bp, Homo sapien
atctgcgctctaccatctggctgct

SEQ ID NO: 3595341 - DNA, 25 bp, Homo sapien
tcttgcatatgttcaatgagtcttc

SEQ ID NO: 3595342 - DNA, 25 bp, Homo sapien
catatgttcaatgagtcttccaata

SEQ ID NO: 3595343 - DNA, 25 bp, Homo sapien
cacaggaacaggcatattcttgcat

SEQ ID NO: 3595344 - DNA, 25 bp, Homo sapien
ggaacaggcatattcttgcatatgt

SEQ ID NO: 3595345 - DNA, 25 bp, Homo sapien
gtgggatgtctccaagaaacattat

SEQ ID NO: 3595346 - DNA, 25 bp, Homo sapien
tgtgggatgtctccaagaaacatta

SEQ ID NO: 3595347 - DNA, 25 bp, Homo sapien
tcagggcatgttcaacccaatgtag

SEQ ID NO: 3595348 - DNA, 25 bp, Homo sapien
taaactctgctatacgtactcaggc

SEQ ID NO: 3595349 - DNA, 25 bp, Homo sapien
tcagccagattgataatgagaagcc

SEQ ID NO: 3595350 - DNA, 25 bp, Homo sapien
cagaggcctacaaagagctacttag

SEQ ID NO: 3595351 - DNA, 25 bp, Homo sapien
agatgtcctgtgtagaaacctgtta

SEQ ID NO: 3595352 - DNA, 25 bp, Homo sapien
gtcactttttctattgatagcccca

SEQ ID NO: 3595353 - DNA, 25 bp, Homo sapien
actttttctattgatagccccaaca

SEQ ID NO: 3595354 - DNA, 25 bp, Homo sapien
gatgtcctgtgtagaaacctgttac

SEQ ID NO: 3595355 - DNA, 25 bp, Homo sapien
gataggtttccagaaactcctactg

SEQ ID NO: 3595356 - DNA, 25 bp, Homo sapien
agataggtttccagaaactcctact

SEQ ID NO: 3595357 - DNA, 25 bp, Homo sapien
caacatgttaaagattgcattgagt

SEQ ID NO: 3595358 - DNA, 25 bp, Homo sapien
taaagattgcattgagttgtagtat

SEQ ID NO: 3595359 - DNA, 25 bp, Homo sapien
gttcttggtattcaacatgttaaag

SEQ ID NO: 3595360 - DNA, 25 bp, Homo sapien
ttgcattgagttgtagtatatctgg

SEQ ID NO: 3595361 - DNA, 25 bp, Homo sapien
ctgggcggtgtgcaaatgcctccag

SEQ ID NO: 3595362 - DNA, 25 bp, Homo sapien
tgggcggtgtgcaaatgcctccagc

SEQ ID NO: 3595363 - DNA, 25 bp, Homo sapien
atgcctccagctctgtagtcatgtc

SEQ ID NO: 3595364 - DNA, 25 bp, Homo sapien
caaatgcctccagctctgtagtcat

SEQ ID NO: 3595365 - DNA, 25 bp, Homo sapien
aacctcagctccagttcttctagga

SEQ ID NO: 3595366 - DNA, 25 bp, Homo sapien
caaattcttcattgcagataatgag

SEQ ID NO: 3595367 - DNA, 25 bp, Homo sapien
ttttcacatctacgctgtaccccag

SEQ ID NO: 3595368 - DNA, 25 bp, Homo sapien
agagcaagacgtgtgcggcttgact

SEQ ID NO: 3595369 - DNA, 25 bp, Homo sapien
ctatccttgggttctgagcatggca

SEQ ID NO: 3595370 - DNA, 25 bp, Homo sapien
tatccttgggttctgagcatggcac

SEQ ID NO: 3595371 - DNA, 25 bp, Homo sapien
tctatccttgggttctgagcatggc

SEQ ID NO: 3595372 - DNA, 25 bp, Homo sapien
gcaaagcttgacattcccttctgag

SEQ ID NO: 3595373 - DNA, 25 bp, Homo sapien
tgtttccatatcctttgagcttctt

SEQ ID NO: 3595374 - DNA, 25 bp, Homo sapien
caaagcttgacattcccttctgagc

SEQ ID NO: 3595375 - DNA, 25 bp, Homo sapien
gaaagtactccttgagagtcttgca

SEQ ID NO: 3595376 - DNA, 25 bp, Homo sapien
aagtactccttgagagtcttgcata

SEQ ID NO: 3595377 - DNA, 25 bp, Homo sapien
agagtcttgcatattaaggtaattt

SEQ ID NO: 3595378 - DNA, 25 bp, Homo sapien
aaggaagaaagtactccttgagagt

SEQ ID NO: 3595379 - DNA, 25 bp, Homo sapien
ctgccaggtaactgtcttcttcaca

SEQ ID NO: 3595380 - DNA, 25 bp, Homo sapien
gagtcaatcaaagctcgggtcttat

SEQ ID NO: 3595381 - DNA, 25 bp, Homo sapien
tggcatgcctgtgcccctttcggaa

SEQ ID NO: 3595382 - DNA, 25 bp, Homo sapien
cctttcggaataacggagtcaatca

SEQ ID NO: 3595383 - DNA, 25 bp, Homo sapien
ctgtaataattcatccagtaagcca

SEQ ID NO: 3595384 - DNA, 25 bp, Homo sapien
taattcatccagtaagccatttatt

SEQ ID NO: 3595385 - DNA, 25 bp, Homo sapien
tcatccagtaagccatttattgtac

SEQ ID NO: 3595386 - DNA, 25 bp, Homo sapien
aattcatccagtaagccatttattg

SEQ ID NO: 3595387 - DNA, 25 bp, Homo sapien
acccatggaacggataaacagcttt

SEQ ID NO: 3595388 - DNA, 25 bp, Homo sapien
catggaacggataaacagctttctc

SEQ ID NO: 3595389 - DNA, 25 bp, Homo sapien
tggaacggataaacagctttctctt

SEQ ID NO: 3595390 - DNA, 25 bp, Homo sapien
cttcacccatggaacggataaacag

SEQ ID NO: 3595391 - DNA, 25 bp, Homo sapien
tgtcctacttgtttccctcaatagt

SEQ ID NO: 3595392 - DNA, 25 bp, Homo sapien
tttccctcaatagtctccatacatg

SEQ ID NO: 3595393 - DNA, 25 bp, Homo sapien
gtcctacttgtttccctcaatagtc

SEQ ID NO: 3595394 - DNA, 25 bp, Homo sapien
ttgtttccctcaatagtctccatac

SEQ ID NO: 3595395 - DNA, 25 bp, Homo sapien
aagaatcagaactgtagcctgcatc

SEQ ID NO: 3595396 - DNA, 25 bp, Homo sapien
agaatcagaactgtagcctgcatca

SEQ ID NO: 3595397 - DNA, 25 bp, Homo sapien
aaatactcactgtgcatgcatatgc

SEQ ID NO: 3595398 - DNA, 25 bp, Homo sapien
tgtattgggaaatactcactgtgca

SEQ ID NO: 3595399 - DNA, 25 bp, Homo sapien
aattgcattgtagaggcccagagca

SEQ ID NO: 3595400 - DNA, 25 bp, Homo sapien
cggaatgcagttatttgaccttggc

SEQ ID NO: 3595401 - DNA, 25 bp, Homo sapien
tatcattctgtcgtgcaggccggaa

SEQ ID NO: 3595402 - DNA, 25 bp, Homo sapien
tccttggcaagataatgaacttccc

SEQ ID NO: 3595403 - DNA, 25 bp, Homo sapien
cctttggtctcacattcaagaggga

SEQ ID NO: 3595404 - DNA, 25 bp, Homo sapien
tttgttagaatcctcaagcagtgca

SEQ ID NO: 3595405 - DNA, 25 bp, Homo sapien
tctaggtgccagaggttcagtcaaa

SEQ ID NO: 3595406 - DNA, 25 bp, Homo sapien
catttagcaaacatatacggacgac

SEQ ID NO: 3595407 - DNA, 25 bp, Homo sapien
taatccgatggcagcacaaacttgt

SEQ ID NO: 3595408 - DNA, 25 bp, Homo sapien
gtatttcacatgagggtttcgccca

SEQ ID NO: 3595409 - DNA, 25 bp, Homo sapien
tcatggaaagctaaacactgagcca

SEQ ID NO: 3595410 - DNA, 25 bp, Homo sapien
ccactagattgcaagggcccactgt

SEQ ID NO: 3595411 - DNA, 25 bp, Homo sapien
tatttaacatctcccatcctccgtg

SEQ ID NO: 3595412 - DNA, 25 bp, Homo sapien
tttggcatctaatagccctagggtc

SEQ ID NO: 3595413 - DNA, 25 bp, Homo sapien
ttctgcccggtttatcagtgtggac

SEQ ID NO: 3595414 - DNA, 25 bp, Homo sapien
tatgagctgtagatcttaaccaagt

SEQ ID NO: 3595415 - DNA, 25 bp, Homo sapien
cctgggattctaggatatagagatc

SEQ ID NO: 3595416 - DNA, 25 bp, Homo sapien
tccagaaccgctcaataaaattggt

SEQ ID NO: 3595417 - DNA, 25 bp, Homo sapien
cagactgggtgaagactatgataat

SEQ ID NO: 3595418 - DNA, 25 bp, Homo sapien
gggagcagaagtatgttcctccaga

SEQ ID NO: 3595419 - DNA, 25 bp, Homo sapien
ttattgtattctgaacatggcacct

SEQ ID NO: 3595420 - DNA, 25 bp, Homo sapien
tctttcactccactttattattgta

SEQ ID NO: 3595421 - DNA, 25 bp, Homo sapien
ctgccttctgggcttgagcatgtgg

SEQ ID NO: 3595422 - DNA, 25 bp, Homo sapien
cctttgagcgtcttctagaaagcaa

SEQ ID NO: 3595423 - DNA, 25 bp, Homo sapien
tatagcctcacctatggaggaagct

SEQ ID NO: 3595424 - DNA, 25 bp, Homo sapien
taacatagttgagtgcgtttgctgc

SEQ ID NO: 3595425 - DNA, 25 bp, Homo sapien
gaagcttttcaaggccatgcatgat

SEQ ID NO: 3595426 - DNA, 25 bp, Homo sapien
gcattacagggaggatctactttca

SEQ ID NO: 3595427 - DNA, 25 bp, Homo sapien
ttggtacttatttgggtaatcagaa

SEQ ID NO: 3595428 - DNA, 25 bp, Homo sapien
atatgatcagtctatgggaattctc

SEQ ID NO: 3595429 - DNA, 25 bp, Homo sapien
gggaattctccatagccccttcaag

SEQ ID NO: 3595430 - DNA, 25 bp, Homo sapien
gaatggcatgttcagctctgaaatt

SEQ ID NO: 3595431 - DNA, 25 bp, Homo sapien
agtaattgggagtcttgtgtactaa

SEQ ID NO: 3595432 - DNA, 25 bp, Homo sapien
aatagtaattgggagtcttgtgtac

SEQ ID NO: 3595433 - DNA, 25 bp, Homo sapien
gtaattgggagtcttgtgtactaag

SEQ ID NO: 3595434 - DNA, 25 bp, Homo sapien
agaaaatagtaattgggagtcttgt

SEQ ID NO: 3595435 - DNA, 25 bp, Homo sapien
taatgttcaagtgcaccaaaactcc

SEQ ID NO: 3595436 - DNA, 25 bp, Homo sapien
tagggacaccctggacacaaaataa

SEQ ID NO: 3595437 - DNA, 25 bp, Homo sapien
gagcactgtatcaggccctaggagg

SEQ ID NO: 3595438 - DNA, 25 bp, Homo sapien
caataaatatcgtgccttgccagga

SEQ ID NO: 3595439 - DNA, 25 bp, Homo sapien
caaatgttaggcacgaagacaggcc

SEQ ID NO: 3595440 - DNA, 25 bp, Homo sapien
gagtcaagggacatgcaatagggcc

SEQ ID NO: 3595441 - DNA, 25 bp, Homo sapien
gacaggccctaggtgaacttgagtg

SEQ ID NO: 3595442 - DNA, 25 bp, Homo sapien
atatggcccaaaggcagagataaga

SEQ ID NO: 3595443 - DNA, 25 bp, Homo sapien
ctgccaggtaactgtcttcttcaca

SEQ ID NO: 3595444 - DNA, 25 bp, Homo sapien
gagtcaatcaaagctcgggtcttat

SEQ ID NO: 3595445 - DNA, 25 bp, Homo sapien
tggcatgcctgtgcccctttcggaa

SEQ ID NO: 3595446 - DNA, 25 bp, Homo sapien
cctttcggaataacggagtcaatca

SEQ ID NO: 3595447 - DNA, 25 bp, Homo sapien
agcacccttgtctgtaataattcat

SEQ ID NO: 3595448 - DNA, 25 bp, Homo sapien
tctgtaataattcatccagtaagcc

SEQ ID NO: 3595449 - DNA, 25 bp, Homo sapien
catccagtaagccatttattgtacc

SEQ ID NO: 3595450 - DNA, 25 bp, Homo sapien
cagtaagccatttattgtaccttca

SEQ ID NO: 3595451 - DNA, 25 bp, Homo sapien
gtagtccccatatatgtgcatggag

SEQ ID NO: 3595452 - DNA, 25 bp, Homo sapien
tggaaagcagagatcatcctcttgt

SEQ ID NO: 3595453 - DNA, 25 bp, Homo sapien
gagatcatcctcttgtgtcccatgt

SEQ ID NO: 3595454 - DNA, 25 bp, Homo sapien
tgtcctacttgtttccctcagtagt

SEQ ID NO: 3595455 - DNA, 25 bp, Homo sapien
gatactaattatggcttccagaaga

SEQ ID NO: 3595456 - DNA, 25 bp, Homo sapien
tcttcccagggacctgttcttggaa

SEQ ID NO: 3595457 - DNA, 25 bp, Homo sapien
aacttccacagatactaattatggc

SEQ ID NO: 3595458 - DNA, 25 bp, Homo sapien
agaagagccagccctttccacaact

SEQ ID NO: 3595459 - DNA, 25 bp, Homo sapien
cttttctctcctacccttcttgtgt

SEQ ID NO: 3595460 - DNA, 25 bp, Homo sapien
gcttttctctcctacccttcttgtg

SEQ ID NO: 3595461 - DNA, 25 bp, Homo sapien
ttttctctcctacccttcttgtgtg

SEQ ID NO: 3595462 - DNA, 25 bp, Homo sapien
tgggtccagaattgtaggagaggga

SEQ ID NO: 3595463 - DNA, 25 bp, Homo sapien
tgtgggtccagaattgtaggagagg

SEQ ID NO: 3595464 - DNA, 25 bp, Homo sapien
ctttgaagatcgaagatgttcatca

SEQ ID NO: 3595465 - DNA, 25 bp, Homo sapien
ctgctttgaagatcgaagatgttca

SEQ ID NO: 3595466 - DNA, 25 bp, Homo sapien
cttgaggacaaagcttgagagtatt

SEQ ID NO: 3595467 - DNA, 25 bp, Homo sapien
ggacaaagcttgagagtatttgtag

SEQ ID NO: 3595468 - DNA, 25 bp, Homo sapien
aaagcttgagagtatttgtagattc

SEQ ID NO: 3595469 - DNA, 25 bp, Homo sapien
tgaggacaaagcttgagagtatttg

SEQ ID NO: 3595470 - DNA, 25 bp, Homo sapien
aggttcctatcagccgacactcaga

SEQ ID NO: 3595471 - DNA, 25 bp, Homo sapien
tagtcttacggccacttctaggttc

SEQ ID NO: 3595472 - DNA, 25 bp, Homo sapien
gaaggaagccttggttatctatggg

SEQ ID NO: 3595473 - DNA, 25 bp, Homo sapien
taaagttataccaccaatgagaaca

SEQ ID NO: 3595474 - DNA, 25 bp, Homo sapien
ggtggaaacgtcttgtcaaagtcat

SEQ ID NO: 3595475 - DNA, 25 bp, Homo sapien
gtggaaacgtcttgtcaaagtcatc

SEQ ID NO: 3595476 - DNA, 25 bp, Homo sapien
tggaaacgtcttgtcaaagtcatcc

SEQ ID NO: 3595477 - DNA, 25 bp, Homo sapien
ctaatagccatgagggagacacagg

SEQ ID NO: 3595478 - DNA, 25 bp, Homo sapien
cacaggcgaattagagtccgctcat

SEQ ID NO: 3595479 - DNA, 25 bp, Homo sapien
ggagacacaggcgaattagagtccg

SEQ ID NO: 3595480 - DNA, 25 bp, Homo sapien
gcgaattagagtccgctcatttgtc

SEQ ID NO: 3595481 - DNA, 25 bp, Homo sapien
tgtgggctttcttaatagcatcatc

SEQ ID NO: 3595482 - DNA, 25 bp, Homo sapien
gagttggtaaagatatattttcaga

SEQ ID NO: 3595483 - DNA, 25 bp, Homo sapien
agttggtaaagatatattttcagag

SEQ ID NO: 3595484 - DNA, 25 bp, Homo sapien
tgggctttcttaatagcatcatcct

SEQ ID NO: 3595485 - DNA, 25 bp, Homo sapien
catgagacaagaacaccgggaaggt

SEQ ID NO: 3595486 - DNA, 25 bp, Homo sapien
gaacaccatgagacaagaacaccgg

SEQ ID NO: 3595487 - DNA, 25 bp, Homo sapien
acagcaggcctcgaagatgatcacc

SEQ ID NO: 3595488 - DNA, 25 bp, Homo sapien
taatatatcacggacttgttcagag

SEQ ID NO: 3595489 - DNA, 25 bp, Homo sapien
ctgggcggtgagcaaatgcctccag

SEQ ID NO: 3595490 - DNA, 25 bp, Homo sapien
tgggcggtgagcaaatgcctccagc

SEQ ID NO: 3595491 - DNA, 25 bp, Homo sapien
atgcctccagctctgtagtcatttc

SEQ ID NO: 3595492 - DNA, 25 bp, Homo sapien
caaatgcctccagctctgtagtcat

SEQ ID NO: 3595493 - DNA, 25 bp, Homo sapien
taccactgattttggactatgtaat

SEQ ID NO: 3595494 - DNA, 25 bp, Homo sapien
ttttggactatgtaattaactctca

SEQ ID NO: 3595495 - DNA, 25 bp, Homo sapien
ctgaaagagaccataccactgattt

SEQ ID NO: 3595496 - DNA, 25 bp, Homo sapien
actatgtaattaactctcatggaac

SEQ ID NO: 3595497 - DNA, 25 bp, Homo sapien
accttgtaccccagattttgcagca

SEQ ID NO: 3595498 - DNA, 25 bp, Homo sapien
ccttgtaccccagattttgcagcag

SEQ ID NO: 3595499 - DNA, 25 bp, Homo sapien
cttgtaccccagattttgcagcagc

SEQ ID NO: 3595500 - DNA, 25 bp, Homo sapien
taacagagtcaagcaaatctcgggc

SEQ ID NO: 3595501 - DNA, 25 bp, Homo sapien
tctcgggccttatcgataactgtaa

SEQ ID NO: 3595502 - DNA, 25 bp, Homo sapien
gatgcaaatttcacatgcccgtgcc

SEQ ID NO: 3595503 - DNA, 25 bp, Homo sapien
catttgtctccaataattcatccag

SEQ ID NO: 3595504 - DNA, 25 bp, Homo sapien
gccgtctcttcttcaggaggatcat

SEQ ID NO: 3595505 - DNA, 25 bp, Homo sapien
gataagcagccgtctcttcttcagg

SEQ ID NO: 3595506 - DNA, 25 bp, Homo sapien
taagcagccgtctcttcttcaggag

SEQ ID NO: 3595507 - DNA, 25 bp, Homo sapien
agcagccgtctcttcttcaggagga

SEQ ID NO: 3595508 - DNA, 25 bp, Homo sapien
cacatcatgaacacagcctcatatt

SEQ ID NO: 3595509 - DNA, 25 bp, Homo sapien
ctgtttggagcacaaggatgtctca

SEQ ID NO: 3595510 - DNA, 25 bp, Homo sapien
gatgtctcacatcatgaacacagcc

SEQ ID NO: 3595511 - DNA, 25 bp, Homo sapien
ttggagcacaaggatgtctcacatc

SEQ ID NO: 3595512 - DNA, 25 bp, Homo sapien
tgtgcagaatggatcggagagttaa

SEQ ID NO: 3595513 - DNA, 25 bp, Homo sapien
gctttttcagcgtcgttatataaga

SEQ ID NO: 3595514 - DNA, 25 bp, Homo sapien
tataagacaggagacccgaaagttg

SEQ ID NO: 3595515 - DNA, 25 bp, Homo sapien
ccgaaagttgtgtgcagaatggatc

SEQ ID NO: 3595516 - DNA, 25 bp, Homo sapien
taaagggcagaaacgtgcaattaca

SEQ ID NO: 3595517 - DNA, 25 bp, Homo sapien
gtaaagggcagaaacgtgcaattac

SEQ ID NO: 3595518 - DNA, 25 bp, Homo sapien
agtgccttgtcgtcagcaagttgac

SEQ ID NO: 3595519 - DNA, 25 bp, Homo sapien
aagtgccttgtcgtcagcaagttga

SEQ ID NO: 3595520 - DNA, 25 bp, Homo sapien
ttctcttcctgatctctcagttttt

SEQ ID NO: 3595521 - DNA, 25 bp, Homo sapien
ctcttctcttcctgatctctcagtt

SEQ ID NO: 3595522 - DNA, 25 bp, Homo sapien
ctcttcctgatctctcagtttttct

SEQ ID NO: 3595523 - DNA, 25 bp, Homo sapien
tctatccatctgtctcttctcttcc

SEQ ID NO: 3595524 - DNA, 25 bp, Homo sapien
tccatcgatgatacccaggtgaaca

SEQ ID NO: 3595525 - DNA, 25 bp, Homo sapien
caggtaagtgcctctctgggacgaa

SEQ ID NO: 3595526 - DNA, 25 bp, Homo sapien
tgcaggagagttccaacaggcatca

SEQ ID NO: 3595527 - DNA, 25 bp, Homo sapien
cccagcgaattgcagcagacctgca

SEQ ID NO: 3595528 - DNA, 25 bp, Homo sapien
tctcaatcggtagacttcgagtcct

SEQ ID NO: 3595529 - DNA, 25 bp, Homo sapien
ttctgtatattatgccacggcttga

SEQ ID NO: 3595530 - DNA, 25 bp, Homo sapien
tgtgggcgctcacacagttttggat

SEQ ID NO: 3595531 - DNA, 25 bp, Homo sapien
taccaccaatgggaacatatgcaac

SEQ ID NO: 3595532 - DNA, 25 bp, Homo sapien
cggccctcagacattcatacagctt

SEQ ID NO: 3595533 - DNA, 25 bp, Homo sapien
gagatagaaacgtcttgtcgaagta

SEQ ID NO: 3595534 - DNA, 25 bp, Homo sapien
cgtcttgtcgaagtaactctttcag

SEQ ID NO: 3595535 - DNA, 25 bp, Homo sapien
tagaaacgtcttgtcgaagtaactc

SEQ ID NO: 3595536 - DNA, 25 bp, Homo sapien
gggaagagatagaaacgtcttgtcg

SEQ ID NO: 3595537 - DNA, 25 bp, Homo sapien
tctcaggaaactgccatacaaggtg

SEQ ID NO: 3595538 - DNA, 25 bp, Homo sapien
tatatagagggccatgaatgtcatg

SEQ ID NO: 3595539 - DNA, 25 bp, Homo sapien
tcagcaggattggtgatgagaagcc

SEQ ID NO: 3595540 - DNA, 25 bp, Homo sapien
aaaatttaactacttgagcagaggc

SEQ ID NO: 3595541 - DNA, 25 bp, Homo sapien
tgcacaggtatctaccctctagtgg

SEQ ID NO: 3595542 - DNA, 25 bp, Homo sapien
tgctctttgaggataaagggaatcc

SEQ ID NO: 3595543 - DNA, 25 bp, Homo sapien
tcttatctaaagttctgcacaggta

SEQ ID NO: 3595544 - DNA, 25 bp, Homo sapien
aagggaatcctgtgtataacttgga

SEQ ID NO: 3595545 - DNA, 25 bp, Homo sapien
ctctatgtgtacttgattaatagca

SEQ ID NO: 3595546 - DNA, 25 bp, Homo sapien
cagaggccggtactgaatcttttac

SEQ ID NO: 3595547 - DNA, 25 bp, Homo sapien
ttggtaaagatatattttcagaggc

SEQ ID NO: 3595548 - DNA, 25 bp, Homo sapien
gtgtacttgattaatagcatcatcc

SEQ ID NO: 3595549 - DNA, 25 bp, Homo sapien
tgaggacagtatttgaatgtctggt

SEQ ID NO: 3595550 - DNA, 25 bp, Homo sapien
tgaatgtctggtgttctcaaagaca

SEQ ID NO: 3595551 - DNA, 25 bp, Homo sapien
tgagtgctgacagtgtatgttcttt

SEQ ID NO: 3595552 - DNA, 25 bp, Homo sapien
gctgacagtgtatgttctttgacac

SEQ ID NO: 3595553 - DNA, 25 bp, Homo sapien
gattatcaccttgggtttgtccttc

SEQ ID NO: 3595554 - DNA, 25 bp, Homo sapien
acatggcaggcctggatgattatca

SEQ ID NO: 3595555 - DNA, 25 bp, Homo sapien
caacatggcaggcctggatgattat

SEQ ID NO: 3595556 - DNA, 25 bp, Homo sapien
atgattatcaccttgggtttgtcct

SEQ ID NO: 3595557 - DNA, 25 bp, Homo sapien
cgaataccatgagaccagaggcctt

SEQ ID NO: 3595558 - DNA, 25 bp, Homo sapien
gggcagttcttgctattcaacgttt

SEQ ID NO: 3595559 - DNA, 25 bp, Homo sapien
cttcccgaataccatgagaccagag

SEQ ID NO: 3595560 - DNA, 25 bp, Homo sapien
gagaaaatacctccaactctgtagt

SEQ ID NO: 3595561 - DNA, 25 bp, Homo sapien
tgtaccccagattttgtagcagcat

SEQ ID NO: 3595562 - DNA, 25 bp, Homo sapien
tttgttaaagataatgagagcaagc

SEQ ID NO: 3595563 - DNA, 25 bp, Homo sapien
gactgtcaaactctttgttaaagat

SEQ ID NO: 3595564 - DNA, 25 bp, Homo sapien
cagctcccactcttttagaaagact

SEQ ID NO: 3595565 - DNA, 25 bp, Homo sapien
gaaagactgtcaaactctttgttaa

SEQ ID NO: 3595566 - DNA, 25 bp, Homo sapien
gaagcttttcaaggccatgcatgaa

SEQ ID NO: 3595567 - DNA, 25 bp, Homo sapien
cagccagagatttccaggtgtgcaa

SEQ ID NO: 3595568 - DNA, 25 bp, Homo sapien
cacagcctgaggagtcgcaagagtc

SEQ ID NO: 3595569 - DNA, 25 bp, Homo sapien
caacattaatgtcacgggaagccac

SEQ ID NO: 3595570 - DNA, 25 bp, Homo sapien
ctaggaaggaagtactatttgagaa

SEQ ID NO: 3595571 - DNA, 25 bp, Homo sapien
gaagtactatttgagaatcttgtgt

SEQ ID NO: 3595572 - DNA, 25 bp, Homo sapien
tagtaaggtgatttccagatgttgg

SEQ ID NO: 3595573 - DNA, 25 bp, Homo sapien
gtagtaaggtgatttccagatgttg

SEQ ID NO: 3595574 - DNA, 25 bp, Homo sapien
taacagagtcaagcaaagctcgggc

SEQ ID NO: 3595575 - DNA, 25 bp, Homo sapien
aagccatttattgtaccttcgccca

SEQ ID NO: 3595576 - DNA, 25 bp, Homo sapien
ttcgcccactgaacggataaactgc

SEQ ID NO: 3595577 - DNA, 25 bp, Homo sapien
tgatgcaaatttggcatgctggagc

SEQ ID NO: 3595578 - DNA, 25 bp, Homo sapien
gcaagcgccttccacaactttttcc

SEQ ID NO: 3595579 - DNA, 25 bp, Homo sapien
caagcgccttccacaactttttcct

SEQ ID NO: 3595580 - DNA, 25 bp, Homo sapien
gaattccaggctcattgtaaggaag

SEQ ID NO: 3595581 - DNA, 25 bp, Homo sapien
gaagtgccttgtcgtcagcaagttg

SEQ ID NO: 3595582 - DNA, 25 bp, Homo sapien
aggaagtgccttgtcgtcagcaagt

SEQ ID NO: 3595583 - DNA, 25 bp, Homo sapien
gtaaggaagtgccttgtcgtcagca

SEQ ID NO: 3595584 - DNA, 25 bp, Homo sapien
ctgttcatggatttgtcggtagtaa

SEQ ID NO: 3595585 - DNA, 25 bp, Homo sapien
tcaagaagtctgtaaactactgaag

SEQ ID NO: 3595586 - DNA, 25 bp, Homo sapien
caaagggtagaaatatggaggttct

SEQ ID NO: 3595587 - DNA, 25 bp, Homo sapien
cttttcaagaagtctgtaaactact

SEQ ID NO: 3595588 - DNA, 25 bp, Homo sapien
gtagaagcgtattgtcaaagtcatc

SEQ ID NO: 3595589 - DNA, 25 bp, Homo sapien
ggaagaggtagaagcgtattgtcaa

SEQ ID NO: 3595590 - DNA, 25 bp, Homo sapien
aatgttctgggaagaggtagaagcg

SEQ ID NO: 3595591 - DNA, 25 bp, Homo sapien
ttctgggaagaggtagaagcgtatt

SEQ ID NO: 3595592 - DNA, 25 bp, Homo sapien
ctggctgctcaaatgaaagtcgaac

SEQ ID NO: 3595593 - DNA, 25 bp, Homo sapien
catctggctgctcaaatgaaagtcg

SEQ ID NO: 3595594 - DNA, 25 bp, Homo sapien
tgctcaaatgaaagtcgaacccgaa

SEQ ID NO: 3595595 - DNA, 25 bp, Homo sapien
tcaaatgaaagtcgaacccgaaaga

SEQ ID NO: 3595596 - DNA, 25 bp, Homo sapien
tcctccacatcacaggaacaggcat

SEQ ID NO: 3595597 - DNA, 25 bp, Homo sapien
tttcctccacatcacaggaacaggc

SEQ ID NO: 3595598 - DNA, 25 bp, Homo sapien
aatttcctccacatcacaggaacag

SEQ ID NO: 3595599 - DNA, 25 bp, Homo sapien
cttgcagaaaatttcctccacatca

SEQ ID NO: 3595600 - DNA, 25 bp, Homo sapien
tcttgcagatgttcaatgagtctca

SEQ ID NO: 3595601 - DNA, 25 bp, Homo sapien
ttcttgcagatgttcaatgagtctc

SEQ ID NO: 3595602 - DNA, 25 bp, Homo sapien
attcttgcagatgttcaatgagtct

SEQ ID NO: 3595603 - DNA, 25 bp, Homo sapien
cttgcagatgttcaatgagtctcat

SEQ ID NO: 3595604 - DNA, 25 bp, Homo sapien
tctctacaggattgcaaaggaacta

SEQ ID NO: 3595605 - DNA, 25 bp, Homo sapien
tacattacaatcatcatgaccttca

SEQ ID NO: 3595606 - DNA, 25 bp, Homo sapien
catgaccttcattattattgatgaa

SEQ ID NO: 3595607 - DNA, 25 bp, Homo sapien
caaagtaagctgtacatgtctctac

SEQ ID NO: 3595608 - DNA, 25 bp, Homo sapien
gaaagatttattggaaattgatgaa

SEQ ID NO: 3595609 - DNA, 25 bp, Homo sapien
agaatgaaagatttattggaaattg

SEQ ID NO: 3595610 - DNA, 25 bp, Homo sapien
attaatcaggtttgaaaaaagcact

SEQ ID NO: 3595611 - DNA, 25 bp, Homo sapien
tgatgaaattaatcaggtttgaaaa

SEQ ID NO: 3595612 - DNA, 25 bp, Homo sapien
gaatatcttctcccttggaagaagc

SEQ ID NO: 3595613 - DNA, 25 bp, Homo sapien
cttggaagaagctctgggaagtctc

SEQ ID NO: 3595614 - DNA, 25 bp, Homo sapien
ttggaagaagctctgggaagtctct

SEQ ID NO: 3595615 - DNA, 25 bp, Homo sapien
atatcttctcccttggaagaagctc

SEQ ID NO: 3595616 - DNA, 25 bp, Homo sapien
gaatgggccagctcagatacaagag

SEQ ID NO: 3595617 - DNA, 25 bp, Homo sapien
gagcctgcatcagggctcttaggag

SEQ ID NO: 3595618 - DNA, 25 bp, Homo sapien
aaaagtggtattggaatgggccagc

SEQ ID NO: 3595619 - DNA, 25 bp, Homo sapien
ctcagatacaagagcctgcatcagg

SEQ ID NO: 3595620 - DNA, 25 bp, Homo sapien
tctaataggcaatccagcaaggcat

SEQ ID NO: 3595621 - DNA, 25 bp, Homo sapien
tgtgcctgcacccactgaatggata

SEQ ID NO: 3595622 - DNA, 25 bp, Homo sapien
gcaagacttgggtccttttccagta

SEQ ID NO: 3595623 - DNA, 25 bp, Homo sapien
gactcgagccttatccatgacagtg

SEQ ID NO: 3595624 - DNA, 25 bp, Homo sapien
tccctctcaatttaccaacagggta

SEQ ID NO: 3595625 - DNA, 25 bp, Homo sapien
tgttggaagcacaaagattcctcaa

SEQ ID NO: 3595626 - DNA, 25 bp, Homo sapien
tttatctgttccttcaaaaacgctg

SEQ ID NO: 3595627 - DNA, 25 bp, Homo sapien
tctgttccttcaaaaacgctgtgca

SEQ ID NO: 3595628 - DNA, 25 bp, Homo sapien
tgttccttcaaaaacgctgtgcaag

SEQ ID NO: 3595629 - DNA, 25 bp, Homo sapien
ttcaaaaacgctgtgcaagtctggg

SEQ ID NO: 3595630 - DNA, 25 bp, Homo sapien
tgccgaaagactgataaaattcctt

SEQ ID NO: 3595631 - DNA, 25 bp, Homo sapien
ggaggtaggaaagcagtggtcagac

SEQ ID NO: 3595632 - DNA, 25 bp, Homo sapien
gttctcaggtttccctccgagcagc

SEQ ID NO: 3595633 - DNA, 25 bp, Homo sapien
gcagtggtcagactctgccgaaaga

SEQ ID NO: 3595634 - DNA, 25 bp, Homo sapien
cctgttcctcggcaaagacaatcag

SEQ ID NO: 3595635 - DNA, 25 bp, Homo sapien
ccagaatgaagcagtagttgggggc

SEQ ID NO: 3595636 - DNA, 25 bp, Homo sapien
cagcagcatcggaatcatagaaagg

SEQ ID NO: 3595637 - DNA, 25 bp, Homo sapien
tcctgttcctcggcaaagacaatca

SEQ ID NO: 3595638 - DNA, 25 bp, Homo sapien
tggaagtaggggtctatgcagagga

SEQ ID NO: 3595639 - DNA, 25 bp, Homo sapien
ggaagtaggggtctatgcagaggag

SEQ ID NO: 3595640 - DNA, 25 bp, Homo sapien
gaagtaggggtctatgcagaggagg

SEQ ID NO: 3595641 - DNA, 25 bp, Homo sapien
aagtaggggtctatgcagaggaggt

SEQ ID NO: 3595642 - DNA, 25 bp, Homo sapien
gaagaaatcttgattgaagcaccag

SEQ ID NO: 3595643 - DNA, 25 bp, Homo sapien
agcaccagcaagtatgtttcttgcc

SEQ ID NO: 3595644 - DNA, 25 bp, Homo sapien
agaagaaatcttgattgaagcacca

SEQ ID NO: 3595645 - DNA, 25 bp, Homo sapien
ggtgcgctagtgtctttggctgcat

SEQ ID NO: 3595646 - DNA, 25 bp, Homo sapien
gtttcctgggtatgcatctcatttg

SEQ ID NO: 3595647 - DNA, 25 bp, Homo sapien
tctcatttggcaatctcacaggaag

SEQ ID NO: 3595648 - DNA, 25 bp, Homo sapien
aagaaggtgcgctagtgtctttggc

SEQ ID NO: 3595649 - DNA, 25 bp, Homo sapien
cctaattcataaaatagtgcctctt

SEQ ID NO: 3595650 - DNA, 25 bp, Homo sapien
gcctcttgtctttaggaactgttca

SEQ ID NO: 3595651 - DNA, 25 bp, Homo sapien
ctgtctcctagtaatttccgtgttt

SEQ ID NO: 3595652 - DNA, 25 bp, Homo sapien
ttcaagtaactagtgtctccttagg

SEQ ID NO: 3595653 - DNA, 25 bp, Homo sapien
tgtaagatgattcctttagcttatg

SEQ ID NO: 3595654 - DNA, 25 bp, Homo sapien
tttggggatccagccttactccatt

SEQ ID NO: 3595655 - DNA, 25 bp, Homo sapien
tacacataagtgttccaggcttgtt

SEQ ID NO: 3595656 - DNA, 25 bp, Homo sapien
taatagtctgagcattctacacata

SEQ ID NO: 3595657 - DNA, 25 bp, Homo sapien
aaagcatgaaggctcccaagttcaa

SEQ ID NO: 3595658 - DNA, 25 bp, Homo sapien
ctggatatgcaatccactggaagga

SEQ ID NO: 3595659 - DNA, 25 bp, Homo sapien
ttatctggatatgcaatccactgga

SEQ ID NO: 3595660 - DNA, 25 bp, Homo sapien
catgaaggctcccaagttcaacatt

SEQ ID NO: 3595661 - DNA, 25 bp, Homo sapien
catcctgtctttcaccagccaagga

SEQ ID NO: 3595662 - DNA, 25 bp, Homo sapien
tgtctttcaccagccaaggaatgca

SEQ ID NO: 3595663 - DNA, 25 bp, Homo sapien
cctgtctttcaccagccaaggaatg

SEQ ID NO: 3595664 - DNA, 25 bp, Homo sapien
atcatcctgtctttcaccagccaag

SEQ ID NO: 3595665 - DNA, 25 bp, Homo sapien
attactttgaaaacaggcattatct

SEQ ID NO: 3595666 - DNA, 25 bp, Homo sapien
tctttatcaagacgtcctcaaatat

SEQ ID NO: 3595667 - DNA, 25 bp, Homo sapien
acaggcattatctttatcaagacgt

SEQ ID NO: 3595668 - DNA, 25 bp, Homo sapien
tcaagacgtcctcaaatatcagttc

SEQ ID NO: 3595669 - DNA, 25 bp, Homo sapien
tatcaaagctccctggcgaattggc

SEQ ID NO: 3595670 - DNA, 25 bp, Homo sapien
ttagtgatcagtgcttcaaatggac

SEQ ID NO: 3595671 - DNA, 25 bp, Homo sapien
gagtgtactgagattacccctctac

SEQ ID NO: 3595672 - DNA, 25 bp, Homo sapien
tcttaaagctaaactacagtgtgca

SEQ ID NO: 3595673 - DNA, 25 bp, Homo sapien
cataccactggcataagagatgttc

SEQ ID NO: 3595674 - DNA, 25 bp, Homo sapien
tagagcgcaatccatggttcccagt

SEQ ID NO: 3595675 - DNA, 25 bp, Homo sapien
atcaccaccagtagagcgcaatcca

SEQ ID NO: 3595676 - DNA, 25 bp, Homo sapien
gccacagccataacaacagtataag

SEQ ID NO: 3595677 - DNA, 25 bp, Homo sapien
tgtaattaaaagatggaactgatgg

SEQ ID NO: 3595678 - DNA, 25 bp, Homo sapien
gatgggagtccaggtatgacagaat

SEQ ID NO: 3595679 - DNA, 25 bp, Homo sapien
gaaaagagaataagtaccgagagtg

SEQ ID NO: 3595680 - DNA, 25 bp, Homo sapien
aagatggaactgatggtgtagcaga

SEQ ID NO: 3595681 - DNA, 25 bp, Homo sapien
gcagaaaagcttgaagtgtatgtta

SEQ ID NO: 3595682 - DNA, 25 bp, Homo sapien
agaaatttctgaactgagatgacga

SEQ ID NO: 3595683 - DNA, 25 bp, Homo sapien
tgagatgacgagctcgagttgagtc

SEQ ID NO: 3595684 - DNA, 25 bp, Homo sapien
cagcccacgttgtaaggttctcaca

SEQ ID NO: 3595685 - DNA, 25 bp, Homo sapien
acatccgatatgacaatttccaaca

SEQ ID NO: 3595686 - DNA, 25 bp, Homo sapien
aataacatccgatatgacaatttcc

SEQ ID NO: 3595687 - DNA, 25 bp, Homo sapien
aaccaataacatccgatatgacaat

SEQ ID NO: 3595688 - DNA, 25 bp, Homo sapien
taacatccgatatgacaatttccaa

SEQ ID NO: 3595689 - DNA, 25 bp, Homo sapien
acaggatgaagtggaatggtgcatc

SEQ ID NO: 3595690 - DNA, 25 bp, Homo sapien
ttcttgtgatgaagacaggatgaag

SEQ ID NO: 3595691 - DNA, 25 bp, Homo sapien
atgaagacaggatgaagtggaatgg

SEQ ID NO: 3595692 - DNA, 25 bp, Homo sapien
tttcttcttgtgatgaagacaggat

SEQ ID NO: 3595693 - DNA, 25 bp, Homo sapien
gctctactcagatatcctagacgta

SEQ ID NO: 3595694 - DNA, 25 bp, Homo sapien
tatcctagacgtaatttcttgttag

SEQ ID NO: 3595695 - DNA, 25 bp, Homo sapien
aagaggtggaagtaatcagctgctc

SEQ ID NO: 3595696 - DNA, 25 bp, Homo sapien
tctttaagaggtggaagtaatcagc

SEQ ID NO: 3595697 - DNA, 25 bp, Homo sapien
cagtaactgtaagtcatagcacaca

SEQ ID NO: 3595698 - DNA, 25 bp, Homo sapien
tcaacttgggacactcatgcacttc

SEQ ID NO: 3595699 - DNA, 25 bp, Homo sapien
tattatagaatttgtgcagtaactg

SEQ ID NO: 3595700 - DNA, 25 bp, Homo sapien
gcaggagaagcttttcactggtctc

SEQ ID NO: 3595701 - DNA, 25 bp, Homo sapien
ccagagactaatgtcataatggaat

SEQ ID NO: 3595702 - DNA, 25 bp, Homo sapien
tcagataattgtgaccagagactaa

SEQ ID NO: 3595703 - DNA, 25 bp, Homo sapien
taattgtgaccagagactaatgtca

SEQ ID NO: 3595704 - DNA, 25 bp, Homo sapien
tgtgaccagagactaatgtcataat

SEQ ID NO: 3595705 - DNA, 25 bp, Homo sapien
taagatggctgacgagaagtggctc

SEQ ID NO: 3595706 - DNA, 25 bp, Homo sapien
tattaacagaactatcgggagggag

SEQ ID NO: 3595707 - DNA, 25 bp, Homo sapien
cacttgtattgtcaaaagcgtagta

SEQ ID NO: 3595708 - DNA, 25 bp, Homo sapien
caaatatggcaagttaaccctgcac

SEQ ID NO: 3595709 - DNA, 25 bp, Homo sapien
caatcttccttacgccaatctggtg

SEQ ID NO: 3595710 - DNA, 25 bp, Homo sapien
tggcatactccattgccgtcttggg

SEQ ID NO: 3595711 - DNA, 25 bp, Homo sapien
tgttcacaaacatgatgccagactg

SEQ ID NO: 3595712 - DNA, 25 bp, Homo sapien
taccatgtaggtgggcacgtgccac

SEQ ID NO: 3595713 - DNA, 25 bp, Homo sapien
gtaaaattgttgctgacacttattt

SEQ ID NO: 3595714 - DNA, 25 bp, Homo sapien
atgtaaaattgttgctgacacttat

SEQ ID NO: 3595715 - DNA, 25 bp, Homo sapien
aattgttgctgacacttattttcca

SEQ ID NO: 3595716 - DNA, 25 bp, Homo sapien
attctacacccttaataaccacagc

SEQ ID NO: 3595717 - DNA, 25 bp, Homo sapien
cctggctactccaaagtagatgatt

SEQ ID NO: 3595718 - DNA, 25 bp, Homo sapien
acttccaattcagttaccctggcta

SEQ ID NO: 3595719 - DNA, 25 bp, Homo sapien
tagatgattcccagcaccactttca

SEQ ID NO: 3595720 - DNA, 25 bp, Homo sapien
actttcaccttcaactcacacggtg

SEQ ID NO: 3595721 - DNA, 25 bp, Homo sapien
tatactttggctacattaaatttat

SEQ ID NO: 3595722 - DNA, 25 bp, Homo sapien
gtatactttggctacattaaattta

SEQ ID NO: 3595723 - DNA, 25 bp, Homo sapien
cattactatacactattgtaggctt

SEQ ID NO: 3595724 - DNA, 25 bp, Homo sapien
actatacactattgtaggctttata

SEQ ID NO: 3595725 - DNA, 25 bp, Homo sapien
aagagtggaaacaactactagccca

SEQ ID NO: 3595726 - DNA, 25 bp, Homo sapien
tctgtcatcgaccaatacgttctga

SEQ ID NO: 3595727 - DNA, 25 bp, Homo sapien
tcagctccactacagtcttacaggg

SEQ ID NO: 3595728 - DNA, 25 bp, Homo sapien
caaagtaggactgtttacaccagca

SEQ ID NO: 3595729 - DNA, 25 bp, Homo sapien
tttttgttgttgttgctgtttatct

SEQ ID NO: 3595730 - DNA, 25 bp, Homo sapien
tttgttgttgttgctgtttatcttc

SEQ ID NO: 3595731 - DNA, 25 bp, Homo sapien
tgttgttgttgctgtttatcttcat

SEQ ID NO: 3595732 - DNA, 25 bp, Homo sapien
cttcaactctctctttttgttgttg

SEQ ID NO: 3595733 - DNA, 25 bp, Homo sapien
tggatcccttgtctggtcctagttt

SEQ ID NO: 3595734 - DNA, 25 bp, Homo sapien
cttggaattgcctgaatgtgtaaca

SEQ ID NO: 3595735 - DNA, 25 bp, Homo sapien
aatacaagaagagtcagtattcagg

SEQ ID NO: 3595736 - DNA, 25 bp, Homo sapien
tttgggatttgcttggaattgcctg

SEQ ID NO: 3595737 - DNA, 25 bp, Homo sapien
aacaaatacaagaagagtcagtatt

SEQ ID NO: 3595738 - DNA, 25 bp, Homo sapien
gagcaaacgctccaaaacaacctaa

SEQ ID NO: 3595739 - DNA, 25 bp, Homo sapien
tcctgtagccccaagcagaaagcac

SEQ ID NO: 3595740 - DNA, 25 bp, Homo sapien
tgtcacagacacttgcgctattggt

SEQ ID NO: 3595741 - DNA, 25 bp, Homo sapien
aagagtcattctaccagactgatgg

SEQ ID NO: 3595742 - DNA, 25 bp, Homo sapien
ggtgtgatcatccactcataaattt

SEQ ID NO: 3595743 - DNA, 25 bp, Homo sapien
taatacatagactaacttttgccag

SEQ ID NO: 3595744 - DNA, 25 bp, Homo sapien
tcattcagtgcttactctctccaaa

SEQ ID NO: 3595745 - DNA, 25 bp, Homo sapien
cttttgccagtaaatcacataacat

SEQ ID NO: 3595746 - DNA, 25 bp, Homo sapien
catctgagaggccatcctgaaactg

SEQ ID NO: 3595747 - DNA, 25 bp, Homo sapien
tcgactgcaaaggtagtgtgtggct

SEQ ID NO: 3595748 - DNA, 25 bp, Homo sapien
gaaagtaagatgaaggacccttgcc

SEQ ID NO: 3595749 - DNA, 25 bp, Homo sapien
tctggaattatggtacgtacatgct

SEQ ID NO: 3595750 - DNA, 25 bp, Homo sapien
gccacagtggtatgaagctataaat

SEQ ID NO: 3595751 - DNA, 25 bp, Homo sapien
ttaacattacacctcagagaactag

SEQ ID NO: 3595752 - DNA, 25 bp, Homo sapien
cgaaagattaatataacccagttgt

SEQ ID NO: 3595753 - DNA, 25 bp, Homo sapien
aatatgcccctgaacaaaaaactga

SEQ ID NO: 3595754 - DNA, 25 bp, Homo sapien
aagctcattgccctgaagcgtagga

SEQ ID NO: 3595755 - DNA, 25 bp, Homo sapien
ccaggcagcggtcaccttgagcctt

SEQ ID NO: 3595756 - DNA, 25 bp, Homo sapien
gacacatgtctgactagattcacca

SEQ ID NO: 3595757 - DNA, 25 bp, Homo sapien
ccttgggtaagacccggcgctgtgc

SEQ ID NO: 3595758 - DNA, 25 bp, Homo sapien
ctcaagagcagctggcggatggtca

SEQ ID NO: 3595759 - DNA, 25 bp, Homo sapien
gctgctgcaggtcaagaacagccag

SEQ ID NO: 3595760 - DNA, 25 bp, Homo sapien
tgaagagcagatgaacaaagctgct

SEQ ID NO: 3595761 - DNA, 25 bp, Homo sapien
ccttagggccttgaaatggagctta

SEQ ID NO: 3595762 - DNA, 25 bp, Homo sapien
gggttgatgtatggataggtggacg

SEQ ID NO: 3595763 - DNA, 25 bp, Homo sapien
aatgaatgggttgatgtatggatag

SEQ ID NO: 3595764 - DNA, 25 bp, Homo sapien
gaatgggttgatgtatggataggtg

SEQ ID NO: 3595765 - DNA, 25 bp, Homo sapien
gaatgaatgggttgatgtatggata

SEQ ID NO: 3595766 - DNA, 25 bp, Homo sapien
tttgctattgctattctgcctagaa

SEQ ID NO: 3595767 - DNA, 25 bp, Homo sapien
ggcaataaaaacacattaccccaga

SEQ ID NO: 3595768 - DNA, 25 bp, Homo sapien
ccagatcttggtgtttttaggcaaa

SEQ ID NO: 3595769 - DNA, 25 bp, Homo sapien
ggtacgctaagatcaatatcaagtg

SEQ ID NO: 3595770 - DNA, 25 bp, Homo sapien
aggctttcagaagcagtgccccaga

SEQ ID NO: 3595771 - DNA, 25 bp, Homo sapien
cagtggagattgtctgcaggtgtca

SEQ ID NO: 3595772 - DNA, 25 bp, Homo sapien
tcagctgccgattgtgagcagaggc

SEQ ID NO: 3595773 - DNA, 25 bp, Homo sapien
ccatgttccggaatgagacagtaca

SEQ ID NO: 3595774 - DNA, 25 bp, Homo sapien
taatgtcgatatatatttaaacagg

SEQ ID NO: 3595775 - DNA, 25 bp, Homo sapien
cagcccacagacctacaatagcagg

SEQ ID NO: 3595776 - DNA, 25 bp, Homo sapien
gccgagccccgccaatctcagatga

SEQ ID NO: 3595777 - DNA, 25 bp, Homo sapien
cagccaaagctatctaatgtcgata

SEQ ID NO: 3595778 - DNA, 25 bp, Homo sapien
actggttcaatttgttcatgtgtcc

SEQ ID NO: 3595779 - DNA, 25 bp, Homo sapien
tggttcaatttgttcatgtgtcctt

SEQ ID NO: 3595780 - DNA, 25 bp, Homo sapien
caatttgttcatgtgtcctttcaag

SEQ ID NO: 3595781 - DNA, 25 bp, Homo sapien
gttcaatttgttcatgtgtcctttc

SEQ ID NO: 3595782 - DNA, 25 bp, Homo sapien
tattaactgagctacttcccaccag

SEQ ID NO: 3595783 - DNA, 25 bp, Homo sapien
gctattgcttcaatctacaaaagga

SEQ ID NO: 3595784 - DNA, 25 bp, Homo sapien
cagtatacagttagtggctccattg

SEQ ID NO: 3595785 - DNA, 25 bp, Homo sapien
ggctccattgagtttatgctatagg

SEQ ID NO: 3595786 - DNA, 25 bp, Homo sapien
gaactgcgtgtggtgtgttacatca

SEQ ID NO: 3595787 - DNA, 25 bp, Homo sapien
tatacctactcagagaactttgctg

SEQ ID NO: 3595788 - DNA, 25 bp, Homo sapien
cagccatacactggacttcttgttt

SEQ ID NO: 3595789 - DNA, 25 bp, Homo sapien
gaaatgctttgcatagaactgcgtg

SEQ ID NO: 3595790 - DNA, 25 bp, Homo sapien
tacgtgtgttcttacaagttacatt

SEQ ID NO: 3595791 - DNA, 25 bp, Homo sapien
ctcccttttgctctacgtgtgttct

SEQ ID NO: 3595792 - DNA, 25 bp, Homo sapien
tgctctacgtgtgttcttacaagtt

SEQ ID NO: 3595793 - DNA, 25 bp, Homo sapien
ccttttgctctacgtgtgttcttac

SEQ ID NO: 3595794 - DNA, 25 bp, Homo sapien
tcttacaactgtcagcagatgacat

SEQ ID NO: 3595795 - DNA, 25 bp, Homo sapien
atgcttcaaaccttcagcaacattc

SEQ ID NO: 3595796 - DNA, 25 bp, Homo sapien
ttcaaaccttcagcaacattcttac

SEQ ID NO: 3595797 - DNA, 25 bp, Homo sapien
gcaacattcttacaactgtcagcag

SEQ ID NO: 3595798 - DNA, 25 bp, Homo sapien
ctctggtcaccctcaatacgatatt

SEQ ID NO: 3595799 - DNA, 25 bp, Homo sapien
ctggtcaccctcaatacgatatttt

SEQ ID NO: 3595800 - DNA, 25 bp, Homo sapien
caccctcaatacgatattttcaaaa

SEQ ID NO: 3595801 - DNA, 25 bp, Homo sapien
ggtcaccctcaatacgatattttca

SEQ ID NO: 3595802 - DNA, 25 bp, Homo sapien
gaacagcctttaggaagagtgcgag

SEQ ID NO: 3595803 - DNA, 25 bp, Homo sapien
gagcctttccgagcagcgtgcaaat

SEQ ID NO: 3595804 - DNA, 25 bp, Homo sapien
caggttccgttggaatacacccagg

SEQ ID NO: 3595805 - DNA, 25 bp, Homo sapien
caaataggtaaggtgtgctccgatg

SEQ ID NO: 3595806 - DNA, 25 bp, Homo sapien
gatcatccctattagtagttccaat

SEQ ID NO: 3595807 - DNA, 25 bp, Homo sapien
gctaaaccagagtagatcatcccta

SEQ ID NO: 3595808 - DNA, 25 bp, Homo sapien
tgtgttggcaattgcaagctgatgc

SEQ ID NO: 3595809 - DNA, 25 bp, Homo sapien
tgccagacacatattgctaaaccag

SEQ ID NO: 3595810 - DNA, 25 bp, Homo sapien
tcaatattgggcatgaggagcttcc

SEQ ID NO: 3595811 - DNA, 25 bp, Homo sapien
ggtaaatctcatcctcccagtcatc

SEQ ID NO: 3595812 - DNA, 25 bp, Homo sapien
attgggcatgaggagcttccatggc

SEQ ID NO: 3595813 - DNA, 25 bp, Homo sapien
attcccacagcagggtaaatctcat

SEQ ID NO: 3595814 - DNA, 25 bp, Homo sapien
gaaaatcagttttagtgatcccaca

SEQ ID NO: 3595815 - DNA, 25 bp, Homo sapien
taaagttgaagaagtagaccgctgg

SEQ ID NO: 3595816 - DNA, 25 bp, Homo sapien
ggacttgccgatgggtaaagttgaa

SEQ ID NO: 3595817 - DNA, 25 bp, Homo sapien
tctaggaagaacacaactggacctt

SEQ ID NO: 3595818 - DNA, 25 bp, Homo sapien
tagctgccttgaactgtcgtttgaa

SEQ ID NO: 3595819 - DNA, 25 bp, Homo sapien
tggtccagagattgagcatttagct

SEQ ID NO: 3595820 - DNA, 25 bp, Homo sapien
tagaccattcactggagagagaact

SEQ ID NO: 3595821 - DNA, 25 bp, Homo sapien
taacgattggtcagcatttatggca

SEQ ID NO: 3595822 - DNA, 25 bp, Homo sapien
tcactggagctaatacctgattata

SEQ ID NO: 3595823 - DNA, 25 bp, Homo sapien
tgattatagccatagagggcaccta

SEQ ID NO: 3595824 - DNA, 25 bp, Homo sapien
catagagggcacctataatcatagg

SEQ ID NO: 3595825 - DNA, 25 bp, Homo sapien
taatcataggtgtcagaaacctcat

SEQ ID NO: 3595826 - DNA, 25 bp, Homo sapien
gacacacattgttgactgacacatc

SEQ ID NO: 3595827 - DNA, 25 bp, Homo sapien
tggacacacattgttgactgacaca

SEQ ID NO: 3595828 - DNA, 25 bp, Homo sapien
ggacacacattgttgactgacacat

SEQ ID NO: 3595829 - DNA, 25 bp, Homo sapien
agcagatccaatggcctctctgagt

SEQ ID NO: 3595830 - DNA, 25 bp, Homo sapien
agatccaatggcctctctgagtgtg

SEQ ID NO: 3595831 - DNA, 25 bp, Homo sapien
cagatccaatggcctctctgagtgt

SEQ ID NO: 3595832 - DNA, 25 bp, Homo sapien
gcagatccaatggcctctctgagtg

SEQ ID NO: 3595833 - DNA, 25 bp, Homo sapien
cagtgtgttccactgatccatcact

SEQ ID NO: 3595834 - DNA, 25 bp, Homo sapien
ctcagtgtgttccactgatccatca

SEQ ID NO: 3595835 - DNA, 25 bp, Homo sapien
actttttctcagtgtgttccactga

SEQ ID NO: 3595836 - DNA, 25 bp, Homo sapien
tttctcagtgtgttccactgatcca

SEQ ID NO: 3595837 - DNA, 25 bp, Homo sapien
tttggcgtggcaagtcccaaatgtc

SEQ ID NO: 3595838 - DNA, 25 bp, Homo sapien
gtagtagcagcttcgaggtcccatc

SEQ ID NO: 3595839 - DNA, 25 bp, Homo sapien
ccaaatgtcacatccccagaggcag

SEQ ID NO: 3595840 - DNA, 25 bp, Homo sapien
tcccacattcttttggcgtggcaag

SEQ ID NO: 3595841 - DNA, 25 bp, Homo sapien
tgacacccgaatgccctcatgtgtt

SEQ ID NO: 3595842 - DNA, 25 bp, Homo sapien
tgttactgccgaaagctgagtgcaa

SEQ ID NO: 3595843 - DNA, 25 bp, Homo sapien
tcatgtgttgggtcaccttcagttc

SEQ ID NO: 3595844 - DNA, 25 bp, Homo sapien
tgctgcctagtccatctgctgttga

SEQ ID NO: 3595845 - DNA, 25 bp, Homo sapien
gcttttgaccccaactcacactctg

SEQ ID NO: 3595846 - DNA, 25 bp, Homo sapien
ttttgaccccaactcacactctgca

SEQ ID NO: 3595847 - DNA, 25 bp, Homo sapien
catgcttttgaccccaactcacact

SEQ ID NO: 3595848 - DNA, 25 bp, Homo sapien
tttgaccccaactcacactctgcat

SEQ ID NO: 3595849 - DNA, 25 bp, Homo sapien
aaataacctgcatgcctggctggtc

SEQ ID NO: 3595850 - DNA, 25 bp, Homo sapien
cattataaccactaatactcacagg

SEQ ID NO: 3595851 - DNA, 25 bp, Homo sapien
tcacaggtaaagaacgaatcttcat

SEQ ID NO: 3595852 - DNA, 25 bp, Homo sapien
gtcacaattccatccattataacca

SEQ ID NO: 3595853 - DNA, 25 bp, Homo sapien
tgctgttgatccaaagaccgtggag

SEQ ID NO: 3595854 - DNA, 25 bp, Homo sapien
tccccataagaagctagagatatca

SEQ ID NO: 3595855 - DNA, 25 bp, Homo sapien
tccagttcggatatgcagtcttccg

SEQ ID NO: 3595856 - DNA, 25 bp, Homo sapien
gaccgtggagcacctgagtccaaaa

SEQ ID NO: 3595857 - DNA, 25 bp, Homo sapien
catcatggtatgtggttccaaaagc

SEQ ID NO: 3595858 - DNA, 25 bp, Homo sapien
cattcatgtgtctggtggttggtca

SEQ ID NO: 3595859 - DNA, 25 bp, Homo sapien
ccttgacccctgcagttcagtggga

SEQ ID NO: 3595860 - DNA, 25 bp, Homo sapien
atctattggccgttatgatctagcc

SEQ ID NO: 3595861 - DNA, 25 bp, Homo sapien
gaagtcaagatcactagggtacaac

SEQ ID NO: 3595862 - DNA, 25 bp, Homo sapien
tatttgtggcagcaattggatggca

SEQ ID NO: 3595863 - DNA, 25 bp, Homo sapien
tttgtaactatctggtgagcctgcc

SEQ ID NO: 3595864 - DNA, 25 bp, Homo sapien
tgcttttcaggccacgtctagttga

SEQ ID NO: 3595865 - DNA, 25 bp, Homo sapien
ctgggtcatgtctataactggtgtg

SEQ ID NO: 3595866 - DNA, 25 bp, Homo sapien
tgtctataactggtgtgaatgaatg

SEQ ID NO: 3595867 - DNA, 25 bp, Homo sapien
tatgtcactaattgtgctgttctgg

SEQ ID NO: 3595868 - DNA, 25 bp, Homo sapien
gaatgaatgaagtgtctgtggatag

SEQ ID NO: 3595869 - DNA, 25 bp, Homo sapien
gacagattcattcttcggtgtagtt

SEQ ID NO: 3595870 - DNA, 25 bp, Homo sapien
gtaggaccacaaactctagacagat

SEQ ID NO: 3595871 - DNA, 25 bp, Homo sapien
gctcatccagaagtactaagatata

SEQ ID NO: 3595872 - DNA, 25 bp, Homo sapien
tcctgcccagatttactaacagtag

SEQ ID NO: 3595873 - DNA, 25 bp, Homo sapien
gtaacactccgcgttctttctgctt

SEQ ID NO: 3595874 - DNA, 25 bp, Homo sapien
tatatttcggtgtttgttgtggaac

SEQ ID NO: 3595875 - DNA, 25 bp, Homo sapien
gaaatatggtaacactccgcgttct

SEQ ID NO: 3595876 - DNA, 25 bp, Homo sapien
tatttcggtgtttgttgtggaacat

SEQ ID NO: 3595877 - DNA, 25 bp, Homo sapien
tctgaagccataagaaacaaagcca

SEQ ID NO: 3595878 - DNA, 25 bp, Homo sapien
gagaatggccgcgtcttgacgcctg

SEQ ID NO: 3595879 - DNA, 25 bp, Homo sapien
gctgtacacactggaactgcaatca

SEQ ID NO: 3595880 - DNA, 25 bp, Homo sapien
ttgacgcctgactgcccaaaggctg

SEQ ID NO: 3595881 - DNA, 25 bp, Homo sapien
tgtctccagaacatccatatagtcc

SEQ ID NO: 3595882 - DNA, 25 bp, Homo sapien
gataaaatagttgtagaagtccgtg

SEQ ID NO: 3595883 - DNA, 25 bp, Homo sapien
tgtcttcaccggaaaggataaaata

SEQ ID NO: 3595884 - DNA, 25 bp, Homo sapien
gaacatgctaacctgtgtctccaga

SEQ ID NO: 3595885 - DNA, 25 bp, Homo sapien
gacgtaaattcagtagaggacaaca

SEQ ID NO: 3595886 - DNA, 25 bp, Homo sapien
tatgtcacatgagtcgattcaccga

SEQ ID NO: 3595887 - DNA, 25 bp, Homo sapien
gattcaccgattgcatttgtctcac

SEQ ID NO: 3595888 - DNA, 25 bp, Homo sapien
gtttaggttcaatcatcagtctgcg

SEQ ID NO: 3595889 - DNA, 25 bp, Homo sapien
tttggccaccttaaactgatgcagt

SEQ ID NO: 3595890 - DNA, 25 bp, Homo sapien
gagctaattgccaacataaatggga

SEQ ID NO: 3595891 - DNA, 25 bp, Homo sapien
gagatttgcctaatcctttggccac

SEQ ID NO: 3595892 - DNA, 25 bp, Homo sapien
tctaagcacagtcagtatcagccag

SEQ ID NO: 3595893 - DNA, 25 bp, Homo sapien
cttgcacaggaacgggtgacactaa

SEQ ID NO: 3595894 - DNA, 25 bp, Homo sapien
taagcttccaagactaccatcaaag

SEQ ID NO: 3595895 - DNA, 25 bp, Homo sapien
aggcttgttgggacttgcacaggaa

SEQ ID NO: 3595896 - DNA, 25 bp, Homo sapien
gcttccaagactaccatcaaagtag

SEQ ID NO: 3595897 - DNA, 25 bp, Homo sapien
atttaatgaaaaccctgaggcttga

SEQ ID NO: 3595898 - DNA, 25 bp, Homo sapien
ttgagatttaatgaaaaccctgagg

SEQ ID NO: 3595899 - DNA, 25 bp, Homo sapien
gatttaatgaaaaccctgaggcttg

SEQ ID NO: 3595900 - DNA, 25 bp, Homo sapien
gagatttaatgaaaaccctgaggct

SEQ ID NO: 3595901 - DNA, 25 bp, Homo sapien
gtgtcttgtccgcattttcctccca

SEQ ID NO: 3595902 - DNA, 25 bp, Homo sapien
cacagcttcacatctaaatcgttcc

SEQ ID NO: 3595903 - DNA, 25 bp, Homo sapien
ccggtaggtctatatccatgtcatc

SEQ ID NO: 3595904 - DNA, 25 bp, Homo sapien
taggtctatatccatgtcatccttg

SEQ ID NO: 3595905 - DNA, 25 bp, Homo sapien
gaatgtcagtccttacaattacagc

SEQ ID NO: 3595906 - DNA, 25 bp, Homo sapien
gaacatcctcaagttctccccagag

SEQ ID NO: 3595907 - DNA, 25 bp, Homo sapien
ccctaggaccctcatatgaagtaag

SEQ ID NO: 3595908 - DNA, 25 bp, Homo sapien
tgataataccactccatgtaccaca

SEQ ID NO: 3595909 - DNA, 25 bp, Homo sapien
tttggagaagacacatgctgcattg

SEQ ID NO: 3595910 - DNA, 25 bp, Homo sapien
cacatgcaccacaaaggttcagagg

SEQ ID NO: 3595911 - DNA, 25 bp, Homo sapien
ggtatgctttgtagagctgccctct

SEQ ID NO: 3595912 - DNA, 25 bp, Homo sapien
taaatgactacccacgattcaagac

SEQ ID NO: 3595913 - DNA, 25 bp, Homo sapien
ctgggtgcagtgatccttgggcatc

SEQ ID NO: 3595914 - DNA, 25 bp, Homo sapien
ggtgcagtgatccttgggcatctcc

SEQ ID NO: 3595915 - DNA, 25 bp, Homo sapien
tgggtgcagtgatccttgggcatct

SEQ ID NO: 3595916 - DNA, 25 bp, Homo sapien
gctgggtgcagtgatccttgggcat

SEQ ID NO: 3595917 - DNA, 25 bp, Homo sapien
gtctcattcctaccacttggcagag

SEQ ID NO: 3595918 - DNA, 25 bp, Homo sapien
ccttggtctcattcctaccacttgg

SEQ ID NO: 3595919 - DNA, 25 bp, Homo sapien
aatcagaagaaactatgggacttac

SEQ ID NO: 3595920 - DNA, 25 bp, Homo sapien
gcagcaggtgccaggtgaatcagaa

SEQ ID NO: 3595921 - DNA, 25 bp, Homo sapien
gattgggtgtggtaagacttctgcc

SEQ ID NO: 3595922 - DNA, 25 bp, Homo sapien
cacttccggcctattgttggtaaca

SEQ ID NO: 3595923 - DNA, 25 bp, Homo sapien
tgtatagtcaggcaacccatctgta

SEQ ID NO: 3595924 - DNA, 25 bp, Homo sapien
agaacagctagaatcccaggagtga

SEQ ID NO: 3595925 - DNA, 25 bp, Homo sapien
agcagacaggtacagcagctcacac

SEQ ID NO: 3595926 - DNA, 25 bp, Homo sapien
tgagtctttccaaacttgaagccgg

SEQ ID NO: 3595927 - DNA, 25 bp, Homo sapien
tccaggtgatttgggcaggactgac

SEQ ID NO: 3595928 - DNA, 25 bp, Homo sapien
tgacagcctatccttatcacacaga

SEQ ID NO: 3595929 - DNA, 25 bp, Homo sapien
gcagagtgaatggttagtgccaaca

SEQ ID NO: 3595930 - DNA, 25 bp, Homo sapien
aaagccctcacagtggcctagaagg

SEQ ID NO: 3595931 - DNA, 25 bp, Homo sapien
taagatacgaagtcagaaacgaggt

SEQ ID NO: 3595932 - DNA, 25 bp, Homo sapien
tgggccaggcactcttttcagcgct

SEQ ID NO: 3595933 - DNA, 25 bp, Homo sapien
tactctacgatccagaaataccact

SEQ ID NO: 3595934 - DNA, 25 bp, Homo sapien
taacactattgttgggagttccata

SEQ ID NO: 3595935 - DNA, 25 bp, Homo sapien
tataagattttcagtactagcaagg

SEQ ID NO: 3595936 - DNA, 25 bp, Homo sapien
gtccagccataggaaaagagcttaa

SEQ ID NO: 3595937 - DNA, 25 bp, Homo sapien
caatgccggaagctaagagcaagcc

SEQ ID NO: 3595938 - DNA, 25 bp, Homo sapien
cagagactgctattgtcccacaaaa

SEQ ID NO: 3595939 - DNA, 25 bp, Homo sapien
ggagacaaggatacacacagagaag

SEQ ID NO: 3595940 - DNA, 25 bp, Homo sapien
gaacactcttgccagtaaccatcag

SEQ ID NO: 3595941 - DNA, 25 bp, Homo sapien
tctaatttctcagtgacccatagtc

SEQ ID NO: 3595942 - DNA, 25 bp, Homo sapien
tgcaggttctgtagtcaaaacgttt

SEQ ID NO: 3595943 - DNA, 25 bp, Homo sapien
ctgaactcatcaattgccaactgtg

SEQ ID NO: 3595944 - DNA, 25 bp, Homo sapien
tagtagtgattaagggtgcaggttc

SEQ ID NO: 3595945 - DNA, 25 bp, Homo sapien
gaaattcctaggatgaccagcgtga

SEQ ID NO: 3595946 - DNA, 25 bp, Homo sapien
tcagcaggtatcagtttcaaaggta

SEQ ID NO: 3595947 - DNA, 25 bp, Homo sapien
aaagctctcagattctacgctggga

SEQ ID NO: 3595948 - DNA, 25 bp, Homo sapien
tacgctgggacactagtttcctggg

SEQ ID NO: 3595949 - DNA, 25 bp, Homo sapien
tgctgccgggcatgtataaaaagga

SEQ ID NO: 3595950 - DNA, 25 bp, Homo sapien
ggattttaattaaggccccatgcaa

SEQ ID NO: 3595951 - DNA, 25 bp, Homo sapien
gaatgcctctatctacagtggtaaa

SEQ ID NO: 3595952 - DNA, 25 bp, Homo sapien
tgtgtcccagtcatacataagctag

SEQ ID NO: 3595953 - DNA, 25 bp, Homo sapien
tatcattcaaagtccttatcagggc

SEQ ID NO: 3595954 - DNA, 25 bp, Homo sapien
cacttttgtctagaactaatgctaa

SEQ ID NO: 3595955 - DNA, 25 bp, Homo sapien
aacagatgggaaggtgctccttaca

SEQ ID NO: 3595956 - DNA, 25 bp, Homo sapien
tgagataggatatcacaaccactgg

SEQ ID NO: 3595957 - DNA, 25 bp, Homo sapien
gggttcaagctcatggactacaagt

SEQ ID NO: 3595958 - DNA, 25 bp, Homo sapien
agatacgtgctttgttcctcaggga

SEQ ID NO: 3595959 - DNA, 25 bp, Homo sapien
gctatactgtttacgctagggcaca

SEQ ID NO: 3595960 - DNA, 25 bp, Homo sapien
gaaaatcatcaggtcaagcaagccc

SEQ ID NO: 3595961 - DNA, 25 bp, Homo sapien
gtccttctttctgaattcgaagtct

SEQ ID NO: 3595962 - DNA, 25 bp, Homo sapien
ccttctttctgaattcgaagtctgt

SEQ ID NO: 3595963 - DNA, 25 bp, Homo sapien
tctttctgaattcgaagtctgtctt

SEQ ID NO: 3595964 - DNA, 25 bp, Homo sapien
tctgaattcgaagtctgtctttctc

SEQ ID NO: 3595965 - DNA, 25 bp, Homo sapien
tttccagttgcaagcgttctcgctc

SEQ ID NO: 3595966 - DNA, 25 bp, Homo sapien
ctatgtcctgtggttgaagcatgga

SEQ ID NO: 3595967 - DNA, 25 bp, Homo sapien
tgactatctgtaacctcaacttttc

SEQ ID NO: 3595968 - DNA, 25 bp, Homo sapien
ccaaggacggtttctctgaattgac

SEQ ID NO: 3595969 - DNA, 25 bp, Homo sapien
tgttccatgtctaaatgccgcagcc

SEQ ID NO: 3595970 - DNA, 25 bp, Homo sapien
gatatccagtcgtcgtttttccaac

SEQ ID NO: 3595971 - DNA, 25 bp, Homo sapien
taggcgttccttttctacctgcagc

SEQ ID NO: 3595972 - DNA, 25 bp, Homo sapien
gaatctggtatgacggatgacaaca

SEQ ID NO: 3595973 - DNA, 25 bp, Homo sapien
aatttgcatcatttcggaatccaat

SEQ ID NO: 3595974 - DNA, 25 bp, Homo sapien
accttgacctcagttaaggatccac

SEQ ID NO: 3595975 - DNA, 25 bp, Homo sapien
gcatcatttcggaatccaatctttt

SEQ ID NO: 3595976 - DNA, 25 bp, Homo sapien
caggactctgcggatccctttcttc

SEQ ID NO: 3595977 - DNA, 25 bp, Homo sapien
tgctcgccagtcaaggtaccttctt

SEQ ID NO: 3595978 - DNA, 25 bp, Homo sapien
accagcttaatgttggccttcatcc

SEQ ID NO: 3595979 - DNA, 25 bp, Homo sapien
caagccattcgcttcatcacattaa

SEQ ID NO: 3595980 - DNA, 25 bp, Homo sapien
tatctcttcagtgagagagtcatcc

SEQ ID NO: 3595981 - DNA, 25 bp, Homo sapien
taattctttgctggcccttagttca

SEQ ID NO: 3595982 - DNA, 25 bp, Homo sapien
attctttgctggcccttagttcaaa

SEQ ID NO: 3595983 - DNA, 25 bp, Homo sapien
aattctttgctggcccttagttcaa

SEQ ID NO: 3595984 - DNA, 25 bp, Homo sapien
ataattctttgctggcccttagttc

SEQ ID NO: 3595985 - DNA, 25 bp, Homo sapien
tccattcatctagtggcaaggcagt

SEQ ID NO: 3595986 - DNA, 25 bp, Homo sapien
cattcatctagtggcaaggcagtct

SEQ ID NO: 3595987 - DNA, 25 bp, Homo sapien
gtcttccattcatctagtggcaagg

SEQ ID NO: 3595988 - DNA, 25 bp, Homo sapien
catctagtggcaaggcagtctggat

SEQ ID NO: 3595989 - DNA, 25 bp, Homo sapien
catgaggtaccatgtttataagcca

SEQ ID NO: 3595990 - DNA, 25 bp, Homo sapien
aaattatccaatagcttgggcaagc

SEQ ID NO: 3595991 - DNA, 25 bp, Homo sapien
ccatgctgagcctagaacacttaaa

SEQ ID NO: 3595992 - DNA, 25 bp, Homo sapien
gattccaaggcagtttagtgaacac

SEQ ID NO: 3595993 - DNA, 25 bp, Homo sapien
ttcactccatatgctgtatagtcaa

SEQ ID NO: 3595994 - DNA, 25 bp, Homo sapien
cactccatatgctgtatagtcaata

SEQ ID NO: 3595995 - DNA, 25 bp, Homo sapien
gaatacaatgtgtactttacagtta

SEQ ID NO: 3595996 - DNA, 25 bp, Homo sapien
tttctttcgctgtcattagaataca

SEQ ID NO: 3595997 - DNA, 25 bp, Homo sapien
taaaactcgtggtaggtgcataaca

SEQ ID NO: 3595998 - DNA, 25 bp, Homo sapien
tgtcatcgctctcttagcagaaagg

SEQ ID NO: 3595999 - DNA, 25 bp, Homo sapien
tatatgccggtatccaagtaacaga

SEQ ID NO: 3596000 - DNA, 25 bp, Homo sapien
gaatcgagttagactgggctcccgg

SEQ ID NO: 3596001 - DNA, 25 bp, Homo sapien
tcccgactgagtgcccagaaacttc

SEQ ID NO: 3596002 - DNA, 25 bp, Homo sapien
tgcagtcttgtttccgtggcctggg

SEQ ID NO: 3596003 - DNA, 25 bp, Homo sapien
caagcgttgcgccaattgccgctga

SEQ ID NO: 3596004 - DNA, 25 bp, Homo sapien
ggtattaaatgagagtcccgactga

SEQ ID NO: 3596005 - DNA, 25 bp, Homo sapien
gcggcacctccccacggtcgcccca

SEQ ID NO: 3596006 - DNA, 25 bp, Homo sapien
tgctgcgctgttccaactgattggg

SEQ ID NO: 3596007 - DNA, 25 bp, Homo sapien
gtctgtggcgcgcagctctgtcagt

SEQ ID NO: 3596008 - DNA, 25 bp, Homo sapien
ttggcccctagagatccgcttgctg

SEQ ID NO: 3596009 - DNA, 25 bp, Homo sapien
tggactctaggaagggattggcccc

SEQ ID NO: 3596010 - DNA, 25 bp, Homo sapien
taactctggacgtatgtaagtgtag

SEQ ID NO: 3596011 - DNA, 25 bp, Homo sapien
cagaacctgtaagtctggatccctc

SEQ ID NO: 3596012 - DNA, 25 bp, Homo sapien
tagcatatgtaaggccagagatgtt

SEQ ID NO: 3596013 - DNA, 25 bp, Homo sapien
cacagattgtcataactctggacgt

SEQ ID NO: 3596014 - DNA, 25 bp, Homo sapien
aaaaccccacattccactaacagag

SEQ ID NO: 3596015 - DNA, 25 bp, Homo sapien
aacactattatgctcttgtaggaga

SEQ ID NO: 3596016 - DNA, 25 bp, Homo sapien
aatagctttgggcattattcccctg

SEQ ID NO: 3596017 - DNA, 25 bp, Homo sapien
ggttaacatggacgtctaaatgcta

SEQ ID NO: 3596018 - DNA, 25 bp, Homo sapien
cagatataccaaactgattcagaaa

SEQ ID NO: 3596019 - DNA, 25 bp, Homo sapien
cacatattggctcaatataatatca

SEQ ID NO: 3596020 - DNA, 25 bp, Homo sapien
tgtccctatccctaagagtttccag

SEQ ID NO: 3596021 - DNA, 25 bp, Homo sapien
cagtacaatgtggtagcattctaaa

SEQ ID NO: 3596022 - DNA, 25 bp, Homo sapien
gaaggcagaatcacctacctgagaa

SEQ ID NO: 3596023 - DNA, 25 bp, Homo sapien
gaaacatatactcttggaaggcaga

SEQ ID NO: 3596024 - DNA, 25 bp, Homo sapien
ctcaggccaggtgtaacttagaact

SEQ ID NO: 3596025 - DNA, 25 bp, Homo sapien
gaattcaacaactcatacccgcagt

SEQ ID NO: 3596026 - DNA, 25 bp, Homo sapien
gggtctctgtatttattaaactgaa

SEQ ID NO: 3596027 - DNA, 25 bp, Homo sapien
ccatgggtctctgtatttattaaac

SEQ ID NO: 3596028 - DNA, 25 bp, Homo sapien
ctctgtatttattaaactgaatcac

SEQ ID NO: 3596029 - DNA, 25 bp, Homo sapien
catgggtctctgtatttattaaact

SEQ ID NO: 3596030 - DNA, 25 bp, Homo sapien
tggtagacctgcacttcatctgtga

SEQ ID NO: 3596031 - DNA, 25 bp, Homo sapien
aaaattctgttaaggctctaggcat

SEQ ID NO: 3596032 - DNA, 25 bp, Homo sapien
tgcacactcaaaagatccttcgcct

SEQ ID NO: 3596033 - DNA, 25 bp, Homo sapien
tctaggcattggtgaaacttcttcc

SEQ ID NO: 3596034 - DNA, 25 bp, Homo sapien
tgcttctggatagtatatgcctctg

SEQ ID NO: 3596035 - DNA, 25 bp, Homo sapien
tgacaaataatctatcgagagccat

SEQ ID NO: 3596036 - DNA, 25 bp, Homo sapien
aaaattgcccaaactctgctactag

SEQ ID NO: 3596037 - DNA, 25 bp, Homo sapien
tatgcctctgggtaatgggctaaca

SEQ ID NO: 3596038 - DNA, 25 bp, Homo sapien
cactggacagtagcaccaggtttga

SEQ ID NO: 3596039 - DNA, 25 bp, Homo sapien
ggcaatatgcagtcgaaccgttcga

SEQ ID NO: 3596040 - DNA, 25 bp, Homo sapien
tgattgcggcagtattttccatgaa

SEQ ID NO: 3596041 - DNA, 25 bp, Homo sapien
taactcgaaagactagatcctggca

SEQ ID NO: 3596042 - DNA, 25 bp, Homo sapien
tcagttgtggatggtcgagcatcag

SEQ ID NO: 3596043 - DNA, 25 bp, Homo sapien
caactaaggacaactttcagtacca

SEQ ID NO: 3596044 - DNA, 25 bp, Homo sapien
tgcatccatgattatgtcaaaacag

SEQ ID NO: 3596045 - DNA, 25 bp, Homo sapien
gagtaaactctcttcattgaacaga

SEQ ID NO: 3596046 - DNA, 25 bp, Homo sapien
caaacaaactggtggagccatagct

SEQ ID NO: 3596047 - DNA, 25 bp, Homo sapien
tacaaagtgtaatgcatgatcaaac

SEQ ID NO: 3596048 - DNA, 25 bp, Homo sapien
tctgatatagataataactgtaaac

SEQ ID NO: 3596049 - DNA, 25 bp, Homo sapien
gaaaagtgatgttgtacaaagtgta

SEQ ID NO: 3596050 - DNA, 25 bp, Homo sapien
gtcactgcaagctttggataggaag

SEQ ID NO: 3596051 - DNA, 25 bp, Homo sapien
gaagaaatgatgacaactggaagaa

SEQ ID NO: 3596052 - DNA, 25 bp, Homo sapien
gaaatgcttttactgccttggagga

SEQ ID NO: 3596053 - DNA, 25 bp, Homo sapien
ccagtataggcataatcgagaaatg

SEQ ID NO: 3596054 - DNA, 25 bp, Homo sapien
agcatattttaattgcctcctaatt

SEQ ID NO: 3596055 - DNA, 25 bp, Homo sapien
gcatattttaattgcctcctaatta

SEQ ID NO: 3596056 - DNA, 25 bp, Homo sapien
tattttaattgcctcctaattaata

SEQ ID NO: 3596057 - DNA, 25 bp, Homo sapien
catattttaattgcctcctaattaa

SEQ ID NO: 3596058 - DNA, 25 bp, Homo sapien
tattgaccaagaagcctcacaggat

SEQ ID NO: 3596059 - DNA, 25 bp, Homo sapien
tctattgaccaagaagcctcacagg

SEQ ID NO: 3596060 - DNA, 25 bp, Homo sapien
tgtctattgaccaagaagcctcaca

SEQ ID NO: 3596061 - DNA, 25 bp, Homo sapien
tattgtagtataactaggaaggctg

SEQ ID NO: 3596062 - DNA, 25 bp, Homo sapien
atgtgtctgacccttaacttcgcag

SEQ ID NO: 3596063 - DNA, 25 bp, Homo sapien
agtaattgcaaggtcatgtgtctga

SEQ ID NO: 3596064 - DNA, 25 bp, Homo sapien
ccttaacttcgcagaaatggaaatc

SEQ ID NO: 3596065 - DNA, 25 bp, Homo sapien
tacaattaacacagtaattgcaagg

SEQ ID NO: 3596066 - DNA, 25 bp, Homo sapien
tacatgaatacaacacaggacggaa

SEQ ID NO: 3596067 - DNA, 25 bp, Homo sapien
tctctttagggtgatctacatggga

SEQ ID NO: 3596068 - DNA, 25 bp, Homo sapien
caagctgagagctttcaagaaatgc

SEQ ID NO: 3596069 - DNA, 25 bp, Homo sapien
tcttctgtcccagcgtagttcaagg

SEQ ID NO: 3596070 - DNA, 25 bp, Homo sapien
aatcataaaatctgaggcatagaca

SEQ ID NO: 3596071 - DNA, 25 bp, Homo sapien
tgctaacacacaacgatgacacggg

SEQ ID NO: 3596072 - DNA, 25 bp, Homo sapien
gatggaattccattacatgtgcttc

SEQ ID NO: 3596073 - DNA, 25 bp, Homo sapien
tgatcttctgatacaaggaagttgt

SEQ ID NO: 3596074 - DNA, 25 bp, Homo sapien
catgtgcttcgttgattgaaagcat

SEQ ID NO: 3596075 - DNA, 25 bp, Homo sapien
gcaagcacttttccaagttgggcta

SEQ ID NO: 3596076 - DNA, 25 bp, Homo sapien
tcataagggctaacattgaaggcta

SEQ ID NO: 3596077 - DNA, 25 bp, Homo sapien
cattctcttctggtaacaaagtagc

SEQ ID NO: 3596078 - DNA, 25 bp, Homo sapien
gatcttggaccatagactatatgcc

SEQ ID NO: 3596079 - DNA, 25 bp, Homo sapien
tacagcatcaattaaggctccattc

SEQ ID NO: 3596080 - DNA, 25 bp, Homo sapien
tagtccaaattgtcctacagcatca

SEQ ID NO: 3596081 - DNA, 25 bp, Homo sapien
tctccaagtggctagctggtgcttc

SEQ ID NO: 3596082 - DNA, 25 bp, Homo sapien
tccaagaggcctaggtggaagctag

SEQ ID NO: 3596083 - DNA, 25 bp, Homo sapien
cctgcaaaggtacaacggagagcct

SEQ ID NO: 3596084 - DNA, 25 bp, Homo sapien
gactgactagtgatctgaggaacaa

SEQ ID NO: 3596085 - DNA, 25 bp, Homo sapien
gctgcaaccctgatacaccagtggg

SEQ ID NO: 3596086 - DNA, 25 bp, Homo sapien
actaaaacatctatgcaggccaggc

SEQ ID NO: 3596087 - DNA, 25 bp, Homo sapien
tggacacacctatgacactggactg

SEQ ID NO: 3596088 - DNA, 25 bp, Homo sapien
tacagaatgacaaatctaaggagct

SEQ ID NO: 3596089 - DNA, 25 bp, Homo sapien
gaatatgacatttgcaactagagaa

SEQ ID NO: 3596090 - DNA, 25 bp, Homo sapien
gaaatagtcctaaatggttcatcac

SEQ ID NO: 3596091 - DNA, 25 bp, Homo sapien
tgacaagcaccgaattaggcactag

SEQ ID NO: 3596092 - DNA, 25 bp, Homo sapien
gataaagagttgtgccatagttggc

SEQ ID NO: 3596093 - DNA, 25 bp, Homo sapien
gagtcaagcctaagaaccaagcctt

SEQ ID NO: 3596094 - DNA, 25 bp, Homo sapien
taaactaaagctgtgctctgcctga

SEQ ID NO: 3596095 - DNA, 25 bp, Homo sapien
ctggataaaggagatacttatcttc

SEQ ID NO: 3596096 - DNA, 25 bp, Homo sapien
acagagaaaacaggctttgataatt

SEQ ID NO: 3596097 - DNA, 25 bp, Homo sapien
tacacatactcttttaatcttcaaa

SEQ ID NO: 3596098 - DNA, 25 bp, Homo sapien
gcctggtcccatgctatatgtttta

SEQ ID NO: 3596099 - DNA, 25 bp, Homo sapien
cacttggatcgcgtgggctttcata

SEQ ID NO: 3596100 - DNA, 25 bp, Homo sapien
gatatttccgggcagtcagaggaag

SEQ ID NO: 3596101 - DNA, 25 bp, Homo sapien
gaaggaaatcggctgaatcccgcag

SEQ ID NO: 3596102 - DNA, 25 bp, Homo sapien
cgcactttaatcgacctccaggtag

SEQ ID NO: 3596103 - DNA, 25 bp, Homo sapien
catacaatgccgcaaagcgcagggc

SEQ ID NO: 3596104 - DNA, 25 bp, Homo sapien
gactggttgcgattggcctgcaccg

SEQ ID NO: 3596105 - DNA, 25 bp, Homo sapien
gaagcctcgcctacttgacgtcata

SEQ ID NO: 3596106 - DNA, 25 bp, Homo sapien
taactcttccgcaagtgtgagtggc

SEQ ID NO: 3596107 - DNA, 25 bp, Homo sapien
cattcctagcagtccttggcttgca

SEQ ID NO: 3596108 - DNA, 25 bp, Homo sapien
tgaacatttgactgcagggacatag

SEQ ID NO: 3596109 - DNA, 25 bp, Homo sapien
aaactccgaagggtacgcgaatgtg

SEQ ID NO: 3596110 - DNA, 25 bp, Homo sapien
ctctagctaagaagtgatggaccag

SEQ ID NO: 3596111 - DNA, 25 bp, Homo sapien
gaacaggctctctgataggcccatt

SEQ ID NO: 3596112 - DNA, 25 bp, Homo sapien
tggaacaggctctctgataggccca

SEQ ID NO: 3596113 - DNA, 25 bp, Homo sapien
caggctctctgataggcccattagg

SEQ ID NO: 3596114 - DNA, 25 bp, Homo sapien
cttggaacaggctctctgataggcc

SEQ ID NO: 3596115 - DNA, 25 bp, Homo sapien
gttgcagttgctcttaggaaacccg

SEQ ID NO: 3596116 - DNA, 25 bp, Homo sapien
atagatgagcaccattttgttgcag

SEQ ID NO: 3596117 - DNA, 25 bp, Homo sapien
ggaaagcaaaatagatgagcaccat

SEQ ID NO: 3596118 - DNA, 25 bp, Homo sapien
gttgctcttaggaaacccgatggat

SEQ ID NO: 3596119 - DNA, 25 bp, Homo sapien
tgacccaggttactcgtccttctgt

SEQ ID NO: 3596120 - DNA, 25 bp, Homo sapien
gatgttctgacccaggttactcgtc

SEQ ID NO: 3596121 - DNA, 25 bp, Homo sapien
ttctgacccaggttactcgtccttc

SEQ ID NO: 3596122 - DNA, 25 bp, Homo sapien
tgttctgacccaggttactcgtcct

SEQ ID NO: 3596123 - DNA, 25 bp, Homo sapien
tcaggatgattccaaaccaacccag

SEQ ID NO: 3596124 - DNA, 25 bp, Homo sapien
gatttaatgtcatctgccgttccca

SEQ ID NO: 3596125 - DNA, 25 bp, Homo sapien
aatggtacaaagtcatgatgattcc

SEQ ID NO: 3596126 - DNA, 25 bp, Homo sapien
caaacaatgttctaggaatcctatg

SEQ ID NO: 3596127 - DNA, 25 bp, Homo sapien
gaagtattgttatccctagcatgag

SEQ ID NO: 3596128 - DNA, 25 bp, Homo sapien
tgtttgacataacacagggttcagg

SEQ ID NO: 3596129 - DNA, 25 bp, Homo sapien
cttttggccagaggtaacagtgtcc

SEQ ID NO: 3596130 - DNA, 25 bp, Homo sapien
gaatggaattggaagcccactgcct

SEQ ID NO: 3596131 - DNA, 25 bp, Homo sapien
gaaagatcttgctcttgcttagcct

SEQ ID NO: 3596132 - DNA, 25 bp, Homo sapien
cagtaatttgtaccatgagtagtcc

SEQ ID NO: 3596133 - DNA, 25 bp, Homo sapien
aaatagctgtgttcctcagcatcac

SEQ ID NO: 3596134 - DNA, 25 bp, Homo sapien
cctgcagtggcttggaaatagctgt

SEQ ID NO: 3596135 - DNA, 25 bp, Homo sapien
gtagctctcgggttctctatcacaa

SEQ ID NO: 3596136 - DNA, 25 bp, Homo sapien
tgaccttggtggtaagacacatgca

SEQ ID NO: 3596137 - DNA, 25 bp, Homo sapien
cacatgcatgccagaagataggaga

SEQ ID NO: 3596138 - DNA, 25 bp, Homo sapien
tcttcatatgacagagacagcagtc

SEQ ID NO: 3596139 - DNA, 25 bp, Homo sapien
tgaccttgaggcagggcaagaacaa

SEQ ID NO: 3596140 - DNA, 25 bp, Homo sapien
tcttacatgccatgttgtaagagaa

SEQ ID NO: 3596141 - DNA, 25 bp, Homo sapien
atttcttacatgccatgttgtaaga

SEQ ID NO: 3596142 - DNA, 25 bp, Homo sapien
ctgaccttgaggcagggcaagaaca

SEQ ID NO: 3596143 - DNA, 25 bp, Homo sapien
ctcccttcttcaggtcttgcctttg

SEQ ID NO: 3596144 - DNA, 25 bp, Homo sapien
ggctacccagtcaccatcctctgaa

SEQ ID NO: 3596145 - DNA, 25 bp, Homo sapien
aggctttgcctcacagctggctacc

SEQ ID NO: 3596146 - DNA, 25 bp, Homo sapien
aacctgagcaacctcaccactctgg

SEQ ID NO: 3596147 - DNA, 25 bp, Homo sapien
ttgttcctagcttcacaatggctga

SEQ ID NO: 3596148 - DNA, 25 bp, Homo sapien
gttcctagcttcacaatggctgaaa

SEQ ID NO: 3596149 - DNA, 25 bp, Homo sapien
tgttcctagcttcacaatggctgaa

SEQ ID NO: 3596150 - DNA, 25 bp, Homo sapien
cttgttcctagcttcacaatggctg

SEQ ID NO: 3596151 - DNA, 25 bp, Homo sapien
gactgctgcctaatctgttctgtta

SEQ ID NO: 3596152 - DNA, 25 bp, Homo sapien
ttaccgtgcagtaggacacagctct

SEQ ID NO: 3596153 - DNA, 25 bp, Homo sapien
tcttgatgactgctgcctaatctgt

SEQ ID NO: 3596154 - DNA, 25 bp, Homo sapien
gtcagtgtgtttgtggtcctcagca

SEQ ID NO: 3596155 - DNA, 25 bp, Homo sapien
aactgtgagagctgctactgctttc

SEQ ID NO: 3596156 - DNA, 25 bp, Homo sapien
ttggaagtccggcagtgcagaactg

SEQ ID NO: 3596157 - DNA, 25 bp, Homo sapien
agaaacttgttggaagtccggcagt

SEQ ID NO: 3596158 - DNA, 25 bp, Homo sapien
gaactgtgagagctgctactgcttt

SEQ ID NO: 3596159 - DNA, 25 bp, Homo sapien
cagtgaagcaccctactctgggaat

SEQ ID NO: 3596160 - DNA, 25 bp, Homo sapien
gaatactctattgactgcagactca

SEQ ID NO: 3596161 - DNA, 25 bp, Homo sapien
gggaatcctcacagatatattgtca

SEQ ID NO: 3596162 - DNA, 25 bp, Homo sapien
tcaatctctggttcttgtgttccag

SEQ ID NO: 3596163 - DNA, 25 bp, Homo sapien
tgaaaatctccaggcatagagtctg

SEQ ID NO: 3596164 - DNA, 25 bp, Homo sapien
aatctccaggcatagagtctgacct

SEQ ID NO: 3596165 - DNA, 25 bp, Homo sapien
ccaggcatagagtctgacctctgta

SEQ ID NO: 3596166 - DNA, 25 bp, Homo sapien
ttcacccagcatgggttctgtgtct

SEQ ID NO: 3596167 - DNA, 25 bp, Homo sapien
tctgtttcactagcttttgaaggtt

SEQ ID NO: 3596168 - DNA, 25 bp, Homo sapien
gaggtaggaggttccactgtgatta

SEQ ID NO: 3596169 - DNA, 25 bp, Homo sapien
taccagatgagctttgccaataaca

SEQ ID NO: 3596170 - DNA, 25 bp, Homo sapien
ccatgtgtcgctgggtggagacttc

SEQ ID NO: 3596171 - DNA, 25 bp, Homo sapien
gctgatcttcattcaccataagtgc

SEQ ID NO: 3596172 - DNA, 25 bp, Homo sapien
cggctgcctgaggcttcagttctcc

SEQ ID NO: 3596173 - DNA, 25 bp, Homo sapien
gcttcagttctccagtggctttctt

SEQ ID NO: 3596174 - DNA, 25 bp, Homo sapien
tcagttctccagtggctttcttact

SEQ ID NO: 3596175 - DNA, 25 bp, Homo sapien
ggctgcctgaggcttcagttctcca

SEQ ID NO: 3596176 - DNA, 25 bp, Homo sapien
tgcacttctgcggagcttggggatc

SEQ ID NO: 3596177 - DNA, 25 bp, Homo sapien
ctttgcacttctgcggagcttgggg

SEQ ID NO: 3596178 - DNA, 25 bp, Homo sapien
cacttctgcggagcttggggatccc

SEQ ID NO: 3596179 - DNA, 25 bp, Homo sapien
ttctgcggagcttggggatccccat

SEQ ID NO: 3596180 - DNA, 25 bp, Homo sapien
cgtggcattatctccagtatttatg

SEQ ID NO: 3596181 - DNA, 25 bp, Homo sapien
agatttttgctgtttcggtcgtggc

SEQ ID NO: 3596182 - DNA, 25 bp, Homo sapien
tcggtcgtggcattatctccagtat

SEQ ID NO: 3596183 - DNA, 25 bp, Homo sapien
tgctgtttcggtcgtggcattatct

SEQ ID NO: 3596184 - DNA, 25 bp, Homo sapien
gccaagacctcagatacaattcaga

SEQ ID NO: 3596185 - DNA, 25 bp, Homo sapien
tagccactctaagccacatatccag

SEQ ID NO: 3596186 - DNA, 25 bp, Homo sapien
acagagcctgagagtagttagccac

SEQ ID NO: 3596187 - DNA, 25 bp, Homo sapien
ttgagagtaggtaggcaacagagcc

SEQ ID NO: 3596188 - DNA, 25 bp, Homo sapien
gatgtaggaaaatctgtgctaccca

SEQ ID NO: 3596189 - DNA, 25 bp, Homo sapien
agatgtaggaaaatctgtgctaccc

SEQ ID NO: 3596190 - DNA, 25 bp, Homo sapien
gaagatgtaggaaaatctgtgctac

SEQ ID NO: 3596191 - DNA, 25 bp, Homo sapien
atgtaggaaaatctgtgctacccat

SEQ ID NO: 3596192 - DNA, 25 bp, Homo sapien
tggaccattttcagggtagttttca

SEQ ID NO: 3596193 - DNA, 25 bp, Homo sapien
ttcatttcagaggggacattaaata

SEQ ID NO: 3596194 - DNA, 25 bp, Homo sapien
tcatttcagaggggacattaaatat

SEQ ID NO: 3596195 - DNA, 25 bp, Homo sapien
cttctttggaccattttcagggtag

SEQ ID NO: 3596196 - DNA, 25 bp, Homo sapien
agatcttccgactcctgcacaatgg

SEQ ID NO: 3596197 - DNA, 25 bp, Homo sapien
gaggtgatacccagctctacacttt

SEQ ID NO: 3596198 - DNA, 25 bp, Homo sapien
tcctcagagggtgccagaaatgaat

SEQ ID NO: 3596199 - DNA, 25 bp, Homo sapien
gcacaatggatgttttcatgaacac

SEQ ID NO: 3596200 - DNA, 25 bp, Homo sapien
tcctctcttctgcatgatcagtgat

SEQ ID NO: 3596201 - DNA, 25 bp, Homo sapien
attactcctctcttctgcatgatca

SEQ ID NO: 3596202 - DNA, 25 bp, Homo sapien
ccattactcctctcttctgcatgat

SEQ ID NO: 3596203 - DNA, 25 bp, Homo sapien
tactcctctcttctgcatgatcagt

SEQ ID NO: 3596204 - DNA, 25 bp, Homo sapien
cattgttcagggatattgaatgcca

SEQ ID NO: 3596205 - DNA, 25 bp, Homo sapien
tgtccaatctgtacgtcatccctgt

SEQ ID NO: 3596206 - DNA, 25 bp, Homo sapien
tttagtaaatgagaggcgcggtacc

SEQ ID NO: 3596207 - DNA, 25 bp, Homo sapien
gtggaaccagtcaggatgttttagt

SEQ ID NO: 3596208 - DNA, 25 bp, Homo sapien
tcaaaagaagggacagccttgccat

SEQ ID NO: 3596209 - DNA, 25 bp, Homo sapien
gctgaattagctgaccaagggaaag

SEQ ID NO: 3596210 - DNA, 25 bp, Homo sapien
gatttgctttctcacactggccaag

SEQ ID NO: 3596211 - DNA, 25 bp, Homo sapien
aacaatatgtccctgtctaagtgga

SEQ ID NO: 3596212 - DNA, 25 bp, Homo sapien
ctcaacagatgtgagtaccagaccc

SEQ ID NO: 3596213 - DNA, 25 bp, Homo sapien
ggtcagctttgcctcaacagatgtg

SEQ ID NO: 3596214 - DNA, 25 bp, Homo sapien
acaaatgatactgcacagggcaccc

SEQ ID NO: 3596215 - DNA, 25 bp, Homo sapien
ctcctgcctcacaatcacaaatgat

SEQ ID NO: 3596216 - DNA, 25 bp, Homo sapien
gatggaggagtggagctaaatagag

SEQ ID NO: 3596217 - DNA, 25 bp, Homo sapien
tatgctggtagcttgatcctctgga

SEQ ID NO: 3596218 - DNA, 25 bp, Homo sapien
ctgactctatggaataatatgctgg

SEQ ID NO: 3596219 - DNA, 25 bp, Homo sapien
gacagagcagcataccatttactat

SEQ ID NO: 3596220 - DNA, 25 bp, Homo sapien
caaagtttgattgtcagccgtgaat

SEQ ID NO: 3596221 - DNA, 25 bp, Homo sapien
gaaataggtgtctttagaaatcctc

SEQ ID NO: 3596222 - DNA, 25 bp, Homo sapien
cctgcaaagaaatctcaggctcctt

SEQ ID NO: 3596223 - DNA, 25 bp, Homo sapien
ttgttagacgcagttcttattcctg

SEQ ID NO: 3596224 - DNA, 25 bp, Homo sapien
tatgttgaaataggtgtctttagaa

SEQ ID NO: 3596225 - DNA, 25 bp, Homo sapien
ggatcaatccgaaagttcctatttc

SEQ ID NO: 3596226 - DNA, 25 bp, Homo sapien
tcagggatcaatccgaaagttccta

SEQ ID NO: 3596227 - DNA, 25 bp, Homo sapien
cattcagggatcaatccgaaagttc

SEQ ID NO: 3596228 - DNA, 25 bp, Homo sapien
aacctgcattcagggatcaatccga

SEQ ID NO: 3596229 - DNA, 25 bp, Homo sapien
tctcttttcagttacggcaattgtc

SEQ ID NO: 3596230 - DNA, 25 bp, Homo sapien
acggcaattgtctcctcccagtgag

SEQ ID NO: 3596231 - DNA, 25 bp, Homo sapien
ctcaatcacgggaaaccccttccag

SEQ ID NO: 3596232 - DNA, 25 bp, Homo sapien
cgggaaaccccttccagtctggcat

SEQ ID NO: 3596233 - DNA, 25 bp, Homo sapien
atgtgaggatatggaaatgcggaat

SEQ ID NO: 3596234 - DNA, 25 bp, Homo sapien
ggatatggaaatgcggaatccacga

SEQ ID NO: 3596235 - DNA, 25 bp, Homo sapien
gaggatatggaaatgcggaatccac

SEQ ID NO: 3596236 - DNA, 25 bp, Homo sapien
atggaaatgcggaatccacgacagc

SEQ ID NO: 3596237 - DNA, 25 bp, Homo sapien
gctggctttctgattgctttgcctt

SEQ ID NO: 3596238 - DNA, 25 bp, Homo sapien
gtgctggctttctgattgctttgcc

SEQ ID NO: 3596239 - DNA, 25 bp, Homo sapien
gctttgcctttctctggattaccac

SEQ ID NO: 3596240 - DNA, 25 bp, Homo sapien
ttgcctttctctggattaccaccat

SEQ ID NO: 3596241 - DNA, 25 bp, Homo sapien
cagctattcctgtctatgctgctca

SEQ ID NO: 3596242 - DNA, 25 bp, Homo sapien
ttcctgtctatgctgctcaatcttt

SEQ ID NO: 3596243 - DNA, 25 bp, Homo sapien
tagggcagctattcctgtctatgct

SEQ ID NO: 3596244 - DNA, 25 bp, Homo sapien
gtactttagggcagctattcctgtc

SEQ ID NO: 3596245 - DNA, 25 bp, Homo sapien
ttttgctaagtgtatgttcatatcc

SEQ ID NO: 3596246 - DNA, 25 bp, Homo sapien
cttttgctaagtgtatgttcatatc

SEQ ID NO: 3596247 - DNA, 25 bp, Homo sapien
ttgctaagtgtatgttcatatcctt

SEQ ID NO: 3596248 - DNA, 25 bp, Homo sapien
ttcttttgctaagtgtatgttcata

SEQ ID NO: 3596249 - DNA, 25 bp, Homo sapien
tcatcattggatggcacgggtttcc

SEQ ID NO: 3596250 - DNA, 25 bp, Homo sapien
catcatcattggatggcacgggttt

SEQ ID NO: 3596251 - DNA, 25 bp, Homo sapien
acatcatcattggatggcacgggtt

SEQ ID NO: 3596252 - DNA, 25 bp, Homo sapien
atcattggatggcacgggtttccat

SEQ ID NO: 3596253 - DNA, 25 bp, Homo sapien
ttctcctaaaggtgcagccaccctg

SEQ ID NO: 3596254 - DNA, 25 bp, Homo sapien
acatcaggatactggatggagctgc

SEQ ID NO: 3596255 - DNA, 25 bp, Homo sapien
gctctagcgtactgaaggacactga

SEQ ID NO: 3596256 - DNA, 25 bp, Homo sapien
gccaccctgagtttgcatggcaaaa

SEQ ID NO: 3596257 - DNA, 25 bp, Homo sapien
gatattgcaaccataacagcaattg

SEQ ID NO: 3596258 - DNA, 25 bp, Homo sapien
gcccagaactcataataaatagatg

SEQ ID NO: 3596259 - DNA, 25 bp, Homo sapien
tcagaatgaccttgtaggactatat

SEQ ID NO: 3596260 - DNA, 25 bp, Homo sapien
gactatatagagtgatattgcaacc

SEQ ID NO: 3596261 - DNA, 25 bp, Homo sapien
ctgagggctctggttgagaagtaag

SEQ ID NO: 3596262 - DNA, 25 bp, Homo sapien
gggctctggttgagaagtaagggcc

SEQ ID NO: 3596263 - DNA, 25 bp, Homo sapien
gagggctctggttgagaagtaaggg

SEQ ID NO: 3596264 - DNA, 25 bp, Homo sapien
gctctggttgagaagtaagggccat

SEQ ID NO: 3596265 - DNA, 25 bp, Homo sapien
gccaattattctggtgacttggaga

SEQ ID NO: 3596266 - DNA, 25 bp, Homo sapien
tattctaagcgcacagagatccata

SEQ ID NO: 3596267 - DNA, 25 bp, Homo sapien
ccttagcagaagaggttttagcaga

SEQ ID NO: 3596268 - DNA, 25 bp, Homo sapien
ttggagagtcccaaggttcatcctt

SEQ ID NO: 3596269 - DNA, 25 bp, Homo sapien
tgcgtgccgtactgcataggtctca

SEQ ID NO: 3596270 - DNA, 25 bp, Homo sapien
gacataatcggagctccttgtgacc

SEQ ID NO: 3596271 - DNA, 25 bp, Homo sapien
tagaaagtacacagctgcgtgccgt

SEQ ID NO: 3596272 - DNA, 25 bp, Homo sapien
ggagctgaatgtggacataatcgga

SEQ ID NO: 3596273 - DNA, 25 bp, Homo sapien
ttagtcagctgccaattgcttccat

SEQ ID NO: 3596274 - DNA, 25 bp, Homo sapien
caggtatccattattcttttgctta

SEQ ID NO: 3596275 - DNA, 25 bp, Homo sapien
ggtacatgcttcatgcatgggagaa

SEQ ID NO: 3596276 - DNA, 25 bp, Homo sapien
tgtccctaaaagcagtcccataagt

SEQ ID NO: 3596277 - DNA, 25 bp, Homo sapien
caccagtttgaccactcaggtatcc

SEQ ID NO: 3596278 - DNA, 25 bp, Homo sapien
tctgccaccttcactctaactgggt

SEQ ID NO: 3596279 - DNA, 25 bp, Homo sapien
gttaaagtagtatgcattaggaagc

SEQ ID NO: 3596280 - DNA, 25 bp, Homo sapien
gccaggaatgatcgcagaaagaatg

SEQ ID NO: 3596281 - DNA, 25 bp, Homo sapien
aaaccacagccaattttccaatctg

SEQ ID NO: 3596282 - DNA, 25 bp, Homo sapien
gcaagtcctacgtcctatgtggcat

SEQ ID NO: 3596283 - DNA, 25 bp, Homo sapien
aatggagtcattcttgtgcacaggg

SEQ ID NO: 3596284 - DNA, 25 bp, Homo sapien
gcttgtttgctgcaagtcctacgtc

SEQ ID NO: 3596285 - DNA, 25 bp, Homo sapien
tttcttctgcaagaacagagtgacc

SEQ ID NO: 3596286 - DNA, 25 bp, Homo sapien
tgagacgttggaatgagagatcttt

SEQ ID NO: 3596287 - DNA, 25 bp, Homo sapien
tgatactagcattactctgcaagaa

SEQ ID NO: 3596288 - DNA, 25 bp, Homo sapien
aagaataaatccctgctaccgctca

SEQ ID NO: 3596289 - DNA, 25 bp, Homo sapien
gtgtcaaaggattgagacgttggaa

SEQ ID NO: 3596290 - DNA, 25 bp, Homo sapien
taacaagcctgcaattgggaagagc

SEQ ID NO: 3596291 - DNA, 25 bp, Homo sapien
tcgaattttggtgaatcatcatccc

SEQ ID NO: 3596292 - DNA, 25 bp, Homo sapien
tacaatttaacacagccactcgcct

SEQ ID NO: 3596293 - DNA, 25 bp, Homo sapien
tgggaagagctgtatcgaattttgg

SEQ ID NO: 3596294 - DNA, 25 bp, Homo sapien
ttaacacaaatagcaactgtgtcaa

SEQ ID NO: 3596295 - DNA, 25 bp, Homo sapien
caaatagcaactgtgtcaaattggc

SEQ ID NO: 3596296 - DNA, 25 bp, Homo sapien
ctgtgtcaaattggcgaatatactc

SEQ ID NO: 3596297 - DNA, 25 bp, Homo sapien
gcaactgtgtcaaattggcgaatat

SEQ ID NO: 3596298 - DNA, 25 bp, Homo sapien
cgttgcaataattaaattgtgaggg

SEQ ID NO: 3596299 - DNA, 25 bp, Homo sapien
ctgaggttgcgttgcaataattaaa

SEQ ID NO: 3596300 - DNA, 25 bp, Homo sapien
ttgcaataattaaattgtgagggtg

SEQ ID NO: 3596301 - DNA, 25 bp, Homo sapien
gttgcgttgcaataattaaattgtg

SEQ ID NO: 3596302 - DNA, 25 bp, Homo sapien
agaatcctgtgttctacagtcaaag

SEQ ID NO: 3596303 - DNA, 25 bp, Homo sapien
gaatcctgtgttctacagtcaaaga

SEQ ID NO: 3596304 - DNA, 25 bp, Homo sapien
tagaatcctgtgttctacagtcaaa

SEQ ID NO: 3596305 - DNA, 25 bp, Homo sapien
caaaaaacgatctttgacataaact

SEQ ID NO: 3596306 - DNA, 25 bp, Homo sapien
tctgcaggcaattggtcagaacaat

SEQ ID NO: 3596307 - DNA, 25 bp, Homo sapien
taaactttaatctgcaggcaattgg

SEQ ID NO: 3596308 - DNA, 25 bp, Homo sapien
cagaacaatgcaggttgctacagaa

SEQ ID NO: 3596309 - DNA, 25 bp, Homo sapien
tagaatcacgggagcacagtggaca

SEQ ID NO: 3596310 - DNA, 25 bp, Homo sapien
cttagaatcacgggagcacagtgga

SEQ ID NO: 3596311 - DNA, 25 bp, Homo sapien
ttagaatcacgggagcacagtggac

SEQ ID NO: 3596312 - DNA, 25 bp, Homo sapien
tttacctccatttctaaagtgtgac

SEQ ID NO: 3596313 - DNA, 25 bp, Homo sapien
tacctccatttctaaagtgtgacac

SEQ ID NO: 3596314 - DNA, 25 bp, Homo sapien
cactgctggacttttgactgaggtc

SEQ ID NO: 3596315 - DNA, 25 bp, Homo sapien
aagtgtgacactgctggacttttga

SEQ ID NO: 3596316 - DNA, 25 bp, Homo sapien
cttttgcagcacaagaggcaatggg

SEQ ID NO: 3596317 - DNA, 25 bp, Homo sapien
tactgaatgcagtgtccatagggag

SEQ ID NO: 3596318 - DNA, 25 bp, Homo sapien
cagataataccctgaggactgggtc

SEQ ID NO: 3596319 - DNA, 25 bp, Homo sapien
gtcactgtactagattcagagccca

SEQ ID NO: 3596320 - DNA, 25 bp, Homo sapien
gaagtaatcccagattttgagggca

SEQ ID NO: 3596321 - DNA, 25 bp, Homo sapien
tgccttcacgcttagccagcaagag

SEQ ID NO: 3596322 - DNA, 25 bp, Homo sapien
agagaacaagagtcttcccacccat

SEQ ID NO: 3596323 - DNA, 25 bp, Homo sapien
ttggctatattcaactcaaaaacgt

SEQ ID NO: 3596324 - DNA, 25 bp, Homo sapien
ccctcaggataaactcctattgacg

SEQ ID NO: 3596325 - DNA, 25 bp, Homo sapien
gcagacagttgtgaattcatcccaa

SEQ ID NO: 3596326 - DNA, 25 bp, Homo sapien
taaactcctattgacgtcagcggga

SEQ ID NO: 3596327 - DNA, 25 bp, Homo sapien
cgtcagcgggagctttctcttgcag

SEQ ID NO: 3596328 - DNA, 25 bp, Homo sapien
cctggtggtgaaagatgctgcttga

SEQ ID NO: 3596329 - DNA, 25 bp, Homo sapien
tttgcttgactctagaggctgctca

SEQ ID NO: 3596330 - DNA, 25 bp, Homo sapien
aaattggcattgagaacctgaaccc

SEQ ID NO: 3596331 - DNA, 25 bp, Homo sapien
tcagatgcgatgactccctcctggt

SEQ ID NO: 3596332 - DNA, 25 bp, Homo sapien
gacaaagacactgaaaagccacacc

SEQ ID NO: 3596333 - DNA, 25 bp, Homo sapien
aagacccacttgtacatgttgttac

SEQ ID NO: 3596334 - DNA, 25 bp, Homo sapien
ttgttacaccaaagatctcttcttg

SEQ ID NO: 3596335 - DNA, 25 bp, Homo sapien
aagccacaccagttctcaagaccaa

SEQ ID NO: 3596336 - DNA, 25 bp, Homo sapien
gacacagattgccatttagagagct

SEQ ID NO: 3596337 - DNA, 25 bp, Homo sapien
tcagcatgcataagggcttcctgga

SEQ ID NO: 3596338 - DNA, 25 bp, Homo sapien
gctaccatgtaagaggaacctttca

SEQ ID NO: 3596339 - DNA, 25 bp, Homo sapien
gaaagcggactaattcaggcagtaa

SEQ ID NO: 3596340 - DNA, 25 bp, Homo sapien
ggtaactagaggtacaaactgcatg

SEQ ID NO: 3596341 - DNA, 25 bp, Homo sapien
tgcctggtgtagttcaaagtcctct

SEQ ID NO: 3596342 - DNA, 25 bp, Homo sapien
gcacaccattgggaaaaatactaga

SEQ ID NO: 3596343 - DNA, 25 bp, Homo sapien
gatttgacgctcaatatgatgcagc

SEQ ID NO: 3596344 - DNA, 25 bp, Homo sapien
tgctcagtgtcaattctcttatggt

SEQ ID NO: 3596345 - DNA, 25 bp, Homo sapien
ctgctcagtgtcaattctcttatgg

SEQ ID NO: 3596346 - DNA, 25 bp, Homo sapien
gctcagtgtcaattctcttatggtc

SEQ ID NO: 3596347 - DNA, 25 bp, Homo sapien
caggagtagcatggcttctgagcag

SEQ ID NO: 3596348 - DNA, 25 bp, Homo sapien
tctgagagtccaagccaaggttaag

SEQ ID NO: 3596349 - DNA, 25 bp, Homo sapien
gattgcccaaacctcagaagaaagt

SEQ ID NO: 3596350 - DNA, 25 bp, Homo sapien
gaatatggcgtagagtacagccgcc

SEQ ID NO: 3596351 - DNA, 25 bp, Homo sapien
aaatgggactcctcctatagccagg

SEQ ID NO: 3596352 - DNA, 25 bp, Homo sapien
ctcactgaatgctagctcagccagg

SEQ ID NO: 3596353 - DNA, 25 bp, Homo sapien
gaatgctagctcagccaggcatgtt

SEQ ID NO: 3596354 - DNA, 25 bp, Homo sapien
tgaatgctagctcagccaggcatgt

SEQ ID NO: 3596355 - DNA, 25 bp, Homo sapien
ttcttctcactgaatgctagctcag

SEQ ID NO: 3596356 - DNA, 25 bp, Homo sapien
tcctgagtctgctgtgtaaatgcca

SEQ ID NO: 3596357 - DNA, 25 bp, Homo sapien
tgttacggaaattgcctctccttta

SEQ ID NO: 3596358 - DNA, 25 bp, Homo sapien
ccagtagtcaaataaatcatgtggc

SEQ ID NO: 3596359 - DNA, 25 bp, Homo sapien
cattaaaccagaggtgtttgttacg

SEQ ID NO: 3596360 - DNA, 25 bp, Homo sapien
tttgaataaatctgccgcaagaccc

SEQ ID NO: 3596361 - DNA, 25 bp, Homo sapien
ttattgtgctacaggtgactttcag

SEQ ID NO: 3596362 - DNA, 25 bp, Homo sapien
tactacaaagatccaaaaattgggc

SEQ ID NO: 3596363 - DNA, 25 bp, Homo sapien
aagacccatctatatttttgcaaag

SEQ ID NO: 3596364 - DNA, 25 bp, Homo sapien
tgctaatggctagttataaggtgcc

SEQ ID NO: 3596365 - DNA, 25 bp, Homo sapien
catttggtttctaagggaacatcac

SEQ ID NO: 3596366 - DNA, 25 bp, Homo sapien
taatcctgataccaacgtgatgctt

SEQ ID NO: 3596367 - DNA, 25 bp, Homo sapien
ggtccacaaagaagatacagggtag

SEQ ID NO: 3596368 - DNA, 25 bp, Homo sapien
tgttctcaagaatagcagtcggctc

SEQ ID NO: 3596369 - DNA, 25 bp, Homo sapien
ggaaaactctggacacctgatgctc

SEQ ID NO: 3596370 - DNA, 25 bp, Homo sapien
gagaacaggtcttcatttgagcagg

SEQ ID NO: 3596371 - DNA, 25 bp, Homo sapien
taagcatgaggattgaggtgctccc

SEQ ID NO: 3596372 - DNA, 25 bp, Homo sapien
ttgggaagtttaccacactgccatg

SEQ ID NO: 3596373 - DNA, 25 bp, Homo sapien
tgttgtgcgaaatgtagttatctag

SEQ ID NO: 3596374 - DNA, 25 bp, Homo sapien
aaaccactcatatgaatggacacat

SEQ ID NO: 3596375 - DNA, 25 bp, Homo sapien
cgagttacaattcttccagttggga

SEQ ID NO: 3596376 - DNA, 25 bp, Homo sapien
gcctgacataatacagaaattttgc

SEQ ID NO: 3596377 - DNA, 25 bp, Homo sapien
ttattgacagcggtcacctccacct

SEQ ID NO: 3596378 - DNA, 25 bp, Homo sapien
tcatcctccggctttttattgacag

SEQ ID NO: 3596379 - DNA, 25 bp, Homo sapien
ccttttagtaggattattgcctgac

SEQ ID NO: 3596380 - DNA, 25 bp, Homo sapien
tttttattctcgacgaagaaagaga

SEQ ID NO: 3596381 - DNA, 25 bp, Homo sapien
tggtgccgatgttgtaggaaacctt

SEQ ID NO: 3596382 - DNA, 25 bp, Homo sapien
tgtctcccggaggaacatggtgccg

SEQ ID NO: 3596383 - DNA, 25 bp, Homo sapien
tcagaggcttgtctcccggaggaac

SEQ ID NO: 3596384 - DNA, 25 bp, Homo sapien
tctggaagctcttcacgagaccgcg

SEQ ID NO: 3596385 - DNA, 25 bp, Homo sapien
gctcttcacgagaccgcggaatgaa

SEQ ID NO: 3596386 - DNA, 25 bp, Homo sapien
cacgagaccgcggaatgaatgtgaa

SEQ ID NO: 3596387 - DNA, 25 bp, Homo sapien
gagaccgcggaatgaatgtgaaact

SEQ ID NO: 3596388 - DNA, 25 bp, Homo sapien
aatgtttatgcgttttaaggttgca

SEQ ID NO: 3596389 - DNA, 25 bp, Homo sapien
caataagttctcctaaagggatagc

SEQ ID NO: 3596390 - DNA, 25 bp, Homo sapien
aagggatagccttcctgtatgtccc

SEQ ID NO: 3596391 - DNA, 25 bp, Homo sapien
attcaggccaataagttctcctaaa

SEQ ID NO: 3596392 - DNA, 25 bp, Homo sapien
cttaggcttggaacaacaatgacct

SEQ ID NO: 3596393 - DNA, 25 bp, Homo sapien
attatattgacaaaggaacagaagc

SEQ ID NO: 3596394 - DNA, 25 bp, Homo sapien
ttaccagaaagatatgcattcctcc

SEQ ID NO: 3596395 - DNA, 25 bp, Homo sapien
cagaagcagagtttctagctagtgt

SEQ ID NO: 3596396 - DNA, 25 bp, Homo sapien
tcattcttcaattattccattcgtc

SEQ ID NO: 3596397 - DNA, 25 bp, Homo sapien
tgccatggtaattgttgtcagatca

SEQ ID NO: 3596398 - DNA, 25 bp, Homo sapien
taacttttttcatcgtatagagcag

SEQ ID NO: 3596399 - DNA, 25 bp, Homo sapien
gaggccctcaaaatctcttgggttc

SEQ ID NO: 3596400 - DNA, 25 bp, Homo sapien
cagaatcactgatctctactagaga

SEQ ID NO: 3596401 - DNA, 25 bp, Homo sapien
ggtatagcagagcattcaaaatccc

SEQ ID NO: 3596402 - DNA, 25 bp, Homo sapien
gacacagtcgctgcccatatacagg

SEQ ID NO: 3596403 - DNA, 25 bp, Homo sapien
acagagtgcttattatgggctagac

SEQ ID NO: 3596404 - DNA, 25 bp, Homo sapien
taagcagctgtacagtaatgcccag

SEQ ID NO: 3596405 - DNA, 25 bp, Homo sapien
gcacggagcctgagtgaattcctat

SEQ ID NO: 3596406 - DNA, 25 bp, Homo sapien
caggcaataacgtggcattcgcacc

SEQ ID NO: 3596407 - DNA, 25 bp, Homo sapien
attgatgcgccgagggtgacttccc

SEQ ID NO: 3596408 - DNA, 25 bp, Homo sapien
ctcgaatttgcttgccagtgtgaca

SEQ ID NO: 3596409 - DNA, 25 bp, Homo sapien
gtagccaaatatcaccccttcacca

SEQ ID NO: 3596410 - DNA, 25 bp, Homo sapien
agccaaatatcaccccttcaccacc

SEQ ID NO: 3596411 - DNA, 25 bp, Homo sapien
caaatatcaccccttcaccaccagg

SEQ ID NO: 3596412 - DNA, 25 bp, Homo sapien
caagtagccaaatatcaccccttca

SEQ ID NO: 3596413 - DNA, 25 bp, Homo sapien
tgtggaattatctaagggtggcctg

SEQ ID NO: 3596414 - DNA, 25 bp, Homo sapien
tacaccaggaaccagtaacacagca

SEQ ID NO: 3596415 - DNA, 25 bp, Homo sapien
ccttgtggaattatctaagggtggc

SEQ ID NO: 3596416 - DNA, 25 bp, Homo sapien
agccctttcagagatgtacaccagg

SEQ ID NO: 3596417 - DNA, 25 bp, Homo sapien
agtatgtggcatgggaaacaaaaag

SEQ ID NO: 3596418 - DNA, 25 bp, Homo sapien
caaagagtatgtggcatgggaaaca

SEQ ID NO: 3596419 - DNA, 25 bp, Homo sapien
tttagagccaacaggttgggactgt

SEQ ID NO: 3596420 - DNA, 25 bp, Homo sapien
gctggatgaataattttggaactga

SEQ ID NO: 3596421 - DNA, 25 bp, Homo sapien
ctgaatctgtcaaacagaagccagc

SEQ ID NO: 3596422 - DNA, 25 bp, Homo sapien
tctgaagaacagagatacggagcag

SEQ ID NO: 3596423 - DNA, 25 bp, Homo sapien
tttagaagtactgagcgagctgacc

SEQ ID NO: 3596424 - DNA, 25 bp, Homo sapien
gcttggacagggaatacagccctca

SEQ ID NO: 3596425 - DNA, 25 bp, Homo sapien
tacggagcagacacatgaggtttag

SEQ ID NO: 3596426 - DNA, 25 bp, Homo sapien
ttagatggtggtagatatgtggcaa

SEQ ID NO: 3596427 - DNA, 25 bp, Homo sapien
tagatggtggtagatatgtggcaat

SEQ ID NO: 3596428 - DNA, 25 bp, Homo sapien
gtcttcttctgaaaggtgtctttca

SEQ ID NO: 3596429 - DNA, 25 bp, Homo sapien
cttctgaaaggtgtctttcatgtcc

SEQ ID NO: 3596430 - DNA, 25 bp, Homo sapien
aacaaatggcgaatttccatcttta

SEQ ID NO: 3596431 - DNA, 25 bp, Homo sapien
ttttggtggtccttatcagtatcta

SEQ ID NO: 3596432 - DNA, 25 bp, Homo sapien
tcagtatctattatagaaacaaatg

SEQ ID NO: 3596433 - DNA, 25 bp, Homo sapien
tatagaaacaaatggcgaatttcca

SEQ ID NO: 3596434 - DNA, 25 bp, Homo sapien
cactttgatgctgatctggaaccag

SEQ ID NO: 3596435 - DNA, 25 bp, Homo sapien
tcactttgatgctgatctggaacca

SEQ ID NO: 3596436 - DNA, 25 bp, Homo sapien
cagtacccaaatccgtttcactttg

SEQ ID NO: 3596437 - DNA, 25 bp, Homo sapien
ctggatggaaacaggaaaggagaaa

SEQ ID NO: 3596438 - DNA, 25 bp, Homo sapien
caggaaaggagaaaaggagttcact

SEQ ID NO: 3596439 - DNA, 25 bp, Homo sapien
tggatggaaacaggaaaggagaaaa

SEQ ID NO: 3596440 - DNA, 25 bp, Homo sapien
ggagaaaaggagttcactcctctgg

SEQ ID NO: 3596441 - DNA, 25 bp, Homo sapien
gatcactgtggctgtgatatcctta

SEQ ID NO: 3596442 - DNA, 25 bp, Homo sapien
gcttgcagatcactgtggctgtgat

SEQ ID NO: 3596443 - DNA, 25 bp, Homo sapien
aagtcttacaacagcagtgcttgca

SEQ ID NO: 3596444 - DNA, 25 bp, Homo sapien
tgtactctgttgagacaagtcttac

SEQ ID NO: 3596445 - DNA, 25 bp, Homo sapien
gagttcagccatagctactggactg

SEQ ID NO: 3596446 - DNA, 25 bp, Homo sapien
actggactgttcttaggagctttta

SEQ ID NO: 3596447 - DNA, 25 bp, Homo sapien
ggagcttttaggcttgttctatact

SEQ ID NO: 3596448 - DNA, 25 bp, Homo sapien
tgttctatactgatcaccttttgcc

SEQ ID NO: 3596449 - DNA, 25 bp, Homo sapien
agttaaactttaccaggtgatgcca

SEQ ID NO: 3596450 - DNA, 25 bp, Homo sapien
tgctacagatcctcaccaacagtgg

SEQ ID NO: 3596451 - DNA, 25 bp, Homo sapien
tacatgtgtaaacgtctaggagagg

SEQ ID NO: 3596452 - DNA, 25 bp, Homo sapien
actagctatgggtgagatttcctgc

SEQ ID NO: 3596453 - DNA, 25 bp, Homo sapien
ttcccagaggtagacctcagattgc

SEQ ID NO: 3596454 - DNA, 25 bp, Homo sapien
gattgcagaagaccatcagacccaa

SEQ ID NO: 3596455 - DNA, 25 bp, Homo sapien
gacccaagagtacaacacaccagga

SEQ ID NO: 3596456 - DNA, 25 bp, Homo sapien
gatctggactttccactgtttttaa

SEQ ID NO: 3596457 - DNA, 25 bp, Homo sapien
ctgaatcggtcttccatcaggtgtc

SEQ ID NO: 3596458 - DNA, 25 bp, Homo sapien
gctgcaacacagtaggcatcaccta

SEQ ID NO: 3596459 - DNA, 25 bp, Homo sapien
gccatcagagcaatgggtttagcat

SEQ ID NO: 3596460 - DNA, 25 bp, Homo sapien
tcaggtgtcagcacctcttctgaaa

SEQ ID NO: 3596461 - DNA, 25 bp, Homo sapien
cattttacccctaataagacaatgt

SEQ ID NO: 3596462 - DNA, 25 bp, Homo sapien
cccctaataagacaatgttctttgc

SEQ ID NO: 3596463 - DNA, 25 bp, Homo sapien
taatcttcacattatcccacccgtt

SEQ ID NO: 3596464 - DNA, 25 bp, Homo sapien
tctttgctaatcttcacattatccc

SEQ ID NO: 3596465 - DNA, 25 bp, Homo sapien
gggactggtaaatgtcccatattct

SEQ ID NO: 3596466 - DNA, 25 bp, Homo sapien
tattggctgtcaccaagaatgcttg

SEQ ID NO: 3596467 - DNA, 25 bp, Homo sapien
tgcttggttcttagaaaggatgcca

SEQ ID NO: 3596468 - DNA, 25 bp, Homo sapien
cacctgccagcccaatcagctgaca

SEQ ID NO: 3596469 - DNA, 25 bp, Homo sapien
cagaacagcctgagtatctccatgg

SEQ ID NO: 3596470 - DNA, 25 bp, Homo sapien
ggctttccctccacatgacagttgg

SEQ ID NO: 3596471 - DNA, 25 bp, Homo sapien
taacagcaatcttatcaggttctgg

SEQ ID NO: 3596472 - DNA, 25 bp, Homo sapien
tgccctgctgaaggtaacctggctt

SEQ ID NO: 3596473 - DNA, 25 bp, Homo sapien
ggcagttaagcattggaaaggcttt

SEQ ID NO: 3596474 - DNA, 25 bp, Homo sapien
ttctcagtgcttgatatatgcacag

SEQ ID NO: 3596475 - DNA, 25 bp, Homo sapien
tctcagtgcttgatatatgcacagc

SEQ ID NO: 3596476 - DNA, 25 bp, Homo sapien
tcagtgcttgatatatgcacagcaa

SEQ ID NO: 3596477 - DNA, 25 bp, Homo sapien
gaaactaaagagctcatttccccaa

SEQ ID NO: 3596478 - DNA, 25 bp, Homo sapien
tgaatgtttaccactcagaagagat

SEQ ID NO: 3596479 - DNA, 25 bp, Homo sapien
cctgacattgtgcaatctacgtaag

SEQ ID NO: 3596480 - DNA, 25 bp, Homo sapien
gaaaataaaacctgcagctcacaac

SEQ ID NO: 3596481 - DNA, 25 bp, Homo sapien
atgtcaacacaaacgaactcatatt

SEQ ID NO: 3596482 - DNA, 25 bp, Homo sapien
caatttaattcacatgacaatttac

SEQ ID NO: 3596483 - DNA, 25 bp, Homo sapien
gagttgtcaattatttagtatcaag

SEQ ID NO: 3596484 - DNA, 25 bp, Homo sapien
cacaaacgaactcatattgaaagtt

SEQ ID NO: 3596485 - DNA, 25 bp, Homo sapien
cactggtggtcaaatctggtgtaca

SEQ ID NO: 3596486 - DNA, 25 bp, Homo sapien
caacttgtccacacatggagagccc

SEQ ID NO: 3596487 - DNA, 25 bp, Homo sapien
tacttgcatgggagtacactgggca

SEQ ID NO: 3596488 - DNA, 25 bp, Homo sapien
caaaatgacatctcgggtggcatca

SEQ ID NO: 3596489 - DNA, 25 bp, Homo sapien
tttactagtaatgctctgctctgga

SEQ ID NO: 3596490 - DNA, 25 bp, Homo sapien
tattaggatcttaagggcatggtaa

SEQ ID NO: 3596491 - DNA, 25 bp, Homo sapien
tcacagtatggtggagaaccaaatc

SEQ ID NO: 3596492 - DNA, 25 bp, Homo sapien
gaaccaaatctatatcggccagaga

SEQ ID NO: 3596493 - DNA, 25 bp, Homo sapien
gtcatcattaactcaatacagtcat

SEQ ID NO: 3596494 - DNA, 25 bp, Homo sapien
ggtcatcattaactcaatacagtca

SEQ ID NO: 3596495 - DNA, 25 bp, Homo sapien
catcattaactcaatacagtcattc

SEQ ID NO: 3596496 - DNA, 25 bp, Homo sapien
atcattaactcaatacagtcattca

SEQ ID NO: 3596497 - DNA, 25 bp, Homo sapien
tagttgtaactgacgtatggtctct

SEQ ID NO: 3596498 - DNA, 25 bp, Homo sapien
tattagttgtaactgacgtatggtc

SEQ ID NO: 3596499 - DNA, 25 bp, Homo sapien
cgcactgcctacattatctgattta

SEQ ID NO: 3596500 - DNA, 25 bp, Homo sapien
ccaacgcactgcctacattatctga

SEQ ID NO: 3596501 - DNA, 25 bp, Homo sapien
ccaccgttccctaagatcattattc

SEQ ID NO: 3596502 - DNA, 25 bp, Homo sapien
taactcaagtgcgataccaccgttc

SEQ ID NO: 3596503 - DNA, 25 bp, Homo sapien
tgcgataccaccgttccctaagatc

SEQ ID NO: 3596504 - DNA, 25 bp, Homo sapien
tcaagtgcgataccaccgttcccta

SEQ ID NO: 3596505 - DNA, 25 bp, Homo sapien
cataaggatttccttcacatatcaa

SEQ ID NO: 3596506 - DNA, 25 bp, Homo sapien
ctaatacataaggatttccttcaca

SEQ ID NO: 3596507 - DNA, 25 bp, Homo sapien
tacataaggatttccttcacatatc

SEQ ID NO: 3596508 - DNA, 25 bp, Homo sapien
taatacataaggatttccttcacat

SEQ ID NO: 3596509 - DNA, 25 bp, Homo sapien
atgctgattgccatcttctgttaca

SEQ ID NO: 3596510 - DNA, 25 bp, Homo sapien
tctgttacaatgcagtgttcttcac

SEQ ID NO: 3596511 - DNA, 25 bp, Homo sapien
tgctgattgccatcttctgttacaa

SEQ ID NO: 3596512 - DNA, 25 bp, Homo sapien
atcttctgttacaatgcagtgttct

SEQ ID NO: 3596513 - DNA, 25 bp, Homo sapien
tccgcacaagtgacgcccgcgatgc

SEQ ID NO: 3596514 - DNA, 25 bp, Homo sapien
cttcagttgctttacgccagattct

SEQ ID NO: 3596515 - DNA, 25 bp, Homo sapien
tcttcagttgctttacgccagattc

SEQ ID NO: 3596516 - DNA, 25 bp, Homo sapien
ctgctccgcacaagtgacgcccgcg

SEQ ID NO: 3596517 - DNA, 25 bp, Homo sapien
atatcgcggcggaacagcgagactc

SEQ ID NO: 3596518 - DNA, 25 bp, Homo sapien
aatatcgcggcggaacagcgagact

SEQ ID NO: 3596519 - DNA, 25 bp, Homo sapien
gaatatcgcggcggaacagcgagac

SEQ ID NO: 3596520 - DNA, 25 bp, Homo sapien
caccataggatccatcatagagcac

SEQ ID NO: 3596521 - DNA, 25 bp, Homo sapien
aatgaggtataacatcggtcagcat

SEQ ID NO: 3596522 - DNA, 25 bp, Homo sapien
catagagcacttagaaactttcagg

SEQ ID NO: 3596523 - DNA, 25 bp, Homo sapien
ggaaatgaggtataacatcggtcag

SEQ ID NO: 3596524 - DNA, 25 bp, Homo sapien
tggaagcaccccaaagtgagctaac

SEQ ID NO: 3596525 - DNA, 25 bp, Homo sapien
gattggatactcaacatgtacctgg

SEQ ID NO: 3596526 - DNA, 25 bp, Homo sapien
gtgagctaaccctagaatgaagtgg

SEQ ID NO: 3596527 - DNA, 25 bp, Homo sapien
cagatattgctaaagatgtactccc

SEQ ID NO: 3596528 - DNA, 25 bp, Homo sapien
ctaatctaggagcctatcttgagat

SEQ ID NO: 3596529 - DNA, 25 bp, Homo sapien
atctaggagcctatcttgagatgta

SEQ ID NO: 3596530 - DNA, 25 bp, Homo sapien
aatctaggagcctatcttgagatgt

SEQ ID NO: 3596531 - DNA, 25 bp, Homo sapien
tctaggagcctatcttgagatgtaa

SEQ ID NO: 3596532 - DNA, 25 bp, Homo sapien
ttccagaaagcttcttcttctctcc

SEQ ID NO: 3596533 - DNA, 25 bp, Homo sapien
ccagaaagcttcttcttctctccca

SEQ ID NO: 3596534 - DNA, 25 bp, Homo sapien
ctagatttccagaaagcttcttctt

SEQ ID NO: 3596535 - DNA, 25 bp, Homo sapien
atttccagaaagcttcttcttctct

SEQ ID NO: 3596536 - DNA, 25 bp, Homo sapien
gaataccaatttaccgactgtccac

SEQ ID NO: 3596537 - DNA, 25 bp, Homo sapien
tccccagaggtaatccacagtactt

SEQ ID NO: 3596538 - DNA, 25 bp, Homo sapien
tgtccacctaaagcagtaaaatgtt

SEQ ID NO: 3596539 - DNA, 25 bp, Homo sapien
gctctacagtaaatgccaattgcaa

SEQ ID NO: 3596540 - DNA, 25 bp, Homo sapien
tagtaggacagacactttcaacgtg

SEQ ID NO: 3596541 - DNA, 25 bp, Homo sapien
acactttcaacgtggaatactccaa

SEQ ID NO: 3596542 - DNA, 25 bp, Homo sapien
tcaacgtggaatactccaaaaggcc

SEQ ID NO: 3596543 - DNA, 25 bp, Homo sapien
tcaactgtctagtaggacagacact

SEQ ID NO: 3596544 - DNA, 25 bp, Homo sapien
caagcagcaggcactatttctatta

SEQ ID NO: 3596545 - DNA, 25 bp, Homo sapien
agtcatcagtttttcaaaacctgcc

SEQ ID NO: 3596546 - DNA, 25 bp, Homo sapien
ctattataatcatcgagtatattag

SEQ ID NO: 3596547 - DNA, 25 bp, Homo sapien
catcgagtatattagtcatcagttt

SEQ ID NO: 3596548 - DNA, 25 bp, Homo sapien
gacttagacccacgaagtcatacat

SEQ ID NO: 3596549 - DNA, 25 bp, Homo sapien
ggccgaaatgacttagacccacgaa

SEQ ID NO: 3596550 - DNA, 25 bp, Homo sapien
tacatcagccttggtcccttacaga

SEQ ID NO: 3596551 - DNA, 25 bp, Homo sapien
cccacgaagtcatacatcagccttg

SEQ ID NO: 3596552 - DNA, 25 bp, Homo sapien
caccaaaaccagtccgctgaatgta

SEQ ID NO: 3596553 - DNA, 25 bp, Homo sapien
agaaggagacttaacacttgcacca

SEQ ID NO: 3596554 - DNA, 25 bp, Homo sapien
ccagtccgctgaatgtatgggcagt

SEQ ID NO: 3596555 - DNA, 25 bp, Homo sapien
tatgggcagttatctgattgtgccc

SEQ ID NO: 3596556 - DNA, 25 bp, Homo sapien
tagtctgagtagaaatccaaaactg

SEQ ID NO: 3596557 - DNA, 25 bp, Homo sapien
aatctgtactccattgccacattcc

SEQ ID NO: 3596558 - DNA, 25 bp, Homo sapien
attgccacattcctccaacaaacta

SEQ ID NO: 3596559 - DNA, 25 bp, Homo sapien
ccacattcctccaacaaactagctg

SEQ ID NO: 3596560 - DNA, 25 bp, Homo sapien
cccataaaccgagtatcggcagtgc

SEQ ID NO: 3596561 - DNA, 25 bp, Homo sapien
atatgatagtggtgagaagcagccc

SEQ ID NO: 3596562 - DNA, 25 bp, Homo sapien
gagaagcagccccataaaccgagta

SEQ ID NO: 3596563 - DNA, 25 bp, Homo sapien
ttatatgatagtggtgagaagcagc

SEQ ID NO: 3596564 - DNA, 25 bp, Homo sapien
gttaaaaaagtcctgcaaagtgcca

SEQ ID NO: 3596565 - DNA, 25 bp, Homo sapien
gatgctaattctgaggtccgcagga

SEQ ID NO: 3596566 - DNA, 25 bp, Homo sapien
tattttcagagccagaagcctcagg

SEQ ID NO: 3596567 - DNA, 25 bp, Homo sapien
caaagtgccacctacagctcgaagg

SEQ ID NO: 3596568 - DNA, 25 bp, Homo sapien
aatccatgaacctacatgatgcatt

SEQ ID NO: 3596569 - DNA, 25 bp, Homo sapien
cacagcctgccccattatcatatct

SEQ ID NO: 3596570 - DNA, 25 bp, Homo sapien
tcatatcacttagagcattttcact

SEQ ID NO: 3596571 - DNA, 25 bp, Homo sapien
ccatatctctctgccccgacacatg

SEQ ID NO: 3596572 - DNA, 25 bp, Homo sapien
cttttaaggttgcacttgtgccaca

SEQ ID NO: 3596573 - DNA, 25 bp, Homo sapien
ttttaaggttgcacttgtgccacat

SEQ ID NO: 3596574 - DNA, 25 bp, Homo sapien
gggattactgtgacgtacatagatt

SEQ ID NO: 3596575 - DNA, 25 bp, Homo sapien
ttgctgatgatgactagccctgttc

SEQ ID NO: 3596576 - DNA, 25 bp, Homo sapien
ccctgttcaaattggcggccacaga

SEQ ID NO: 3596577 - DNA, 25 bp, Homo sapien
tacatagattctggcttttgctgat

SEQ ID NO: 3596578 - DNA, 25 bp, Homo sapien
aaagcagtttccctagcgcactcac

SEQ ID NO: 3596579 - DNA, 25 bp, Homo sapien
caaccaagtgttgggagctatgctg

SEQ ID NO: 3596580 - DNA, 25 bp, Homo sapien
caattttggcgagagaacctgaata

SEQ ID NO: 3596581 - DNA, 25 bp, Homo sapien
gtgggagcctctgaacacgcagctt

SEQ ID NO: 3596582 - DNA, 25 bp, Homo sapien
tattcatctcgtttcaccatttgtg

SEQ ID NO: 3596583 - DNA, 25 bp, Homo sapien
acacacccacacatcatttgagagt

SEQ ID NO: 3596584 - DNA, 25 bp, Homo sapien
tttgagagtaggtagcagacattat

SEQ ID NO: 3596585 - DNA, 25 bp, Homo sapien
tgtgaacaatttgtgccatttgctt

SEQ ID NO: 3596586 - DNA, 25 bp, Homo sapien
cttctttgttggagtggtctgcata

SEQ ID NO: 3596587 - DNA, 25 bp, Homo sapien
tattagcagtacactgaagaattcc

SEQ ID NO: 3596588 - DNA, 25 bp, Homo sapien
tggtctgcataggagcatctgttag

SEQ ID NO: 3596589 - DNA, 25 bp, Homo sapien
tctgttagagatattgtggaaattc

SEQ ID NO: 3596590 - DNA, 25 bp, Homo sapien
aagagagaggcaagcttgagttgtc

SEQ ID NO: 3596591 - DNA, 25 bp, Homo sapien
gaagagagaggcaagcttgagttgt

SEQ ID NO: 3596592 - DNA, 25 bp, Homo sapien
ttcccatgggttagggaagagagag

SEQ ID NO: 3596593 - DNA, 25 bp, Homo sapien
tcctcttgagagtctgctgtatcgt

SEQ ID NO: 3596594 - DNA, 25 bp, Homo sapien
tgagagtctgctgtatcgtctgagg

SEQ ID NO: 3596595 - DNA, 25 bp, Homo sapien
cttgagagtctgctgtatcgtctga

SEQ ID NO: 3596596 - DNA, 25 bp, Homo sapien
tcttgagagtctgctgtatcgtctg

SEQ ID NO: 3596597 - DNA, 25 bp, Homo sapien
agttgcttccaatgtgtcgttacgg

SEQ ID NO: 3596598 - DNA, 25 bp, Homo sapien
taaccgcttaattcaaacagagtcc

SEQ ID NO: 3596599 - DNA, 25 bp, Homo sapien
tcactactgctctaagccaatggtt

SEQ ID NO: 3596600 - DNA, 25 bp, Homo sapien
tctgagatggatactcataaccgct

SEQ ID NO: 3596601 - DNA, 25 bp, Homo sapien
tctcctgccctatgaaatcaatagt

SEQ ID NO: 3596602 - DNA, 25 bp, Homo sapien
gactcagagtgaccatgcactgaga

SEQ ID NO: 3596603 - DNA, 25 bp, Homo sapien
gcttctaactagtacaatgacaggt

SEQ ID NO: 3596604 - DNA, 25 bp, Homo sapien
tggaagaaggcaaacagactcagag

SEQ ID NO: 3596605 - DNA, 25 bp, Homo sapien
caagaagtacagagcggtttaaata

SEQ ID NO: 3596606 - DNA, 25 bp, Homo sapien
ctgcacatgtaacccgggactttaa

SEQ ID NO: 3596607 - DNA, 25 bp, Homo sapien
agacaccaggtttacccagagaaga

SEQ ID NO: 3596608 - DNA, 25 bp, Homo sapien
acagagcggtttaaatagctaatgc

SEQ ID NO: 3596609 - DNA, 25 bp, Homo sapien
gagctgaaggactcggacgaaatct

SEQ ID NO: 3596610 - DNA, 25 bp, Homo sapien
gactcggacgaaatcttccttcgag

SEQ ID NO: 3596611 - DNA, 25 bp, Homo sapien
tctccaggtagtcggagcccaggga

SEQ ID NO: 3596612 - DNA, 25 bp, Homo sapien
tctcgcccagcgagtccaggttgac

SEQ ID NO: 3596613 - DNA, 25 bp, Homo sapien
gtggcgggaccggcaagcgacaacg

SEQ ID NO: 3596614 - DNA, 25 bp, Homo sapien
ggtggcgggaccggcaagcgacaac

SEQ ID NO: 3596615 - DNA, 25 bp, Homo sapien
cggtggcgggaccggcaagcgacaa

SEQ ID NO: 3596616 - DNA, 25 bp, Homo sapien
gcggtggcgggaccggcaagcgaca

SEQ ID NO: 3596617 - DNA, 25 bp, Homo sapien
ctgctcatggcgggaacttggggcg

SEQ ID NO: 3596618 - DNA, 25 bp, Homo sapien
agccccccgagccggctgctcatgg

SEQ ID NO: 3596619 - DNA, 25 bp, Homo sapien
tcatggcgggaacttggggcgccgc

SEQ ID NO: 3596620 - DNA, 25 bp, Homo sapien
ccggctgctcatggcgggaacttgg

SEQ ID NO: 3596621 - DNA, 25 bp, Homo sapien
gagagtgtgtgaccgcggtcggcgg

SEQ ID NO: 3596622 - DNA, 25 bp, Homo sapien
cgcctcggcgcatcgccgtgcgccg

SEQ ID NO: 3596623 - DNA, 25 bp, Homo sapien
tcccgctcacggggaggctccgaga

SEQ ID NO: 3596624 - DNA, 25 bp, Homo sapien
gggaggctccgagagtgtgtgaccg

SEQ ID NO: 3596625 - DNA, 25 bp, Homo sapien
ctgacagtgtgaagtgggggttagg

SEQ ID NO: 3596626 - DNA, 25 bp, Homo sapien
cttggggaaacctgacagtgtgaag

SEQ ID NO: 3596627 - DNA, 25 bp, Homo sapien
tggggaaacctgacagtgtgaagtg

SEQ ID NO: 3596628 - DNA, 25 bp, Homo sapien
gggaaacctgacagtgtgaagtggg

SEQ ID NO: 3596629 - DNA, 25 bp, Homo sapien
tccaaacatcctctgaaatataagc

SEQ ID NO: 3596630 - DNA, 25 bp, Homo sapien
tgtaggcccaacacatgtaagctgc

SEQ ID NO: 3596631 - DNA, 25 bp, Homo sapien
caaaaccatttttgcctcagagatc

SEQ ID NO: 3596632 - DNA, 25 bp, Homo sapien
cccttttagccatgcctgggatgca

SEQ ID NO: 3596633 - DNA, 25 bp, Homo sapien
ccctaacaggtagacttggagcacg

SEQ ID NO: 3596634 - DNA, 25 bp, Homo sapien
ttccagggcataaatgagatccatg

SEQ ID NO: 3596635 - DNA, 25 bp, Homo sapien
tgagatccatgttgagaaagtccct

SEQ ID NO: 3596636 - DNA, 25 bp, Homo sapien
tggagcacgttctgtaaaatagtca

SEQ ID NO: 3596637 - DNA, 25 bp, Homo sapien
tgaaggggactgtttcaagcccaag

SEQ ID NO: 3596638 - DNA, 25 bp, Homo sapien
cctgaaggggactgtttcaagccca

SEQ ID NO: 3596639 - DNA, 25 bp, Homo sapien
ggaccatccgatagtccctgaaggg

SEQ ID NO: 3596640 - DNA, 25 bp, Homo sapien
ctcctggaccatccgatagtccctg

SEQ ID NO: 3596641 - DNA, 25 bp, Homo sapien
tccattatgctatttacagggttta

SEQ ID NO: 3596642 - DNA, 25 bp, Homo sapien
tatgctatttacagggtttattaac

SEQ ID NO: 3596643 - DNA, 25 bp, Homo sapien
tacagggtttattaaccacatactc

SEQ ID NO: 3596644 - DNA, 25 bp, Homo sapien
ggtttattaaccacatactcctatg

SEQ ID NO: 3596645 - DNA, 25 bp, Homo sapien
tgcggttgttccagcatgagccact

SEQ ID NO: 3596646 - DNA, 25 bp, Homo sapien
tatgcggttgttccagcatgagcca

SEQ ID NO: 3596647 - DNA, 25 bp, Homo sapien
actatgcggttgttccagcatgagc

SEQ ID NO: 3596648 - DNA, 25 bp, Homo sapien
atgcggttgttccagcatgagccac

SEQ ID NO: 3596649 - DNA, 25 bp, Homo sapien
ttggtagcaaaagcagcaggagcca

SEQ ID NO: 3596650 - DNA, 25 bp, Homo sapien
gcaggagccaatggcccaaccccag

SEQ ID NO: 3596651 - DNA, 25 bp, Homo sapien
ttctctacgtttaactccataacag

SEQ ID NO: 3596652 - DNA, 25 bp, Homo sapien
tccatgaacgggcaggtagcaaaag

SEQ ID NO: 3596653 - DNA, 25 bp, Homo sapien
ggatattgaaatcttcgttcctttc

SEQ ID NO: 3596654 - DNA, 25 bp, Homo sapien
gattgctgcaccttcctctttagga

SEQ ID NO: 3596655 - DNA, 25 bp, Homo sapien
tcctttcagaggaatgattgctgca

SEQ ID NO: 3596656 - DNA, 25 bp, Homo sapien
ttgaaatcttcgttcctttcagagg

SEQ ID NO: 3596657 - DNA, 25 bp, Homo sapien
ttagtaatatgctcctagaggcagg

SEQ ID NO: 3596658 - DNA, 25 bp, Homo sapien
agtaatatgctcctagaggcaggaa

SEQ ID NO: 3596659 - DNA, 25 bp, Homo sapien
taatatgctcctagaggcaggaaaa

SEQ ID NO: 3596660 - DNA, 25 bp, Homo sapien
aatatgctcctagaggcaggaaaat

SEQ ID NO: 3596661 - DNA, 25 bp, Homo sapien
tcatttggcaggctgtgaattcttc

SEQ ID NO: 3596662 - DNA, 25 bp, Homo sapien
agtagagagtataggacggtcgtgg

SEQ ID NO: 3596663 - DNA, 25 bp, Homo sapien
gaagatccttgtggggtgaaagcaa

SEQ ID NO: 3596664 - DNA, 25 bp, Homo sapien
taggacggtcgtggtgcttggtttc

SEQ ID NO: 3596665 - DNA, 25 bp, Homo sapien
ctcatgcgggatgtggcagtcttga

SEQ ID NO: 3596666 - DNA, 25 bp, Homo sapien
attctcatgcgggatgtggcagtct

SEQ ID NO: 3596667 - DNA, 25 bp, Homo sapien
tttcattctcatgcgggatgtggca

SEQ ID NO: 3596668 - DNA, 25 bp, Homo sapien
ttttcattctcatgcgggatgtggc

SEQ ID NO: 3596669 - DNA, 25 bp, Homo sapien
tctgaatcttggtattataaagctc

SEQ ID NO: 3596670 - DNA, 25 bp, Homo sapien
ctctgagtttgttctgaccattcgt

SEQ ID NO: 3596671 - DNA, 25 bp, Homo sapien
gctctggggacctctgagtttgttc

SEQ ID NO: 3596672 - DNA, 25 bp, Homo sapien
gttctgaccattcgttagtccgcat

SEQ ID NO: 3596673 - DNA, 25 bp, Homo sapien
cgaggacagcttgatggagcaacaa

SEQ ID NO: 3596674 - DNA, 25 bp, Homo sapien
taaaattttcagtgcactgtgccac

SEQ ID NO: 3596675 - DNA, 25 bp, Homo sapien
gcagaagcagtgttttgacagttca

SEQ ID NO: 3596676 - DNA, 25 bp, Homo sapien
tggaaaccataactactctgtaagc

SEQ ID NO: 3596677 - DNA, 25 bp, Homo sapien
caaagtgggaccaaactgctactgt

SEQ ID NO: 3596678 - DNA, 25 bp, Homo sapien
ctgattgcaaaagctcaggacagag

SEQ ID NO: 3596679 - DNA, 25 bp, Homo sapien
cagagctggttatcacatcaagaca

SEQ ID NO: 3596680 - DNA, 25 bp, Homo sapien
tactgtgcttattgtggaagaactg

SEQ ID NO: 3596681 - DNA, 25 bp, Homo sapien
gagggatccagcatctcccatcact

SEQ ID NO: 3596682 - DNA, 25 bp, Homo sapien
aagctgagtttgagggatccagcat

SEQ ID NO: 3596683 - DNA, 25 bp, Homo sapien
ctgtgtagccatccggccccagtgt

SEQ ID NO: 3596684 - DNA, 25 bp, Homo sapien
attcctcttgccacgaaagctgagt

SEQ ID NO: 3596685 - DNA, 25 bp, Homo sapien
tccagaacccgagccaaggatttct

SEQ ID NO: 3596686 - DNA, 25 bp, Homo sapien
ttaataagtttatcagtaaactgtc

SEQ ID NO: 3596687 - DNA, 25 bp, Homo sapien
gcacaacaggccagttgactgaggt

SEQ ID NO: 3596688 - DNA, 25 bp, Homo sapien
tggcaccaggcttgagaactttctg

SEQ ID NO: 3596689 - DNA, 25 bp, Homo sapien
ggttcccagtactcttggcaccagg

SEQ ID NO: 3596690 - DNA, 25 bp, Homo sapien
gcgagaagggaattcgtggttccca

SEQ ID NO: 3596691 - DNA, 25 bp, Homo sapien
cctgtgaaatgggagtaatcgtagt

SEQ ID NO: 3596692 - DNA, 25 bp, Homo sapien
taatcgtagtcatgtagtcatagtg

SEQ ID NO: 3596693 - DNA, 25 bp, Homo sapien
gtcatagtgacaggtgcaatggttc

SEQ ID NO: 3596694 - DNA, 25 bp, Homo sapien
catgtagtcatagtgacaggtgcaa

SEQ ID NO: 3596695 - DNA, 25 bp, Homo sapien
aagttgtatctttctgcgcgaggaa

SEQ ID NO: 3596696 - DNA, 25 bp, Homo sapien
cctcctgcttagtagggccaacatt

SEQ ID NO: 3596697 - DNA, 25 bp, Homo sapien
tgttgcgagggtcgtggttagttgg

SEQ ID NO: 3596698 - DNA, 25 bp, Homo sapien
tgaggtgagtgttgcgagggtcgtg

SEQ ID NO: 3596699 - DNA, 25 bp, Homo sapien
tgtgaaggatagtgtttgctgttcc

SEQ ID NO: 3596700 - DNA, 25 bp, Homo sapien
acagaggagggatctgtgtgaagga

SEQ ID NO: 3596701 - DNA, 25 bp, Homo sapien
tcactggagtttgaccccagagaca

SEQ ID NO: 3596702 - DNA, 25 bp, Homo sapien
ttgtgtataagctgaacttcactgg

SEQ ID NO: 3596703 - DNA, 25 bp, Homo sapien
tctttctttggcccactgctctttt

SEQ ID NO: 3596704 - DNA, 25 bp, Homo sapien
tctttggcccactgctcttttctct

SEQ ID NO: 3596705 - DNA, 25 bp, Homo sapien
caacaaagttgagggtctttctttg

SEQ ID NO: 3596706 - DNA, 25 bp, Homo sapien
ttctttggcccactgctcttttctc

SEQ ID NO: 3596707 - DNA, 25 bp, Homo sapien
tcccgccagtgcttatgagaatagc

SEQ ID NO: 3596708 - DNA, 25 bp, Homo sapien
tcattttcccgccagtgcttatgag

SEQ ID NO: 3596709 - DNA, 25 bp, Homo sapien
gcttatgagaatagcggcttaggcc

SEQ ID NO: 3596710 - DNA, 25 bp, Homo sapien
ccagtgcttatgagaatagcggctt

SEQ ID NO: 3596711 - DNA, 25 bp, Homo sapien
tcaggagaaactctagccaaccagc

SEQ ID NO: 3596712 - DNA, 25 bp, Homo sapien
tcagtccccagacaatcagaaaggt

SEQ ID NO: 3596713 - DNA, 25 bp, Homo sapien
tcctggcttagaggaacaactctgt

SEQ ID NO: 3596714 - DNA, 25 bp, Homo sapien
gagcacagggaggagctacacactt

SEQ ID NO: 3596715 - DNA, 25 bp, Homo sapien
gcagctccttcgttaggtaatctat

SEQ ID NO: 3596716 - DNA, 25 bp, Homo sapien
ctatcttcaaaactagcagggtcat

SEQ ID NO: 3596717 - DNA, 25 bp, Homo sapien
tctgcagctccttcgttaggtaatc

SEQ ID NO: 3596718 - DNA, 25 bp, Homo sapien
taggtaatctatcttcaaaactagc

SEQ ID NO: 3596719 - DNA, 25 bp, Homo sapien
tgaatccctaggcttgatatagtgg

SEQ ID NO: 3596720 - DNA, 25 bp, Homo sapien
tgttgaaatgaatccctaggcttga

SEQ ID NO: 3596721 - DNA, 25 bp, Homo sapien
tgaaatgaatccctaggcttgatat

SEQ ID NO: 3596722 - DNA, 25 bp, Homo sapien
cttgttgaaatgaatccctaggctt

SEQ ID NO: 3596723 - DNA, 25 bp, Homo sapien
tcaactctatgggaataagggctcc

SEQ ID NO: 3596724 - DNA, 25 bp, Homo sapien
aaaataaccaacgtctccaactgtg

SEQ ID NO: 3596725 - DNA, 25 bp, Homo sapien
cagcctctggtcagatgctagaaac

SEQ ID NO: 3596726 - DNA, 25 bp, Homo sapien
ttgcacaggtccagagtcaactcta

SEQ ID NO: 3596727 - DNA, 25 bp, Homo sapien
gctggccgttccctcgagaataatc

SEQ ID NO: 3596728 - DNA, 25 bp, Homo sapien
agtagcttttatccagtaccccagg

SEQ ID NO: 3596729 - DNA, 25 bp, Homo sapien
gatgggcacattcagcgcatgactg

SEQ ID NO: 3596730 - DNA, 25 bp, Homo sapien
tgtccgggcaccatcttgtctgctg

SEQ ID NO: 3596731 - DNA, 25 bp, Homo sapien
ggtatggcaaattcagataactgta

SEQ ID NO: 3596732 - DNA, 25 bp, Homo sapien
cattctgggaactgattcctgctcc

SEQ ID NO: 3596733 - DNA, 25 bp, Homo sapien
tgctctccttaggatcagccacatt

SEQ ID NO: 3596734 - DNA, 25 bp, Homo sapien
ctccaggtatggcaaattcagataa

SEQ ID NO: 3596735 - DNA, 25 bp, Homo sapien
ctttgctgtgctcaggggtctgtac

SEQ ID NO: 3596736 - DNA, 25 bp, Homo sapien
ctgtacaatttctctgctccaggaa

SEQ ID NO: 3596737 - DNA, 25 bp, Homo sapien
ttgctgtgctcaggggtctgtacaa

SEQ ID NO: 3596738 - DNA, 25 bp, Homo sapien
gtgctcaggggtctgtacaatttct

SEQ ID NO: 3596739 - DNA, 25 bp, Homo sapien
agtagctggtattcccaagcaattc

SEQ ID NO: 3596740 - DNA, 25 bp, Homo sapien
agctggtattcccaagcaattctcc

SEQ ID NO: 3596741 - DNA, 25 bp, Homo sapien
gtagctggtattcccaagcaattct

SEQ ID NO: 3596742 - DNA, 25 bp, Homo sapien
caagtagctggtattcccaagcaat

SEQ ID NO: 3596743 - DNA, 25 bp, Homo sapien
gaattgaaatcacagtaggagcaca

SEQ ID NO: 3596744 - DNA, 25 bp, Homo sapien
tcgggtcatgaattgaaatcacagt

SEQ ID NO: 3596745 - DNA, 25 bp, Homo sapien
tttcatcattcttgttcgggtcatg

SEQ ID NO: 3596746 - DNA, 25 bp, Homo sapien
cttgttcgggtcatgaattgaaatc

SEQ ID NO: 3596747 - DNA, 25 bp, Homo sapien
tgatgtaggttagtccaaggcagct

SEQ ID NO: 3596748 - DNA, 25 bp, Homo sapien
tctgcccaggtttgatgtaggttag

SEQ ID NO: 3596749 - DNA, 25 bp, Homo sapien
gtgaattctcctattcagctccatg

SEQ ID NO: 3596750 - DNA, 25 bp, Homo sapien
gggttatgtcagctggtcccaggtt

SEQ ID NO: 3596751 - DNA, 25 bp, Homo sapien
tcacccacaggacgattgtgttaac

SEQ ID NO: 3596752 - DNA, 25 bp, Homo sapien
tcctcacctccaaggggtgctatct

SEQ ID NO: 3596753 - DNA, 25 bp, Homo sapien
gttaactgtgccaagtgtggactcc

SEQ ID NO: 3596754 - DNA, 25 bp, Homo sapien
actgtgccaagtgtggactcctcac

SEQ ID NO: 3596755 - DNA, 25 bp, Homo sapien
gagagtccacctgagggtctgccaa

SEQ ID NO: 3596756 - DNA, 25 bp, Homo sapien
tgggaccccaagcaagggaaagtca

SEQ ID NO: 3596757 - DNA, 25 bp, Homo sapien
tctgccaaagtgtgtgggaccccaa

SEQ ID NO: 3596758 - DNA, 25 bp, Homo sapien
tgggattcgtgtgagagtccacctg

SEQ ID NO: 3596759 - DNA, 25 bp, Homo sapien
gtaaggctgaccaaatcacatagat

SEQ ID NO: 3596760 - DNA, 25 bp, Homo sapien
caaatcacatagatgggaggtaaaa

SEQ ID NO: 3596761 - DNA, 25 bp, Homo sapien
ctttcactccacatggagtgttttc

SEQ ID NO: 3596762 - DNA, 25 bp, Homo sapien
cacatagatgggaggtaaaaagagc

SEQ ID NO: 3596763 - DNA, 25 bp, Homo sapien
gctgtgctttccgtccacaatttta

SEQ ID NO: 3596764 - DNA, 25 bp, Homo sapien
ggtgtaaccctattgaagctgtcat

SEQ ID NO: 3596765 - DNA, 25 bp, Homo sapien
cacaattttagacaaatcctccagg

SEQ ID NO: 3596766 - DNA, 25 bp, Homo sapien
taaagaggttctgatgcataacccc

SEQ ID NO: 3596767 - DNA, 25 bp, Homo sapien
ggcatctgtggcagactctgtccgt

SEQ ID NO: 3596768 - DNA, 25 bp, Homo sapien
tcccttacagctagtggttgtggcc

SEQ ID NO: 3596769 - DNA, 25 bp, Homo sapien
cagactctgtccgttgatgaacaca

SEQ ID NO: 3596770 - DNA, 25 bp, Homo sapien
gtggttgtggcctcgtgacaccacc

SEQ ID NO: 3596771 - DNA, 25 bp, Homo sapien
tattcctgcttttgatgaagacctg

SEQ ID NO: 3596772 - DNA, 25 bp, Homo sapien
actcttcccacttattcctgctttt

SEQ ID NO: 3596773 - DNA, 25 bp, Homo sapien
gtgattgacaccaactcttcccact

SEQ ID NO: 3596774 - DNA, 25 bp, Homo sapien
ttcctgcttttgatgaagacctgat

SEQ ID NO: 3596775 - DNA, 25 bp, Homo sapien
tccacagcagggtcatgcaggactt

SEQ ID NO: 3596776 - DNA, 25 bp, Homo sapien
taataacacagatttcactggaact

SEQ ID NO: 3596777 - DNA, 25 bp, Homo sapien
cagcagggtcatgcaggactttgct

SEQ ID NO: 3596778 - DNA, 25 bp, Homo sapien
ggactttgctcccacaaagtctcac

SEQ ID NO: 3596779 - DNA, 25 bp, Homo sapien
tcacctctactactcttgttcctgg

SEQ ID NO: 3596780 - DNA, 25 bp, Homo sapien
cagatactcatagtcgatcctgtca

SEQ ID NO: 3596781 - DNA, 25 bp, Homo sapien
ggttcatgtccactacctgtgaagc

SEQ ID NO: 3596782 - DNA, 25 bp, Homo sapien
cattgctacagtatgggtgccttcc

SEQ ID NO: 3596783 - DNA, 25 bp, Homo sapien
ttatcactatataaaatcgggtctg

SEQ ID NO: 3596784 - DNA, 25 bp, Homo sapien
caatgcaattgggaattctaccaaa

SEQ ID NO: 3596785 - DNA, 25 bp, Homo sapien
caattgggaattctaccaaattatc

SEQ ID NO: 3596786 - DNA, 25 bp, Homo sapien
gggaattctaccaaattatcactat

SEQ ID NO: 3596787 - DNA, 25 bp, Homo sapien
ctccactatcattaaacttgacaca

SEQ ID NO: 3596788 - DNA, 25 bp, Homo sapien
cattaaacttgacacatcttcaagc

SEQ ID NO: 3596789 - DNA, 25 bp, Homo sapien
ttcaagcaaagttctatcatctttg

SEQ ID NO: 3596790 - DNA, 25 bp, Homo sapien
cttcaagcaaagttctatcatcttt

SEQ ID NO: 3596791 - DNA, 25 bp, Homo sapien
tcccagagccttgcactgtgcctgc

SEQ ID NO: 3596792 - DNA, 25 bp, Homo sapien
ccagagccttgcactgtgcctgcct

SEQ ID NO: 3596793 - DNA, 25 bp, Homo sapien
gagccttgcactgtgcctgcctcat

SEQ ID NO: 3596794 - DNA, 25 bp, Homo sapien
agagccttgcactgtgcctgcctca

SEQ ID NO: 3596795 - DNA, 25 bp, Homo sapien
acagcagatctcttgtcagaaatgc

SEQ ID NO: 3596796 - DNA, 25 bp, Homo sapien
gctaacaccaaaatgacaggattaa

SEQ ID NO: 3596797 - DNA, 25 bp, Homo sapien
tcttgtcagaaatgctacaaaccag

SEQ ID NO: 3596798 - DNA, 25 bp, Homo sapien
cacagaaagaaacaactggtatcag

SEQ ID NO: 3596799 - DNA, 25 bp, Homo sapien
caaaatgtcagtaaggtaagcctag

SEQ ID NO: 3596800 - DNA, 25 bp, Homo sapien
gatcatgtgaatggttctcgggaca

SEQ ID NO: 3596801 - DNA, 25 bp, Homo sapien
gaagcagcatgtgatgcccagtact

SEQ ID NO: 3596802 - DNA, 25 bp, Homo sapien
gatgtgtaacctgcagaaacttcca

SEQ ID NO: 3596803 - DNA, 25 bp, Homo sapien
ggctgttatagtgatccagaagaga

SEQ ID NO: 3596804 - DNA, 25 bp, Homo sapien
gaaggtgatacaattgttaggctgt

SEQ ID NO: 3596805 - DNA, 25 bp, Homo sapien
caattgttaggctgttatagtgatc

SEQ ID NO: 3596806 - DNA, 25 bp, Homo sapien
tatagtgatccagaagagagctaag

SEQ ID NO: 3596807 - DNA, 25 bp, Homo sapien
taaaatggcagctacctatgtccgt

SEQ ID NO: 3596808 - DNA, 25 bp, Homo sapien
taggtgaggacttcgcggtaataaa

SEQ ID NO: 3596809 - DNA, 25 bp, Homo sapien
cagacaggaccaccaaagaagtaaa

SEQ ID NO: 3596810 - DNA, 25 bp, Homo sapien
gtataccgtaagcaacaattaggca

SEQ ID NO: 3596811 - DNA, 25 bp, Homo sapien
gagaaattcagggtcctgcaagaca

SEQ ID NO: 3596812 - DNA, 25 bp, Homo sapien
gatatgaaaaagcaccgtgaattgg

SEQ ID NO: 3596813 - DNA, 25 bp, Homo sapien
taaaatcctcagataagcatttggg

SEQ ID NO: 3596814 - DNA, 25 bp, Homo sapien
tctgaactaggaatcttataacccc

SEQ ID NO: 3596815 - DNA, 25 bp, Homo sapien
tcctcgaggattcagggatacgtga

SEQ ID NO: 3596816 - DNA, 25 bp, Homo sapien
gacaattatgtacccctgagccact

SEQ ID NO: 3596817 - DNA, 25 bp, Homo sapien
gctttcagactaaaccaacagtagg

SEQ ID NO: 3596818 - DNA, 25 bp, Homo sapien
cagtaggaattcgagtgcaaaacca

SEQ ID NO: 3596819 - DNA, 25 bp, Homo sapien
gaaatgttaagaaagtatacggctc

SEQ ID NO: 3596820 - DNA, 25 bp, Homo sapien
gaggcagtctgaagagaggctatac

SEQ ID NO: 3596821 - DNA, 25 bp, Homo sapien
caataatgggagataatagcaagcc

SEQ ID NO: 3596822 - DNA, 25 bp, Homo sapien
gcaagccactctcactgtaagacaa

SEQ ID NO: 3596823 - DNA, 25 bp, Homo sapien
ggctgctacccgcaagttttggcat

SEQ ID NO: 3596824 - DNA, 25 bp, Homo sapien
tacctaagtatagctatcccagttc

SEQ ID NO: 3596825 - DNA, 25 bp, Homo sapien
tgtctaaactgtggctcaattccaa

SEQ ID NO: 3596826 - DNA, 25 bp, Homo sapien
ctggatatgactttaacctgcttaa

SEQ ID NO: 3596827 - DNA, 25 bp, Homo sapien
taatggtgaaatgagcgtcttgtat

SEQ ID NO: 3596828 - DNA, 25 bp, Homo sapien
ttgtattcagcctaaaatcaggtcc

SEQ ID NO: 3596829 - DNA, 25 bp, Homo sapien
gataggtaagaatttactacagcca

SEQ ID NO: 3596830 - DNA, 25 bp, Homo sapien
tccaatgatattcaaggtgattact

SEQ ID NO: 3596831 - DNA, 25 bp, Homo sapien
tgaatcttattggagacctctgacc

SEQ ID NO: 3596832 - DNA, 25 bp, Homo sapien
cctgtaaggtctgtcctgggaaatc

SEQ ID NO: 3596833 - DNA, 25 bp, Homo sapien
agcatttattagtttcaggcaggtc

SEQ ID NO: 3596834 - DNA, 25 bp, Homo sapien
acagctttgccaggtgaaatattct

SEQ ID NO: 3596835 - DNA, 25 bp, Homo sapien
gtatgaccccatccccttaagtgtg

SEQ ID NO: 3596836 - DNA, 25 bp, Homo sapien
taagtttgtacccagagcataggca

SEQ ID NO: 3596837 - DNA, 25 bp, Homo sapien
gaatagattcttaaggtggcctcca

SEQ ID NO: 3596838 - DNA, 25 bp, Homo sapien
tagatccttgagcactatcagggct

SEQ ID NO: 3596839 - DNA, 25 bp, Homo sapien
tctagatcccgtagaaagtgagtgc

SEQ ID NO: 3596840 - DNA, 25 bp, Homo sapien
cagaggcaaatcatccagctgagcc

SEQ ID NO: 3596841 - DNA, 25 bp, Homo sapien
cagctgagcccgtatcaaatgcctc

SEQ ID NO: 3596842 - DNA, 25 bp, Homo sapien
ctagtgtggaaagtcaccgatgacc

SEQ ID NO: 3596843 - DNA, 25 bp, Homo sapien
tatatatgcctaagtgtatgttgca

SEQ ID NO: 3596844 - DNA, 25 bp, Homo sapien
aaaaactacagacagaacacataca

SEQ ID NO: 3596845 - DNA, 25 bp, Homo sapien
tttaacatattagggaagcaatgag

SEQ ID NO: 3596846 - DNA, 25 bp, Homo sapien
taacacagtgctctacaaacaaatg

SEQ ID NO: 3596847 - DNA, 25 bp, Homo sapien
caatgtgtagagttataagttacag

SEQ ID NO: 3596848 - DNA, 25 bp, Homo sapien
tccaaaaagccaatagctgaaaaaa

SEQ ID NO: 3596849 - DNA, 25 bp, Homo sapien
gagcacacctcacactgaatctagg

SEQ ID NO: 3596850 - DNA, 25 bp, Homo sapien
gaatctaggtatccaacatttcata

SEQ ID NO: 3596851 - DNA, 25 bp, Homo sapien
atggtgtgagttgagaacaaataaa

SEQ ID NO: 3596852 - DNA, 25 bp, Homo sapien
tatggtgtgagttgagaacaaataa

SEQ ID NO: 3596853 - DNA, 25 bp, Homo sapien
actcaaaaccaatgatttggctata

SEQ ID NO: 3596854 - DNA, 25 bp, Homo sapien
tacttaagattttacgacaatcagt

SEQ ID NO: 3596855 - DNA, 25 bp, Homo sapien
ttacgacaatcagtacaactcaaaa

SEQ ID NO: 3596856 - DNA, 25 bp, Homo sapien
taactttcatgcaaaccccaaacaa

SEQ ID NO: 3596857 - DNA, 25 bp, Homo sapien
gaagccagacagtagacttaacaac

SEQ ID NO: 3596858 - DNA, 25 bp, Homo sapien
ttaacaaccatgaagcagacccact

SEQ ID NO: 3596859 - DNA, 25 bp, Homo sapien
tagatatcccttcagaaaaggcctt

SEQ ID NO: 3596860 - DNA, 25 bp, Homo sapien
taccaagaagtaggtagagagcagg

SEQ ID NO: 3596861 - DNA, 25 bp, Homo sapien
taaaatgaagtccatagataggagc

SEQ ID NO: 3596862 - DNA, 25 bp, Homo sapien
catggtgactaaaatgaagtccata

SEQ ID NO: 3596863 - DNA, 25 bp, Homo sapien
aagtccatagataggagcaggtgaa

SEQ ID NO: 3596864 - DNA, 25 bp, Homo sapien
tgtgagcagatcatcgaatatatgt

SEQ ID NO: 3596865 - DNA, 25 bp, Homo sapien
ggaaataaaactgaacgggatctga

SEQ ID NO: 3596866 - DNA, 25 bp, Homo sapien
actgaacgggatctgaagaaaaatt

SEQ ID NO: 3596867 - DNA, 25 bp, Homo sapien
tacagttgtcactgacccagagcag

SEQ ID NO: 3596868 - DNA, 25 bp, Homo sapien
caatctcctgatgtacagttgtcac

SEQ ID NO: 3596869 - DNA, 25 bp, Homo sapien
ccaaagtcttggttctatatccagc

SEQ ID NO: 3596870 - DNA, 25 bp, Homo sapien
cctccaaagtcttggttctatatcc

SEQ ID NO: 3596871 - DNA, 25 bp, Homo sapien
tccaaagtcttggttctatatccag

SEQ ID NO: 3596872 - DNA, 25 bp, Homo sapien
tgagcaaactgcagtgcttttttcc

SEQ ID NO: 3596873 - DNA, 25 bp, Homo sapien
caaaccgtgtgattctaagagtcca

SEQ ID NO: 3596874 - DNA, 25 bp, Homo sapien
gaggctcccgtaaacaattttgcaa

SEQ ID NO: 3596875 - DNA, 25 bp, Homo sapien
atatgatctctattagaggctcccg

SEQ ID NO: 3596876 - DNA, 25 bp, Homo sapien
taagagtccaagttagctgcatctc

SEQ ID NO: 3596877 - DNA, 25 bp, Homo sapien
gttgacaccgtcaagaaatgtttgg

SEQ ID NO: 3596878 - DNA, 25 bp, Homo sapien
aaaaactgggtggagcagtactcac

SEQ ID NO: 3596879 - DNA, 25 bp, Homo sapien
tgaatgcttagaacagtagctggca

SEQ ID NO: 3596880 - DNA, 25 bp, Homo sapien
tcatcattctcaacacaagcctggc

SEQ ID NO: 3596881 - DNA, 25 bp, Homo sapien
ctttccaaagtaatgagggaatttg

SEQ ID NO: 3596882 - DNA, 25 bp, Homo sapien
ttccaaagtaatgagggaatttgtg

SEQ ID NO: 3596883 - DNA, 25 bp, Homo sapien
tgggcaaaccctccgtgaaggccaa

SEQ ID NO: 3596884 - DNA, 25 bp, Homo sapien
caatgacatgggcaaaccctccgtg

SEQ ID NO: 3596885 - DNA, 25 bp, Homo sapien
gacatgggcaaaccctccgtgaagg

SEQ ID NO: 3596886 - DNA, 25 bp, Homo sapien
atcttcaatgacatgggcaaaccct

SEQ ID NO: 3596887 - DNA, 25 bp, Homo sapien
tgaagagagatctatcaacttcttg

SEQ ID NO: 3596888 - DNA, 25 bp, Homo sapien
actttctgatatcttttgaagagag

SEQ ID NO: 3596889 - DNA, 25 bp, Homo sapien
agagagatctatcaacttcttgttc

SEQ ID NO: 3596890 - DNA, 25 bp, Homo sapien
tttgaagagagatctatcaacttct

SEQ ID NO: 3596891 - DNA, 25 bp, Homo sapien
aaaatagatgggagccatgtcaccc

SEQ ID NO: 3596892 - DNA, 25 bp, Homo sapien
taaaatagatgggagccatgtcacc

SEQ ID NO: 3596893 - DNA, 25 bp, Homo sapien
aatagatgggagccatgtcacccac

SEQ ID NO: 3596894 - DNA, 25 bp, Homo sapien
cttaaaatagatgggagccatgtca

SEQ ID NO: 3596895 - DNA, 25 bp, Homo sapien
ccatgtgatactgtttcttcatgct

SEQ ID NO: 3596896 - DNA, 25 bp, Homo sapien
acattcataaaccatgtgatactgt

SEQ ID NO: 3596897 - DNA, 25 bp, Homo sapien
aaaaatgcagtctaatcctttatct

SEQ ID NO: 3596898 - DNA, 25 bp, Homo sapien
taaaccatgtgatactgtttcttca

SEQ ID NO: 3596899 - DNA, 25 bp, Homo sapien
ttttcctaagggccaatgatattaa

SEQ ID NO: 3596900 - DNA, 25 bp, Homo sapien
ttcctaagggccaatgatattaaat

SEQ ID NO: 3596901 - DNA, 25 bp, Homo sapien
tttcctaagggccaatgatattaaa

SEQ ID NO: 3596902 - DNA, 25 bp, Homo sapien
gttgaacaaagcaatggtctgccct

SEQ ID NO: 3596903 - DNA, 25 bp, Homo sapien
gccttatggagagaacaaactttag

SEQ ID NO: 3596904 - DNA, 25 bp, Homo sapien
ggtgttccttagcacaacattgtga

SEQ ID NO: 3596905 - DNA, 25 bp, Homo sapien
tctgttcaaactggaccctaagcac

SEQ ID NO: 3596906 - DNA, 25 bp, Homo sapien
tctagtgagaaatgcgctgtcattc

SEQ ID NO: 3596907 - DNA, 25 bp, Homo sapien
tattcttctaggacagctctgctga

SEQ ID NO: 3596908 - DNA, 25 bp, Homo sapien
taatactgctccatcagaagaaagg

SEQ ID NO: 3596909 - DNA, 25 bp, Homo sapien
gacactcaaaaatgggagaggctac

SEQ ID NO: 3596910 - DNA, 25 bp, Homo sapien
gagaatagtgaagaaggcagactca

SEQ ID NO: 3596911 - DNA, 25 bp, Homo sapien
ggatgactgttctagattttatctg

SEQ ID NO: 3596912 - DNA, 25 bp, Homo sapien
cctcatactaatagctccaaggagg

SEQ ID NO: 3596913 - DNA, 25 bp, Homo sapien
tgtttgttcatactccctttctggc

SEQ ID NO: 3596914 - DNA, 25 bp, Homo sapien
aaaggagctacaacaccattatttg

SEQ ID NO: 3596915 - DNA, 25 bp, Homo sapien
ttttccatagtacacttggtttcca

SEQ ID NO: 3596916 - DNA, 25 bp, Homo sapien
tcctctctttcgcagttttccatag

SEQ ID NO: 3596917 - DNA, 25 bp, Homo sapien
tctgctaaactataatgtaaactat

SEQ ID NO: 3596918 - DNA, 25 bp, Homo sapien
tacaactatgaaaacacacgtgttt

SEQ ID NO: 3596919 - DNA, 25 bp, Homo sapien
aaaaggtctcaaaatctggagtaca

SEQ ID NO: 3596920 - DNA, 25 bp, Homo sapien
tctggagtacacaagggaaataaaa

SEQ ID NO: 3596921 - DNA, 25 bp, Homo sapien
catcatgatccacagatatatacaa

SEQ ID NO: 3596922 - DNA, 25 bp, Homo sapien
tgcaaagggactatcaggcagtgcc

SEQ ID NO: 3596923 - DNA, 25 bp, Homo sapien
caggcagtgcccctcagtaagagac

SEQ ID NO: 3596924 - DNA, 25 bp, Homo sapien
ctcagtaagagaccgtacgttgggt

SEQ ID NO: 3596925 - DNA, 25 bp, Homo sapien
aaagtagctgctctatggtgctgca

SEQ ID NO: 3596926 - DNA, 25 bp, Homo sapien
gactccgatgctcagcaatagcttt

SEQ ID NO: 3596927 - DNA, 25 bp, Homo sapien
ccatttgtgcagcaagactccgatg

SEQ ID NO: 3596928 - DNA, 25 bp, Homo sapien
tcaccaagacgttctctctcagctg

SEQ ID NO: 3596929 - DNA, 25 bp, Homo sapien
tgtcatccagggtgtaatagtctcc

SEQ ID NO: 3596930 - DNA, 25 bp, Homo sapien
catgccagatagtaattctaatcca

SEQ ID NO: 3596931 - DNA, 25 bp, Homo sapien
taccaaggcatttcttagagcacac

SEQ ID NO: 3596932 - DNA, 25 bp, Homo sapien
caccattactgaaagaatcaggtaa

SEQ ID NO: 3596933 - DNA, 25 bp, Homo sapien
aaatagtgtccaactacatgccaga

SEQ ID NO: 3596934 - DNA, 25 bp, Homo sapien
gatgccattctcataaagagcttgt

SEQ ID NO: 3596935 - DNA, 25 bp, Homo sapien
atgccattctcataaagagcttgtt

SEQ ID NO: 3596936 - DNA, 25 bp, Homo sapien
tcatgaaagtatctgaccctttctc

SEQ ID NO: 3596937 - DNA, 25 bp, Homo sapien
catttaggcttagattatcatcatc

SEQ ID NO: 3596938 - DNA, 25 bp, Homo sapien
atcatcatcatgaaagtatctgacc

SEQ ID NO: 3596939 - DNA, 25 bp, Homo sapien
gactaaatcatttaggcttagatta

SEQ ID NO: 3596940 - DNA, 25 bp, Homo sapien
gagcaaaactgctctaccccttctt

SEQ ID NO: 3596941 - DNA, 25 bp, Homo sapien
gactgatctgttctgacaaggatta

SEQ ID NO: 3596942 - DNA, 25 bp, Homo sapien
tccagagattttccgggtgtgttca

SEQ ID NO: 3596943 - DNA, 25 bp, Homo sapien
gatctgttctgacaaggattacttc

SEQ ID NO: 3596944 - DNA, 25 bp, Homo sapien
gtgttcacaggccatactcttccag

SEQ ID NO: 3596945 - DNA, 25 bp, Homo sapien
tacgtaagaccccaagttgctccat

SEQ ID NO: 3596946 - DNA, 25 bp, Homo sapien
taggactgccaatacgtaagacccc

SEQ ID NO: 3596947 - DNA, 25 bp, Homo sapien
ttctgttccttaggactgccaatac

SEQ ID NO: 3596948 - DNA, 25 bp, Homo sapien
tgccaatacgtaagaccccaagttg

SEQ ID NO: 3596949 - DNA, 25 bp, Homo sapien
cctcctgctttttgccggtctgttc

SEQ ID NO: 3596950 - DNA, 25 bp, Homo sapien
ctgccctgactgcactcggcttgct

SEQ ID NO: 3596951 - DNA, 25 bp, Homo sapien
gctttttgccggtctgttcctctgc

SEQ ID NO: 3596952 - DNA, 25 bp, Homo sapien
gccctgactgcactcggcttgctct

SEQ ID NO: 3596953 - DNA, 25 bp, Homo sapien
ccacttctactgtcagaccgcacaa

SEQ ID NO: 3596954 - DNA, 25 bp, Homo sapien
atccacttctactgtcagaccgcac

SEQ ID NO: 3596955 - DNA, 25 bp, Homo sapien
taagtgaatctgtgctttctaggaa

SEQ ID NO: 3596956 - DNA, 25 bp, Homo sapien
ttctactgtcagaccgcacaacctt

SEQ ID NO: 3596957 - DNA, 25 bp, Homo sapien
cgacaactgaccgaacgtctggcac

SEQ ID NO: 3596958 - DNA, 25 bp, Homo sapien
attctagctgttgcgacaactgacc

SEQ ID NO: 3596959 - DNA, 25 bp, Homo sapien
ctgtcgtttaaggacctgcattcta

SEQ ID NO: 3596960 - DNA, 25 bp, Homo sapien
tgttgcgacaactgaccgaacgtct

SEQ ID NO: 3596961 - DNA, 25 bp, Homo sapien
tgtactctttctgcttcgtatccat

SEQ ID NO: 3596962 - DNA, 25 bp, Homo sapien
tacgtaagcaaggtatgtgggggaa

SEQ ID NO: 3596963 - DNA, 25 bp, Homo sapien
gcatttacgtaagcaaggtatgtgg

SEQ ID NO: 3596964 - DNA, 25 bp, Homo sapien
cattgtactctttctgcttcgtatc

SEQ ID NO: 3596965 - DNA, 25 bp, Homo sapien
tttggaattatagtaccagaggatg

SEQ ID NO: 3596966 - DNA, 25 bp, Homo sapien
cagcagcttatctggtggctttggg

SEQ ID NO: 3596967 - DNA, 25 bp, Homo sapien
gttttggaattatagtaccagagga

SEQ ID NO: 3596968 - DNA, 25 bp, Homo sapien
ggaattatagtaccagaggatgcca

SEQ ID NO: 3596969 - DNA, 25 bp, Homo sapien
tatatgaattcatccgtccaagaca

SEQ ID NO: 3596970 - DNA, 25 bp, Homo sapien
tagtcagaacctcttggtacctgca

SEQ ID NO: 3596971 - DNA, 25 bp, Homo sapien
gctactgaacagtataaggactcag

SEQ ID NO: 3596972 - DNA, 25 bp, Homo sapien
tataattatgtgacatcgtccctcc

SEQ ID NO: 3596973 - DNA, 25 bp, Homo sapien
gaactttaagttgttcagctaattc

SEQ ID NO: 3596974 - DNA, 25 bp, Homo sapien
gttgaactttaagttgttcagctaa

SEQ ID NO: 3596975 - DNA, 25 bp, Homo sapien
agttgaactttaagttgttcagcta

SEQ ID NO: 3596976 - DNA, 25 bp, Homo sapien
tgaactttaagttgttcagctaatt

SEQ ID NO: 3596977 - DNA, 25 bp, Homo sapien
gctatatccacactgctaaggaact

SEQ ID NO: 3596978 - DNA, 25 bp, Homo sapien
aatcattattctctaaagcaacatc

SEQ ID NO: 3596979 - DNA, 25 bp, Homo sapien
tctttaaggaatcaataaccaacag

SEQ ID NO: 3596980 - DNA, 25 bp, Homo sapien
caataaccaacagttattttcacag

SEQ ID NO: 3596981 - DNA, 25 bp, Homo sapien
tctcatcaacactcaggatgtgaat

SEQ ID NO: 3596982 - DNA, 25 bp, Homo sapien
gatgtgaatggactcacgctctgga

SEQ ID NO: 3596983 - DNA, 25 bp, Homo sapien
tcaggatgtgaatggactcacgctc

SEQ ID NO: 3596984 - DNA, 25 bp, Homo sapien
ttctcatcaacactcaggatgtgaa

SEQ ID NO: 3596985 - DNA, 25 bp, Homo sapien
ctaaagttatgtctagttcctccat

SEQ ID NO: 3596986 - DNA, 25 bp, Homo sapien
ttctttccaactaaagttatgtcta

SEQ ID NO: 3596987 - DNA, 25 bp, Homo sapien
tccaactaaagttatgtctagttcc

SEQ ID NO: 3596988 - DNA, 25 bp, Homo sapien
caactaaagttatgtctagttcctc

SEQ ID NO: 3596989 - DNA, 25 bp, Homo sapien
cagcaaagacactgttctacagcaa

SEQ ID NO: 3596990 - DNA, 25 bp, Homo sapien
cagtaataggtgtcaagtaaagaca

SEQ ID NO: 3596991 - DNA, 25 bp, Homo sapien
caccatgacacctgcaattatcctg

SEQ ID NO: 3596992 - DNA, 25 bp, Homo sapien
tctacagcaaacatcagggaatggg

SEQ ID NO: 3596993 - DNA, 25 bp, Homo sapien
gaatatatccccactgttaagccac

SEQ ID NO: 3596994 - DNA, 25 bp, Homo sapien
gcttaagtacacactacgctgtcca

SEQ ID NO: 3596995 - DNA, 25 bp, Homo sapien
gacagaccacatgacagtaatcccg

SEQ ID NO: 3596996 - DNA, 25 bp, Homo sapien
tcatgcatagcataacgacgtttca

SEQ ID NO: 3596997 - DNA, 25 bp, Homo sapien
ttctgggctacagtaacaaactctg

SEQ ID NO: 3596998 - DNA, 25 bp, Homo sapien
tatttgcttccttgcttaaagatct

SEQ ID NO: 3596999 - DNA, 25 bp, Homo sapien
agccttcagaatctagcatcctttg

SEQ ID NO: 3597000 - DNA, 25 bp, Homo sapien
tctgccaagaatgacatccaaaggt

SEQ ID NO: 3597001 - DNA, 25 bp, Homo sapien
caaagagtctgtttctcaactacac

SEQ ID NO: 3597002 - DNA, 25 bp, Homo sapien
gatactcacaaaaaattaaatgcgg

SEQ ID NO: 3597003 - DNA, 25 bp, Homo sapien
taaatgcggaattgtttcttagagc

SEQ ID NO: 3597004 - DNA, 25 bp, Homo sapien
tgtactctttgacctgacagttcca

SEQ ID NO: 3597005 - DNA, 25 bp, Homo sapien
cagaagaaggcctacagatcatcca

SEQ ID NO: 3597006 - DNA, 25 bp, Homo sapien
tatgcagcaatcagacaaccggttg

SEQ ID NO: 3597007 - DNA, 25 bp, Homo sapien
gcacctggagtgaagactggacaat

SEQ ID NO: 3597008 - DNA, 25 bp, Homo sapien
tggaaatagtctaccacccagggca

SEQ ID NO: 3597009 - DNA, 25 bp, Homo sapien
gcttttatctactacaaccatgtgt

SEQ ID NO: 3597010 - DNA, 25 bp, Homo sapien
cagggccagcaaatttctaaagcaa

SEQ ID NO: 3597011 - DNA, 25 bp, Homo sapien
cactgcttcagatggagtcattaac

SEQ ID NO: 3597012 - DNA, 25 bp, Homo sapien
tctggctatctccaacagggccagc

SEQ ID NO: 3597013 - DNA, 25 bp, Homo sapien
gagccctgagctaccaatgctgaag

SEQ ID NO: 3597014 - DNA, 25 bp, Homo sapien
tctgcccttgctgtgaaatgacagt

SEQ ID NO: 3597015 - DNA, 25 bp, Homo sapien
tcagagcgactccatgatgttaatc

SEQ ID NO: 3597016 - DNA, 25 bp, Homo sapien
taaaaccactacacaaagagccctg

SEQ ID NO: 3597017 - DNA, 25 bp, Homo sapien
tatccatagcaaattatcaacgaag

SEQ ID NO: 3597018 - DNA, 25 bp, Homo sapien
aaaaattccaattcggctgggcgca

SEQ ID NO: 3597019 - DNA, 25 bp, Homo sapien
taccaagagcactaattcatgaaaa

SEQ ID NO: 3597020 - DNA, 25 bp, Homo sapien
cgaagtaaaaaacatcaagccgagg

SEQ ID NO: 3597021 - DNA, 25 bp, Homo sapien
tacaatgtcctcaaagtttctactt

SEQ ID NO: 3597022 - DNA, 25 bp, Homo sapien
tatctttcggctacaatgtcctcaa

SEQ ID NO: 3597023 - DNA, 25 bp, Homo sapien
cccatatctttcggctacaatgtcc

SEQ ID NO: 3597024 - DNA, 25 bp, Homo sapien
ttcggctacaatgtcctcaaagttt

SEQ ID NO: 3597025 - DNA, 25 bp, Homo sapien
ccagcttaatccaccatcttctacc

SEQ ID NO: 3597026 - DNA, 25 bp, Homo sapien
ttccttagccagcttaatccaccat

SEQ ID NO: 3597027 - DNA, 25 bp, Homo sapien
cagcttaatccaccatcttctacca

SEQ ID NO: 3597028 - DNA, 25 bp, Homo sapien
ccttagccagcttaatccaccatct

SEQ ID NO: 3597029 - DNA, 25 bp, Homo sapien
tttagatgcctaacagttccacccc

SEQ ID NO: 3597030 - DNA, 25 bp, Homo sapien
tttcaactctgggatcttagcctca

SEQ ID NO: 3597031 - DNA, 25 bp, Homo sapien
gaataaattgggctctgagaggcca

SEQ ID NO: 3597032 - DNA, 25 bp, Homo sapien
aatcccaagtagactgactccaaag

SEQ ID NO: 3597033 - DNA, 25 bp, Homo sapien
ctgtcaactggcaagatccaaagat

SEQ ID NO: 3597034 - DNA, 25 bp, Homo sapien
tcttctccactcagtaaagaacctg

SEQ ID NO: 3597035 - DNA, 25 bp, Homo sapien
tccaaagattgggtttgtcaattct

SEQ ID NO: 3597036 - DNA, 25 bp, Homo sapien
tcaattctaggttttcctcaaagaa

SEQ ID NO: 3597037 - DNA, 25 bp, Homo sapien
ctttagtaatcgatgacacactaca

SEQ ID NO: 3597038 - DNA, 25 bp, Homo sapien
taatcgatgacacactacagtcttc

SEQ ID NO: 3597039 - DNA, 25 bp, Homo sapien
gatgacacactacagtcttcaggtg

SEQ ID NO: 3597040 - DNA, 25 bp, Homo sapien
tagtaatcgatgacacactacagtc

SEQ ID NO: 3597041 - DNA, 25 bp, Homo sapien
catccttccagtacggattcaattc

SEQ ID NO: 3597042 - DNA, 25 bp, Homo sapien
ccttccagtacggattcaattctct

SEQ ID NO: 3597043 - DNA, 25 bp, Homo sapien
tccagtacggattcaattctctttc

SEQ ID NO: 3597044 - DNA, 25 bp, Homo sapien
cagtacggattcaattctctttcca

SEQ ID NO: 3597045 - DNA, 25 bp, Homo sapien
atgatgatgacacagttttaacaga

SEQ ID NO: 3597046 - DNA, 25 bp, Homo sapien
gagtctgggatggaacagcctcaac

SEQ ID NO: 3597047 - DNA, 25 bp, Homo sapien
taatttgggtgtcatcttttcctga

SEQ ID NO: 3597048 - DNA, 25 bp, Homo sapien
ctttttccttgtcaggagtctggga

SEQ ID NO: 3597049 - DNA, 25 bp, Homo sapien
tgataatttgggtgtcatcttttcc

SEQ ID NO: 3597050 - DNA, 25 bp, Homo sapien
gcaggaattaatcttccggcttcca

SEQ ID NO: 3597051 - DNA, 25 bp, Homo sapien
gaaacttctccaaactcaccagtgg

SEQ ID NO: 3597052 - DNA, 25 bp, Homo sapien
caaaacgtttcagtcttcagctctc

SEQ ID NO: 3597053 - DNA, 25 bp, Homo sapien
gagtagtctacatgcaccgccttca

SEQ ID NO: 3597054 - DNA, 25 bp, Homo sapien
gatgagctatcagatgactcattgt

SEQ ID NO: 3597055 - DNA, 25 bp, Homo sapien
tgatgagctatcagatgactcattg

SEQ ID NO: 3597056 - DNA, 25 bp, Homo sapien
acttgaatacgtgcaaaaaaggaca

SEQ ID NO: 3597057 - DNA, 25 bp, Homo sapien
ggacagatatccttacatcacgtaa

SEQ ID NO: 3597058 - DNA, 25 bp, Homo sapien
tataagcttgctatagtgggccaga

SEQ ID NO: 3597059 - DNA, 25 bp, Homo sapien
taatatccctctatggtctccccaa

SEQ ID NO: 3597060 - DNA, 25 bp, Homo sapien
ctcaccccgaagtcgcttaagttct

SEQ ID NO: 3597061 - DNA, 25 bp, Homo sapien
tctctcattcacatcaggtagcatc

SEQ ID NO: 3597062 - DNA, 25 bp, Homo sapien
aggtagcatccatgtatcctcaccc

SEQ ID NO: 3597063 - DNA, 25 bp, Homo sapien
ctcattcacatcaggtagcatccat

SEQ ID NO: 3597064 - DNA, 25 bp, Homo sapien
ggcagagtccttacaagccgcaggg

SEQ ID NO: 3597065 - DNA, 25 bp, Homo sapien
cctacaaagtgtgcagtccgagtga

SEQ ID NO: 3597066 - DNA, 25 bp, Homo sapien
gagaggtagtccaacattctgcagc

SEQ ID NO: 3597067 - DNA, 25 bp, Homo sapien
agcagggcttatgatggactccaaa

SEQ ID NO: 3597068 - DNA, 25 bp, Homo sapien
tgttctttccgctcttcgatactct

SEQ ID NO: 3597069 - DNA, 25 bp, Homo sapien
ctcggccctggcattccgggtctgt

SEQ ID NO: 3597070 - DNA, 25 bp, Homo sapien
ggccctggcattccgggtctgttct

SEQ ID NO: 3597071 - DNA, 25 bp, Homo sapien
ttcgatactcttcgcactttcaaat

SEQ ID NO: 3597072 - DNA, 25 bp, Homo sapien
taaggtgatgaagtgctttgagaac

SEQ ID NO: 3597073 - DNA, 25 bp, Homo sapien
taagccaggttgaggtaaatactct

SEQ ID NO: 3597074 - DNA, 25 bp, Homo sapien
tcttgaacacacaatgcctacttgt

SEQ ID NO: 3597075 - DNA, 25 bp, Homo sapien
aatgtgtgtttgcaagaagctttcc

SEQ ID NO: 3597076 - DNA, 25 bp, Homo sapien
agcagagaggtcacttgtagcactt

SEQ ID NO: 3597077 - DNA, 25 bp, Homo sapien
cagaagtatgctcagtggtcactgc

SEQ ID NO: 3597078 - DNA, 25 bp, Homo sapien
agatcacagacttgtgcccagggca

SEQ ID NO: 3597079 - DNA, 25 bp, Homo sapien
gcaggtagcaggttgaccagaagta

SEQ ID NO: 3597080 - DNA, 25 bp, Homo sapien
gacaagggcaatgatctaaggccac

SEQ ID NO: 3597081 - DNA, 25 bp, Homo sapien
tgtgttccattgacaagggcaatga

SEQ ID NO: 3597082 - DNA, 25 bp, Homo sapien
ttccattgacaagggcaatgatcta

SEQ ID NO: 3597083 - DNA, 25 bp, Homo sapien
cattgacaagggcaatgatctaagg

SEQ ID NO: 3597084 - DNA, 25 bp, Homo sapien
atagtggtcctgaccggaagatgct

SEQ ID NO: 3597085 - DNA, 25 bp, Homo sapien
tttctacccggccagaaagcaccat

SEQ ID NO: 3597086 - DNA, 25 bp, Homo sapien
tggtcctgaccggaagatgcttcca

SEQ ID NO: 3597087 - DNA, 25 bp, Homo sapien
gatgcttccatatcatttctacccg

SEQ ID NO: 3597088 - DNA, 25 bp, Homo sapien
cagggagatttgctcagggcaggca

SEQ ID NO: 3597089 - DNA, 25 bp, Homo sapien
cagggcaggcatggtagacccatgc

SEQ ID NO: 3597090 - DNA, 25 bp, Homo sapien
tgctcagggcaggcatggtagaccc

SEQ ID NO: 3597091 - DNA, 25 bp, Homo sapien
ctcagggcaggcatggtagacccat

SEQ ID NO: 3597092 - DNA, 25 bp, Homo sapien
tccctggtcaactcagtgaggctag

SEQ ID NO: 3597093 - DNA, 25 bp, Homo sapien
cagtgaggctagaagtttattgatt

SEQ ID NO: 3597094 - DNA, 25 bp, Homo sapien
aagagtatgcttttcgtttcaatgg

SEQ ID NO: 3597095 - DNA, 25 bp, Homo sapien
ccaagagtatgcttttcgtttcaat

SEQ ID NO: 3597096 - DNA, 25 bp, Homo sapien
gaagtcttacactacccagttccaa

SEQ ID NO: 3597097 - DNA, 25 bp, Homo sapien
tgcagctatatcagtttttgctaca

SEQ ID NO: 3597098 - DNA, 25 bp, Homo sapien
ggaaagatgttcaccatatctaccg

SEQ ID NO: 3597099 - DNA, 25 bp, Homo sapien
ggcctatatccttactttctatgta

SEQ ID NO: 3597100 - DNA, 25 bp, Homo sapien
tgaacctggattgggacaaactatg

SEQ ID NO: 3597101 - DNA, 25 bp, Homo sapien
tgactaaacgttattggacacccgc

SEQ ID NO: 3597102 - DNA, 25 bp, Homo sapien
cttataaattcatcccagagggacc

SEQ ID NO: 3597103 - DNA, 25 bp, Homo sapien
tgtaagcaccataagggcaagagct

SEQ ID NO: 3597104 - DNA, 25 bp, Homo sapien
tccctcacggaacacatggtagtaa

SEQ ID NO: 3597105 - DNA, 25 bp, Homo sapien
caggatttcccttaaggtgccaggg

SEQ ID NO: 3597106 - DNA, 25 bp, Homo sapien
gatcctatgggaccaaatggctcaa

SEQ ID NO: 3597107 - DNA, 25 bp, Homo sapien
cagggaaccagtacatcttgagaat

SEQ ID NO: 3597108 - DNA, 25 bp, Homo sapien
gaagatgccgagtctcgactgccca

SEQ ID NO: 3597109 - DNA, 25 bp, Homo sapien
gaaacttgccttgaattacatcctc

SEQ ID NO: 3597110 - DNA, 25 bp, Homo sapien
caagtgacctctgcactgaggtatc

SEQ ID NO: 3597111 - DNA, 25 bp, Homo sapien
aacaggcagcttggaattagaaact

SEQ ID NO: 3597112 - DNA, 25 bp, Homo sapien
cagacataaatgagtgccttcccac

SEQ ID NO: 3597113 - DNA, 25 bp, Homo sapien
ttccattgcccagacataaatgagt

SEQ ID NO: 3597114 - DNA, 25 bp, Homo sapien
gtctcaggagtcgaacaatttcttg

SEQ ID NO: 3597115 - DNA, 25 bp, Homo sapien
cttcccacctggtctcaggagtcga

SEQ ID NO: 3597116 - DNA, 25 bp, Homo sapien
gagccacgacagctggcctcaatga

SEQ ID NO: 3597117 - DNA, 25 bp, Homo sapien
tcatacttaatggttgtgcaaccat

SEQ ID NO: 3597118 - DNA, 25 bp, Homo sapien
tgcgccaatcaacccagataacttt

SEQ ID NO: 3597119 - DNA, 25 bp, Homo sapien
acaggcatgcgccaatcaacccaga

SEQ ID NO: 3597120 - DNA, 25 bp, Homo sapien
tgccaatgcatcacagacaaaagcc

SEQ ID NO: 3597121 - DNA, 25 bp, Homo sapien
ccacaaggttttggctacgatcaca

SEQ ID NO: 3597122 - DNA, 25 bp, Homo sapien
actgcggactggtactgccaatgca

SEQ ID NO: 3597123 - DNA, 25 bp, Homo sapien
cagcaatggagatgcaggcatcaca

SEQ ID NO: 3597124 - DNA, 25 bp, Homo sapien
tcctacaggattgatggcatggtgg

SEQ ID NO: 3597125 - DNA, 25 bp, Homo sapien
tgttagccaacacgcccagacaatt

SEQ ID NO: 3597126 - DNA, 25 bp, Homo sapien
tattacctaagctcgagtacagtgg

SEQ ID NO: 3597127 - DNA, 25 bp, Homo sapien
tcaacaggtgagacctagcatgcct

SEQ ID NO: 3597128 - DNA, 25 bp, Homo sapien
catgtgtagaagattgaaactgtac

SEQ ID NO: 3597129 - DNA, 25 bp, Homo sapien
taagtcactgataactatccctgga

SEQ ID NO: 3597130 - DNA, 25 bp, Homo sapien
taatgagcactgatcctagggctga

SEQ ID NO: 3597131 - DNA, 25 bp, Homo sapien
tatgaatgctcatatcaaaacatgc

SEQ ID NO: 3597132 - DNA, 25 bp, Homo sapien
gtcaacagaaagaaatccaacctgc

SEQ ID NO: 3597133 - DNA, 25 bp, Homo sapien
cttgctaaaagtcaacagaaagaaa

SEQ ID NO: 3597134 - DNA, 25 bp, Homo sapien
ctaaaagtcaacagaaagaaatcca

SEQ ID NO: 3597135 - DNA, 25 bp, Homo sapien
agtcaacagaaagaaatccaacctg

SEQ ID NO: 3597136 - DNA, 25 bp, Homo sapien
cagtgtttgaaaaatctccctaata

SEQ ID NO: 3597137 - DNA, 25 bp, Homo sapien
taactttcttcatgtaggtgcacaa

SEQ ID NO: 3597138 - DNA, 25 bp, Homo sapien
gtaactttcttcatgtaggtgcaca

SEQ ID NO: 3597139 - DNA, 25 bp, Homo sapien
ttgtagtaactttcttcatgtaggt

SEQ ID NO: 3597140 - DNA, 25 bp, Homo sapien
tagtaactttcttcatgtaggtgca

SEQ ID NO: 3597141 - DNA, 25 bp, Homo sapien
tatataatgatggtgtgcccataaa

SEQ ID NO: 3597142 - DNA, 25 bp, Homo sapien
tataatgatggtgtgcccataaatt

SEQ ID NO: 3597143 - DNA, 25 bp, Homo sapien
ataatgatggtgtgcccataaattc

SEQ ID NO: 3597144 - DNA, 25 bp, Homo sapien
ttatataatgatggtgtgcccataa

SEQ ID NO: 3597145 - DNA, 25 bp, Homo sapien
ttaagcaaaaagaaagtcaaaagca

SEQ ID NO: 3597146 - DNA, 25 bp, Homo sapien
ttgatgccaagatactttccattac

SEQ ID NO: 3597147 - DNA, 25 bp, Homo sapien
catatataactccttattgatgcca

SEQ ID NO: 3597148 - DNA, 25 bp, Homo sapien
ctccttattgatgccaagatacttt

SEQ ID NO: 3597149 - DNA, 25 bp, Homo sapien
tataactccttattgatgccaagat

SEQ ID NO: 3597150 - DNA, 25 bp, Homo sapien
gccttcaaaaactccacaatgtgcg

SEQ ID NO: 3597151 - DNA, 25 bp, Homo sapien
aatatcagccactattgaaccactt

SEQ ID NO: 3597152 - DNA, 25 bp, Homo sapien
tactcttgctccagccgtgaggctt

SEQ ID NO: 3597153 - DNA, 25 bp, Homo sapien
aatctcttcataaacctgatggacg

SEQ ID NO: 3597154 - DNA, 25 bp, Homo sapien
tggctatcacagaccaacgggtaac

SEQ ID NO: 3597155 - DNA, 25 bp, Homo sapien
ctggctatcacagaccaacgggtaa

SEQ ID NO: 3597156 - DNA, 25 bp, Homo sapien
cctctggctatcacagaccaacggg

SEQ ID NO: 3597157 - DNA, 25 bp, Homo sapien
tctggctatcacagaccaacgggta

SEQ ID NO: 3597158 - DNA, 25 bp, Homo sapien
tacagttacaaggtgtttgcctcac

SEQ ID NO: 3597159 - DNA, 25 bp, Homo sapien
cagtatcaaattttctgcacgtgat

SEQ ID NO: 3597160 - DNA, 25 bp, Homo sapien
cctcttgcttaaagttaagtctcca

SEQ ID NO: 3597161 - DNA, 25 bp, Homo sapien
tctcagatgcttgaacagtatcaaa

SEQ ID NO: 3597162 - DNA, 25 bp, Homo sapien
aatgtaaatgatgttcgtagtcccc

SEQ ID NO: 3597163 - DNA, 25 bp, Homo sapien
tccaaccggcaatatatgagagagt

SEQ ID NO: 3597164 - DNA, 25 bp, Homo sapien
cagatgatgccaagaggaaacaaat

SEQ ID NO: 3597165 - DNA, 25 bp, Homo sapien
tgtaaaatgttacactccaaccggc

SEQ ID NO: 3597166 - DNA, 25 bp, Homo sapien
agttccaggctagttaacattctca

SEQ ID NO: 3597167 - DNA, 25 bp, Homo sapien
aggcaacataactggcactgcaatg

SEQ ID NO: 3597168 - DNA, 25 bp, Homo sapien
cgacgaggcaacataactggcactg

SEQ ID NO: 3597169 - DNA, 25 bp, Homo sapien
gtcatcaccagcaaactccgacgag

SEQ ID NO: 3597170 - DNA, 25 bp, Homo sapien
gcaaactccgacgaggcaacataac

SEQ ID NO: 3597171 - DNA, 25 bp, Homo sapien
aaaggagagaggagctacacagcag

SEQ ID NO: 3597172 - DNA, 25 bp, Homo sapien
tccaaggactctcagataagaataa

SEQ ID NO: 3597173 - DNA, 25 bp, Homo sapien
ttatataggcaaatattgagggctg

SEQ ID NO: 3597174 - DNA, 25 bp, Homo sapien
aagtatggggcctggaatcaagata

SEQ ID NO: 3597175 - DNA, 25 bp, Homo sapien
ggtttgtaggagctaacacatgtcc

SEQ ID NO: 3597176 - DNA, 25 bp, Homo sapien
tgtcctgttatacgaacagcctctg

SEQ ID NO: 3597177 - DNA, 25 bp, Homo sapien
aaggtctccagttgtccagctacgc

SEQ ID NO: 3597178 - DNA, 25 bp, Homo sapien
ctgttagaggagctccttcgtgtcc

SEQ ID NO: 3597179 - DNA, 25 bp, Homo sapien
ctgaccccaaactgagagaaacgat

SEQ ID NO: 3597180 - DNA, 25 bp, Homo sapien
cccaaactgagagaaacgatctcat

SEQ ID NO: 3597181 - DNA, 25 bp, Homo sapien
tgtgtatcaatatgagcgggaattc

SEQ ID NO: 3597182 - DNA, 25 bp, Homo sapien
tctcatcctcaaaagcggaatgtgt

SEQ ID NO: 3597183 - DNA, 25 bp, Homo sapien
caaaaagctttcacaaatgtcagga

SEQ ID NO: 3597184 - DNA, 25 bp, Homo sapien
tatggtcatttgatcaggtttatgt

SEQ ID NO: 3597185 - DNA, 25 bp, Homo sapien
tatgtttaatgtaacctttcctcaa

SEQ ID NO: 3597186 - DNA, 25 bp, Homo sapien
tgcccaggttcatactgatttatgg

SEQ ID NO: 3597187 - DNA, 25 bp, Homo sapien
tatatattgaaattgtccactttct

SEQ ID NO: 3597188 - DNA, 25 bp, Homo sapien
tactatatattgaaattgtccactt

SEQ ID NO: 3597189 - DNA, 25 bp, Homo sapien
atatactatatattgaaattgtcca

SEQ ID NO: 3597190 - DNA, 25 bp, Homo sapien
tatactatatattgaaattgtccac

SEQ ID NO: 3597191 - DNA, 25 bp, Homo sapien
caaatgaccaaccttaccagtaatc

SEQ ID NO: 3597192 - DNA, 25 bp, Homo sapien
aagctttacaacaccacaggttggg

SEQ ID NO: 3597193 - DNA, 25 bp, Homo sapien
cagcagcattacttatgaaagctaa

SEQ ID NO: 3597194 - DNA, 25 bp, Homo sapien
gctggtacaactgttttaggaagca

SEQ ID NO: 3597195 - DNA, 25 bp, Homo sapien
caaaatgctttactcttctgtgttt

SEQ ID NO: 3597196 - DNA, 25 bp, Homo sapien
ccaaaatgctttactcttctgtgtt

SEQ ID NO: 3597197 - DNA, 25 bp, Homo sapien
tctactaccatgagtcctggtggta

SEQ ID NO: 3597198 - DNA, 25 bp, Homo sapien
cttctactaccatgagtcctggtgg

SEQ ID NO: 3597199 - DNA, 25 bp, Homo sapien
tactaccatgagtcctggtggtaag

SEQ ID NO: 3597200 - DNA, 25 bp, Homo sapien
actaccatgagtcctggtggtaagg

SEQ ID NO: 3597201 - DNA, 25 bp, Homo sapien
tctgtatcttgcaaatgagtacggc

SEQ ID NO: 3597202 - DNA, 25 bp, Homo sapien
attacccaaaccaccattggcaaca

SEQ ID NO: 3597203 - DNA, 25 bp, Homo sapien
cagctggttccgactcacaccatta

SEQ ID NO: 3597204 - DNA, 25 bp, Homo sapien
ctctaaaaccgggagcagctggttc

SEQ ID NO: 3597205 - DNA, 25 bp, Homo sapien
acaatatttgctctcccctggaaag

SEQ ID NO: 3597206 - DNA, 25 bp, Homo sapien
aaaatataattagaggtccatctac

SEQ ID NO: 3597207 - DNA, 25 bp, Homo sapien
tagaggtccatctacaattttattc

SEQ ID NO: 3597208 - DNA, 25 bp, Homo sapien
tgccgccatgtaagccaggactttc

SEQ ID NO: 3597209 - DNA, 25 bp, Homo sapien
gcataggatactgtctcaatgcctt

SEQ ID NO: 3597210 - DNA, 25 bp, Homo sapien
ataggatactgtctcaatgccttca

SEQ ID NO: 3597211 - DNA, 25 bp, Homo sapien
atgtctcagcaaagtatgcttggct

SEQ ID NO: 3597212 - DNA, 25 bp, Homo sapien
tgtctcagcaaagtatgcttggctt

SEQ ID NO: 3597213 - DNA, 25 bp, Homo sapien
tcagttttactgagtttgtaattac

SEQ ID NO: 3597214 - DNA, 25 bp, Homo sapien
taagaacttcttctcagttttactg

SEQ ID NO: 3597215 - DNA, 25 bp, Homo sapien
tctcagttttactgagtttgtaatt

SEQ ID NO: 3597216 - DNA, 25 bp, Homo sapien
gaacttcttctcagttttactgagt

SEQ ID NO: 3597217 - DNA, 25 bp, Homo sapien
cctagctggcaaggcggatagagaa

SEQ ID NO: 3597218 - DNA, 25 bp, Homo sapien
accaagggcgcctctgggatccatc

SEQ ID NO: 3597219 - DNA, 25 bp, Homo sapien
acactgcaccaagggcgcctctggg

SEQ ID NO: 3597220 - DNA, 25 bp, Homo sapien
tttccctaggttctcagccctagct

SEQ ID NO: 3597221 - DNA, 25 bp, Homo sapien
gaagcggtgatttgctgcccgtatg

SEQ ID NO: 3597222 - DNA, 25 bp, Homo sapien
aagaggaagcggtgatttgctgccc

SEQ ID NO: 3597223 - DNA, 25 bp, Homo sapien
gtatgcccgccagtaagaagtgcca

SEQ ID NO: 3597224 - DNA, 25 bp, Homo sapien
atttgctgcccgtatgcccgccagt

SEQ ID NO: 3597225 - DNA, 25 bp, Homo sapien
tccgcttcggctcaggccggattct

SEQ ID NO: 3597226 - DNA, 25 bp, Homo sapien
ccgcttcggctcaggccggattctc

SEQ ID NO: 3597227 - DNA, 25 bp, Homo sapien
cagaacaccgcagcggatacttgca

SEQ ID NO: 3597228 - DNA, 25 bp, Homo sapien
tctagcaccagaacaccgcagcgga

SEQ ID NO: 3597229 - DNA, 25 bp, Homo sapien
gcagcggatacttgcacgccatctc

SEQ ID NO: 3597230 - DNA, 25 bp, Homo sapien
tttgccagcctctccactctagcac

SEQ ID NO: 3597231 - DNA, 25 bp, Homo sapien
aattaaggctaggagtaacatattg

SEQ ID NO: 3597232 - DNA, 25 bp, Homo sapien
ggctaggagtaacatattgaaaggg

SEQ ID NO: 3597233 - DNA, 25 bp, Homo sapien
ccctcgcaaggcgtgcagcggggga

SEQ ID NO: 3597234 - DNA, 25 bp, Homo sapien
gttccagaaattaaggctaggagta

SEQ ID NO: 3597235 - DNA, 25 bp, Homo sapien
caacatttggatgcgaaggcaggag

SEQ ID NO: 3597236 - DNA, 25 bp, Homo sapien
tgtctgttggtgtgcccttccgccg

SEQ ID NO: 3597237 - DNA, 25 bp, Homo sapien
aaactctgcatagttctgcccgttg

SEQ ID NO: 3597238 - DNA, 25 bp, Homo sapien
gcaggagtgcattccctgggcacag

SEQ ID NO: 3597239 - DNA, 25 bp, Homo sapien
agctgctacagttccagacatcttg

SEQ ID NO: 3597240 - DNA, 25 bp, Homo sapien
gccagacaaggcaatcactggtact

SEQ ID NO: 3597241 - DNA, 25 bp, Homo sapien
ttcctcaaatgacaagccagccaga

SEQ ID NO: 3597242 - DNA, 25 bp, Homo sapien
agaattgcttttagttgccagtaac

SEQ ID NO: 3597243 - DNA, 25 bp, Homo sapien
ggatggtggttggagccctaagtac

SEQ ID NO: 3597244 - DNA, 25 bp, Homo sapien
ccagggatggtggttggagccctaa

SEQ ID NO: 3597245 - DNA, 25 bp, Homo sapien
caccagggatggtggttggagccct

SEQ ID NO: 3597246 - DNA, 25 bp, Homo sapien
agggatggtggttggagccctaagt

SEQ ID NO: 3597247 - DNA, 25 bp, Homo sapien
ggccctaaagccatggaatacatga

SEQ ID NO: 3597248 - DNA, 25 bp, Homo sapien
ggactggtctccaaactgaaagcca

SEQ ID NO: 3597249 - DNA, 25 bp, Homo sapien
gaatacatgacgagaacaccttttg

SEQ ID NO: 3597250 - DNA, 25 bp, Homo sapien
tttgctctcaaaacgccgaagtagg

SEQ ID NO: 3597251 - DNA, 25 bp, Homo sapien
tgcctggcatagtatttggctcctc

SEQ ID NO: 3597252 - DNA, 25 bp, Homo sapien
tcttttgcctggcatagtatttggc

SEQ ID NO: 3597253 - DNA, 25 bp, Homo sapien
tatttggctcctccaacccaaactc

SEQ ID NO: 3597254 - DNA, 25 bp, Homo sapien
tatttctcttttgcctggcatagta

SEQ ID NO: 3597255 - DNA, 25 bp, Homo sapien
tactttcacatatgagagactcgag

SEQ ID NO: 3597256 - DNA, 25 bp, Homo sapien
tgaagctgactctgcactgggatgt

SEQ ID NO: 3597257 - DNA, 25 bp, Homo sapien
ttctcttgggtgttcgtcctcctcc

SEQ ID NO: 3597258 - DNA, 25 bp, Homo sapien
tttaggatacctgtctactttcaca

SEQ ID NO: 3597259 - DNA, 25 bp, Homo sapien
taattctaccatctacggtagtgcc

SEQ ID NO: 3597260 - DNA, 25 bp, Homo sapien
tctccctattatcactggctgcttc

SEQ ID NO: 3597261 - DNA, 25 bp, Homo sapien
tgttcacctactggtgcctcctgag

SEQ ID NO: 3597262 - DNA, 25 bp, Homo sapien
tctatactggcgctaaagaaatacc

SEQ ID NO: 3597263 - DNA, 25 bp, Homo sapien
cctgttttctgacatcagtttcttg

SEQ ID NO: 3597264 - DNA, 25 bp, Homo sapien
acatcagtttcttgctcttaggtac

SEQ ID NO: 3597265 - DNA, 25 bp, Homo sapien
tctgacatcagtttcttgctcttag

SEQ ID NO: 3597266 - DNA, 25 bp, Homo sapien
tgacatcagtttcttgctcttaggt

SEQ ID NO: 3597267 - DNA, 25 bp, Homo sapien
cctgagcaccagcattcacaaaatt

SEQ ID NO: 3597268 - DNA, 25 bp, Homo sapien
ccagattccggcactgggtgccgcg

SEQ ID NO: 3597269 - DNA, 25 bp, Homo sapien
agattccggcactgggtgccgcgct

SEQ ID NO: 3597270 - DNA, 25 bp, Homo sapien
gagcaattaaactgggccacaccag

SEQ ID NO: 3597271 - DNA, 25 bp, Homo sapien
tccagggaggccacccgggagcaat

SEQ ID NO: 3597272 - DNA, 25 bp, Homo sapien
ctcccccgctgctctcggtcgcctc

SEQ ID NO: 3597273 - DNA, 25 bp, Homo sapien
gtgcatcccggcttgctccgctcca

SEQ ID NO: 3597274 - DNA, 25 bp, Homo sapien
agccgccccgggtgcatcccggctt

SEQ ID NO: 3597275 - DNA, 25 bp, Homo sapien
agccgcccgcttcgtgctcccaggg

SEQ ID NO: 3597276 - DNA, 25 bp, Homo sapien
cccgcagccagtgcggcagccgcgg

SEQ ID NO: 3597277 - DNA, 25 bp, Homo sapien
cgccccttccgcgcccgcagccagt

SEQ ID NO: 3597278 - DNA, 25 bp, Homo sapien
tccgcgcccgcagccagtgcggcag

SEQ ID NO: 3597279 - DNA, 25 bp, Homo sapien
gcgacccagattcctgccccgcccc

SEQ ID NO: 3597280 - DNA, 25 bp, Homo sapien
cccgggaccgagcgcgtcgctcgcc

SEQ ID NO: 3597281 - DNA, 25 bp, Homo sapien
gcccgggaccgagcgcgtcgctcgc

SEQ ID NO: 3597282 - DNA, 25 bp, Homo sapien
gcgcccgggaccgagcgcgtcgctc

SEQ ID NO: 3597283 - DNA, 25 bp, Homo sapien
tcggcgcccgggaccgagcgcgtcg

SEQ ID NO: 3597284 - DNA, 25 bp, Homo sapien
agagtccaggtgattggcgacccca

SEQ ID NO: 3597285 - DNA, 25 bp, Homo sapien
cgccgccagagtccaggtgattggc

SEQ ID NO: 3597286 - DNA, 25 bp, Homo sapien
gccagagtccaggtgattggcgacc

SEQ ID NO: 3597287 - DNA, 25 bp, Homo sapien
ccgccagagtccaggtgattggcga

SEQ ID NO: 3597288 - DNA, 25 bp, Homo sapien
tggaaggcgggacaagggcggcctg

SEQ ID NO: 3597289 - DNA, 25 bp, Homo sapien
aaggcgggacaagggcggcctggct

SEQ ID NO: 3597290 - DNA, 25 bp, Homo sapien
atggaaggcgggacaagggcggcct

SEQ ID NO: 3597291 - DNA, 25 bp, Homo sapien
gaagggatcccagacagagccaaaa

SEQ ID NO: 3597292 - DNA, 25 bp, Homo sapien
tgggctgttgagctgcgcctcctcc

SEQ ID NO: 3597293 - DNA, 25 bp, Homo sapien
gagcatctctttcccgggcaggtag

SEQ ID NO: 3597294 - DNA, 25 bp, Homo sapien
cgcacttcaatattggagcatctct

SEQ ID NO: 3597295 - DNA, 25 bp, Homo sapien
aactgctgggaaactccgcacttca

SEQ ID NO: 3597296 - DNA, 25 bp, Homo sapien
cccagtgggccgtagattggtacta

SEQ ID NO: 3597297 - DNA, 25 bp, Homo sapien
gcttgacaaccgtccttaactggtg

SEQ ID NO: 3597298 - DNA, 25 bp, Homo sapien
accaattttgggcaggcatccaggc

SEQ ID NO: 3597299 - DNA, 25 bp, Homo sapien
aatgtatacgttttgtgccggtggc

SEQ ID NO: 3597300 - DNA, 25 bp, Homo sapien
cacagcaatcagtactcgaaatggt

SEQ ID NO: 3597301 - DNA, 25 bp, Homo sapien
gctttggtgagatagatacgtaatc

SEQ ID NO: 3597302 - DNA, 25 bp, Homo sapien
taatcttcgtaaagacctataagga

SEQ ID NO: 3597303 - DNA, 25 bp, Homo sapien
gcaatcagtactcgaaatggttctc

SEQ ID NO: 3597304 - DNA, 25 bp, Homo sapien
ccaccctttgtgtcgaggtaagaag

SEQ ID NO: 3597305 - DNA, 25 bp, Homo sapien
gctaatcactccagacatgtttatg

SEQ ID NO: 3597306 - DNA, 25 bp, Homo sapien
agtgctaatcactccagacatgttt

SEQ ID NO: 3597307 - DNA, 25 bp, Homo sapien
tgtcgaggtaagaagtgctaatcac

SEQ ID NO: 3597308 - DNA, 25 bp, Homo sapien
gattgagggatgtcactattttgat

SEQ ID NO: 3597309 - DNA, 25 bp, Homo sapien
attgagggatgtcactattttgatt

SEQ ID NO: 3597310 - DNA, 25 bp, Homo sapien
taaccatattgaagtcaacaggctg

SEQ ID NO: 3597311 - DNA, 25 bp, Homo sapien
tattgaagtcaacaggctgatgtgt

SEQ ID NO: 3597312 - DNA, 25 bp, Homo sapien
gaagtcaacaggctgatgtgtaaaa

SEQ ID NO: 3597313 - DNA, 25 bp, Homo sapien
atgtaaccatattgaagtcaacagg

SEQ ID NO: 3597314 - DNA, 25 bp, Homo sapien
atctggacagtcaacacgggcacca

SEQ ID NO: 3597315 - DNA, 25 bp, Homo sapien
gcatctggacagtcaacacgggcac

SEQ ID NO: 3597316 - DNA, 25 bp, Homo sapien
gcaattacttgaggacagttcatat

SEQ ID NO: 3597317 - DNA, 25 bp, Homo sapien
ttgaggacagttcatatagcatctg

SEQ ID NO: 3597318 - DNA, 25 bp, Homo sapien
ggaattatgaaagaacaagcagcgt

SEQ ID NO: 3597319 - DNA, 25 bp, Homo sapien
ggtgaaccctaagaaatgatgcttc

SEQ ID NO: 3597320 - DNA, 25 bp, Homo sapien
tatcaggtcctgttggcctaggaat

SEQ ID NO: 3597321 - DNA, 25 bp, Homo sapien
tttacttcacagagtggtgaaccct

SEQ ID NO: 3597322 - DNA, 25 bp, Homo sapien
gcttaggtcgcagctcacgcattga

SEQ ID NO: 3597323 - DNA, 25 bp, Homo sapien
ggtcataattccgagatccccagag

SEQ ID NO: 3597324 - DNA, 25 bp, Homo sapien
catgtagttgcccacgccggtttta

SEQ ID NO: 3597325 - DNA, 25 bp, Homo sapien
cattttgctgcctcggaaggtttaa

SEQ ID NO: 3597326 - DNA, 25 bp, Homo sapien
tatgtaagaggtttagctgaatctc

SEQ ID NO: 3597327 - DNA, 25 bp, Homo sapien
taagaggtttagctgaatctcattc

SEQ ID NO: 3597328 - DNA, 25 bp, Homo sapien
gctcttcaagccaggttcatgcttg

SEQ ID NO: 3597329 - DNA, 25 bp, Homo sapien
gcttggacctcattctgataaagta

SEQ ID NO: 3597330 - DNA, 25 bp, Homo sapien
tgccctgtggcaagtcatgaagctg

SEQ ID NO: 3597331 - DNA, 25 bp, Homo sapien
ggcagaccccattttgagaagtaca

SEQ ID NO: 3597332 - DNA, 25 bp, Homo sapien
taacttacactctatggcagcccaa

SEQ ID NO: 3597333 - DNA, 25 bp, Homo sapien
gatatgaagcagcaccgcaaaggtt

SEQ ID NO: 3597334 - DNA, 25 bp, Homo sapien
tattatcctcttagaagaaatagtg

SEQ ID NO: 3597335 - DNA, 25 bp, Homo sapien
caaagggattctacaattcagtatc

SEQ ID NO: 3597336 - DNA, 25 bp, Homo sapien
tgagcaaagggattctacaattcag

SEQ ID NO: 3597337 - DNA, 25 bp, Homo sapien
tctacaattcagtatccctatccct

SEQ ID NO: 3597338 - DNA, 25 bp, Homo sapien
tgcagaccgtgtgggttgaagggat

SEQ ID NO: 3597339 - DNA, 25 bp, Homo sapien
acagatcaggggcttgtaacaatcc

SEQ ID NO: 3597340 - DNA, 25 bp, Homo sapien
ttccttctggcaggttgaattagag

SEQ ID NO: 3597341 - DNA, 25 bp, Homo sapien
tattcacatgatagctataagggct

SEQ ID NO: 3597342 - DNA, 25 bp, Homo sapien
taaatctaccgttccctggcaaaca

SEQ ID NO: 3597343 - DNA, 25 bp, Homo sapien
ttaactttgtggcttgtctaacaca

SEQ ID NO: 3597344 - DNA, 25 bp, Homo sapien
caatcctagcactacagcatagcag

SEQ ID NO: 3597345 - DNA, 25 bp, Homo sapien
cagcatctttggagaacacataatc

SEQ ID NO: 3597346 - DNA, 25 bp, Homo sapien
acaatgacagcagtggggtctcagg

SEQ ID NO: 3597347 - DNA, 25 bp, Homo sapien
tgacaatgacagcagtggggtctca

SEQ ID NO: 3597348 - DNA, 25 bp, Homo sapien
gtgccctcggatggagaatggcatc

SEQ ID NO: 3597349 - DNA, 25 bp, Homo sapien
ggtgccctcggatggagaatggcat

SEQ ID NO: 3597350 - DNA, 25 bp, Homo sapien
cacataagaataaccgtaatcaaga

SEQ ID NO: 3597351 - DNA, 25 bp, Homo sapien
aaccgtaatcaagacaatagtgaag

SEQ ID NO: 3597352 - DNA, 25 bp, Homo sapien
taagaataaccgtaatcaagacaat

SEQ ID NO: 3597353 - DNA, 25 bp, Homo sapien
gaataaccgtaatcaagacaatagt

SEQ ID NO: 3597354 - DNA, 25 bp, Homo sapien
tttcacagcggcttggtgagaactg

SEQ ID NO: 3597355 - DNA, 25 bp, Homo sapien
ttcagccgaaagagcaagtgttaac

SEQ ID NO: 3597356 - DNA, 25 bp, Homo sapien
gcattcagccgaaagagcaagtgtt

SEQ ID NO: 3597357 - DNA, 25 bp, Homo sapien
attcagccgaaagagcaagtgttaa

SEQ ID NO: 3597358 - DNA, 25 bp, Homo sapien
cattcagccgaaagagcaagtgtta

SEQ ID NO: 3597359 - DNA, 25 bp, Homo sapien
atcaaagacacaccctggctatggc

SEQ ID NO: 3597360 - DNA, 25 bp, Homo sapien
ggctatggcaggtttctcctcgctg

SEQ ID NO: 3597361 - DNA, 25 bp, Homo sapien
gaagaggatcaaagacacaccctgg

SEQ ID NO: 3597362 - DNA, 25 bp, Homo sapien
tcgctgtctccaacttgagctccaa

SEQ ID NO: 3597363 - DNA, 25 bp, Homo sapien
actgttcataatagtggatactctc

SEQ ID NO: 3597364 - DNA, 25 bp, Homo sapien
cctctgtaagcagatcactatctgt

SEQ ID NO: 3597365 - DNA, 25 bp, Homo sapien
taagcagatcactatctgtcttttt

SEQ ID NO: 3597366 - DNA, 25 bp, Homo sapien
tctgtaagcagatcactatctgtct

SEQ ID NO: 3597367 - DNA, 25 bp, Homo sapien
gcagatcactatctgtctttttata

SEQ ID NO: 3597368 - DNA, 25 bp, Homo sapien
gaaaattctccaagatattttatct

SEQ ID NO: 3597369 - DNA, 25 bp, Homo sapien
tctccaagatattttatctatcaaa

SEQ ID NO: 3597370 - DNA, 25 bp, Homo sapien
tcttccttgaaaattctccaagata

SEQ ID NO: 3597371 - DNA, 25 bp, Homo sapien
tttatctatcaaatttgttttctgg

SEQ ID NO: 3597372 - DNA, 25 bp, Homo sapien
ttcctctcattgaggatgcaacagt

SEQ ID NO: 3597373 - DNA, 25 bp, Homo sapien
acagttctgactgttggccccatcc

SEQ ID NO: 3597374 - DNA, 25 bp, Homo sapien
aacagttctgactgttggccccatc

SEQ ID NO: 3597375 - DNA, 25 bp, Homo sapien
gcaacagttctgactgttggcccca

SEQ ID NO: 3597376 - DNA, 25 bp, Homo sapien
taaagccttcctgcatgtctcaatg

SEQ ID NO: 3597377 - DNA, 25 bp, Homo sapien
gatgatcagcagttcggctcaaaaa

SEQ ID NO: 3597378 - DNA, 25 bp, Homo sapien
tttctggaaatggtggaatattcag

SEQ ID NO: 3597379 - DNA, 25 bp, Homo sapien
ttcagagtgggttgtgcttcttcaa

SEQ ID NO: 3597380 - DNA, 25 bp, Homo sapien
aggtttatcaactgtaatgaagtgt

SEQ ID NO: 3597381 - DNA, 25 bp, Homo sapien
agtgttcctttaaatctcgttcatc

SEQ ID NO: 3597382 - DNA, 25 bp, Homo sapien
gtccatcagtgaggcatagttgctg

SEQ ID NO: 3597383 - DNA, 25 bp, Homo sapien
catgtccatcagtgaggcatagttg

SEQ ID NO: 3597384 - DNA, 25 bp, Homo sapien
ctgcagcagggcggaagagccactg

SEQ ID NO: 3597385 - DNA, 25 bp, Homo sapien
gttttcctggatcaaagagaggcat

SEQ ID NO: 3597386 - DNA, 25 bp, Homo sapien
tctggaatcggaatcggaagtagcc

SEQ ID NO: 3597387 - DNA, 25 bp, Homo sapien
gaagtagccgctgttccttagcagc

SEQ ID NO: 3597388 - DNA, 25 bp, Homo sapien
cttagcagcactgattgaagtctca

SEQ ID NO: 3597389 - DNA, 25 bp, Homo sapien
tcatatctggaatcggaatcggaag

SEQ ID NO: 3597390 - DNA, 25 bp, Homo sapien
gacctgggactgaaactgtggagca

SEQ ID NO: 3597391 - DNA, 25 bp, Homo sapien
caacccagggttgtagagtgtccat

SEQ ID NO: 3597392 - DNA, 25 bp, Homo sapien
tggtgcctctaagaccccagtgtgg

SEQ ID NO: 3597393 - DNA, 25 bp, Homo sapien
tcatctgtacccaaaggcctgtgga

SEQ ID NO: 3597394 - DNA, 25 bp, Homo sapien
caggttgtcaatcccaatgctggtg

SEQ ID NO: 3597395 - DNA, 25 bp, Homo sapien
caggataaaccccaccatgatgaca

SEQ ID NO: 3597396 - DNA, 25 bp, Homo sapien
ggtggagcagtacaggataaacccc

SEQ ID NO: 3597397 - DNA, 25 bp, Homo sapien
tttcagccggctcggccgtgcgagt

SEQ ID NO: 3597398 - DNA, 25 bp, Homo sapien
atatctgcaaactattaatccaaca

SEQ ID NO: 3597399 - DNA, 25 bp, Homo sapien
taagatatcatcttacctcagttag

SEQ ID NO: 3597400 - DNA, 25 bp, Homo sapien
caataagatatcatcttacctcagt

SEQ ID NO: 3597401 - DNA, 25 bp, Homo sapien
cacaataagatatcatcttacctca

SEQ ID NO: 3597402 - DNA, 25 bp, Homo sapien
aatcaccaatggcatgaagctgtac

SEQ ID NO: 3597403 - DNA, 25 bp, Homo sapien
tatagccaaacagaaagagtccaac

SEQ ID NO: 3597404 - DNA, 25 bp, Homo sapien
tgtagaggtccgctgtcaggatgcc

SEQ ID NO: 3597405 - DNA, 25 bp, Homo sapien
cagggcaaatgccacgaacagcagg

SEQ ID NO: 3597406 - DNA, 25 bp, Homo sapien
tcaggattcctagtaaccaaaggct

SEQ ID NO: 3597407 - DNA, 25 bp, Homo sapien
caagcagacaaccttcgcaagaagt

SEQ ID NO: 3597408 - DNA, 25 bp, Homo sapien
tatcagatgacaggagcaatgggag

SEQ ID NO: 3597409 - DNA, 25 bp, Homo sapien
tttgaggacccaagatacagatcta

SEQ ID NO: 3597410 - DNA, 25 bp, Homo sapien
ttccagtcccaatgaatgctggcaa

SEQ ID NO: 3597411 - DNA, 25 bp, Homo sapien
tgctggcaatatccttatattccac

SEQ ID NO: 3597412 - DNA, 25 bp, Homo sapien
ttttccagtcccaatgaatgctggc

SEQ ID NO: 3597413 - DNA, 25 bp, Homo sapien
atgctggcaatatccttatattcca

SEQ ID NO: 3597414 - DNA, 25 bp, Homo sapien
gctaaagtgaggaattacatggaca

SEQ ID NO: 3597415 - DNA, 25 bp, Homo sapien
cagagaggtccacatactaattttc

SEQ ID NO: 3597416 - DNA, 25 bp, Homo sapien
cctctagtagacactcagcaagtta

SEQ ID NO: 3597417 - DNA, 25 bp, Homo sapien
ggaatcctaagcaacacacatgttt

SEQ ID NO: 3597418 - DNA, 25 bp, Homo sapien
gataattgttccaaacaggcccacc

SEQ ID NO: 3597419 - DNA, 25 bp, Homo sapien
tggcatagagggaagccccaagaag

SEQ ID NO: 3597420 - DNA, 25 bp, Homo sapien
caagaaggaccaagatgtcaccaat

SEQ ID NO: 3597421 - DNA, 25 bp, Homo sapien
gcttcttcacgatgtattcctcaca

SEQ ID NO: 3597422 - DNA, 25 bp, Homo sapien
ggcaaagtgttctcacctacacagt

SEQ ID NO: 3597423 - DNA, 25 bp, Homo sapien
caatccaaggagacgtttaactcac

SEQ ID NO: 3597424 - DNA, 25 bp, Homo sapien
caggcggtcatctgactcgtgttca

SEQ ID NO: 3597425 - DNA, 25 bp, Homo sapien
tgtcaacagatgaacctccacagcg

SEQ ID NO: 3597426 - DNA, 25 bp, Homo sapien
tcttccctccctgctagtatgtctg

SEQ ID NO: 3597427 - DNA, 25 bp, Homo sapien
gacagacagccacggcgatgaagtg

SEQ ID NO: 3597428 - DNA, 25 bp, Homo sapien
atggttcctacacccaacagacaga

SEQ ID NO: 3597429 - DNA, 25 bp, Homo sapien
gtggatcactctgtatcttgcatga

SEQ ID NO: 3597430 - DNA, 25 bp, Homo sapien
caacacaggaatcccaaagcaatcc

SEQ ID NO: 3597431 - DNA, 25 bp, Homo sapien
acacaggaatcccaaagcaatccaa

SEQ ID NO: 3597432 - DNA, 25 bp, Homo sapien
caggaatcccaaagcaatccaaaag

SEQ ID NO: 3597433 - DNA, 25 bp, Homo sapien
cacaggaatcccaaagcaatccaaa

SEQ ID NO: 3597434 - DNA, 25 bp, Homo sapien
agaaaacactagctatacacctgat

SEQ ID NO: 3597435 - DNA, 25 bp, Homo sapien
actagctatacacctgatattgctc

SEQ ID NO: 3597436 - DNA, 25 bp, Homo sapien
tagctatacacctgatattgctcat

SEQ ID NO: 3597437 - DNA, 25 bp, Homo sapien
aacactagctatacacctgatattg

SEQ ID NO: 3597438 - DNA, 25 bp, Homo sapien
aaaacagaacacgtgtcaacaccac

SEQ ID NO: 3597439 - DNA, 25 bp, Homo sapien
taggtcaacacatatgacttcgtgt

SEQ ID NO: 3597440 - DNA, 25 bp, Homo sapien
gaactgttctaatctgccatagcag

SEQ ID NO: 3597441 - DNA, 25 bp, Homo sapien
gaatatctactatgcttgcaaagct

SEQ ID NO: 3597442 - DNA, 25 bp, Homo sapien
gacgatcacataattagcttccaca

SEQ ID NO: 3597443 - DNA, 25 bp, Homo sapien
tcccagcaggatgtacttccaccat

SEQ ID NO: 3597444 - DNA, 25 bp, Homo sapien
tagagttgtgtactggtaggctctg

SEQ ID NO: 3597445 - DNA, 25 bp, Homo sapien
tactggtaggctctgacgatcacat

SEQ ID NO: 3597446 - DNA, 25 bp, Homo sapien
tatctttctgccaaatactggctgg

SEQ ID NO: 3597447 - DNA, 25 bp, Homo sapien
tatacacaaggacaacatctgaccc

SEQ ID NO: 3597448 - DNA, 25 bp, Homo sapien
tgtataaattaggaacagcaagcaa

SEQ ID NO: 3597449 - DNA, 25 bp, Homo sapien
gatggctgtcccacatatacacaag

SEQ ID NO: 3597450 - DNA, 25 bp, Homo sapien
ttgaactactctcacagcttatttc

SEQ ID NO: 3597451 - DNA, 25 bp, Homo sapien
tgaactactctcacagcttatttca

SEQ ID NO: 3597452 - DNA, 25 bp, Homo sapien
cttgaactactctcacagcttattt

SEQ ID NO: 3597453 - DNA, 25 bp, Homo sapien
gaactactctcacagcttatttcat

SEQ ID NO: 3597454 - DNA, 25 bp, Homo sapien
cagatccagagttgctatctccttc

SEQ ID NO: 3597455 - DNA, 25 bp, Homo sapien
agatccagagttgctatctccttct

SEQ ID NO: 3597456 - DNA, 25 bp, Homo sapien
gtatagtgcaccaggagtctccagg

SEQ ID NO: 3597457 - DNA, 25 bp, Homo sapien
tgaaggagtcatggtttgcattgat

SEQ ID NO: 3597458 - DNA, 25 bp, Homo sapien
aattcaccacttagtccggtatagt

SEQ ID NO: 3597459 - DNA, 25 bp, Homo sapien
gcattgattcgggtctgaggctgcc

SEQ ID NO: 3597460 - DNA, 25 bp, Homo sapien
gatacttatgtacctgatttccaat

SEQ ID NO: 3597461 - DNA, 25 bp, Homo sapien
aatgtatatcgtaacctcccttcca

SEQ ID NO: 3597462 - DNA, 25 bp, Homo sapien
caatggttgttaatatgtgccaagc

SEQ ID NO: 3597463 - DNA, 25 bp, Homo sapien
gactcacctattttctagtcccaga

SEQ ID NO: 3597464 - DNA, 25 bp, Homo sapien
taataacttccagtacgtctataaa

SEQ ID NO: 3597465 - DNA, 25 bp, Homo sapien
agaataataacttccagtacgtcta

SEQ ID NO: 3597466 - DNA, 25 bp, Homo sapien
ctggtaaagaataataacttccagt

SEQ ID NO: 3597467 - DNA, 25 bp, Homo sapien
aataataacttccagtacgtctata

SEQ ID NO: 3597468 - DNA, 25 bp, Homo sapien
gaacagcaagagctactttctccag

SEQ ID NO: 3597469 - DNA, 25 bp, Homo sapien
ccaaatgaactgatcatgatgttcc

SEQ ID NO: 3597470 - DNA, 25 bp, Homo sapien
ttctccagagactggtcactaccaa

SEQ ID NO: 3597471 - DNA, 25 bp, Homo sapien
tgtaagtttgaacagcaagagctac

SEQ ID NO: 3597472 - DNA, 25 bp, Homo sapien
gaagaatactggtcctccaaaagtg

SEQ ID NO: 3597473 - DNA, 25 bp, Homo sapien
tagcccgggaagatcaccgttggcc

SEQ ID NO: 3597474 - DNA, 25 bp, Homo sapien
aaaacgtttcccagctgtagtcaga

SEQ ID NO: 3597475 - DNA, 25 bp, Homo sapien
tagatgtggattaaccaggtagccc

SEQ ID NO: 3597476 - DNA, 25 bp, Homo sapien
agggcgccggcgccaggaagtggcg

SEQ ID NO: 3597477 - DNA, 25 bp, Homo sapien
gcccagtctggctggctcggcagca

SEQ ID NO: 3597478 - DNA, 25 bp, Homo sapien
gctcggcagcagatggaatgagggc

SEQ ID NO: 3597479 - DNA, 25 bp, Homo sapien
cagcagatggaatgagggcgccggc

SEQ ID NO: 3597480 - DNA, 25 bp, Homo sapien
ccgagggagacgcaccaagtgcttc

SEQ ID NO: 3597481 - DNA, 25 bp, Homo sapien
cacgatttcgaaacgggagccgagg

SEQ ID NO: 3597482 - DNA, 25 bp, Homo sapien
aaatcctccaaaatacatcgccacg

SEQ ID NO: 3597483 - DNA, 25 bp, Homo sapien
cgccccagaggaccgacttaatagt

SEQ ID NO: 3597484 - DNA, 25 bp, Homo sapien
ggagctgcagcacgccccttccact

SEQ ID NO: 3597485 - DNA, 25 bp, Homo sapien
accgaagtccgtgcggccgccacct

SEQ ID NO: 3597486 - DNA, 25 bp, Homo sapien
tggtgtgcgtgttgagccccgaacc

SEQ ID NO: 3597487 - DNA, 25 bp, Homo sapien
ttgagccccgaaccgaagtccgtgc

SEQ ID NO: 3597488 - DNA, 25 bp, Homo sapien
ggcccgctggcgagtctgcctccat

SEQ ID NO: 3597489 - DNA, 25 bp, Homo sapien
cttttatcctgcgcagcaggctgga

SEQ ID NO: 3597490 - DNA, 25 bp, Homo sapien
ttttatcctgcgcagcaggctggag

SEQ ID NO: 3597491 - DNA, 25 bp, Homo sapien
ggggcccgctggcgagtctgcctcc

SEQ ID NO: 3597492 - DNA, 25 bp, Homo sapien
ccttgcgcgtctccggcgcccaaaa

SEQ ID NO: 3597493 - DNA, 25 bp, Homo sapien
ccttcagcgaccaatcattaactgt

SEQ ID NO: 3597494 - DNA, 25 bp, Homo sapien
ccgctcggctccttcagcgaccaat

SEQ ID NO: 3597495 - DNA, 25 bp, Homo sapien
ctcgctctcttgctcgcgtccctct

SEQ ID NO: 3597496 - DNA, 25 bp, Homo sapien
catttgcagattacaacctggcacc

SEQ ID NO: 3597497 - DNA, 25 bp, Homo sapien
acatttgcagattacaacctggcac

SEQ ID NO: 3597498 - DNA, 25 bp, Homo sapien
atttgcagattacaacctggcacct

SEQ ID NO: 3597499 - DNA, 25 bp, Homo sapien
ttgcagattacaacctggcacctcc

SEQ ID NO: 3597500 - DNA, 25 bp, Homo sapien
ctggccacgccttccgaggcttcca

SEQ ID NO: 3597501 - DNA, 25 bp, Homo sapien
cattcctcgcggtgtgttggttttg

SEQ ID NO: 3597502 - DNA, 25 bp, Homo sapien
ttgtctccgccgtgccagggagaga

SEQ ID NO: 3597503 - DNA, 25 bp, Homo sapien
gcgctcggcttggatgccctgccct

SEQ ID NO: 3597504 - DNA, 25 bp, Homo sapien
gcctgaatcccttttcctgaggtca

SEQ ID NO: 3597505 - DNA, 25 bp, Homo sapien
cctgaatcccttttcctgaggtcat

SEQ ID NO: 3597506 - DNA, 25 bp, Homo sapien
tgcctgaatcccttttcctgaggtc

SEQ ID NO: 3597507 - DNA, 25 bp, Homo sapien
gcatcgaggaggattacgaccggct

SEQ ID NO: 3597508 - DNA, 25 bp, Homo sapien
ccggctcaacaaggttatcagtgag

SEQ ID NO: 3597509 - DNA, 25 bp, Homo sapien
agatcttggacagcgtgggcatcga

SEQ ID NO: 3597510 - DNA, 25 bp, Homo sapien
aagaagatcttggacagcgtgggca

SEQ ID NO: 3597511 - DNA, 25 bp, Homo sapien
gaaaacaatgaagacgtcattgcct

SEQ ID NO: 3597512 - DNA, 25 bp, Homo sapien
tgcctagagtattggcaagcttgcc

SEQ ID NO: 3597513 - DNA, 25 bp, Homo sapien
ggacgatgacatgggatttggcctc

SEQ ID NO: 3597514 - DNA, 25 bp, Homo sapien
caagcttgccagtgtacctgccggt

SEQ ID NO: 3597515 - DNA, 25 bp, Homo sapien
ttgaattctggtggttacttaccaa

SEQ ID NO: 3597516 - DNA, 25 bp, Homo sapien
tgaattctggtggttacttaccaaa

SEQ ID NO: 3597517 - DNA, 25 bp, Homo sapien
cctgccggcgcccagtgagcgttga

SEQ ID NO: 3597518 - DNA, 25 bp, Homo sapien
ctgaccctcccggagttgagacctt

SEQ ID NO: 3597519 - DNA, 25 bp, Homo sapien
ggagttgagaccttgcttcattttc

SEQ ID NO: 3597520 - DNA, 25 bp, Homo sapien
ccctcccggagttgagaccttgctt

SEQ ID NO: 3597521 - DNA, 25 bp, Homo sapien
cgcaggaatatgctggaaggcggcg

SEQ ID NO: 3597522 - DNA, 25 bp, Homo sapien
agccgcaggaatatgctggaaggcg

SEQ ID NO: 3597523 - DNA, 25 bp, Homo sapien
ccgcaggaatatgctggaaggcggc

SEQ ID NO: 3597524 - DNA, 25 bp, Homo sapien
gcaggaatatgctggaaggcggcgg

SEQ ID NO: 3597525 - DNA, 25 bp, Homo sapien
gccaaaagatgatctgtgtagccag

SEQ ID NO: 3597526 - DNA, 25 bp, Homo sapien
gcaccagagtgccaaaagatgatct

SEQ ID NO: 3597527 - DNA, 25 bp, Homo sapien
gtgtagccagacatttttaggcaca

SEQ ID NO: 3597528 - DNA, 25 bp, Homo sapien
tcgtttctaacaagtgcaccagagt

SEQ ID NO: 3597529 - DNA, 25 bp, Homo sapien
gatgctgagtaaattcaagctttca

SEQ ID NO: 3597530 - DNA, 25 bp, Homo sapien
caagctttcagtctaagaacatagc

SEQ ID NO: 3597531 - DNA, 25 bp, Homo sapien
aaaagtgatgcaggcttgatgctga

SEQ ID NO: 3597532 - DNA, 25 bp, Homo sapien
aaacatagtatttcctacagtgaaa

SEQ ID NO: 3597533 - DNA, 25 bp, Homo sapien
cacagtgataggtcgtgggagcctc

SEQ ID NO: 3597534 - DNA, 25 bp, Homo sapien
gacctggtgtttctatactgctaat

SEQ ID NO: 3597535 - DNA, 25 bp, Homo sapien
taaatggtaggatacaatcccaacc

SEQ ID NO: 3597536 - DNA, 25 bp, Homo sapien
tgatctgaaccttaatgaactgctg

SEQ ID NO: 3597537 - DNA, 25 bp, Homo sapien
gagacccagatgagcttatgctgca

SEQ ID NO: 3597538 - DNA, 25 bp, Homo sapien
taaagcctatctgccgtagagccag

SEQ ID NO: 3597539 - DNA, 25 bp, Homo sapien
ttcttagtgagtgacacagacgccc

SEQ ID NO: 3597540 - DNA, 25 bp, Homo sapien
taatatttgtgggtactccttggcc

SEQ ID NO: 3597541 - DNA, 25 bp, Homo sapien
tcaggtagctcttgccagtgtagtt

SEQ ID NO: 3597542 - DNA, 25 bp, Homo sapien
tgtagttaactgatattccactggg

SEQ ID NO: 3597543 - DNA, 25 bp, Homo sapien
tgaaatagagttttgaacaccaccc

SEQ ID NO: 3597544 - DNA, 25 bp, Homo sapien
ccactgggggtagctgttgaaatag

SEQ ID NO: 3597545 - DNA, 25 bp, Homo sapien
tgggagcgagtccacagttgtagac

SEQ ID NO: 3597546 - DNA, 25 bp, Homo sapien
tgccctgagcattttggtcgctgtt

SEQ ID NO: 3597547 - DNA, 25 bp, Homo sapien
caggacaagagaagcatgccctgag

SEQ ID NO: 3597548 - DNA, 25 bp, Homo sapien
ggttcagaagtgaagggtccacctc

SEQ ID NO: 3597549 - DNA, 25 bp, Homo sapien
gctaaattcgttgcaggtggccgcg

SEQ ID NO: 3597550 - DNA, 25 bp, Homo sapien
ttactgggcgcattctatgcacgag

SEQ ID NO: 3597551 - DNA, 25 bp, Homo sapien
tcctgagcgcgtgcatgaggtcttt

SEQ ID NO: 3597552 - DNA, 25 bp, Homo sapien
tatgcacgagttattgaagacagct

SEQ ID NO: 3597553 - DNA, 25 bp, Homo sapien
aacattgctcagtataataactgga

SEQ ID NO: 3597554 - DNA, 25 bp, Homo sapien
tgaaaagagtgagctggtcaatgca

SEQ ID NO: 3597555 - DNA, 25 bp, Homo sapien
gaaggatcttcagatattcatgcac

SEQ ID NO: 3597556 - DNA, 25 bp, Homo sapien
cagatgtaggtgagaagttaagtat

SEQ ID NO: 3597557 - DNA, 25 bp, Homo sapien
gtctcatgattagggatttgtagcc

SEQ ID NO: 3597558 - DNA, 25 bp, Homo sapien
ctgatctcttaatctgtagcataga

SEQ ID NO: 3597559 - DNA, 25 bp, Homo sapien
acagaaatctcctgctctgatatag

SEQ ID NO: 3597560 - DNA, 25 bp, Homo sapien
gatttgtagcctcaggtttgaatca

SEQ ID NO: 3597561 - DNA, 25 bp, Homo sapien
cagtattatgttacagtggagtgct

SEQ ID NO: 3597562 - DNA, 25 bp, Homo sapien
tggagtacagaaaggcatacagtat

SEQ ID NO: 3597563 - DNA, 25 bp, Homo sapien
tgtccccatccgaagaggctttgtg

SEQ ID NO: 3597564 - DNA, 25 bp, Homo sapien
gagcatttcgtaggatctgtcccca

SEQ ID NO: 3597565 - DNA, 25 bp, Homo sapien
catttagttgacaaggtgcctatgc

SEQ ID NO: 3597566 - DNA, 25 bp, Homo sapien
caaggtgcctatgccattgttaaat

SEQ ID NO: 3597567 - DNA, 25 bp, Homo sapien
gaaaatcatttagttgacaaggtgc

SEQ ID NO: 3597568 - DNA, 25 bp, Homo sapien
tagttgacaaggtgcctatgccatt

SEQ ID NO: 3597569 - DNA, 25 bp, Homo sapien
ctcttctctccagcgtacacttaaa

SEQ ID NO: 3597570 - DNA, 25 bp, Homo sapien
acttaaaattggtgccgagcaggga

SEQ ID NO: 3597571 - DNA, 25 bp, Homo sapien
tcacagttggcatcctttattcagg

SEQ ID NO: 3597572 - DNA, 25 bp, Homo sapien
ttgtaaaggtctggaatcacagttg

SEQ ID NO: 3597573 - DNA, 25 bp, Homo sapien
tggcaataagacacttcagaggcta

SEQ ID NO: 3597574 - DNA, 25 bp, Homo sapien
ttaaagacagagacatcccatctgg

SEQ ID NO: 3597575 - DNA, 25 bp, Homo sapien
tgttgccatctcgttgccggagtaa

SEQ ID NO: 3597576 - DNA, 25 bp, Homo sapien
tgtgtgccactacatactgagatga

SEQ ID NO: 3597577 - DNA, 25 bp, Homo sapien
tacagggacttaattacccagagga

SEQ ID NO: 3597578 - DNA, 25 bp, Homo sapien
gcaacagggccagactaattcattc

SEQ ID NO: 3597579 - DNA, 25 bp, Homo sapien
taacgactctaaactcaaccttgga

SEQ ID NO: 3597580 - DNA, 25 bp, Homo sapien
ccttggacttaaactggcatttggg

SEQ ID NO: 3597581 - DNA, 25 bp, Homo sapien
tggattggtcatggcctaacttcag

SEQ ID NO: 3597582 - DNA, 25 bp, Homo sapien
taacagcttgctttgtggattggtc

SEQ ID NO: 3597583 - DNA, 25 bp, Homo sapien
cctggagtgcgtaaaatgagtaaca

SEQ ID NO: 3597584 - DNA, 25 bp, Homo sapien
tcaggagcgctgatccaaactttga

SEQ ID NO: 3597585 - DNA, 25 bp, Homo sapien
gagttgttatcagttcattgacgga

SEQ ID NO: 3597586 - DNA, 25 bp, Homo sapien
ctgttactgagcaggtatcctttgg

SEQ ID NO: 3597587 - DNA, 25 bp, Homo sapien
ccatgggttccataggttcaaagcc

SEQ ID NO: 3597588 - DNA, 25 bp, Homo sapien
agttcattgacggagatgctgttac

SEQ ID NO: 3597589 - DNA, 25 bp, Homo sapien
atgaaaaaccttatcagagcaggag

SEQ ID NO: 3597590 - DNA, 25 bp, Homo sapien
agcatgaagcgtgtgaagcagtttt

SEQ ID NO: 3597591 - DNA, 25 bp, Homo sapien
ttaatgaaaaaccttatcagagcag

SEQ ID NO: 3597592 - DNA, 25 bp, Homo sapien
gcaggagaagcatgaagcgtgtgaa

SEQ ID NO: 3597593 - DNA, 25 bp, Homo sapien
gaagtgtcttagctatgtgcatccc

SEQ ID NO: 3597594 - DNA, 25 bp, Homo sapien
ttcagctttcacaatcccaggataa

SEQ ID NO: 3597595 - DNA, 25 bp, Homo sapien
ctctgttgacactttgtacctgtct

SEQ ID NO: 3597596 - DNA, 25 bp, Homo sapien
tgcatccctccaggatgagtattag

SEQ ID NO: 3597597 - DNA, 25 bp, Homo sapien
taatgaccctttgactcgatccagc

SEQ ID NO: 3597598 - DNA, 25 bp, Homo sapien
tcctggcttcgctgacacggttgag

SEQ ID NO: 3597599 - DNA, 25 bp, Homo sapien
gatgcacaccattagaactctcaag

SEQ ID NO: 3597600 - DNA, 25 bp, Homo sapien
cacaaagggactgcgatgaggcaag

SEQ ID NO: 3597601 - DNA, 25 bp, Homo sapien
tgtgctggcggcacttctgcgcagc

SEQ ID NO: 3597602 - DNA, 25 bp, Homo sapien
tagtctacgcctgtggagccgatac

SEQ ID NO: 3597603 - DNA, 25 bp, Homo sapien
cgtgtcaggtgctcgttgaccccag

SEQ ID NO: 3597604 - DNA, 25 bp, Homo sapien
ttagacttggtggacacgggagcca

SEQ ID NO: 3597605 - DNA, 25 bp, Homo sapien
agttctttattggtggtatctgata

SEQ ID NO: 3597606 - DNA, 25 bp, Homo sapien
tctttattggtggtatctgatattt

SEQ ID NO: 3597607 - DNA, 25 bp, Homo sapien
ggtgttggattatatgaataagttc

SEQ ID NO: 3597608 - DNA, 25 bp, Homo sapien
gaacataagctgtttggtgtttcca

SEQ ID NO: 3597609 - DNA, 25 bp, Homo sapien
aagtggatagggagaaacagcaagt

SEQ ID NO: 3597610 - DNA, 25 bp, Homo sapien
gtgtttgcctcatataaatcagaca

SEQ ID NO: 3597611 - DNA, 25 bp, Homo sapien
gaaaatatcttgttagattctaaga

SEQ ID NO: 3597612 - DNA, 25 bp, Homo sapien
catatttatatgagatgtgtttgcc

SEQ ID NO: 3597613 - DNA, 25 bp, Homo sapien
ggctggagtgtagtcccagaatctt

SEQ ID NO: 3597614 - DNA, 25 bp, Homo sapien
gctggagtgtagtcccagaatcttg

SEQ ID NO: 3597615 - DNA, 25 bp, Homo sapien
ggagtgtagtcccagaatcttggct

SEQ ID NO: 3597616 - DNA, 25 bp, Homo sapien
gagtgtagtcccagaatcttggctc

SEQ ID NO: 3597617 - DNA, 25 bp, Homo sapien
gacaggctccttagcaaaaatatgc

SEQ ID NO: 3597618 - DNA, 25 bp, Homo sapien
gaggtgagacctggacacacagaag

SEQ ID NO: 3597619 - DNA, 25 bp, Homo sapien
cacggtgcttaaccctgggaatcaa

SEQ ID NO: 3597620 - DNA, 25 bp, Homo sapien
cttgagatcaagcaagagacaggct

SEQ ID NO: 3597621 - DNA, 25 bp, Homo sapien
caaacccttgtcaaactggtaggtg

SEQ ID NO: 3597622 - DNA, 25 bp, Homo sapien
ctggtaggtgaaaaacggtcaccag

SEQ ID NO: 3597623 - DNA, 25 bp, Homo sapien
tgtgacttgtctggatctgcaccac

SEQ ID NO: 3597624 - DNA, 25 bp, Homo sapien
cataaaagttgtaccagttagactt

SEQ ID NO: 3597625 - DNA, 25 bp, Homo sapien
gcatcggcatggctcagtcattaaa

SEQ ID NO: 3597626 - DNA, 25 bp, Homo sapien
tgtaatgaacagaggatcaacacca

SEQ ID NO: 3597627 - DNA, 25 bp, Homo sapien
gagggtacttcctgtattcactgtg

SEQ ID NO: 3597628 - DNA, 25 bp, Homo sapien
aaagacgggctaactgatgtctaca

SEQ ID NO: 3597629 - DNA, 25 bp, Homo sapien
caaaaagctggctaggattcaactc

SEQ ID NO: 3597630 - DNA, 25 bp, Homo sapien
ggcagtaaaggtcattgtgtacaca

SEQ ID NO: 3597631 - DNA, 25 bp, Homo sapien
gagtagctaaataaattccaagggc

SEQ ID NO: 3597632 - DNA, 25 bp, Homo sapien
taattgtcacaaaaacttctaagag

SEQ ID NO: 3597633 - DNA, 25 bp, Homo sapien
gaagtgctctgacaattctgggaaa

SEQ ID NO: 3597634 - DNA, 25 bp, Homo sapien
caataattatctgccccgacttaca

SEQ ID NO: 3597635 - DNA, 25 bp, Homo sapien
caaaaacttctaactgaaccaggag

SEQ ID NO: 3597636 - DNA, 25 bp, Homo sapien
ttgcatccaaaggtcattgatctgg

SEQ ID NO: 3597637 - DNA, 25 bp, Homo sapien
aaataggtagccacagttcttattt

SEQ ID NO: 3597638 - DNA, 25 bp, Homo sapien
agaaaatcatactaagacattctgg

SEQ ID NO: 3597639 - DNA, 25 bp, Homo sapien
aataggtagccacagttcttatttc

SEQ ID NO: 3597640 - DNA, 25 bp, Homo sapien
aaatcatactaagacattctggaga

SEQ ID NO: 3597641 - DNA, 25 bp, Homo sapien
aatctgcgtctatggagaatctcca

SEQ ID NO: 3597642 - DNA, 25 bp, Homo sapien
tcagaaagcttctaacaagaccacc

SEQ ID NO: 3597643 - DNA, 25 bp, Homo sapien
ttgagatggctatcagagggccagc

SEQ ID NO: 3597644 - DNA, 25 bp, Homo sapien
ttttgaaagaaatctgcgtctatgg

SEQ ID NO: 3597645 - DNA, 25 bp, Homo sapien
tcaggtttgccacagaatgagttct

SEQ ID NO: 3597646 - DNA, 25 bp, Homo sapien
cagtggcacagaatagacgatacac

SEQ ID NO: 3597647 - DNA, 25 bp, Homo sapien
agataaagactgttaagtagcctcg

SEQ ID NO: 3597648 - DNA, 25 bp, Homo sapien
gtctggaacagcagactaatcaaca

SEQ ID NO: 3597649 - DNA, 25 bp, Homo sapien
caatgagtccattgcttaaaggaag

SEQ ID NO: 3597650 - DNA, 25 bp, Homo sapien
tagtcatgacatgtagcctttgcat

SEQ ID NO: 3597651 - DNA, 25 bp, Homo sapien
tatgcgcaatttcaacacactatag

SEQ ID NO: 3597652 - DNA, 25 bp, Homo sapien
gcctgagcctaaaagatgatgacca

SEQ ID NO: 3597653 - DNA, 25 bp, Homo sapien
ccaaaaagaactgacttgcaaagga

SEQ ID NO: 3597654 - DNA, 25 bp, Homo sapien
ttttcagcattgtacaaactcccaa

SEQ ID NO: 3597655 - DNA, 25 bp, Homo sapien
taatcagtttctaaacaagactgcc

SEQ ID NO: 3597656 - DNA, 25 bp, Homo sapien
tcagtgcttagtacatacaactatg

SEQ ID NO: 3597657 - DNA, 25 bp, Homo sapien
tacaatgaaagtgcaggtcatgctt

SEQ ID NO: 3597658 - DNA, 25 bp, Homo sapien
gttccttaggaatagaccactgcca

SEQ ID NO: 3597659 - DNA, 25 bp, Homo sapien
cacaagtttttgcagtaaggttcag

SEQ ID NO: 3597660 - DNA, 25 bp, Homo sapien
gtaacactttaagggacacagacaa

SEQ ID NO: 3597661 - DNA, 25 bp, Homo sapien
cataatgcaatgataacaaaaattt

SEQ ID NO: 3597662 - DNA, 25 bp, Homo sapien
actcatcataatgcaatgataacaa

SEQ ID NO: 3597663 - DNA, 25 bp, Homo sapien
tactcatcataatgcaatgataaca

SEQ ID NO: 3597664 - DNA, 25 bp, Homo sapien
aatgcaatgataacaaaaatttgtc

SEQ ID NO: 3597665 - DNA, 25 bp, Homo sapien
tgtttataaacaaatgcctcagcag

SEQ ID NO: 3597666 - DNA, 25 bp, Homo sapien
tgtttcccaatctttcatgactatg

SEQ ID NO: 3597667 - DNA, 25 bp, Homo sapien
tatgtcacgctcatgaaaaaacttg

SEQ ID NO: 3597668 - DNA, 25 bp, Homo sapien
tgtttcacctagacaccttgtgcgt

SEQ ID NO: 3597669 - DNA, 25 bp, Homo sapien
cagtcaagttgttgtggcaagaact

SEQ ID NO: 3597670 - DNA, 25 bp, Homo sapien
aagttgttgtggcaagaactgctga

SEQ ID NO: 3597671 - DNA, 25 bp, Homo sapien
gcaagaactgctgaattcgctaatc

SEQ ID NO: 3597672 - DNA, 25 bp, Homo sapien
caagaactgctgaattcgctaatca

SEQ ID NO: 3597673 - DNA, 25 bp, Homo sapien
tcattggtattgatgaatttgtaag

SEQ ID NO: 3597674 - DNA, 25 bp, Homo sapien
attggtattgatgaatttgtaagat

SEQ ID NO: 3597675 - DNA, 25 bp, Homo sapien
cattggtattgatgaatttgtaaga

SEQ ID NO: 3597676 - DNA, 25 bp, Homo sapien
tcttcactgaaacgcctactagagg

SEQ ID NO: 3597677 - DNA, 25 bp, Homo sapien
tagaaggacgagagtttcgctcacg

SEQ ID NO: 3597678 - DNA, 25 bp, Homo sapien
tgctgaagtagtcctagaaatggct

SEQ ID NO: 3597679 - DNA, 25 bp, Homo sapien
tgtgggcagccatatttacactgtt

SEQ ID NO: 3597680 - DNA, 25 bp, Homo sapien
gcacaggtaaatcactactatcagc

SEQ ID NO: 3597681 - DNA, 25 bp, Homo sapien
gctgtgcctctgtatatcctgtaac

SEQ ID NO: 3597682 - DNA, 25 bp, Homo sapien
gcctacttactgagctgtgcctctg

SEQ ID NO: 3597683 - DNA, 25 bp, Homo sapien
taatcaaagaactggcggatttagt

SEQ ID NO: 3597684 - DNA, 25 bp, Homo sapien
tctcttatggtggtatgccggctaa

SEQ ID NO: 3597685 - DNA, 25 bp, Homo sapien
tatagatttctcacttcgcaaaccc

SEQ ID NO: 3597686 - DNA, 25 bp, Homo sapien
ccgatttagataaaatcttaggcag

SEQ ID NO: 3597687 - DNA, 25 bp, Homo sapien
tgtctttctacatcgctgcataatt

SEQ ID NO: 3597688 - DNA, 25 bp, Homo sapien
aggacacattgggtgagtcaagatt

SEQ ID NO: 3597689 - DNA, 25 bp, Homo sapien
ttgggtgagtcaagattaggaaaag

SEQ ID NO: 3597690 - DNA, 25 bp, Homo sapien
ggaggacacattgggtgagtcaaga

SEQ ID NO: 3597691 - DNA, 25 bp, Homo sapien
gaggacacattgggtgagtcaagat

SEQ ID NO: 3597692 - DNA, 25 bp, Homo sapien
tggcccctgcgtatttgccacagga

SEQ ID NO: 3597693 - DNA, 25 bp, Homo sapien
cttatggtttggcccctgcgtattt

SEQ ID NO: 3597694 - DNA, 25 bp, Homo sapien
tggtttggcccctgcgtatttgcca

SEQ ID NO: 3597695 - DNA, 25 bp, Homo sapien
agtgctgtcgaaacagagtacacgt

SEQ ID NO: 3597696 - DNA, 25 bp, Homo sapien
ggtttagcagctggaactatactct

SEQ ID NO: 3597697 - DNA, 25 bp, Homo sapien
ctgtggcatggtttagcagctggaa

SEQ ID NO: 3597698 - DNA, 25 bp, Homo sapien
ttagcagctggaactatactctctt

SEQ ID NO: 3597699 - DNA, 25 bp, Homo sapien
tgtggcatggtttagcagctggaac

SEQ ID NO: 3597700 - DNA, 25 bp, Homo sapien
agggaactgtggtttcttctgattt

SEQ ID NO: 3597701 - DNA, 25 bp, Homo sapien
ggaagggaactgtggtttcttctga

SEQ ID NO: 3597702 - DNA, 25 bp, Homo sapien
gaagggaactgtggtttcttctgat

SEQ ID NO: 3597703 - DNA, 25 bp, Homo sapien
tgtggtttcttctgattttttccca

SEQ ID NO: 3597704 - DNA, 25 bp, Homo sapien
gacctgacgaatccaccaaattatt

SEQ ID NO: 3597705 - DNA, 25 bp, Homo sapien
ttttgtgcatgacatccaactgaat

SEQ ID NO: 3597706 - DNA, 25 bp, Homo sapien
caactgaatgacctgacgaatccac

SEQ ID NO: 3597707 - DNA, 25 bp, Homo sapien
ttgtgcatgacatccaactgaatga

SEQ ID NO: 3597708 - DNA, 25 bp, Homo sapien
actctcctcctgctttagtctcccg

SEQ ID NO: 3597709 - DNA, 25 bp, Homo sapien
accactctcctcctgctttagtctc

SEQ ID NO: 3597710 - DNA, 25 bp, Homo sapien
cacaccactctcctcctgctttagt

SEQ ID NO: 3597711 - DNA, 25 bp, Homo sapien
tcacaccactctcctcctgctttag

SEQ ID NO: 3597712 - DNA, 25 bp, Homo sapien
ctatacaaggcttgtttcttagtcc

SEQ ID NO: 3597713 - DNA, 25 bp, Homo sapien
gtttcttagtccctgagccttctga

SEQ ID NO: 3597714 - DNA, 25 bp, Homo sapien
tatacaaggcttgtttcttagtccc

SEQ ID NO: 3597715 - DNA, 25 bp, Homo sapien
gcttgtttcttagtccctgagcctt

SEQ ID NO: 3597716 - DNA, 25 bp, Homo sapien
attgcatacaggtgctgtcaaaggc

SEQ ID NO: 3597717 - DNA, 25 bp, Homo sapien
tattgcatacaggtgctgtcaaagg

SEQ ID NO: 3597718 - DNA, 25 bp, Homo sapien
ctattgcatacaggtgctgtcaaag

SEQ ID NO: 3597719 - DNA, 25 bp, Homo sapien
tccttggagtacaggctggactgga

SEQ ID NO: 3597720 - DNA, 25 bp, Homo sapien
ggactggagaggcaattattatggc

SEQ ID NO: 3597721 - DNA, 25 bp, Homo sapien
cacagatactgggatcatccctacc

SEQ ID NO: 3597722 - DNA, 25 bp, Homo sapien
ccctaccattccttggagtacaggc

SEQ ID NO: 3597723 - DNA, 25 bp, Homo sapien
acaaatttcaattatgttattaaag

SEQ ID NO: 3597724 - DNA, 25 bp, Homo sapien
gagaaacaaatttcaattatgttat

SEQ ID NO: 3597725 - DNA, 25 bp, Homo sapien
cccagagaaacaaatttcaattatg

SEQ ID NO: 3597726 - DNA, 25 bp, Homo sapien
caaatttcaattatgttattaaagt

SEQ ID NO: 3597727 - DNA, 25 bp, Homo sapien
gaggtggtagaggttgagcagtcat

SEQ ID NO: 3597728 - DNA, 25 bp, Homo sapien
gagcagtcataggtgcagaatttcc

SEQ ID NO: 3597729 - DNA, 25 bp, Homo sapien
gcaacaccactacattagactgact

SEQ ID NO: 3597730 - DNA, 25 bp, Homo sapien
gacacagcttggttgacagcaaata

SEQ ID NO: 3597731 - DNA, 25 bp, Homo sapien
tcctaacgctgttggatcagtcaca

SEQ ID NO: 3597732 - DNA, 25 bp, Homo sapien
cagtcacacaggtagctatcagaat

SEQ ID NO: 3597733 - DNA, 25 bp, Homo sapien
gggtgagaatctcccactgaagaac

SEQ ID NO: 3597734 - DNA, 25 bp, Homo sapien
ttgaggctgaatcccctacttcggc

SEQ ID NO: 3597735 - DNA, 25 bp, Homo sapien
tgaactttcaacagacacaggtagt

SEQ ID NO: 3597736 - DNA, 25 bp, Homo sapien
tctggaggcgtcagtgcaactttct

SEQ ID NO: 3597737 - DNA, 25 bp, Homo sapien
tatcaggctgatcaggctgtaactg

SEQ ID NO: 3597738 - DNA, 25 bp, Homo sapien
tagaagacagcgaatctccaagatg

SEQ ID NO: 3597739 - DNA, 25 bp, Homo sapien
caatgtcacacttctgttcagtggg

SEQ ID NO: 3597740 - DNA, 25 bp, Homo sapien
tcttgtctaagcacatcatggttgt

SEQ ID NO: 3597741 - DNA, 25 bp, Homo sapien
ttcaaattaggcacggactcaaagg

SEQ ID NO: 3597742 - DNA, 25 bp, Homo sapien
taggatgtacaaaaagcgggctgac

SEQ ID NO: 3597743 - DNA, 25 bp, Homo sapien
ttcatctgctaagactatactggga

SEQ ID NO: 3597744 - DNA, 25 bp, Homo sapien
taactgctagattagtttcatctgc

SEQ ID NO: 3597745 - DNA, 25 bp, Homo sapien
taggttgactggaaatactttgtga

SEQ ID NO: 3597746 - DNA, 25 bp, Homo sapien
gattggattccataggttgactgga

SEQ ID NO: 3597747 - DNA, 25 bp, Homo sapien
agatcaaagagtgcctgaaatgctg

SEQ ID NO: 3597748 - DNA, 25 bp, Homo sapien
gatcaaagagtgcctgaaatgctgg

SEQ ID NO: 3597749 - DNA, 25 bp, Homo sapien
tgtctgttccaatatgtcctgtata

SEQ ID NO: 3597750 - DNA, 25 bp, Homo sapien
ctgtctgttccaatatgtcctgtat

SEQ ID NO: 3597751 - DNA, 25 bp, Homo sapien
gtgcctggcccatactataaagttc

SEQ ID NO: 3597752 - DNA, 25 bp, Homo sapien
tgtgcctggcccatactataaagtt

SEQ ID NO: 3597753 - DNA, 25 bp, Homo sapien
tgcctggcccatactataaagttct

SEQ ID NO: 3597754 - DNA, 25 bp, Homo sapien
tcaagtagtgtgatggcttttcaag

SEQ ID NO: 3597755 - DNA, 25 bp, Homo sapien
gtgtgatggcttttcaaggggtggg

SEQ ID NO: 3597756 - DNA, 25 bp, Homo sapien
agtgctgtcatggtcagtcaagtag

SEQ ID NO: 3597757 - DNA, 25 bp, Homo sapien
gaagtttatccatagtgctgtcatg

SEQ ID NO: 3597758 - DNA, 25 bp, Homo sapien
cccatcagcaataagagactggaga

SEQ ID NO: 3597759 - DNA, 25 bp, Homo sapien
gaggctgagccagattcttaaaggg

SEQ ID NO: 3597760 - DNA, 25 bp, Homo sapien
ttcttaaagggcagcactaccaggc

SEQ ID NO: 3597761 - DNA, 25 bp, Homo sapien
ccagcattgcatagagagagctgtg

SEQ ID NO: 3597762 - DNA, 25 bp, Homo sapien
cataacatcttatgttggcaatggt

SEQ ID NO: 3597763 - DNA, 25 bp, Homo sapien
aacatcttatgttggcaatggtttt

SEQ ID NO: 3597764 - DNA, 25 bp, Homo sapien
tcttactattgtaaatcattttatc

SEQ ID NO: 3597765 - DNA, 25 bp, Homo sapien
ttatctaattagatggcaaatcata

SEQ ID NO: 3597766 - DNA, 25 bp, Homo sapien
cttaagtataagtaacacacacgca

SEQ ID NO: 3597767 - DNA, 25 bp, Homo sapien
tcttaagtataagtaacacacacgc

SEQ ID NO: 3597768 - DNA, 25 bp, Homo sapien
ttaagtataagtaacacacacgcac

SEQ ID NO: 3597769 - DNA, 25 bp, Homo sapien
aatcttaagtataagtaacacacac

SEQ ID NO: 3597770 - DNA, 25 bp, Homo sapien
ccatgcacaccccaaccacccatac

SEQ ID NO: 3597771 - DNA, 25 bp, Homo sapien
ctccgtagggttgttatctgtttgc

SEQ ID NO: 3597772 - DNA, 25 bp, Homo sapien
gttatctgtttgcttaggtacttgg

SEQ ID NO: 3597773 - DNA, 25 bp, Homo sapien
aattgaagtctctggctccgtaggg

SEQ ID NO: 3597774 - DNA, 25 bp, Homo sapien
cggaagtcctaggaattcatcaatt

SEQ ID NO: 3597775 - DNA, 25 bp, Homo sapien
tatagttatgcaattaggcaaaaac

SEQ ID NO: 3597776 - DNA, 25 bp, Homo sapien
ttattatagttatgcaattaggcaa

SEQ ID NO: 3597777 - DNA, 25 bp, Homo sapien
tagttatgcaattaggcaaaaacaa

SEQ ID NO: 3597778 - DNA, 25 bp, Homo sapien
tctttattatagttatgcaattagg

SEQ ID NO: 3597779 - DNA, 25 bp, Homo sapien
tcttgaagagatttgttgcttagta

SEQ ID NO: 3597780 - DNA, 25 bp, Homo sapien
tgaagagatttgttgcttagtattt

SEQ ID NO: 3597781 - DNA, 25 bp, Homo sapien
ttcttgaagagatttgttgcttagt

SEQ ID NO: 3597782 - DNA, 25 bp, Homo sapien
cttgaagagatttgttgcttagtat

SEQ ID NO: 3597783 - DNA, 25 bp, Homo sapien
aaaggacaataaagagtattctgct

SEQ ID NO: 3597784 - DNA, 25 bp, Homo sapien
accgataagagctggatagttttaa

SEQ ID NO: 3597785 - DNA, 25 bp, Homo sapien
agaacaaaccgataagagctggata

SEQ ID NO: 3597786 - DNA, 25 bp, Homo sapien
ggacaataaagagtattctgctatt

SEQ ID NO: 3597787 - DNA, 25 bp, Homo sapien
gaatgagggccagacaaagtggtac

SEQ ID NO: 3597788 - DNA, 25 bp, Homo sapien
tttggatcttggaaattccgtattg

SEQ ID NO: 3597789 - DNA, 25 bp, Homo sapien
ttccgtattgttgaatgagggccag

SEQ ID NO: 3597790 - DNA, 25 bp, Homo sapien
tgagggccagacaaagtggtacttt

SEQ ID NO: 3597791 - DNA, 25 bp, Homo sapien
taccgggagacattaaactggcatg

SEQ ID NO: 3597792 - DNA, 25 bp, Homo sapien
cttttgcgtctaccgggagacatta

SEQ ID NO: 3597793 - DNA, 25 bp, Homo sapien
ggagacattaaactggcatgtgctt

SEQ ID NO: 3597794 - DNA, 25 bp, Homo sapien
tgcgtctaccgggagacattaaact

SEQ ID NO: 3597795 - DNA, 25 bp, Homo sapien
gcaacaaattttagctgcacagaaa

SEQ ID NO: 3597796 - DNA, 25 bp, Homo sapien
tgaactgagagtgctaactcctgaa

SEQ ID NO: 3597797 - DNA, 25 bp, Homo sapien
ccttaactaccatgtgttttcagaa

SEQ ID NO: 3597798 - DNA, 25 bp, Homo sapien
aaatacagtctttatgccttaaggt

SEQ ID NO: 3597799 - DNA, 25 bp, Homo sapien
gaaatttggccacttggtcgagtaa

SEQ ID NO: 3597800 - DNA, 25 bp, Homo sapien
tcttgtgactgtgagtggttgacca

SEQ ID NO: 3597801 - DNA, 25 bp, Homo sapien
ccacttggtcgagtaacctgtgtac

SEQ ID NO: 3597802 - DNA, 25 bp, Homo sapien
caaaatatgacctcgatggatctga

SEQ ID NO: 3597803 - DNA, 25 bp, Homo sapien
ctgtggaaggaggagtggtaaactg

SEQ ID NO: 3597804 - DNA, 25 bp, Homo sapien
gtggaaggaggagtggtaaactgtc

SEQ ID NO: 3597805 - DNA, 25 bp, Homo sapien
tgtggaaggaggagtggtaaactgt

SEQ ID NO: 3597806 - DNA, 25 bp, Homo sapien
caagctttctctgccgtttgatttc

SEQ ID NO: 3597807 - DNA, 25 bp, Homo sapien
ctttctctgccgtttgatttctgca

SEQ ID NO: 3597808 - DNA, 25 bp, Homo sapien
aaggtaaggtaaagtgagcaactct

SEQ ID NO: 3597809 - DNA, 25 bp, Homo sapien
taaggtaaagtgagcaactctgcac

SEQ ID NO: 3597810 - DNA, 25 bp, Homo sapien
ccacagattgaagaatgattcctaa

SEQ ID NO: 3597811 - DNA, 25 bp, Homo sapien
caacgtcagggtagtttgggaattg

SEQ ID NO: 3597812 - DNA, 25 bp, Homo sapien
tgtaagaagtcaatatgatgcaacc

SEQ ID NO: 3597813 - DNA, 25 bp, Homo sapien
taacaacgtgttacatccacagatt

SEQ ID NO: 3597814 - DNA, 25 bp, Homo sapien
tctgactgccagcaaaccttgggga

SEQ ID NO: 3597815 - DNA, 25 bp, Homo sapien
gactgccagcaaaccttggggaact

SEQ ID NO: 3597816 - DNA, 25 bp, Homo sapien
ctctctgactgccagcaaaccttgg

SEQ ID NO: 3597817 - DNA, 25 bp, Homo sapien
tgccagcaaaccttggggaactttg

SEQ ID NO: 3597818 - DNA, 25 bp, Homo sapien
ggcatgtagacacactcacaacaca

SEQ ID NO: 3597819 - DNA, 25 bp, Homo sapien
tgtaataatgcattagagtgccttg

SEQ ID NO: 3597820 - DNA, 25 bp, Homo sapien
cattacgttaagaatgcaatctggg

SEQ ID NO: 3597821 - DNA, 25 bp, Homo sapien
cattttttgggcaagcaactgtgat

SEQ ID NO: 3597822 - DNA, 25 bp, Homo sapien
ctgagaaagtgtatggtccaatttc

SEQ ID NO: 3597823 - DNA, 25 bp, Homo sapien
tccaatttcttccatagagatgaca

SEQ ID NO: 3597824 - DNA, 25 bp, Homo sapien
ctgatctgagaaagtgtatggtcca

SEQ ID NO: 3597825 - DNA, 25 bp, Homo sapien
gtccaatttcttccatagagatgac

SEQ ID NO: 3597826 - DNA, 25 bp, Homo sapien
attgctgggacattatttgatgttt

SEQ ID NO: 3597827 - DNA, 25 bp, Homo sapien
tattgctgggacattatttgatgtt

SEQ ID NO: 3597828 - DNA, 25 bp, Homo sapien
ctaaatcataggagaaaaggttctt

SEQ ID NO: 3597829 - DNA, 25 bp, Homo sapien
cttaataaacccagctgaagaaatt

SEQ ID NO: 3597830 - DNA, 25 bp, Homo sapien
aggttcttaataaacccagctgaag

SEQ ID NO: 3597831 - DNA, 25 bp, Homo sapien
tcataggagaaaaggttcttaataa

SEQ ID NO: 3597832 - DNA, 25 bp, Homo sapien
agctacatactcatttaaaattgtt

SEQ ID NO: 3597833 - DNA, 25 bp, Homo sapien
gctacatactcatttaaaattgttg

SEQ ID NO: 3597834 - DNA, 25 bp, Homo sapien
ctcatttaaaattgttgtcaagttt

SEQ ID NO: 3597835 - DNA, 25 bp, Homo sapien
atactcatttaaaattgttgtcaag

SEQ ID NO: 3597836 - DNA, 25 bp, Homo sapien
catctgtacaatgttctgcatattc

SEQ ID NO: 3597837 - DNA, 25 bp, Homo sapien
tcatctgtacaatgttctgcatatt

SEQ ID NO: 3597838 - DNA, 25 bp, Homo sapien
tctgtacaatgttctgcatattctt

SEQ ID NO: 3597839 - DNA, 25 bp, Homo sapien
gtacaatgttctgcatattctttta

SEQ ID NO: 3597840 - DNA, 25 bp, Homo sapien
ctaaaggaatccacgtctagaaaat

SEQ ID NO: 3597841 - DNA, 25 bp, Homo sapien
gaatccacgtctagaaaattatgag

SEQ ID NO: 3597842 - DNA, 25 bp, Homo sapien
atacagttgataagagcaggagaca

SEQ ID NO: 3597843 - DNA, 25 bp, Homo sapien
gacaaactcccaagcagacgggtag

SEQ ID NO: 3597844 - DNA, 25 bp, Homo sapien
gttgggtcccctctcgtgtcgagag

SEQ ID NO: 3597845 - DNA, 25 bp, Homo sapien
tttggaatcccctctcacatggagc

SEQ ID NO: 3597846 - DNA, 25 bp, Homo sapien
tggagctctactcacgttgggtccc

SEQ ID NO: 3597847 - DNA, 25 bp, Homo sapien
caaacgagctgaaacatgcgctccc

SEQ ID NO: 3597848 - DNA, 25 bp, Homo sapien
cccgcaatcatgtcaggagtcagca

SEQ ID NO: 3597849 - DNA, 25 bp, Homo sapien
ttcgggtgtcagtcaagacctccag

SEQ ID NO: 3597850 - DNA, 25 bp, Homo sapien
caacgttaagggtgttgctgcaaac

SEQ ID NO: 3597851 - DNA, 25 bp, Homo sapien
gctattttagctggtacgggaccca

SEQ ID NO: 3597852 - DNA, 25 bp, Homo sapien
caactcgtaagctgggaggcaaaac

SEQ ID NO: 3597853 - DNA, 25 bp, Homo sapien
ctgtccagcatagccgggtccaata

SEQ ID NO: 3597854 - DNA, 25 bp, Homo sapien
gcaatccgtccgtcatgcagacaaa

SEQ ID NO: 3597855 - DNA, 25 bp, Homo sapien
tgtggaggcctgactttccttccga

SEQ ID NO: 3597856 - DNA, 25 bp, Homo sapien
ccaatacaagccgggctacgtccga

SEQ ID NO: 3597857 - DNA, 25 bp, Homo sapien
caatacaagccgggctacgtccgag

SEQ ID NO: 3597858 - DNA, 25 bp, Homo sapien
aatacaagccgggctacgtccgagg

SEQ ID NO: 3597859 - DNA, 25 bp, Homo sapien
aaccacagcaggaaccacaataagg

SEQ ID NO: 3597860 - DNA, 25 bp, Homo sapien
ccacaataaggaacaagactcaggt

SEQ ID NO: 3597861 - DNA, 25 bp, Homo sapien
gcaggaaccacaataaggaacaaga

SEQ ID NO: 3597862 - DNA, 25 bp, Homo sapien
ggaacaagactcaggttaaagcaaa

SEQ ID NO: 3597863 - DNA, 25 bp, Homo sapien
ttccagtggcggcactgaactcgcg

SEQ ID NO: 3597864 - DNA, 25 bp, Homo sapien
gcggcaatttgtcccgcctctttcg

SEQ ID NO: 3597865 - DNA, 25 bp, Homo sapien
ctgcgccgcatctcctggttccagt

SEQ ID NO: 3597866 - DNA, 25 bp, Homo sapien
tgaactcgcggcaatttgtcccgcc

SEQ ID NO: 3597867 - DNA, 25 bp, Homo sapien
tcacggcagccaatcgcttccgcca

SEQ ID NO: 3597868 - DNA, 25 bp, Homo sapien
agccaatcgcttccgccagagaaag

SEQ ID NO: 3597869 - DNA, 25 bp, Homo sapien
aatcgcttccgccagagaaagaaag

SEQ ID NO: 3597870 - DNA, 25 bp, Homo sapien
cagagaaagaaaggcgccgaaatga

SEQ ID NO: 3597871 - DNA, 25 bp, Homo sapien
cgttcgccttcggaactgtcgtcac

SEQ ID NO: 3597872 - DNA, 25 bp, Homo sapien
tccgttcgccttcggaactgtcgtc

SEQ ID NO: 3597873 - DNA, 25 bp, Homo sapien
ctccgttcgccttcggaactgtcgt

SEQ ID NO: 3597874 - DNA, 25 bp, Homo sapien
ccgttcgccttcggaactgtcgtca

SEQ ID NO: 3597875 - DNA, 25 bp, Homo sapien
caaacgctaagtcgctggccattgg

SEQ ID NO: 3597876 - DNA, 25 bp, Homo sapien
tgggcagtcacgcagggtttgaacc

SEQ ID NO: 3597877 - DNA, 25 bp, Homo sapien
gagaccgcgtgatactggatgcgca

SEQ ID NO: 3597878 - DNA, 25 bp, Homo sapien
accgccgcggttgatactactttga

SEQ ID NO: 3597879 - DNA, 25 bp, Homo sapien
aaggaaaaatgcgtgtaaaggcaca

SEQ ID NO: 3597880 - DNA, 25 bp, Homo sapien
aaatgcgtgtaaaggcacaaagtgt

SEQ ID NO: 3597881 - DNA, 25 bp, Homo sapien
gatggaaggaaaaatgcgtgtaaag

SEQ ID NO: 3597882 - DNA, 25 bp, Homo sapien
cgtgtaaaggcacaaagtgtagaag

SEQ ID NO: 3597883 - DNA, 25 bp, Homo sapien
tttgtgggttttcagctgctgaagt

SEQ ID NO: 3597884 - DNA, 25 bp, Homo sapien
tattttgtgggttttcagctgctga

SEQ ID NO: 3597885 - DNA, 25 bp, Homo sapien
atattttgtgggttttcagctgctg

SEQ ID NO: 3597886 - DNA, 25 bp, Homo sapien
gtgggttttcagctgctgaagtcat

SEQ ID NO: 3597887 - DNA, 25 bp, Homo sapien
agaaatctgtaactggttgtgatca

SEQ ID NO: 3597888 - DNA, 25 bp, Homo sapien
aaacaccactgcactcaggccagcc

SEQ ID NO: 3597889 - DNA, 25 bp, Homo sapien
agcagtgggagtttagaaggaacaa

SEQ ID NO: 3597890 - DNA, 25 bp, Homo sapien
gtgaagcagtgggagtttagaagga

SEQ ID NO: 3597891 - DNA, 25 bp, Homo sapien
ttgctttccaaggtaaatattctcc

SEQ ID NO: 3597892 - DNA, 25 bp, Homo sapien
gggatcatttttggtctaacaccag

SEQ ID NO: 3597893 - DNA, 25 bp, Homo sapien
gagtgccaaaaaacttgggatcatt

SEQ ID NO: 3597894 - DNA, 25 bp, Homo sapien
ttgcttttcgagatgagcagatcac

SEQ ID NO: 3597895 - DNA, 25 bp, Homo sapien
acatcactgcgatccagcagcctcg

SEQ ID NO: 3597896 - DNA, 25 bp, Homo sapien
cactgcgatccagcagcctcgacct

SEQ ID NO: 3597897 - DNA, 25 bp, Homo sapien
tgatcacatcactgcgatccagcag

SEQ ID NO: 3597898 - DNA, 25 bp, Homo sapien
gatcacatcactgcgatccagcagc

SEQ ID NO: 3597899 - DNA, 25 bp, Homo sapien
gttcaacttcgattgaaactcttgc

SEQ ID NO: 3597900 - DNA, 25 bp, Homo sapien
aagtaattacgttcaacttcgattg

SEQ ID NO: 3597901 - DNA, 25 bp, Homo sapien
ttacgttcaacttcgattgaaactc

SEQ ID NO: 3597902 - DNA, 25 bp, Homo sapien
taattacgttcaacttcgattgaaa

SEQ ID NO: 3597903 - DNA, 25 bp, Homo sapien
cataacttactatgaccttgaattc

SEQ ID NO: 3597904 - DNA, 25 bp, Homo sapien
ataacttactatgaccttgaattcc

SEQ ID NO: 3597905 - DNA, 25 bp, Homo sapien
tcataacttactatgaccttgaatt

SEQ ID NO: 3597906 - DNA, 25 bp, Homo sapien
gttttactgctacaaccttcatttg

SEQ ID NO: 3597907 - DNA, 25 bp, Homo sapien
tgtacttaaagaccaatcaattcta

SEQ ID NO: 3597908 - DNA, 25 bp, Homo sapien
gatgcccatcctgtgatcctactag

SEQ ID NO: 3597909 - DNA, 25 bp, Homo sapien
cagcaaaggttgtgattactcagtt

SEQ ID NO: 3597910 - DNA, 25 bp, Homo sapien
gtacctgaattggatggcatctgct

SEQ ID NO: 3597911 - DNA, 25 bp, Homo sapien
gcatataggcttcccatatgtagat

SEQ ID NO: 3597912 - DNA, 25 bp, Homo sapien
taaaagaggtgttcttgtgacaaac

SEQ ID NO: 3597913 - DNA, 25 bp, Homo sapien
tatagtatatgtattcaggagcttc

SEQ ID NO: 3597914 - DNA, 25 bp, Homo sapien
catatgacctcgaaacagcaatccc

SEQ ID NO: 3597915 - DNA, 25 bp, Homo sapien
gggcaaagccctagtaacatatgac

SEQ ID NO: 3597916 - DNA, 25 bp, Homo sapien
gaagatgttacaacccattactagg

SEQ ID NO: 3597917 - DNA, 25 bp, Homo sapien
tatagactacgaacatatgaacacg

SEQ ID NO: 3597918 - DNA, 25 bp, Homo sapien
taacttacttgcttagatgtgagaa

SEQ ID NO: 3597919 - DNA, 25 bp, Homo sapien
ccaatgcattaatctagagtaccca

SEQ ID NO: 3597920 - DNA, 25 bp, Homo sapien
taaccacttgtgctaatagaggagc

SEQ ID NO: 3597921 - DNA, 25 bp, Homo sapien
tagaggagcactgtcttaaaataac

SEQ ID NO: 3597922 - DNA, 25 bp, Homo sapien
aagatgatgggaggcctaggatttc

SEQ ID NO: 3597923 - DNA, 25 bp, Homo sapien
caattggctgctagaatggggacca

SEQ ID NO: 3597924 - DNA, 25 bp, Homo sapien
gacggaatgaagattccaacatata

SEQ ID NO: 3597925 - DNA, 25 bp, Homo sapien
ttttaatggtagagagacggaatga

SEQ ID NO: 3597926 - DNA, 25 bp, Homo sapien
ggaagatttgtagagtagaaatgca

SEQ ID NO: 3597927 - DNA, 25 bp, Homo sapien
atgaggaagatttgtagagtagaaa

SEQ ID NO: 3597928 - DNA, 25 bp, Homo sapien
gaagatttgtagagtagaaatgcat

SEQ ID NO: 3597929 - DNA, 25 bp, Homo sapien
gaggaagatttgtagagtagaaatg

SEQ ID NO: 3597930 - DNA, 25 bp, Homo sapien
gtcactcagtttcagcagttaccaa

SEQ ID NO: 3597931 - DNA, 25 bp, Homo sapien
gccctagtccttaaggtgttcacat

SEQ ID NO: 3597932 - DNA, 25 bp, Homo sapien
gaagtagtaaaacattgccctagtc

SEQ ID NO: 3597933 - DNA, 25 bp, Homo sapien
tagagatggtaccaccttcacttgg

SEQ ID NO: 3597934 - DNA, 25 bp, Homo sapien
gaaagagttcccaggtaattgtgaa

SEQ ID NO: 3597935 - DNA, 25 bp, Homo sapien
cacttacatactataccccaggaag

SEQ ID NO: 3597936 - DNA, 25 bp, Homo sapien
cattctgattccctacccagtgtgt

SEQ ID NO: 3597937 - DNA, 25 bp, Homo sapien
gatttctcccattagtgcatgtcat

SEQ ID NO: 3597938 - DNA, 25 bp, Homo sapien
cgatctcagctccatgtatccttca

SEQ ID NO: 3597939 - DNA, 25 bp, Homo sapien
acgatctcagctccatgtatccttc

SEQ ID NO: 3597940 - DNA, 25 bp, Homo sapien
cacgatctcagctccatgtatcctt

SEQ ID NO: 3597941 - DNA, 25 bp, Homo sapien
gatctcagctccatgtatccttcac

SEQ ID NO: 3597942 - DNA, 25 bp, Homo sapien
tgtatagattatagaatttagtgct

SEQ ID NO: 3597943 - DNA, 25 bp, Homo sapien
tagaatcgtattccagtgccttatc

SEQ ID NO: 3597944 - DNA, 25 bp, Homo sapien
acacacacacgggttagagatttgt

SEQ ID NO: 3597945 - DNA, 25 bp, Homo sapien
cacacacgggttagagatttgtata

SEQ ID NO: 3597946 - DNA, 25 bp, Homo sapien
tccaaggctgtgctattcccaaggt

SEQ ID NO: 3597947 - DNA, 25 bp, Homo sapien
cacctgaatagggtttgggcctgca

SEQ ID NO: 3597948 - DNA, 25 bp, Homo sapien
tcttaactttgggacagctcacctg

SEQ ID NO: 3597949 - DNA, 25 bp, Homo sapien
tgtgtgcacctttatgaaccgaggc

SEQ ID NO: 3597950 - DNA, 25 bp, Homo sapien
agcccttctgtactgtccatgtatg

SEQ ID NO: 3597951 - DNA, 25 bp, Homo sapien
taccctatccattgggcttcttctt

SEQ ID NO: 3597952 - DNA, 25 bp, Homo sapien
gttcatgaattctcttgtcagatgt

SEQ ID NO: 3597953 - DNA, 25 bp, Homo sapien
catagattgccttctagttcatgaa

SEQ ID NO: 3597954 - DNA, 25 bp, Homo sapien
agcataaatactgataggagatttc

SEQ ID NO: 3597955 - DNA, 25 bp, Homo sapien
tgagagtataagcttccatgtgtcc

SEQ ID NO: 3597956 - DNA, 25 bp, Homo sapien
cctcatctccttgtgctagtgggca

SEQ ID NO: 3597957 - DNA, 25 bp, Homo sapien
ggtttccatacctgaagtgtagcat

SEQ ID NO: 3597958 - DNA, 25 bp, Homo sapien
aaatgggtgattgagctttctcctc

SEQ ID NO: 3597959 - DNA, 25 bp, Homo sapien
tacatacagatcacaagcctaggag

SEQ ID NO: 3597960 - DNA, 25 bp, Homo sapien
cttgcatggtatgctatgaggctcc

SEQ ID NO: 3597961 - DNA, 25 bp, Homo sapien
cagctgcggagattaacaaatgggt

SEQ ID NO: 3597962 - DNA, 25 bp, Homo sapien
cagtaggttcacaaactcttggtca

SEQ ID NO: 3597963 - DNA, 25 bp, Homo sapien
gatactatcccaatacactgctgga

SEQ ID NO: 3597964 - DNA, 25 bp, Homo sapien
gcaggtcatacctccccaaagtgtt

SEQ ID NO: 3597965 - DNA, 25 bp, Homo sapien
gaacagttgtgtccagattaaggga

SEQ ID NO: 3597966 - DNA, 25 bp, Homo sapien
gtctctttacttaagtgtgactgtt

SEQ ID NO: 3597967 - DNA, 25 bp, Homo sapien
gtttctcagaatactaggaataatt

SEQ ID NO: 3597968 - DNA, 25 bp, Homo sapien
tacttaagtgtgactgttagaatac

SEQ ID NO: 3597969 - DNA, 25 bp, Homo sapien
gtgactgttagaatactacagtttc

SEQ ID NO: 3597970 - DNA, 25 bp, Homo sapien
tccttacttaactgagctagattct

SEQ ID NO: 3597971 - DNA, 25 bp, Homo sapien
ctataactgatggatggaaggctca

SEQ ID NO: 3597972 - DNA, 25 bp, Homo sapien
cagtcagaatacactatctcttggc

SEQ ID NO: 3597973 - DNA, 25 bp, Homo sapien
tatacacaagttattccagtcagaa

SEQ ID NO: 3597974 - DNA, 25 bp, Homo sapien
gaatcaggcgttaatctagttacat

SEQ ID NO: 3597975 - DNA, 25 bp, Homo sapien
tatagtccataagtagaatcaggcg

SEQ ID NO: 3597976 - DNA, 25 bp, Homo sapien
gcatctttgatatgtctcctccata

SEQ ID NO: 3597977 - DNA, 25 bp, Homo sapien
catagtaagtatcatctggtattcc

SEQ ID NO: 3597978 - DNA, 25 bp, Homo sapien
gttgtggtctgttccacattccttt

SEQ ID NO: 3597979 - DNA, 25 bp, Homo sapien
aatgctactgtgttgtggtctgttc

SEQ ID NO: 3597980 - DNA, 25 bp, Homo sapien
ttccttttcaccattcttaaagcaa

SEQ ID NO: 3597981 - DNA, 25 bp, Homo sapien
cattccttttcaccattcttaaagc

SEQ ID NO: 3597982 - DNA, 25 bp, Homo sapien
tagccgaagagttgcttgtagcaat

SEQ ID NO: 3597983 - DNA, 25 bp, Homo sapien
ttgaagttagccgaagagttgcttg

SEQ ID NO: 3597984 - DNA, 25 bp, Homo sapien
cgaagagttgcttgtagcaatttcc

SEQ ID NO: 3597985 - DNA, 25 bp, Homo sapien
gagttgcttgtagcaatttccttcc

SEQ ID NO: 3597986 - DNA, 25 bp, Homo sapien
tgtggcattgtgcataactccgtga

SEQ ID NO: 3597987 - DNA, 25 bp, Homo sapien
tatccattaggatgaatgccagcaa

SEQ ID NO: 3597988 - DNA, 25 bp, Homo sapien
gcaaaagccacggtagctgtcctgt

SEQ ID NO: 3597989 - DNA, 25 bp, Homo sapien
tgctgtttgaaaaacgtgatgatcc

SEQ ID NO: 3597990 - DNA, 25 bp, Homo sapien
taatcagcccctttgttgcagtgtg

SEQ ID NO: 3597991 - DNA, 25 bp, Homo sapien
agtcctagagtttcatgatgtgttg

SEQ ID NO: 3597992 - DNA, 25 bp, Homo sapien
cttcaaaagctctaatcagcccctt

SEQ ID NO: 3597993 - DNA, 25 bp, Homo sapien
gttgcagtgtgaattagtcctagag

SEQ ID NO: 3597994 - DNA, 25 bp, Homo sapien
tgaggttcgtccatgtcattctgtc

SEQ ID NO: 3597995 - DNA, 25 bp, Homo sapien
tcacctgctgatgcaaatttgtgct

SEQ ID NO: 3597996 - DNA, 25 bp, Homo sapien
taaatctatccatcaccctctgacg

SEQ ID NO: 3597997 - DNA, 25 bp, Homo sapien
tagttcattctgttgtactgctgcg

SEQ ID NO: 3597998 - DNA, 25 bp, Homo sapien
gcctcatccactctatttttctaag

SEQ ID NO: 3597999 - DNA, 25 bp, Homo sapien
ttgcctcatccactctatttttcta

SEQ ID NO: 3598000 - DNA, 25 bp, Homo sapien
atttgcctcatccactctatttttc

SEQ ID NO: 3598001 - DNA, 25 bp, Homo sapien
cctcatccactctatttttctaagt

SEQ ID NO: 3598002 - DNA, 25 bp, Homo sapien
gcataatttctagggctgttagcac

SEQ ID NO: 3598003 - DNA, 25 bp, Homo sapien
gttttctatacgatgataccagcca

SEQ ID NO: 3598004 - DNA, 25 bp, Homo sapien
tttattatgagatgtatgctttgct

SEQ ID NO: 3598005 - DNA, 25 bp, Homo sapien
caataggtctgtgagtaaaaatctt

SEQ ID NO: 3598006 - DNA, 25 bp, Homo sapien
tgaatcgcacatgaatgccagcagc

SEQ ID NO: 3598007 - DNA, 25 bp, Homo sapien
tccacctaatctgaatcgcacatga

SEQ ID NO: 3598008 - DNA, 25 bp, Homo sapien
tctgaatcgcacatgaatgccagca

SEQ ID NO: 3598009 - DNA, 25 bp, Homo sapien
cctaatctgaatcgcacatgaatgc

SEQ ID NO: 3598010 - DNA, 25 bp, Homo sapien
ttttgtcagtctgacaacctttgct

SEQ ID NO: 3598011 - DNA, 25 bp, Homo sapien
tattgtttaaagtatgcctcaaaaa

SEQ ID NO: 3598012 - DNA, 25 bp, Homo sapien
attcttattgtttaaagtatgcctc

SEQ ID NO: 3598013 - DNA, 25 bp, Homo sapien
agatggggtttttgtcagtctgaca

SEQ ID NO: 3598014 - DNA, 25 bp, Homo sapien
ctctttgggattaatatatttcact

SEQ ID NO: 3598015 - DNA, 25 bp, Homo sapien
taaatcaatcagacttttaaagtgt

SEQ ID NO: 3598016 - DNA, 25 bp, Homo sapien
tatatttcactatctgacgtggttc

SEQ ID NO: 3598017 - DNA, 25 bp, Homo sapien
tttaaagtgttgaaatatagcgaca

SEQ ID NO: 3598018 - DNA, 25 bp, Homo sapien
agagactaacactgagcccctggta

SEQ ID NO: 3598019 - DNA, 25 bp, Homo sapien
gagagtccaacttgccaacacagag

SEQ ID NO: 3598020 - DNA, 25 bp, Homo sapien
aatggaggttattcataggctcagc

SEQ ID NO: 3598021 - DNA, 25 bp, Homo sapien
gaactacctagcttccttgagacaa

SEQ ID NO: 3598022 - DNA, 25 bp, Homo sapien
tggaaactgatactgccacctgacc

SEQ ID NO: 3598023 - DNA, 25 bp, Homo sapien
gaagatgtctagaattcaggagaac

SEQ ID NO: 3598024 - DNA, 25 bp, Homo sapien
aaagacaattaccatactggctggg

SEQ ID NO: 3598025 - DNA, 25 bp, Homo sapien
tgtgctctgcagatataatggtctt

SEQ ID NO: 3598026 - DNA, 25 bp, Homo sapien
gactctggcagccttatcctgcttt

SEQ ID NO: 3598027 - DNA, 25 bp, Homo sapien
actctggcagccttatcctgctttg

SEQ ID NO: 3598028 - DNA, 25 bp, Homo sapien
atgactctggcagccttatcctgct

SEQ ID NO: 3598029 - DNA, 25 bp, Homo sapien
tctggcagccttatcctgctttgta

SEQ ID NO: 3598030 - DNA, 25 bp, Homo sapien
tgcgcaggtccctaacctaaaatta

SEQ ID NO: 3598031 - DNA, 25 bp, Homo sapien
gacagagttgcatccacaaaattgc

SEQ ID NO: 3598032 - DNA, 25 bp, Homo sapien
ctttcttaacgtgcatagagacaga

SEQ ID NO: 3598033 - DNA, 25 bp, Homo sapien
aacctttcttaacgtgcatagagac

SEQ ID NO: 3598034 - DNA, 25 bp, Homo sapien
tggcccgggcgccgctggactccta

SEQ ID NO: 3598035 - DNA, 25 bp, Homo sapien
ctggcccgggcgccgctggactcct

SEQ ID NO: 3598036 - DNA, 25 bp, Homo sapien
ctgctggcccgggcgccgctggact

SEQ ID NO: 3598037 - DNA, 25 bp, Homo sapien
aatcgctgctggcccgggcgccgct

SEQ ID NO: 3598038 - DNA, 25 bp, Homo sapien
ccctgaaatgtcagggattgtggtt

SEQ ID NO: 3598039 - DNA, 25 bp, Homo sapien
tgcagagttggcagtatgggagacc

SEQ ID NO: 3598040 - DNA, 25 bp, Homo sapien
tctgagtgatgctagtggaatcatc

SEQ ID NO: 3598041 - DNA, 25 bp, Homo sapien
tatgggagaccgcagttttatttct

SEQ ID NO: 3598042 - DNA, 25 bp, Homo sapien
gcaaccggccagagtacatatttta

SEQ ID NO: 3598043 - DNA, 25 bp, Homo sapien
taactctttaaaggctgcggctgaa

SEQ ID NO: 3598044 - DNA, 25 bp, Homo sapien
tctacatatataaagccaccgggag

SEQ ID NO: 3598045 - DNA, 25 bp, Homo sapien
gaatcccaagatagcaggcttcctg

SEQ ID NO: 3598046 - DNA, 25 bp, Homo sapien
tccattccatcacgtacttcgggtt

SEQ ID NO: 3598047 - DNA, 25 bp, Homo sapien
cagatggctgtgctatcttctggct

SEQ ID NO: 3598048 - DNA, 25 bp, Homo sapien
gtttgctggactggcgctcggcata

SEQ ID NO: 3598049 - DNA, 25 bp, Homo sapien
tcttctggctgaggaacaagttcca

SEQ ID NO: 3598050 - DNA, 25 bp, Homo sapien
tagccatcaactgtccttcttttgc

SEQ ID NO: 3598051 - DNA, 25 bp, Homo sapien
gcagtacttggtaatagtagcagta

SEQ ID NO: 3598052 - DNA, 25 bp, Homo sapien
ctgcagtacttggtaatagtagcag

SEQ ID NO: 3598053 - DNA, 25 bp, Homo sapien
ctgtgtggctgtagtaggtccctag

SEQ ID NO: 3598054 - DNA, 25 bp, Homo sapien
ggaggcagaggttgcagtgagtgga

SEQ ID NO: 3598055 - DNA, 25 bp, Homo sapien
tgaggcacgaaattccttgaacccg

SEQ ID NO: 3598056 - DNA, 25 bp, Homo sapien
gatcgtgccactgcattccagcctg

SEQ ID NO: 3598057 - DNA, 25 bp, Homo sapien
tccagcctgggcgacagagtgaaac

SEQ ID NO: 3598058 - DNA, 25 bp, Homo sapien
gatatctgtaagcagccacggtccc

SEQ ID NO: 3598059 - DNA, 25 bp, Homo sapien
gcttccaaggttctagtgccatgta

SEQ ID NO: 3598060 - DNA, 25 bp, Homo sapien
gactgtcgcccagcatgagatatgg

SEQ ID NO: 3598061 - DNA, 25 bp, Homo sapien
tgttcataatatggcgagtcctgct

SEQ ID NO: 3598062 - DNA, 25 bp, Homo sapien
aatatcctgtaattcctgcatctag

SEQ ID NO: 3598063 - DNA, 25 bp, Homo sapien
aacccatcaacttggcttttccaag

SEQ ID NO: 3598064 - DNA, 25 bp, Homo sapien
gctctctctgttttattgatccagg

SEQ ID NO: 3598065 - DNA, 25 bp, Homo sapien
tggacagctgtaccaactggagcct

SEQ ID NO: 3598066 - DNA, 25 bp, Homo sapien
gaggagatcatttgtaacaccccgc

SEQ ID NO: 3598067 - DNA, 25 bp, Homo sapien
gctccaagggccaatctccaagatt

SEQ ID NO: 3598068 - DNA, 25 bp, Homo sapien
cattgacttttcgatgctccaaggg

SEQ ID NO: 3598069 - DNA, 25 bp, Homo sapien
catacgttggaaggacaacatctct

SEQ ID NO: 3598070 - DNA, 25 bp, Homo sapien
ggatcttccggacactcacagtact

SEQ ID NO: 3598071 - DNA, 25 bp, Homo sapien
tcacagtactcatggtacactggtc

SEQ ID NO: 3598072 - DNA, 25 bp, Homo sapien
tccttggttggacaagaaagagtct

SEQ ID NO: 3598073 - DNA, 25 bp, Homo sapien
tccctaaagatctccggtaaacatg

SEQ ID NO: 3598074 - DNA, 25 bp, Homo sapien
tagggacatgtatccggaccaactc

SEQ ID NO: 3598075 - DNA, 25 bp, Homo sapien
tcttcaggccttcatcgacagtttc

SEQ ID NO: 3598076 - DNA, 25 bp, Homo sapien
tcattcctgtccaaaggtttaggga

SEQ ID NO: 3598077 - DNA, 25 bp, Homo sapien
gagatttgactacgactttgaatgg

SEQ ID NO: 3598078 - DNA, 25 bp, Homo sapien
aaagaaatataaacaactctaccat

SEQ ID NO: 3598079 - DNA, 25 bp, Homo sapien
tattggataggtgttattggataac

SEQ ID NO: 3598080 - DNA, 25 bp, Homo sapien
catccagctaggagtgcagaggcag

SEQ ID NO: 3598081 - DNA, 25 bp, Homo sapien
tgaggccaggaactgtcatgtctgg

SEQ ID NO: 3598082 - DNA, 25 bp, Homo sapien
gaggcagaatcctagctcattacag

SEQ ID NO: 3598083 - DNA, 25 bp, Homo sapien
agagcgagtgaggttctggccctcc

SEQ ID NO: 3598084 - DNA, 25 bp, Homo sapien
tgcaggtagaaatagcggaccggca

SEQ ID NO: 3598085 - DNA, 25 bp, Homo sapien
ggaccggcaggacgacggccgcctg

SEQ ID NO: 3598086 - DNA, 25 bp, Homo sapien
cctccgagttgaccgcctgcaggta

SEQ ID NO: 3598087 - DNA, 25 bp, Homo sapien
tgtaaagtaacccacgcattttgcg

SEQ ID NO: 3598088 - DNA, 25 bp, Homo sapien
caatacagccacaaacttgcctggg

SEQ ID NO: 3598089 - DNA, 25 bp, Homo sapien
ttaaacagtacattccagcgcagtc

SEQ ID NO: 3598090 - DNA, 25 bp, Homo sapien
gaatcatagtgacaagcccttagga

SEQ ID NO: 3598091 - DNA, 25 bp, Homo sapien
tattggcttactagggattcaggtc

SEQ ID NO: 3598092 - DNA, 25 bp, Homo sapien
taagtcggtcccatgaagggatacc

SEQ ID NO: 3598093 - DNA, 25 bp, Homo sapien
tgtggaccggaagaagcaatacaga

SEQ ID NO: 3598094 - DNA, 25 bp, Homo sapien
gtgctttgaccatgtgcctcccagg

SEQ ID NO: 3598095 - DNA, 25 bp, Homo sapien
catagatattaagcggttcacttgg

SEQ ID NO: 3598096 - DNA, 25 bp, Homo sapien
cactgggtcatcctcatagatatta

SEQ ID NO: 3598097 - DNA, 25 bp, Homo sapien
acttggagataagccatcttctggc

SEQ ID NO: 3598098 - DNA, 25 bp, Homo sapien
tgtgtcacaatttgagtccactggg

SEQ ID NO: 3598099 - DNA, 25 bp, Homo sapien
tgggagggttcctcaaatcatcttt

SEQ ID NO: 3598100 - DNA, 25 bp, Homo sapien
agaatttgagcttaatgactctgag

SEQ ID NO: 3598101 - DNA, 25 bp, Homo sapien
ggttgggagggttcctcaaatcatc

SEQ ID NO: 3598102 - DNA, 25 bp, Homo sapien
tgggagaatttgagcttaatgactc

SEQ ID NO: 3598103 - DNA, 25 bp, Homo sapien
cgatagaggtgtggctcaggttccc

SEQ ID NO: 3598104 - DNA, 25 bp, Homo sapien
tagatattgcagacctgggacctgt

SEQ ID NO: 3598105 - DNA, 25 bp, Homo sapien
gacctgtttttgtcccgctgcgata

SEQ ID NO: 3598106 - DNA, 25 bp, Homo sapien
ccaagggtcagtcgactcagggcat

SEQ ID NO: 3598107 - DNA, 25 bp, Homo sapien
ggtgttcctgactgctctcgtgtag

SEQ ID NO: 3598108 - DNA, 25 bp, Homo sapien
aagtgaaggttgatcccaagctgac

SEQ ID NO: 3598109 - DNA, 25 bp, Homo sapien
tgctttcgccaatggactctgcaga

SEQ ID NO: 3598110 - DNA, 25 bp, Homo sapien
gactagagggaccactgttacttga

SEQ ID NO: 3598111 - DNA, 25 bp, Homo sapien
tatattgagaccacctccagacatt

SEQ ID NO: 3598112 - DNA, 25 bp, Homo sapien
taatatattgagaccacctccagac

SEQ ID NO: 3598113 - DNA, 25 bp, Homo sapien
gtgtaatatattgagaccacctcca

SEQ ID NO: 3598114 - DNA, 25 bp, Homo sapien
agagtgtaatatattgagaccacct

SEQ ID NO: 3598115 - DNA, 25 bp, Homo sapien
cacacgaggtcttgtggccaggagt

SEQ ID NO: 3598116 - DNA, 25 bp, Homo sapien
gaacactgtagtagatggaaccaca

SEQ ID NO: 3598117 - DNA, 25 bp, Homo sapien
caagcccttggtgttagctcagaag

SEQ ID NO: 3598118 - DNA, 25 bp, Homo sapien
ttccagttgaggcatgtggctcccc

SEQ ID NO: 3598119 - DNA, 25 bp, Homo sapien
tgcaagttgggactctgaggattcc

SEQ ID NO: 3598120 - DNA, 25 bp, Homo sapien
tctgtgaccaagatattgggctggc

SEQ ID NO: 3598121 - DNA, 25 bp, Homo sapien
tgatagcttgaaccagtcatggagc

SEQ ID NO: 3598122 - DNA, 25 bp, Homo sapien
cctgcttcgatgaaagtcagaccag

SEQ ID NO: 3598123 - DNA, 25 bp, Homo sapien
tctcaaaagtgtcgggactcattgc

SEQ ID NO: 3598124 - DNA, 25 bp, Homo sapien
cataaattgtgcttgtcctaggaga

SEQ ID NO: 3598125 - DNA, 25 bp, Homo sapien
tgggatacacatacttgtcagcggg

SEQ ID NO: 3598126 - DNA, 25 bp, Homo sapien
tccgcttcgtccaaaggtattgctg

SEQ ID NO: 3598127 - DNA, 25 bp, Homo sapien
tttctgtgatattaccatgtctgtt

SEQ ID NO: 3598128 - DNA, 25 bp, Homo sapien
ttctgtgatattaccatgtctgtta

SEQ ID NO: 3598129 - DNA, 25 bp, Homo sapien
ctttctgtgatattaccatgtctgt

SEQ ID NO: 3598130 - DNA, 25 bp, Homo sapien
gtgttctggtattcactgagcttgc

SEQ ID NO: 3598131 - DNA, 25 bp, Homo sapien
gagcttgcagactgttcctgagcca

SEQ ID NO: 3598132 - DNA, 25 bp, Homo sapien
tgtgttcttgatccatagttgaggg

SEQ ID NO: 3598133 - DNA, 25 bp, Homo sapien
tgagccaatttgctatccaagtcat

SEQ ID NO: 3598134 - DNA, 25 bp, Homo sapien
tgaagcatcccacggtggaggcatg

SEQ ID NO: 3598135 - DNA, 25 bp, Homo sapien
agtgaagcatcccacggtggaggca

SEQ ID NO: 3598136 - DNA, 25 bp, Homo sapien
gtgaagcatcccacggtggaggcat

SEQ ID NO: 3598137 - DNA, 25 bp, Homo sapien
aagcatcccacggtggaggcatgcc

SEQ ID NO: 3598138 - DNA, 25 bp, Homo sapien
ctgtcaactagatgattttccagag

SEQ ID NO: 3598139 - DNA, 25 bp, Homo sapien
gtcaactagatgattttccagaggt

SEQ ID NO: 3598140 - DNA, 25 bp, Homo sapien
tgtcaactagatgattttccagagg

SEQ ID NO: 3598141 - DNA, 25 bp, Homo sapien
cagtctgctatttaccagggtgacc

SEQ ID NO: 3598142 - DNA, 25 bp, Homo sapien
tgctgtggagttccaaaaacccagg

SEQ ID NO: 3598143 - DNA, 25 bp, Homo sapien
tcaaacggcagaggatggtcagtct

SEQ ID NO: 3598144 - DNA, 25 bp, Homo sapien
gcttagttaaagcagagtctccgca

SEQ ID NO: 3598145 - DNA, 25 bp, Homo sapien
tcacaggcataggaggtcctgcatg

SEQ ID NO: 3598146 - DNA, 25 bp, Homo sapien
cccctcacaggcataggaggtcctg

SEQ ID NO: 3598147 - DNA, 25 bp, Homo sapien
caggcataggaggtcctgcatggcc

SEQ ID NO: 3598148 - DNA, 25 bp, Homo sapien
ggcataggaggtcctgcatggccat

SEQ ID NO: 3598149 - DNA, 25 bp, Homo sapien
aaactatgctggtaaaaggcccctg

SEQ ID NO: 3598150 - DNA, 25 bp, Homo sapien
caaatatgactcagatagggaccct

SEQ ID NO: 3598151 - DNA, 25 bp, Homo sapien
gctgggatgctaccaccaagcgtga

SEQ ID NO: 3598152 - DNA, 25 bp, Homo sapien
cacataattgcctaagggtgccatg

SEQ ID NO: 3598153 - DNA, 25 bp, Homo sapien
tgtccagatgaactggctttgggtg

SEQ ID NO: 3598154 - DNA, 25 bp, Homo sapien
tttgtagaggtgcagcctgactatg

SEQ ID NO: 3598155 - DNA, 25 bp, Homo sapien
aaccattgaggtacagtaatctctc

SEQ ID NO: 3598156 - DNA, 25 bp, Homo sapien
tatgccaaagggtagtgtttgtcca

SEQ ID NO: 3598157 - DNA, 25 bp, Homo sapien
ctgtcccagtgatggaagctttgaa

SEQ ID NO: 3598158 - DNA, 25 bp, Homo sapien
aacagggaagcaaatgacgatctga

SEQ ID NO: 3598159 - DNA, 25 bp, Homo sapien
ctcatccgggaagaaaaaggtgtcg

SEQ ID NO: 3598160 - DNA, 25 bp, Homo sapien
aatgacgatctgaagctcatccggg

SEQ ID NO: 3598161 - DNA, 25 bp, Homo sapien
ttttagatcttgatgtaggtaattc

SEQ ID NO: 3598162 - DNA, 25 bp, Homo sapien
cttgatgtaggtaattctatcggat

SEQ ID NO: 3598163 - DNA, 25 bp, Homo sapien
tcttgatgtaggtaattctatcgga

SEQ ID NO: 3598164 - DNA, 25 bp, Homo sapien
agatcttgatgtaggtaattctatc

SEQ ID NO: 3598165 - DNA, 25 bp, Homo sapien
ttatgcagactagaaacagggcagg

SEQ ID NO: 3598166 - DNA, 25 bp, Homo sapien
ggaatctttccatgtgtactgtgaa

SEQ ID NO: 3598167 - DNA, 25 bp, Homo sapien
caacctcacatgaagacctcaggga

SEQ ID NO: 3598168 - DNA, 25 bp, Homo sapien
ctgtgaatcagagttcctagagtgt

SEQ ID NO: 3598169 - DNA, 25 bp, Homo sapien
tacttagcctgtatgtaagtggttg

SEQ ID NO: 3598170 - DNA, 25 bp, Homo sapien
tgaagccatctgatatccctctttg

SEQ ID NO: 3598171 - DNA, 25 bp, Homo sapien
tgttttaacatttggctaacatctg

SEQ ID NO: 3598172 - DNA, 25 bp, Homo sapien
ttttgccatctccttacttagcctg

SEQ ID NO: 3598173 - DNA, 25 bp, Homo sapien
agaaagaagccagaggtcaccctgc

SEQ ID NO: 3598174 - DNA, 25 bp, Homo sapien
gaaaagtattccgtgtggctcagca

SEQ ID NO: 3598175 - DNA, 25 bp, Homo sapien
gggtctgtcgtaaagcacaagtgtt

SEQ ID NO: 3598176 - DNA, 25 bp, Homo sapien
aagttaggcatgttgttgggttcca

SEQ ID NO: 3598177 - DNA, 25 bp, Homo sapien
tgactcaacatatcacaagggactg

SEQ ID NO: 3598178 - DNA, 25 bp, Homo sapien
taccctgaggctgatcaacttgatt

SEQ ID NO: 3598179 - DNA, 25 bp, Homo sapien
tggtgacaaaacttgaggacagtac

SEQ ID NO: 3598180 - DNA, 25 bp, Homo sapien
tatgccaatgagaacctcagggttg

SEQ ID NO: 3598181 - DNA, 25 bp, Homo sapien
gagaggacatggaagttctgctgga

SEQ ID NO: 3598182 - DNA, 25 bp, Homo sapien
ctggagctgccgaactgagacgcga

SEQ ID NO: 3598183 - DNA, 25 bp, Homo sapien
gaacccacacgcctctgagtctaaa

SEQ ID NO: 3598184 - DNA, 25 bp, Homo sapien
tgccgaactgagacgcgaacccaca

SEQ ID NO: 3598185 - DNA, 25 bp, Homo sapien
ttcctgtgtttccttacttctccat

SEQ ID NO: 3598186 - DNA, 25 bp, Homo sapien
gaaactgctctatgttccttgtcac

SEQ ID NO: 3598187 - DNA, 25 bp, Homo sapien
aaagtgccacccatcccttgaggaa

SEQ ID NO: 3598188 - DNA, 25 bp, Homo sapien
acttctccattagatcctgacaata

SEQ ID NO: 3598189 - DNA, 25 bp, Homo sapien
tctaggaccgtatgttctaattatc

SEQ ID NO: 3598190 - DNA, 25 bp, Homo sapien
taaagctgggattaatctaggaccg

SEQ ID NO: 3598191 - DNA, 25 bp, Homo sapien
cctttgtttgtatccagtggcattt

SEQ ID NO: 3598192 - DNA, 25 bp, Homo sapien
tgaccagaaaagtcaagggactgcc

SEQ ID NO: 3598193 - DNA, 25 bp, Homo sapien
gacaatcggaactagacttgctggg

SEQ ID NO: 3598194 - DNA, 25 bp, Homo sapien
taaaatcactgtccgagcttacgtg

SEQ ID NO: 3598195 - DNA, 25 bp, Homo sapien
tgaaatccaaggtaaagagccaagc

SEQ ID NO: 3598196 - DNA, 25 bp, Homo sapien
gacaagccagagtttacccacaata

SEQ ID NO: 3598197 - DNA, 25 bp, Homo sapien
tttaccatagcagatttcatagccc

SEQ ID NO: 3598198 - DNA, 25 bp, Homo sapien
gtcccatactttgcatttaccatag

SEQ ID NO: 3598199 - DNA, 25 bp, Homo sapien
ttcatagcccatacaaacattaggc

SEQ ID NO: 3598200 - DNA, 25 bp, Homo sapien
gtacttagtcatgcgtagccttata

SEQ ID NO: 3598201 - DNA, 25 bp, Homo sapien
tgttaaatgggacttagttaagcaa

SEQ ID NO: 3598202 - DNA, 25 bp, Homo sapien
tgtgcctgctgaagatcttattctc

SEQ ID NO: 3598203 - DNA, 25 bp, Homo sapien
taagcaaactaacatcatgatatac

SEQ ID NO: 3598204 - DNA, 25 bp, Homo sapien
catgatatactggaaacaggtatct

SEQ ID NO: 3598205 - DNA, 25 bp, Homo sapien
acacagtagaatggccgctttgtct

SEQ ID NO: 3598206 - DNA, 25 bp, Homo sapien
gcacacagtagaatggccgctttgt

SEQ ID NO: 3598207 - DNA, 25 bp, Homo sapien
cgctttgtctctcttgagtgactct

SEQ ID NO: 3598208 - DNA, 25 bp, Homo sapien
tggtgggtgttgggtagcacacagt

SEQ ID NO: 3598209 - DNA, 25 bp, Homo sapien
aaaccaaaatccacagtgccctatc

SEQ ID NO: 3598210 - DNA, 25 bp, Homo sapien
ctgaagacagggggtttccgactcg

SEQ ID NO: 3598211 - DNA, 25 bp, Homo sapien
caaagaacatttgtatatctccggt

SEQ ID NO: 3598212 - DNA, 25 bp, Homo sapien
atctccggtaccaggttcacagtag

SEQ ID NO: 3598213 - DNA, 25 bp, Homo sapien
ggttcacagtaggatctcaaatata

SEQ ID NO: 3598214 - DNA, 25 bp, Homo sapien
gcattgaaagcttacaaagaacatt

SEQ ID NO: 3598215 - DNA, 25 bp, Homo sapien
ttatgtacactaatgtatatacact

SEQ ID NO: 3598216 - DNA, 25 bp, Homo sapien
tttgaatatgtacctagcaatggga

SEQ ID NO: 3598217 - DNA, 25 bp, Homo sapien
taatatcccattatgtacactaatg

SEQ ID NO: 3598218 - DNA, 25 bp, Homo sapien
ttgcaaatcataggatttagttcct

SEQ ID NO: 3598219 - DNA, 25 bp, Homo sapien
agcaccatccattgaagagggatcc

SEQ ID NO: 3598220 - DNA, 25 bp, Homo sapien
tttaaatgtaagatcatattgtctg

SEQ ID NO: 3598221 - DNA, 25 bp, Homo sapien
cactttctatcatcagcgttttata

SEQ ID NO: 3598222 - DNA, 25 bp, Homo sapien
catccattgaagagggatcctttcc

SEQ ID NO: 3598223 - DNA, 25 bp, Homo sapien
ttccagataagatagagtaagtgct

SEQ ID NO: 3598224 - DNA, 25 bp, Homo sapien
tagccatagaacctggtcacaaggc

SEQ ID NO: 3598225 - DNA, 25 bp, Homo sapien
gaatgaccattttaacgtgttgttg

SEQ ID NO: 3598226 - DNA, 25 bp, Homo sapien
gatgcatcccgcctgattataatga

SEQ ID NO: 3598227 - DNA, 25 bp, Homo sapien
gaggatatggaatgcccccaacaca

SEQ ID NO: 3598228 - DNA, 25 bp, Homo sapien
tagaagagaggatatggaatgcccc

SEQ ID NO: 3598229 - DNA, 25 bp, Homo sapien
gagaggatatggaatgcccccaaca

SEQ ID NO: 3598230 - DNA, 25 bp, Homo sapien
gaagagaggatatggaatgccccca

SEQ ID NO: 3598231 - DNA, 25 bp, Homo sapien
ccccaaatatacaatggatcactta

SEQ ID NO: 3598232 - DNA, 25 bp, Homo sapien
tacaatggatcacttaagaagcccc

SEQ ID NO: 3598233 - DNA, 25 bp, Homo sapien
gatcacttaagaagccccatcctct

SEQ ID NO: 3598234 - DNA, 25 bp, Homo sapien
caaatatacaatggatcacttaaga

SEQ ID NO: 3598235 - DNA, 25 bp, Homo sapien
tgccttgtgcggtgcatgtgcatat

SEQ ID NO: 3598236 - DNA, 25 bp, Homo sapien
cagggcattgggcttagtgtattct

SEQ ID NO: 3598237 - DNA, 25 bp, Homo sapien
gggtgtggcatactgttctcctgaa

SEQ ID NO: 3598238 - DNA, 25 bp, Homo sapien
taggtacattatgcacgtgggtgtg

SEQ ID NO: 3598239 - DNA, 25 bp, Homo sapien
ctctggtgccgagggaaaactgcgt

SEQ ID NO: 3598240 - DNA, 25 bp, Homo sapien
tggaagctctgtcggacccgtgcga

SEQ ID NO: 3598241 - DNA, 25 bp, Homo sapien
gtgcttcgctgactgcccgcattgg

SEQ ID NO: 3598242 - DNA, 25 bp, Homo sapien
tatttgacaaattcctcgagctcct

SEQ ID NO: 3598243 - DNA, 25 bp, Homo sapien
tcctggcctcttcgtcatttaagaa

SEQ ID NO: 3598244 - DNA, 25 bp, Homo sapien
gtccttctcggccctctgtaactcc

SEQ ID NO: 3598245 - DNA, 25 bp, Homo sapien
tgtccttctcggccctctgtaactc

SEQ ID NO: 3598246 - DNA, 25 bp, Homo sapien
cttcctggcctcttcgtcatttaag

SEQ ID NO: 3598247 - DNA, 25 bp, Homo sapien
caaacgccggaggaactttcgtcat

SEQ ID NO: 3598248 - DNA, 25 bp, Homo sapien
tcaaacgccggaggaactttcgtca

SEQ ID NO: 3598249 - DNA, 25 bp, Homo sapien
ctgaaatcaaacgccggaggaactt

SEQ ID NO: 3598250 - DNA, 25 bp, Homo sapien
ccttggcgcctcctgttaggaaggc

SEQ ID NO: 3598251 - DNA, 25 bp, Homo sapien
gcatttttcaacctgtacaagacca

SEQ ID NO: 3598252 - DNA, 25 bp, Homo sapien
gagttacacttaagctccttggcgc

SEQ ID NO: 3598253 - DNA, 25 bp, Homo sapien
tacaagaccagtttcacgaacttga

SEQ ID NO: 3598254 - DNA, 25 bp, Homo sapien
gctgtgctctgattagaagcactgg

SEQ ID NO: 3598255 - DNA, 25 bp, Homo sapien
ttgacaaaggagcaatttcacgctg

SEQ ID NO: 3598256 - DNA, 25 bp, Homo sapien
taatgctgcattaggtttctcaaca

SEQ ID NO: 3598257 - DNA, 25 bp, Homo sapien
tgtccaacgagcctttaaagcaggg

SEQ ID NO: 3598258 - DNA, 25 bp, Homo sapien
tcttgtaagcttctgtggcataatg

SEQ ID NO: 3598259 - DNA, 25 bp, Homo sapien
ttgtaagcttctgtggcataatgag

SEQ ID NO: 3598260 - DNA, 25 bp, Homo sapien
ctcttgtaagcttctgtggcataat

SEQ ID NO: 3598261 - DNA, 25 bp, Homo sapien
cttgtaagcttctgtggcataatga

SEQ ID NO: 3598262 - DNA, 25 bp, Homo sapien
gaacttccttctggttagtatcttc

SEQ ID NO: 3598263 - DNA, 25 bp, Homo sapien
tgccctctatcatctcttcttcatt

SEQ ID NO: 3598264 - DNA, 25 bp, Homo sapien
tggttagtatcttcttccctgggca

SEQ ID NO: 3598265 - DNA, 25 bp, Homo sapien
cttcattctgtggaacttccttctg

SEQ ID NO: 3598266 - DNA, 25 bp, Homo sapien
cagcctcttggtcgaggtatagcaa

SEQ ID NO: 3598267 - DNA, 25 bp, Homo sapien
ccagggtggcaatgcagcctcttgg

SEQ ID NO: 3598268 - DNA, 25 bp, Homo sapien
tggtcgaggtatagcaattgtcaat

SEQ ID NO: 3598269 - DNA, 25 bp, Homo sapien
caattgtcaatacccaccatcagca

SEQ ID NO: 3598270 - DNA, 25 bp, Homo sapien
tcttggcacaaggacaatggagagc

SEQ ID NO: 3598271 - DNA, 25 bp, Homo sapien
ggctcctcaaatggcagtggctacc

SEQ ID NO: 3598272 - DNA, 25 bp, Homo sapien
gcgccatgtaatctttgaaacctca

SEQ ID NO: 3598273 - DNA, 25 bp, Homo sapien
ttttgcgccatgtaatctttgaaac

SEQ ID NO: 3598274 - DNA, 25 bp, Homo sapien
tgtaatctttgaaacctcattcttg

SEQ ID NO: 3598275 - DNA, 25 bp, Homo sapien
ttgcgccatgtaatctttgaaacct

SEQ ID NO: 3598276 - DNA, 25 bp, Homo sapien
ctgtggtttccaattccttgtcccg

SEQ ID NO: 3598277 - DNA, 25 bp, Homo sapien
ctcagtggccttggttgcaggtgct

SEQ ID NO: 3598278 - DNA, 25 bp, Homo sapien
ccaagcagcacagctttgtgactgg

SEQ ID NO: 3598279 - DNA, 25 bp, Homo sapien
tgactggcatccaccccttggcttt

SEQ ID NO: 3598280 - DNA, 25 bp, Homo sapien
caagggcgttttggaagtgtactgc

SEQ ID NO: 3598281 - DNA, 25 bp, Homo sapien
catgagagaacattgagtgaatgcc

SEQ ID NO: 3598282 - DNA, 25 bp, Homo sapien
ggattgactgttgcctagccctcag

SEQ ID NO: 3598283 - DNA, 25 bp, Homo sapien
tccttggtggagtgtgagagcttca

SEQ ID NO: 3598284 - DNA, 25 bp, Homo sapien
ttcagcatcagtgggatccatcaga

SEQ ID NO: 3598285 - DNA, 25 bp, Homo sapien
gagagttgtgatctcctgtcactaa

SEQ ID NO: 3598286 - DNA, 25 bp, Homo sapien
tcactaaggatgtgtacattcagca

SEQ ID NO: 3598287 - DNA, 25 bp, Homo sapien
tattggcgctgttgaaacaccctgg

SEQ ID NO: 3598288 - DNA, 25 bp, Homo sapien
gtaactgattatgaggtttgtgaat

SEQ ID NO: 3598289 - DNA, 25 bp, Homo sapien
taactgattatgaggtttgtgaatg

SEQ ID NO: 3598290 - DNA, 25 bp, Homo sapien
ggagtctgtacttaggcccctctga

SEQ ID NO: 3598291 - DNA, 25 bp, Homo sapien
tagtgaagcgctagcactggagtct

SEQ ID NO: 3598292 - DNA, 25 bp, Homo sapien
tcagacacaggctttgacaggttca

SEQ ID NO: 3598293 - DNA, 25 bp, Homo sapien
tcagcagcagttacctaacggatgc

SEQ ID NO: 3598294 - DNA, 25 bp, Homo sapien
cattgccagaagactttgcaagacc

SEQ ID NO: 3598295 - DNA, 25 bp, Homo sapien
gagtggcaaatggaagcaggtgtcc

SEQ ID NO: 3598296 - DNA, 25 bp, Homo sapien
gggaagctgggtgtccttggcagaa

SEQ ID NO: 3598297 - DNA, 25 bp, Homo sapien
ccccacagaggggaagctgggtgtc

SEQ ID NO: 3598298 - DNA, 25 bp, Homo sapien
tgtccttggcagaacaggtgctcac

SEQ ID NO: 3598299 - DNA, 25 bp, Homo sapien
gaagctgggtgtccttggcagaaca

SEQ ID NO: 3598300 - DNA, 25 bp, Homo sapien
ccttggtggccagatcacactgtgc

SEQ ID NO: 3598301 - DNA, 25 bp, Homo sapien
gttgattgctcctctaatggagcag

SEQ ID NO: 3598302 - DNA, 25 bp, Homo sapien
tgctcctctaatggagcaggatgcc

SEQ ID NO: 3598303 - DNA, 25 bp, Homo sapien
cgctgtagcagtaatattgagaagt

SEQ ID NO: 3598304 - DNA, 25 bp, Homo sapien
tgcttacaatgttatgccttcctgt

SEQ ID NO: 3598305 - DNA, 25 bp, Homo sapien
taaaactcagattattcatcgcctc

SEQ ID NO: 3598306 - DNA, 25 bp, Homo sapien
tgaatccgtttcctagtgcccactc

SEQ ID NO: 3598307 - DNA, 25 bp, Homo sapien
ccacatatgctttgtctggaatatc

SEQ ID NO: 3598308 - DNA, 25 bp, Homo sapien
tcatgagaaatattggcccgaagct

SEQ ID NO: 3598309 - DNA, 25 bp, Homo sapien
catagtacccaataagtgcacgccc

SEQ ID NO: 3598310 - DNA, 25 bp, Homo sapien
gaatgagttaaggagaagcccttcc

SEQ ID NO: 3598311 - DNA, 25 bp, Homo sapien
ccagtgtcaagcagggtattttcta

SEQ ID NO: 3598312 - DNA, 25 bp, Homo sapien
gctggcctcccttttgcattgtgtg

SEQ ID NO: 3598313 - DNA, 25 bp, Homo sapien
gtctccaaatagtgcatcagtgtat

SEQ ID NO: 3598314 - DNA, 25 bp, Homo sapien
gatgagtagcgtttttgagattagc

SEQ ID NO: 3598315 - DNA, 25 bp, Homo sapien
gggagtctccaaatagtgcatcagt

SEQ ID NO: 3598316 - DNA, 25 bp, Homo sapien
ctcttccatcactggtgctacgaag

SEQ ID NO: 3598317 - DNA, 25 bp, Homo sapien
ggtgctacgaaggttccctctctga

SEQ ID NO: 3598318 - DNA, 25 bp, Homo sapien
tccatcactggtgctacgaaggttc

SEQ ID NO: 3598319 - DNA, 25 bp, Homo sapien
tcactggtgctacgaaggttccctc

SEQ ID NO: 3598320 - DNA, 25 bp, Homo sapien
gaagttctgtatggaggtgatcaca

SEQ ID NO: 3598321 - DNA, 25 bp, Homo sapien
aggaagttctgtatggaggtgatca

SEQ ID NO: 3598322 - DNA, 25 bp, Homo sapien
gatcacatccgcatgcatcttccat

SEQ ID NO: 3598323 - DNA, 25 bp, Homo sapien
ggaggtgatcacatccgcatgcatc

SEQ ID NO: 3598324 - DNA, 25 bp, Homo sapien
gggttctttgaagaaatggctagaa

SEQ ID NO: 3598325 - DNA, 25 bp, Homo sapien
agaaatggctagaaacacagagaac

SEQ ID NO: 3598326 - DNA, 25 bp, Homo sapien
tactacttcttgggttctttgaaga

SEQ ID NO: 3598327 - DNA, 25 bp, Homo sapien
cacagagaacaaaaggccaaagctt

SEQ ID NO: 3598328 - DNA, 25 bp, Homo sapien
ggcacttaaatagctccctggcttg

SEQ ID NO: 3598329 - DNA, 25 bp, Homo sapien
gagagggtagaaacgcacagttccc

SEQ ID NO: 3598330 - DNA, 25 bp, Homo sapien
gttaccaataacagagcgatgtcgg

SEQ ID NO: 3598331 - DNA, 25 bp, Homo sapien
gatacagacttcactatgggaatcc

SEQ ID NO: 3598332 - DNA, 25 bp, Homo sapien
tacgtggcccatttaggtatcatgt

SEQ ID NO: 3598333 - DNA, 25 bp, Homo sapien
ttattgccatgttgtacgtggccca

SEQ ID NO: 3598334 - DNA, 25 bp, Homo sapien
catgttgtacgtggcccatttaggt

SEQ ID NO: 3598335 - DNA, 25 bp, Homo sapien
gggaatactttattgccatgttgta

SEQ ID NO: 3598336 - DNA, 25 bp, Homo sapien
cctgagaatttcactattctgagta

SEQ ID NO: 3598337 - DNA, 25 bp, Homo sapien
tcactattctgagtatttggtagtt

SEQ ID NO: 3598338 - DNA, 25 bp, Homo sapien
ttccctgagaatttcactattctga

SEQ ID NO: 3598339 - DNA, 25 bp, Homo sapien
aatttcactattctgagtatttggt

SEQ ID NO: 3598340 - DNA, 25 bp, Homo sapien
tggttcctgtagtgctgcagcatcc

SEQ ID NO: 3598341 - DNA, 25 bp, Homo sapien
gaaagaatacttgcaggaagacgta

SEQ ID NO: 3598342 - DNA, 25 bp, Homo sapien
ttacaacacagaattggagtgatca

SEQ ID NO: 3598343 - DNA, 25 bp, Homo sapien
cagaattggagtgatcagaattggg

SEQ ID NO: 3598344 - DNA, 25 bp, Homo sapien
gggaaagaatacttgcaggaagacg

SEQ ID NO: 3598345 - DNA, 25 bp, Homo sapien
tcccattcttcttagtgactctgca

SEQ ID NO: 3598346 - DNA, 25 bp, Homo sapien
tacattccctcccatgcattattgc

SEQ ID NO: 3598347 - DNA, 25 bp, Homo sapien
cttgcatttgaatttagaagaccca

SEQ ID NO: 3598348 - DNA, 25 bp, Homo sapien
catttcttggtgttcctccccttct

SEQ ID NO: 3598349 - DNA, 25 bp, Homo sapien
aagctgaccccctggttcttgtctc

SEQ ID NO: 3598350 - DNA, 25 bp, Homo sapien
gtctccatgaggcttcaccttttca

SEQ ID NO: 3598351 - DNA, 25 bp, Homo sapien
gaagactcccagatccaagctgacc

SEQ ID NO: 3598352 - DNA, 25 bp, Homo sapien
tcctgtataagtttgtctcctctgc

SEQ ID NO: 3598353 - DNA, 25 bp, Homo sapien
ccttggagagcctatctgtgacgtt

SEQ ID NO: 3598354 - DNA, 25 bp, Homo sapien
tatcactggaatgctgaaagtcttc

SEQ ID NO: 3598355 - DNA, 25 bp, Homo sapien
ctagcacaaagagtccttggagcat

SEQ ID NO: 3598356 - DNA, 25 bp, Homo sapien
gctttcactgaagcaagcctcatgg

SEQ ID NO: 3598357 - DNA, 25 bp, Homo sapien
gatgatcgagtcttaactgtgcccc

SEQ ID NO: 3598358 - DNA, 25 bp, Homo sapien
ccccagtgtaacatctatgttctcc

SEQ ID NO: 3598359 - DNA, 25 bp, Homo sapien
tccagggcccatgacggtccatgat

SEQ ID NO: 3598360 - DNA, 25 bp, Homo sapien
tgctgcccccagtgtaacatctatg

SEQ ID NO: 3598361 - DNA, 25 bp, Homo sapien
tgcctgcacacactgggtctgcagt

SEQ ID NO: 3598362 - DNA, 25 bp, Homo sapien
gtgcctgcacacactgggtctgcag

SEQ ID NO: 3598363 - DNA, 25 bp, Homo sapien
gcctgcacacactgggtctgcagtg

SEQ ID NO: 3598364 - DNA, 25 bp, Homo sapien
accgggtcgtctgtcagtgttctga

SEQ ID NO: 3598365 - DNA, 25 bp, Homo sapien
cagtgccaccgggtcgtctgtcagt

SEQ ID NO: 3598366 - DNA, 25 bp, Homo sapien
tcagaggagcagtgccaccgggtcg

SEQ ID NO: 3598367 - DNA, 25 bp, Homo sapien
ggtcgtctgtcagtgttctgagcaa

SEQ ID NO: 3598368 - DNA, 25 bp, Homo sapien
aatattaactgtcatccttccatac

SEQ ID NO: 3598369 - DNA, 25 bp, Homo sapien
ctgacaaaatattaactgtcatcct

SEQ ID NO: 3598370 - DNA, 25 bp, Homo sapien
gtgagtgtttaaatttaccaggaca

SEQ ID NO: 3598371 - DNA, 25 bp, Homo sapien
caggacaacgctgggtaactgacaa

SEQ ID NO: 3598372 - DNA, 25 bp, Homo sapien
gcaaggtatccatgacaaacacaca

SEQ ID NO: 3598373 - DNA, 25 bp, Homo sapien
aacacacatcaggatggccccggtg

SEQ ID NO: 3598374 - DNA, 25 bp, Homo sapien
cttttggtaagaatggcccttggca

SEQ ID NO: 3598375 - DNA, 25 bp, Homo sapien
tattcttgtgtttccatgctttggt

SEQ ID NO: 3598376 - DNA, 25 bp, Homo sapien
tcctgagtggcggaatgttagttcc

SEQ ID NO: 3598377 - DNA, 25 bp, Homo sapien
tattgccagtgcagatgcgaagagc

SEQ ID NO: 3598378 - DNA, 25 bp, Homo sapien
tgttagttcccagttgatgacagtc

SEQ ID NO: 3598379 - DNA, 25 bp, Homo sapien
tgcgaagagcctgctggcatcactg

SEQ ID NO: 3598380 - DNA, 25 bp, Homo sapien
gaagggacggcatcctattttagga

SEQ ID NO: 3598381 - DNA, 25 bp, Homo sapien
caaggatcaccataatgtgaggaga

SEQ ID NO: 3598382 - DNA, 25 bp, Homo sapien
tgtaatgttgctagacaacagcccc

SEQ ID NO: 3598383 - DNA, 25 bp, Homo sapien
gttatctgtgaatctgcaaggaggg

SEQ ID NO: 3598384 - DNA, 25 bp, Homo sapien
gagtcatgggtgttgccaggttttt

SEQ ID NO: 3598385 - DNA, 25 bp, Homo sapien
gggccagtgatggtccagtagaggg

SEQ ID NO: 3598386 - DNA, 25 bp, Homo sapien
gtaggcagcatacacaggaaaggac

SEQ ID NO: 3598387 - DNA, 25 bp, Homo sapien
aatagagaggatacattggtcactg

SEQ ID NO: 3598388 - DNA, 25 bp, Homo sapien
aaatgaggtaggctgagattccagg

SEQ ID NO: 3598389 - DNA, 25 bp, Homo sapien
aaaatgaggtaggctgagattccag

SEQ ID NO: 3598390 - DNA, 25 bp, Homo sapien
caaaatgaggtaggctgagattcca

SEQ ID NO: 3598391 - DNA, 25 bp, Homo sapien
gctctgccctgttggtacagtcttc

SEQ ID NO: 3598392 - DNA, 25 bp, Homo sapien
tggtacagtcttctagtgactccat

SEQ ID NO: 3598393 - DNA, 25 bp, Homo sapien
cagctagaggttgcgatggctctgc

SEQ ID NO: 3598394 - DNA, 25 bp, Homo sapien
tacagctagaggttgcgatggctct

SEQ ID NO: 3598395 - DNA, 25 bp, Homo sapien
tacttggctggtgagtttggaggga

SEQ ID NO: 3598396 - DNA, 25 bp, Homo sapien
tttaggtacttggctggtgagtttg

SEQ ID NO: 3598397 - DNA, 25 bp, Homo sapien
tttggagggagagttggttcttgga

SEQ ID NO: 3598398 - DNA, 25 bp, Homo sapien
tgagtttggagggagagttggttct

SEQ ID NO: 3598399 - DNA, 25 bp, Homo sapien
ggagacactgacagtttatagacat

SEQ ID NO: 3598400 - DNA, 25 bp, Homo sapien
gagtaaaagtccgggaatggagaca

SEQ ID NO: 3598401 - DNA, 25 bp, Homo sapien
tttatagacatggtgtgatgctttg

SEQ ID NO: 3598402 - DNA, 25 bp, Homo sapien
tgctttgcagctatttggatccatg

SEQ ID NO: 3598403 - DNA, 25 bp, Homo sapien
ggatttccaatagccccagagctca

SEQ ID NO: 3598404 - DNA, 25 bp, Homo sapien
ctggttgtgactagaggccatgact

SEQ ID NO: 3598405 - DNA, 25 bp, Homo sapien
gagcagggagcttgtaatacgatag

SEQ ID NO: 3598406 - DNA, 25 bp, Homo sapien
ccagagctcagaggcggacatgaga

SEQ ID NO: 3598407 - DNA, 25 bp, Homo sapien
aaagctttggacttatcttcatatc

SEQ ID NO: 3598408 - DNA, 25 bp, Homo sapien
aatgggctctgagatgcgggtctta

SEQ ID NO: 3598409 - DNA, 25 bp, Homo sapien
ggtcttatcaagtgtaaagctttgg

SEQ ID NO: 3598410 - DNA, 25 bp, Homo sapien
tcagcaaaggatcggacaggacagt

SEQ ID NO: 3598411 - DNA, 25 bp, Homo sapien
ctgaggtaaagttgagaggcggcat

SEQ ID NO: 3598412 - DNA, 25 bp, Homo sapien
gttgagaggcggcataggcagaggc

SEQ ID NO: 3598413 - DNA, 25 bp, Homo sapien
gtaaagttgagaggcggcataggca

SEQ ID NO: 3598414 - DNA, 25 bp, Homo sapien
ttgagaggcggcataggcagaggct

SEQ ID NO: 3598415 - DNA, 25 bp, Homo sapien
tctttaggaaagagtgaggtcagag

SEQ ID NO: 3598416 - DNA, 25 bp, Homo sapien
tttccatggttctgtctcggtagcc

SEQ ID NO: 3598417 - DNA, 25 bp, Homo sapien
taggtgttccagtgaaagtctgttg

SEQ ID NO: 3598418 - DNA, 25 bp, Homo sapien
tgaattcagaatagttggtgcaagg

SEQ ID NO: 3598419 - DNA, 25 bp, Homo sapien
ctttgttgaatcttcagttttcctc

SEQ ID NO: 3598420 - DNA, 25 bp, Homo sapien
ctggtggctttgttgaatcttcagt

SEQ ID NO: 3598421 - DNA, 25 bp, Homo sapien
ggctttgttgaatcttcagttttcc

SEQ ID NO: 3598422 - DNA, 25 bp, Homo sapien
ggtggctttgttgaatcttcagttt

SEQ ID NO: 3598423 - DNA, 25 bp, Homo sapien
attattgctggattgctctctgagg

SEQ ID NO: 3598424 - DNA, 25 bp, Homo sapien
tgtttggtggggaagcttccactac

SEQ ID NO: 3598425 - DNA, 25 bp, Homo sapien
tgctgtgatgctgggtaattgccat

SEQ ID NO: 3598426 - DNA, 25 bp, Homo sapien
tctctgaggtactggttgccaagga

SEQ ID NO: 3598427 - DNA, 25 bp, Homo sapien
taagaagcagacagaattctccggc

SEQ ID NO: 3598428 - DNA, 25 bp, Homo sapien
gcaagggtggttgtttcagctctcc

SEQ ID NO: 3598429 - DNA, 25 bp, Homo sapien
tatgatccttagacttctgactccc

SEQ ID NO: 3598430 - DNA, 25 bp, Homo sapien
ggatctccacgtagcctttggcaag

SEQ ID NO: 3598431 - DNA, 25 bp, Homo sapien
catagccaattggaggagtgcagta

SEQ ID NO: 3598432 - DNA, 25 bp, Homo sapien
cagtaggacacccaggttccagatg

SEQ ID NO: 3598433 - DNA, 25 bp, Homo sapien
acagagcatagccaattggaggagt

SEQ ID NO: 3598434 - DNA, 25 bp, Homo sapien
ttggaggagtgcagtaggacaccca

SEQ ID NO: 3598435 - DNA, 25 bp, Homo sapien
ttctggatgtggcataactactagg

SEQ ID NO: 3598436 - DNA, 25 bp, Homo sapien
taaggacacatctggagatcaatga

SEQ ID NO: 3598437 - DNA, 25 bp, Homo sapien
ggagcataggcttttataaggacac

SEQ ID NO: 3598438 - DNA, 25 bp, Homo sapien
tcctgtccaaatgctcttattctgg

SEQ ID NO: 3598439 - DNA, 25 bp, Homo sapien
atcaggaggagcatagagaacatga

SEQ ID NO: 3598440 - DNA, 25 bp, Homo sapien
ggagcatagagaacatgacacaggt

SEQ ID NO: 3598441 - DNA, 25 bp, Homo sapien
caggaggagcatagagaacatgaca

SEQ ID NO: 3598442 - DNA, 25 bp, Homo sapien
gaggagcatagagaacatgacacag

SEQ ID NO: 3598443 - DNA, 25 bp, Homo sapien
cataacttgaggtaaaggtcacttc

SEQ ID NO: 3598444 - DNA, 25 bp, Homo sapien
cttgaggtaaaggtcacttcaaggg

SEQ ID NO: 3598445 - DNA, 25 bp, Homo sapien
ggcataacttgaggtaaaggtcact

SEQ ID NO: 3598446 - DNA, 25 bp, Homo sapien
taacttgaggtaaaggtcacttcaa

SEQ ID NO: 3598447 - DNA, 25 bp, Homo sapien
ttcctgtgttcaccatcctgtcccc

SEQ ID NO: 3598448 - DNA, 25 bp, Homo sapien
gtggtttctcatgttctacttcctt

SEQ ID NO: 3598449 - DNA, 25 bp, Homo sapien
ccctccccgtactgctgtggtttct

SEQ ID NO: 3598450 - DNA, 25 bp, Homo sapien
tgtgttcaccatcctgtcccccctc

SEQ ID NO: 3598451 - DNA, 25 bp, Homo sapien
tgggaaatggcaatttccagtggcc

SEQ ID NO: 3598452 - DNA, 25 bp, Homo sapien
gggaaatggcaatttccagtggcca

SEQ ID NO: 3598453 - DNA, 25 bp, Homo sapien
ggaaatggcaatttccagtggccat

SEQ ID NO: 3598454 - DNA, 25 bp, Homo sapien
gggccttgtctgagttaggactcag

SEQ ID NO: 3598455 - DNA, 25 bp, Homo sapien
gccttgtctgagttaggactcagct

SEQ ID NO: 3598456 - DNA, 25 bp, Homo sapien
tggttatgtttcccgttccattctc

SEQ ID NO: 3598457 - DNA, 25 bp, Homo sapien
tatgtttcccgttccattctccatt

SEQ ID NO: 3598458 - DNA, 25 bp, Homo sapien
atggaatgctttgagtaggatatac

SEQ ID NO: 3598459 - DNA, 25 bp, Homo sapien
catggaatgctttgagtaggatata

SEQ ID NO: 3598460 - DNA, 25 bp, Homo sapien
tggtccctggagttcgcctatggta

SEQ ID NO: 3598461 - DNA, 25 bp, Homo sapien
cctggagttcgcctatggtaagcaa

SEQ ID NO: 3598462 - DNA, 25 bp, Homo sapien
tcgcctatggtaagcaaacttgttt

SEQ ID NO: 3598463 - DNA, 25 bp, Homo sapien
tggagttcgcctatggtaagcaaac

SEQ ID NO: 3598464 - DNA, 25 bp, Homo sapien
cttaaatctggacccctgacctaag

SEQ ID NO: 3598465 - DNA, 25 bp, Homo sapien
tgtgacagcagtatgagacttctcc

SEQ ID NO: 3598466 - DNA, 25 bp, Homo sapien
cctaaggagtccagaattaaggagc

SEQ ID NO: 3598467 - DNA, 25 bp, Homo sapien
gacccctgacctaaggagtccagaa

SEQ ID NO: 3598468 - DNA, 25 bp, Homo sapien
tgttcaggatgtctgatacactaga

SEQ ID NO: 3598469 - DNA, 25 bp, Homo sapien
caaaacgtggtgctgagtaagaact

SEQ ID NO: 3598470 - DNA, 25 bp, Homo sapien
taagaactggacattttgttcagga

SEQ ID NO: 3598471 - DNA, 25 bp, Homo sapien
tgtctgatacactagaatgccaagt

SEQ ID NO: 3598472 - DNA, 25 bp, Homo sapien
gttctgtgttaacgcagctcttgga

SEQ ID NO: 3598473 - DNA, 25 bp, Homo sapien
ctaccatactcgttggccaggattt

SEQ ID NO: 3598474 - DNA, 25 bp, Homo sapien
aggatttactggctgcggctgttct

SEQ ID NO: 3598475 - DNA, 25 bp, Homo sapien
tgcggctgttctgtgttaacgcagc

SEQ ID NO: 3598476 - DNA, 25 bp, Homo sapien
gagcccatccatcccatgtcagcac

SEQ ID NO: 3598477 - DNA, 25 bp, Homo sapien
ggagcccatccatcccatgtcagca

SEQ ID NO: 3598478 - DNA, 25 bp, Homo sapien
gcccatccatcccatgtcagcacac

SEQ ID NO: 3598479 - DNA, 25 bp, Homo sapien
aggagcccatccatcccatgtcagc

SEQ ID NO: 3598480 - DNA, 25 bp, Homo sapien
ttgtccaccagctgctgtggctgct

SEQ ID NO: 3598481 - DNA, 25 bp, Homo sapien
cttgtccaccagctgctgtggctgc

SEQ ID NO: 3598482 - DNA, 25 bp, Homo sapien
tgtccaccagctgctgtggctgctg

SEQ ID NO: 3598483 - DNA, 25 bp, Homo sapien
gtccaccagctgctgtggctgctgt

SEQ ID NO: 3598484 - DNA, 25 bp, Homo sapien
ctgcttaacttctgagatcaggtgt

SEQ ID NO: 3598485 - DNA, 25 bp, Homo sapien
acttctgagatcaggtgtgttcagg

SEQ ID NO: 3598486 - DNA, 25 bp, Homo sapien
tccaagtactagacaggcccaaccc

SEQ ID NO: 3598487 - DNA, 25 bp, Homo sapien
tgttcagggtggtatggccttagac

SEQ ID NO: 3598488 - DNA, 25 bp, Homo sapien
gttccccatggattgacagcaggcc

SEQ ID NO: 3598489 - DNA, 25 bp, Homo sapien
gacagcaggccccttgcttgttggc

SEQ ID NO: 3598490 - DNA, 25 bp, Homo sapien
gaactgtgccactcagttgtgttga

SEQ ID NO: 3598491 - DNA, 25 bp, Homo sapien
gggatactggcaacatgccagaact

SEQ ID NO: 3598492 - DNA, 25 bp, Homo sapien
gcagcaaagtgggaaaggcacactt

SEQ ID NO: 3598493 - DNA, 25 bp, Homo sapien
cttgcaaatatgtcttaatgcccat

SEQ ID NO: 3598494 - DNA, 25 bp, Homo sapien
tgggaaaggcacacttgcaaatatg

SEQ ID NO: 3598495 - DNA, 25 bp, Homo sapien
tttggcagcaaagtgggaaaggcac

SEQ ID NO: 3598496 - DNA, 25 bp, Homo sapien
ctcttctggagagtcttttgcaaca

SEQ ID NO: 3598497 - DNA, 25 bp, Homo sapien
tctcttctggagagtcttttgcaac

SEQ ID NO: 3598498 - DNA, 25 bp, Homo sapien
tcttctggagagtcttttgcaacat

SEQ ID NO: 3598499 - DNA, 25 bp, Homo sapien
ttctcttctggagagtcttttgcaa

SEQ ID NO: 3598500 - DNA, 25 bp, Homo sapien
tcagcagtctgccacaagcaactgg

SEQ ID NO: 3598501 - DNA, 25 bp, Homo sapien
tatttctgaggtaggtctgcacaac

SEQ ID NO: 3598502 - DNA, 25 bp, Homo sapien
cagaggctcctgatgtttcatgaga

SEQ ID NO: 3598503 - DNA, 25 bp, Homo sapien
caagcaactggtccctatttctgag

SEQ ID NO: 3598504 - DNA, 25 bp, Homo sapien
tgccagacgttttggatccataggt

SEQ ID NO: 3598505 - DNA, 25 bp, Homo sapien
tacataatgtgccagtgttctgact

SEQ ID NO: 3598506 - DNA, 25 bp, Homo sapien
cctgtagtgtagatgaactggcaac

SEQ ID NO: 3598507 - DNA, 25 bp, Homo sapien
gaaggctattttgccagatctaaaa

SEQ ID NO: 3598508 - DNA, 25 bp, Homo sapien
ataaagagccttccgaccagcatgg

SEQ ID NO: 3598509 - DNA, 25 bp, Homo sapien
gcttctcacgggatcaggaatcagg

SEQ ID NO: 3598510 - DNA, 25 bp, Homo sapien
ccagcatggctgtctgtgtagcttc

SEQ ID NO: 3598511 - DNA, 25 bp, Homo sapien
taattgtcgatcctcataaagagcc

SEQ ID NO: 3598512 - DNA, 25 bp, Homo sapien
tgtttttattgttgatgtcgatgat

SEQ ID NO: 3598513 - DNA, 25 bp, Homo sapien
ccagtcccataccaggaacaataaa

SEQ ID NO: 3598514 - DNA, 25 bp, Homo sapien
gtcccagtcccataccaggaacaat

SEQ ID NO: 3598515 - DNA, 25 bp, Homo sapien
gtttttattgttgatgtcgatgatg

SEQ ID NO: 3598516 - DNA, 25 bp, Homo sapien
taaatcacagccactgtgatagagg

SEQ ID NO: 3598517 - DNA, 25 bp, Homo sapien
ctaaatcacagccactgtgatagag

SEQ ID NO: 3598518 - DNA, 25 bp, Homo sapien
aatagtcaccaagcccttgccaggg

SEQ ID NO: 3598519 - DNA, 25 bp, Homo sapien
gactgcaaaggccaccaaacttgga

SEQ ID NO: 3598520 - DNA, 25 bp, Homo sapien
catttcagagcgttgtccagggaga

SEQ ID NO: 3598521 - DNA, 25 bp, Homo sapien
cagtgcaattggctgacttcacatt

SEQ ID NO: 3598522 - DNA, 25 bp, Homo sapien
gaggtttcatgcttctgttcacaaa

SEQ ID NO: 3598523 - DNA, 25 bp, Homo sapien
ttaatgaggtttcatgcttctgttc

SEQ ID NO: 3598524 - DNA, 25 bp, Homo sapien
ggtttcatgcttctgttcacaaatg

SEQ ID NO: 3598525 - DNA, 25 bp, Homo sapien
aatgaggtttcatgcttctgttcac

SEQ ID NO: 3598526 - DNA, 25 bp, Homo sapien
agagttgtcagtgtaaagtgtttcc

SEQ ID NO: 3598527 - DNA, 25 bp, Homo sapien
cagagttgtcagtgtaaagtgtttc

SEQ ID NO: 3598528 - DNA, 25 bp, Homo sapien
ctcttcctttgggaagcttcctgga

SEQ ID NO: 3598529 - DNA, 25 bp, Homo sapien
gttcatttggcccttgcaagcttgg

SEQ ID NO: 3598530 - DNA, 25 bp, Homo sapien
ccttgcaagcttggcactcttcctt

SEQ ID NO: 3598531 - DNA, 25 bp, Homo sapien
tggcccttgcaagcttggcactctt

SEQ ID NO: 3598532 - DNA, 25 bp, Homo sapien
cttgatgttgttgagctgatcctgt

SEQ ID NO: 3598533 - DNA, 25 bp, Homo sapien
tgcttctgtgggttggtcgctgaac

SEQ ID NO: 3598534 - DNA, 25 bp, Homo sapien
ctgcttctgtgggttggtcgctgaa

SEQ ID NO: 3598535 - DNA, 25 bp, Homo sapien
gttgagctgatcctgttgtgtctgc

SEQ ID NO: 3598536 - DNA, 25 bp, Homo sapien
aagggactttccctcgatgggtcat

SEQ ID NO: 3598537 - DNA, 25 bp, Homo sapien
aggcctgtcacaatgttgccaatag

SEQ ID NO: 3598538 - DNA, 25 bp, Homo sapien
tcacaatgttgccaatagagataca

SEQ ID NO: 3598539 - DNA, 25 bp, Homo sapien
ctgtcacaatgttgccaatagagat

SEQ ID NO: 3598540 - DNA, 25 bp, Homo sapien
atagagatacatagcttttcttcat

SEQ ID NO: 3598541 - DNA, 25 bp, Homo sapien
ctgtgtcactgagggcaaccctgtt

SEQ ID NO: 3598542 - DNA, 25 bp, Homo sapien
gctgtgtcactgagggcaaccctgt

SEQ ID NO: 3598543 - DNA, 25 bp, Homo sapien
aaaaaatcttggctcagataatgct

SEQ ID NO: 3598544 - DNA, 25 bp, Homo sapien
aaatcttggctcagataatgctgtg

SEQ ID NO: 3598545 - DNA, 25 bp, Homo sapien
tttatttcgccatttgtacttgtca

SEQ ID NO: 3598546 - DNA, 25 bp, Homo sapien
ttatttcgccatttgtacttgtcat

SEQ ID NO: 3598547 - DNA, 25 bp, Homo sapien
gtttatttcgccatttgtacttgtc

SEQ ID NO: 3598548 - DNA, 25 bp, Homo sapien
ggtttgtctgatttggatgactgac

SEQ ID NO: 3598549 - DNA, 25 bp, Homo sapien
agggaatggataaaccttccttctg

SEQ ID NO: 3598550 - DNA, 25 bp, Homo sapien
ggatttgacaagtgctaaacagccg

SEQ ID NO: 3598551 - DNA, 25 bp, Homo sapien
tatagctcaggccaaatcggctggg

SEQ ID NO: 3598552 - DNA, 25 bp, Homo sapien
gatagtgatactactgggtgctgac

SEQ ID NO: 3598553 - DNA, 25 bp, Homo sapien
gcagttccagcttagaatccagagc

SEQ ID NO: 3598554 - DNA, 25 bp, Homo sapien
catggcagagctaataggtggtttc

SEQ ID NO: 3598555 - DNA, 25 bp, Homo sapien
agaggacatacttgaactgagccag

SEQ ID NO: 3598556 - DNA, 25 bp, Homo sapien
ttcctgatggtgagcaatgcccact

SEQ ID NO: 3598557 - DNA, 25 bp, Homo sapien
atctgccattctgccttctccaact

SEQ ID NO: 3598558 - DNA, 25 bp, Homo sapien
tctgctgtttcctgatggtgagcaa

SEQ ID NO: 3598559 - DNA, 25 bp, Homo sapien
ctgtttcctgatggtgagcaatgcc

SEQ ID NO: 3598560 - DNA, 25 bp, Homo sapien
aatgctgtgcagatttaggtctccc

SEQ ID NO: 3598561 - DNA, 25 bp, Homo sapien
gaacactcaataggcactaatcgaa

SEQ ID NO: 3598562 - DNA, 25 bp, Homo sapien
gctattaatttgcaggaggcctaga

SEQ ID NO: 3598563 - DNA, 25 bp, Homo sapien
gaccatttggccctgcctttgaagc

SEQ ID NO: 3598564 - DNA, 25 bp, Homo sapien
ggcctttcctgatataggcctgacc

SEQ ID NO: 3598565 - DNA, 25 bp, Homo sapien
cactgtaactgcaggaaccagacat

SEQ ID NO: 3598566 - DNA, 25 bp, Homo sapien
tgatataggcctgacccagatccct

SEQ ID NO: 3598567 - DNA, 25 bp, Homo sapien
gtgtgggtagtgatgggctgatcag

SEQ ID NO: 3598568 - DNA, 25 bp, Homo sapien
ttgtctggatatttgcacttgttgt

SEQ ID NO: 3598569 - DNA, 25 bp, Homo sapien
cttgtctggatatttgcacttgttg

SEQ ID NO: 3598570 - DNA, 25 bp, Homo sapien
tgtctggatatttgcacttgttgtt

SEQ ID NO: 3598571 - DNA, 25 bp, Homo sapien
cttctgttccaactactgaagtcat

SEQ ID NO: 3598572 - DNA, 25 bp, Homo sapien
ctctaagtgctgctaagaagttgaa

SEQ ID NO: 3598573 - DNA, 25 bp, Homo sapien
gatggacagcccaaagatgtttgca

SEQ ID NO: 3598574 - DNA, 25 bp, Homo sapien
ggccattcggatggacagcccaaag

SEQ ID NO: 3598575 - DNA, 25 bp, Homo sapien
gttgaatatgaagataactgttcca

SEQ ID NO: 3598576 - DNA, 25 bp, Homo sapien
aatgaaaatgagtctaagtactgag

SEQ ID NO: 3598577 - DNA, 25 bp, Homo sapien
ctgttaatgaaaatgagtctaagta

SEQ ID NO: 3598578 - DNA, 25 bp, Homo sapien
tgttaatgaaaatgagtctaagtac

SEQ ID NO: 3598579 - DNA, 25 bp, Homo sapien
ttaatgaaaatgagtctaagtactg

SEQ ID NO: 3598580 - DNA, 25 bp, Homo sapien
ataattctaccaaccgcattttccg

SEQ ID NO: 3598581 - DNA, 25 bp, Homo sapien
taccaaccgcattttccgtgatttg

SEQ ID NO: 3598582 - DNA, 25 bp, Homo sapien
ttctaccaaccgcattttccgtgat

SEQ ID NO: 3598583 - DNA, 25 bp, Homo sapien
accgcattttccgtgatttgcttca

SEQ ID NO: 3598584 - DNA, 25 bp, Homo sapien
ttatgtctccacgtcccttacacag

SEQ ID NO: 3598585 - DNA, 25 bp, Homo sapien
ttacacagtccgtgatttttatgga

SEQ ID NO: 3598586 - DNA, 25 bp, Homo sapien
cacgtcccttacacagtccgtgatt

SEQ ID NO: 3598587 - DNA, 25 bp, Homo sapien
acacagtccgtgatttttatggagt

SEQ ID NO: 3598588 - DNA, 25 bp, Homo sapien
ccggcatttgaattgtagttgagaa

SEQ ID NO: 3598589 - DNA, 25 bp, Homo sapien
gtctctgcgatccaaaggaatgaat

SEQ ID NO: 3598590 - DNA, 25 bp, Homo sapien
aggaatgaatcataaatggaggcat

SEQ ID NO: 3598591 - DNA, 25 bp, Homo sapien
gaactgatgagggcaaaagcagtct

SEQ ID NO: 3598592 - DNA, 25 bp, Homo sapien
tataaggacatttcttaattgagtt

SEQ ID NO: 3598593 - DNA, 25 bp, Homo sapien
ccaacagtataaggacatttcttaa

SEQ ID NO: 3598594 - DNA, 25 bp, Homo sapien
cagtataaggacatttcttaattga

SEQ ID NO: 3598595 - DNA, 25 bp, Homo sapien
caacagtataaggacatttcttaat

SEQ ID NO: 3598596 - DNA, 25 bp, Homo sapien
gcgtcaggttttgtagaggcacaca

SEQ ID NO: 3598597 - DNA, 25 bp, Homo sapien
gaatgagtagcctctatactaatag

SEQ ID NO: 3598598 - DNA, 25 bp, Homo sapien
caaaagcaagtacgcagaatatgga

SEQ ID NO: 3598599 - DNA, 25 bp, Homo sapien
tggtcacacctgactgcaggagagg

SEQ ID NO: 3598600 - DNA, 25 bp, Homo sapien
ggacttccagtacaaacatggtagg

SEQ ID NO: 3598601 - DNA, 25 bp, Homo sapien
caggcctccttaaatgctgttggca

SEQ ID NO: 3598602 - DNA, 25 bp, Homo sapien
ggtaggttagctcagattccattcc

SEQ ID NO: 3598603 - DNA, 25 bp, Homo sapien
tccttaaatgctgttggcaggactt

SEQ ID NO: 3598604 - DNA, 25 bp, Homo sapien
aataaggtgctgatgtggtggtcac

SEQ ID NO: 3598605 - DNA, 25 bp, Homo sapien
taaggtgctgatgtggtggtcacca

SEQ ID NO: 3598606 - DNA, 25 bp, Homo sapien
tgaataaggtgctgatgtggtggtc

SEQ ID NO: 3598607 - DNA, 25 bp, Homo sapien
ctgaataaggtgctgatgtggtggt

SEQ ID NO: 3598608 - DNA, 25 bp, Homo sapien
aacagctccccaaagtctcgactca

SEQ ID NO: 3598609 - DNA, 25 bp, Homo sapien
ccaacagctccccaaagtctcgact

SEQ ID NO: 3598610 - DNA, 25 bp, Homo sapien
ttcccaacagctccccaaagtctcg

SEQ ID NO: 3598611 - DNA, 25 bp, Homo sapien
cagctccccaaagtctcgactcatt

SEQ ID NO: 3598612 - DNA, 25 bp, Homo sapien
gggcacgatgatgcaaggggtgggc

SEQ ID NO: 3598613 - DNA, 25 bp, Homo sapien
ccagggcacgatgatgcaaggggtg

SEQ ID NO: 3598614 - DNA, 25 bp, Homo sapien
atccagggcacgatgatgcaagggg

SEQ ID NO: 3598615 - DNA, 25 bp, Homo sapien
gcacgatgatgcaaggggtgggctt

SEQ ID NO: 3598616 - DNA, 25 bp, Homo sapien
tgagaagtccacctcttgtgttgca

SEQ ID NO: 3598617 - DNA, 25 bp, Homo sapien
agtctgagaagtccacctcttgtgt

SEQ ID NO: 3598618 - DNA, 25 bp, Homo sapien
tctgagaagtccacctcttgtgttg

SEQ ID NO: 3598619 - DNA, 25 bp, Homo sapien
gagaagtccacctcttgtgttgcag

SEQ ID NO: 3598620 - DNA, 25 bp, Homo sapien
atggaaacacaacaccacagaactt

SEQ ID NO: 3598621 - DNA, 25 bp, Homo sapien
gcagttctaagaggtacgtttataa

SEQ ID NO: 3598622 - DNA, 25 bp, Homo sapien
cacagaacttacaggatgcagcaaa

SEQ ID NO: 3598623 - DNA, 25 bp, Homo sapien
cagcctaatgttacacctcgtgaaa

SEQ ID NO: 3598624 - DNA, 25 bp, Homo sapien
ccattgttacaggatgtcatattct

SEQ ID NO: 3598625 - DNA, 25 bp, Homo sapien
cactcgccattgttacaggatgtca

SEQ ID NO: 3598626 - DNA, 25 bp, Homo sapien
tcattcactcgccattgttacagga

SEQ ID NO: 3598627 - DNA, 25 bp, Homo sapien
ggaaatcattcactcgccattgtta

SEQ ID NO: 3598628 - DNA, 25 bp, Homo sapien
tagcactgaagtccccatttccttg

SEQ ID NO: 3598629 - DNA, 25 bp, Homo sapien
agttccttgaagttgtagcactgaa

SEQ ID NO: 3598630 - DNA, 25 bp, Homo sapien
ccaggctgggctcttatttggaggc

SEQ ID NO: 3598631 - DNA, 25 bp, Homo sapien
ggctgtcagccaaaggctgttccca

SEQ ID NO: 3598632 - DNA, 25 bp, Homo sapien
ctggcgagggccttttgcaaacggt

SEQ ID NO: 3598633 - DNA, 25 bp, Homo sapien
aatatgagcgggatcactgcagcgg

SEQ ID NO: 3598634 - DNA, 25 bp, Homo sapien
aacgcctcgtcgttgtcctcttcgt

SEQ ID NO: 3598635 - DNA, 25 bp, Homo sapien
acgcaaaggaaacccggctggagag

SEQ ID NO: 3598636 - DNA, 25 bp, Homo sapien
caagcacccttgagaaagatcacaa

SEQ ID NO: 3598637 - DNA, 25 bp, Homo sapien
acaactgccagcagtctttgcacct

SEQ ID NO: 3598638 - DNA, 25 bp, Homo sapien
cctgtgattaatgttgtagtctcct

SEQ ID NO: 3598639 - DNA, 25 bp, Homo sapien
tttgcacctccatatggatcagcct

SEQ ID NO: 3598640 - DNA, 25 bp, Homo sapien
ttgtagacagagaaattcgcatctg

SEQ ID NO: 3598641 - DNA, 25 bp, Homo sapien
gaagttgaggcaaggaaaggtccag

SEQ ID NO: 3598642 - DNA, 25 bp, Homo sapien
aggcaaggaaaggtccaggttctgt

SEQ ID NO: 3598643 - DNA, 25 bp, Homo sapien
aattcgcatctgacagcaggatttg

SEQ ID NO: 3598644 - DNA, 25 bp, Homo sapien
tattcttagctgtacggtggcccat

SEQ ID NO: 3598645 - DNA, 25 bp, Homo sapien
aagaatacccgtgaaagccagagca

SEQ ID NO: 3598646 - DNA, 25 bp, Homo sapien
ataagaatacccgtgaaagccagag

SEQ ID NO: 3598647 - DNA, 25 bp, Homo sapien
acctttgcccaagcatctattctta

SEQ ID NO: 3598648 - DNA, 25 bp, Homo sapien
tataacattttccagttatgggctg

SEQ ID NO: 3598649 - DNA, 25 bp, Homo sapien
caagcttggccattcgactttctcc

SEQ ID NO: 3598650 - DNA, 25 bp, Homo sapien
ttttccagttatgggctgctccttt

SEQ ID NO: 3598651 - DNA, 25 bp, Homo sapien
cctgaaagagcacagccattgacat

SEQ ID NO: 3598652 - DNA, 25 bp, Homo sapien
gcatggtgcagtaattaggtctgcc

SEQ ID NO: 3598653 - DNA, 25 bp, Homo sapien
tagctgtgtgataaagggcaccagc

SEQ ID NO: 3598654 - DNA, 25 bp, Homo sapien
tgggccaggagcgttgttagctgtg

SEQ ID NO: 3598655 - DNA, 25 bp, Homo sapien
tctgccactgttagaacttcctctg

SEQ ID NO: 3598656 - DNA, 25 bp, Homo sapien
ggtctcaggctgcttaggctcaaaa

SEQ ID NO: 3598657 - DNA, 25 bp, Homo sapien
tcaggctgcttaggctcaaaagcct

SEQ ID NO: 3598658 - DNA, 25 bp, Homo sapien
cttattgagaccttcaagggtctca

SEQ ID NO: 3598659 - DNA, 25 bp, Homo sapien
tgcttaggctcaaaagcctttggac

SEQ ID NO: 3598660 - DNA, 25 bp, Homo sapien
ggactataaccatcctcacatgagg

SEQ ID NO: 3598661 - DNA, 25 bp, Homo sapien
tcacatgaggctggaacaagaactg

SEQ ID NO: 3598662 - DNA, 25 bp, Homo sapien
tggaaacgaggcagcatatttgctt

SEQ ID NO: 3598663 - DNA, 25 bp, Homo sapien
gcttggctccacattgatccttgga

SEQ ID NO: 3598664 - DNA, 25 bp, Homo sapien
ggagggttacagcttcgttggtatc

SEQ ID NO: 3598665 - DNA, 25 bp, Homo sapien
tcgttggtatcctctttagattagt

SEQ ID NO: 3598666 - DNA, 25 bp, Homo sapien
ctttagattagttttatcctcagtc

SEQ ID NO: 3598667 - DNA, 25 bp, Homo sapien
ctctgtggttatcagatggttgcca

SEQ ID NO: 3598668 - DNA, 25 bp, Homo sapien
agagatggatagacactgagggaaa

SEQ ID NO: 3598669 - DNA, 25 bp, Homo sapien
tggatagacactgagggaaagagaa

SEQ ID NO: 3598670 - DNA, 25 bp, Homo sapien
gaaaccatactaattaagaaatgca

SEQ ID NO: 3598671 - DNA, 25 bp, Homo sapien
gtgtatatataacagagatggatag

SEQ ID NO: 3598672 - DNA, 25 bp, Homo sapien
aactctcagcggctccattgccaat

SEQ ID NO: 3598673 - DNA, 25 bp, Homo sapien
cagcggctccattgccaataggtca

SEQ ID NO: 3598674 - DNA, 25 bp, Homo sapien
ttggcttcaactctcagcggctcca

SEQ ID NO: 3598675 - DNA, 25 bp, Homo sapien
gctccattgccaataggtcatcata

SEQ ID NO: 3598676 - DNA, 25 bp, Homo sapien
ccagggtggggattccaactgctgc

SEQ ID NO: 3598677 - DNA, 25 bp, Homo sapien
ccccatcctaaatgctgctgtagct

SEQ ID NO: 3598678 - DNA, 25 bp, Homo sapien
gctgctgtagcttccctggaacctc

SEQ ID NO: 3598679 - DNA, 25 bp, Homo sapien
aggtttcctgtcctctcgccatttt

SEQ ID NO: 3598680 - DNA, 25 bp, Homo sapien
tggtttattctgagtatacgacatt

SEQ ID NO: 3598681 - DNA, 25 bp, Homo sapien
ttttgtgaaatcttccttgtgtctc

SEQ ID NO: 3598682 - DNA, 25 bp, Homo sapien
gtatacgacattaatggcttcttct

SEQ ID NO: 3598683 - DNA, 25 bp, Homo sapien
ctgggctcccatagtgtcctatact

SEQ ID NO: 3598684 - DNA, 25 bp, Homo sapien
tatcaactgtcttatatttgtcctt

SEQ ID NO: 3598685 - DNA, 25 bp, Homo sapien
taaggtcttatcaactgtcttatat

SEQ ID NO: 3598686 - DNA, 25 bp, Homo sapien
tctaaggtcttatcaactgtcttat

SEQ ID NO: 3598687 - DNA, 25 bp, Homo sapien
ggtcttatcaactgtcttatatttg

SEQ ID NO: 3598688 - DNA, 25 bp, Homo sapien
agtgcataggctttaaaaacctcat

SEQ ID NO: 3598689 - DNA, 25 bp, Homo sapien
gaagtgcataggctttaaaaacctc

SEQ ID NO: 3598690 - DNA, 25 bp, Homo sapien
aagtgcataggctttaaaaacctca

SEQ ID NO: 3598691 - DNA, 25 bp, Homo sapien
gtgcataggctttaaaaacctcatt

SEQ ID NO: 3598692 - DNA, 25 bp, Homo sapien
tctagtagaccttcgagtattctga

SEQ ID NO: 3598693 - DNA, 25 bp, Homo sapien
agtattctgatttctctgggtgtca

SEQ ID NO: 3598694 - DNA, 25 bp, Homo sapien
gttatttctagtagaccttcgagta

SEQ ID NO: 3598695 - DNA, 25 bp, Homo sapien
tccttccgttgttatttctagtaga

SEQ ID NO: 3598696 - DNA, 25 bp, Homo sapien
gaggtacattcattctgtacctaat

SEQ ID NO: 3598697 - DNA, 25 bp, Homo sapien
aggtacattcattctgtacctaatt

SEQ ID NO: 3598698 - DNA, 25 bp, Homo sapien
ttgaggtacattcattctgtaccta

SEQ ID NO: 3598699 - DNA, 25 bp, Homo sapien
tattgaggtacattcattctgtacc

SEQ ID NO: 3598700 - DNA, 25 bp, Homo sapien
gacagagctaggatagttatatttc

SEQ ID NO: 3598701 - DNA, 25 bp, Homo sapien
cctctccaaatgtatactcacagag

SEQ ID NO: 3598702 - DNA, 25 bp, Homo sapien
ccaaatgtatactcacagagaagtc

SEQ ID NO: 3598703 - DNA, 25 bp, Homo sapien
tacttatttggttctttggccaata

SEQ ID NO: 3598704 - DNA, 25 bp, Homo sapien
gactaggtgcatttaccaatacagc

SEQ ID NO: 3598705 - DNA, 25 bp, Homo sapien
tccagagaatatgccagactaggtg

SEQ ID NO: 3598706 - DNA, 25 bp, Homo sapien
tgcatttaccaatacagccatgtag

SEQ ID NO: 3598707 - DNA, 25 bp, Homo sapien
tatgccagactaggtgcatttacca

SEQ ID NO: 3598708 - DNA, 25 bp, Homo sapien
ttgggccggcaaaagtgcctggagg

SEQ ID NO: 3598709 - DNA, 25 bp, Homo sapien
tccagtgcatttgacatcgcccttt

SEQ ID NO: 3598710 - DNA, 25 bp, Homo sapien
ggagagtcttcacagtgataagagt

SEQ ID NO: 3598711 - DNA, 25 bp, Homo sapien
agagtctacaagaactccagtgcat

SEQ ID NO: 3598712 - DNA, 25 bp, Homo sapien
tcttgctcttctgagctactacaag

SEQ ID NO: 3598713 - DNA, 25 bp, Homo sapien
cttgctcttctgagctactacaaga

SEQ ID NO: 3598714 - DNA, 25 bp, Homo sapien
tggctgatgccaagtgtaaagtaac

SEQ ID NO: 3598715 - DNA, 25 bp, Homo sapien
acataagactgtagcaagcctggta

SEQ ID NO: 3598716 - DNA, 25 bp, Homo sapien
gacccttcacgtgaaatgatgcaca

SEQ ID NO: 3598717 - DNA, 25 bp, Homo sapien
taaagtaactggatcctgcctctgg

SEQ ID NO: 3598718 - DNA, 25 bp, Homo sapien
aaggtttgacgtagtctggctgagc

SEQ ID NO: 3598719 - DNA, 25 bp, Homo sapien
gaacttttgaggcagtcatgggtga

SEQ ID NO: 3598720 - DNA, 25 bp, Homo sapien
ggctccccagcattacagtcactga

SEQ ID NO: 3598721 - DNA, 25 bp, Homo sapien
ttatagcacagttattgagcccctg

SEQ ID NO: 3598722 - DNA, 25 bp, Homo sapien
cacaaatctctgaattactcttctc

SEQ ID NO: 3598723 - DNA, 25 bp, Homo sapien
ccacaaatctctgaattactcttct

SEQ ID NO: 3598724 - DNA, 25 bp, Homo sapien
ataattagtgataatcatcatttcc

SEQ ID NO: 3598725 - DNA, 25 bp, Homo sapien
ttaagacacattggtgtagggatgt

SEQ ID NO: 3598726 - DNA, 25 bp, Homo sapien
ttgaaggtataattagtgataatca

SEQ ID NO: 3598727 - DNA, 25 bp, Homo sapien
taagacacattggtgtagggatgtg

SEQ ID NO: 3598728 - DNA, 25 bp, Homo sapien
tatttctgagcagttgttccacaaa

SEQ ID NO: 3598729 - DNA, 25 bp, Homo sapien
gttgttccacaaagaacaatgcagc

SEQ ID NO: 3598730 - DNA, 25 bp, Homo sapien
tgctctatttctgagcagttgttcc

SEQ ID NO: 3598731 - DNA, 25 bp, Homo sapien
gagcagttgttccacaaagaacaat

SEQ ID NO: 3598732 - DNA, 25 bp, Homo sapien
caatgttaaacctcgtgactttgta

SEQ ID NO: 3598733 - DNA, 25 bp, Homo sapien
catgctccagagactgtctaacaat

SEQ ID NO: 3598734 - DNA, 25 bp, Homo sapien
tgctccagagactgtctaacaatgt

SEQ ID NO: 3598735 - DNA, 25 bp, Homo sapien
tattctgtaggaacatgacctgaaa

SEQ ID NO: 3598736 - DNA, 25 bp, Homo sapien
ggttgttatcccggcagctctttcc

SEQ ID NO: 3598737 - DNA, 25 bp, Homo sapien
gttcccttgtgttctaatctgagtc

SEQ ID NO: 3598738 - DNA, 25 bp, Homo sapien
ctaaaaaatggctggtgttcccttg

SEQ ID NO: 3598739 - DNA, 25 bp, Homo sapien
ctaatctgagtcattatggtggctg

SEQ ID NO: 3598740 - DNA, 25 bp, Homo sapien
cattgggcccaacaggcaaacatga

SEQ ID NO: 3598741 - DNA, 25 bp, Homo sapien
ccaactgtctaagcatccaaccaag

SEQ ID NO: 3598742 - DNA, 25 bp, Homo sapien
acagccaactgtctaagcatccaac

SEQ ID NO: 3598743 - DNA, 25 bp, Homo sapien
ccattgggcccaacaggcaaacatg

SEQ ID NO: 3598744 - DNA, 25 bp, Homo sapien
caaaattggtggatgcctcagagga

SEQ ID NO: 3598745 - DNA, 25 bp, Homo sapien
aaattggtggatgcctcagaggata

SEQ ID NO: 3598746 - DNA, 25 bp, Homo sapien
gatgctgaccaaagggtagtgagca

SEQ ID NO: 3598747 - DNA, 25 bp, Homo sapien
caaagggtagtgagcaaaattggtg

SEQ ID NO: 3598748 - DNA, 25 bp, Homo sapien
ttgtccccagaagagcccaccaaag

SEQ ID NO: 3598749 - DNA, 25 bp, Homo sapien
gggtttgcatatgccatttatttcc

SEQ ID NO: 3598750 - DNA, 25 bp, Homo sapien
gttgtgctttcttttgtccccagaa

SEQ ID NO: 3598751 - DNA, 25 bp, Homo sapien
ttcttttgtccccagaagagcccac

SEQ ID NO: 3598752 - DNA, 25 bp, Homo sapien
tcctgtcacaatcctgaaaaaatcc

SEQ ID NO: 3598753 - DNA, 25 bp, Homo sapien
ctgtcacaatcctgaaaaaatccag

SEQ ID NO: 3598754 - DNA, 25 bp, Homo sapien
cctgtcacaatcctgaaaaaatcca

SEQ ID NO: 3598755 - DNA, 25 bp, Homo sapien
catacgagctgcgttctaaaacaac

SEQ ID NO: 3598756 - DNA, 25 bp, Homo sapien
tgctgagtgtcttggctacaaggtg

SEQ ID NO: 3598757 - DNA, 25 bp, Homo sapien
ggtggtttgtgacagcaaaactcca

SEQ ID NO: 3598758 - DNA, 25 bp, Homo sapien
agttctccccagtatcctcatacga

SEQ ID NO: 3598759 - DNA, 25 bp, Homo sapien
cacttgagataaagcgtggttgata

SEQ ID NO: 3598760 - DNA, 25 bp, Homo sapien
tgataaattaaagggtcagcacaca

SEQ ID NO: 3598761 - DNA, 25 bp, Homo sapien
gatgctttaagttcctgatggctgt

SEQ ID NO: 3598762 - DNA, 25 bp, Homo sapien
acacttcaaggagggtcgaggagcc

SEQ ID NO: 3598763 - DNA, 25 bp, Homo sapien
ggaacctgagttccccatgctctat

SEQ ID NO: 3598764 - DNA, 25 bp, Homo sapien
tgagaggcacttccaatgccaggac

SEQ ID NO: 3598765 - DNA, 25 bp, Homo sapien
tgctctatatactgggctgccacca

SEQ ID NO: 3598766 - DNA, 25 bp, Homo sapien
tgaacacaggaaacgtgggatctgg

SEQ ID NO: 3598767 - DNA, 25 bp, Homo sapien
tctggagtaggtgctccttctagat

SEQ ID NO: 3598768 - DNA, 25 bp, Homo sapien
cgtgtgaatctggagtaggtgctcc

SEQ ID NO: 3598769 - DNA, 25 bp, Homo sapien
tgaatctggagtaggtgctccttct

SEQ ID NO: 3598770 - DNA, 25 bp, Homo sapien
ggagtaggtgctccttctagatctt

SEQ ID NO: 3598771 - DNA, 25 bp, Homo sapien
taccatagctactcctgagcaggca

SEQ ID NO: 3598772 - DNA, 25 bp, Homo sapien
aggcactgcctgaatgcacctggtg

SEQ ID NO: 3598773 - DNA, 25 bp, Homo sapien
tcttggagcatgtctacagttacca

SEQ ID NO: 3598774 - DNA, 25 bp, Homo sapien
cccaagcaatgtgtggtccaggtta

SEQ ID NO: 3598775 - DNA, 25 bp, Homo sapien
tacacaccatctccacttatctgcg

SEQ ID NO: 3598776 - DNA, 25 bp, Homo sapien
cacttatctgcgcatcaagaactgt

SEQ ID NO: 3598777 - DNA, 25 bp, Homo sapien
catctccacttatctgcgcatcaag

SEQ ID NO: 3598778 - DNA, 25 bp, Homo sapien
tatctgcgcatcaagaactgtcccc

SEQ ID NO: 3598779 - DNA, 25 bp, Homo sapien
aaacactgattcttagaatgagcga

SEQ ID NO: 3598780 - DNA, 25 bp, Homo sapien
tgattcttagaatgagcgaacctca

SEQ ID NO: 3598781 - DNA, 25 bp, Homo sapien
ccatctcttactccaaaacactgat

SEQ ID NO: 3598782 - DNA, 25 bp, Homo sapien
gaatgagcgaacctcaactcgtaca

SEQ ID NO: 3598783 - DNA, 25 bp, Homo sapien
aaattagtcaacattctttcgcttc

SEQ ID NO: 3598784 - DNA, 25 bp, Homo sapien
ttagtcaacattctttcgcttcagt

SEQ ID NO: 3598785 - DNA, 25 bp, Homo sapien
agtcaacattctttcgcttcagttt

SEQ ID NO: 3598786 - DNA, 25 bp, Homo sapien
attagtcaacattctttcgcttcag

SEQ ID NO: 3598787 - DNA, 25 bp, Homo sapien
catgaagctgtaatcgaaaggggaa

SEQ ID NO: 3598788 - DNA, 25 bp, Homo sapien
tgaagctgtaatcgaaaggggaaaa

SEQ ID NO: 3598789 - DNA, 25 bp, Homo sapien
aatcatgaagctgtaatcgaaaggg

SEQ ID NO: 3598790 - DNA, 25 bp, Homo sapien
tcaatcatgaagctgtaatcgaaag

SEQ ID NO: 3598791 - DNA, 25 bp, Homo sapien
cctcctgagaagtacagggtatcct

SEQ ID NO: 3598792 - DNA, 25 bp, Homo sapien
atctgatgttcctatcctcctgaga

SEQ ID NO: 3598793 - DNA, 25 bp, Homo sapien
cctgagaagtacagggtatccttat

SEQ ID NO: 3598794 - DNA, 25 bp, Homo sapien
aatctgatgttcctatcctcctgag

SEQ ID NO: 3598795 - DNA, 25 bp, Homo sapien
ctaagcatatagtggaatggctgca

SEQ ID NO: 3598796 - DNA, 25 bp, Homo sapien
taagcatatagtggaatggctgcaa

SEQ ID NO: 3598797 - DNA, 25 bp, Homo sapien
attccacttaaaatcattggagaaa

SEQ ID NO: 3598798 - DNA, 25 bp, Homo sapien
ttccacttaaaatcattggagaaaa

SEQ ID NO: 3598799 - DNA, 25 bp, Homo sapien
tagctaagtaaagctcttgtcgctg

SEQ ID NO: 3598800 - DNA, 25 bp, Homo sapien
tgttagtacctcaaagcctgcagtc

SEQ ID NO: 3598801 - DNA, 25 bp, Homo sapien
gcctgcagtctcgtagctaagtaaa

SEQ ID NO: 3598802 - DNA, 25 bp, Homo sapien
tgggcttttgttgttagtacctcaa

SEQ ID NO: 3598803 - DNA, 25 bp, Homo sapien
ggcacttcttatatggtggtggcaa

SEQ ID NO: 3598804 - DNA, 25 bp, Homo sapien
gtgaaaggcacttcttatatggtgg

SEQ ID NO: 3598805 - DNA, 25 bp, Homo sapien
cacttcttatatggtggtggcaaga

SEQ ID NO: 3598806 - DNA, 25 bp, Homo sapien
gaaaggcacttcttatatggtggtg

SEQ ID NO: 3598807 - DNA, 25 bp, Homo sapien
gatgtgtgaactctatcatttgcag

SEQ ID NO: 3598808 - DNA, 25 bp, Homo sapien
tgaagatcctgatgcctcagtagtg

SEQ ID NO: 3598809 - DNA, 25 bp, Homo sapien
ttatgaggagcagcccacatgaacc

SEQ ID NO: 3598810 - DNA, 25 bp, Homo sapien
cctcagtagtgtttgagcagggtta

SEQ ID NO: 3598811 - DNA, 25 bp, Homo sapien
tacgtatttgcgttaagagaaacca

SEQ ID NO: 3598812 - DNA, 25 bp, Homo sapien
tgttggcgatagttttcctctcacc

SEQ ID NO: 3598813 - DNA, 25 bp, Homo sapien
tcatcgacgaatatgaacctgtacg

SEQ ID NO: 3598814 - DNA, 25 bp, Homo sapien
tcctgaggcacaattgacaccatcc

SEQ ID NO: 3598815 - DNA, 25 bp, Homo sapien
ccagcctaggtagcatagggagact

SEQ ID NO: 3598816 - DNA, 25 bp, Homo sapien
gcctaggtagcatagggagactcca

SEQ ID NO: 3598817 - DNA, 25 bp, Homo sapien
ggagaccagcctaggtagcataggg

SEQ ID NO: 3598818 - DNA, 25 bp, Homo sapien
gcaagaggaacacttgagtgcagga

SEQ ID NO: 3598819 - DNA, 25 bp, Homo sapien
aagcgtcattgcaccgttgcaccga

SEQ ID NO: 3598820 - DNA, 25 bp, Homo sapien
taaccttgaattgacggctctccaa

SEQ ID NO: 3598821 - DNA, 25 bp, Homo sapien
ctgtgttggctataacagggagctc

SEQ ID NO: 3598822 - DNA, 25 bp, Homo sapien
gatagaagatcccacaagcaagcgt

SEQ ID NO: 3598823 - DNA, 25 bp, Homo sapien
aattaagttgaagtaaagatgacac

SEQ ID NO: 3598824 - DNA, 25 bp, Homo sapien
ctgtgaaattaagttgaagtaaaga

SEQ ID NO: 3598825 - DNA, 25 bp, Homo sapien
ctctcctaggattctgacaccaaaa

SEQ ID NO: 3598826 - DNA, 25 bp, Homo sapien
atttctctcctaggattctgacacc

SEQ ID NO: 3598827 - DNA, 25 bp, Homo sapien
gaaattagtaatggctcctttgtca

SEQ ID NO: 3598828 - DNA, 25 bp, Homo sapien
gagtctctagtagtgggaacattct

SEQ ID NO: 3598829 - DNA, 25 bp, Homo sapien
aaattagtaatggctcctttgtcat

SEQ ID NO: 3598830 - DNA, 25 bp, Homo sapien
aggaaattagtaatggctcctttgt

SEQ ID NO: 3598831 - DNA, 25 bp, Homo sapien
tggcttcaaccaggaggcttgaatt

SEQ ID NO: 3598832 - DNA, 25 bp, Homo sapien
aaggaacagttctgattggcctggc

SEQ ID NO: 3598833 - DNA, 25 bp, Homo sapien
gcttgaatttctggttccaaggaac

SEQ ID NO: 3598834 - DNA, 25 bp, Homo sapien
ggcttgagtcaagacagcagtttgg

SEQ ID NO: 3598835 - DNA, 25 bp, Homo sapien
tctgtttcctataattagctgggtg

SEQ ID NO: 3598836 - DNA, 25 bp, Homo sapien
tgagaagtgcaacaacaacacccct

SEQ ID NO: 3598837 - DNA, 25 bp, Homo sapien
aacagtatagctctctatagggaag

SEQ ID NO: 3598838 - DNA, 25 bp, Homo sapien
tcccatcaggcggagacatagctct

SEQ ID NO: 3598839 - DNA, 25 bp, Homo sapien
attgtgggcccacgtcgtggggata

SEQ ID NO: 3598840 - DNA, 25 bp, Homo sapien
tgtgggcccacgtcgtggggatatg

SEQ ID NO: 3598841 - DNA, 25 bp, Homo sapien
gaattgtgggcccacgtcgtgggga

SEQ ID NO: 3598842 - DNA, 25 bp, Homo sapien
tcagaattgtgggcccacgtcgtgg

SEQ ID NO: 3598843 - DNA, 25 bp, Homo sapien
tgcagaatcaatcatggtgatgacc

SEQ ID NO: 3598844 - DNA, 25 bp, Homo sapien
caatcatggtgatgaccaaggccat

SEQ ID NO: 3598845 - DNA, 25 bp, Homo sapien
atcaatcatggtgatgaccaaggcc

SEQ ID NO: 3598846 - DNA, 25 bp, Homo sapien
agaatcaatcatggtgatgaccaag

SEQ ID NO: 3598847 - DNA, 25 bp, Homo sapien
tctcctgcaatgacagcaacagaaa

SEQ ID NO: 3598848 - DNA, 25 bp, Homo sapien
tcctgcaatgacagcaacagaaaaa

SEQ ID NO: 3598849 - DNA, 25 bp, Homo sapien
cttctaatctacagaaattctgcac

SEQ ID NO: 3598850 - DNA, 25 bp, Homo sapien
attctcctgcaatgacagcaacaga

SEQ ID NO: 3598851 - DNA, 25 bp, Homo sapien
caaaaacctgcatgggcagaatcgt

SEQ ID NO: 3598852 - DNA, 25 bp, Homo sapien
aaaaacctgcatgggcagaatcgtc

SEQ ID NO: 3598853 - DNA, 25 bp, Homo sapien
cctgcatgggcagaatcgtccagtc

SEQ ID NO: 3598854 - DNA, 25 bp, Homo sapien
aacctgcatgggcagaatcgtccag

SEQ ID NO: 3598855 - DNA, 25 bp, Homo sapien
cttccttaggatctgcaagctgaaa

SEQ ID NO: 3598856 - DNA, 25 bp, Homo sapien
gcaagctgaaaaattgcttctcaac

SEQ ID NO: 3598857 - DNA, 25 bp, Homo sapien
caatggttaagtatcatcaggcaac

SEQ ID NO: 3598858 - DNA, 25 bp, Homo sapien
tccctgctgccgcataaaagaccgt

SEQ ID NO: 3598859 - DNA, 25 bp, Homo sapien
gtgacaggagtcaaacccacactgg

SEQ ID NO: 3598860 - DNA, 25 bp, Homo sapien
gacaggagtcaaacccacactggtg

SEQ ID NO: 3598861 - DNA, 25 bp, Homo sapien
tagctcagtggacgagacttcccca

SEQ ID NO: 3598862 - DNA, 25 bp, Homo sapien
ctgacatcttagctcagtggacgag

SEQ ID NO: 3598863 - DNA, 25 bp, Homo sapien
ttggtcacagctgctacatgaggtg

SEQ ID NO: 3598864 - DNA, 25 bp, Homo sapien
tgtaaggccaatggacttctgtccc

SEQ ID NO: 3598865 - DNA, 25 bp, Homo sapien
gcaacacataggcagtcaggttata

SEQ ID NO: 3598866 - DNA, 25 bp, Homo sapien
tcccctgagaccagcaacacatagg

SEQ ID NO: 3598867 - DNA, 25 bp, Homo sapien
tagcctctttttcacagccccattg

SEQ ID NO: 3598868 - DNA, 25 bp, Homo sapien
acaatccacatgtctggtacaaact

SEQ ID NO: 3598869 - DNA, 25 bp, Homo sapien
cagtacaatccacatgtctggtaca

SEQ ID NO: 3598870 - DNA, 25 bp, Homo sapien
ttagcctctttttcacagccccatt

SEQ ID NO: 3598871 - DNA, 25 bp, Homo sapien
tcattgtagggtatgctccaccagt

SEQ ID NO: 3598872 - DNA, 25 bp, Homo sapien
tgtcctcttcaaaacagcccaacag

SEQ ID NO: 3598873 - DNA, 25 bp, Homo sapien
aactcctgtatggtgtcattgtagg

SEQ ID NO: 3598874 - DNA, 25 bp, Homo sapien
cagttttcagaatagagcaactctc

SEQ ID NO: 3598875 - DNA, 25 bp, Homo sapien
tcccctatttctctgagttaccatc

SEQ ID NO: 3598876 - DNA, 25 bp, Homo sapien
cgcttaatagagaaagaatcatccc

SEQ ID NO: 3598877 - DNA, 25 bp, Homo sapien
catctgattggctcctgagtcggcc

SEQ ID NO: 3598878 - DNA, 25 bp, Homo sapien
tgaagtacagtatgggactcccaca

SEQ ID NO: 3598879 - DNA, 25 bp, Homo sapien
tggacttttgagatcccatgaagcc

SEQ ID NO: 3598880 - DNA, 25 bp, Homo sapien
taggtcatagaccttttgagagtcc

SEQ ID NO: 3598881 - DNA, 25 bp, Homo sapien
gaacttccgcttaagaactgttgga

SEQ ID NO: 3598882 - DNA, 25 bp, Homo sapien
tgagagtccattcaaagctacagaa

SEQ ID NO: 3598883 - DNA, 25 bp, Homo sapien
ggcatctgcccttctttggccattt

SEQ ID NO: 3598884 - DNA, 25 bp, Homo sapien
tcaaggggtgttggcatctgccctt

SEQ ID NO: 3598885 - DNA, 25 bp, Homo sapien
catctgcccttctttggccatttaa

SEQ ID NO: 3598886 - DNA, 25 bp, Homo sapien
tctgcccttctttggccatttaatt

SEQ ID NO: 3598887 - DNA, 25 bp, Homo sapien
actagcacttatgccttcctcagag

SEQ ID NO: 3598888 - DNA, 25 bp, Homo sapien
gggagaatttgggtgttctcattgc

SEQ ID NO: 3598889 - DNA, 25 bp, Homo sapien
cagctcttcatgctcactagcactt

SEQ ID NO: 3598890 - DNA, 25 bp, Homo sapien
agtatgggagaatttgggtgttctc

SEQ ID NO: 3598891 - DNA, 25 bp, Homo sapien
tcttttggttagagacgcccatcag

SEQ ID NO: 3598892 - DNA, 25 bp, Homo sapien
gctgtcttttggttagagacgccca

SEQ ID NO: 3598893 - DNA, 25 bp, Homo sapien
gaagctgtcttttggttagagacgc

SEQ ID NO: 3598894 - DNA, 25 bp, Homo sapien
tttggttagagacgcccatcagcat

SEQ ID NO: 3598895 - DNA, 25 bp, Homo sapien
tcattgccaaatttcggtggttgct

SEQ ID NO: 3598896 - DNA, 25 bp, Homo sapien
tcatttcaagatgtataaaatcatt

SEQ ID NO: 3598897 - DNA, 25 bp, Homo sapien
ttcatttcaagatgtataaaatcat

SEQ ID NO: 3598898 - DNA, 25 bp, Homo sapien
ctcattgccaaatttcggtggttgc

SEQ ID NO: 3598899 - DNA, 25 bp, Homo sapien
tttcttttccaaagatattatctga

SEQ ID NO: 3598900 - DNA, 25 bp, Homo sapien
tgatttcttttccaaagatattatc

SEQ ID NO: 3598901 - DNA, 25 bp, Homo sapien
taaagtttttgcatgatttcttttc

SEQ ID NO: 3598902 - DNA, 25 bp, Homo sapien
ttcttttccaaagatattatctgac

SEQ ID NO: 3598903 - DNA, 25 bp, Homo sapien
taaatatgagtagctgttctttcaa

SEQ ID NO: 3598904 - DNA, 25 bp, Homo sapien
ggtaagacaccataggtttcttcag

SEQ ID NO: 3598905 - DNA, 25 bp, Homo sapien
tgccagactgccctgttagcatctt

SEQ ID NO: 3598906 - DNA, 25 bp, Homo sapien
tgaatcagcaagttctctccatagc

SEQ ID NO: 3598907 - DNA, 25 bp, Homo sapien
agtagagagccttagtgttcctggc

SEQ ID NO: 3598908 - DNA, 25 bp, Homo sapien
agagagccttagtgttcctggcttc

SEQ ID NO: 3598909 - DNA, 25 bp, Homo sapien
gtagagagccttagtgttcctggct

SEQ ID NO: 3598910 - DNA, 25 bp, Homo sapien
tagagagccttagtgttcctggctt

SEQ ID NO: 3598911 - DNA, 25 bp, Homo sapien
aaaccaagaaggggagacaatgagg

SEQ ID NO: 3598912 - DNA, 25 bp, Homo sapien
gagtacaaggacctgaagatcagac

SEQ ID NO: 3598913 - DNA, 25 bp, Homo sapien
ccagagtacaaggacctgaagatca

SEQ ID NO: 3598914 - DNA, 25 bp, Homo sapien
tgaagatcagacagcatggctacac

SEQ ID NO: 3598915 - DNA, 25 bp, Homo sapien
cagccagtcgtgactggttgtggca

SEQ ID NO: 3598916 - DNA, 25 bp, Homo sapien
cagtgccagccagtcgtgactggtt

SEQ ID NO: 3598917 - DNA, 25 bp, Homo sapien
cagccatcaatgactgcatgacgcc

SEQ ID NO: 3598918 - DNA, 25 bp, Homo sapien
tcaatgactgcatgacgcctttccc

SEQ ID NO: 3598919 - DNA, 25 bp, Homo sapien
taagctcccatttcctaatgagtgg

SEQ ID NO: 3598920 - DNA, 25 bp, Homo sapien
tatgtaactctagggtcaaagagga

SEQ ID NO: 3598921 - DNA, 25 bp, Homo sapien
ttaacaaccctcatgcagcactatg

SEQ ID NO: 3598922 - DNA, 25 bp, Homo sapien
gaaggctccttcgtaagtctccagg

SEQ ID NO: 3598923 - DNA, 25 bp, Homo sapien
cggactctggacagcctttgagaag

SEQ ID NO: 3598924 - DNA, 25 bp, Homo sapien
tggattcaatgcacggcttcccttc

SEQ ID NO: 3598925 - DNA, 25 bp, Homo sapien
gatagtttcagctccattccattca

SEQ ID NO: 3598926 - DNA, 25 bp, Homo sapien
ttttgtgctgctgatcggactctgg

SEQ ID NO: 3598927 - DNA, 25 bp, Homo sapien
attctggccacagctaatgacgatc

SEQ ID NO: 3598928 - DNA, 25 bp, Homo sapien
ggccacagctaatgacgatccaaca

SEQ ID NO: 3598929 - DNA, 25 bp, Homo sapien
tctggccacagctaatgacgatcca

SEQ ID NO: 3598930 - DNA, 25 bp, Homo sapien
tggccacagctaatgacgatccaac

SEQ ID NO: 3598931 - DNA, 25 bp, Homo sapien
aggttttctggtgcttatttcatct

SEQ ID NO: 3598932 - DNA, 25 bp, Homo sapien
ttttctggtgcttatttcatctccc

SEQ ID NO: 3598933 - DNA, 25 bp, Homo sapien
ttctggtgcttatttcatctcccat

SEQ ID NO: 3598934 - DNA, 25 bp, Homo sapien
gctgggaggttttctggtgcttatt

SEQ ID NO: 3598935 - DNA, 25 bp, Homo sapien
gggctgccccaggtctcttccccat

SEQ ID NO: 3598936 - DNA, 25 bp, Homo sapien
ttgggctgccccaggtctcttcccc

SEQ ID NO: 3598937 - DNA, 25 bp, Homo sapien
ctgttgggctgccccaggtctcttc

SEQ ID NO: 3598938 - DNA, 25 bp, Homo sapien
tgttgggctgccccaggtctcttcc

SEQ ID NO: 3598939 - DNA, 25 bp, Homo sapien
agtacacccctagaagacagctgca

SEQ ID NO: 3598940 - DNA, 25 bp, Homo sapien
gtcgaacactaagtacacccctaga

SEQ ID NO: 3598941 - DNA, 25 bp, Homo sapien
caagtcgaacactaagtacacccct

SEQ ID NO: 3598942 - DNA, 25 bp, Homo sapien
tctgcaagtcgaacactaagtacac

SEQ ID NO: 3598943 - DNA, 25 bp, Homo sapien
tgttggccctatataagctccgaga

SEQ ID NO: 3598944 - DNA, 25 bp, Homo sapien
ccgtggcgcgctactttgggataaa

SEQ ID NO: 3598945 - DNA, 25 bp, Homo sapien
tgggcatcaagaccctcaacgtgta

SEQ ID NO: 3598946 - DNA, 25 bp, Homo sapien
caggtagtgaagatcatccggccca

SEQ ID NO: 3598947 - DNA, 25 bp, Homo sapien
gagacggggtgtcccttcactccca

SEQ ID NO: 3598948 - DNA, 25 bp, Homo sapien
acagatgcacactactatgcctggt

SEQ ID NO: 3598949 - DNA, 25 bp, Homo sapien
gatgcacactactatgcctggttaa

SEQ ID NO: 3598950 - DNA, 25 bp, Homo sapien
tagagacggggtgtcccttcactcc

SEQ ID NO: 3598951 - DNA, 25 bp, Homo sapien
cattttagtccgacagagctggctt

SEQ ID NO: 3598952 - DNA, 25 bp, Homo sapien
tgtttccctgagataggcagcctgc

SEQ ID NO: 3598953 - DNA, 25 bp, Homo sapien
catcaaggacgtggtgcaaagcaca

SEQ ID NO: 3598954 - DNA, 25 bp, Homo sapien
agcacagctctttagtttccaaatg

SEQ ID NO: 3598955 - DNA, 25 bp, Homo sapien
aatggaatggcaggtatggtccttg

SEQ ID NO: 3598956 - DNA, 25 bp, Homo sapien
aaacttctgggcaaggcgaactaca

SEQ ID NO: 3598957 - DNA, 25 bp, Homo sapien
caacagacgcttgtataggtgaaga

SEQ ID NO: 3598958 - DNA, 25 bp, Homo sapien
gctgtagtacacttgaaatcccagg

SEQ ID NO: 3598959 - DNA, 25 bp, Homo sapien
atggctatagcagggcagtcacact

SEQ ID NO: 3598960 - DNA, 25 bp, Homo sapien
aaaaccttgcaatcctgtctctctg

SEQ ID NO: 3598961 - DNA, 25 bp, Homo sapien
tgtctctctggtggcctcctacaaa

SEQ ID NO: 3598962 - DNA, 25 bp, Homo sapien
cacactatctgtttcaggtaggaaa

SEQ ID NO: 3598963 - DNA, 25 bp, Homo sapien
gagtctattccaagattttgcctac

SEQ ID NO: 3598964 - DNA, 25 bp, Homo sapien
cagccatgcctggttgttgttatca

SEQ ID NO: 3598965 - DNA, 25 bp, Homo sapien
taaattttcatactgacgctctcaa

SEQ ID NO: 3598966 - DNA, 25 bp, Homo sapien
gcctgttttgaagtctactatcaga

SEQ ID NO: 3598967 - DNA, 25 bp, Homo sapien
gtgatggctgcggagaagagaatgc

SEQ ID NO: 3598968 - DNA, 25 bp, Homo sapien
tgatggctgcggagaagagaatgca

SEQ ID NO: 3598969 - DNA, 25 bp, Homo sapien
cagatcccttttacacgctgcgttc

SEQ ID NO: 3598970 - DNA, 25 bp, Homo sapien
gatcccttttacacgctgcgttcat

SEQ ID NO: 3598971 - DNA, 25 bp, Homo sapien
gtccagatcccttttacacgctgcg

SEQ ID NO: 3598972 - DNA, 25 bp, Homo sapien
tccagatcccttttacacgctgcgt

SEQ ID NO: 3598973 - DNA, 25 bp, Homo sapien
gaaaagttcctgtcgcctagtgatg

SEQ ID NO: 3598974 - DNA, 25 bp, Homo sapien
cagtgctgctgatggtagaaggata

SEQ ID NO: 3598975 - DNA, 25 bp, Homo sapien
tctcctgatgtcatagcacaaggca

SEQ ID NO: 3598976 - DNA, 25 bp, Homo sapien
caatgtggtcaaataacttacccga

SEQ ID NO: 3598977 - DNA, 25 bp, Homo sapien
ggtgaaaagcagtgatcttggtgat

SEQ ID NO: 3598978 - DNA, 25 bp, Homo sapien
tgtttctgtcttaagccaagtgtta

SEQ ID NO: 3598979 - DNA, 25 bp, Homo sapien
agaggtgaaaagcagtgatcttggt

SEQ ID NO: 3598980 - DNA, 25 bp, Homo sapien
tttctagatagacaaaagcttatag

SEQ ID NO: 3598981 - DNA, 25 bp, Homo sapien
caggaacatactaggactgctgtcc

SEQ ID NO: 3598982 - DNA, 25 bp, Homo sapien
tgtaagcatcggaacaccttcactg

SEQ ID NO: 3598983 - DNA, 25 bp, Homo sapien
gaaatagggtaagctgctcttatcc

SEQ ID NO: 3598984 - DNA, 25 bp, Homo sapien
catctttcagtgcatgtgcatggtc

SEQ ID NO: 3598985 - DNA, 25 bp, Homo sapien
gagcttagtaacactgaaccccaga

SEQ ID NO: 3598986 - DNA, 25 bp, Homo sapien
gagggcaaagcacccaagtgttttc

SEQ ID NO: 3598987 - DNA, 25 bp, Homo sapien
cctcaaatgtgttagacaagtggtc

SEQ ID NO: 3598988 - DNA, 25 bp, Homo sapien
ggtccttacagacttacccatcaaa

SEQ ID NO: 3598989 - DNA, 25 bp, Homo sapien
caagaactttgccaatggccgaggg

SEQ ID NO: 3598990 - DNA, 25 bp, Homo sapien
gcagtatcagggctacaagaacttt

SEQ ID NO: 3598991 - DNA, 25 bp, Homo sapien
ggccgagggctctgataaacccacc

SEQ ID NO: 3598992 - DNA, 25 bp, Homo sapien
agcagccccagtggcagtatcaggg

SEQ ID NO: 3598993 - DNA, 25 bp, Homo sapien
tgttgggactttcggcgtctgcctc

SEQ ID NO: 3598994 - DNA, 25 bp, Homo sapien
tatgggctaatgttgggactttcgg

SEQ ID NO: 3598995 - DNA, 25 bp, Homo sapien
ttcaaatatgggctaatgttgggac

SEQ ID NO: 3598996 - DNA, 25 bp, Homo sapien
tgggtggattgtattcagggctggc

SEQ ID NO: 3598997 - DNA, 25 bp, Homo sapien
aaggatcacctagggcatgacctcg

SEQ ID NO: 3598998 - DNA, 25 bp, Homo sapien
cacctgatgtggtgcgagaatacca

SEQ ID NO: 3598999 - DNA, 25 bp, Homo sapien
catgagtcagaacaattgggtagca

SEQ ID NO: 3599000 - DNA, 25 bp, Homo sapien
tacacgtaacaacttcatgggcttg

SEQ ID NO: 3599001 - DNA, 25 bp, Homo sapien
cagagttctgacctaatcacgggtg

SEQ ID NO: 3599002 - DNA, 25 bp, Homo sapien
cagatgggaccttcaatgagttacc

SEQ ID NO: 3599003 - DNA, 25 bp, Homo sapien
cactcagccaaagtagtcagaggga

SEQ ID NO: 3599004 - DNA, 25 bp, Homo sapien
cttttgaccgttgcaaagcaggatt

SEQ ID NO: 3599005 - DNA, 25 bp, Homo sapien
aataaaattggcagtggattggttt

SEQ ID NO: 3599006 - DNA, 25 bp, Homo sapien
tgcttggaggaaagagcaatcccga

SEQ ID NO: 3599007 - DNA, 25 bp, Homo sapien
tttcctgcagaggaataaaattggc

SEQ ID NO: 3599008 - DNA, 25 bp, Homo sapien
tcccgacctgatgctctcattacag

SEQ ID NO: 3599009 - DNA, 25 bp, Homo sapien
ttagagaaggagaaaatcctggtgt

SEQ ID NO: 3599010 - DNA, 25 bp, Homo sapien
ggagaaaatcctggtgttcacgcca

SEQ ID NO: 3599011 - DNA, 25 bp, Homo sapien
aaatcctggtgttcacgccatcccg

SEQ ID NO: 3599012 - DNA, 25 bp, Homo sapien
taaattagagaaggagaaaatcctg

SEQ ID NO: 3599013 - DNA, 25 bp, Homo sapien
tagtccatccaaaatagtaggttta

SEQ ID NO: 3599014 - DNA, 25 bp, Homo sapien
gacactcctgtaagggttcatacat

SEQ ID NO: 3599015 - DNA, 25 bp, Homo sapien
ttgactatgccatgcaacattggat

SEQ ID NO: 3599016 - DNA, 25 bp, Homo sapien
tatctcaactgagaagcgcattcaa

SEQ ID NO: 3599017 - DNA, 25 bp, Homo sapien
tattattaaggccagactcttgcca

SEQ ID NO: 3599018 - DNA, 25 bp, Homo sapien
gatactgcactatagagaaatggtg

SEQ ID NO: 3599019 - DNA, 25 bp, Homo sapien
cagactaaggtctgttctagtatta

SEQ ID NO: 3599020 - DNA, 25 bp, Homo sapien
tagtattagtaagggatatttctgg

SEQ ID NO: 3599021 - DNA, 25 bp, Homo sapien
cacatggtcagtatcaatgtaaatg

SEQ ID NO: 3599022 - DNA, 25 bp, Homo sapien
agtttgcctgcattcagtggctaac

SEQ ID NO: 3599023 - DNA, 25 bp, Homo sapien
gaagaaattgatctcatatggcatc

SEQ ID NO: 3599024 - DNA, 25 bp, Homo sapien
aagcatcatacttctctagtttgcc

SEQ ID NO: 3599025 - DNA, 25 bp, Homo sapien
gctgaccagggttcactgcttaagg

SEQ ID NO: 3599026 - DNA, 25 bp, Homo sapien
ggcccgctgcgtctgataagcaaca

SEQ ID NO: 3599027 - DNA, 25 bp, Homo sapien
caacagtggtagcttctgtgtccaa

SEQ ID NO: 3599028 - DNA, 25 bp, Homo sapien
tgtacaaacacctgcgacaatgatg

SEQ ID NO: 3599029 - DNA, 25 bp, Homo sapien
ccaggttcaagaaagtagctgggac

SEQ ID NO: 3599030 - DNA, 25 bp, Homo sapien
ctcccaggttcaagaaagtagctgg

SEQ ID NO: 3599031 - DNA, 25 bp, Homo sapien
caggttcaagaaagtagctgggacc

SEQ ID NO: 3599032 - DNA, 25 bp, Homo sapien
acaggtgcgcaccaccacacccagc

SEQ ID NO: 3599033 - DNA, 25 bp, Homo sapien
tctgaacaggtagcagtatcaccag

SEQ ID NO: 3599034 - DNA, 25 bp, Homo sapien
gctgtagttcatctgaacaggtagc

SEQ ID NO: 3599035 - DNA, 25 bp, Homo sapien
aggccctttcggagtcctctctgct

SEQ ID NO: 3599036 - DNA, 25 bp, Homo sapien
gtagcagtatcaccaggccctttcg

SEQ ID NO: 3599037 - DNA, 25 bp, Homo sapien
gcagcctgccaagggccaagcgcac

SEQ ID NO: 3599038 - DNA, 25 bp, Homo sapien
tctgagaggctcagagtttctggag

SEQ ID NO: 3599039 - DNA, 25 bp, Homo sapien
agcgcaacatcgcacagtcggctgg

SEQ ID NO: 3599040 - DNA, 25 bp, Homo sapien
tgaagctttgcccaaaagaccctct

SEQ ID NO: 3599041 - DNA, 25 bp, Homo sapien
ttccagagacatcggttctgtcaag

SEQ ID NO: 3599042 - DNA, 25 bp, Homo sapien
tttccagagacatcggttctgtcaa

SEQ ID NO: 3599043 - DNA, 25 bp, Homo sapien
atttccagagacatcggttctgtca

SEQ ID NO: 3599044 - DNA, 25 bp, Homo sapien
tggctggcacaacctgtttctcttt

SEQ ID NO: 3599045 - DNA, 25 bp, Homo sapien
tgacagacatatctgctttggctgg

SEQ ID NO: 3599046 - DNA, 25 bp, Homo sapien
tctgctttggctggcacaacctgtt

SEQ ID NO: 3599047 - DNA, 25 bp, Homo sapien
ttgatgacagacatatctgctttgg

SEQ ID NO: 3599048 - DNA, 25 bp, Homo sapien
tatttagaaaatcggagctccagcc

SEQ ID NO: 3599049 - DNA, 25 bp, Homo sapien
gtgaagccgtcctgatatttagaaa

SEQ ID NO: 3599050 - DNA, 25 bp, Homo sapien
gaaaccttcggatgaactgtgtggc

SEQ ID NO: 3599051 - DNA, 25 bp, Homo sapien
gatgtgccccgtgttatattcctcc

SEQ ID NO: 3599052 - DNA, 25 bp, Homo sapien
gcattttaagtcagcttcactgtcc

SEQ ID NO: 3599053 - DNA, 25 bp, Homo sapien
gggcaggggcattttaagtcagctt

SEQ ID NO: 3599054 - DNA, 25 bp, Homo sapien
cagcgagtgaggactactgagctcc

SEQ ID NO: 3599055 - DNA, 25 bp, Homo sapien
ctctgagctctcagcgagtgaggac

SEQ ID NO: 3599056 - DNA, 25 bp, Homo sapien
cagcagctgctttagcagctttctg

SEQ ID NO: 3599057 - DNA, 25 bp, Homo sapien
gcagctgctttagcagctttctgag

SEQ ID NO: 3599058 - DNA, 25 bp, Homo sapien
ctcatttctcctagagtcatcaggc

SEQ ID NO: 3599059 - DNA, 25 bp, Homo sapien
tccctcatttctcctagagtcatca

SEQ ID NO: 3599060 - DNA, 25 bp, Homo sapien
tctgtccctcatttctcctagagtc

SEQ ID NO: 3599061 - DNA, 25 bp, Homo sapien
atttctcctagagtcatcaggccca

SEQ ID NO: 3599062 - DNA, 25 bp, Homo sapien
ctgatggaaatcggcagagggaaga

SEQ ID NO: 3599063 - DNA, 25 bp, Homo sapien
gctctgactgatggaaatcggcaga

SEQ ID NO: 3599064 - DNA, 25 bp, Homo sapien
actgatggaaatcggcagagggaag

SEQ ID NO: 3599065 - DNA, 25 bp, Homo sapien
tctgactgatggaaatcggcagagg

SEQ ID NO: 3599066 - DNA, 25 bp, Homo sapien
tttatccaaggagaactgagcatgt

SEQ ID NO: 3599067 - DNA, 25 bp, Homo sapien
gaatgccttctcttagccaagtgtt

SEQ ID NO: 3599068 - DNA, 25 bp, Homo sapien
tcatgctgaccgaggactgtttgcc

SEQ ID NO: 3599069 - DNA, 25 bp, Homo sapien
tgccagccccaggttagcaaaggag

SEQ ID NO: 3599070 - DNA, 25 bp, Homo sapien
aagtgggttctcataagctgatgcc

SEQ ID NO: 3599071 - DNA, 25 bp, Homo sapien
tgcagggtgctgtgcgaagtcccaa

SEQ ID NO: 3599072 - DNA, 25 bp, Homo sapien
gctagtcatgcagaaaaaagtgggt

SEQ ID NO: 3599073 - DNA, 25 bp, Homo sapien
gaaatggagctgttcaccactgagt

SEQ ID NO: 3599074 - DNA, 25 bp, Homo sapien
gttcttccaagggtgccaactatgt

SEQ ID NO: 3599075 - DNA, 25 bp, Homo sapien
agcagttcttccaagggtgccaact

SEQ ID NO: 3599076 - DNA, 25 bp, Homo sapien
tcttccaagggtgccaactatgtga

SEQ ID NO: 3599077 - DNA, 25 bp, Homo sapien
tccaagggtgccaactatgtgacac

SEQ ID NO: 3599078 - DNA, 25 bp, Homo sapien
atcaccaactctgtggatcccttca

SEQ ID NO: 3599079 - DNA, 25 bp, Homo sapien
tacttctgacgacaatagctcagag

SEQ ID NO: 3599080 - DNA, 25 bp, Homo sapien
catttgatcttgacttttcatgcag

SEQ ID NO: 3599081 - DNA, 25 bp, Homo sapien
tcataaattcatgtctagataattc

SEQ ID NO: 3599082 - DNA, 25 bp, Homo sapien
gcatgcgagggttccacgttgcacg

SEQ ID NO: 3599083 - DNA, 25 bp, Homo sapien
tgaattgtgcatgcgagggttccac

SEQ ID NO: 3599084 - DNA, 25 bp, Homo sapien
gcacgctcctttatgggaatctaat

SEQ ID NO: 3599085 - DNA, 25 bp, Homo sapien
gggttccacgttgcacgctccttta

SEQ ID NO: 3599086 - DNA, 25 bp, Homo sapien
cattctcaatgctagagagggctct

SEQ ID NO: 3599087 - DNA, 25 bp, Homo sapien
aagtaggaggtccaatcagctcacc

SEQ ID NO: 3599088 - DNA, 25 bp, Homo sapien
gagaacttgcaccataatactttca

SEQ ID NO: 3599089 - DNA, 25 bp, Homo sapien
aagtgtcataagagaacttgcacca

SEQ ID NO: 3599090 - DNA, 25 bp, Homo sapien
ggccacggctgccagttgtacttac

SEQ ID NO: 3599091 - DNA, 25 bp, Homo sapien
tcagattttatgaggtcccaccagc

SEQ ID NO: 3599092 - DNA, 25 bp, Homo sapien
cagaggctgtaaagatagaggttgc

SEQ ID NO: 3599093 - DNA, 25 bp, Homo sapien
caagagatgcaaactattgggaaag

SEQ ID NO: 3599094 - DNA, 25 bp, Homo sapien
ctgctttggcaagagcgcatctgga

SEQ ID NO: 3599095 - DNA, 25 bp, Homo sapien
cagtaggaagctgaatgggcaggct

SEQ ID NO: 3599096 - DNA, 25 bp, Homo sapien
gagacattaagagattagaaagcat

SEQ ID NO: 3599097 - DNA, 25 bp, Homo sapien
aatgcatacagtttgggtccccacc

SEQ ID NO: 3599098 - DNA, 25 bp, Homo sapien
cactgaaatagctgacatgtataat

SEQ ID NO: 3599099 - DNA, 25 bp, Homo sapien
tacatttcaactcaaatatagtata

SEQ ID NO: 3599100 - DNA, 25 bp, Homo sapien
aattacatttcaactcaaatatagt

SEQ ID NO: 3599101 - DNA, 25 bp, Homo sapien
atagctgacatgtataatctgaaag

SEQ ID NO: 3599102 - DNA, 25 bp, Homo sapien
tcaagaccactactgcactgaacat

SEQ ID NO: 3599103 - DNA, 25 bp, Homo sapien
ctgaacatccactgagatacgccct

SEQ ID NO: 3599104 - DNA, 25 bp, Homo sapien
tctactcatacagcggataccgttg

SEQ ID NO: 3599105 - DNA, 25 bp, Homo sapien
catgatagattctgaaactcctctg

SEQ ID NO: 3599106 - DNA, 25 bp, Homo sapien
cataagaattatgtgtagatttggg

SEQ ID NO: 3599107 - DNA, 25 bp, Homo sapien
cataatctcagtgacttgagcaggg

SEQ ID NO: 3599108 - DNA, 25 bp, Homo sapien
gggctcatgccaacgtgtcagattt

SEQ ID NO: 3599109 - DNA, 25 bp, Homo sapien
gaggacactgttagagacagcattt

SEQ ID NO: 3599110 - DNA, 25 bp, Homo sapien
tagattaggctgcaaatgaccgctg

SEQ ID NO: 3599111 - DNA, 25 bp, Homo sapien
gcttcggcagggaccagaatagatt

SEQ ID NO: 3599112 - DNA, 25 bp, Homo sapien
catttaagcaaattcctggaggtgg

SEQ ID NO: 3599113 - DNA, 25 bp, Homo sapien
caagctgagtaagaggagttggacc

SEQ ID NO: 3599114 - DNA, 25 bp, Homo sapien
caaatggccaagtggattcccaagg

SEQ ID NO: 3599115 - DNA, 25 bp, Homo sapien
taatgtgctgtgaactgataaaacc

SEQ ID NO: 3599116 - DNA, 25 bp, Homo sapien
gagattctcttaatgcctgtcagac

SEQ ID NO: 3599117 - DNA, 25 bp, Homo sapien
tgtttgatgagacaactcaggctca

SEQ ID NO: 3599118 - DNA, 25 bp, Homo sapien
tcagtccgggaagatgagaacatcc

SEQ ID NO: 3599119 - DNA, 25 bp, Homo sapien
gactggtcagttgggtctaaaatga

SEQ ID NO: 3599120 - DNA, 25 bp, Homo sapien
tcagaaaacaagcataccgaaacgt

SEQ ID NO: 3599121 - DNA, 25 bp, Homo sapien
gtagaacagtggtcaccaaggactg

SEQ ID NO: 3599122 - DNA, 25 bp, Homo sapien
gaagtcccctatataggccaaaaca

SEQ ID NO: 3599123 - DNA, 25 bp, Homo sapien
ccactaggaagatggacatttggct

SEQ ID NO: 3599124 - DNA, 25 bp, Homo sapien
aactagctagctacaaacatggagg

SEQ ID NO: 3599125 - DNA, 25 bp, Homo sapien
tctgatcgcatattaccactaggaa

SEQ ID NO: 3599126 - DNA, 25 bp, Homo sapien
ccatcaagtagttagggatctccac

SEQ ID NO: 3599127 - DNA, 25 bp, Homo sapien
atgacgaccattaaataagaacccg

SEQ ID NO: 3599128 - DNA, 25 bp, Homo sapien
tagttagggatctccacagccaaaa

SEQ ID NO: 3599129 - DNA, 25 bp, Homo sapien
taagaacccggagccatcaagtagt

SEQ ID NO: 3599130 - DNA, 25 bp, Homo sapien
tcagaaaactcttgtatcacagagg

SEQ ID NO: 3599131 - DNA, 25 bp, Homo sapien
attgtgtaggaaatacttcaactcc

SEQ ID NO: 3599132 - DNA, 25 bp, Homo sapien
agtagtccatataaccccaaatcag

SEQ ID NO: 3599133 - DNA, 25 bp, Homo sapien
gggtatcaccttagtcaagatcttt

SEQ ID NO: 3599134 - DNA, 25 bp, Homo sapien
taatcaacacggtgatcaatactgg

SEQ ID NO: 3599135 - DNA, 25 bp, Homo sapien
ttccattttctgacaggatcagagt

SEQ ID NO: 3599136 - DNA, 25 bp, Homo sapien
taagagtgacttccaataaaatcta

SEQ ID NO: 3599137 - DNA, 25 bp, Homo sapien
ttgaaacacttctaatgataagagt

SEQ ID NO: 3599138 - DNA, 25 bp, Homo sapien
tacttccataccaaagaggtatcgg

SEQ ID NO: 3599139 - DNA, 25 bp, Homo sapien
tggctgtgataaagattgtaatttt

SEQ ID NO: 3599140 - DNA, 25 bp, Homo sapien
gaaagagtagatctatgaggattta

SEQ ID NO: 3599141 - DNA, 25 bp, Homo sapien
ttccacagaattaatcactattact

SEQ ID NO: 3599142 - DNA, 25 bp, Homo sapien
gatgatagtataccagtgaggagct

SEQ ID NO: 3599143 - DNA, 25 bp, Homo sapien
gccttaatgttgaagagctcccctt

SEQ ID NO: 3599144 - DNA, 25 bp, Homo sapien
tgtgctcgcgactgctaataagtta

SEQ ID NO: 3599145 - DNA, 25 bp, Homo sapien
catcagtaaactctcctagggagct

SEQ ID NO: 3599146 - DNA, 25 bp, Homo sapien
caaactcatcgatacgctgctttgt

SEQ ID NO: 3599147 - DNA, 25 bp, Homo sapien
ctcatcgatacgctgctttgtattg

SEQ ID NO: 3599148 - DNA, 25 bp, Homo sapien
catcgatacgctgctttgtattgcc

SEQ ID NO: 3599149 - DNA, 25 bp, Homo sapien
aactcatcgatacgctgctttgtat

SEQ ID NO: 3599150 - DNA, 25 bp, Homo sapien
tggtttcatctctggcttgggctaa

SEQ ID NO: 3599151 - DNA, 25 bp, Homo sapien
cattttgtgttttcttggtttcatc

SEQ ID NO: 3599152 - DNA, 25 bp, Homo sapien
cagcatgaagaacatcattttgtgt

SEQ ID NO: 3599153 - DNA, 25 bp, Homo sapien
ctcagcatgaagaacatcattttgt

SEQ ID NO: 3599154 - DNA, 25 bp, Homo sapien
aaaccaatcacaagggcagccagta

SEQ ID NO: 3599155 - DNA, 25 bp, Homo sapien
ccaatcacaagggcagccagtatta

SEQ ID NO: 3599156 - DNA, 25 bp, Homo sapien
aaccaatcacaagggcagccagtat

SEQ ID NO: 3599157 - DNA, 25 bp, Homo sapien
aatcacaagggcagccagtattaaa

SEQ ID NO: 3599158 - DNA, 25 bp, Homo sapien
cacgttcttcctcgcttctatggtt

SEQ ID NO: 3599159 - DNA, 25 bp, Homo sapien
acacgttcttcctcgcttctatggt

SEQ ID NO: 3599160 - DNA, 25 bp, Homo sapien
gttacacgttcttcctcgcttctat

SEQ ID NO: 3599161 - DNA, 25 bp, Homo sapien
tacacgttcttcctcgcttctatgg

SEQ ID NO: 3599162 - DNA, 25 bp, Homo sapien
tgcctaagaatctcacacccaatag

SEQ ID NO: 3599163 - DNA, 25 bp, Homo sapien
cgaataacggaggaatgagactgtc

SEQ ID NO: 3599164 - DNA, 25 bp, Homo sapien
tacctggaaaagtcctgttacactg

SEQ ID NO: 3599165 - DNA, 25 bp, Homo sapien
gactgtcgttactcaaatccaatga

SEQ ID NO: 3599166 - DNA, 25 bp, Homo sapien
cctctagaagtgcaatcttggcagt

SEQ ID NO: 3599167 - DNA, 25 bp, Homo sapien
tgttgccactcagtagcttcctctt

SEQ ID NO: 3599168 - DNA, 25 bp, Homo sapien
tttgtgttgccactcagtagcttcc

SEQ ID NO: 3599169 - DNA, 25 bp, Homo sapien
tcttggcagtgaattcagcaagttc

SEQ ID NO: 3599170 - DNA, 25 bp, Homo sapien
tcagtagcaggaacttaaaatgtgt

SEQ ID NO: 3599171 - DNA, 25 bp, Homo sapien
cctttaggtaatgagctaaggagac

SEQ ID NO: 3599172 - DNA, 25 bp, Homo sapien
ttttaatgcacatgcttaggctgtt

SEQ ID NO: 3599173 - DNA, 25 bp, Homo sapien
tattctacagactagttaatcctgc

SEQ ID NO: 3599174 - DNA, 25 bp, Homo sapien
tttctctaagaagacagttccttac

SEQ ID NO: 3599175 - DNA, 25 bp, Homo sapien
ttttctctaagaagacagttcctta

SEQ ID NO: 3599176 - DNA, 25 bp, Homo sapien
ttcagcagctcgacgctccttttca

SEQ ID NO: 3599177 - DNA, 25 bp, Homo sapien
tcttcagcagctcgacgctcctttt

SEQ ID NO: 3599178 - DNA, 25 bp, Homo sapien
tcagcagctcgacgctccttttcaa

SEQ ID NO: 3599179 - DNA, 25 bp, Homo sapien
ctcttcagcagctcgacgctccttt

SEQ ID NO: 3599180 - DNA, 25 bp, Homo sapien
ttccccccaacagtgattaattcca

SEQ ID NO: 3599181 - DNA, 25 bp, Homo sapien
ctatgaaatatgtgtattcccccca

SEQ ID NO: 3599182 - DNA, 25 bp, Homo sapien
tccccccaacagtgattaattccaa

SEQ ID NO: 3599183 - DNA, 25 bp, Homo sapien
gaaatatgtgtattccccccaacag

SEQ ID NO: 3599184 - DNA, 25 bp, Homo sapien
gtagcaagaaatcaaatctgttcaa

SEQ ID NO: 3599185 - DNA, 25 bp, Homo sapien
agtagcaagaaatcaaatctgttca

SEQ ID NO: 3599186 - DNA, 25 bp, Homo sapien
aatagtagcaagaaatcaaatctgt

SEQ ID NO: 3599187 - DNA, 25 bp, Homo sapien
tagtagcaagaaatcaaatctgttc

SEQ ID NO: 3599188 - DNA, 25 bp, Homo sapien
tgaagtgcagaagctcactgcagcc

SEQ ID NO: 3599189 - DNA, 25 bp, Homo sapien
ggctgaagtgcagaagctcactgca

SEQ ID NO: 3599190 - DNA, 25 bp, Homo sapien
caggctgaagtgcagaagctcactg

SEQ ID NO: 3599191 - DNA, 25 bp, Homo sapien
ctgaagtgcagaagctcactgcagc

SEQ ID NO: 3599192 - DNA, 25 bp, Homo sapien
tgttttcactcatatgtcagagcta

SEQ ID NO: 3599193 - DNA, 25 bp, Homo sapien
gttgtactcctacgtttattgcagc

SEQ ID NO: 3599194 - DNA, 25 bp, Homo sapien
caatatattggagatagttgtactc

SEQ ID NO: 3599195 - DNA, 25 bp, Homo sapien
gaagtcaacctaagtgcttaaagaa

SEQ ID NO: 3599196 - DNA, 25 bp, Homo sapien
tcagccttaaaggaaggcaattctg

SEQ ID NO: 3599197 - DNA, 25 bp, Homo sapien
atacctgaatatccatgttcataac

SEQ ID NO: 3599198 - DNA, 25 bp, Homo sapien
agccttaaaggaaggcaattctgac

SEQ ID NO: 3599199 - DNA, 25 bp, Homo sapien
cacaaaagcaacctgagtgcccatc

SEQ ID NO: 3599200 - DNA, 25 bp, Homo sapien
tctgagctttaattgtctgctcttc

SEQ ID NO: 3599201 - DNA, 25 bp, Homo sapien
ctttctgagctttaattgtctgctc

SEQ ID NO: 3599202 - DNA, 25 bp, Homo sapien
tcttcaatttgttttagacgttcca

SEQ ID NO: 3599203 - DNA, 25 bp, Homo sapien
cttcaatttgttttagacgttccat

SEQ ID NO: 3599204 - DNA, 25 bp, Homo sapien
gctcttccttttcacgttctattct

SEQ ID NO: 3599205 - DNA, 25 bp, Homo sapien
tagattaaccggagacctccactgg

SEQ ID NO: 3599206 - DNA, 25 bp, Homo sapien
aaagagttaaccacacagttgccat

SEQ ID NO: 3599207 - DNA, 25 bp, Homo sapien
gcatacgggatgaactctgacaaca

SEQ ID NO: 3599208 - DNA, 25 bp, Homo sapien
taaatgtcagcaccaaaagagttaa

SEQ ID NO: 3599209 - DNA, 25 bp, Homo sapien
acaggcagcatacctctgggcattc

SEQ ID NO: 3599210 - DNA, 25 bp, Homo sapien
tgcccaagagagtctagcagcacag

SEQ ID NO: 3599211 - DNA, 25 bp, Homo sapien
tctgctggctactttgccaatgggc

SEQ ID NO: 3599212 - DNA, 25 bp, Homo sapien
ggcattctcccaggtatatctgctg

SEQ ID NO: 3599213 - DNA, 25 bp, Homo sapien
cgcttattgattctcagacgaggtg

SEQ ID NO: 3599214 - DNA, 25 bp, Homo sapien
ccgcttattgattctcagacgaggt

SEQ ID NO: 3599215 - DNA, 25 bp, Homo sapien
aggtgcctttttgtcgattggcttt

SEQ ID NO: 3599216 - DNA, 25 bp, Homo sapien
ggtgcctttttgtcgattggcttta

SEQ ID NO: 3599217 - DNA, 25 bp, Homo sapien
caaattttttgtcattaaatgaaat

SEQ ID NO: 3599218 - DNA, 25 bp, Homo sapien
gcctttttgtcgattggctttataa

SEQ ID NO: 3599219 - DNA, 25 bp, Homo sapien
tggattcaagctacaactacagttt

SEQ ID NO: 3599220 - DNA, 25 bp, Homo sapien
actacagttgaccttatcttttaag

SEQ ID NO: 3599221 - DNA, 25 bp, Homo sapien
gacccaagtgtagaactgagcctcc

SEQ ID NO: 3599222 - DNA, 25 bp, Homo sapien
gaatgaccaatcttaagagttccag

SEQ ID NO: 3599223 - DNA, 25 bp, Homo sapien
aacacctagccacaattcagttcct

SEQ ID NO: 3599224 - DNA, 25 bp, Homo sapien
gttcttcatgccagttctgtattct

SEQ ID NO: 3599225 - DNA, 25 bp, Homo sapien
tcctctatgttcttcatgccagttc

SEQ ID NO: 3599226 - DNA, 25 bp, Homo sapien
tgttagtttgtgttgttccaataca

SEQ ID NO: 3599227 - DNA, 25 bp, Homo sapien
cttaacattcctctatgttcttcat

SEQ ID NO: 3599228 - DNA, 25 bp, Homo sapien
gcagatttagatactgagctcagag

SEQ ID NO: 3599229 - DNA, 25 bp, Homo sapien
gctcagaggttttaggtcatgtacc

SEQ ID NO: 3599230 - DNA, 25 bp, Homo sapien
gcaaagggtggaatcggtactcaaa

SEQ ID NO: 3599231 - DNA, 25 bp, Homo sapien
tagccagagaaggattattatcccc

SEQ ID NO: 3599232 - DNA, 25 bp, Homo sapien
tcctcaagtccaaattatcactgcc

SEQ ID NO: 3599233 - DNA, 25 bp, Homo sapien
tcaaccttaggtaattacagagcat

SEQ ID NO: 3599234 - DNA, 25 bp, Homo sapien
tttttagaagtataccccatgatcc

SEQ ID NO: 3599235 - DNA, 25 bp, Homo sapien
tgcttaccctatgggaatgaggaaa

SEQ ID NO: 3599236 - DNA, 25 bp, Homo sapien
taatgcaaacgcatgtttcacttac

SEQ ID NO: 3599237 - DNA, 25 bp, Homo sapien
atataatgcaaacgcatgtttcact

SEQ ID NO: 3599238 - DNA, 25 bp, Homo sapien
tacaattttcagacaatataatgca

SEQ ID NO: 3599239 - DNA, 25 bp, Homo sapien
tatagacttctagaatacaattttc

SEQ ID NO: 3599240 - DNA, 25 bp, Homo sapien
tctttaacttgcaagaagaagagtc

SEQ ID NO: 3599241 - DNA, 25 bp, Homo sapien
ctttaacttgcaagaagaagagtct

SEQ ID NO: 3599242 - DNA, 25 bp, Homo sapien
taatttcaagtataatcaacaaaaa

SEQ ID NO: 3599243 - DNA, 25 bp, Homo sapien
cagacctcacgcaaaccaactgttt

SEQ ID NO: 3599244 - DNA, 25 bp, Homo sapien
ttaagccatgtagaataacctttgc

SEQ ID NO: 3599245 - DNA, 25 bp, Homo sapien
tgctgtctacatactgcagcccaaa

SEQ ID NO: 3599246 - DNA, 25 bp, Homo sapien
ttttatttagtttaagccatgtaga

SEQ ID NO: 3599247 - DNA, 25 bp, Homo sapien
ccattgtagttactcttacgttgat

SEQ ID NO: 3599248 - DNA, 25 bp, Homo sapien
tattgggctgaatggcaaattccag

SEQ ID NO: 3599249 - DNA, 25 bp, Homo sapien
aattccagctcagcatccattgtag

SEQ ID NO: 3599250 - DNA, 25 bp, Homo sapien
aaaaagttgtttgccagttgtattg

SEQ ID NO: 3599251 - DNA, 25 bp, Homo sapien
caggcctagctccaaactctatttt

SEQ ID NO: 3599252 - DNA, 25 bp, Homo sapien
gcgattcctactaacactgtttctg

SEQ ID NO: 3599253 - DNA, 25 bp, Homo sapien
tcttcacctagaattcttcacatga

SEQ ID NO: 3599254 - DNA, 25 bp, Homo sapien
catgatccaaatatatctttttagc

SEQ ID NO: 3599255 - DNA, 25 bp, Homo sapien
agtataaacgggccagtataaatgt

SEQ ID NO: 3599256 - DNA, 25 bp, Homo sapien
tagtataaacgggccagtataaatg

SEQ ID NO: 3599257 - DNA, 25 bp, Homo sapien
ataaacgggccagtataaatgttgg

SEQ ID NO: 3599258 - DNA, 25 bp, Homo sapien
tataaacgggccagtataaatgttg

SEQ ID NO: 3599259 - DNA, 25 bp, Homo sapien
aaaaattctccacttcaatgaattc

SEQ ID NO: 3599260 - DNA, 25 bp, Homo sapien
aaattctccacttcaatgaattctg

SEQ ID NO: 3599261 - DNA, 25 bp, Homo sapien
ttaaaaattctccacttcaatgaat

SEQ ID NO: 3599262 - DNA, 25 bp, Homo sapien
tttaaaaattctccacttcaatgaa

SEQ ID NO: 3599263 - DNA, 25 bp, Homo sapien
gagaaattctctaagttgtaataaa

SEQ ID NO: 3599264 - DNA, 25 bp, Homo sapien
agagaaattctctaagttgtaataa

SEQ ID NO: 3599265 - DNA, 25 bp, Homo sapien
taaaagagaaattctctaagttgta

SEQ ID NO: 3599266 - DNA, 25 bp, Homo sapien
aaagagaaattctctaagttgtaat

SEQ ID NO: 3599267 - DNA, 25 bp, Homo sapien
cttaaaagtggtcttgccctgcctc

SEQ ID NO: 3599268 - DNA, 25 bp, Homo sapien
ttttctcccactcttaaatgtctta

SEQ ID NO: 3599269 - DNA, 25 bp, Homo sapien
tctcctaaagcaatatattgtgctc

SEQ ID NO: 3599270 - DNA, 25 bp, Homo sapien
tccatacctacttctcctaaagcaa

SEQ ID NO: 3599271 - DNA, 25 bp, Homo sapien
ccagcaagtcgtctggagagatgct

SEQ ID NO: 3599272 - DNA, 25 bp, Homo sapien
ctgccagccagcaaacgtctcccat

SEQ ID NO: 3599273 - DNA, 25 bp, Homo sapien
accgcagacagctccgcaatatggc

SEQ ID NO: 3599274 - DNA, 25 bp, Homo sapien
tcgcgccgcggactgagcgccaacg

SEQ ID NO: 3599275 - DNA, 25 bp, Homo sapien
gcggtggtgcgagcgctggcccgcg

SEQ ID NO: 3599276 - DNA, 25 bp, Homo sapien
tggcccgcgggagacgagaggcgcc

SEQ ID NO: 3599277 - DNA, 25 bp, Homo sapien
tggctgggatgagacaggaagctcc

SEQ ID NO: 3599278 - DNA, 25 bp, Homo sapien
gggatgagacaggaagctcctgact

SEQ ID NO: 3599279 - DNA, 25 bp, Homo sapien
ggaagctcctgacttctggatcagt

SEQ ID NO: 3599280 - DNA, 25 bp, Homo sapien
tttagttagtggctgggatgagaca

SEQ ID NO: 3599281 - DNA, 25 bp, Homo sapien
gcaacctctatctccagtgttcaag

SEQ ID NO: 3599282 - DNA, 25 bp, Homo sapien
aacctctatctccagtgttcaagtg

SEQ ID NO: 3599283 - DNA, 25 bp, Homo sapien
actgcaacctctatctccagtgttc

SEQ ID NO: 3599284 - DNA, 25 bp, Homo sapien
acctctatctccagtgttcaagtga

SEQ ID NO: 3599285 - DNA, 25 bp, Homo sapien
aacaaagtaacagcctgagggcttg

SEQ ID NO: 3599286 - DNA, 25 bp, Homo sapien
gaccccaaggcccaattcaggagca

SEQ ID NO: 3599287 - DNA, 25 bp, Homo sapien
aaggcccaattcaggagcacaaagg

SEQ ID NO: 3599288 - DNA, 25 bp, Homo sapien
gcaccatatttgtcagcaccaccaa

SEQ ID NO: 3599289 - DNA, 25 bp, Homo sapien
ggaaactgcactaaagactctcgtg

SEQ ID NO: 3599290 - DNA, 25 bp, Homo sapien
aaagactctcgtgtgctcgtgcacc

SEQ ID NO: 3599291 - DNA, 25 bp, Homo sapien
gaaaagggccaattggctgttactc

SEQ ID NO: 3599292 - DNA, 25 bp, Homo sapien
cctgaagctgcaaaccctggaaact

SEQ ID NO: 3599293 - DNA, 25 bp, Homo sapien
aatgccttaatttagcacaaccagc

SEQ ID NO: 3599294 - DNA, 25 bp, Homo sapien
gaaggttttccctgaatagaatgac

SEQ ID NO: 3599295 - DNA, 25 bp, Homo sapien
cacaaccagcttgtgtgggtttcct

SEQ ID NO: 3599296 - DNA, 25 bp, Homo sapien
gactggcacgagttctgtgtaagta

SEQ ID NO: 3599297 - DNA, 25 bp, Homo sapien
tattaattgttctacttcccagaga

SEQ ID NO: 3599298 - DNA, 25 bp, Homo sapien
tatatcccttgaattgtaacttgtt

SEQ ID NO: 3599299 - DNA, 25 bp, Homo sapien
gacaaacattgccaacatgttggtg

SEQ ID NO: 3599300 - DNA, 25 bp, Homo sapien
tgttttatatcccttgaattgtaac

SEQ ID NO: 3599301 - DNA, 25 bp, Homo sapien
cctcctcttctgttggtaccaaatc

SEQ ID NO: 3599302 - DNA, 25 bp, Homo sapien
gtttcattaggcctaaatcaaggtg

SEQ ID NO: 3599303 - DNA, 25 bp, Homo sapien
tgtgactccatcactccagtttctg

SEQ ID NO: 3599304 - DNA, 25 bp, Homo sapien
ttctggggtccagaaatctaaactc

SEQ ID NO: 3599305 - DNA, 25 bp, Homo sapien
taattcaggataaccatccaaagat

SEQ ID NO: 3599306 - DNA, 25 bp, Homo sapien
taggatgtagacacatctttgggag

SEQ ID NO: 3599307 - DNA, 25 bp, Homo sapien
gtagacacatctttgggagccatta

SEQ ID NO: 3599308 - DNA, 25 bp, Homo sapien
gccacataaagtaacattcacagat

SEQ ID NO: 3599309 - DNA, 25 bp, Homo sapien
tggagattaggatgtagacacatct

SEQ ID NO: 3599310 - DNA, 25 bp, Homo sapien
tgctctgatgatgatgtgtgggaga

SEQ ID NO: 3599311 - DNA, 25 bp, Homo sapien
ctctgatgatgatgtgtgggagagc

SEQ ID NO: 3599312 - DNA, 25 bp, Homo sapien
ctgatgatgatgtgtgggagagcat

SEQ ID NO: 3599313 - DNA, 25 bp, Homo sapien
tctgatgatgatgtgtgggagagca

SEQ ID NO: 3599314 - DNA, 25 bp, Homo sapien
tgtctggtgagagccagctttctca

SEQ ID NO: 3599315 - DNA, 25 bp, Homo sapien
ctggtgagagccagctttctcatag

SEQ ID NO: 3599316 - DNA, 25 bp, Homo sapien
agttttgaagtctgagaagtccaag

SEQ ID NO: 3599317 - DNA, 25 bp, Homo sapien
gtgagagccagctttctcatagagc

SEQ ID NO: 3599318 - DNA, 25 bp, Homo sapien
tggccaacagctaatgccctttctg

SEQ ID NO: 3599319 - DNA, 25 bp, Homo sapien
tcctataagctatgtgttcagactg

SEQ ID NO: 3599320 - DNA, 25 bp, Homo sapien
gactaaactagaggaaaaatgattg

SEQ ID NO: 3599321 - DNA, 25 bp, Homo sapien
agtctggacgtagacattataatgc

SEQ ID NO: 3599322 - DNA, 25 bp, Homo sapien
ttttgattcggaagactaagtctgg

SEQ ID NO: 3599323 - DNA, 25 bp, Homo sapien
gctttctatgtggagagtgcttgtc

SEQ ID NO: 3599324 - DNA, 25 bp, Homo sapien
gcttggccataactattgaatgctt

SEQ ID NO: 3599325 - DNA, 25 bp, Homo sapien
accgtgcttggccataactattgaa

SEQ ID NO: 3599326 - DNA, 25 bp, Homo sapien
gcaagagaatgcgagtgagagcaag

SEQ ID NO: 3599327 - DNA, 25 bp, Homo sapien
gagataacggcattaatccattcat

SEQ ID NO: 3599328 - DNA, 25 bp, Homo sapien
tcctctgtcctttttatcattgcaa

SEQ ID NO: 3599329 - DNA, 25 bp, Homo sapien
tgttctagaacactatgccaaatgg

SEQ ID NO: 3599330 - DNA, 25 bp, Homo sapien
gacccataaacatttccgttcacca

SEQ ID NO: 3599331 - DNA, 25 bp, Homo sapien
ttcagtcagtctgtagctagcgcac

SEQ ID NO: 3599332 - DNA, 25 bp, Homo sapien
ctccagaattaatttccatggccgg

SEQ ID NO: 3599333 - DNA, 25 bp, Homo sapien
cagaattaatttccatggccggcat

SEQ ID NO: 3599334 - DNA, 25 bp, Homo sapien
agaactgctccagaattaatttcca

SEQ ID NO: 3599335 - DNA, 25 bp, Homo sapien
actgctccagaattaatttccatgg

SEQ ID NO: 3599336 - DNA, 25 bp, Homo sapien
cataagaaccatctgagggcttgtt

SEQ ID NO: 3599337 - DNA, 25 bp, Homo sapien
ttctgtagatctggtatagaacttg

SEQ ID NO: 3599338 - DNA, 25 bp, Homo sapien
ctgtagatctggtatagaacttggg

SEQ ID NO: 3599339 - DNA, 25 bp, Homo sapien
tgcctgatcataagaaccatctgag

SEQ ID NO: 3599340 - DNA, 25 bp, Homo sapien
tgacagctgcacaacagtaggttct

SEQ ID NO: 3599341 - DNA, 25 bp, Homo sapien
gctagattagctcaagtggcactca

SEQ ID NO: 3599342 - DNA, 25 bp, Homo sapien
gaaagttgctttctggttctgggca

SEQ ID NO: 3599343 - DNA, 25 bp, Homo sapien
gaacagggcccttgcaaaatcattt

SEQ ID NO: 3599344 - DNA, 25 bp, Homo sapien
gaagtcagcagaccttaaaaagggc

SEQ ID NO: 3599345 - DNA, 25 bp, Homo sapien
ttgccaaggcaaccagtagaatcca

SEQ ID NO: 3599346 - DNA, 25 bp, Homo sapien
caagtgcctattagctggtctgcct

SEQ ID NO: 3599347 - DNA, 25 bp, Homo sapien
tcttcctggataatggcaagtgcct

SEQ ID NO: 3599348 - DNA, 25 bp, Homo sapien
gggagcatgtcccacaacacaggga

SEQ ID NO: 3599349 - DNA, 25 bp, Homo sapien
agtgggaaatgcggagaagactgtg

SEQ ID NO: 3599350 - DNA, 25 bp, Homo sapien
aatgcggagaagactgtggggagca

SEQ ID NO: 3599351 - DNA, 25 bp, Homo sapien
ggggagcatgtcccacaacacaggg

SEQ ID NO: 3599352 - DNA, 25 bp, Homo sapien
cctgccaatctcagtgcttacagac

SEQ ID NO: 3599353 - DNA, 25 bp, Homo sapien
tcgctcttaaatggtctggaccatt

SEQ ID NO: 3599354 - DNA, 25 bp, Homo sapien
ggaccattgaccctgccaatctcag

SEQ ID NO: 3599355 - DNA, 25 bp, Homo sapien
tggtctggaccattgaccctgccaa

SEQ ID NO: 3599356 - DNA, 25 bp, Homo sapien
gagatgaatctgttgtaatcgtgga

SEQ ID NO: 3599357 - DNA, 25 bp, Homo sapien
tgtaatcgtggaggaaaccttggct

SEQ ID NO: 3599358 - DNA, 25 bp, Homo sapien
cttggctttgttggacttactgaga

SEQ ID NO: 3599359 - DNA, 25 bp, Homo sapien
gttggacttactgagagatactgtc

SEQ ID NO: 3599360 - DNA, 25 bp, Homo sapien
cagatgtagcttttctgcaagtcca

SEQ ID NO: 3599361 - DNA, 25 bp, Homo sapien
ggaccggtctaagtttagctcttga

SEQ ID NO: 3599362 - DNA, 25 bp, Homo sapien
gaaatgaacaggtctgtgaactgag

SEQ ID NO: 3599363 - DNA, 25 bp, Homo sapien
caagtccatatgtgatcctgggacc

SEQ ID NO: 3599364 - DNA, 25 bp, Homo sapien
taatagacttaatcttttgacaaaa

SEQ ID NO: 3599365 - DNA, 25 bp, Homo sapien
tagataatagacttaatcttttgac

SEQ ID NO: 3599366 - DNA, 25 bp, Homo sapien
gataatagacttaatcttttgacaa

SEQ ID NO: 3599367 - DNA, 25 bp, Homo sapien
ctagataatagacttaatcttttga

SEQ ID NO: 3599368 - DNA, 25 bp, Homo sapien
cattggaataggcagtttgtaaaga

SEQ ID NO: 3599369 - DNA, 25 bp, Homo sapien
cagcagaaacaatatggcattggtt

SEQ ID NO: 3599370 - DNA, 25 bp, Homo sapien
gatatacattagattccttcgaagc

SEQ ID NO: 3599371 - DNA, 25 bp, Homo sapien
tctctgtgtcgttaaaacatgagct

SEQ ID NO: 3599372 - DNA, 25 bp, Homo sapien
cagcatggacttcatacatatccat

SEQ ID NO: 3599373 - DNA, 25 bp, Homo sapien
tacatatccattatcagtgccttga

SEQ ID NO: 3599374 - DNA, 25 bp, Homo sapien
ggacttcatacatatccattatcag

SEQ ID NO: 3599375 - DNA, 25 bp, Homo sapien
tcatacatatccattatcagtgcct

SEQ ID NO: 3599376 - DNA, 25 bp, Homo sapien
tggttagcgcaaacagggccatgtc

SEQ ID NO: 3599377 - DNA, 25 bp, Homo sapien
catgtccccaagaggtaggtagcac

SEQ ID NO: 3599378 - DNA, 25 bp, Homo sapien
gactgacagtagtatgccctaaggg

SEQ ID NO: 3599379 - DNA, 25 bp, Homo sapien
cagatggccagtgtcacgaagtagc

SEQ ID NO: 3599380 - DNA, 25 bp, Homo sapien
gaacaacgtctggaagcaaaaccca

SEQ ID NO: 3599381 - DNA, 25 bp, Homo sapien
tgacgagatgtactgctgcaacctt

SEQ ID NO: 3599382 - DNA, 25 bp, Homo sapien
cactctagctgtagcaatgggctgg

SEQ ID NO: 3599383 - DNA, 25 bp, Homo sapien
tattgtgggactccttataaccggc

SEQ ID NO: 3599384 - DNA, 25 bp, Homo sapien
tgttcccataagtgcttcctctgca

SEQ ID NO: 3599385 - DNA, 25 bp, Homo sapien
acatcaatctcacagactgttccca

SEQ ID NO: 3599386 - DNA, 25 bp, Homo sapien
tcattcctgatatcttggtcttctc

SEQ ID NO: 3599387 - DNA, 25 bp, Homo sapien
gcagaagatgctttctctagccctc

SEQ ID NO: 3599388 - DNA, 25 bp, Homo sapien
aaaccacatgacaggaccaatccca

SEQ ID NO: 3599389 - DNA, 25 bp, Homo sapien
aaaaccacatgacaggaccaatccc

SEQ ID NO: 3599390 - DNA, 25 bp, Homo sapien
aaccacatgacaggaccaatcccaa

SEQ ID NO: 3599391 - DNA, 25 bp, Homo sapien
accacatgacaggaccaatcccaac

SEQ ID NO: 3599392 - DNA, 25 bp, Homo sapien
gcaatgataatccttatgctacctc

SEQ ID NO: 3599393 - DNA, 25 bp, Homo sapien
gagaattatttcgttgtcctaagta

SEQ ID NO: 3599394 - DNA, 25 bp, Homo sapien
ctctcccaggtatcttatacaaagg

SEQ ID NO: 3599395 - DNA, 25 bp, Homo sapien
aagcctcccaaacacttaggtgaca

SEQ ID NO: 3599396 - DNA, 25 bp, Homo sapien
tcaatgtcgcagaccactgtaggcc

SEQ ID NO: 3599397 - DNA, 25 bp, Homo sapien
tggtcgcatcctctagagtccaaga

SEQ ID NO: 3599398 - DNA, 25 bp, Homo sapien
caccaggctgaatggagagctacag

SEQ ID NO: 3599399 - DNA, 25 bp, Homo sapien
agagctacagtgtctctctgagtcc

SEQ ID NO: 3599400 - DNA, 25 bp, Homo sapien
acaccatttctcaaccatgtgctgg

SEQ ID NO: 3599401 - DNA, 25 bp, Homo sapien
ccttctttgtataggctgggcggct

SEQ ID NO: 3599402 - DNA, 25 bp, Homo sapien
tgtgaatgccactccatggtgtcct

SEQ ID NO: 3599403 - DNA, 25 bp, Homo sapien
ttctggaacaccagaagcatgtggg

SEQ ID NO: 3599404 - DNA, 25 bp, Homo sapien
gaaagaattgcatcacagctggact

SEQ ID NO: 3599405 - DNA, 25 bp, Homo sapien
tagaatgggccaagtcaaagtcgct

SEQ ID NO: 3599406 - DNA, 25 bp, Homo sapien
cctcgggctggtcaagatcatagtc

SEQ ID NO: 3599407 - DNA, 25 bp, Homo sapien
tgagcagcgccgatgtgtccttgga

SEQ ID NO: 3599408 - DNA, 25 bp, Homo sapien
ctgtcataggaggagtcattcagtt

SEQ ID NO: 3599409 - DNA, 25 bp, Homo sapien
tcataggaggagtcattcagttgaa

SEQ ID NO: 3599410 - DNA, 25 bp, Homo sapien
ataggaggagtcattcagttgaaag

SEQ ID NO: 3599411 - DNA, 25 bp, Homo sapien
tgtcataggaggagtcattcagttg

SEQ ID NO: 3599412 - DNA, 25 bp, Homo sapien
ttggcaggccatctaaggaaggatc

SEQ ID NO: 3599413 - DNA, 25 bp, Homo sapien
catctaaggaaggatcaaaaagccc

SEQ ID NO: 3599414 - DNA, 25 bp, Homo sapien
gccatctaaggaaggatcaaaaagc

SEQ ID NO: 3599415 - DNA, 25 bp, Homo sapien
ctattggcaggccatctaaggaagg

SEQ ID NO: 3599416 - DNA, 25 bp, Homo sapien
ctcactgaaacctctctgaagaggg

SEQ ID NO: 3599417 - DNA, 25 bp, Homo sapien
tctctgaagagggaagtgatttctt

SEQ ID NO: 3599418 - DNA, 25 bp, Homo sapien
tatcctaaggcaattctcaatcaga

SEQ ID NO: 3599419 - DNA, 25 bp, Homo sapien
cttctccaaatatcctaaggcaatt

SEQ ID NO: 3599420 - DNA, 25 bp, Homo sapien
gagaacaacattggctctcggaagc

SEQ ID NO: 3599421 - DNA, 25 bp, Homo sapien
caaagaatacttggagcgacacaca

SEQ ID NO: 3599422 - DNA, 25 bp, Homo sapien
tcaatgttgtgtaacaccccaaaaa

SEQ ID NO: 3599423 - DNA, 25 bp, Homo sapien
ctgattggatgaggaatgttgctca

SEQ ID NO: 3599424 - DNA, 25 bp, Homo sapien
cagtatttattttctcttcatcatt

SEQ ID NO: 3599425 - DNA, 25 bp, Homo sapien
ctttgaacagtatttattttctctt

SEQ ID NO: 3599426 - DNA, 25 bp, Homo sapien
tctcttcatcatttccttgatccat

SEQ ID NO: 3599427 - DNA, 25 bp, Homo sapien
ttctcttcatcatttccttgatcca

SEQ ID NO: 3599428 - DNA, 25 bp, Homo sapien
aaaatacttcctggaatatttcgca

SEQ ID NO: 3599429 - DNA, 25 bp, Homo sapien
tacagagacccagtgatcatagaga

SEQ ID NO: 3599430 - DNA, 25 bp, Homo sapien
cccagtgatcatagagatctgatga

SEQ ID NO: 3599431 - DNA, 25 bp, Homo sapien
ttcctggaatatttcgcagaaaatc

SEQ ID NO: 3599432 - DNA, 25 bp, Homo sapien
gcaaacattcttggttgttaaagaa

SEQ ID NO: 3599433 - DNA, 25 bp, Homo sapien
tctgcaaacattcttggttgttaaa

SEQ ID NO: 3599434 - DNA, 25 bp, Homo sapien
tgccaggcgtggtgtcgggcaactg

SEQ ID NO: 3599435 - DNA, 25 bp, Homo sapien
taaaacacaagcttgggaggccgag

SEQ ID NO: 3599436 - DNA, 25 bp, Homo sapien
cacaggtctgcagaagatactgcta

SEQ ID NO: 3599437 - DNA, 25 bp, Homo sapien
ggttttcacgtttcagcctgagata

SEQ ID NO: 3599438 - DNA, 25 bp, Homo sapien
ctcattttgactgtaggtgtttcca

SEQ ID NO: 3599439 - DNA, 25 bp, Homo sapien
gatactgctaaggtcaaaagctctg

SEQ ID NO: 3599440 - DNA, 25 bp, Homo sapien
aatagattcacagtctaggtgtact

SEQ ID NO: 3599441 - DNA, 25 bp, Homo sapien
gttctctgcaggatttcacattggc

SEQ ID NO: 3599442 - DNA, 25 bp, Homo sapien
taagacagatgctatcacaaaaata

SEQ ID NO: 3599443 - DNA, 25 bp, Homo sapien
ggtgtacttcgactccagaattcaa

SEQ ID NO: 3599444 - DNA, 25 bp, Homo sapien
cgccagaaggcccagtttatgatag

SEQ ID NO: 3599445 - DNA, 25 bp, Homo sapien
ggtgagtgctagaacctcgccagaa

SEQ ID NO: 3599446 - DNA, 25 bp, Homo sapien
tgttggcgatgagggcaagttgtcc

SEQ ID NO: 3599447 - DNA, 25 bp, Homo sapien
cataggtgatgttggcgatgagggc

SEQ ID NO: 3599448 - DNA, 25 bp, Homo sapien
gagtgcagagtctcgaagatggctc

SEQ ID NO: 3599449 - DNA, 25 bp, Homo sapien
ggtagagtcctttgatcccggtgtc

SEQ ID NO: 3599450 - DNA, 25 bp, Homo sapien
catctctcgggggagctgttccata

SEQ ID NO: 3599451 - DNA, 25 bp, Homo sapien
gggagctgttccataaggaagggct

SEQ ID NO: 3599452 - DNA, 25 bp, Homo sapien
gagcctcttctttgccagaattgac

SEQ ID NO: 3599453 - DNA, 25 bp, Homo sapien
cttctttgccagaattgacccacaa

SEQ ID NO: 3599454 - DNA, 25 bp, Homo sapien
ccagaattgacccacaactggtaat

SEQ ID NO: 3599455 - DNA, 25 bp, Homo sapien
caatgagtgggtatggagcctcttc

SEQ ID NO: 3599456 - DNA, 25 bp, Homo sapien
catttgatacttgaatgaggacaca

SEQ ID NO: 3599457 - DNA, 25 bp, Homo sapien
tcacatttgatacttgaatgaggac

SEQ ID NO: 3599458 - DNA, 25 bp, Homo sapien
aaaagagttaaatgtcacaataaat

SEQ ID NO: 3599459 - DNA, 25 bp, Homo sapien
tgtcacaataaatctttcacatttg

SEQ ID NO: 3599460 - DNA, 25 bp, Homo sapien
ttatccctagcattggtaatgacat

SEQ ID NO: 3599461 - DNA, 25 bp, Homo sapien
gttgataacttcattcgctgtatct

SEQ ID NO: 3599462 - DNA, 25 bp, Homo sapien
agttatccctagcattggtaatgac

SEQ ID NO: 3599463 - DNA, 25 bp, Homo sapien
acttcattcgctgtatctgaattca

SEQ ID NO: 3599464 - DNA, 25 bp, Homo sapien
agattttgaggggaatgctcttcgg

SEQ ID NO: 3599465 - DNA, 25 bp, Homo sapien
gaggggaatgctcttcgggtagtcc

SEQ ID NO: 3599466 - DNA, 25 bp, Homo sapien
ttcccaatgtccttggcgaagattt

SEQ ID NO: 3599467 - DNA, 25 bp, Homo sapien
tcccaatgtccttggcgaagatttt

SEQ ID NO: 3599468 - DNA, 25 bp, Homo sapien
aaatttcaggacattaggcatgggc

SEQ ID NO: 3599469 - DNA, 25 bp, Homo sapien
gacaggcatgtcaagtgaggtttga

SEQ ID NO: 3599470 - DNA, 25 bp, Homo sapien
acaatcaggttagggcacctctggg

SEQ ID NO: 3599471 - DNA, 25 bp, Homo sapien
tttggacaggtccaacaccttactg

SEQ ID NO: 3599472 - DNA, 25 bp, Homo sapien
taagtctaacagatgagcctaagtc

SEQ ID NO: 3599473 - DNA, 25 bp, Homo sapien
tagctagtgtacgatataaacggca

SEQ ID NO: 3599474 - DNA, 25 bp, Homo sapien
catgctcaatggtagggataataac

SEQ ID NO: 3599475 - DNA, 25 bp, Homo sapien
tctcatttaactccccagtagggtg

SEQ ID NO: 3599476 - DNA, 25 bp, Homo sapien
ggagagagagccatttgtccttttg

SEQ ID NO: 3599477 - DNA, 25 bp, Homo sapien
aaggagagagagccatttgtccttt

SEQ ID NO: 3599478 - DNA, 25 bp, Homo sapien
gagagagagccatttgtccttttgt

SEQ ID NO: 3599479 - DNA, 25 bp, Homo sapien
gagagagccatttgtccttttgttc

SEQ ID NO: 3599480 - DNA, 25 bp, Homo sapien
cacacagcttgctgtccacatatca

SEQ ID NO: 3599481 - DNA, 25 bp, Homo sapien
ccacacagcttgctgtccacatatc

SEQ ID NO: 3599482 - DNA, 25 bp, Homo sapien
acacagcttgctgtccacatatcag

SEQ ID NO: 3599483 - DNA, 25 bp, Homo sapien
tcttttgagttctgcccggccatca

SEQ ID NO: 3599484 - DNA, 25 bp, Homo sapien
catgtgtcaacactagcagaaggac

SEQ ID NO: 3599485 - DNA, 25 bp, Homo sapien
gccatcaatcagcagagtcctattg

SEQ ID NO: 3599486 - DNA, 25 bp, Homo sapien
aaagatgccgctcctgcctctggag

SEQ ID NO: 3599487 - DNA, 25 bp, Homo sapien
aagttacgtagtgttaagtccatca

SEQ ID NO: 3599488 - DNA, 25 bp, Homo sapien
caagatcaggtaggcatgcagcact

SEQ ID NO: 3599489 - DNA, 25 bp, Homo sapien
tcaaagacaggtgcataaataactc

SEQ ID NO: 3599490 - DNA, 25 bp, Homo sapien
gatgtcagaagcagagatgtcattc

SEQ ID NO: 3599491 - DNA, 25 bp, Homo sapien
tcatgttagaagtttaaacaaatcc

SEQ ID NO: 3599492 - DNA, 25 bp, Homo sapien
tcacaactctctacttcatgttaga

SEQ ID NO: 3599493 - DNA, 25 bp, Homo sapien
gcatcacattgatcatgtttgtcat

SEQ ID NO: 3599494 - DNA, 25 bp, Homo sapien
tacagcaagtggagaatatttcaac

SEQ ID NO: 3599495 - DNA, 25 bp, Homo sapien
tcatttataaactggaatagcatct

SEQ ID NO: 3599496 - DNA, 25 bp, Homo sapien
ttataaactggaatagcatctgttt

SEQ ID NO: 3599497 - DNA, 25 bp, Homo sapien
catttataaactggaatagcatctg

SEQ ID NO: 3599498 - DNA, 25 bp, Homo sapien
taaactggaatagcatctgtttcca

SEQ ID NO: 3599499 - DNA, 25 bp, Homo sapien
tcctcaacagtgtgacagacacact

SEQ ID NO: 3599500 - DNA, 25 bp, Homo sapien
agtatgcttagaataatgaaacaca

SEQ ID NO: 3599501 - DNA, 25 bp, Homo sapien
tatgagttgcaataaaagggtgttc

SEQ ID NO: 3599502 - DNA, 25 bp, Homo sapien
agggtgttcaagaacattcatactg

SEQ ID NO: 3599503 - DNA, 25 bp, Homo sapien
tattttgctactactaagaatctgg

SEQ ID NO: 3599504 - DNA, 25 bp, Homo sapien
ctgggagaactggctctaatgtaag

SEQ ID NO: 3599505 - DNA, 25 bp, Homo sapien
gctactactaagaatctgggagaac

SEQ ID NO: 3599506 - DNA, 25 bp, Homo sapien
ctactaagaatctgggagaactggc

SEQ ID NO: 3599507 - DNA, 25 bp, Homo sapien
ccattggtgaaatgactctgttaac

SEQ ID NO: 3599508 - DNA, 25 bp, Homo sapien
tcccagtgagatcccagaagtatgc

SEQ ID NO: 3599509 - DNA, 25 bp, Homo sapien
caagaggtcaagctgcgtacttgtc

SEQ ID NO: 3599510 - DNA, 25 bp, Homo sapien
cgtacttgtcttctcaagtcgcctg

SEQ ID NO: 3599511 - DNA, 25 bp, Homo sapien
tttgtagggctttatccaggataag

SEQ ID NO: 3599512 - DNA, 25 bp, Homo sapien
tcctcctttctgctagtgttttcat

SEQ ID NO: 3599513 - DNA, 25 bp, Homo sapien
ggataagagatggagcgctcctcct

SEQ ID NO: 3599514 - DNA, 25 bp, Homo sapien
tatccaggataagagatggagcgct

SEQ ID NO: 3599515 - DNA, 25 bp, Homo sapien
cttatttattataatccaaaatgtc

SEQ ID NO: 3599516 - DNA, 25 bp, Homo sapien
tatttattataatccaaaatgtcat

SEQ ID NO: 3599517 - DNA, 25 bp, Homo sapien
ttatttattataatccaaaatgtca

SEQ ID NO: 3599518 - DNA, 25 bp, Homo sapien
ccgggtagatactactatctttatt

SEQ ID NO: 3599519 - DNA, 25 bp, Homo sapien
atctttatttcacaggcaaatttgg

SEQ ID NO: 3599520 - DNA, 25 bp, Homo sapien
tatctttatttcacaggcaaatttg

SEQ ID NO: 3599521 - DNA, 25 bp, Homo sapien
tactatctttatttcacaggcaaat

SEQ ID NO: 3599522 - DNA, 25 bp, Homo sapien
ctgtatcctcgccaaaggtgttacc

SEQ ID NO: 3599523 - DNA, 25 bp, Homo sapien
ggtgttacccactacctctaggcca

SEQ ID NO: 3599524 - DNA, 25 bp, Homo sapien
tgttacccactacctctaggccagt

SEQ ID NO: 3599525 - DNA, 25 bp, Homo sapien
tcctcgccaaaggtgttacccacta

SEQ ID NO: 3599526 - DNA, 25 bp, Homo sapien
ggtcatgataatctttaagcagcac

SEQ ID NO: 3599527 - DNA, 25 bp, Homo sapien
tctggagcatcactatgggtcttca

SEQ ID NO: 3599528 - DNA, 25 bp, Homo sapien
tggcaaagctacaagtttcaacctt

SEQ ID NO: 3599529 - DNA, 25 bp, Homo sapien
cttcacgttggctagatttttcttc

SEQ ID NO: 3599530 - DNA, 25 bp, Homo sapien
ctcattgtcttcaacacagagggga

SEQ ID NO: 3599531 - DNA, 25 bp, Homo sapien
cctcattgtcttcaacacagagggg

SEQ ID NO: 3599532 - DNA, 25 bp, Homo sapien
tcattgtcttcaacacagaggggaa

SEQ ID NO: 3599533 - DNA, 25 bp, Homo sapien
ccctcattgtcttcaacacagaggg

SEQ ID NO: 3599534 - DNA, 25 bp, Homo sapien
cgtgacacggtcaaggtccttggga

SEQ ID NO: 3599535 - DNA, 25 bp, Homo sapien
cacatttctatactcggcacaccga

SEQ ID NO: 3599536 - DNA, 25 bp, Homo sapien
tcaactgacctctagccaacctaag

SEQ ID NO: 3599537 - DNA, 25 bp, Homo sapien
agttcacggacacccctagatggct

SEQ ID NO: 3599538 - DNA, 25 bp, Homo sapien
ccggctgccgctcccgggcagacat

SEQ ID NO: 3599539 - DNA, 25 bp, Homo sapien
cttcttcagcgccggctgccgctcc

SEQ ID NO: 3599540 - DNA, 25 bp, Homo sapien
ttcttcagcgccggctgccgctccc

SEQ ID NO: 3599541 - DNA, 25 bp, Homo sapien
gcgccggctgccgctcccgggcaga

SEQ ID NO: 3599542 - DNA, 25 bp, Homo sapien
aaagggcagtcagtgctcgcccagg

SEQ ID NO: 3599543 - DNA, 25 bp, Homo sapien
tcgcccaggccacttcgggaggccc

SEQ ID NO: 3599544 - DNA, 25 bp, Homo sapien
gggaaaggcgatcgcccactacagc

SEQ ID NO: 3599545 - DNA, 25 bp, Homo sapien
cagcccgcgcgcctagactgaggga

SEQ ID NO: 3599546 - DNA, 25 bp, Homo sapien
acgggagggaggctgcgaggtcgct

SEQ ID NO: 3599547 - DNA, 25 bp, Homo sapien
gtcgctcgaggagagactaaggctc

SEQ ID NO: 3599548 - DNA, 25 bp, Homo sapien
ctaaggctctagaaacggagaagcg

SEQ ID NO: 3599549 - DNA, 25 bp, Homo sapien
aaccggcggcggatggagacgggag

SEQ ID NO: 3599550 - DNA, 25 bp, Homo sapien
gagcgtcaaattcccgcggcgtccg

SEQ ID NO: 3599551 - DNA, 25 bp, Homo sapien
gagcctcgagcgtcaaattcccgcg

SEQ ID NO: 3599552 - DNA, 25 bp, Homo sapien
cgctggccgtcaagggcgggaagtg

SEQ ID NO: 3599553 - DNA, 25 bp, Homo sapien
gcgggaagtgttctgggactctcat

SEQ ID NO: 3599554 - DNA, 25 bp, Homo sapien
cttggtgcagctgcctcccgcgagc

SEQ ID NO: 3599555 - DNA, 25 bp, Homo sapien
cgcgagccgagacactcctgtcagg

SEQ ID NO: 3599556 - DNA, 25 bp, Homo sapien
agccgagacactcctgtcagggaag

SEQ ID NO: 3599557 - DNA, 25 bp, Homo sapien
ggaagaggagcgccccggctgtccc

SEQ ID NO: 3599558 - DNA, 25 bp, Homo sapien
aggcgcggctgccgtgctcaggcag

SEQ ID NO: 3599559 - DNA, 25 bp, Homo sapien
ctccgcctgcgctcgacaccgcggg

SEQ ID NO: 3599560 - DNA, 25 bp, Homo sapien
agggagccgagctccgggtgctcgc

SEQ ID NO: 3599561 - DNA, 25 bp, Homo sapien
tacacgatcatgtccgcgggctgcc

SEQ ID NO: 3599562 - DNA, 25 bp, Homo sapien
cttttcggtctgtgactccgcgtgg

SEQ ID NO: 3599563 - DNA, 25 bp, Homo sapien
ctcatcggcctgtgtcacgcacggg

SEQ ID NO: 3599564 - DNA, 25 bp, Homo sapien
gtgcagcccgcaggagctcatcggc

SEQ ID NO: 3599565 - DNA, 25 bp, Homo sapien
tttcggtctgtgactccgcgtgggt

SEQ ID NO: 3599566 - DNA, 25 bp, Homo sapien
cagagtgtcgcagctgtacaaattt

SEQ ID NO: 3599567 - DNA, 25 bp, Homo sapien
cgtcgcagagtgtcgcagctgtaca

SEQ ID NO: 3599568 - DNA, 25 bp, Homo sapien
gggatagggtggcacgtcgcagagt

SEQ ID NO: 3599569 - DNA, 25 bp, Homo sapien
tggcacgtcgcagagtgtcgcagct

SEQ ID NO: 3599570 - DNA, 25 bp, Homo sapien
acgctagcctgttcgggtaaccctg

SEQ ID NO: 3599571 - DNA, 25 bp, Homo sapien
ctcttgtgcaatcccgaacgctagc

SEQ ID NO: 3599572 - DNA, 25 bp, Homo sapien
gtgcaatcccgaacgctagcctgtt

SEQ ID NO: 3599573 - DNA, 25 bp, Homo sapien
ctgttcgggtaaccctgagtgggct

SEQ ID NO: 3599574 - DNA, 25 bp, Homo sapien
gagacgggggcattccaaacgtgaa

SEQ ID NO: 3599575 - DNA, 25 bp, Homo sapien
tgcacatttgcacccgcggtttccg

SEQ ID NO: 3599576 - DNA, 25 bp, Homo sapien
gacgccgaaatttggctaagctatt

SEQ ID NO: 3599577 - DNA, 25 bp, Homo sapien
aaaatgcagacagagcgaggacgcc

SEQ ID NO: 3599578 - DNA, 25 bp, Homo sapien
gctggttgactggtacggatgattc

SEQ ID NO: 3599579 - DNA, 25 bp, Homo sapien
tgattcggtagatggcattcttccc

SEQ ID NO: 3599580 - DNA, 25 bp, Homo sapien
gtacggatgattcggtagatggcat

SEQ ID NO: 3599581 - DNA, 25 bp, Homo sapien
tgactggtacggatgattcggtaga

SEQ ID NO: 3599582 - DNA, 25 bp, Homo sapien
aagaatggatgcaatattagaaaca

SEQ ID NO: 3599583 - DNA, 25 bp, Homo sapien
agaatggatgcaatattagaaacaa

SEQ ID NO: 3599584 - DNA, 25 bp, Homo sapien
cctcttgtttcacataggacatctg

SEQ ID NO: 3599585 - DNA, 25 bp, Homo sapien
ttgtttcacataggacatctgagac

SEQ ID NO: 3599586 - DNA, 25 bp, Homo sapien
gatcctcttgtttcacataggacat

SEQ ID NO: 3599587 - DNA, 25 bp, Homo sapien
tacagatcctcttgtttcacatagg

SEQ ID NO: 3599588 - DNA, 25 bp, Homo sapien
gtgttggaagggctcaaatgacaac

SEQ ID NO: 3599589 - DNA, 25 bp, Homo sapien
gttggaagggctcaaatgacaacaa

SEQ ID NO: 3599590 - DNA, 25 bp, Homo sapien
tcataaaagaaagctaaggagagct

SEQ ID NO: 3599591 - DNA, 25 bp, Homo sapien
ctgcattgtgttcataaaagaaagc

SEQ ID NO: 3599592 - DNA, 25 bp, Homo sapien
tcaggaaatcgttagaggaatcatg

SEQ ID NO: 3599593 - DNA, 25 bp, Homo sapien
gaaatcgttagaggaatcatgcaca

SEQ ID NO: 3599594 - DNA, 25 bp, Homo sapien
ttagaggaatcatgcacatactcac

SEQ ID NO: 3599595 - DNA, 25 bp, Homo sapien
tcgttagaggaatcatgcacatact

SEQ ID NO: 3599596 - DNA, 25 bp, Homo sapien
tagaattggccagcccaactgccat

SEQ ID NO: 3599597 - DNA, 25 bp, Homo sapien
tcttctctgataatggttccatgga

SEQ ID NO: 3599598 - DNA, 25 bp, Homo sapien
aatggcaagccctattagcctactg

SEQ ID NO: 3599599 - DNA, 25 bp, Homo sapien
tgctgcctctcagactgtcagttga

SEQ ID NO: 3599600 - DNA, 25 bp, Homo sapien
caccaccatagaggcaagatctttt

SEQ ID NO: 3599601 - DNA, 25 bp, Homo sapien
tagaggcaagatcttttgcctccaa

SEQ ID NO: 3599602 - DNA, 25 bp, Homo sapien
ctccaccaccatagaggcaagatct

SEQ ID NO: 3599603 - DNA, 25 bp, Homo sapien
accatagaggcaagatcttttgcct

SEQ ID NO: 3599604 - DNA, 25 bp, Homo sapien
atagccgtctgcactgccaccatgg

SEQ ID NO: 3599605 - DNA, 25 bp, Homo sapien
ccattatagccgtctgcactgccac

SEQ ID NO: 3599606 - DNA, 25 bp, Homo sapien
attatagccgtctgcactgccacca

SEQ ID NO: 3599607 - DNA, 25 bp, Homo sapien
atccattatagccgtctgcactgcc

SEQ ID NO: 3599608 - DNA, 25 bp, Homo sapien
tccacgaccaccaccaaagtttcca

SEQ ID NO: 3599609 - DNA, 25 bp, Homo sapien
cacgaccaccaccaaagtttccaga

SEQ ID NO: 3599610 - DNA, 25 bp, Homo sapien
ccacgaccaccaccaaagtttccag

SEQ ID NO: 3599611 - DNA, 25 bp, Homo sapien
gacttctttggctggacggagcact

SEQ ID NO: 3599612 - DNA, 25 bp, Homo sapien
cgacttctttggctggacggagcac

SEQ ID NO: 3599613 - DNA, 25 bp, Homo sapien
acttctttggctggacggagcacta

SEQ ID NO: 3599614 - DNA, 25 bp, Homo sapien
cactgttaagtaggcacctggtctt

SEQ ID NO: 3599615 - DNA, 25 bp, Homo sapien
tttcactgttaagtaggcacctggt

SEQ ID NO: 3599616 - DNA, 25 bp, Homo sapien
ctgttaagtaggcacctggtctttg

SEQ ID NO: 3599617 - DNA, 25 bp, Homo sapien
tctttttcactgttaagtaggcacc

SEQ ID NO: 3599618 - DNA, 25 bp, Homo sapien
aggctctcatctgatgtttcaaacc

SEQ ID NO: 3599619 - DNA, 25 bp, Homo sapien
ctctcatctgatgtttcaaacctca

SEQ ID NO: 3599620 - DNA, 25 bp, Homo sapien
tctcatctgatgtttcaaacctcaa

SEQ ID NO: 3599621 - DNA, 25 bp, Homo sapien
cctccacagtgacataggggacaaa

SEQ ID NO: 3599622 - DNA, 25 bp, Homo sapien
gttgtgatatttaatacatcagttg

SEQ ID NO: 3599623 - DNA, 25 bp, Homo sapien
cataagttaaagtgttgtgatattt

SEQ ID NO: 3599624 - DNA, 25 bp, Homo sapien
tatcaaacctgcattcataagttaa

SEQ ID NO: 3599625 - DNA, 25 bp, Homo sapien
tgatatttaatacatcagttgatgt

SEQ ID NO: 3599626 - DNA, 25 bp, Homo sapien
tcttcaacattcatccgaacgatgg

SEQ ID NO: 3599627 - DNA, 25 bp, Homo sapien
ttatgaatcacagtcttcaacattc

SEQ ID NO: 3599628 - DNA, 25 bp, Homo sapien
cgaacgatggatattcggcatgcct

SEQ ID NO: 3599629 - DNA, 25 bp, Homo sapien
tcggcatgccttaagttcaagtttt

SEQ ID NO: 3599630 - DNA, 25 bp, Homo sapien
gtatcaatctacttcaaaggcagtc

SEQ ID NO: 3599631 - DNA, 25 bp, Homo sapien
agccaagtggctacaaaataatagt

SEQ ID NO: 3599632 - DNA, 25 bp, Homo sapien
ctggcacttccgtttagccacttac

SEQ ID NO: 3599633 - DNA, 25 bp, Homo sapien
tcatgtgttcctggcacttccgttt

SEQ ID NO: 3599634 - DNA, 25 bp, Homo sapien
ttcctggcacttccgtttagccact

SEQ ID NO: 3599635 - DNA, 25 bp, Homo sapien
tgtgttcctggcacttccgtttagc

SEQ ID NO: 3599636 - DNA, 25 bp, Homo sapien
tgccctacgcatctatcctgtgttc

SEQ ID NO: 3599637 - DNA, 25 bp, Homo sapien
gagcccaaagcgttatttggcttca

SEQ ID NO: 3599638 - DNA, 25 bp, Homo sapien
tacgcatctatcctgtgttcccttt

SEQ ID NO: 3599639 - DNA, 25 bp, Homo sapien
cagagggggagcccaaagcgttatt

SEQ ID NO: 3599640 - DNA, 25 bp, Homo sapien
gattctactcccattctctgcaaaa

SEQ ID NO: 3599641 - DNA, 25 bp, Homo sapien
tggaataagaaattgttgccaccct

SEQ ID NO: 3599642 - DNA, 25 bp, Homo sapien
tgccacccttagttggcccacatgt

SEQ ID NO: 3599643 - DNA, 25 bp, Homo sapien
tggtgctgaccatagggtcaaggtc

SEQ ID NO: 3599644 - DNA, 25 bp, Homo sapien
tgctagattttgaatttgtttgctg

SEQ ID NO: 3599645 - DNA, 25 bp, Homo sapien
tcttctgctagattttgaatttgtt

SEQ ID NO: 3599646 - DNA, 25 bp, Homo sapien
gtcttctgctagattttgaatttgt

SEQ ID NO: 3599647 - DNA, 25 bp, Homo sapien
gctagattttgaatttgtttgctgt

SEQ ID NO: 3599648 - DNA, 25 bp, Homo sapien
gaagctccgggatcatggatgtctg

SEQ ID NO: 3599649 - DNA, 25 bp, Homo sapien
tggcaggatggatctgagaagctcc

SEQ ID NO: 3599650 - DNA, 25 bp, Homo sapien
gaacaaaggacaaggctcctctaat

SEQ ID NO: 3599651 - DNA, 25 bp, Homo sapien
ctttggtacagattcaaggacacac

SEQ ID NO: 3599652 - DNA, 25 bp, Homo sapien
gcatgaactttccatagcaacttat

SEQ ID NO: 3599653 - DNA, 25 bp, Homo sapien
ccatctctggaagcctataaaatac

SEQ ID NO: 3599654 - DNA, 25 bp, Homo sapien
tagaccctatagaccccttggtgcc

SEQ ID NO: 3599655 - DNA, 25 bp, Homo sapien
tcttctgctgacattgcagcatgaa

SEQ ID NO: 3599656 - DNA, 25 bp, Homo sapien
gagtttgctttcatcagatagaccc

SEQ ID NO: 3599657 - DNA, 25 bp, Homo sapien
tgacttttcgatgagcaacttgccg

SEQ ID NO: 3599658 - DNA, 25 bp, Homo sapien
caacttgccgaagtctgctgtcata

SEQ ID NO: 3599659 - DNA, 25 bp, Homo sapien
tgctgtcatagaatcccagagccag

SEQ ID NO: 3599660 - DNA, 25 bp, Homo sapien
agggtcaggacggtcacatctggcc

SEQ ID NO: 3599661 - DNA, 25 bp, Homo sapien
gggtcaggacggtcacatctggcca

SEQ ID NO: 3599662 - DNA, 25 bp, Homo sapien
cagggtcaggacggtcacatctggc

SEQ ID NO: 3599663 - DNA, 25 bp, Homo sapien
acagggtcaggacggtcacatctgg

SEQ ID NO: 3599664 - DNA, 25 bp, Homo sapien
gcaaagcaaggagcattcgggtact

SEQ ID NO: 3599665 - DNA, 25 bp, Homo sapien
ctccttggagcagatagaaatttaa

SEQ ID NO: 3599666 - DNA, 25 bp, Homo sapien
cctaatagggtgtctgtctcttcat

SEQ ID NO: 3599667 - DNA, 25 bp, Homo sapien
tcgggtactggagccacctaatagg

SEQ ID NO: 3599668 - DNA, 25 bp, Homo sapien
tggcaatgtctgtgtttcgaagctt

SEQ ID NO: 3599669 - DNA, 25 bp, Homo sapien
atggcaatgtctgtgtttcgaagct

SEQ ID NO: 3599670 - DNA, 25 bp, Homo sapien
gttgatggtggtttagctctgacca

SEQ ID NO: 3599671 - DNA, 25 bp, Homo sapien
tggtaaccctgtgcgtgtcctgagc

SEQ ID NO: 3599672 - DNA, 25 bp, Homo sapien
aagactctctcttctatcctctcta

SEQ ID NO: 3599673 - DNA, 25 bp, Homo sapien
tactgcgtctacaactggtaaccct

SEQ ID NO: 3599674 - DNA, 25 bp, Homo sapien
tcatcagtgcttcaggcaaaatagc

SEQ ID NO: 3599675 - DNA, 25 bp, Homo sapien
tagcaaagaaggcacagctcgtctc

SEQ ID NO: 3599676 - DNA, 25 bp, Homo sapien
tgtcatcagtgcttcaggcaaaata

SEQ ID NO: 3599677 - DNA, 25 bp, Homo sapien
aaggcacagctcgtctctggctgcc

SEQ ID NO: 3599678 - DNA, 25 bp, Homo sapien
gccttgccgtgaagggtcattactg

SEQ ID NO: 3599679 - DNA, 25 bp, Homo sapien
tgccgtgaagggtcattactgggca

SEQ ID NO: 3599680 - DNA, 25 bp, Homo sapien
cttctgagccttgccgtgaagggtc

SEQ ID NO: 3599681 - DNA, 25 bp, Homo sapien
ctgagccttgccgtgaagggtcatt

SEQ ID NO: 3599682 - DNA, 25 bp, Homo sapien
catggaacagcctttctttctgatt

SEQ ID NO: 3599683 - DNA, 25 bp, Homo sapien
cttgtccatggaacagcctttcttt

SEQ ID NO: 3599684 - DNA, 25 bp, Homo sapien
ctggagccgtaaaatctggtcataa

SEQ ID NO: 3599685 - DNA, 25 bp, Homo sapien
ctggtcataacttttatccttgtcc

SEQ ID NO: 3599686 - DNA, 25 bp, Homo sapien
gcccgttagaactgatcttgagaca

SEQ ID NO: 3599687 - DNA, 25 bp, Homo sapien
tgggcccgttagaactgatcttgag

SEQ ID NO: 3599688 - DNA, 25 bp, Homo sapien
cacgcagtttaagtatcctggtccc

SEQ ID NO: 3599689 - DNA, 25 bp, Homo sapien
atcttggttgggcccgttagaactg

SEQ ID NO: 3599690 - DNA, 25 bp, Homo sapien
tcaaagcgggtttgaggattgagat

SEQ ID NO: 3599691 - DNA, 25 bp, Homo sapien
ttttgacgagagagccaatgcggag

SEQ ID NO: 3599692 - DNA, 25 bp, Homo sapien
cagggaaggcatctagcactggaaa

SEQ ID NO: 3599693 - DNA, 25 bp, Homo sapien
tagcactggaaatgcgatcgctgtt

SEQ ID NO: 3599694 - DNA, 25 bp, Homo sapien
ttcctgccaggtcagatatccaaaa

SEQ ID NO: 3599695 - DNA, 25 bp, Homo sapien
gtgaccattgtttatcacctataag

SEQ ID NO: 3599696 - DNA, 25 bp, Homo sapien
gcatccaagcgggtttcctctgaat

SEQ ID NO: 3599697 - DNA, 25 bp, Homo sapien
taaacctggccagcaaaataagctc

SEQ ID NO: 3599698 - DNA, 25 bp, Homo sapien
gcaaccaatgcaaaaagggactcat

SEQ ID NO: 3599699 - DNA, 25 bp, Homo sapien
ctatgtctatgatgctctatggagc

SEQ ID NO: 3599700 - DNA, 25 bp, Homo sapien
agcacagtctggcaacatgtgtagc

SEQ ID NO: 3599701 - DNA, 25 bp, Homo sapien
catgtgtagcttttactattctggc

SEQ ID NO: 3599702 - DNA, 25 bp, Homo sapien
gctctcttacatgcccctggggtgg

SEQ ID NO: 3599703 - DNA, 25 bp, Homo sapien
gttcaagattagctctcttacatgc

SEQ ID NO: 3599704 - DNA, 25 bp, Homo sapien
gggatgagagaggatcatccctttt

SEQ ID NO: 3599705 - DNA, 25 bp, Homo sapien
cctgacagtgagttcaagattagct

SEQ ID NO: 3599706 - DNA, 25 bp, Homo sapien
catgcaagatgtgggaccaattccc

SEQ ID NO: 3599707 - DNA, 25 bp, Homo sapien
gaaaaatgatgatggcccaagaact

SEQ ID NO: 3599708 - DNA, 25 bp, Homo sapien
tcgagagaagcattatgatggcctc

SEQ ID NO: 3599709 - DNA, 25 bp, Homo sapien
gccaggtctgactgatgtcctaaaa

SEQ ID NO: 3599710 - DNA, 25 bp, Homo sapien
tgctctctccgtacaataaataatg

SEQ ID NO: 3599711 - DNA, 25 bp, Homo sapien
cacgtgaataagaaagccctttttg

SEQ ID NO: 3599712 - DNA, 25 bp, Homo sapien
gaagtttcctctagggtcattggtg

SEQ ID NO: 3599713 - DNA, 25 bp, Homo sapien
cattgaggacaacaaaacggaagtt

SEQ ID NO: 3599714 - DNA, 25 bp, Homo sapien
agcaggggacagcattacttggttc

SEQ ID NO: 3599715 - DNA, 25 bp, Homo sapien
gcaggggacagcattacttggttct

SEQ ID NO: 3599716 - DNA, 25 bp, Homo sapien
gaagcaggggacagcattacttggt

SEQ ID NO: 3599717 - DNA, 25 bp, Homo sapien
gaagaagcaggggacagcattactt

SEQ ID NO: 3599718 - DNA, 25 bp, Homo sapien
tagaattccaatacctagtttggtg

SEQ ID NO: 3599719 - DNA, 25 bp, Homo sapien
taagtgtcaagcactgctaaaatat

SEQ ID NO: 3599720 - DNA, 25 bp, Homo sapien
ctagtttggtgagacaggaggtttc

SEQ ID NO: 3599721 - DNA, 25 bp, Homo sapien
tgggagggtaagttgtttcatcact

SEQ ID NO: 3599722 - DNA, 25 bp, Homo sapien
gttcgtaatattgaagtccagatga

SEQ ID NO: 3599723 - DNA, 25 bp, Homo sapien
gaacttttgtgaataagtagttgag

SEQ ID NO: 3599724 - DNA, 25 bp, Homo sapien
tgtgtagttcgtaatattgaagtcc

SEQ ID NO: 3599725 - DNA, 25 bp, Homo sapien
gttgagctggaaacctaagtttctc

SEQ ID NO: 3599726 - DNA, 25 bp, Homo sapien
tgcaaaggttctaggctgcgggccc

SEQ ID NO: 3599727 - DNA, 25 bp, Homo sapien
taggctcggaggtataagcaggccc

SEQ ID NO: 3599728 - DNA, 25 bp, Homo sapien
gaatggtggttacaataggctcgga

SEQ ID NO: 3599729 - DNA, 25 bp, Homo sapien
gttggaaagacatgagtactgatgc

SEQ ID NO: 3599730 - DNA, 25 bp, Homo sapien
cagcaaccctttctatgtggctctt

SEQ ID NO: 3599731 - DNA, 25 bp, Homo sapien
aaggtaggctaaaagcttcaagttg

SEQ ID NO: 3599732 - DNA, 25 bp, Homo sapien
caaaatgaaaggtaggctaaaagct

SEQ ID NO: 3599733 - DNA, 25 bp, Homo sapien
acaggcaaaatgaaaggtaggctaa

SEQ ID NO: 3599734 - DNA, 25 bp, Homo sapien
tgaaaggtaggctaaaagcttcaag

SEQ ID NO: 3599735 - DNA, 25 bp, Homo sapien
tctgcatgtagacagtaggttcttg

SEQ ID NO: 3599736 - DNA, 25 bp, Homo sapien
taatctcgtaaagaataagggcaat

SEQ ID NO: 3599737 - DNA, 25 bp, Homo sapien
gccagcacttacaatctgcatgtag

SEQ ID NO: 3599738 - DNA, 25 bp, Homo sapien
tggcggcactcagttacccgatgaa

SEQ ID NO: 3599739 - DNA, 25 bp, Homo sapien
ggacagctccagcattctgtatatg

SEQ ID NO: 3599740 - DNA, 25 bp, Homo sapien
aggaaggaatggtcataagagagat

SEQ ID NO: 3599741 - DNA, 25 bp, Homo sapien
tcttcgggatgacaatctggttggg

SEQ ID NO: 3599742 - DNA, 25 bp, Homo sapien
tatatgggggtcttcgggatgacaa

SEQ ID NO: 3599743 - DNA, 25 bp, Homo sapien
ctcatcagcaaacatatgctctcca

SEQ ID NO: 3599744 - DNA, 25 bp, Homo sapien
cctcatcagcaaacatatgctctcc

SEQ ID NO: 3599745 - DNA, 25 bp, Homo sapien
cccagcccatctgaaccagttacta

SEQ ID NO: 3599746 - DNA, 25 bp, Homo sapien
tgtagaaaacgtagcgccgaattcc

SEQ ID NO: 3599747 - DNA, 25 bp, Homo sapien
tggctatgtagaaaacgtagcgccg

SEQ ID NO: 3599748 - DNA, 25 bp, Homo sapien
actgactggctatgtagaaaacgta

SEQ ID NO: 3599749 - DNA, 25 bp, Homo sapien
ttaatggagtttagatgactgactg

SEQ ID NO: 3599750 - DNA, 25 bp, Homo sapien
ctgattggtcaaagatttaagtttc

SEQ ID NO: 3599751 - DNA, 25 bp, Homo sapien
ttcctgattggtcaaagatttaagt

SEQ ID NO: 3599752 - DNA, 25 bp, Homo sapien
aattcctgattggtcaaagatttaa

SEQ ID NO: 3599753 - DNA, 25 bp, Homo sapien
tcctgattggtcaaagatttaagtt

SEQ ID NO: 3599754 - DNA, 25 bp, Homo sapien
tgcatatgcatagaagtttctggag

SEQ ID NO: 3599755 - DNA, 25 bp, Homo sapien
atatgcatagaagtttctggagaat

SEQ ID NO: 3599756 - DNA, 25 bp, Homo sapien
ttctaatgttcacctttggtgagtg

SEQ ID NO: 3599757 - DNA, 25 bp, Homo sapien
gcatatgcatagaagtttctggaga

SEQ ID NO: 3599758 - DNA, 25 bp, Homo sapien
taatagtgttggttaggagaaagac

SEQ ID NO: 3599759 - DNA, 25 bp, Homo sapien
gttaggagaaagacgagccaaaatg

SEQ ID NO: 3599760 - DNA, 25 bp, Homo sapien
gagccaaaatgcctaggttccattc

SEQ ID NO: 3599761 - DNA, 25 bp, Homo sapien
ggatttttgctaatagtgttggtta

SEQ ID NO: 3599762 - DNA, 25 bp, Homo sapien
tgtggtgctccctacaattgtaacg

SEQ ID NO: 3599763 - DNA, 25 bp, Homo sapien
tgtggcttccctgaatagacatcaa

SEQ ID NO: 3599764 - DNA, 25 bp, Homo sapien
tcagagacaagatcgaaagccaata

SEQ ID NO: 3599765 - DNA, 25 bp, Homo sapien
tagacatcaatgatacttgctgccc

SEQ ID NO: 3599766 - DNA, 25 bp, Homo sapien
cttggttcattcgcgttctccattc

SEQ ID NO: 3599767 - DNA, 25 bp, Homo sapien
ggttcattcgcgttctccattctat

SEQ ID NO: 3599768 - DNA, 25 bp, Homo sapien
gttctccattctatcagccccagaa

SEQ ID NO: 3599769 - DNA, 25 bp, Homo sapien
cattcgcgttctccattctatcagc

SEQ ID NO: 3599770 - DNA, 25 bp, Homo sapien
tcaaatatgccccacaggcttcttt

SEQ ID NO: 3599771 - DNA, 25 bp, Homo sapien
ccacaggcttctttgaaggatacct

SEQ ID NO: 3599772 - DNA, 25 bp, Homo sapien
tgacaatgccttccctcaaatatgc

SEQ ID NO: 3599773 - DNA, 25 bp, Homo sapien
ggcacaggtataacaatcagctcca

SEQ ID NO: 3599774 - DNA, 25 bp, Homo sapien
agacaagatctggtgcgttcagggt

SEQ ID NO: 3599775 - DNA, 25 bp, Homo sapien
cgttcagggtggtatggccgtagac

SEQ ID NO: 3599776 - DNA, 25 bp, Homo sapien
gagatcagacaagatctggtgcgtt

SEQ ID NO: 3599777 - DNA, 25 bp, Homo sapien
gatcagacaagatctggtgcgttca

SEQ ID NO: 3599778 - DNA, 25 bp, Homo sapien
caggtccttcacccgacttccctct

SEQ ID NO: 3599779 - DNA, 25 bp, Homo sapien
tcttcaggtccttcacccgacttcc

SEQ ID NO: 3599780 - DNA, 25 bp, Homo sapien
tccttcacccgacttccctctcttc

SEQ ID NO: 3599781 - DNA, 25 bp, Homo sapien
cttcacccgacttccctctcttcat

SEQ ID NO: 3599782 - DNA, 25 bp, Homo sapien
tgcactctgctctagtcctcatgtg

SEQ ID NO: 3599783 - DNA, 25 bp, Homo sapien
tttgggaaattctctaatgtaactg

SEQ ID NO: 3599784 - DNA, 25 bp, Homo sapien
tagaagaagcaacatgagagccctt

SEQ ID NO: 3599785 - DNA, 25 bp, Homo sapien
tcagaaagtaatatcctgttttgtc

SEQ ID NO: 3599786 - DNA, 25 bp, Homo sapien
cagcagagcactggcaacctgaggc

SEQ ID NO: 3599787 - DNA, 25 bp, Homo sapien
cttgctgatggccatgaagcttcat

SEQ ID NO: 3599788 - DNA, 25 bp, Homo sapien
ccactggggccatatggcttgctga

SEQ ID NO: 3599789 - DNA, 25 bp, Homo sapien
caacctgaggccacactgtgacagc

SEQ ID NO: 3599790 - DNA, 25 bp, Homo sapien
agaccaagctaccagaatgctgagc

SEQ ID NO: 3599791 - DNA, 25 bp, Homo sapien
gagaccaagctaccagaatgctgag

SEQ ID NO: 3599792 - DNA, 25 bp, Homo sapien
ctgagaccaagctaccagaatgctg

SEQ ID NO: 3599793 - DNA, 25 bp, Homo sapien
tgagaccaagctaccagaatgctga

SEQ ID NO: 3599794 - DNA, 25 bp, Homo sapien
acagctgctcctttcatcgcactcc

SEQ ID NO: 3599795 - DNA, 25 bp, Homo sapien
gctgctcctttcatcgcactccttg

SEQ ID NO: 3599796 - DNA, 25 bp, Homo sapien
tgctcctttcatcgcactccttgcg

SEQ ID NO: 3599797 - DNA, 25 bp, Homo sapien
ctttcatcgcactccttgcggcatg

SEQ ID NO: 3599798 - DNA, 25 bp, Homo sapien
gtgagtgtgtggtccacatttttac

SEQ ID NO: 3599799 - DNA, 25 bp, Homo sapien
caaactcatgccacttgtgagtgtg

SEQ ID NO: 3599800 - DNA, 25 bp, Homo sapien
cccagtcatccaccagaaacgagaa

SEQ ID NO: 3599801 - DNA, 25 bp, Homo sapien
gtggtccacatttttactagcctca

SEQ ID NO: 3599802 - DNA, 25 bp, Homo sapien
ctgagactcccatgataaaaacacc

SEQ ID NO: 3599803 - DNA, 25 bp, Homo sapien
gccacaatctacagaacttagacca

SEQ ID NO: 3599804 - DNA, 25 bp, Homo sapien
gagactcccatgataaaaacaccag

SEQ ID NO: 3599805 - DNA, 25 bp, Homo sapien
ggaagggataacttccaaatgccac

SEQ ID NO: 3599806 - DNA, 25 bp, Homo sapien
gtcctcatgtccgtgctggctgttg

SEQ ID NO: 3599807 - DNA, 25 bp, Homo sapien
ccaatgagccaatgaggctttctca

SEQ ID NO: 3599808 - DNA, 25 bp, Homo sapien
gatctcacagctccataggtcagaa

SEQ ID NO: 3599809 - DNA, 25 bp, Homo sapien
cagaagtccaggtaagctcagaggc

SEQ ID NO: 3599810 - DNA, 25 bp, Homo sapien
tattaaccatggtatccctgaagcc

SEQ ID NO: 3599811 - DNA, 25 bp, Homo sapien
gcttaggttgggtttagctccaggc

SEQ ID NO: 3599812 - DNA, 25 bp, Homo sapien
gtgtgtggcacatatcagctaccca

SEQ ID NO: 3599813 - DNA, 25 bp, Homo sapien
gatctacaggtcaacttgagtttgg

SEQ ID NO: 3599814 - DNA, 25 bp, Homo sapien
ttctccttgaatcagagaacttccc

SEQ ID NO: 3599815 - DNA, 25 bp, Homo sapien
ttgaagcccaggtcgccacacagga

SEQ ID NO: 3599816 - DNA, 25 bp, Homo sapien
gtttcccgcctcacagattgaagcc

SEQ ID NO: 3599817 - DNA, 25 bp, Homo sapien
aagagtcctgctagcaggtttcccg

SEQ ID NO: 3599818 - DNA, 25 bp, Homo sapien
ggtcgccacacaggaacaggctcct

SEQ ID NO: 3599819 - DNA, 25 bp, Homo sapien
aaagacaagccttggtacagcatca

SEQ ID NO: 3599820 - DNA, 25 bp, Homo sapien
aaatgttggtctctataaaagacaa

SEQ ID NO: 3599821 - DNA, 25 bp, Homo sapien
tgttggtctctataaaagacaagcc

SEQ ID NO: 3599822 - DNA, 25 bp, Homo sapien
aagccttggtacagcatcacactcc

SEQ ID NO: 3599823 - DNA, 25 bp, Homo sapien
ttggctccatcaggtcttcacggca

SEQ ID NO: 3599824 - DNA, 25 bp, Homo sapien
ctcccttaattcttggctccatcag

SEQ ID NO: 3599825 - DNA, 25 bp, Homo sapien
cctcccttaattcttggctccatca

SEQ ID NO: 3599826 - DNA, 25 bp, Homo sapien
tcccttaattcttggctccatcagg

SEQ ID NO: 3599827 - DNA, 25 bp, Homo sapien
tcttctcctgcaacctgatggaaat

SEQ ID NO: 3599828 - DNA, 25 bp, Homo sapien
cttcttctcctgcaacctgatggaa

SEQ ID NO: 3599829 - DNA, 25 bp, Homo sapien
cttctcctgcaacctgatggaaata

SEQ ID NO: 3599830 - DNA, 25 bp, Homo sapien
ttctcctgcaacctgatggaaatac

SEQ ID NO: 3599831 - DNA, 25 bp, Homo sapien
tgggcccctgtgaatctgcttcttc

SEQ ID NO: 3599832 - DNA, 25 bp, Homo sapien
tcatgtggaaatcattaccggggtg

SEQ ID NO: 3599833 - DNA, 25 bp, Homo sapien
tgtggaaatcattaccggggtgcat

SEQ ID NO: 3599834 - DNA, 25 bp, Homo sapien
tcattaccggggtgcatgtaatact

SEQ ID NO: 3599835 - DNA, 25 bp, Homo sapien
tggaaatcattaccggggtgcatgt

SEQ ID NO: 3599836 - DNA, 25 bp, Homo sapien
ggtttgtcccatccaacgttcatca

SEQ ID NO: 3599837 - DNA, 25 bp, Homo sapien
tgtgatggatatgactaaggcttcc

SEQ ID NO: 3599838 - DNA, 25 bp, Homo sapien
tctgatgatcaaaaaccccttgtgt

SEQ ID NO: 3599839 - DNA, 25 bp, Homo sapien
tatttccctcccgtagtttctgatg

SEQ ID NO: 3599840 - DNA, 25 bp, Homo sapien
tctctcaacaacctcatgtttgatg

SEQ ID NO: 3599841 - DNA, 25 bp, Homo sapien
catttgttgttgggttaaatccaag

SEQ ID NO: 3599842 - DNA, 25 bp, Homo sapien
ttctgcttcatttgttgttgggtta

SEQ ID NO: 3599843 - DNA, 25 bp, Homo sapien
aagtctctcaacaacctcatgtttg

SEQ ID NO: 3599844 - DNA, 25 bp, Homo sapien
agtggacacctagcccaagcatcag

SEQ ID NO: 3599845 - DNA, 25 bp, Homo sapien
tcctatcgagtagtcagtgagcagg

SEQ ID NO: 3599846 - DNA, 25 bp, Homo sapien
aagtgccctttctcagagagtctgc

SEQ ID NO: 3599847 - DNA, 25 bp, Homo sapien
gctaactgaaccaagagtggacacc

SEQ ID NO: 3599848 - DNA, 25 bp, Homo sapien
tgctcagagggcagttgaaaccaca

SEQ ID NO: 3599849 - DNA, 25 bp, Homo sapien
tcagatgtaaaatcgcacacacggt

SEQ ID NO: 3599850 - DNA, 25 bp, Homo sapien
gctctggttgctgtatgggcaccaa

SEQ ID NO: 3599851 - DNA, 25 bp, Homo sapien
cacacacggttagagatgtgagtgc

SEQ ID NO: 3599852 - DNA, 25 bp, Homo sapien
ttttgcattctaagtggctgagtgt

SEQ ID NO: 3599853 - DNA, 25 bp, Homo sapien
ttctaagtggctgagtgtgagtgac

SEQ ID NO: 3599854 - DNA, 25 bp, Homo sapien
tttgtttttgcattctaagtggctg

SEQ ID NO: 3599855 - DNA, 25 bp, Homo sapien
tatcctggtatcttcatagagtttg

SEQ ID NO: 3599856 - DNA, 25 bp, Homo sapien
cgtcatagaggatttgggtctcttt

SEQ ID NO: 3599857 - DNA, 25 bp, Homo sapien
gcgtcatagaggatttgggtctctt

SEQ ID NO: 3599858 - DNA, 25 bp, Homo sapien
gtcatagaggatttgggtctctttt

SEQ ID NO: 3599859 - DNA, 25 bp, Homo sapien
catagaggatttgggtctctttttt

SEQ ID NO: 3599860 - DNA, 25 bp, Homo sapien
tgcctgtcttcaacatgtgaataat

SEQ ID NO: 3599861 - DNA, 25 bp, Homo sapien
ggtcagctaacacttgactcctggg

SEQ ID NO: 3599862 - DNA, 25 bp, Homo sapien
taattgggtcagctaacacttgact

SEQ ID NO: 3599863 - DNA, 25 bp, Homo sapien
gaataattgggtcagctaacacttg

SEQ ID NO: 3599864 - DNA, 25 bp, Homo sapien
ccttcttctctaactatgggacaca

SEQ ID NO: 3599865 - DNA, 25 bp, Homo sapien
tctaacacctcacttatcatctctt

SEQ ID NO: 3599866 - DNA, 25 bp, Homo sapien
cacatgtagagtgcccctatgtcca

SEQ ID NO: 3599867 - DNA, 25 bp, Homo sapien
tatgggacacatgtagagtgcccct

SEQ ID NO: 3599868 - DNA, 25 bp, Homo sapien
taggcgctataacacaggatgttct

SEQ ID NO: 3599869 - DNA, 25 bp, Homo sapien
ctgttcttcataggcgctataacac

SEQ ID NO: 3599870 - DNA, 25 bp, Homo sapien
gctataacacaggatgttctcagcc

SEQ ID NO: 3599871 - DNA, 25 bp, Homo sapien
tcttcataggcgctataacacagga

SEQ ID NO: 3599872 - DNA, 25 bp, Homo sapien
tgaaggtgacgtgaactgtgtacat

SEQ ID NO: 3599873 - DNA, 25 bp, Homo sapien
ggcttgaatactaactgacttgact

SEQ ID NO: 3599874 - DNA, 25 bp, Homo sapien
tgacttgacttgaaggtgacgtgaa

SEQ ID NO: 3599875 - DNA, 25 bp, Homo sapien
cagggcttgaatactaactgacttg

SEQ ID NO: 3599876 - DNA, 25 bp, Homo sapien
gttcttgatcttgagaggtgcttgc

SEQ ID NO: 3599877 - DNA, 25 bp, Homo sapien
ttcttgatcttgagaggtgcttgcc

SEQ ID NO: 3599878 - DNA, 25 bp, Homo sapien
ctcccatgacactcccatgccacaa

SEQ ID NO: 3599879 - DNA, 25 bp, Homo sapien
tcccatgacactcccatgccacaaa

SEQ ID NO: 3599880 - DNA, 25 bp, Homo sapien
ctttctctgctggtatcctccccac

SEQ ID NO: 3599881 - DNA, 25 bp, Homo sapien
ctagtgagcgctttctctctttctc

SEQ ID NO: 3599882 - DNA, 25 bp, Homo sapien
tctttctctgctggtatcctcccca

SEQ ID NO: 3599883 - DNA, 25 bp, Homo sapien
ctctctttctctgctggtatcctcc

SEQ ID NO: 3599884 - DNA, 25 bp, Homo sapien
tggctggtaactggaaacgactgta

SEQ ID NO: 3599885 - DNA, 25 bp, Homo sapien
gccgaaagtactggaagttcctgct

SEQ ID NO: 3599886 - DNA, 25 bp, Homo sapien
ctaccagctttgggccaggaaggcc

SEQ ID NO: 3599887 - DNA, 25 bp, Homo sapien
ctgtaagttggcatcaggctctctg

SEQ ID NO: 3599888 - DNA, 25 bp, Homo sapien
tcttttctcctgttaggccaggggc

SEQ ID NO: 3599889 - DNA, 25 bp, Homo sapien
aaactctagctaaatataggcatgc

SEQ ID NO: 3599890 - DNA, 25 bp, Homo sapien
tctgcttccgtacagtttgtggagg

SEQ ID NO: 3599891 - DNA, 25 bp, Homo sapien
aggccaggggctcttaagtatgttt

SEQ ID NO: 3599892 - DNA, 25 bp, Homo sapien
taaatgctttccaatctgtgtcttc

SEQ ID NO: 3599893 - DNA, 25 bp, Homo sapien
cataaatgctttccaatctgtgtct

SEQ ID NO: 3599894 - DNA, 25 bp, Homo sapien
gtgtcttctcctcttcgcaaaaact

SEQ ID NO: 3599895 - DNA, 25 bp, Homo sapien
ttctcctcttcgcaaaaactgctct

SEQ ID NO: 3599896 - DNA, 25 bp, Homo sapien
cacctagtggcttaaactgaaaata

SEQ ID NO: 3599897 - DNA, 25 bp, Homo sapien
agcccttttggcgagctgcggatag

SEQ ID NO: 3599898 - DNA, 25 bp, Homo sapien
gcggatagggttgaggcaccaccta

SEQ ID NO: 3599899 - DNA, 25 bp, Homo sapien
gcaagcccttttggcgagctgcgga

SEQ ID NO: 3599900 - DNA, 25 bp, Homo sapien
tgcggtcaacggagcagacccagaa

SEQ ID NO: 3599901 - DNA, 25 bp, Homo sapien
ccctcaaagaagcatgcggtcaacg

SEQ ID NO: 3599902 - DNA, 25 bp, Homo sapien
tcttcacatctctccggtgtaggga

SEQ ID NO: 3599903 - DNA, 25 bp, Homo sapien
tgggggttcctgaatcaaacagctc

SEQ ID NO: 3599904 - DNA, 25 bp, Homo sapien
catcatctctgatgcattctgcgga

SEQ ID NO: 3599905 - DNA, 25 bp, Homo sapien
gaagccatcatctctgatgcattct

SEQ ID NO: 3599906 - DNA, 25 bp, Homo sapien
attctgcggagggttcagcatggct

SEQ ID NO: 3599907 - DNA, 25 bp, Homo sapien
cagcaccataaacacagtgcagtgc

SEQ ID NO: 3599908 - DNA, 25 bp, Homo sapien
cccaacacactatattgccattgca

SEQ ID NO: 3599909 - DNA, 25 bp, Homo sapien
ctgagccagacgctgacccaacaca

SEQ ID NO: 3599910 - DNA, 25 bp, Homo sapien
cattgcactgtccaggacctgattc

SEQ ID NO: 3599911 - DNA, 25 bp, Homo sapien
ctatattgccattgcactgtccagg

SEQ ID NO: 3599912 - DNA, 25 bp, Homo sapien
tgctggtgtcaaaagccggagagaa

SEQ ID NO: 3599913 - DNA, 25 bp, Homo sapien
ctagtgaataacctccgtggccttt

SEQ ID NO: 3599914 - DNA, 25 bp, Homo sapien
agtcatactcgctgcatgctctgga

SEQ ID NO: 3599915 - DNA, 25 bp, Homo sapien
gactcatgggagcagacgttgcctg

SEQ ID NO: 3599916 - DNA, 25 bp, Homo sapien
tgacggtgtcaaatgacctaccgcc

SEQ ID NO: 3599917 - DNA, 25 bp, Homo sapien
tttcatgacggtgtcaaatgaccta

SEQ ID NO: 3599918 - DNA, 25 bp, Homo sapien
tggggccactctccccagatgagga

SEQ ID NO: 3599919 - DNA, 25 bp, Homo sapien
tcaaatgacctaccgcccaaggtgg

SEQ ID NO: 3599920 - DNA, 25 bp, Homo sapien
actctagacaaagtggttctccagc

SEQ ID NO: 3599921 - DNA, 25 bp, Homo sapien
ccttggttctatgggtgacagctct

SEQ ID NO: 3599922 - DNA, 25 bp, Homo sapien
ccagtatctgagaggattctcacca

SEQ ID NO: 3599923 - DNA, 25 bp, Homo sapien
tttacttaaggctccatcactgggt

SEQ ID NO: 3599924 - DNA, 25 bp, Homo sapien
gaatccccaaaggtcaagctaaata

SEQ ID NO: 3599925 - DNA, 25 bp, Homo sapien
tgtggcagttcacgccgcctgtaat

SEQ ID NO: 3599926 - DNA, 25 bp, Homo sapien
ctggtgtgactaaaacaagtatgat

SEQ ID NO: 3599927 - DNA, 25 bp, Homo sapien
aaaacaagtatgataaatcaggaac

SEQ ID NO: 3599928 - DNA, 25 bp, Homo sapien
caccatctttctcagcaaactattg

SEQ ID NO: 3599929 - DNA, 25 bp, Homo sapien
aacccaaatgtccaataatgataga

SEQ ID NO: 3599930 - DNA, 25 bp, Homo sapien
cacatatatgtttattgaggcacta

SEQ ID NO: 3599931 - DNA, 25 bp, Homo sapien
ttcacaatagcaaagacttggaacc

SEQ ID NO: 3599932 - DNA, 25 bp, Homo sapien
caggaataatccaaaagttttaatg

SEQ ID NO: 3599933 - DNA, 25 bp, Homo sapien
cacgaggtttggtaacagtgtccca

SEQ ID NO: 3599934 - DNA, 25 bp, Homo sapien
gactatcaggacttcagggcaaaca

SEQ ID NO: 3599935 - DNA, 25 bp, Homo sapien
tacacagattctactatgggccagg

SEQ ID NO: 3599936 - DNA, 25 bp, Homo sapien
tccaatagtggaacaggctgcctca

SEQ ID NO: 3599937 - DNA, 25 bp, Homo sapien
taatgttgagctacaaaccagaggg

SEQ ID NO: 3599938 - DNA, 25 bp, Homo sapien
tgagatggccatcccagaaacaagg

SEQ ID NO: 3599939 - DNA, 25 bp, Homo sapien
tagttttctgaaatcgctagccagc

SEQ ID NO: 3599940 - DNA, 25 bp, Homo sapien
tctccacagggtagctgatcgtcag

SEQ ID NO: 3599941 - DNA, 25 bp, Homo sapien
cagagcgacttcttgctgtgccaca

SEQ ID NO: 3599942 - DNA, 25 bp, Homo sapien
cttcgcagtgcggtggtgaaaccca

SEQ ID NO: 3599943 - DNA, 25 bp, Homo sapien
cagcagaggcctaaaaccatggact

SEQ ID NO: 3599944 - DNA, 25 bp, Homo sapien
tgaccacgatgtcgggtaactcggc

SEQ ID NO: 3599945 - DNA, 25 bp, Homo sapien
tcccggcggagtgcagggtcatcgg

SEQ ID NO: 3599946 - DNA, 25 bp, Homo sapien
cggagaaacgcctgccccagaaagg

SEQ ID NO: 3599947 - DNA, 25 bp, Homo sapien
cggagcctcagtgcgcctcggagaa

SEQ ID NO: 3599948 - DNA, 25 bp, Homo sapien
tcatcgggagccccggacggctttc

SEQ ID NO: 3599949 - DNA, 25 bp, Homo sapien
cgcttgctcccgggctggcttccag

SEQ ID NO: 3599950 - DNA, 25 bp, Homo sapien
ttgctcccgggctggcttccagacc

SEQ ID NO: 3599951 - DNA, 25 bp, Homo sapien
gcttgctcccgggctggcttccaga

SEQ ID NO: 3599952 - DNA, 25 bp, Homo sapien
cttgctcccgggctggcttccagac

SEQ ID NO: 3599953 - DNA, 25 bp, Homo sapien
cttctgcaggtcagtacagccagca

SEQ ID NO: 3599954 - DNA, 25 bp, Homo sapien
tgttcctttagtttccagccgacag

SEQ ID NO: 3599955 - DNA, 25 bp, Homo sapien
gaaaaaggcatagtcactccacatg

SEQ ID NO: 3599956 - DNA, 25 bp, Homo sapien
tattcttgctttgacagcggtccgg

SEQ ID NO: 3599957 - DNA, 25 bp, Homo sapien
tctaccacgtctagatgacactgca

SEQ ID NO: 3599958 - DNA, 25 bp, Homo sapien
ggtcacagcgccactcctactttgt

SEQ ID NO: 3599959 - DNA, 25 bp, Homo sapien
atgaagtcctcagacccggtcacag

SEQ ID NO: 3599960 - DNA, 25 bp, Homo sapien
ccgccaccagtgatttctataagag

SEQ ID NO: 3599961 - DNA, 25 bp, Homo sapien
tcaaagctacaatgggcttggctgc

SEQ ID NO: 3599962 - DNA, 25 bp, Homo sapien
ttaagcagagctaggcatagacagc

SEQ ID NO: 3599963 - DNA, 25 bp, Homo sapien
agccatttatgccaccccggtgctg

SEQ ID NO: 3599964 - DNA, 25 bp, Homo sapien
gaatgttaagtattcaccagcagtg

SEQ ID NO: 3599965 - DNA, 25 bp, Homo sapien
ggtgcctttggacctttcagtgaca

SEQ ID NO: 3599966 - DNA, 25 bp, Homo sapien
tttggacctttcagtgacatccagg

SEQ ID NO: 3599967 - DNA, 25 bp, Homo sapien
ctttccctgagagcattccagatcc

SEQ ID NO: 3599968 - DNA, 25 bp, Homo sapien
gggcctcttcgctgtgctttccctg

SEQ ID NO: 3599969 - DNA, 25 bp, Homo sapien
gcaggattggaataggagtttctcc

SEQ ID NO: 3599970 - DNA, 25 bp, Homo sapien
gatggtcaagactcctgtcctccct

SEQ ID NO: 3599971 - DNA, 25 bp, Homo sapien
aaaacacagtgaatgggtttaggat

SEQ ID NO: 3599972 - DNA, 25 bp, Homo sapien
aatgggtttaggatggtcaagactc

SEQ ID NO: 3599973 - DNA, 25 bp, Homo sapien
cagagtttagaaaggtggcggccac

SEQ ID NO: 3599974 - DNA, 25 bp, Homo sapien
tgtaagtggaaaccctgatcacccc

SEQ ID NO: 3599975 - DNA, 25 bp, Homo sapien
gacagcagatctcctgagggcatgg

SEQ ID NO: 3599976 - DNA, 25 bp, Homo sapien
tcatcatttcgccagacagcagatc

SEQ ID NO: 3599977 - DNA, 25 bp, Homo sapien
gatttcttcaacaggctttgggagt

SEQ ID NO: 3599978 - DNA, 25 bp, Homo sapien
tctaaaggggagtgagttgcctcct

SEQ ID NO: 3599979 - DNA, 25 bp, Homo sapien
gggatgctcaaggttcactggaagg

SEQ ID NO: 3599980 - DNA, 25 bp, Homo sapien
gagttgcctcctggggatgctcaag

SEQ ID NO: 3599981 - DNA, 25 bp, Homo sapien
ctaaagtctttagggtgagtgcact

SEQ ID NO: 3599982 - DNA, 25 bp, Homo sapien
caaaactctctatggtaacctcagg

SEQ ID NO: 3599983 - DNA, 25 bp, Homo sapien
taacctcagggcataaacctaagga

SEQ ID NO: 3599984 - DNA, 25 bp, Homo sapien
gcactgatggcttagcttactttga

SEQ ID NO: 3599985 - DNA, 25 bp, Homo sapien
aatattaatgtggactggtgtgacc

SEQ ID NO: 3599986 - DNA, 25 bp, Homo sapien
caggcttgccccagactgaaggata

SEQ ID NO: 3599987 - DNA, 25 bp, Homo sapien
tggtgctccccacgctttagttatg

SEQ ID NO: 3599988 - DNA, 25 bp, Homo sapien
taacgtggaccagacaatattaatg

SEQ ID NO: 3599989 - DNA, 25 bp, Homo sapien
ttatttagcataatcaatgatatac

SEQ ID NO: 3599990 - DNA, 25 bp, Homo sapien
gcatgactgatggaagacattttaa

SEQ ID NO: 3599991 - DNA, 25 bp, Homo sapien
gttaaacccagatcttcaaatcagt

SEQ ID NO: 3599992 - DNA, 25 bp, Homo sapien
gatgctccttctagatgttatttac

SEQ ID NO: 3599993 - DNA, 25 bp, Homo sapien
tcagagaatttgagccacttggtca

SEQ ID NO: 3599994 - DNA, 25 bp, Homo sapien
gatgagtgcaacctgatgttcagag

SEQ ID NO: 3599995 - DNA, 25 bp, Homo sapien
tctgccaggcatcatgtctctgtcc

SEQ ID NO: 3599996 - DNA, 25 bp, Homo sapien
catggatcagaatcttgtaaagcac

SEQ ID NO: 3599997 - DNA, 25 bp, Homo sapien
gaaacccagatggactactaccaag

SEQ ID NO: 3599998 - DNA, 25 bp, Homo sapien
tccatcttagcagagtaactcggga

SEQ ID NO: 3599999 - DNA, 25 bp, Homo sapien
aaatggtacgctgaaaaatcttgca

SEQ ID NO: 3600000 - DNA, 25 bp, Homo sapien
tttaatcaaataggactgagagccc

SEQ ID NO: 3600001 - DNA, 25 bp, Homo sapien
cacgttcactatcaagagctaagca

SEQ ID NO: 3600002 - DNA, 25 bp, Homo sapien
aaacctaatggtacttctggctgag

SEQ ID NO: 3600003 - DNA, 25 bp, Homo sapien
acagaatggtggcttatggacgctt

SEQ ID NO: 3600004 - DNA, 25 bp, Homo sapien
gccagttcccaaggtacacgttcac

SEQ ID NO: 3600005 - DNA, 25 bp, Homo sapien
ggcgaggacccatcacctttaggct

SEQ ID NO: 3600006 - DNA, 25 bp, Homo sapien
catggtagcactaagcctaggcgag

SEQ ID NO: 3600007 - DNA, 25 bp, Homo sapien
gactgtaaatctggccgaggctgag

SEQ ID NO: 3600008 - DNA, 25 bp, Homo sapien
tgggaactgacagctcaaggactct

SEQ ID NO: 3600009 - DNA, 25 bp, Homo sapien
gcataggcgtcgctatcctcttcct

SEQ ID NO: 3600010 - DNA, 25 bp, Homo sapien
cacagagagagtgtggttaagcgca

SEQ ID NO: 3600011 - DNA, 25 bp, Homo sapien
tcgatggtcaacgagctggcggctc

SEQ ID NO: 3600012 - DNA, 25 bp, Homo sapien
tcctccaaaagcagcttgtcgatgg

SEQ ID NO: 3600013 - DNA, 25 bp, Homo sapien
gatcttgttagaacgcagcttctgg

SEQ ID NO: 3600014 - DNA, 25 bp, Homo sapien
ttgcatgtctaatcagatctcaggg

SEQ ID NO: 3600015 - DNA, 25 bp, Homo sapien
gaatgctctgcgagtcatacctctc

SEQ ID NO: 3600016 - DNA, 25 bp, Homo sapien
tatatccctcctactgtcactgtgt

SEQ ID NO: 3600017 - DNA, 25 bp, Homo sapien
tctgctgatcaggagtgtggactta

SEQ ID NO: 3600018 - DNA, 25 bp, Homo sapien
gacagaatccgggaaagcctcatga

SEQ ID NO: 3600019 - DNA, 25 bp, Homo sapien
taactataggtttctttgctcggga

SEQ ID NO: 3600020 - DNA, 25 bp, Homo sapien
tgaaatccgggctgaggtgtacacc

SEQ ID NO: 3600021 - DNA, 25 bp, Homo sapien
gcttctgcaggcctttcatagaagg

SEQ ID NO: 3600022 - DNA, 25 bp, Homo sapien
aattcccagtcctttagtcgaacag

SEQ ID NO: 3600023 - DNA, 25 bp, Homo sapien
ccaccatcgaaggtgggctctggga

SEQ ID NO: 3600024 - DNA, 25 bp, Homo sapien
gctggatacagctgtaaccacaggt

SEQ ID NO: 3600025 - DNA, 25 bp, Homo sapien
cataggtcaacactgaggagggccc

SEQ ID NO: 3600026 - DNA, 25 bp, Homo sapien
gctgacagcttcatggggcacatac

SEQ ID NO: 3600027 - DNA, 25 bp, Homo sapien
tgcacatacatgtcagctgagtagg

SEQ ID NO: 3600028 - DNA, 25 bp, Homo sapien
catactcggtgtaaggtgtccatgg

SEQ ID NO: 3600029 - DNA, 25 bp, Homo sapien
ggtgtaggtcgccaggggctgatgg

SEQ ID NO: 3600030 - DNA, 25 bp, Homo sapien
gtggtgtaggtcgccaggggctgat

SEQ ID NO: 3600031 - DNA, 25 bp, Homo sapien
tggtgtaggtcgccaggggctgatg

SEQ ID NO: 3600032 - DNA, 25 bp, Homo sapien
tgtggtgtaggtcgccaggggctga

SEQ ID NO: 3600033 - DNA, 25 bp, Homo sapien
gctggcgtggcctcgcttcctcctc

SEQ ID NO: 3600034 - DNA, 25 bp, Homo sapien
tgctggcgtggcctcgcttcctcct

SEQ ID NO: 3600035 - DNA, 25 bp, Homo sapien
cggacgccctggtatggccgggccg

SEQ ID NO: 3600036 - DNA, 25 bp, Homo sapien
ctgtgaaaagcaatgtccctggagc

SEQ ID NO: 3600037 - DNA, 25 bp, Homo sapien
gaaaagcaatgtccctggagcccat

SEQ ID NO: 3600038 - DNA, 25 bp, Homo sapien
gtgaaaagcaatgtccctggagccc

SEQ ID NO: 3600039 - DNA, 25 bp, Homo sapien
tgtgaaaagcaatgtccctggagcc

SEQ ID NO: 3600040 - DNA, 25 bp, Homo sapien
ttcttgctgacacaagacaaatgca

SEQ ID NO: 3600041 - DNA, 25 bp, Homo sapien
tgaggttttccgtggtcagaattcc

SEQ ID NO: 3600042 - DNA, 25 bp, Homo sapien
tggttgaggttttccgtggtcagaa

SEQ ID NO: 3600043 - DNA, 25 bp, Homo sapien
gacacaagacaaatgcaaccctcct

SEQ ID NO: 3600044 - DNA, 25 bp, Homo sapien
aatgacatggttttagtctccccac

SEQ ID NO: 3600045 - DNA, 25 bp, Homo sapien
gggtgagtcactcttgcacaagttc

SEQ ID NO: 3600046 - DNA, 25 bp, Homo sapien
gcatttaatacatgtgagctccgat

SEQ ID NO: 3600047 - DNA, 25 bp, Homo sapien
ccatgtctggcatagggtagatgct

SEQ ID NO: 3600048 - DNA, 25 bp, Homo sapien
gatacgggcatgcaatgcacactca

SEQ ID NO: 3600049 - DNA, 25 bp, Homo sapien
ttggatacgggcatgcaatgcacac

SEQ ID NO: 3600050 - DNA, 25 bp, Homo sapien
cgggcatgcaatgcacactcatcac

SEQ ID NO: 3600051 - DNA, 25 bp, Homo sapien
catgcaatgcacactcatcacatca

SEQ ID NO: 3600052 - DNA, 25 bp, Homo sapien
ttctaagtcgatgaacaaagagcgc

SEQ ID NO: 3600053 - DNA, 25 bp, Homo sapien
cttgtcaagagagggcttcccgcct

SEQ ID NO: 3600054 - DNA, 25 bp, Homo sapien
ccgcctcctactgtttctaagtcga

SEQ ID NO: 3600055 - DNA, 25 bp, Homo sapien
cgatgaacaaagagcgcttggtgga

SEQ ID NO: 3600056 - DNA, 25 bp, Homo sapien
ttcctattgacgttgcaggactccc

SEQ ID NO: 3600057 - DNA, 25 bp, Homo sapien
ctattgacgttgcaggactcccaca

SEQ ID NO: 3600058 - DNA, 25 bp, Homo sapien
ctgactgcccggcacgtgtccacag

SEQ ID NO: 3600059 - DNA, 25 bp, Homo sapien
ctcttcctattgacgttgcaggact

SEQ ID NO: 3600060 - DNA, 25 bp, Homo sapien
tctcggccctgattggagatctcct

SEQ ID NO: 3600061 - DNA, 25 bp, Homo sapien
taagtctcccgtaggtatccaagag

SEQ ID NO: 3600062 - DNA, 25 bp, Homo sapien
agcctctcggccctgattggagatc

SEQ ID NO: 3600063 - DNA, 25 bp, Homo sapien
tccatcacggaggaaaatctttcca

SEQ ID NO: 3600064 - DNA, 25 bp, Homo sapien
gggcttcccttttccaaaatgagca

SEQ ID NO: 3600065 - DNA, 25 bp, Homo sapien
tggaagtcaagccaatggagtttga

SEQ ID NO: 3600066 - DNA, 25 bp, Homo sapien
cattaatttggcccctataagggct

SEQ ID NO: 3600067 - DNA, 25 bp, Homo sapien
caagccaatggagtttgagggggaa

SEQ ID NO: 3600068 - DNA, 25 bp, Homo sapien
taaaccttgtagccgtacaaggcca

SEQ ID NO: 3600069 - DNA, 25 bp, Homo sapien
cttgtagccgtacaaggccattttg

SEQ ID NO: 3600070 - DNA, 25 bp, Homo sapien
gtagccgtacaaggccattttgcaa

SEQ ID NO: 3600071 - DNA, 25 bp, Homo sapien
caggtaaaccttgtagccgtacaag

SEQ ID NO: 3600072 - DNA, 25 bp, Homo sapien
tgggaaaggctgaaccagggtccac

SEQ ID NO: 3600073 - DNA, 25 bp, Homo sapien
aatttccccagacctaggcaagcca

SEQ ID NO: 3600074 - DNA, 25 bp, Homo sapien
gggtccacggtcactgagaatttcc

SEQ ID NO: 3600075 - DNA, 25 bp, Homo sapien
gagaatttccccagacctaggcaag

SEQ ID NO: 3600076 - DNA, 25 bp, Homo sapien
ggccttgagtgcgagaggtttccac

SEQ ID NO: 3600077 - DNA, 25 bp, Homo sapien
agcatttacaccctaaggcctcagg

SEQ ID NO: 3600078 - DNA, 25 bp, Homo sapien
cctcacaggcaagactcccagggat

SEQ ID NO: 3600079 - DNA, 25 bp, Homo sapien
caggattacttggattgtccctaaa

SEQ ID NO: 3600080 - DNA, 25 bp, Homo sapien
gaagctctaggttgagatccaggca

SEQ ID NO: 3600081 - DNA, 25 bp, Homo sapien
tgccctaagcagatagaagaatccc

SEQ ID NO: 3600082 - DNA, 25 bp, Homo sapien
tcttgaggacaagagccacatgcca

SEQ ID NO: 3600083 - DNA, 25 bp, Homo sapien
tatgtgagagaaaggacaccactgt

SEQ ID NO: 3600084 - DNA, 25 bp, Homo sapien
ctgctctcatccacacagcactcac

SEQ ID NO: 3600085 - DNA, 25 bp, Homo sapien
cattgtcccagaaaggataggctgc

SEQ ID NO: 3600086 - DNA, 25 bp, Homo sapien
ctgccattgtcccagaaaggatagg

SEQ ID NO: 3600087 - DNA, 25 bp, Homo sapien
ttgtcccagaaaggataggctgccg

SEQ ID NO: 3600088 - DNA, 25 bp, Homo sapien
cccagaaaggataggctgccgctgc

SEQ ID NO: 3600089 - DNA, 25 bp, Homo sapien
cctttgcagtgggatggacaagcct

SEQ ID NO: 3600090 - DNA, 25 bp, Homo sapien
caggcccagggaattcaacagaagg

SEQ ID NO: 3600091 - DNA, 25 bp, Homo sapien
taaggtaagtcgctgtttggtccac

SEQ ID NO: 3600092 - DNA, 25 bp, Homo sapien
gggacaagtcacacctggcagaaag

SEQ ID NO: 3600093 - DNA, 25 bp, Homo sapien
tctctttgaagccgacagtttggct

SEQ ID NO: 3600094 - DNA, 25 bp, Homo sapien
ctctttgaagccgacagtttggctt

SEQ ID NO: 3600095 - DNA, 25 bp, Homo sapien
ttctctttgaagccgacagtttggc

SEQ ID NO: 3600096 - DNA, 25 bp, Homo sapien
tggagccaccgcttgagctgaggct

SEQ ID NO: 3600097 - DNA, 25 bp, Homo sapien
tgcgtgggccgcgtcatcacatcct

SEQ ID NO: 3600098 - DNA, 25 bp, Homo sapien
taaaggcctgggttcccgctgcgtg

SEQ ID NO: 3600099 - DNA, 25 bp, Homo sapien
cacctcaggcaccggtgcaacgttt

SEQ ID NO: 3600100 - DNA, 25 bp, Homo sapien
ccaggccgcctgtcaccccactgtg

SEQ ID NO: 3600101 - DNA, 25 bp, Homo sapien
tcaccccactgtgcgcgccccagcg

SEQ ID NO: 3600102 - DNA, 25 bp, Homo sapien
gtcaccccactgtgcgcgccccagc

SEQ ID NO: 3600103 - DNA, 25 bp, Homo sapien
cccaggccagtgatgagcccaaaag

SEQ ID NO: 3600104 - DNA, 25 bp, Homo sapien
caaaagctcctctggaaaacgttga

SEQ ID NO: 3600105 - DNA, 25 bp, Homo sapien
gttgatctttgcacggcgcccatgc

SEQ ID NO: 3600106 - DNA, 25 bp, Homo sapien
caagctgtgggaaccccgtgtcaag

SEQ ID NO: 3600107 - DNA, 25 bp, Homo sapien
tttggggtcaagaccccttggcaca

SEQ ID NO: 3600108 - DNA, 25 bp, Homo sapien
gtagatggtgttggctaccggttcc

SEQ ID NO: 3600109 - DNA, 25 bp, Homo sapien
tggctaccggttccttcacagtttg

SEQ ID NO: 3600110 - DNA, 25 bp, Homo sapien
tgccactgcatatctgaggtccaca

SEQ ID NO: 3600111 - DNA, 25 bp, Homo sapien
tctgaagtaggaggcaactgccact

SEQ ID NO: 3600112 - DNA, 25 bp, Homo sapien
cctttaagaacgagttgctggccca

SEQ ID NO: 3600113 - DNA, 25 bp, Homo sapien
tgattacacaagtccagagaacacc

SEQ ID NO: 3600114 - DNA, 25 bp, Homo sapien
caaaatgtggcccttaaggagatca

SEQ ID NO: 3600115 - DNA, 25 bp, Homo sapien
aattgtgccaagttctattccaggc

SEQ ID NO: 3600116 - DNA, 25 bp, Homo sapien
atcatgtaattgtgccaagttctat

SEQ ID NO: 3600117 - DNA, 25 bp, Homo sapien
tgtaattgtgccaagttctattcca

SEQ ID NO: 3600118 - DNA, 25 bp, Homo sapien
tcatgtaattgtgccaagttctatt

SEQ ID NO: 3600119 - DNA, 25 bp, Homo sapien
tattttcattattcgattgttagtt

SEQ ID NO: 3600120 - DNA, 25 bp, Homo sapien
tcattattcgattgttagtttctta

SEQ ID NO: 3600121 - DNA, 25 bp, Homo sapien
ttttcattattcgattgttagtttc

SEQ ID NO: 3600122 - DNA, 25 bp, Homo sapien
cattattcgattgttagtttcttac

SEQ ID NO: 3600123 - DNA, 25 bp, Homo sapien
tattcattgccactggctaggaaca

SEQ ID NO: 3600124 - DNA, 25 bp, Homo sapien
ttgcccacagctaattttcaattag

SEQ ID NO: 3600125 - DNA, 25 bp, Homo sapien
cagtgtcgagaacatataaactctg

SEQ ID NO: 3600126 - DNA, 25 bp, Homo sapien
agtgtttcatactgtggtttgccca

SEQ ID NO: 3600127 - DNA, 25 bp, Homo sapien
tatcttctcgctgatttgttttcct

SEQ ID NO: 3600128 - DNA, 25 bp, Homo sapien
gggtaaggggcagtatcttctcgct

SEQ ID NO: 3600129 - DNA, 25 bp, Homo sapien
aactggtaggtgttcacagggcatc

SEQ ID NO: 3600130 - DNA, 25 bp, Homo sapien
ggtgtcagccaactggtaggtgttc

SEQ ID NO: 3600131 - DNA, 25 bp, Homo sapien
tgtatcccaatactaagaatagtgc

SEQ ID NO: 3600132 - DNA, 25 bp, Homo sapien
tcccaatactaagaatagtgcttat

SEQ ID NO: 3600133 - DNA, 25 bp, Homo sapien
tgatgtatcccaatactaagaatag

SEQ ID NO: 3600134 - DNA, 25 bp, Homo sapien
attgatgtatcccaatactaagaat

SEQ ID NO: 3600135 - DNA, 25 bp, Homo sapien
tcttatttacggtgttttcaggcca

SEQ ID NO: 3600136 - DNA, 25 bp, Homo sapien
actacacttcaagtgatgctttggg

SEQ ID NO: 3600137 - DNA, 25 bp, Homo sapien
tgttttcaggccataaagacactac

SEQ ID NO: 3600138 - DNA, 25 bp, Homo sapien
acatttcagcagaacgttcaggaaa

SEQ ID NO: 3600139 - DNA, 25 bp, Homo sapien
caagagttccatgatctctaattca

SEQ ID NO: 3600140 - DNA, 25 bp, Homo sapien
aagagttccatgatctctaattcag

SEQ ID NO: 3600141 - DNA, 25 bp, Homo sapien
tgggttgcccaatctgtggaagccc

SEQ ID NO: 3600142 - DNA, 25 bp, Homo sapien
tggaggctttcattacctttggctc

SEQ ID NO: 3600143 - DNA, 25 bp, Homo sapien
caggaggtgcccttgaagccacaat

SEQ ID NO: 3600144 - DNA, 25 bp, Homo sapien
ttcctgtaggatccccagctgcggc

SEQ ID NO: 3600145 - DNA, 25 bp, Homo sapien
gagcagaggacactaaagagagata

SEQ ID NO: 3600146 - DNA, 25 bp, Homo sapien
agaggacactaaagagagataatga

SEQ ID NO: 3600147 - DNA, 25 bp, Homo sapien
agagcagaggacactaaagagagat

SEQ ID NO: 3600148 - DNA, 25 bp, Homo sapien
gcagaggacactaaagagagataat

SEQ ID NO: 3600149 - DNA, 25 bp, Homo sapien
tgggtgaagaatgtcctttttcttg

SEQ ID NO: 3600150 - DNA, 25 bp, Homo sapien
ctcagtgaatatggcaggagctgct

SEQ ID NO: 3600151 - DNA, 25 bp, Homo sapien
gctgctgggtgaagaatgtcctttt

SEQ ID NO: 3600152 - DNA, 25 bp, Homo sapien
atctcagtgaatatggcaggagctg

SEQ ID NO: 3600153 - DNA, 25 bp, Homo sapien
aatgagatccgggtcacttgaaagc

SEQ ID NO: 3600154 - DNA, 25 bp, Homo sapien
tgagtgggtccacctacatgggttg

SEQ ID NO: 3600155 - DNA, 25 bp, Homo sapien
actagatggtgttctcgtccgggca

SEQ ID NO: 3600156 - DNA, 25 bp, Homo sapien
gacaggcttatgattctctcccaca

SEQ ID NO: 3600157 - DNA, 25 bp, Homo sapien
acacagggcaagatcagtgcctcct

SEQ ID NO: 3600158 - DNA, 25 bp, Homo sapien
caggcaaaactgatttgcatgggca

SEQ ID NO: 3600159 - DNA, 25 bp, Homo sapien
aacacagggcaagatcagtgcctcc

SEQ ID NO: 3600160 - DNA, 25 bp, Homo sapien
aaacacagggcaagatcagtgcctc

SEQ ID NO: 3600161 - DNA, 25 bp, Homo sapien
tagaaggaaacttgaagcctgaagt

SEQ ID NO: 3600162 - DNA, 25 bp, Homo sapien
tcctagaaggaaacttgaagcctga

SEQ ID NO: 3600163 - DNA, 25 bp, Homo sapien
ctcctagaaggaaacttgaagcctg

SEQ ID NO: 3600164 - DNA, 25 bp, Homo sapien
cctagaaggaaacttgaagcctgaa

SEQ ID NO: 3600165 - DNA, 25 bp, Homo sapien
gagatgagcacttaacagaaaacaa

SEQ ID NO: 3600166 - DNA, 25 bp, Homo sapien
ggtcgggggagatgagcacttaaca

SEQ ID NO: 3600167 - DNA, 25 bp, Homo sapien
cgggggagatgagcacttaacagaa

SEQ ID NO: 3600168 - DNA, 25 bp, Homo sapien
gggagatgagcacttaacagaaaac

SEQ ID NO: 3600169 - DNA, 25 bp, Homo sapien
tgcagggagccaagatcacaccact

SEQ ID NO: 3600170 - DNA, 25 bp, Homo sapien
ggagccaagatcacaccactgcact

SEQ ID NO: 3600171 - DNA, 25 bp, Homo sapien
tcactcgagcctaggaggtcgaggc

SEQ ID NO: 3600172 - DNA, 25 bp, Homo sapien
aggatcactcgagcctaggaggtcg

SEQ ID NO: 3600173 - DNA, 25 bp, Homo sapien
taaactttgagggactcacgcccca

SEQ ID NO: 3600174 - DNA, 25 bp, Homo sapien
tcctgaggtcaggtcggagcacaaa

SEQ ID NO: 3600175 - DNA, 25 bp, Homo sapien
gaaacgccgttagtcacatcatgga

SEQ ID NO: 3600176 - DNA, 25 bp, Homo sapien
tcttgtcacaaggtcatcgcctagg

SEQ ID NO: 3600177 - DNA, 25 bp, Homo sapien
caggacattggtgcattttctcccc

SEQ ID NO: 3600178 - DNA, 25 bp, Homo sapien
tgctcctcagcagacacctcaggtt

SEQ ID NO: 3600179 - DNA, 25 bp, Homo sapien
gaccctgtagccagtgactcctgac

SEQ ID NO: 3600180 - DNA, 25 bp, Homo sapien
gagactccctgtgtcaggacattgg

SEQ ID NO: 3600181 - DNA, 25 bp, Homo sapien
tggaaccaggaaatctccgaggcct

SEQ ID NO: 3600182 - DNA, 25 bp, Homo sapien
tctccgaggcctgagctcctttcag

SEQ ID NO: 3600183 - DNA, 25 bp, Homo sapien
gagctgaggactgttaagacgaaag

SEQ ID NO: 3600184 - DNA, 25 bp, Homo sapien
taagacgaaaggacattggaaccag

SEQ ID NO: 3600185 - DNA, 25 bp, Homo sapien
aaagcaaggaaactagcctgggctc

SEQ ID NO: 3600186 - DNA, 25 bp, Homo sapien
catccacagcccaagtcgatacaat

SEQ ID NO: 3600187 - DNA, 25 bp, Homo sapien
tactgagagtgacacggatagatga

SEQ ID NO: 3600188 - DNA, 25 bp, Homo sapien
aatccagtgccccaggatactgaga

SEQ ID NO: 3600189 - DNA, 25 bp, Homo sapien
tttcccattgctaccagagcccagg

SEQ ID NO: 3600190 - DNA, 25 bp, Homo sapien
tgctccagagatcctgactcctcag

SEQ ID NO: 3600191 - DNA, 25 bp, Homo sapien
cagagatcctgactcctcagttttc

SEQ ID NO: 3600192 - DNA, 25 bp, Homo sapien
aggccggcctgaattccagatgatg

SEQ ID NO: 3600193 - DNA, 25 bp, Homo sapien
caaacacaattgatttacaatccca

SEQ ID NO: 3600194 - DNA, 25 bp, Homo sapien
gcaaacacaattgatttacaatccc

SEQ ID NO: 3600195 - DNA, 25 bp, Homo sapien
ttgcaaacacaattgatttacaatc

SEQ ID NO: 3600196 - DNA, 25 bp, Homo sapien
aaacacaattgatttacaatcccac

SEQ ID NO: 3600197 - DNA, 25 bp, Homo sapien
ttccttttgccaatgcctggggact

SEQ ID NO: 3600198 - DNA, 25 bp, Homo sapien
ttgccaatgcctggggactatggca

SEQ ID NO: 3600199 - DNA, 25 bp, Homo sapien
ccttttgccaatgcctggggactat

SEQ ID NO: 3600200 - DNA, 25 bp, Homo sapien
caatgcctggggactatggcattgg

SEQ ID NO: 3600201 - DNA, 25 bp, Homo sapien
cagtgtgagaggcaggaatttctgc

SEQ ID NO: 3600202 - DNA, 25 bp, Homo sapien
agtgtgagaggcaggaatttctgca

SEQ ID NO: 3600203 - DNA, 25 bp, Homo sapien
gctgcctcaggttcgtggtaaccag

SEQ ID NO: 3600204 - DNA, 25 bp, Homo sapien
tggtaaccaggaatacagtgtgagg

SEQ ID NO: 3600205 - DNA, 25 bp, Homo sapien
ggctgcctcaggttcgtggtaacca

SEQ ID NO: 3600206 - DNA, 25 bp, Homo sapien
caggttcgtggtaaccaggaataca

SEQ ID NO: 3600207 - DNA, 25 bp, Homo sapien
agaactctgaagtgtagcagtacgt

SEQ ID NO: 3600208 - DNA, 25 bp, Homo sapien
tctgttggccagagtacactagcac

SEQ ID NO: 3600209 - DNA, 25 bp, Homo sapien
gcagtacgtgccctggaggatctaa

SEQ ID NO: 3600210 - DNA, 25 bp, Homo sapien
actctccagcaagacacaactcgga

SEQ ID NO: 3600211 - DNA, 25 bp, Homo sapien
acataatacttctgggtccagccca

SEQ ID NO: 3600212 - DNA, 25 bp, Homo sapien
cacgaaagcataccgctcagggttt

SEQ ID NO: 3600213 - DNA, 25 bp, Homo sapien
gcagctccccagagatgacacttga

SEQ ID NO: 3600214 - DNA, 25 bp, Homo sapien
gacttggcttggcaccacgaaagca

SEQ ID NO: 3600215 - DNA, 25 bp, Homo sapien
caggtttgtggacactcgtgcccac

SEQ ID NO: 3600216 - DNA, 25 bp, Homo sapien
ggtttgtggacactcgtgcccactg

SEQ ID NO: 3600217 - DNA, 25 bp, Homo sapien
gtttgtggacactcgtgcccactgc

SEQ ID NO: 3600218 - DNA, 25 bp, Homo sapien
aggtttgtggacactcgtgcccact

SEQ ID NO: 3600219 - DNA, 25 bp, Homo sapien
ggacctcccccgcagaagagttctg

SEQ ID NO: 3600220 - DNA, 25 bp, Homo sapien
aggctgaggacctcccccgcagaag

SEQ ID NO: 3600221 - DNA, 25 bp, Homo sapien
agctgcacgatttcccaaatgctct

SEQ ID NO: 3600222 - DNA, 25 bp, Homo sapien
ccacaagctgcacgatttcccaaat

SEQ ID NO: 3600223 - DNA, 25 bp, Homo sapien
ttggctcgcgtgtgggtgtttgttg

SEQ ID NO: 3600224 - DNA, 25 bp, Homo sapien
aggcgccctcgagcgagcgccgttt

SEQ ID NO: 3600225 - DNA, 25 bp, Homo sapien
agcgagcgccgtttgttttgctgag

SEQ ID NO: 3600226 - DNA, 25 bp, Homo sapien
tgagagtttccgttggctcgcgtgt

SEQ ID NO: 3600227 - DNA, 25 bp, Homo sapien
ggaagtagagccttggagatgtcca

SEQ ID NO: 3600228 - DNA, 25 bp, Homo sapien
gaagtagagccttggagatgtccaa

SEQ ID NO: 3600229 - DNA, 25 bp, Homo sapien
ccaagctgaccctgttattaagggc

SEQ ID NO: 3600230 - DNA, 25 bp, Homo sapien
tgctgccagacctagatctgccctt

SEQ ID NO: 3600231 - DNA, 25 bp, Homo sapien
ctcagttgctgccagacctagatct

SEQ ID NO: 3600232 - DNA, 25 bp, Homo sapien
agttgctgccagacctagatctgcc

SEQ ID NO: 3600233 - DNA, 25 bp, Homo sapien
tagatctgcccttttcagatttttg

SEQ ID NO: 3600234 - DNA, 25 bp, Homo sapien
gggggaatgccccagacttgtccca

SEQ ID NO: 3600235 - DNA, 25 bp, Homo sapien
gggaatgccccagacttgtcccatc

SEQ ID NO: 3600236 - DNA, 25 bp, Homo sapien
agcccttgcagaatggcaccagcaa

SEQ ID NO: 3600237 - DNA, 25 bp, Homo sapien
ttgcagaatggcaccagcaacaagc

SEQ ID NO: 3600238 - DNA, 25 bp, Homo sapien
agcatctatacctccactcctattg

SEQ ID NO: 3600239 - DNA, 25 bp, Homo sapien
tgtgtatcgtgccaacagggtccgg

SEQ ID NO: 3600240 - DNA, 25 bp, Homo sapien
tctatacctccactcctattgtgta

SEQ ID NO: 3600241 - DNA, 25 bp, Homo sapien
ccactcctattgtgtatcgtgccaa

SEQ ID NO: 3600242 - DNA, 25 bp, Homo sapien
ctctccaccacctgctgaatgcttt

SEQ ID NO: 3600243 - DNA, 25 bp, Homo sapien
gctgaatgctttatccgatacatca

SEQ ID NO: 3600244 - DNA, 25 bp, Homo sapien
tgctgaatgctttatccgatacatc

SEQ ID NO: 3600245 - DNA, 25 bp, Homo sapien
ctgaatgctttatccgatacatcat

SEQ ID NO: 3600246 - DNA, 25 bp, Homo sapien
ccctgactccgataatctattgtct

SEQ ID NO: 3600247 - DNA, 25 bp, Homo sapien
ctgactccgataatctattgtcttt

SEQ ID NO: 3600248 - DNA, 25 bp, Homo sapien
gactccgataatctattgtcttttc

SEQ ID NO: 3600249 - DNA, 25 bp, Homo sapien
tcccctgactccgataatctattgt

SEQ ID NO: 3600250 - DNA, 25 bp, Homo sapien
ttcttctcatcttcctgccatggaa

SEQ ID NO: 3600251 - DNA, 25 bp, Homo sapien
ggtgctgcaaattcattcccagatg

SEQ ID NO: 3600252 - DNA, 25 bp, Homo sapien
caaggtgccttcttctaccaggtgc

SEQ ID NO: 3600253 - DNA, 25 bp, Homo sapien
catggaagcccaaggcagtgccttc

SEQ ID NO: 3600254 - DNA, 25 bp, Homo sapien
gcagagaaacttgacctcatatgcc

SEQ ID NO: 3600255 - DNA, 25 bp, Homo sapien
aacttgacctcatatgccattaagg

SEQ ID NO: 3600256 - DNA, 25 bp, Homo sapien
gacctcatatgccattaagggtagg

SEQ ID NO: 3600257 - DNA, 25 bp, Homo sapien
tcatatgccattaagggtaggtgag

SEQ ID NO: 3600258 - DNA, 25 bp, Homo sapien
tcggtgtgtgttgacccagtggtac

SEQ ID NO: 3600259 - DNA, 25 bp, Homo sapien
ccagtcgctgcgtcatcggtgtgtg

SEQ ID NO: 3600260 - DNA, 25 bp, Homo sapien
gagaataaaggcactcctctgagct

SEQ ID NO: 3600261 - DNA, 25 bp, Homo sapien
tgtgtaccctagtccctaatatggt

SEQ ID NO: 3600262 - DNA, 25 bp, Homo sapien
taggatgcttctgcgagccatggta

SEQ ID NO: 3600263 - DNA, 25 bp, Homo sapien
taaccaagattgaaagggctgtttc

SEQ ID NO: 3600264 - DNA, 25 bp, Homo sapien
caggcctgtaacacttaggatgctt

SEQ ID NO: 3600265 - DNA, 25 bp, Homo sapien
ctgtccagccggtgcatagcaggcc

SEQ ID NO: 3600266 - DNA, 25 bp, Homo sapien
aagctcagccaagtgtagggaatac

SEQ ID NO: 3600267 - DNA, 25 bp, Homo sapien
tagggaatacattgtgcagtgaagg

SEQ ID NO: 3600268 - DNA, 25 bp, Homo sapien
ttatgtggatcctaaaagctcagcc

SEQ ID NO: 3600269 - DNA, 25 bp, Homo sapien
gagaaaaactgctctagtggcagaa

SEQ ID NO: 3600270 - DNA, 25 bp, Homo sapien
ttgttttcataatgagtgcattctt

SEQ ID NO: 3600271 - DNA, 25 bp, Homo sapien
agtatagaaaagaactggaacactc

SEQ ID NO: 3600272 - DNA, 25 bp, Homo sapien
tgttttcataatgagtgcattcttt

SEQ ID NO: 3600273 - DNA, 25 bp, Homo sapien
agaaaagaactggaacactcttgac

SEQ ID NO: 3600274 - DNA, 25 bp, Homo sapien
ttcttcatcgcaggaagtgccagag

SEQ ID NO: 3600275 - DNA, 25 bp, Homo sapien
gactttaggaatgacacgaggttcc

SEQ ID NO: 3600276 - DNA, 25 bp, Homo sapien
ctgataaatactcttcggattgctg

SEQ ID NO: 3600277 - DNA, 25 bp, Homo sapien
ggaaacgtctgatgaggctctacta

SEQ ID NO: 3600278 - DNA, 25 bp, Homo sapien
cacacatgccctttctagaatggga

SEQ ID NO: 3600279 - DNA, 25 bp, Homo sapien
agggatctacccatatggtcatctc

SEQ ID NO: 3600280 - DNA, 25 bp, Homo sapien
tccttcggaagtcccaggtgagaaa

SEQ ID NO: 3600281 - DNA, 25 bp, Homo sapien
tacagcatacttcaaagggatctac

SEQ ID NO: 3600282 - DNA, 25 bp, Homo sapien
aacaagatcgtcatcagcttttctg

SEQ ID NO: 3600283 - DNA, 25 bp, Homo sapien
tgctgtttacttagtttatcatgtt

SEQ ID NO: 3600284 - DNA, 25 bp, Homo sapien
gaaggcttgccctttagaagggcaa

SEQ ID NO: 3600285 - DNA, 25 bp, Homo sapien
gtgacaaagaaaactgttgttgcaa

SEQ ID NO: 3600286 - DNA, 25 bp, Homo sapien
gattcaagaaaaatagataaggagg

SEQ ID NO: 3600287 - DNA, 25 bp, Homo sapien
attcaagaaaaatagataaggaggt

SEQ ID NO: 3600288 - DNA, 25 bp, Homo sapien
agaccaaccgcactatcccttatgt

SEQ ID NO: 3600289 - DNA, 25 bp, Homo sapien
attccaaaatgtggctccaagttgc

SEQ ID NO: 3600290 - DNA, 25 bp, Homo sapien
caacaaaagctctttagcccctaag

SEQ ID NO: 3600291 - DNA, 25 bp, Homo sapien
tgggcgagacttagaagaccaaccg

SEQ ID NO: 3600292 - DNA, 25 bp, Homo sapien
tgaagccatacctaagagctccggc

SEQ ID NO: 3600293 - DNA, 25 bp, Homo sapien
gagctccggcaactttaattataga

SEQ ID NO: 3600294 - DNA, 25 bp, Homo sapien
gcaacctgtttgctcctactgaagc

SEQ ID NO: 3600295 - DNA, 25 bp, Homo sapien
gaattataaaaaccgctggcagttc

SEQ ID NO: 3600296 - DNA, 25 bp, Homo sapien
tgtccctcctgctagatcagaaaga

SEQ ID NO: 3600297 - DNA, 25 bp, Homo sapien
aatggtcacggaaactgggtaggct

SEQ ID NO: 3600298 - DNA, 25 bp, Homo sapien
gaaagagaaacgtctcaagaatctg

SEQ ID NO: 3600299 - DNA, 25 bp, Homo sapien
aagccgctttcccagggcggaatgg

SEQ ID NO: 3600300 - DNA, 25 bp, Homo sapien
ggggcgcacggggtcgagagagcca

SEQ ID NO: 3600301 - DNA, 25 bp, Homo sapien
gcgcacggggtcgagagagccagct

SEQ ID NO: 3600302 - DNA, 25 bp, Homo sapien
agcggcggggcgcacggggtcgaga

SEQ ID NO: 3600303 - DNA, 25 bp, Homo sapien
gccgctcagagcggcggggcgcacg

SEQ ID NO: 3600304 - DNA, 25 bp, Homo sapien
gcgtgttgtgcgctgcgaggccggc

SEQ ID NO: 3600305 - DNA, 25 bp, Homo sapien
tgcgcccagccatggtagggcgtcc

SEQ ID NO: 3600306 - DNA, 25 bp, Homo sapien
gccgcttgcgcccagccatggtagg

SEQ ID NO: 3600307 - DNA, 25 bp, Homo sapien
gtgttgtgcgctgcgaggccggcgg

SEQ ID NO: 3600308 - DNA, 25 bp, Homo sapien
cactgccatcaaaacaaggcacagc

SEQ ID NO: 3600309 - DNA, 25 bp, Homo sapien
tgtggtggttacaatcactaactcc

SEQ ID NO: 3600310 - DNA, 25 bp, Homo sapien
gctcggtttgtaggcagtgtcatta

SEQ ID NO: 3600311 - DNA, 25 bp, Homo sapien
tagctgattgtactgtggtggttac

SEQ ID NO: 3600312 - DNA, 25 bp, Homo sapien
tggtcctaaaacctgatcaccgcag

SEQ ID NO: 3600313 - DNA, 25 bp, Homo sapien
cacctacctaggaaaccgagggcag

SEQ ID NO: 3600314 - DNA, 25 bp, Homo sapien
caaagttgacgttttgactctccca

SEQ ID NO: 3600315 - DNA, 25 bp, Homo sapien
aactgtacacatgggcacgtatccg

SEQ ID NO: 3600316 - DNA, 25 bp, Homo sapien
tgcagaagcgtcctcagttgccatg

SEQ ID NO: 3600317 - DNA, 25 bp, Homo sapien
gcttgcagaagcgtcctcagttgcc

SEQ ID NO: 3600318 - DNA, 25 bp, Homo sapien
tgccatggaaacgggacccagcgaa

SEQ ID NO: 3600319 - DNA, 25 bp, Homo sapien
catggaaacgggacccagcgaagaa

SEQ ID NO: 3600320 - DNA, 25 bp, Homo sapien
ggtatttgctggctcctcggaacaa

SEQ ID NO: 3600321 - DNA, 25 bp, Homo sapien
gtcatatctgcctcaccgtaactgg

SEQ ID NO: 3600322 - DNA, 25 bp, Homo sapien
tggtgagtagaatagcggcctcctg

SEQ ID NO: 3600323 - DNA, 25 bp, Homo sapien
ggctaagcagttctggatctcggcg

SEQ ID NO: 3600324 - DNA, 25 bp, Homo sapien
tgtcagataggcctgtgaatatatg

SEQ ID NO: 3600325 - DNA, 25 bp, Homo sapien
actcaaagaagaagtatgagccaga

SEQ ID NO: 3600326 - DNA, 25 bp, Homo sapien
ctgtgaatatatgggctagaaactc

SEQ ID NO: 3600327 - DNA, 25 bp, Homo sapien
tatatgggctagaaactcaaagaag

SEQ ID NO: 3600328 - DNA, 25 bp, Homo sapien
caacagaagactgggtggcccactg

SEQ ID NO: 3600329 - DNA, 25 bp, Homo sapien
tgacaaggttctggcacaacgctat

SEQ ID NO: 3600330 - DNA, 25 bp, Homo sapien
ccactggtcagagcgtaatcacaag

SEQ ID NO: 3600331 - DNA, 25 bp, Homo sapien
gaggttgcagctctatttaggacca

SEQ ID NO: 3600332 - DNA, 25 bp, Homo sapien
tacacgcatcgaatcagtccttggg

SEQ ID NO: 3600333 - DNA, 25 bp, Homo sapien
cagatcctttttgcgggtgccaaca

SEQ ID NO: 3600334 - DNA, 25 bp, Homo sapien
tccagttagtgtgggacgagcccca

SEQ ID NO: 3600335 - DNA, 25 bp, Homo sapien
gaagccgctttcctttcagtcggga

SEQ ID NO: 3600336 - DNA, 25 bp, Homo sapien
tattatatatagcaacgagaagaga

SEQ ID NO: 3600337 - DNA, 25 bp, Homo sapien
tgtgagcaacgcattgctcagccac

SEQ ID NO: 3600338 - DNA, 25 bp, Homo sapien
ctttgccggtgccaaatttaggacg

SEQ ID NO: 3600339 - DNA, 25 bp, Homo sapien
taggacgcgctgtacttgtaggtga

SEQ ID NO: 3600340 - DNA, 25 bp, Homo sapien
gtcggcgcacgtcagcggcggcgcg

SEQ ID NO: 3600341 - DNA, 25 bp, Homo sapien
gcggcggcgcgcgcctggctgggcc

SEQ ID NO: 3600342 - DNA, 25 bp, Homo sapien
gtcagcggcggcgcgcgcctggctg

SEQ ID NO: 3600343 - DNA, 25 bp, Homo sapien
tcagcggcggcgcgcgcctggctgg

SEQ ID NO: 3600344 - DNA, 25 bp, Homo sapien
ggttctacgacatcgagggcacgct

SEQ ID NO: 3600345 - DNA, 25 bp, Homo sapien
gcaagggcaacttcgctgtggtgaa

SEQ ID NO: 3600346 - DNA, 25 bp, Homo sapien
ggcaccggatcaccaagacggaggt

SEQ ID NO: 3600347 - DNA, 25 bp, Homo sapien
atggtcatggcggatggcccgaggc

SEQ ID NO: 3600348 - DNA, 25 bp, Homo sapien
ccgagaggccgcctcactggcggag

SEQ ID NO: 3600349 - DNA, 25 bp, Homo sapien
gcggccgcagtggtgggaccgggga

SEQ ID NO: 3600350 - DNA, 25 bp, Homo sapien
gggagacccgagaggccgcctcact

SEQ ID NO: 3600351 - DNA, 25 bp, Homo sapien
acccgagaggccgcctcactggcgg

SEQ ID NO: 3600352 - DNA, 25 bp, Homo sapien
ggtcggtgagcagcgaagggatcgg

SEQ ID NO: 3600353 - DNA, 25 bp, Homo sapien
cggacccgagtgtcgtccgactgga

SEQ ID NO: 3600354 - DNA, 25 bp, Homo sapien
cagcgaagggatcgggcccgggcac

SEQ ID NO: 3600355 - DNA, 25 bp, Homo sapien
gtggccacccggaatttcgcccaga

SEQ ID NO: 3600356 - DNA, 25 bp, Homo sapien
ggattggtcttctacttgtctaggg

SEQ ID NO: 3600357 - DNA, 25 bp, Homo sapien
tgttcccaggctgcgccgtgagaga

SEQ ID NO: 3600358 - DNA, 25 bp, Homo sapien
tctagggttgtcactgtaccaggtg

SEQ ID NO: 3600359 - DNA, 25 bp, Homo sapien
ttaatgccccagacaatagaactgg

SEQ ID NO: 3600360 - DNA, 25 bp, Homo sapien
gaatccagcttcctaatacgctttg

SEQ ID NO: 3600361 - DNA, 25 bp, Homo sapien
tctatgtaatgagcaattaggaccc

SEQ ID NO: 3600362 - DNA, 25 bp, Homo sapien
gatgtatttctacagaacttgggag

SEQ ID NO: 3600363 - DNA, 25 bp, Homo sapien
cgatgtgaattttgcatccaaaggg

SEQ ID NO: 3600364 - DNA, 25 bp, Homo sapien
acttgactcttagcatgcattctct

SEQ ID NO: 3600365 - DNA, 25 bp, Homo sapien
cagcaacttgactcttagcatgcat

SEQ ID NO: 3600366 - DNA, 25 bp, Homo sapien
caacttgactcttagcatgcattct

SEQ ID NO: 3600367 - DNA, 25 bp, Homo sapien
ttgactcttagcatgcattctcttt

SEQ ID NO: 3600368 - DNA, 25 bp, Homo sapien
ttcaaaattctgttagcagtttgac

SEQ ID NO: 3600369 - DNA, 25 bp, Homo sapien
cctcctaaataagctcttcccatat

SEQ ID NO: 3600370 - DNA, 25 bp, Homo sapien
caaaattctgttagcagtttgacca

SEQ ID NO: 3600371 - DNA, 25 bp, Homo sapien
ttctcctcctaaataagctcttccc

SEQ ID NO: 3600372 - DNA, 25 bp, Homo sapien
atagattagcttgtatattctagaa

SEQ ID NO: 3600373 - DNA, 25 bp, Homo sapien
catagattagcttgtatattctaga

SEQ ID NO: 3600374 - DNA, 25 bp, Homo sapien
gaagaattaggagatactagagcca

SEQ ID NO: 3600375 - DNA, 25 bp, Homo sapien
gcagagcccggcattcttttccaaa

SEQ ID NO: 3600376 - DNA, 25 bp, Homo sapien
aatgcttgatccagatacctttgta

SEQ ID NO: 3600377 - DNA, 25 bp, Homo sapien
gaaatgggtcagtactaatatgagg

SEQ ID NO: 3600378 - DNA, 25 bp, Homo sapien
tcttcacaatcaggtccctggagga

SEQ ID NO: 3600379 - DNA, 25 bp, Homo sapien
tgaaggagccggaacccccaccaga

SEQ ID NO: 3600380 - DNA, 25 bp, Homo sapien
cttcacaatcaggtccctggaggag

SEQ ID NO: 3600381 - DNA, 25 bp, Homo sapien
gctgaaggagccggaacccccacca

SEQ ID NO: 3600382 - DNA, 25 bp, Homo sapien
cagtaggtagtgatctcgatgtcca

SEQ ID NO: 3600383 - DNA, 25 bp, Homo sapien
gcccaggccatagttgagaccagag

SEQ ID NO: 3600384 - DNA, 25 bp, Homo sapien
gagcttgtgagacccctataggccc

SEQ ID NO: 3600385 - DNA, 25 bp, Homo sapien
tgtccagggctaaattgatgttcat

SEQ ID NO: 3600386 - DNA, 25 bp, Homo sapien
cttggcattggtgtgcttaatggcc

SEQ ID NO: 3600387 - DNA, 25 bp, Homo sapien
ttggcattggtgtgcttaatggcca

SEQ ID NO: 3600388 - DNA, 25 bp, Homo sapien
ctttccagatagctcctgcaactcc

SEQ ID NO: 3600389 - DNA, 25 bp, Homo sapien
tcagtgctttccagatagctcctgc

SEQ ID NO: 3600390 - DNA, 25 bp, Homo sapien
agtgctttccagatagctcctgcaa

SEQ ID NO: 3600391 - DNA, 25 bp, Homo sapien
gtgctttccagatagctcctgcaac

SEQ ID NO: 3600392 - DNA, 25 bp, Homo sapien
tggcctggctgtgattggagatgtc

SEQ ID NO: 3600393 - DNA, 25 bp, Homo sapien
ctgtgattggagatgtcctcatact

SEQ ID NO: 3600394 - DNA, 25 bp, Homo sapien
ttggcctggctgtgattggagatgt

SEQ ID NO: 3600395 - DNA, 25 bp, Homo sapien
ttggagatgtcctcatactgggcac

SEQ ID NO: 3600396 - DNA, 25 bp, Homo sapien
atggacagaaccacagatgtgtcca

SEQ ID NO: 3600397 - DNA, 25 bp, Homo sapien
ggacagaaccacagatgtgtccaag

SEQ ID NO: 3600398 - DNA, 25 bp, Homo sapien
tggtgatgatgctgtccatgtccag

SEQ ID NO: 3600399 - DNA, 25 bp, Homo sapien
acagaaccacagatgtgtccaagat

SEQ ID NO: 3600400 - DNA, 25 bp, Homo sapien
gggacagcagctcctggatctcctt

SEQ ID NO: 3600401 - DNA, 25 bp, Homo sapien
gacagcagctcctggatctccttca

SEQ ID NO: 3600402 - DNA, 25 bp, Homo sapien
cagctcctggatctccttcatacag

SEQ ID NO: 3600403 - DNA, 25 bp, Homo sapien
cagcagctcctggatctccttcata

SEQ ID NO: 3600404 - DNA, 25 bp, Homo sapien
cttcttgatgaagacaaattcgttt

SEQ ID NO: 3600405 - DNA, 25 bp, Homo sapien
tcttgatgaagacaaattcgttttc

SEQ ID NO: 3600406 - DNA, 25 bp, Homo sapien
catcagtcaacccttccaggtgaga

SEQ ID NO: 3600407 - DNA, 25 bp, Homo sapien
ttgatgaagacaaattcgttttcct

SEQ ID NO: 3600408 - DNA, 25 bp, Homo sapien
aagggtgttgatgtggctctcgaac

SEQ ID NO: 3600409 - DNA, 25 bp, Homo sapien
aaagggtgttgatgtggctctcgaa

SEQ ID NO: 3600410 - DNA, 25 bp, Homo sapien
caaagggtgttgatgtggctctcga

SEQ ID NO: 3600411 - DNA, 25 bp, Homo sapien
aaggaggcaaacttcttgtcaaggg

SEQ ID NO: 3600412 - DNA, 25 bp, Homo sapien
tccaggaaccacaacttgttgatga

SEQ ID NO: 3600413 - DNA, 25 bp, Homo sapien
tgctccttctcctggttacacacgg

SEQ ID NO: 3600414 - DNA, 25 bp, Homo sapien
gctccacttggtctcaagtgccttg

SEQ ID NO: 3600415 - DNA, 25 bp, Homo sapien
taaaagagcttagcaggctctggtt

SEQ ID NO: 3600416 - DNA, 25 bp, Homo sapien
ataatggctgtgatgcccccccata

SEQ ID NO: 3600417 - DNA, 25 bp, Homo sapien
gtttaccataatggctgtgatgccc

SEQ ID NO: 3600418 - DNA, 25 bp, Homo sapien
ttagcaggctctggtttaccataat

SEQ ID NO: 3600419 - DNA, 25 bp, Homo sapien
caacaaatagagagagtacctagac

SEQ ID NO: 3600420 - DNA, 25 bp, Homo sapien
gtttggtttagagcacaagtctgca

SEQ ID NO: 3600421 - DNA, 25 bp, Homo sapien
gagaattctttcgaacagcacaggg

SEQ ID NO: 3600422 - DNA, 25 bp, Homo sapien
tctgcatgttcttgggtagacgaga

SEQ ID NO: 3600423 - DNA, 25 bp, Homo sapien
ttccttgatctgatacgatagggtt

SEQ ID NO: 3600424 - DNA, 25 bp, Homo sapien
tataaaaatagcatgtacaccttga

SEQ ID NO: 3600425 - DNA, 25 bp, Homo sapien
aggtactgtgctatgttaagtacaa

SEQ ID NO: 3600426 - DNA, 25 bp, Homo sapien
taagttgggtagagattagtttgcc

SEQ ID NO: 3600427 - DNA, 25 bp, Homo sapien
tagcaagcagaatgtctgaggaaca

SEQ ID NO: 3600428 - DNA, 25 bp, Homo sapien
cctgcatatcacaattagagaagac

SEQ ID NO: 3600429 - DNA, 25 bp, Homo sapien
tcaaaatgaagccacgtggcatggc

SEQ ID NO: 3600430 - DNA, 25 bp, Homo sapien
gagagagacgaatgcccaagtgatt

SEQ ID NO: 3600431 - DNA, 25 bp, Homo sapien
tttgacaaggttatagaagacctca

SEQ ID NO: 3600432 - DNA, 25 bp, Homo sapien
tcagcacatgtaatattgtaacagc

SEQ ID NO: 3600433 - DNA, 25 bp, Homo sapien
caagaccagtctcaaaagaatatat

SEQ ID NO: 3600434 - DNA, 25 bp, Homo sapien
cttttaatatccctatagacccaag

SEQ ID NO: 3600435 - DNA, 25 bp, Homo sapien
cattcaccgaacatgaggctgctgc

SEQ ID NO: 3600436 - DNA, 25 bp, Homo sapien
gctgtcaggcggaagctgcattcat

SEQ ID NO: 3600437 - DNA, 25 bp, Homo sapien
tatcatttcgttaagtcactcagga

SEQ ID NO: 3600438 - DNA, 25 bp, Homo sapien
tgtggacactccaaaggtacggcta

SEQ ID NO: 3600439 - DNA, 25 bp, Homo sapien
ttatttgattactattgctgctctt

SEQ ID NO: 3600440 - DNA, 25 bp, Homo sapien
taaaagttaatgtgctgggccaggc

SEQ ID NO: 3600441 - DNA, 25 bp, Homo sapien
tcatgccaaattgggctttatttga

SEQ ID NO: 3600442 - DNA, 25 bp, Homo sapien
tcaggtacaaaatgatgggccgtct

SEQ ID NO: 3600443 - DNA, 25 bp, Homo sapien
caggtattgtgcatctcaaagagac

SEQ ID NO: 3600444 - DNA, 25 bp, Homo sapien
gcagatgcataaaccttgtagaata

SEQ ID NO: 3600445 - DNA, 25 bp, Homo sapien
gcctcatgtgcatttactgtaacac

SEQ ID NO: 3600446 - DNA, 25 bp, Homo sapien
tgcccaactctagataagaatggtt

SEQ ID NO: 3600447 - DNA, 25 bp, Homo sapien
ctagctgtcccaggataaaatcgaa

SEQ ID NO: 3600448 - DNA, 25 bp, Homo sapien
aaaaagctcaacagcggccgggtgt

SEQ ID NO: 3600449 - DNA, 25 bp, Homo sapien
ttcctcttgtagtctagatgagaaa

SEQ ID NO: 3600450 - DNA, 25 bp, Homo sapien
tctgaaaagaagacctcatacagcc

SEQ ID NO: 3600451 - DNA, 25 bp, Homo sapien
taaaaccctgtaatgcattagccac

SEQ ID NO: 3600452 - DNA, 25 bp, Homo sapien
tgtaagttctcaaacagccattctt

SEQ ID NO: 3600453 - DNA, 25 bp, Homo sapien
gcaaggaaactattaagtttagtca

SEQ ID NO: 3600454 - DNA, 25 bp, Homo sapien
gaccgctcatcgctttaaaaccctg

SEQ ID NO: 3600455 - DNA, 25 bp, Homo sapien
tccaagaggattatagttcgaggcc

SEQ ID NO: 3600456 - DNA, 25 bp, Homo sapien
tgtatgaacaaataggaccggaggc

SEQ ID NO: 3600457 - DNA, 25 bp, Homo sapien
gctttttgaaactcgcgtcgtagga

SEQ ID NO: 3600458 - DNA, 25 bp, Homo sapien
gaatcattcattcagcgggtgctgg

SEQ ID NO: 3600459 - DNA, 25 bp, Homo sapien
gacttgtgagctgccaagcgctgct

SEQ ID NO: 3600460 - DNA, 25 bp, Homo sapien
gagcccagcagagcgacctaacggg

SEQ ID NO: 3600461 - DNA, 25 bp, Homo sapien
acagttctcctatcagacttgtgag

SEQ ID NO: 3600462 - DNA, 25 bp, Homo sapien
agatgcaatacagccctttcctcag

SEQ ID NO: 3600463 - DNA, 25 bp, Homo sapien
tactcaggactccagaggtgtcaca

SEQ ID NO: 3600464 - DNA, 25 bp, Homo sapien
taaataacagctggtactgacccca

SEQ ID NO: 3600465 - DNA, 25 bp, Homo sapien
ccctgggttgccgagtgtcagaata

SEQ ID NO: 3600466 - DNA, 25 bp, Homo sapien
tcaagaacgcatcaagagcaccagc

SEQ ID NO: 3600467 - DNA, 25 bp, Homo sapien
catgggtgccaggatgcttcgcaga

SEQ ID NO: 3600468 - DNA, 25 bp, Homo sapien
tatcaggatccgtcacacacggcag

SEQ ID NO: 3600469 - DNA, 25 bp, Homo sapien
gaaatcgagaggtgccctacagcag

SEQ ID NO: 3600470 - DNA, 25 bp, Homo sapien
ttaggccagccgatgagggactgca

SEQ ID NO: 3600471 - DNA, 25 bp, Homo sapien
gcaatatgtgtggtactttattttt

SEQ ID NO: 3600472 - DNA, 25 bp, Homo sapien
atgtgtggtactttattttttatgt

SEQ ID NO: 3600473 - DNA, 25 bp, Homo sapien
tatgtgtggtactttattttttatg

SEQ ID NO: 3600474 - DNA, 25 bp, Homo sapien
caatatgtgtggtactttatttttt

SEQ ID NO: 3600475 - DNA, 25 bp, Homo sapien
gagaaatgcactagctctgcaattc

SEQ ID NO: 3600476 - DNA, 25 bp, Homo sapien
cactagctctgcaattcccagctgg

SEQ ID NO: 3600477 - DNA, 25 bp, Homo sapien
tctccacgcaactgatacactggtc

SEQ ID NO: 3600478 - DNA, 25 bp, Homo sapien
tgtctctagtatctccacgcaactg

SEQ ID NO: 3600479 - DNA, 25 bp, Homo sapien
gctgttcatgcccatctgagcaaac

SEQ ID NO: 3600480 - DNA, 25 bp, Homo sapien
cactgccttctgtcaccgtgggaaa

SEQ ID NO: 3600481 - DNA, 25 bp, Homo sapien
gaatccctgcgtgggagagcatcag

SEQ ID NO: 3600482 - DNA, 25 bp, Homo sapien
caaacagcatgttagcccgacagga

SEQ ID NO: 3600483 - DNA, 25 bp, Homo sapien
cgagtgtcatcagtcctaaaggcag

SEQ ID NO: 3600484 - DNA, 25 bp, Homo sapien
aaactaaggcaaggtgacaagcagc

SEQ ID NO: 3600485 - DNA, 25 bp, Homo sapien
taaaggcagggaaacgctcacagaa

SEQ ID NO: 3600486 - DNA, 25 bp, Homo sapien
taagcagcctctggagacatgcggg

SEQ ID NO: 3600487 - DNA, 25 bp, Homo sapien
tcaaactcctaaactgggctgcctc

SEQ ID NO: 3600488 - DNA, 25 bp, Homo sapien
ccacccgagccactcggtctctttg

SEQ ID NO: 3600489 - DNA, 25 bp, Homo sapien
ttcttaaagtttctatcatctccct

SEQ ID NO: 3600490 - DNA, 25 bp, Homo sapien
gtttctatcatctcccttctgacag

SEQ ID NO: 3600491 - DNA, 25 bp, Homo sapien
taaagtttctatcatctcccttctg

SEQ ID NO: 3600492 - DNA, 25 bp, Homo sapien
ctgtttctaaactggacaaagagat

SEQ ID NO: 3600493 - DNA, 25 bp, Homo sapien
gctttggtattatgagtgcaaatca

SEQ ID NO: 3600494 - DNA, 25 bp, Homo sapien
ttatgtttccaaccctcttgaatta

SEQ ID NO: 3600495 - DNA, 25 bp, Homo sapien
gcagtgtaataaataatctctgtac

SEQ ID NO: 3600496 - DNA, 25 bp, Homo sapien
aaaattgcctaaaatgcagtgtaat

SEQ ID NO: 3600497 - DNA, 25 bp, Homo sapien
tattctcagtaactcctcggctagc

SEQ ID NO: 3600498 - DNA, 25 bp, Homo sapien
aacaaatgcatggaaggctccctga

SEQ ID NO: 3600499 - DNA, 25 bp, Homo sapien
gacatgagatttgaagtgcctgaca

SEQ ID NO: 3600500 - DNA, 25 bp, Homo sapien
ctgacaaggtgctgcagtgaccaag

SEQ ID NO: 3600501 - DNA, 25 bp, Homo sapien
acgacatggactccaagggctggcc

SEQ ID NO: 3600502 - DNA, 25 bp, Homo sapien
ctgtgcggccactgcaggaacggct

SEQ ID NO: 3600503 - DNA, 25 bp, Homo sapien
tgaggcccagttctgtgaagacgac

SEQ ID NO: 3600504 - DNA, 25 bp, Homo sapien
tccaactggacagtggtcacccagc

SEQ ID NO: 3600505 - DNA, 25 bp, Homo sapien
cttgggaagtggttcttgtcagccc

SEQ ID NO: 3600506 - DNA, 25 bp, Homo sapien
tcagcccgagggacactgggttctc

SEQ ID NO: 3600507 - DNA, 25 bp, Homo sapien
gggacactgggttctccactgtcct

SEQ ID NO: 3600508 - DNA, 25 bp, Homo sapien
tcacaggaaattctagcttcctcag

SEQ ID NO: 3600509 - DNA, 25 bp, Homo sapien
caaaagtgcaccaggttaaccgccg

SEQ ID NO: 3600510 - DNA, 25 bp, Homo sapien
caatgtgacgtctaagggcaagccc

SEQ ID NO: 3600511 - DNA, 25 bp, Homo sapien
tggaagtctacgcaagcaacctgaa

SEQ ID NO: 3600512 - DNA, 25 bp, Homo sapien
taaactctattcgtcctccggaaga

SEQ ID NO: 3600513 - DNA, 25 bp, Homo sapien
cattacatgtctgaagcaatcagac

SEQ ID NO: 3600514 - DNA, 25 bp, Homo sapien
gacacagtctggttcttttgattat

SEQ ID NO: 3600515 - DNA, 25 bp, Homo sapien
ccagaaaagggccacataaagcttg

SEQ ID NO: 3600516 - DNA, 25 bp, Homo sapien
aacaaacaactgatgtaagctgcca

SEQ ID NO: 3600517 - DNA, 25 bp, Homo sapien
caatgcttagggctcctcactggga

SEQ ID NO: 3600518 - DNA, 25 bp, Homo sapien
cactgggagacacaagggcatttta

SEQ ID NO: 3600519 - DNA, 25 bp, Homo sapien
gccaagttatgagccaaagcacaat

SEQ ID NO: 3600520 - DNA, 25 bp, Homo sapien
ccatgcttgagaaagccagggccca

SEQ ID NO: 3600521 - DNA, 25 bp, Homo sapien
tacaatgcagcaaggactaggtgtc

SEQ ID NO: 3600522 - DNA, 25 bp, Homo sapien
ctaggtgtcaatactgctggaagca

SEQ ID NO: 3600523 - DNA, 25 bp, Homo sapien
tcaggaattggtcaataagaacggc

SEQ ID NO: 3600524 - DNA, 25 bp, Homo sapien
ttagcagcaagatgcagccacactt

SEQ ID NO: 3600525 - DNA, 25 bp, Homo sapien
agtgagaatcgtatttcctacccag

SEQ ID NO: 3600526 - DNA, 25 bp, Homo sapien
tcaggttagtggtacagaaagttca

SEQ ID NO: 3600527 - DNA, 25 bp, Homo sapien
tcaaactaacaacttctcactgtgg

SEQ ID NO: 3600528 - DNA, 25 bp, Homo sapien
gaaagttcacgaacgatctatgtga

SEQ ID NO: 3600529 - DNA, 25 bp, Homo sapien
cacttaacacctctcacataataga

SEQ ID NO: 3600530 - DNA, 25 bp, Homo sapien
ttaaccaaggcataagctgcaaggc

SEQ ID NO: 3600531 - DNA, 25 bp, Homo sapien
cacataatagagataaatcccagtt

SEQ ID NO: 3600532 - DNA, 25 bp, Homo sapien
gagataaatcccagttaaccaaggc

SEQ ID NO: 3600533 - DNA, 25 bp, Homo sapien
atcttgacctaacttctgtagtact

SEQ ID NO: 3600534 - DNA, 25 bp, Homo sapien
tcttgacctaacttctgtagtactg

SEQ ID NO: 3600535 - DNA, 25 bp, Homo sapien
atccatgtcttcatcttgacctaac

SEQ ID NO: 3600536 - DNA, 25 bp, Homo sapien
cacttatagcttcctgtgcaaagta

SEQ ID NO: 3600537 - DNA, 25 bp, Homo sapien
cagcttcagacaaggatctacacat

SEQ ID NO: 3600538 - DNA, 25 bp, Homo sapien
tcatagtggacatcctcaaaaatag

SEQ ID NO: 3600539 - DNA, 25 bp, Homo sapien
tgaaagacagtctaatgggccatag

SEQ ID NO: 3600540 - DNA, 25 bp, Homo sapien
tcttaagtaaagtgaaaatccctga

SEQ ID NO: 3600541 - DNA, 25 bp, Homo sapien
catttttaatacgatgggcagcatt

SEQ ID NO: 3600542 - DNA, 25 bp, Homo sapien
tgaagcgaacatttgctacttggtc

SEQ ID NO: 3600543 - DNA, 25 bp, Homo sapien
gaattggtccaatcttttgtagaga

SEQ ID NO: 3600544 - DNA, 25 bp, Homo sapien
ggccacattgaagcgaacatttgct

SEQ ID NO: 3600545 - DNA, 25 bp, Homo sapien
gaacaatagtattttgggcccactc

SEQ ID NO: 3600546 - DNA, 25 bp, Homo sapien
gtggcagcttctcggatggcgtata

SEQ ID NO: 3600547 - DNA, 25 bp, Homo sapien
aataaagtggtcattctatgcaagt

SEQ ID NO: 3600548 - DNA, 25 bp, Homo sapien
ttcatgaggttgttggtggcagctt

SEQ ID NO: 3600549 - DNA, 25 bp, Homo sapien
gatttttatcataatgccattacca

SEQ ID NO: 3600550 - DNA, 25 bp, Homo sapien
tgccattaccataggaagggatctc

SEQ ID NO: 3600551 - DNA, 25 bp, Homo sapien
ccataggaagggatctctactgcca

SEQ ID NO: 3600552 - DNA, 25 bp, Homo sapien
gatctctactgccagaaaaaccaga

SEQ ID NO: 3600553 - DNA, 25 bp, Homo sapien
tgtctactcaaccacaggaatatag

SEQ ID NO: 3600554 - DNA, 25 bp, Homo sapien
tcctccctctgatcaaaactgtcta

SEQ ID NO: 3600555 - DNA, 25 bp, Homo sapien
tctatgctcaataactgataccttc

SEQ ID NO: 3600556 - DNA, 25 bp, Homo sapien
tgaactctacttggccagatgccta

SEQ ID NO: 3600557 - DNA, 25 bp, Homo sapien
tccacgagccaagccatacataaag

SEQ ID NO: 3600558 - DNA, 25 bp, Homo sapien
ggtccacgagccaagccatacataa

SEQ ID NO: 3600559 - DNA, 25 bp, Homo sapien
cgagccaagccatacataaagaatt

SEQ ID NO: 3600560 - DNA, 25 bp, Homo sapien
catggtccacgagccaagccataca

SEQ ID NO: 3600561 - DNA, 25 bp, Homo sapien
gggcttccacaccacatggagaatg

SEQ ID NO: 3600562 - DNA, 25 bp, Homo sapien
ggctccgggagcagatttacacagt

SEQ ID NO: 3600563 - DNA, 25 bp, Homo sapien
actctaagaagttcctgactggtga

SEQ ID NO: 3600564 - DNA, 25 bp, Homo sapien
ctgtcaacaggtggccacttcagtg

SEQ ID NO: 3600565 - DNA, 25 bp, Homo sapien
aatcagaatgtagggcaagtggtac

SEQ ID NO: 3600566 - DNA, 25 bp, Homo sapien
caagtggtacctagggacattttgc

SEQ ID NO: 3600567 - DNA, 25 bp, Homo sapien
gaatttgggctgctcaaccagtaaa

SEQ ID NO: 3600568 - DNA, 25 bp, Homo sapien
agaatacaaggcaaacagggaagtt

SEQ ID NO: 3600569 - DNA, 25 bp, Homo sapien
gagactgagagagctgacggattcc

SEQ ID NO: 3600570 - DNA, 25 bp, Homo sapien
tgatattcaaacgaacgtcaggaca

SEQ ID NO: 3600571 - DNA, 25 bp, Homo sapien
aggcggaccctccatttggcatctt

SEQ ID NO: 3600572 - DNA, 25 bp, Homo sapien
gccagcagcggcatatactcaatga

SEQ ID NO: 3600573 - DNA, 25 bp, Homo sapien
gacatgttgattggtatcggatact

SEQ ID NO: 3600574 - DNA, 25 bp, Homo sapien
tagacaatcccataattacagaagc

SEQ ID NO: 3600575 - DNA, 25 bp, Homo sapien
tctttgcccaaaatagtagacaatc

SEQ ID NO: 3600576 - DNA, 25 bp, Homo sapien
agctagagccgatttgacatgttga

SEQ ID NO: 3600577 - DNA, 25 bp, Homo sapien
taaggcagaatttgattcataatta

SEQ ID NO: 3600578 - DNA, 25 bp, Homo sapien
ttcaatgggcaagttctcaccaagt

SEQ ID NO: 3600579 - DNA, 25 bp, Homo sapien
cttcaatgggcaagttctcaccaag

SEQ ID NO: 3600580 - DNA, 25 bp, Homo sapien
gagactatctttaagtgacaatgta

SEQ ID NO: 3600581 - DNA, 25 bp, Homo sapien
tataaagagactatctttaagtgac

SEQ ID NO: 3600582 - DNA, 25 bp, Homo sapien
ctatctttaagtgacaatgtaacat

SEQ ID NO: 3600583 - DNA, 25 bp, Homo sapien
aagagactatctttaagtgacaatg

SEQ ID NO: 3600584 - DNA, 25 bp, Homo sapien
gctgcccggacttcagcttcacagt

SEQ ID NO: 3600585 - DNA, 25 bp, Homo sapien
agctgcccggacttcagcttcacag

SEQ ID NO: 3600586 - DNA, 25 bp, Homo sapien
gggatgaggtcatttagggtgattt

SEQ ID NO: 3600587 - DNA, 25 bp, Homo sapien
ttttaggacccatggctttctggag

SEQ ID NO: 3600588 - DNA, 25 bp, Homo sapien
ttagggtgattttaggacccatggc

SEQ ID NO: 3600589 - DNA, 25 bp, Homo sapien
ggtgattttaggacccatggctttc

SEQ ID NO: 3600590 - DNA, 25 bp, Homo sapien
aaattgtgcaatctgtaaatacata

SEQ ID NO: 3600591 - DNA, 25 bp, Homo sapien
gccacagcacttcccattgaaaaga

SEQ ID NO: 3600592 - DNA, 25 bp, Homo sapien
ccacagcacttcccattgaaaagaa

SEQ ID NO: 3600593 - DNA, 25 bp, Homo sapien
cacagcacttcccattgaaaagaat

SEQ ID NO: 3600594 - DNA, 25 bp, Homo sapien
tccttagtacttaaaaatgatcact

SEQ ID NO: 3600595 - DNA, 25 bp, Homo sapien
atctatgtgttttcaggtttatttc

SEQ ID NO: 3600596 - DNA, 25 bp, Homo sapien
ctatgtgttttcaggtttatttcct

SEQ ID NO: 3600597 - DNA, 25 bp, Homo sapien
tttccttagtacttaaaaatgatca

SEQ ID NO: 3600598 - DNA, 25 bp, Homo sapien
tagcgaacgcgccaagatttatctt

SEQ ID NO: 3600599 - DNA, 25 bp, Homo sapien
tcatcctgagacaataactgggcaa

SEQ ID NO: 3600600 - DNA, 25 bp, Homo sapien
tgtaggcatcaccaaagtctcaagg

SEQ ID NO: 3600601 - DNA, 25 bp, Homo sapien
tctgtcagccaccatatagcgaacg

SEQ ID NO: 3600602 - DNA, 25 bp, Homo sapien
gaacaaaatttctgtaattcagaca

SEQ ID NO: 3600603 - DNA, 25 bp, Homo sapien
ttcagacatttactgagacccatgg

SEQ ID NO: 3600604 - DNA, 25 bp, Homo sapien
tctgtaattcagacatttactgaga

SEQ ID NO: 3600605 - DNA, 25 bp, Homo sapien
tactgagacccatggggaactgctg

SEQ ID NO: 3600606 - DNA, 25 bp, Homo sapien
caggtagcttacattatatttctgt

SEQ ID NO: 3600607 - DNA, 25 bp, Homo sapien
acttaaaatcaacaggtagcttaca

SEQ ID NO: 3600608 - DNA, 25 bp, Homo sapien
tataacatttaggtaataaaagtgc

SEQ ID NO: 3600609 - DNA, 25 bp, Homo sapien
taacatttaggtaataaaagtgcaa

SEQ ID NO: 3600610 - DNA, 25 bp, Homo sapien
cgtaccattggtgtgtcatctgagc

SEQ ID NO: 3600611 - DNA, 25 bp, Homo sapien
gaagcagcagcacgtcgtaccattg

SEQ ID NO: 3600612 - DNA, 25 bp, Homo sapien
atctgagcacaaggaacggaattgc

SEQ ID NO: 3600613 - DNA, 25 bp, Homo sapien
ctgttcatctgaagctagactagtg

SEQ ID NO: 3600614 - DNA, 25 bp, Homo sapien
tgctaagcgtttcaccagaggtaca

SEQ ID NO: 3600615 - DNA, 25 bp, Homo sapien
gatgtgcgagaggtgaaccaatccc

SEQ ID NO: 3600616 - DNA, 25 bp, Homo sapien
gagatctgtctcagggactccacag

SEQ ID NO: 3600617 - DNA, 25 bp, Homo sapien
gatgccctgggatagcaaacgctga

SEQ ID NO: 3600618 - DNA, 25 bp, Homo sapien
ggtatattctagcattgaggacaca

SEQ ID NO: 3600619 - DNA, 25 bp, Homo sapien
cacactccggcagttttgaacccag

SEQ ID NO: 3600620 - DNA, 25 bp, Homo sapien
gaatagctaggactcagacacatga

SEQ ID NO: 3600621 - DNA, 25 bp, Homo sapien
tttcattagagggaagacctagggc

SEQ ID NO: 3600622 - DNA, 25 bp, Homo sapien
cagctgctcagcaagagctaatagt

SEQ ID NO: 3600623 - DNA, 25 bp, Homo sapien
gggcaaagtcaggacctcccactag

SEQ ID NO: 3600624 - DNA, 25 bp, Homo sapien
tcagcaagagctaatagtacctcat

SEQ ID NO: 3600625 - DNA, 25 bp, Homo sapien
taggccagtgaaatttcccagctgc

SEQ ID NO: 3600626 - DNA, 25 bp, Homo sapien
cttcgggtcctttctactccaagtg

SEQ ID NO: 3600627 - DNA, 25 bp, Homo sapien
tactccaagtgctagggcaattgtt

SEQ ID NO: 3600628 - DNA, 25 bp, Homo sapien
acttcttaatactgttgagtcggag

SEQ ID NO: 3600629 - DNA, 25 bp, Homo sapien
gggcaattgttgataacttcttaat

SEQ ID NO: 3600630 - DNA, 25 bp, Homo sapien
tcctgggccggtcccgagctctgat

SEQ ID NO: 3600631 - DNA, 25 bp, Homo sapien
ggagctcgtcgattaaaaccgcgat

SEQ ID NO: 3600632 - DNA, 25 bp, Homo sapien
cgggtatagcgaatcatctccatct

SEQ ID NO: 3600633 - DNA, 25 bp, Homo sapien
tgcacgtcttcattgcggagctcgt

SEQ ID NO: 3600634 - DNA, 25 bp, Homo sapien
tttctcctcctgctgctggtcaccg

SEQ ID NO: 3600635 - DNA, 25 bp, Homo sapien
ttctcctcctgctgctggtcaccgc

SEQ ID NO: 3600636 - DNA, 25 bp, Homo sapien
ctcctcctgctgctggtcaccgcct

SEQ ID NO: 3600637 - DNA, 25 bp, Homo sapien
tctttctcctcctgctgctggtcac

SEQ ID NO: 3600638 - DNA, 25 bp, Homo sapien
cgcgcccaggcagtagggacgaagg

SEQ ID NO: 3600639 - DNA, 25 bp, Homo sapien
cccgcgcccaggcagtagggacgaa

SEQ ID NO: 3600640 - DNA, 25 bp, Homo sapien
cgcccaggcagtagggacgaaggcc

SEQ ID NO: 3600641 - DNA, 25 bp, Homo sapien
gcgcccaggcagtagggacgaaggc

SEQ ID NO: 3600642 - DNA, 25 bp, Homo sapien
aagcgaatggaacccctgcgtcctt

SEQ ID NO: 3600643 - DNA, 25 bp, Homo sapien
caggagttgtaggtctgaactcaag

SEQ ID NO: 3600644 - DNA, 25 bp, Homo sapien
tcaagaagacgggtgggctaagaaa

SEQ ID NO: 3600645 - DNA, 25 bp, Homo sapien
tgggctaagaaagcgaatggaaccc

SEQ ID NO: 3600646 - DNA, 25 bp, Homo sapien
tatggtgatcacaagctccgaaatg

SEQ ID NO: 3600647 - DNA, 25 bp, Homo sapien
gggagctcgttcttacaaacctgaa

SEQ ID NO: 3600648 - DNA, 25 bp, Homo sapien
ttaagcagcttggagtgataactac

SEQ ID NO: 3600649 - DNA, 25 bp, Homo sapien
cccctgtcagggtagcacagaataa

SEQ ID NO: 3600650 - DNA, 25 bp, Homo sapien
caggcaacaccatagtaacaatacg

SEQ ID NO: 3600651 - DNA, 25 bp, Homo sapien
gaagctgagctatagcaggcaacac

SEQ ID NO: 3600652 - DNA, 25 bp, Homo sapien
caatacgacggatgacagttttagc

SEQ ID NO: 3600653 - DNA, 25 bp, Homo sapien
tcaggagtcacttggtggcataggc

SEQ ID NO: 3600654 - DNA, 25 bp, Homo sapien
cagccatgggcagcatagcaaaacc

SEQ ID NO: 3600655 - DNA, 25 bp, Homo sapien
ctgtaggcattgagaggaggaatct

SEQ ID NO: 3600656 - DNA, 25 bp, Homo sapien
ctttaccagttagaagatcagaggg

SEQ ID NO: 3600657 - DNA, 25 bp, Homo sapien
gctgcccaggctaaaaatggattca

SEQ ID NO: 3600658 - DNA, 25 bp, Homo sapien
accagtcctagcaacatagtgagat

SEQ ID NO: 3600659 - DNA, 25 bp, Homo sapien
caagaccagtcctagcaacatagtg

SEQ ID NO: 3600660 - DNA, 25 bp, Homo sapien
agttcaagaccagtcctagcaacat

SEQ ID NO: 3600661 - DNA, 25 bp, Homo sapien
ttcaagaccagtcctagcaacatag

SEQ ID NO: 3600662 - DNA, 25 bp, Homo sapien
cctcaggtaacaaggtgacagcctc

SEQ ID NO: 3600663 - DNA, 25 bp, Homo sapien
aggtgacagcctcagtacaaaagca

SEQ ID NO: 3600664 - DNA, 25 bp, Homo sapien
aggatttaaggcagccctcaggtaa

SEQ ID NO: 3600665 - DNA, 25 bp, Homo sapien
gacagcctcagtacaaaagcactga

SEQ ID NO: 3600666 - DNA, 25 bp, Homo sapien
gatcaaaggaagactgagttagatt

SEQ ID NO: 3600667 - DNA, 25 bp, Homo sapien
gcagttcactcatccagtgtggatc

SEQ ID NO: 3600668 - DNA, 25 bp, Homo sapien
agactgagttagatttgcccggttc

SEQ ID NO: 3600669 - DNA, 25 bp, Homo sapien
atgcagttcactcatccagtgtgga

SEQ ID NO: 3600670 - DNA, 25 bp, Homo sapien
agtgagagtcatgatgaaaggtgct

SEQ ID NO: 3600671 - DNA, 25 bp, Homo sapien
gtgagagtcatgatgaaaggtgctt

SEQ ID NO: 3600672 - DNA, 25 bp, Homo sapien
tgaaaggtgctttgttagtggaaag

SEQ ID NO: 3600673 - DNA, 25 bp, Homo sapien
gtgctttgttagtggaaagcaccat

SEQ ID NO: 3600674 - DNA, 25 bp, Homo sapien
taccagggaggcttagagacacagt

SEQ ID NO: 3600675 - DNA, 25 bp, Homo sapien
cctctgctggacattagggaagact

SEQ ID NO: 3600676 - DNA, 25 bp, Homo sapien
gaatcctcgaccagtagggagtcac

SEQ ID NO: 3600677 - DNA, 25 bp, Homo sapien
ttagtgagaataggatgccctctgc

SEQ ID NO: 3600678 - DNA, 25 bp, Homo sapien
gagcaggccaagtagtgtcaagcaa

SEQ ID NO: 3600679 - DNA, 25 bp, Homo sapien
caagcaataaggttgaatctgaagg

SEQ ID NO: 3600680 - DNA, 25 bp, Homo sapien
ttcctgaagggcaagtcggcctgct

SEQ ID NO: 3600681 - DNA, 25 bp, Homo sapien
tgacactgaataggtctgcaattgc

SEQ ID NO: 3600682 - DNA, 25 bp, Homo sapien
gagcagtggtgttcaactctagcta

SEQ ID NO: 3600683 - DNA, 25 bp, Homo sapien
tctcagtctttatccagagcagtgg

SEQ ID NO: 3600684 - DNA, 25 bp, Homo sapien
cctgttagctagatcacctggagag

SEQ ID NO: 3600685 - DNA, 25 bp, Homo sapien
tgggtaaccaggagtcacaattaga

SEQ ID NO: 3600686 - DNA, 25 bp, Homo sapien
ttttggcaagcagaacagtcagtgc

SEQ ID NO: 3600687 - DNA, 25 bp, Homo sapien
tctgaaatccaacgatgccatacgg

SEQ ID NO: 3600688 - DNA, 25 bp, Homo sapien
tataacatttggcacagcgttctgc

SEQ ID NO: 3600689 - DNA, 25 bp, Homo sapien
gaatcacctggttatacagactggc

SEQ ID NO: 3600690 - DNA, 25 bp, Homo sapien
ttgatagaattttctccaaatatgt

SEQ ID NO: 3600691 - DNA, 25 bp, Homo sapien
attttctccaaatatgtcctataca

SEQ ID NO: 3600692 - DNA, 25 bp, Homo sapien
tagaattttctccaaatatgtccta

SEQ ID NO: 3600693 - DNA, 25 bp, Homo sapien
atgtatcaattgatagaattttctc

SEQ ID NO: 3600694 - DNA, 25 bp, Homo sapien
caataagaaggtctgctaggagctg

SEQ ID NO: 3600695 - DNA, 25 bp, Homo sapien
tgggttggcaactaggctgtgttca

SEQ ID NO: 3600696 - DNA, 25 bp, Homo sapien
gagaagcccatatggcctaagagag

SEQ ID NO: 3600697 - DNA, 25 bp, Homo sapien
gctagttctcagatgccaggccaga

SEQ ID NO: 3600698 - DNA, 25 bp, Homo sapien
aaatagactttgactagcccagagc

SEQ ID NO: 3600699 - DNA, 25 bp, Homo sapien
tgcctagctgcaaaaagtttacatg

SEQ ID NO: 3600700 - DNA, 25 bp, Homo sapien
tatatctatctgtgctttagggcct

SEQ ID NO: 3600701 - DNA, 25 bp, Homo sapien
ctttgattagactttgaaatagact

SEQ ID NO: 3600702 - DNA, 25 bp, Homo sapien
ggagtcaggtcactggaatcaatag

SEQ ID NO: 3600703 - DNA, 25 bp, Homo sapien
agttaacaagatggttgtcctttgg

SEQ ID NO: 3600704 - DNA, 25 bp, Homo sapien
ttattacaaatgttacaggcgatga

SEQ ID NO: 3600705 - DNA, 25 bp, Homo sapien
tacaggcgatgacttgcagggagtc

SEQ ID NO: 3600706 - DNA, 25 bp, Homo sapien
gtttgaggatggtgtagtttacgta

SEQ ID NO: 3600707 - DNA, 25 bp, Homo sapien
tacgtacactgtatactgatctgac

SEQ ID NO: 3600708 - DNA, 25 bp, Homo sapien
tgacaggaaggggacatagaatgcc

SEQ ID NO: 3600709 - DNA, 25 bp, Homo sapien
caggaaggggacatagaatgcccgc

SEQ ID NO: 3600710 - DNA, 25 bp, Homo sapien
ttctaaacttgtaaatgtcatgtca

SEQ ID NO: 3600711 - DNA, 25 bp, Homo sapien
tgaggtagctgaaggtgctccactg

SEQ ID NO: 3600712 - DNA, 25 bp, Homo sapien
caacgtggcatttgtactggcagcc

SEQ ID NO: 3600713 - DNA, 25 bp, Homo sapien
tactggcagcctaaccttgggtttg

SEQ ID NO: 3600714 - DNA, 25 bp, Homo sapien
cagtcaaggagaagttaatggccag

SEQ ID NO: 3600715 - DNA, 25 bp, Homo sapien
gtcaaggagaagttaatggccaggc

SEQ ID NO: 3600716 - DNA, 25 bp, Homo sapien
cccagtcaaggagaagttaatggcc

SEQ ID NO: 3600717 - DNA, 25 bp, Homo sapien
ccagtcaaggagaagttaatggcca

SEQ ID NO: 3600718 - DNA, 25 bp, Homo sapien
cactctagcctgggcaacagagcga

SEQ ID NO: 3600719 - DNA, 25 bp, Homo sapien
ttgcagtgaacagagattgtgtcac

SEQ ID NO: 3600720 - DNA, 25 bp, Homo sapien
gcagtgaacagagattgtgtcactg

SEQ ID NO: 3600721 - DNA, 25 bp, Homo sapien
ctagcctgggcaacagagcgagacc

SEQ ID NO: 3600722 - DNA, 25 bp, Homo sapien
gctgacagacagaaactgctgtggc

SEQ ID NO: 3600723 - DNA, 25 bp, Homo sapien
cttaattggcccaaagtcagcaaca

SEQ ID NO: 3600724 - DNA, 25 bp, Homo sapien
gctgtggcaaaattggctgtggcat

SEQ ID NO: 3600725 - DNA, 25 bp, Homo sapien
tcatatgtcatggtgctgacagaca

SEQ ID NO: 3600726 - DNA, 25 bp, Homo sapien
gagtggagcactcaacaatgggatt

SEQ ID NO: 3600727 - DNA, 25 bp, Homo sapien
gagagctagcttgtcttcttgcagc

SEQ ID NO: 3600728 - DNA, 25 bp, Homo sapien
gaattaggtcaaaagagtggagcac

SEQ ID NO: 3600729 - DNA, 25 bp, Homo sapien
gaacttgactatactggcatcgtga

SEQ ID NO: 3600730 - DNA, 25 bp, Homo sapien
tctataggccaagctgatccattct

SEQ ID NO: 3600731 - DNA, 25 bp, Homo sapien
gaatggtctataggccaagctgatc

SEQ ID NO: 3600732 - DNA, 25 bp, Homo sapien
caaggaatggtctataggccaagct

SEQ ID NO: 3600733 - DNA, 25 bp, Homo sapien
gatgaatattttggctcccggggtg

SEQ ID NO: 3600734 - DNA, 25 bp, Homo sapien
tccaaatccactaaataatggcatt

SEQ ID NO: 3600735 - DNA, 25 bp, Homo sapien
tgtccaaatccactaaataatggca

SEQ ID NO: 3600736 - DNA, 25 bp, Homo sapien
ggtgtccaaatccactaaataatgg

SEQ ID NO: 3600737 - DNA, 25 bp, Homo sapien
gtgtccaaatccactaaataatggc

SEQ ID NO: 3600738 - DNA, 25 bp, Homo sapien
cctatactagctatgctgcggagga

SEQ ID NO: 3600739 - DNA, 25 bp, Homo sapien
tcttagaaagagaggcctatactag

SEQ ID NO: 3600740 - DNA, 25 bp, Homo sapien
tcagttgtgaagtgataatgccttc

SEQ ID NO: 3600741 - DNA, 25 bp, Homo sapien
tctttctttctagacagggactcac

SEQ ID NO: 3600742 - DNA, 25 bp, Homo sapien
tcctactcgtggaacattccctgtt

SEQ ID NO: 3600743 - DNA, 25 bp, Homo sapien
gaagaccaatatgactaaaatactg

SEQ ID NO: 3600744 - DNA, 25 bp, Homo sapien
tgacctcttaaactaggacagggcc

SEQ ID NO: 3600745 - DNA, 25 bp, Homo sapien
cagtctgccctagatcaaagtgtca

SEQ ID NO: 3600746 - DNA, 25 bp, Homo sapien
gaaatgacaatgacgcaagtagctg

SEQ ID NO: 3600747 - DNA, 25 bp, Homo sapien
tctggcaagggccaacatgaggttc

SEQ ID NO: 3600748 - DNA, 25 bp, Homo sapien
tgtttagacagtttgcccacagcta

SEQ ID NO: 3600749 - DNA, 25 bp, Homo sapien
taactgagactatccagcagccaca

SEQ ID NO: 3600750 - DNA, 25 bp, Homo sapien
ataaggtcctactttcatgctctgt

SEQ ID NO: 3600751 - DNA, 25 bp, Homo sapien
catgctctgtatttgtacaagatca

SEQ ID NO: 3600752 - DNA, 25 bp, Homo sapien
ctgccccagtcaaacatcctacttg

SEQ ID NO: 3600753 - DNA, 25 bp, Homo sapien
tgccccagtcaaacatcctacttgg

SEQ ID NO: 3600754 - DNA, 25 bp, Homo sapien
ccagtcaaacatcctacttggcact

SEQ ID NO: 3600755 - DNA, 25 bp, Homo sapien
gtcaaacatcctacttggcactgtc

SEQ ID NO: 3600756 - DNA, 25 bp, Homo sapien
catgtgtgtcactaatgagatgacg

SEQ ID NO: 3600757 - DNA, 25 bp, Homo sapien
cccttggctgtagttttgctgaatc

SEQ ID NO: 3600758 - DNA, 25 bp, Homo sapien
tgctgaatcataggtaggaacagtg

SEQ ID NO: 3600759 - DNA, 25 bp, Homo sapien
tgttcttacagaaatggtccactca

SEQ ID NO: 3600760 - DNA, 25 bp, Homo sapien
tagtgtatatcccagaacttctctg

SEQ ID NO: 3600761 - DNA, 25 bp, Homo sapien
tgagagtcctcagtttatatccctg

SEQ ID NO: 3600762 - DNA, 25 bp, Homo sapien
tgccccataggtctaaaagctaaag

SEQ ID NO: 3600763 - DNA, 25 bp, Homo sapien
aaatcaccatcagcctattagtgta

SEQ ID NO: 3600764 - DNA, 25 bp, Homo sapien
tgtttcaacccactagaagctttag

SEQ ID NO: 3600765 - DNA, 25 bp, Homo sapien
tgtagggtgacattaacacatgatc

SEQ ID NO: 3600766 - DNA, 25 bp, Homo sapien
gcctgaaacagaggttgagatccca

SEQ ID NO: 3600767 - DNA, 25 bp, Homo sapien
gctgtcgaagctaaaaatatgcctt

SEQ ID NO: 3600768 - DNA, 25 bp, Homo sapien
cacagagtaagcctctaacagtact

SEQ ID NO: 3600769 - DNA, 25 bp, Homo sapien
agcatcacactcttggagcgggaca

SEQ ID NO: 3600770 - DNA, 25 bp, Homo sapien
taagcctctaacagtactcatctct

SEQ ID NO: 3600771 - DNA, 25 bp, Homo sapien
acagaagcagcatgtagacttccat

SEQ ID NO: 3600772 - DNA, 25 bp, Homo sapien
tgggtacatgacaccgtcctagaca

SEQ ID NO: 3600773 - DNA, 25 bp, Homo sapien
ctgagaaagcatgtaaaagtgaact

SEQ ID NO: 3600774 - DNA, 25 bp, Homo sapien
gagaaagcatgtaaaagtgaactac

SEQ ID NO: 3600775 - DNA, 25 bp, Homo sapien
ttaccacaatgacgatgaatattca

SEQ ID NO: 3600776 - DNA, 25 bp, Homo sapien
gaaggtctgctcaatatggacttaa

SEQ ID NO: 3600777 - DNA, 25 bp, Homo sapien
taattttgatagtgtgagaagagac

SEQ ID NO: 3600778 - DNA, 25 bp, Homo sapien
atatggacttaaatagttcacttca

SEQ ID NO: 3600779 - DNA, 25 bp, Homo sapien
taaaggaaggtctgctcaatatgga

SEQ ID NO: 3600780 - DNA, 25 bp, Homo sapien
gggtggaaaacgcaatgatgagtct

SEQ ID NO: 3600781 - DNA, 25 bp, Homo sapien
tcaggcatagtcaccaatataagcg

SEQ ID NO: 3600782 - DNA, 25 bp, Homo sapien
aagtcactggggtggaaaacgcaat

SEQ ID NO: 3600783 - DNA, 25 bp, Homo sapien
tcaccaatataagcgaagtcactgg

SEQ ID NO: 3600784 - DNA, 25 bp, Homo sapien
gaggtttgaatgcaggcctactcaa

SEQ ID NO: 3600785 - DNA, 25 bp, Homo sapien
aaagtaggtgccattttacagacag

SEQ ID NO: 3600786 - DNA, 25 bp, Homo sapien
cacttgtgcaagcataagaacattg

SEQ ID NO: 3600787 - DNA, 25 bp, Homo sapien
caagtttagcaacagagctgaggtt

SEQ ID NO: 3600788 - DNA, 25 bp, Homo sapien
tttaggcatagaattcttttcagag

SEQ ID NO: 3600789 - DNA, 25 bp, Homo sapien
ttaggcatagaattcttttcagaga

SEQ ID NO: 3600790 - DNA, 25 bp, Homo sapien
acagacttttaggcatagaattctt

SEQ ID NO: 3600791 - DNA, 25 bp, Homo sapien
caacagacttttaggcatagaattc

SEQ ID NO: 3600792 - DNA, 25 bp, Homo sapien
tcagtaggaacaatccgggtggcca

SEQ ID NO: 3600793 - DNA, 25 bp, Homo sapien
ggccagaggtccttctgcaaaaggt

SEQ ID NO: 3600794 - DNA, 25 bp, Homo sapien
tatctggatggctcttctagattct

SEQ ID NO: 3600795 - DNA, 25 bp, Homo sapien
tctagattctggtcattcatgtcag

SEQ ID NO: 3600796 - DNA, 25 bp, Homo sapien
gcaattcggtaaaattctggataca

SEQ ID NO: 3600797 - DNA, 25 bp, Homo sapien
tggatggttgggtctgtagcaattc

SEQ ID NO: 3600798 - DNA, 25 bp, Homo sapien
tctggatacaaatcaaggggcccgt

SEQ ID NO: 3600799 - DNA, 25 bp, Homo sapien
ggtctgtagcaattcggtaaaattc

SEQ ID NO: 3600800 - DNA, 25 bp, Homo sapien
gaaaatgacaagagcccaaacagga

SEQ ID NO: 3600801 - DNA, 25 bp, Homo sapien
tgccagccaattcgatgtcacagta

SEQ ID NO: 3600802 - DNA, 25 bp, Homo sapien
tgtcacagtatagtgctccaggcga

SEQ ID NO: 3600803 - DNA, 25 bp, Homo sapien
gaagacagttcctaatgccagccaa

SEQ ID NO: 3600804 - DNA, 25 bp, Homo sapien
gccaatacgggtggcctaaattctg

SEQ ID NO: 3600805 - DNA, 25 bp, Homo sapien
cacagcgccacagagacatataagt

SEQ ID NO: 3600806 - DNA, 25 bp, Homo sapien
gacatataagtggatacacagggaa

SEQ ID NO: 3600807 - DNA, 25 bp, Homo sapien
tataaaccaaatatacattggagcc

SEQ ID NO: 3600808 - DNA, 25 bp, Homo sapien
taaatagaaataccagggttctgta

SEQ ID NO: 3600809 - DNA, 25 bp, Homo sapien
ccaaagcaaaggctacattgaaatt

SEQ ID NO: 3600810 - DNA, 25 bp, Homo sapien
caaaggctacattgaaattcagaaa

SEQ ID NO: 3600811 - DNA, 25 bp, Homo sapien
gaaatctctgcagcaggtattccat

SEQ ID NO: 3600812 - DNA, 25 bp, Homo sapien
agtttgagctattcaggcatctccc

SEQ ID NO: 3600813 - DNA, 25 bp, Homo sapien
gtttgagctattcaggcatctccca

SEQ ID NO: 3600814 - DNA, 25 bp, Homo sapien
gacccactgttaaattagcaccgta

SEQ ID NO: 3600815 - DNA, 25 bp, Homo sapien
tatcccaggaaagactggctactgc

SEQ ID NO: 3600816 - DNA, 25 bp, Homo sapien
agtcctgttcatggttggtatgcca

SEQ ID NO: 3600817 - DNA, 25 bp, Homo sapien
ggctactgctctactggatctcaaa

SEQ ID NO: 3600818 - DNA, 25 bp, Homo sapien
taatagtagctgtcaatgaccacca

SEQ ID NO: 3600819 - DNA, 25 bp, Homo sapien
cataaagatcaggtccatgaggagt

SEQ ID NO: 3600820 - DNA, 25 bp, Homo sapien
ggtgcaatcaccaacttcccataat

SEQ ID NO: 3600821 - DNA, 25 bp, Homo sapien
ccatgaggagtaaagacattataca

SEQ ID NO: 3600822 - DNA, 25 bp, Homo sapien
gcgaccaatgaaagaaactcttcca

SEQ ID NO: 3600823 - DNA, 25 bp, Homo sapien
tcttccacctgtgtttcatgaccag

SEQ ID NO: 3600824 - DNA, 25 bp, Homo sapien
agggccatcagcgaccaatgaaaga

SEQ ID NO: 3600825 - DNA, 25 bp, Homo sapien
tttcatgaccagcaaatcaaaggca

SEQ ID NO: 3600826 - DNA, 25 bp, Homo sapien
tgtcatgtgctgtcacagtacctct

SEQ ID NO: 3600827 - DNA, 25 bp, Homo sapien
tcattgatttagcaatgtcatgtgc

SEQ ID NO: 3600828 - DNA, 25 bp, Homo sapien
tgtaaattccgtataacattttgcg

SEQ ID NO: 3600829 - DNA, 25 bp, Homo sapien
cctggccccatctttgaatttatat

SEQ ID NO: 3600830 - DNA, 25 bp, Homo sapien
ctgtggtacaggtaagaaattaagg

SEQ ID NO: 3600831 - DNA, 25 bp, Homo sapien
gtcttgtccatataccatccagtca

SEQ ID NO: 3600832 - DNA, 25 bp, Homo sapien
tgctactcccagcacagcaatggaa

SEQ ID NO: 3600833 - DNA, 25 bp, Homo sapien
cagtcatggctatcaacgtagtgta

SEQ ID NO: 3600834 - DNA, 25 bp, Homo sapien
gaatggccagcctaagatagcccca

SEQ ID NO: 3600835 - DNA, 25 bp, Homo sapien
gaaattctagaaagcctcctcaagg

SEQ ID NO: 3600836 - DNA, 25 bp, Homo sapien
caccccatgattatatttccaggaa

SEQ ID NO: 3600837 - DNA, 25 bp, Homo sapien
cctcaagggccagatattgtatggc

SEQ ID NO: 3600838 - DNA, 25 bp, Homo sapien
caggaggacaagagctcgaggttaa

SEQ ID NO: 3600839 - DNA, 25 bp, Homo sapien
atgagcaaaacatgccagtgctgag

SEQ ID NO: 3600840 - DNA, 25 bp, Homo sapien
aaacatgccagtgctgagaaccaag

SEQ ID NO: 3600841 - DNA, 25 bp, Homo sapien
tgagcaaaacatgccagtgctgaga

SEQ ID NO: 3600842 - DNA, 25 bp, Homo sapien
gcaaaacatgccagtgctgagaacc

SEQ ID NO: 3600843 - DNA, 25 bp, Homo sapien
tcgactcacgtgcaacccaaacttc

SEQ ID NO: 3600844 - DNA, 25 bp, Homo sapien
actcacgtgcaacccaaacttcttg

SEQ ID NO: 3600845 - DNA, 25 bp, Homo sapien
gactcacgtgcaacccaaacttctt

SEQ ID NO: 3600846 - DNA, 25 bp, Homo sapien
ctcacgtgcaacccaaacttcttgc

SEQ ID NO: 3600847 - DNA, 25 bp, Homo sapien
gcattgagaatattaggaatagaca

SEQ ID NO: 3600848 - DNA, 25 bp, Homo sapien
aggcaaagactatcagcattgagaa

SEQ ID NO: 3600849 - DNA, 25 bp, Homo sapien
cattgagaatattaggaatagacat

SEQ ID NO: 3600850 - DNA, 25 bp, Homo sapien
gcaaagactatcagcattgagaata

SEQ ID NO: 3600851 - DNA, 25 bp, Homo sapien
aactggcccggccctcacgtgcacc

SEQ ID NO: 3600852 - DNA, 25 bp, Homo sapien
cccacgaactggcccggccctcacg

SEQ ID NO: 3600853 - DNA, 25 bp, Homo sapien
ctggcccggccctcacgtgcaccat

SEQ ID NO: 3600854 - DNA, 25 bp, Homo sapien
cacgaactggcccggccctcacgtg

SEQ ID NO: 3600855 - DNA, 25 bp, Homo sapien
cagaagacatcgcaaaaagtaaaac

SEQ ID NO: 3600856 - DNA, 25 bp, Homo sapien
ccagaagacatcgcaaaaagtaaaa

SEQ ID NO: 3600857 - DNA, 25 bp, Homo sapien
ccaggcatgaagcaacaggtaagca

SEQ ID NO: 3600858 - DNA, 25 bp, Homo sapien
ttcttgcatgaaatgcagctggcca

SEQ ID NO: 3600859 - DNA, 25 bp, Homo sapien
tctgaaacccttccccatagatgag

SEQ ID NO: 3600860 - DNA, 25 bp, Homo sapien
caggtaagcataggagcgaatggca

SEQ ID NO: 3600861 - DNA, 25 bp, Homo sapien
catcacagtcagagatgttgctcag

SEQ ID NO: 3600862 - DNA, 25 bp, Homo sapien
tcaggtgcccagacttgtcctgctt

SEQ ID NO: 3600863 - DNA, 25 bp, Homo sapien
tcaggagagcagcacataaccttgc

SEQ ID NO: 3600864 - DNA, 25 bp, Homo sapien
aaagcagtagatccttcaggtgccc

SEQ ID NO: 3600865 - DNA, 25 bp, Homo sapien
tcttaacaaggtcattgcttttgat

SEQ ID NO: 3600866 - DNA, 25 bp, Homo sapien
ttcttttcttaacaaggtcattgct

SEQ ID NO: 3600867 - DNA, 25 bp, Homo sapien
cttttcttaacaaggtcattgcttt

SEQ ID NO: 3600868 - DNA, 25 bp, Homo sapien
tttcttaacaaggtcattgcttttg

SEQ ID NO: 3600869 - DNA, 25 bp, Homo sapien
ccaataggacctagctgaagaggga

SEQ ID NO: 3600870 - DNA, 25 bp, Homo sapien
tctaaggtgggcgaagactgaatgc

SEQ ID NO: 3600871 - DNA, 25 bp, Homo sapien
gaagcctaggtgcaaggtacatagc

SEQ ID NO: 3600872 - DNA, 25 bp, Homo sapien
ttttacagcgcagtggagggatcta

SEQ ID NO: 3600873 - DNA, 25 bp, Homo sapien
cgcccgcctctcggctgcccagcag

SEQ ID NO: 3600874 - DNA, 25 bp, Homo sapien
tcggtccggtgctccgcgccgcccg

SEQ ID NO: 3600875 - DNA, 25 bp, Homo sapien
gccgcccgcctctcggctgcccagc

SEQ ID NO: 3600876 - DNA, 25 bp, Homo sapien
gcgccgcccgcctctcggctgccca

SEQ ID NO: 3600877 - DNA, 25 bp, Homo sapien
cctcgactagccatggcaagcctgg

SEQ ID NO: 3600878 - DNA, 25 bp, Homo sapien
ccggggcgcgtatccccactgctgg

SEQ ID NO: 3600879 - DNA, 25 bp, Homo sapien
gcccttcaggcgctgccgagcccct

SEQ ID NO: 3600880 - DNA, 25 bp, Homo sapien
cttgtccgcagccggggcgcgtatc

SEQ ID NO: 3600881 - DNA, 25 bp, Homo sapien
tgagcgcgcagacatagctttggct

SEQ ID NO: 3600882 - DNA, 25 bp, Homo sapien
ctatgaagtcggtgagcgcgcagac

SEQ ID NO: 3600883 - DNA, 25 bp, Homo sapien
tccgccgagggacaaaagaccttga

SEQ ID NO: 3600884 - DNA, 25 bp, Homo sapien
ttggctggcaaacggtgtccgccga

SEQ ID NO: 3600885 - DNA, 25 bp, Homo sapien
tcgttccatgactttcaaccacaga

SEQ ID NO: 3600886 - DNA, 25 bp, Homo sapien
aataaatgttagtctgatgccaaaa

SEQ ID NO: 3600887 - DNA, 25 bp, Homo sapien
ttcgttccatgactttcaaccacag

SEQ ID NO: 3600888 - DNA, 25 bp, Homo sapien
ttattcgttccatgactttcaacca

SEQ ID NO: 3600889 - DNA, 25 bp, Homo sapien
caacgaacagtagctatggtcacaa

SEQ ID NO: 3600890 - DNA, 25 bp, Homo sapien
tgttttagtcacttctcgggaccaa

SEQ ID NO: 3600891 - DNA, 25 bp, Homo sapien
gatcaactaacagtaggccgggcgc

SEQ ID NO: 3600892 - DNA, 25 bp, Homo sapien
gaaaggactactggttgcaagttgg

SEQ ID NO: 3600893 - DNA, 25 bp, Homo sapien
gaggtataacatataggtgttgttg

SEQ ID NO: 3600894 - DNA, 25 bp, Homo sapien
tataacatataggtgttgttgaatc

SEQ ID NO: 3600895 - DNA, 25 bp, Homo sapien
catataggtgttgttgaatctcctt

SEQ ID NO: 3600896 - DNA, 25 bp, Homo sapien
aacatataggtgttgttgaatctcc

SEQ ID NO: 3600897 - DNA, 25 bp, Homo sapien
tgagggccttgtcacaggtctggta

SEQ ID NO: 3600898 - DNA, 25 bp, Homo sapien
ttgatgctacttgctgctgggtgag

SEQ ID NO: 3600899 - DNA, 25 bp, Homo sapien
tgggactgcattgatgctacttgct

SEQ ID NO: 3600900 - DNA, 25 bp, Homo sapien
taggtcaatctatagcagagactga

SEQ ID NO: 3600901 - DNA, 25 bp, Homo sapien
cactgaggatgtgcagagaacctga

SEQ ID NO: 3600902 - DNA, 25 bp, Homo sapien
tcagagatacaccagacaagcatgg

SEQ ID NO: 3600903 - DNA, 25 bp, Homo sapien
gagctctccggcaatgtctgggtca

SEQ ID NO: 3600904 - DNA, 25 bp, Homo sapien
tctgaaagacaggtccactgaggat

SEQ ID NO: 3600905 - DNA, 25 bp, Homo sapien
gcgggaaaactttgcctaattcagc

SEQ ID NO: 3600906 - DNA, 25 bp, Homo sapien
ggccacaggttccttcacaagcttc

SEQ ID NO: 3600907 - DNA, 25 bp, Homo sapien
ccaaaaagcagctgacagaaagtca

SEQ ID NO: 3600908 - DNA, 25 bp, Homo sapien
cagaaagtcacaattccagaaagga

SEQ ID NO: 3600909 - DNA, 25 bp, Homo sapien
atctttaaattgatcttgaaaggaa

SEQ ID NO: 3600910 - DNA, 25 bp, Homo sapien
tatttcagaactctgacagccacca

SEQ ID NO: 3600911 - DNA, 25 bp, Homo sapien
aaagaaatcatctaccataaggaga

SEQ ID NO: 3600912 - DNA, 25 bp, Homo sapien
tacaaatagctggacagaaaagaat

SEQ ID NO: 3600913 - DNA, 25 bp, Homo sapien
cctgaagattctgggttgagaacct

SEQ ID NO: 3600914 - DNA, 25 bp, Homo sapien
tgaagatatggttcaaagcaccttc

SEQ ID NO: 3600915 - DNA, 25 bp, Homo sapien
caaaaggtaagctcctggtgaagat

SEQ ID NO: 3600916 - DNA, 25 bp, Homo sapien
actggttacccagtttgatcctgaa

SEQ ID NO: 3600917 - DNA, 25 bp, Homo sapien
ttagagaccgaatcaattaattggc

SEQ ID NO: 3600918 - DNA, 25 bp, Homo sapien
aattggcagggcctattgagtctgt

SEQ ID NO: 3600919 - DNA, 25 bp, Homo sapien
ggcaaaatagacaccaatatgaagt

SEQ ID NO: 3600920 - DNA, 25 bp, Homo sapien
tgaaaacgcagaaggcttaaaccta

SEQ ID NO: 3600921 - DNA, 25 bp, Homo sapien
ttcctctgcaagaacgtctgcacag

SEQ ID NO: 3600922 - DNA, 25 bp, Homo sapien
gcttatccgcaggagttccaccttg

SEQ ID NO: 3600923 - DNA, 25 bp, Homo sapien
atacacgtcgcttaaaatgagcccc

SEQ ID NO: 3600924 - DNA, 25 bp, Homo sapien
tctacataatgccacgtggacttct

SEQ ID NO: 3600925 - DNA, 25 bp, Homo sapien
aagcagttccctgttcttagctacg

SEQ ID NO: 3600926 - DNA, 25 bp, Homo sapien
cagctttgcgtccacaatgcgggaa

SEQ ID NO: 3600927 - DNA, 25 bp, Homo sapien
tgggtgcagtccacaccgaaacgta

SEQ ID NO: 3600928 - DNA, 25 bp, Homo sapien
tctctcgtgcagttcaaagacatct

SEQ ID NO: 3600929 - DNA, 25 bp, Homo sapien
gatcaagaacaatctccacgtgggt

SEQ ID NO: 3600930 - DNA, 25 bp, Homo sapien
caaaatatagacaggaggatgcctc

SEQ ID NO: 3600931 - DNA, 25 bp, Homo sapien
caaagccggctttatgtgaatatcc

SEQ ID NO: 3600932 - DNA, 25 bp, Homo sapien
gaatatccgtgggacgatcaagaac

SEQ ID NO: 3600933 - DNA, 25 bp, Homo sapien
ggtttcgcagaggggcgggctcgct

SEQ ID NO: 3600934 - DNA, 25 bp, Homo sapien
gggtttcgcagaggggcgggctcgc

SEQ ID NO: 3600935 - DNA, 25 bp, Homo sapien
gtttcgcagaggggcgggctcgcta

SEQ ID NO: 3600936 - DNA, 25 bp, Homo sapien
tttcgcagaggggcgggctcgctac

SEQ ID NO: 3600937 - DNA, 25 bp, Homo sapien
tgatccagggtttcgctcagagcgg

SEQ ID NO: 3600938 - DNA, 25 bp, Homo sapien
tcccaggccagtggatcccgagcca

SEQ ID NO: 3600939 - DNA, 25 bp, Homo sapien
ctggaggcaggtggcggtaagttga

SEQ ID NO: 3600940 - DNA, 25 bp, Homo sapien
cggtaagttgagtgctctgatccag

SEQ ID NO: 3600941 - DNA, 25 bp, Homo sapien
ggactcccggctcgcgttctctgtg

SEQ ID NO: 3600942 - DNA, 25 bp, Homo sapien
cccggctcgcgttctctgtggcgct

SEQ ID NO: 3600943 - DNA, 25 bp, Homo sapien
ccacggactcccggctcgcgttctc

SEQ ID NO: 3600944 - DNA, 25 bp, Homo sapien
tcccggctcgcgttctctgtggcgc

SEQ ID NO: 3600945 - DNA, 25 bp, Homo sapien
ttccagccctagagacagttacacc

SEQ ID NO: 3600946 - DNA, 25 bp, Homo sapien
tcagagtcaaagataagccccaggc

SEQ ID NO: 3600947 - DNA, 25 bp, Homo sapien
ttactctgaaaacggtggaaagcca

SEQ ID NO: 3600948 - DNA, 25 bp, Homo sapien
cttccggtaacaagaacatgctgta

SEQ ID NO: 3600949 - DNA, 25 bp, Homo sapien
tttgttataggccagagatgtctca

SEQ ID NO: 3600950 - DNA, 25 bp, Homo sapien
aacccatttgttataggccagagat

SEQ ID NO: 3600951 - DNA, 25 bp, Homo sapien
tgttataggccagagatgtctcaaa

SEQ ID NO: 3600952 - DNA, 25 bp, Homo sapien
ccatttgttataggccagagatgtc

SEQ ID NO: 3600953 - DNA, 25 bp, Homo sapien
gacttcaccatgacagccgaagtgg

SEQ ID NO: 3600954 - DNA, 25 bp, Homo sapien
atggcagacttcaccatgacagccg

SEQ ID NO: 3600955 - DNA, 25 bp, Homo sapien
ttcaccatgacagccgaagtggtgt

SEQ ID NO: 3600956 - DNA, 25 bp, Homo sapien
catgacagccgaagtggtgttgtag

SEQ ID NO: 3600957 - DNA, 25 bp, Homo sapien
ggtgggtcctgtatttactgactat

SEQ ID NO: 3600958 - DNA, 25 bp, Homo sapien
tcctgtatttactgactattccgac

SEQ ID NO: 3600959 - DNA, 25 bp, Homo sapien
gccccatggtgggtcctgtatttac

SEQ ID NO: 3600960 - DNA, 25 bp, Homo sapien
catggtgggtcctgtatttactgac

SEQ ID NO: 3600961 - DNA, 25 bp, Homo sapien
aagtgtgtggaatattcaaacacaa

SEQ ID NO: 3600962 - DNA, 25 bp, Homo sapien
agtgtgtggaatattcaaacacaag

SEQ ID NO: 3600963 - DNA, 25 bp, Homo sapien
tttattagcttgataatttgggcct

SEQ ID NO: 3600964 - DNA, 25 bp, Homo sapien
ttagcttgataatttgggcctgccc

SEQ ID NO: 3600965 - DNA, 25 bp, Homo sapien
tattagcttgataatttgggcctgc

SEQ ID NO: 3600966 - DNA, 25 bp, Homo sapien
gcttgataatttgggcctgccctta

SEQ ID NO: 3600967 - DNA, 25 bp, Homo sapien
taataagcttcagcactagtcacaa

SEQ ID NO: 3600968 - DNA, 25 bp, Homo sapien
agcttcagcactagtcacaagactt

SEQ ID NO: 3600969 - DNA, 25 bp, Homo sapien
aataagcttcagcactagtcacaag

SEQ ID NO: 3600970 - DNA, 25 bp, Homo sapien
taagcttcagcactagtcacaagac

SEQ ID NO: 3600971 - DNA, 25 bp, Homo sapien
taaaaaatgcaattcaagaaagggc

SEQ ID NO: 3600972 - DNA, 25 bp, Homo sapien
aaaaatgcaattcaagaaagggcat

SEQ ID NO: 3600973 - DNA, 25 bp, Homo sapien
tcattcactggtggggaaactttct

SEQ ID NO: 3600974 - DNA, 25 bp, Homo sapien
attcactggtggggaaactttcttg

SEQ ID NO: 3600975 - DNA, 25 bp, Homo sapien
gtgacagcaggcttctcttcacggg

SEQ ID NO: 3600976 - DNA, 25 bp, Homo sapien
atggtgcgctcagggccagagacct

SEQ ID NO: 3600977 - DNA, 25 bp, Homo sapien
tgaagtaatggtgagagggtctaca

SEQ ID NO: 3600978 - DNA, 25 bp, Homo sapien
tctacatcagctgggatccggtatt

SEQ ID NO: 3600979 - DNA, 25 bp, Homo sapien
caaagcaactaggtgtctgacagcc

SEQ ID NO: 3600980 - DNA, 25 bp, Homo sapien
tagatgaccttaacccgtatgcctg

SEQ ID NO: 3600981 - DNA, 25 bp, Homo sapien
cgttaactgattaccacatgggctg

SEQ ID NO: 3600982 - DNA, 25 bp, Homo sapien
taattggtctggagtatgcccgagc

SEQ ID NO: 3600983 - DNA, 25 bp, Homo sapien
tatggcttgggactggaatgtagcc

SEQ ID NO: 3600984 - DNA, 25 bp, Homo sapien
atttgtaacccctgatcccgactgt

SEQ ID NO: 3600985 - DNA, 25 bp, Homo sapien
gccagcctccaaagctgatagcact

SEQ ID NO: 3600986 - DNA, 25 bp, Homo sapien
aaagctgatagcactacctggacta

SEQ ID NO: 3600987 - DNA, 25 bp, Homo sapien
cacatccaggttgacagagaacctg

SEQ ID NO: 3600988 - DNA, 25 bp, Homo sapien
catctcccaacaccttaactttgag

SEQ ID NO: 3600989 - DNA, 25 bp, Homo sapien
catgttttccatgcacctcaatcac

SEQ ID NO: 3600990 - DNA, 25 bp, Homo sapien
cttcatgttttccatgcacctcaat

SEQ ID NO: 3600991 - DNA, 25 bp, Homo sapien
tcagggagccaccacagtgatacct

SEQ ID NO: 3600992 - DNA, 25 bp, Homo sapien
agctgctttctgtccgggtaattca

SEQ ID NO: 3600993 - DNA, 25 bp, Homo sapien
aataaacatagctgtctgcttcagg

SEQ ID NO: 3600994 - DNA, 25 bp, Homo sapien
tacctaaggctcatggtgatcagac

SEQ ID NO: 3600995 - DNA, 25 bp, Homo sapien
ttctggctcaggtctctttgccagt

SEQ ID NO: 3600996 - DNA, 25 bp, Homo sapien
acccaggggaccagtcgcaaggatg

SEQ ID NO: 3600997 - DNA, 25 bp, Homo sapien
cagtcgcaaggatgggtgcaagcct

SEQ ID NO: 3600998 - DNA, 25 bp, Homo sapien
tggctttgtggtttgtctgtgagac

SEQ ID NO: 3600999 - DNA, 25 bp, Homo sapien
tggaatgttctgctggtcctgcttg

SEQ ID NO: 3601000 - DNA, 25 bp, Homo sapien
aatgttctgctggtcctgcttgtcc

SEQ ID NO: 3601001 - DNA, 25 bp, Homo sapien
ctgctggtcctgcttgtccttccaa

SEQ ID NO: 3601002 - DNA, 25 bp, Homo sapien
gttctgctggtcctgcttgtccttc

SEQ ID NO: 3601003 - DNA, 25 bp, Homo sapien
tcctcgtagggcttgattggaccca

SEQ ID NO: 3601004 - DNA, 25 bp, Homo sapien
taaaatcggtcaagagtccaaggtg

SEQ ID NO: 3601005 - DNA, 25 bp, Homo sapien
ttgtcatgaaccaaaccagaaaggg

SEQ ID NO: 3601006 - DNA, 25 bp, Homo sapien
tgtcgtagccctgagaaacccagaa

SEQ ID NO: 3601007 - DNA, 25 bp, Homo sapien
cgaagaactggtcaaagaggcggct

SEQ ID NO: 3601008 - DNA, 25 bp, Homo sapien
aagatcagactccaacaggtgctct

SEQ ID NO: 3601009 - DNA, 25 bp, Homo sapien
ggaagtagacgtcgggaaaagatca

SEQ ID NO: 3601010 - DNA, 25 bp, Homo sapien
gtcaaaccagctgggtgcccgcagg

SEQ ID NO: 3601011 - DNA, 25 bp, Homo sapien
tatgcagtcttgtgaagcttctgga

SEQ ID NO: 3601012 - DNA, 25 bp, Homo sapien
ccgggatttggcaatgtgacacata

SEQ ID NO: 3601013 - DNA, 25 bp, Homo sapien
tacagccagccccttatatatgcag

SEQ ID NO: 3601014 - DNA, 25 bp, Homo sapien
tatcctagctcaccagcagttcatg

SEQ ID NO: 3601015 - DNA, 25 bp, Homo sapien
tgtttcactagctttctgtccacac

SEQ ID NO: 3601016 - DNA, 25 bp, Homo sapien
gacttgtcatggtcttgtttcacta

SEQ ID NO: 3601017 - DNA, 25 bp, Homo sapien
aagagagacacaaacacgtctgagc

SEQ ID NO: 3601018 - DNA, 25 bp, Homo sapien
tctgagccggccagtgacttgtcat

SEQ ID NO: 3601019 - DNA, 25 bp, Homo sapien
gaatcaggccagcaactatcttggg

SEQ ID NO: 3601020 - DNA, 25 bp, Homo sapien
gtcaacatgtcagcaccagccatct

SEQ ID NO: 3601021 - DNA, 25 bp, Homo sapien
agccatctgcctcgtgccctgggtt

SEQ ID NO: 3601022 - DNA, 25 bp, Homo sapien
tccttggaagagagcagtgatggtc

SEQ ID NO: 3601023 - DNA, 25 bp, Homo sapien
ttggtgcttgcagtgctgatacctg

SEQ ID NO: 3601024 - DNA, 25 bp, Homo sapien
tgccggcctgggtgtgcctccttgt

SEQ ID NO: 3601025 - DNA, 25 bp, Homo sapien
tgatacctgctctttgccggcctgg

SEQ ID NO: 3601026 - DNA, 25 bp, Homo sapien
tcaagacacacttggtgcttgcagt

SEQ ID NO: 3601027 - DNA, 25 bp, Homo sapien
aagctcaaccaggaacccggaaatg

SEQ ID NO: 3601028 - DNA, 25 bp, Homo sapien
ggcttcaaaagtccaacctgctagg

SEQ ID NO: 3601029 - DNA, 25 bp, Homo sapien
tctgacactgacacagactccggga

SEQ ID NO: 3601030 - DNA, 25 bp, Homo sapien
ggaatcattccagcaggtggcttca

SEQ ID NO: 3601031 - DNA, 25 bp, Homo sapien
cagagccttctgtaagtttttggtg

SEQ ID NO: 3601032 - DNA, 25 bp, Homo sapien
ggttatgagattcaataactccttg

SEQ ID NO: 3601033 - DNA, 25 bp, Homo sapien
tgattcgtctcttctagggactctt

SEQ ID NO: 3601034 - DNA, 25 bp, Homo sapien
ttcctgttttagatggccctgattc

SEQ ID NO: 3601035 - DNA, 25 bp, Homo sapien
gacgtcctgcaggagggcttcaatg

SEQ ID NO: 3601036 - DNA, 25 bp, Homo sapien
gggcttcaatgaggtaactgtcctg

SEQ ID NO: 3601037 - DNA, 25 bp, Homo sapien
aatgaggtaactgtcctgctcctcc

SEQ ID NO: 3601038 - DNA, 25 bp, Homo sapien
cgtctcccgcccagtctccggaagg

SEQ ID NO: 3601039 - DNA, 25 bp, Homo sapien
tatatcaggagctaaccagcggagc

SEQ ID NO: 3601040 - DNA, 25 bp, Homo sapien
tctctgcaatcaaggacatggttgt

SEQ ID NO: 3601041 - DNA, 25 bp, Homo sapien
tgcaccggtccatgtgagagcagag

SEQ ID NO: 3601042 - DNA, 25 bp, Homo sapien
tgtagatggtccatgtgaagtgccc

SEQ ID NO: 3601043 - DNA, 25 bp, Homo sapien
tgtcctctctgcaattggcagacat

SEQ ID NO: 3601044 - DNA, 25 bp, Homo sapien
aattggcagacatccgtaaagaacc

SEQ ID NO: 3601045 - DNA, 25 bp, Homo sapien
gacatccgtaaagaaccagccagat

SEQ ID NO: 3601046 - DNA, 25 bp, Homo sapien
ctctgcaattggcagacatccgtaa

SEQ ID NO: 3601047 - DNA, 25 bp, Homo sapien
taggcatggacaaggacttcatgac

SEQ ID NO: 3601048 - DNA, 25 bp, Homo sapien
taaaacaccaaaagcaatgacaaca

SEQ ID NO: 3601049 - DNA, 25 bp, Homo sapien
tctaattaaactaaagagcttctgc

SEQ ID NO: 3601050 - DNA, 25 bp, Homo sapien
caaaagccaaaatagacaagtggga

SEQ ID NO: 3601051 - DNA, 25 bp, Homo sapien
gcttttacactgttgatggaagtgt

SEQ ID NO: 3601052 - DNA, 25 bp, Homo sapien
atatctagagtctacaaagaactta

SEQ ID NO: 3601053 - DNA, 25 bp, Homo sapien
aatatctagagtctacaaagaactt

SEQ ID NO: 3601054 - DNA, 25 bp, Homo sapien
ggaatgcttttacactgttgatgga

SEQ ID NO: 3601055 - DNA, 25 bp, Homo sapien
tgtgtaatccagttgattgctcctc

SEQ ID NO: 3601056 - DNA, 25 bp, Homo sapien
cagcatgagggctatcaggccaaaa

SEQ ID NO: 3601057 - DNA, 25 bp, Homo sapien
tacctggtcttttcctattgaagaa

SEQ ID NO: 3601058 - DNA, 25 bp, Homo sapien
ctgggaaagtttgggaaagtcagca

SEQ ID NO: 3601059 - DNA, 25 bp, Homo sapien
cttggctgggtggaacacctgttca

SEQ ID NO: 3601060 - DNA, 25 bp, Homo sapien
tgggctgcctttcgttaccacttgg

SEQ ID NO: 3601061 - DNA, 25 bp, Homo sapien
tacatggaaggaccacgcagacact

SEQ ID NO: 3601062 - DNA, 25 bp, Homo sapien
ttgctacagtatacatgaatgcggg

SEQ ID NO: 3601063 - DNA, 25 bp, Homo sapien
ttcgtctgcgaatgtctcctggtaa

SEQ ID NO: 3601064 - DNA, 25 bp, Homo sapien
cgcactttgagatcaccacagtagt

SEQ ID NO: 3601065 - DNA, 25 bp, Homo sapien
tttgtactgggaccgctgtttgccg

SEQ ID NO: 3601066 - DNA, 25 bp, Homo sapien
ctgtttgccgtggaaagcaggcctg

SEQ ID NO: 3601067 - DNA, 25 bp, Homo sapien
gtctgcagagagctcgatctttgtg

SEQ ID NO: 3601068 - DNA, 25 bp, Homo sapien
ttctgaattctctagtgcagaacta

SEQ ID NO: 3601069 - DNA, 25 bp, Homo sapien
cagagagctcgatctttgtgcggcc

SEQ ID NO: 3601070 - DNA, 25 bp, Homo sapien
cagaactacccaaagttctcggtcg

SEQ ID NO: 3601071 - DNA, 25 bp, Homo sapien
tagcagggcttgaagttgccaccac

SEQ ID NO: 3601072 - DNA, 25 bp, Homo sapien
caccatggggttagcagggcttgaa

SEQ ID NO: 3601073 - DNA, 25 bp, Homo sapien
cagggcttgaagttgccaccaccat

SEQ ID NO: 3601074 - DNA, 25 bp, Homo sapien
ggttagcagggcttgaagttgccac

SEQ ID NO: 3601075 - DNA, 25 bp, Homo sapien
tgcttcacgaatttgttgtccttgc

SEQ ID NO: 3601076 - DNA, 25 bp, Homo sapien
catgctaatctctatatcgttccaa

SEQ ID NO: 3601077 - DNA, 25 bp, Homo sapien
gaatttgttgtccttgcgcaggggc

SEQ ID NO: 3601078 - DNA, 25 bp, Homo sapien
ttttagtatatgtgttgctgaagcg

SEQ ID NO: 3601079 - DNA, 25 bp, Homo sapien
gaagttagatttataatggactctg

SEQ ID NO: 3601080 - DNA, 25 bp, Homo sapien
taagactagtcaggtatactagtga

SEQ ID NO: 3601081 - DNA, 25 bp, Homo sapien
tatactagtgagaagggcggaagag

SEQ ID NO: 3601082 - DNA, 25 bp, Homo sapien
gtcaggtatactagtgagaagggcg

SEQ ID NO: 3601083 - DNA, 25 bp, Homo sapien
tacgataggtagaattgtggttccc

SEQ ID NO: 3601084 - DNA, 25 bp, Homo sapien
gtggttccctaaagacaagtacata

SEQ ID NO: 3601085 - DNA, 25 bp, Homo sapien
tagccctttggtgataagtacttcc

SEQ ID NO: 3601086 - DNA, 25 bp, Homo sapien
ggacatgtatgtggccttgcctagc

SEQ ID NO: 3601087 - DNA, 25 bp, Homo sapien
acattttggagtgcttaaaaatgcc

SEQ ID NO: 3601088 - DNA, 25 bp, Homo sapien
gctatcaaataactaaggaatatat

SEQ ID NO: 3601089 - DNA, 25 bp, Homo sapien
tagagttagatatgtgccaaagtcc

SEQ ID NO: 3601090 - DNA, 25 bp, Homo sapien
caaagtccatttatcccaaatcctg

SEQ ID NO: 3601091 - DNA, 25 bp, Homo sapien
catctttcgctaatgcttgtggttc

SEQ ID NO: 3601092 - DNA, 25 bp, Homo sapien
tatcacaagggaccatcatcaatat

SEQ ID NO: 3601093 - DNA, 25 bp, Homo sapien
aaagaaacaagcttatcacaaggga

SEQ ID NO: 3601094 - DNA, 25 bp, Homo sapien
agataattcatctttcgctaatgct

SEQ ID NO: 3601095 - DNA, 25 bp, Homo sapien
aattctgaagcttgtgattgtgaag

SEQ ID NO: 3601096 - DNA, 25 bp, Homo sapien
ggtctggttctgttaggtgatttat

SEQ ID NO: 3601097 - DNA, 25 bp, Homo sapien
attgtgaagttagggtatcccaagg

SEQ ID NO: 3601098 - DNA, 25 bp, Homo sapien
tatcaagatggaaagtgtggtctgg

SEQ ID NO: 3601099 - DNA, 25 bp, Homo sapien
atgaaggtcctttaattcacatgac

SEQ ID NO: 3601100 - DNA, 25 bp, Homo sapien
acccaaaacatatgatgctcttctt

SEQ ID NO: 3601101 - DNA, 25 bp, Homo sapien
aacccaaaacatatgatgctcttct

SEQ ID NO: 3601102 - DNA, 25 bp, Homo sapien
aaatgaaggtcctttaattcacatg

SEQ ID NO: 3601103 - DNA, 25 bp, Homo sapien
caaaggcattgtgatgattagcgtg

SEQ ID NO: 3601104 - DNA, 25 bp, Homo sapien
cagatacttcaatcaataaatcatc

SEQ ID NO: 3601105 - DNA, 25 bp, Homo sapien
gattcagatgtaatctgtacttctc

SEQ ID NO: 3601106 - DNA, 25 bp, Homo sapien
gctgtggtcatttcagtatcaataa

SEQ ID NO: 3601107 - DNA, 25 bp, Homo sapien
taccaggtaattcaactttcaactc

SEQ ID NO: 3601108 - DNA, 25 bp, Homo sapien
ttttagttcataggctggcatcttc

SEQ ID NO: 3601109 - DNA, 25 bp, Homo sapien
ctttcaactcaattttcagaggttt

SEQ ID NO: 3601110 - DNA, 25 bp, Homo sapien
ttaataccaggtaattcaactttca

SEQ ID NO: 3601111 - DNA, 25 bp, Homo sapien
ttgcctgaaacttggtcttttggca

SEQ ID NO: 3601112 - DNA, 25 bp, Homo sapien
ggtcttttggcagtaacagttgagg

SEQ ID NO: 3601113 - DNA, 25 bp, Homo sapien
ggaaagtgatctggattgctcatag

SEQ ID NO: 3601114 - DNA, 25 bp, Homo sapien
gctcatagtactgcttcgtatctgt

SEQ ID NO: 3601115 - DNA, 25 bp, Homo sapien
ttttccatttacaatcatcaactta

SEQ ID NO: 3601116 - DNA, 25 bp, Homo sapien
tttccatttacaatcatcaacttac

SEQ ID NO: 3601117 - DNA, 25 bp, Homo sapien
gaacatcaggattgtaggcaacatc

SEQ ID NO: 3601118 - DNA, 25 bp, Homo sapien
ggcaacatcaatgactgtgtaagca

SEQ ID NO: 3601119 - DNA, 25 bp, Homo sapien
tcatggccatctgaattaactgatt

SEQ ID NO: 3601120 - DNA, 25 bp, Homo sapien
ggaatttctcctcaatgcatttcat

SEQ ID NO: 3601121 - DNA, 25 bp, Homo sapien
caacagttagaggtactggatgagt

SEQ ID NO: 3601122 - DNA, 25 bp, Homo sapien
tcagttgtatcttctggtttgccaa

SEQ ID NO: 3601123 - DNA, 25 bp, Homo sapien
tatcttctggtttgccaacagttag

SEQ ID NO: 3601124 - DNA, 25 bp, Homo sapien
tctggtttgccaacagttagaggta

SEQ ID NO: 3601125 - DNA, 25 bp, Homo sapien
gcctggtgacaaagtaagactctgt

SEQ ID NO: 3601126 - DNA, 25 bp, Homo sapien
tgcagcgagccaagaccacaccatt

SEQ ID NO: 3601127 - DNA, 25 bp, Homo sapien
tccagcctggtgacaaagtaagact

SEQ ID NO: 3601128 - DNA, 25 bp, Homo sapien
gcactccagcctggtgacaaagtaa

SEQ ID NO: 3601129 - DNA, 25 bp, Homo sapien
ggtctgtagacaaagctgtggttct

SEQ ID NO: 3601130 - DNA, 25 bp, Homo sapien
agctagatcatctaggaggttccaa

SEQ ID NO: 3601131 - DNA, 25 bp, Homo sapien
ctgtagacaaagctgtggttctggg

SEQ ID NO: 3601132 - DNA, 25 bp, Homo sapien
cagggtcactctgagctagatcatc

SEQ ID NO: 3601133 - DNA, 25 bp, Homo sapien
taagcagaccttttgaggatgtctc

SEQ ID NO: 3601134 - DNA, 25 bp, Homo sapien
tgagtaacttgggtaagcagacctt

SEQ ID NO: 3601135 - DNA, 25 bp, Homo sapien
gcagaccttttgaggatgtctccat

SEQ ID NO: 3601136 - DNA, 25 bp, Homo sapien
ctgagtaacttgggtaagcagacct

SEQ ID NO: 3601137 - DNA, 25 bp, Homo sapien
gacttatgagtggtgaataattttc

SEQ ID NO: 3601138 - DNA, 25 bp, Homo sapien
tctaacgggtaatcattctataggt

SEQ ID NO: 3601139 - DNA, 25 bp, Homo sapien
cttctctcagttctaacgggtaatc

SEQ ID NO: 3601140 - DNA, 25 bp, Homo sapien
tcattctataggttggcaaacccac

SEQ ID NO: 3601141 - DNA, 25 bp, Homo sapien
cgggtaatcattctataggttggca

SEQ ID NO: 3601142 - DNA, 25 bp, Homo sapien
cagcctgggtacaacatctaattgg

SEQ ID NO: 3601143 - DNA, 25 bp, Homo sapien
tctgcacccgtcaacctctggagtg

SEQ ID NO: 3601144 - DNA, 25 bp, Homo sapien
tgcttttcagttgggcctgacccac

SEQ ID NO: 3601145 - DNA, 25 bp, Homo sapien
agtgtcctgaaaaccctcccttgtg

SEQ ID NO: 3601146 - DNA, 25 bp, Homo sapien
aggccgtagccatccaaagcgttcc

SEQ ID NO: 3601147 - DNA, 25 bp, Homo sapien
gtcaaccgggctgtccgaattccgc

SEQ ID NO: 3601148 - DNA, 25 bp, Homo sapien
tcaggctccctagatactttctggg

SEQ ID NO: 3601149 - DNA, 25 bp, Homo sapien
acagggatcccggtgacaaagatgg

SEQ ID NO: 3601150 - DNA, 25 bp, Homo sapien
tagtgacctgggtacaccaatcgga

SEQ ID NO: 3601151 - DNA, 25 bp, Homo sapien
cagaaagctggatccaatagtgacc

SEQ ID NO: 3601152 - DNA, 25 bp, Homo sapien
tgccagtgactcttgttcagcacgg

SEQ ID NO: 3601153 - DNA, 25 bp, Homo sapien
caagaggtggattggaactaatgcc

SEQ ID NO: 3601154 - DNA, 25 bp, Homo sapien
cactcattggttatgaggaggccca

SEQ ID NO: 3601155 - DNA, 25 bp, Homo sapien
gaggcccagagcaggtaagttcacc

SEQ ID NO: 3601156 - DNA, 25 bp, Homo sapien
tcactgaaagaaggctggcagaacg

SEQ ID NO: 3601157 - DNA, 25 bp, Homo sapien
gcatgacagtataagacaccagcag

SEQ ID NO: 3601158 - DNA, 25 bp, Homo sapien
tttctagtgttcctgccaatcagag

SEQ ID NO: 3601159 - DNA, 25 bp, Homo sapien
agtaactgatgtcatacaacctgga

SEQ ID NO: 3601160 - DNA, 25 bp, Homo sapien
gccttaggcttcgatggttcttcca

SEQ ID NO: 3601161 - DNA, 25 bp, Homo sapien
catttgcactactggccatggaaca

SEQ ID NO: 3601162 - DNA, 25 bp, Homo sapien
aatctgggcaaaccgactggtgatg

SEQ ID NO: 3601163 - DNA, 25 bp, Homo sapien
cagctggagagacaattttcagtgc

SEQ ID NO: 3601164 - DNA, 25 bp, Homo sapien
cacatttatcccaacataactccat

SEQ ID NO: 3601165 - DNA, 25 bp, Homo sapien
aaaccgactggtgatggcaagagtg

SEQ ID NO: 3601166 - DNA, 25 bp, Homo sapien
gagtatcttttctacgggcacgtgg

SEQ ID NO: 3601167 - DNA, 25 bp, Homo sapien
aagtcaggccgcgttagaaccatgt

SEQ ID NO: 3601168 - DNA, 25 bp, Homo sapien
agaaccatgtccgaagggctccaaa

SEQ ID NO: 3601169 - DNA, 25 bp, Homo sapien
tgtagtccaaggtcatgtagccagc

SEQ ID NO: 3601170 - DNA, 25 bp, Homo sapien
tgtgcagtaaactgcgccttctgct

SEQ ID NO: 3601171 - DNA, 25 bp, Homo sapien
ctgtgcagtaaactgcgccttctgc

SEQ ID NO: 3601172 - DNA, 25 bp, Homo sapien
gtgcagtaaactgcgccttctgctg

SEQ ID NO: 3601173 - DNA, 25 bp, Homo sapien
gcgacgggtgtgcaccgcctctcga

SEQ ID NO: 3601174 - DNA, 25 bp, Homo sapien
acagctgtgtttgcgcatgcgcgac

SEQ ID NO: 3601175 - DNA, 25 bp, Homo sapien
tcgccaccttccgacagctgtgttt

SEQ ID NO: 3601176 - DNA, 25 bp, Homo sapien
catgcgcgacgggtgtgcaccgcct

SEQ ID NO: 3601177 - DNA, 25 bp, Homo sapien
ccctcaggaacgagatggcggttct

SEQ ID NO: 3601178 - DNA, 25 bp, Homo sapien
ctgttttctttcgtcgtcgtgggtg

SEQ ID NO: 3601179 - DNA, 25 bp, Homo sapien
gtggatgaccttgagccctcaggaa

SEQ ID NO: 3601180 - DNA, 25 bp, Homo sapien
cgtcgtgggtgggaattgtcgccta

SEQ ID NO: 3601181 - DNA, 25 bp, Homo sapien
ctggaggctgagtgccgtttgcggt

SEQ ID NO: 3601182 - DNA, 25 bp, Homo sapien
gaggctgagtgccgtttgcggtgcc

SEQ ID NO: 3601183 - DNA, 25 bp, Homo sapien
tggaggctgagtgccgtttgcggtg

SEQ ID NO: 3601184 - DNA, 25 bp, Homo sapien
ggaggctgagtgccgtttgcggtgc

SEQ ID NO: 3601185 - DNA, 25 bp, Homo sapien
ctgaggtgcttagcgtagcctccag

SEQ ID NO: 3601186 - DNA, 25 bp, Homo sapien
caccctgaggtgcttagcgtagcct

SEQ ID NO: 3601187 - DNA, 25 bp, Homo sapien
ccaccctgaggtgcttagcgtagcc

SEQ ID NO: 3601188 - DNA, 25 bp, Homo sapien
ttcccaccctgaggtgcttagcgta

SEQ ID NO: 3601189 - DNA, 25 bp, Homo sapien
tgtagtctaggggtccagatgttta

SEQ ID NO: 3601190 - DNA, 25 bp, Homo sapien
actgtagtctaggggtccagatgtt

SEQ ID NO: 3601191 - DNA, 25 bp, Homo sapien
gtagtctaggggtccagatgtttac

SEQ ID NO: 3601192 - DNA, 25 bp, Homo sapien
cactgtagtctaggggtccagatgt

SEQ ID NO: 3601193 - DNA, 25 bp, Homo sapien
gagctgacgagttgagggaataatc

SEQ ID NO: 3601194 - DNA, 25 bp, Homo sapien
cgttcactgtccctagaatgctccc

SEQ ID NO: 3601195 - DNA, 25 bp, Homo sapien
gaggctaatccacatagcagttctg

SEQ ID NO: 3601196 - DNA, 25 bp, Homo sapien
tctggaagtcgcagtcctgatgagg

SEQ ID NO: 3601197 - DNA, 25 bp, Homo sapien
gaaagagggttaggagcttgcccat

SEQ ID NO: 3601198 - DNA, 25 bp, Homo sapien
ggaaagagggttaggagcttgccca

SEQ ID NO: 3601199 - DNA, 25 bp, Homo sapien
atgaagacctagtttacacctttgg

SEQ ID NO: 3601200 - DNA, 25 bp, Homo sapien
ccaactttgtcaaatgaagacctag

SEQ ID NO: 3601201 - DNA, 25 bp, Homo sapien
gtcaaatgaagacctagtttacacc

SEQ ID NO: 3601202 - DNA, 25 bp, Homo sapien
tgtgtccaactttgtcaaatgaaga

SEQ ID NO: 3601203 - DNA, 25 bp, Homo sapien
tccaaatatagttgtctgctcagtt

SEQ ID NO: 3601204 - DNA, 25 bp, Homo sapien
gaagttgattgaaatgccctaaatt

SEQ ID NO: 3601205 - DNA, 25 bp, Homo sapien
tggtcctttttgtagctggctccaa

SEQ ID NO: 3601206 - DNA, 25 bp, Homo sapien
cttcatggtcactggcaagtatagc

SEQ ID NO: 3601207 - DNA, 25 bp, Homo sapien
gaatttctgatctcccctaatctgt

SEQ ID NO: 3601208 - DNA, 25 bp, Homo sapien
gatttccgtatctaatagcattttg

SEQ ID NO: 3601209 - DNA, 25 bp, Homo sapien
tagcattttgaatgtagcctgtcaa

SEQ ID NO: 3601210 - DNA, 25 bp, Homo sapien
gaatgtagcctgtcaaactgaattt

SEQ ID NO: 3601211 - DNA, 25 bp, Homo sapien
tctctagacagtagataccacctac

SEQ ID NO: 3601212 - DNA, 25 bp, Homo sapien
tattttcgcacaatgggaatctcta

SEQ ID NO: 3601213 - DNA, 25 bp, Homo sapien
tctaaatcctaggaagaaacgcttg

SEQ ID NO: 3601214 - DNA, 25 bp, Homo sapien
tactgatggttacatatactaggga

SEQ ID NO: 3601215 - DNA, 25 bp, Homo sapien
tgcgcccggcatgaaattttaatag

SEQ ID NO: 3601216 - DNA, 25 bp, Homo sapien
ctagtcttcgttttgaacagtgaac

SEQ ID NO: 3601217 - DNA, 25 bp, Homo sapien
catcttattatcatgtcctgggaca

SEQ ID NO: 3601218 - DNA, 25 bp, Homo sapien
ctctctttttcacaagctagaaagt

SEQ ID NO: 3601219 - DNA, 25 bp, Homo sapien
tgaaagaatatgatgtcactttttg

SEQ ID NO: 3601220 - DNA, 25 bp, Homo sapien
gaaagtatccttcgtatgatgaaga

SEQ ID NO: 3601221 - DNA, 25 bp, Homo sapien
cctgggttcctgtgtaagcctgctg

SEQ ID NO: 3601222 - DNA, 25 bp, Homo sapien
caataattgttgtagggctaggccc

SEQ ID NO: 3601223 - DNA, 25 bp, Homo sapien
gcactccagttccatagtagtcttg

SEQ ID NO: 3601224 - DNA, 25 bp, Homo sapien
ggcagtccttgactctgtcttcctg

SEQ ID NO: 3601225 - DNA, 25 bp, Homo sapien
ggttatccaactggtagtgctgcct

SEQ ID NO: 3601226 - DNA, 25 bp, Homo sapien
caatcagttgtggaatcagtagtca

SEQ ID NO: 3601227 - DNA, 25 bp, Homo sapien
agattcccatgatcctaagcactga

SEQ ID NO: 3601228 - DNA, 25 bp, Homo sapien
tggatcagaacatgtgggcaccacc

SEQ ID NO: 3601229 - DNA, 25 bp, Homo sapien
tctcccaagtgcactggaaagtctg

SEQ ID NO: 3601230 - DNA, 25 bp, Homo sapien
gaaaggtgagcacataagggtagcc

SEQ ID NO: 3601231 - DNA, 25 bp, Homo sapien
gaaagtctgagggaaccctggccaa

SEQ ID NO: 3601232 - DNA, 25 bp, Homo sapien
gaagcttaaatgtcagattccctca

SEQ ID NO: 3601233 - DNA, 25 bp, Homo sapien
gatttgcccagttcctactaagtgc

SEQ ID NO: 3601234 - DNA, 25 bp, Homo sapien
tttgataactaagctgcctgtcagg

SEQ ID NO: 3601235 - DNA, 25 bp, Homo sapien
cacctgtaggttcggacttatccca

SEQ ID NO: 3601236 - DNA, 25 bp, Homo sapien
ttgttcagtaacagcatgcttaacc

SEQ ID NO: 3601237 - DNA, 25 bp, Homo sapien
ctagaatggggactccaaattgtca

SEQ ID NO: 3601238 - DNA, 25 bp, Homo sapien
tagaatggggactccaaattgtcac

SEQ ID NO: 3601239 - DNA, 25 bp, Homo sapien
cccttggtaccttcactaaggtcat

SEQ ID NO: 3601240 - DNA, 25 bp, Homo sapien
tttgtctgggggctgtatctgttgc

SEQ ID NO: 3601241 - DNA, 25 bp, Homo sapien
ctgtatctgttgcatatgcactgtt

SEQ ID NO: 3601242 - DNA, 25 bp, Homo sapien
catatcctaactgtctttcagtggg

SEQ ID NO: 3601243 - DNA, 25 bp, Homo sapien
tcctctgaagcattgccaatttgta

SEQ ID NO: 3601244 - DNA, 25 bp, Homo sapien
catgaaagcggttatttattggcaa

SEQ ID NO: 3601245 - DNA, 25 bp, Homo sapien
ttactggctcagtctgtagctatag

SEQ ID NO: 3601246 - DNA, 25 bp, Homo sapien
gcatccctggctactcttactggct

SEQ ID NO: 3601247 - DNA, 25 bp, Homo sapien
gatagttacagccatacctctaggc

SEQ ID NO: 3601248 - DNA, 25 bp, Homo sapien
taattttgttctcacaggagagagt

SEQ ID NO: 3601249 - DNA, 25 bp, Homo sapien
tgttctcacaggagagagttgaaat

SEQ ID NO: 3601250 - DNA, 25 bp, Homo sapien
ctcacacttcacagagatagttaca

SEQ ID NO: 3601251 - DNA, 25 bp, Homo sapien
tcagtcatatcttcaaatagaggcc

SEQ ID NO: 3601252 - DNA, 25 bp, Homo sapien
gccgatttccttggtcaatgaagag

SEQ ID NO: 3601253 - DNA, 25 bp, Homo sapien
caaatagaggccgatttccttggtc

SEQ ID NO: 3601254 - DNA, 25 bp, Homo sapien
tctacagtcagaatcagtcatatct

SEQ ID NO: 3601255 - DNA, 25 bp, Homo sapien
gataatttagattcaagcttgccaa

SEQ ID NO: 3601256 - DNA, 25 bp, Homo sapien
tgataatttagattcaagcttgcca

SEQ ID NO: 3601257 - DNA, 25 bp, Homo sapien
gggctgatcccatttgtgctcggca

SEQ ID NO: 3601258 - DNA, 25 bp, Homo sapien
tgctgctggtgaacaatggcacaag

SEQ ID NO: 3601259 - DNA, 25 bp, Homo sapien
catttctggtatctagggctgatcc

SEQ ID NO: 3601260 - DNA, 25 bp, Homo sapien
caagcgttcaaatcggtgccattac

SEQ ID NO: 3601261 - DNA, 25 bp, Homo sapien
tttctcttctatcaacccagcaatt

SEQ ID NO: 3601262 - DNA, 25 bp, Homo sapien
cctctactgaagctttaatttgcca

SEQ ID NO: 3601263 - DNA, 25 bp, Homo sapien
ttaatttgccaatcatcctttctct

SEQ ID NO: 3601264 - DNA, 25 bp, Homo sapien
gaagctttaatttgccaatcatcct

SEQ ID NO: 3601265 - DNA, 25 bp, Homo sapien
aggaatgcttatgggaacattgtta

SEQ ID NO: 3601266 - DNA, 25 bp, Homo sapien
cattcaccaattaagaattgattaa

SEQ ID NO: 3601267 - DNA, 25 bp, Homo sapien
tatgggaacattgttaataacaaca

SEQ ID NO: 3601268 - DNA, 25 bp, Homo sapien
gggcaaagatatgcccttattgtga

SEQ ID NO: 3601269 - DNA, 25 bp, Homo sapien
tgtttcactcattgcaatctgcctc

SEQ ID NO: 3601270 - DNA, 25 bp, Homo sapien
caatcttgaaatgctctcctgggag

SEQ ID NO: 3601271 - DNA, 25 bp, Homo sapien
caatctcactttgcagctagtcttg

SEQ ID NO: 3601272 - DNA, 25 bp, Homo sapien
cactgagatcaccaaactccttgtt

SEQ ID NO: 3601273 - DNA, 25 bp, Homo sapien
tccactaggacgttccacagacatc

SEQ ID NO: 3601274 - DNA, 25 bp, Homo sapien
gccatttctatgcataagccttcaa

SEQ ID NO: 3601275 - DNA, 25 bp, Homo sapien
tcctgaactcagaaccacatgtaga

SEQ ID NO: 3601276 - DNA, 25 bp, Homo sapien
tctcagatccaaaacgaaatgcgtc

SEQ ID NO: 3601277 - DNA, 25 bp, Homo sapien
tcagcactcccctatgtctacctta

SEQ ID NO: 3601278 - DNA, 25 bp, Homo sapien
tcctcatcagcactcccctatgtct

SEQ ID NO: 3601279 - DNA, 25 bp, Homo sapien
cagctcctcatcagcactcccctat

SEQ ID NO: 3601280 - DNA, 25 bp, Homo sapien
atcagcactcccctatgtctacctt

SEQ ID NO: 3601281 - DNA, 25 bp, Homo sapien
cccaatatcatcaggttgcttccag

SEQ ID NO: 3601282 - DNA, 25 bp, Homo sapien
gagtcatatggctacctggaataaa

SEQ ID NO: 3601283 - DNA, 25 bp, Homo sapien
gagaacgtcttgctctacaccctgt

SEQ ID NO: 3601284 - DNA, 25 bp, Homo sapien
gaatgagcctgacttctcttgaccc

SEQ ID NO: 3601285 - DNA, 25 bp, Homo sapien
tgagatagatgtgtctcaagcagat

SEQ ID NO: 3601286 - DNA, 25 bp, Homo sapien
gtctcaagcagatacttagtttgca

SEQ ID NO: 3601287 - DNA, 25 bp, Homo sapien
ttcattccaaagctgtgctactgag

SEQ ID NO: 3601288 - DNA, 25 bp, Homo sapien
tttcctcagctgacaatggtgagat

SEQ ID NO: 3601289 - DNA, 25 bp, Homo sapien
taaagtaaagcgtattgtcaataaa

SEQ ID NO: 3601290 - DNA, 25 bp, Homo sapien
ataaagtaaagcgtattgtcaataa

SEQ ID NO: 3601291 - DNA, 25 bp, Homo sapien
aaagtaaagcgtattgtcaataaat

SEQ ID NO: 3601292 - DNA, 25 bp, Homo sapien
ctataaagtaaagcgtattgtcaat

SEQ ID NO: 3601293 - DNA, 25 bp, Homo sapien
gttgatgcaattgtcttctactggt

SEQ ID NO: 3601294 - DNA, 25 bp, Homo sapien
cacaaagttgatgcaattgtcttct

SEQ ID NO: 3601295 - DNA, 25 bp, Homo sapien
caaagttgatgcaattgtcttctac

SEQ ID NO: 3601296 - DNA, 25 bp, Homo sapien
tgccacaaagttgatgcaattgtct

SEQ ID NO: 3601297 - DNA, 25 bp, Homo sapien
gcaaaaagacgaatttcaggagtcc

SEQ ID NO: 3601298 - DNA, 25 bp, Homo sapien
ggctgaactcaccacagatttggct

SEQ ID NO: 3601299 - DNA, 25 bp, Homo sapien
caattgtagcccagtccaaaggtgt

SEQ ID NO: 3601300 - DNA, 25 bp, Homo sapien
ctcgctctgtttagtggctgaactc

SEQ ID NO: 3601301 - DNA, 25 bp, Homo sapien
gctttagcagccagagttggcagcc

SEQ ID NO: 3601302 - DNA, 25 bp, Homo sapien
tagtttgttgcgagaggaagcgatc

SEQ ID NO: 3601303 - DNA, 25 bp, Homo sapien
caggagggcaaaatgcactgggaga

SEQ ID NO: 3601304 - DNA, 25 bp, Homo sapien
tcttcccgaagctgtgtagactgca

SEQ ID NO: 3601305 - DNA, 25 bp, Homo sapien
gaggagactgctgtcggcactcctt

SEQ ID NO: 3601306 - DNA, 25 bp, Homo sapien
gactgctgtcggcactccttgggcc

SEQ ID NO: 3601307 - DNA, 25 bp, Homo sapien
tgggcccgccttcaaacaggctctt

SEQ ID NO: 3601308 - DNA, 25 bp, Homo sapien
ggagactgctgtcggcactccttgg

SEQ ID NO: 3601309 - DNA, 25 bp, Homo sapien
tttacaatgcggaataatcagtcct

SEQ ID NO: 3601310 - DNA, 25 bp, Homo sapien
caatggaagtcgaaataaagtggca

SEQ ID NO: 3601311 - DNA, 25 bp, Homo sapien
gcacctccttagtccattagaagca

SEQ ID NO: 3601312 - DNA, 25 bp, Homo sapien
tgtgccttccaaaacctgtacctct

SEQ ID NO: 3601313 - DNA, 25 bp, Homo sapien
caactgtagagtccaattgggccaa

SEQ ID NO: 3601314 - DNA, 25 bp, Homo sapien
taacatgaaagcacgaagtgggatc

SEQ ID NO: 3601315 - DNA, 25 bp, Homo sapien
gaagcagcacactaagcaagctcta

SEQ ID NO: 3601316 - DNA, 25 bp, Homo sapien
gataagaatacatacgtgactcaag

SEQ ID NO: 3601317 - DNA, 25 bp, Homo sapien
tgtgccccccaaattaggaaggaca

SEQ ID NO: 3601318 - DNA, 25 bp, Homo sapien
tatatttgacttgatgaaaacttta

SEQ ID NO: 3601319 - DNA, 25 bp, Homo sapien
tgaatatatttgacttgatgaaaac

SEQ ID NO: 3601320 - DNA, 25 bp, Homo sapien
aatatatttgacttgatgaaaactt

SEQ ID NO: 3601321 - DNA, 25 bp, Homo sapien
agaataaagcacagtcactttaaag

SEQ ID NO: 3601322 - DNA, 25 bp, Homo sapien
gttctttcttgaccagtttcagatt

SEQ ID NO: 3601323 - DNA, 25 bp, Homo sapien
gctttggcaagtcttccttgttctt

SEQ ID NO: 3601324 - DNA, 25 bp, Homo sapien
cggccttgctttggcaagtcttcct

SEQ ID NO: 3601325 - DNA, 25 bp, Homo sapien
ccttgttctttcttgaccagtttca

SEQ ID NO: 3601326 - DNA, 25 bp, Homo sapien
gcgttcgctgacgaggaaggtcccc

SEQ ID NO: 3601327 - DNA, 25 bp, Homo sapien
gtcttcactccctcgcgttcgctga

SEQ ID NO: 3601328 - DNA, 25 bp, Homo sapien
actccctcgcgttcgctgacgagga

SEQ ID NO: 3601329 - DNA, 25 bp, Homo sapien
ccctcgcgttcgctgacgaggaagg

SEQ ID NO: 3601330 - DNA, 25 bp, Homo sapien
ctctgaaatttccggactattttat

SEQ ID NO: 3601331 - DNA, 25 bp, Homo sapien
ttattttgtcctgttagtctccagt

SEQ ID NO: 3601332 - DNA, 25 bp, Homo sapien
ctccagtgccagatagtccacagct

SEQ ID NO: 3601333 - DNA, 25 bp, Homo sapien
tttgtcctgttagtctccagtgcca

SEQ ID NO: 3601334 - DNA, 25 bp, Homo sapien
ccttgtatgagttggcttttttaca

SEQ ID NO: 3601335 - DNA, 25 bp, Homo sapien
cagaaccttgtatgagttggctttt

SEQ ID NO: 3601336 - DNA, 25 bp, Homo sapien
ttgtatgagttggcttttttacaca

SEQ ID NO: 3601337 - DNA, 25 bp, Homo sapien
agaaccttgtatgagttggcttttt

SEQ ID NO: 3601338 - DNA, 25 bp, Homo sapien
aaggctgagttaggattgtttcctc

SEQ ID NO: 3601339 - DNA, 25 bp, Homo sapien
agatagcaattccgcagagtcctgg

SEQ ID NO: 3601340 - DNA, 25 bp, Homo sapien
gagatagcaattccgcagagtcctg

SEQ ID NO: 3601341 - DNA, 25 bp, Homo sapien
atgagatagcaattccgcagagtcc

SEQ ID NO: 3601342 - DNA, 25 bp, Homo sapien
actagcaactccaaccaagtcagaa

SEQ ID NO: 3601343 - DNA, 25 bp, Homo sapien
ttactagcaactccaaccaagtcag

SEQ ID NO: 3601344 - DNA, 25 bp, Homo sapien
tagcaactccaaccaagtcagaact

SEQ ID NO: 3601345 - DNA, 25 bp, Homo sapien
tactagcaactccaaccaagtcaga

SEQ ID NO: 3601346 - DNA, 25 bp, Homo sapien
tgatcttggtgcaagtggtccctgg

SEQ ID NO: 3601347 - DNA, 25 bp, Homo sapien
tcagctgacagtattgggcaggtcc

SEQ ID NO: 3601348 - DNA, 25 bp, Homo sapien
tgcgcctggtctgaattacatattc

SEQ ID NO: 3601349 - DNA, 25 bp, Homo sapien
tggatctcaccgattaacccagcca

SEQ ID NO: 3601350 - DNA, 25 bp, Homo sapien
ggagaggtatgaagatgtgtaagac

SEQ ID NO: 3601351 - DNA, 25 bp, Homo sapien
aacaatttgtgagtgtataggtgag

SEQ ID NO: 3601352 - DNA, 25 bp, Homo sapien
catgatatcctttccagtccagttc

SEQ ID NO: 3601353 - DNA, 25 bp, Homo sapien
gctgtaggtatgaacttctttagcc

SEQ ID NO: 3601354 - DNA, 25 bp, Homo sapien
cagaggtacctgtgcagatgcctta

SEQ ID NO: 3601355 - DNA, 25 bp, Homo sapien
ttttacagcttagtggaggagacag

SEQ ID NO: 3601356 - DNA, 25 bp, Homo sapien
tatcctagttttggatgccaagaac

SEQ ID NO: 3601357 - DNA, 25 bp, Homo sapien
ggttccatggtaccttcatacccat

SEQ ID NO: 3601358 - DNA, 25 bp, Homo sapien
tccatcacagtctgcctgttaccat

SEQ ID NO: 3601359 - DNA, 25 bp, Homo sapien
tagtagactttgaatacaaatctga

SEQ ID NO: 3601360 - DNA, 25 bp, Homo sapien
agatagtagactttgaatacaaatc

SEQ ID NO: 3601361 - DNA, 25 bp, Homo sapien
ccattggtcctaaggtactcagaag

SEQ ID NO: 3601362 - DNA, 25 bp, Homo sapien
ggcaggcaaggtctgtcacttaaac

SEQ ID NO: 3601363 - DNA, 25 bp, Homo sapien
tccttcagttacactcccttccctc

SEQ ID NO: 3601364 - DNA, 25 bp, Homo sapien
ccaggaccagttaaactgtttatgc

SEQ ID NO: 3601365 - DNA, 25 bp, Homo sapien
acttaaacgacactcttgccaacac

SEQ ID NO: 3601366 - DNA, 25 bp, Homo sapien
gtgtgggttgactccactcgcccca

SEQ ID NO: 3601367 - DNA, 25 bp, Homo sapien
tgtgggttgactccactcgccccag

SEQ ID NO: 3601368 - DNA, 25 bp, Homo sapien
gggtgtgggttgactccactcgccc

SEQ ID NO: 3601369 - DNA, 25 bp, Homo sapien
ggtgtgggttgactccactcgcccc

SEQ ID NO: 3601370 - DNA, 25 bp, Homo sapien
cgtggtcctatttgtgctctcaaat

SEQ ID NO: 3601371 - DNA, 25 bp, Homo sapien
gtattcacactatgccaacccagag

SEQ ID NO: 3601372 - DNA, 25 bp, Homo sapien
taaatgggtccatacatgcttgtgg

SEQ ID NO: 3601373 - DNA, 25 bp, Homo sapien
tccaaaggactgttgtcacgtggtc

SEQ ID NO: 3601374 - DNA, 25 bp, Homo sapien
aaccaacataacacatgaataccta

SEQ ID NO: 3601375 - DNA, 25 bp, Homo sapien
tcacccataggtgggaatcaaacaa

SEQ ID NO: 3601376 - DNA, 25 bp, Homo sapien
cacaccggtgcctgtcagggagtag

SEQ ID NO: 3601377 - DNA, 25 bp, Homo sapien
cagcaaaccaacataacacatgaat

SEQ ID NO: 3601378 - DNA, 25 bp, Homo sapien
gattcagatagcgagagacaccctt

SEQ ID NO: 3601379 - DNA, 25 bp, Homo sapien
agacacccttaactgtctcccgagg

SEQ ID NO: 3601380 - DNA, 25 bp, Homo sapien
gtatcccaaatcttgctctccgaag

SEQ ID NO: 3601381 - DNA, 25 bp, Homo sapien
gaccactccagggtatgcttaggta

SEQ ID NO: 3601382 - DNA, 25 bp, Homo sapien
tgccagccgtttaatatggagagcc

SEQ ID NO: 3601383 - DNA, 25 bp, Homo sapien
caatgattatctctgggatgaaggc

SEQ ID NO: 3601384 - DNA, 25 bp, Homo sapien
tctttagattgaccctgctacggga

SEQ ID NO: 3601385 - DNA, 25 bp, Homo sapien
ctacgggaatggttatgaatctggc

SEQ ID NO: 3601386 - DNA, 25 bp, Homo sapien
gatgtgccatactttgcagatgtgg

SEQ ID NO: 3601387 - DNA, 25 bp, Homo sapien
ggatgtgccatactttgcagatgtg

SEQ ID NO: 3601388 - DNA, 25 bp, Homo sapien
caacacgtgattgttgtacgtacac

SEQ ID NO: 3601389 - DNA, 25 bp, Homo sapien
gaaatcattgtaagacctgttataa

SEQ ID NO: 3601390 - DNA, 25 bp, Homo sapien
tattgaaatcattgtaagacctgtt

SEQ ID NO: 3601391 - DNA, 25 bp, Homo sapien
tgtgctctggagtgcctatttattg

SEQ ID NO: 3601392 - DNA, 25 bp, Homo sapien
actgcagaataatcatattttaaac

SEQ ID NO: 3601393 - DNA, 25 bp, Homo sapien
tcagaagactgcagaataatcatat

SEQ ID NO: 3601394 - DNA, 25 bp, Homo sapien
ctgcagaataatcatattttaaact

SEQ ID NO: 3601395 - DNA, 25 bp, Homo sapien
gaagactgcagaataatcatatttt

SEQ ID NO: 3601396 - DNA, 25 bp, Homo sapien
cttcagagtaatatgctggcatttg

SEQ ID NO: 3601397 - DNA, 25 bp, Homo sapien
tcttggcaactgttcctggtgcttt

SEQ ID NO: 3601398 - DNA, 25 bp, Homo sapien
gcagtgaggacggtctgtgtctctt

SEQ ID NO: 3601399 - DNA, 25 bp, Homo sapien
cttaatatactgtttcttcagagta

SEQ ID NO: 3601400 - DNA, 25 bp, Homo sapien
gagatgagacaccataggatcagct

SEQ ID NO: 3601401 - DNA, 25 bp, Homo sapien
agatgagacaccataggatcagctc

SEQ ID NO: 3601402 - DNA, 25 bp, Homo sapien
gagcctcagctgattttgcaaagaa

SEQ ID NO: 3601403 - DNA, 25 bp, Homo sapien
agatttgtcttaggcagggagagcc

SEQ ID NO: 3601404 - DNA, 25 bp, Homo sapien
gtttggccgcgagagcaggattcct

SEQ ID NO: 3601405 - DNA, 25 bp, Homo sapien
ttctggaatgtggaactgacctcat

SEQ ID NO: 3601406 - DNA, 25 bp, Homo sapien
cagcccatggtcctaagatgtttac

SEQ ID NO: 3601407 - DNA, 25 bp, Homo sapien
gaagataccaacaaggacacactcc

SEQ ID NO: 3601408 - DNA, 25 bp, Homo sapien
gtcaactacatcttgcaactagcaa

SEQ ID NO: 3601409 - DNA, 25 bp, Homo sapien
tgtaacagcggaaagtccagatgtc

SEQ ID NO: 3601410 - DNA, 25 bp, Homo sapien
tataggcagcgctctgatctggaca

SEQ ID NO: 3601411 - DNA, 25 bp, Homo sapien
aaagtataggcagcgctctgatctg

SEQ ID NO: 3601412 - DNA, 25 bp, Homo sapien
ggcagcgctctgatctggacagtga

SEQ ID NO: 3601413 - DNA, 25 bp, Homo sapien
agtagaaagtataggcagcgctctg

SEQ ID NO: 3601414 - DNA, 25 bp, Homo sapien
gctgagtcactgttctcgtccaagg

SEQ ID NO: 3601415 - DNA, 25 bp, Homo sapien
ttttatccgctctttgccagaggcc

SEQ ID NO: 3601416 - DNA, 25 bp, Homo sapien
gcatagacgctgtcattcacgggaa

SEQ ID NO: 3601417 - DNA, 25 bp, Homo sapien
cactgtgcctctaagaccgtcatgt

SEQ ID NO: 3601418 - DNA, 25 bp, Homo sapien
gcagaagaaagctgcagactgaggc

SEQ ID NO: 3601419 - DNA, 25 bp, Homo sapien
aaggtgaagcaggtgctactgtacc

SEQ ID NO: 3601420 - DNA, 25 bp, Homo sapien
gcagcatgtcatggaagactgccat

SEQ ID NO: 3601421 - DNA, 25 bp, Homo sapien
gctttcgtagatatgtgaactggcc

SEQ ID NO: 3601422 - DNA, 25 bp, Homo sapien
cagcttatatgcagaggctcctcat

SEQ ID NO: 3601423 - DNA, 25 bp, Homo sapien
gaaaagctaggttccgtgactgccc

SEQ ID NO: 3601424 - DNA, 25 bp, Homo sapien
tgcccgtctgcctacagcttatatg

SEQ ID NO: 3601425 - DNA, 25 bp, Homo sapien
aaagtctggtgggtgcttcaatgcc

SEQ ID NO: 3601426 - DNA, 25 bp, Homo sapien
gcctcgcactaataaacttctattt

SEQ ID NO: 3601427 - DNA, 25 bp, Homo sapien
aactttgggatcctgcacggctgca

SEQ ID NO: 3601428 - DNA, 25 bp, Homo sapien
agttattccggccatcccaggcatg

SEQ ID NO: 3601429 - DNA, 25 bp, Homo sapien
attgagtccagttattccggccatc

SEQ ID NO: 3601430 - DNA, 25 bp, Homo sapien
ggaagaggccaccataactttggga

SEQ ID NO: 3601431 - DNA, 25 bp, Homo sapien
atgttccgcaatgtctgtgccctag

SEQ ID NO: 3601432 - DNA, 25 bp, Homo sapien
ttccgcaatgtctgtgccctaggct

SEQ ID NO: 3601433 - DNA, 25 bp, Homo sapien
tctgatgttccgcaatgtctgtgcc

SEQ ID NO: 3601434 - DNA, 25 bp, Homo sapien
ctgatgttccgcaatgtctgtgccc

SEQ ID NO: 3601435 - DNA, 25 bp, Homo sapien
ctgaaataaatttcaacggctctgt

SEQ ID NO: 3601436 - DNA, 25 bp, Homo sapien
tcttggcatacaaaatggccaactg

SEQ ID NO: 3601437 - DNA, 25 bp, Homo sapien
ttggcatacaaaatggccaactgag

SEQ ID NO: 3601438 - DNA, 25 bp, Homo sapien
ggcatacaaaatggccaactgagga

SEQ ID NO: 3601439 - DNA, 25 bp, Homo sapien
atacaaaatggccaactgaggattc

SEQ ID NO: 3601440 - DNA, 25 bp, Homo sapien
tgtgaataagtcaatggctttctgc

SEQ ID NO: 3601441 - DNA, 25 bp, Homo sapien
ctgtgaataagtcaatggctttctg

SEQ ID NO: 3601442 - DNA, 25 bp, Homo sapien
aagtcaatggctttctgcagttcac

SEQ ID NO: 3601443 - DNA, 25 bp, Homo sapien
aataagtcaatggctttctgcagtt

SEQ ID NO: 3601444 - DNA, 25 bp, Homo sapien
attaatagattactttcctcacttg

SEQ ID NO: 3601445 - DNA, 25 bp, Homo sapien
tatcaattaatagattactttcctc

SEQ ID NO: 3601446 - DNA, 25 bp, Homo sapien
caattaatagattactttcctcact

SEQ ID NO: 3601447 - DNA, 25 bp, Homo sapien
ttaatagattactttcctcacttga

SEQ ID NO: 3601448 - DNA, 25 bp, Homo sapien
caaaagcccgaagtgcattcacttt

SEQ ID NO: 3601449 - DNA, 25 bp, Homo sapien
cacaaaagcccgaagtgcattcact

SEQ ID NO: 3601450 - DNA, 25 bp, Homo sapien
aagcccgaagtgcattcactttgtg

SEQ ID NO: 3601451 - DNA, 25 bp, Homo sapien
ttcacaaaagcccgaagtgcattca

SEQ ID NO: 3601452 - DNA, 25 bp, Homo sapien
aggcggtggacgaagctgaggggcc

SEQ ID NO: 3601453 - DNA, 25 bp, Homo sapien
ggcggtggacgaagctgaggggccg

SEQ ID NO: 3601454 - DNA, 25 bp, Homo sapien
gcggtggacgaagctgaggggccgt

SEQ ID NO: 3601455 - DNA, 25 bp, Homo sapien
cggtggacgaagctgaggggccgtg

SEQ ID NO: 3601456 - DNA, 25 bp, Homo sapien
ctcccttctgagcaacggcaggtga

SEQ ID NO: 3601457 - DNA, 25 bp, Homo sapien
tctcccttctgagcaacggcaggtg

SEQ ID NO: 3601458 - DNA, 25 bp, Homo sapien
tcccttctgagcaacggcaggtgag

SEQ ID NO: 3601459 - DNA, 25 bp, Homo sapien
gtccagctggttacgagtctccatg

SEQ ID NO: 3601460 - DNA, 25 bp, Homo sapien
tgctgtccagctggttacgagtctc

SEQ ID NO: 3601461 - DNA, 25 bp, Homo sapien
gctgtccagctggttacgagtctcc

SEQ ID NO: 3601462 - DNA, 25 bp, Homo sapien
catggcatccgaggaaaagtggagc

SEQ ID NO: 3601463 - DNA, 25 bp, Homo sapien
atcttctagcctaagagctccagag

SEQ ID NO: 3601464 - DNA, 25 bp, Homo sapien
tcttctagcctaagagctccagaga

SEQ ID NO: 3601465 - DNA, 25 bp, Homo sapien
gaagaaatcatcttctagcctaaga

SEQ ID NO: 3601466 - DNA, 25 bp, Homo sapien
gaaatcatcttctagcctaagagct

SEQ ID NO: 3601467 - DNA, 25 bp, Homo sapien
ctgttttgctactgtctgagaatat

SEQ ID NO: 3601468 - DNA, 25 bp, Homo sapien
tgcattcagctgtgtcgaacagtct

SEQ ID NO: 3601469 - DNA, 25 bp, Homo sapien
gctgtgtcgaacagtcttcctgttt

SEQ ID NO: 3601470 - DNA, 25 bp, Homo sapien
gatgcatgcattcagctgtgtcgaa

SEQ ID NO: 3601471 - DNA, 25 bp, Homo sapien
gaaacgcctcatgaaggtggctggt

SEQ ID NO: 3601472 - DNA, 25 bp, Homo sapien
gattgttcaactgcacctgtctaga

SEQ ID NO: 3601473 - DNA, 25 bp, Homo sapien
gctaggcttagcatgaggttcttcc

SEQ ID NO: 3601474 - DNA, 25 bp, Homo sapien
tgaaccccaggtctagaaacgcctc

SEQ ID NO: 3601475 - DNA, 25 bp, Homo sapien
cagtaaggcgacctggcttctgtga

SEQ ID NO: 3601476 - DNA, 25 bp, Homo sapien
ttggatctgaggttacactccagca

SEQ ID NO: 3601477 - DNA, 25 bp, Homo sapien
acagagcctgcatttggatctgagg

SEQ ID NO: 3601478 - DNA, 25 bp, Homo sapien
gagcaacaagggagcaagaatgtcc

SEQ ID NO: 3601479 - DNA, 25 bp, Homo sapien
aggtgagccacggtcctcggcacca

SEQ ID NO: 3601480 - DNA, 25 bp, Homo sapien
agccacggtcctcggcaccagatga

SEQ ID NO: 3601481 - DNA, 25 bp, Homo sapien
ggtcctcggcaccagatgaggaacc

SEQ ID NO: 3601482 - DNA, 25 bp, Homo sapien
cacggtcctcggcaccagatgagga

SEQ ID NO: 3601483 - DNA, 25 bp, Homo sapien
gctgtgtgtgtaatggttaccgtga

SEQ ID NO: 3601484 - DNA, 25 bp, Homo sapien
tccggttcatggattgtgacaacgc

SEQ ID NO: 3601485 - DNA, 25 bp, Homo sapien
tgagagcttccctgcaatccgaatt

SEQ ID NO: 3601486 - DNA, 25 bp, Homo sapien
tcaagcagaccctgccgtcaggtac

SEQ ID NO: 3601487 - DNA, 25 bp, Homo sapien
cattggacgtatttgtacagcagct

SEQ ID NO: 3601488 - DNA, 25 bp, Homo sapien
gaagcccctaatatttaccctgaga

SEQ ID NO: 3601489 - DNA, 25 bp, Homo sapien
tgctcttgccaaccgggaacatttg

SEQ ID NO: 3601490 - DNA, 25 bp, Homo sapien
catgagaggacagtgacaaccttgg

SEQ ID NO: 3601491 - DNA, 25 bp, Homo sapien
gagagggaatagttctccggctcct

SEQ ID NO: 3601492 - DNA, 25 bp, Homo sapien
aatagagagccaggttttcatttgg

SEQ ID NO: 3601493 - DNA, 25 bp, Homo sapien
ggtttcccagtaattgcattctatg

SEQ ID NO: 3601494 - DNA, 25 bp, Homo sapien
tcctccaaagagtagcagtcataat

SEQ ID NO: 3601495 - DNA, 25 bp, Homo sapien
aagctgttaggagcccatagtcctt

SEQ ID NO: 3601496 - DNA, 25 bp, Homo sapien
tgaagctgttaggagcccatagtcc

SEQ ID NO: 3601497 - DNA, 25 bp, Homo sapien
agatcccaggacaattgggcctttt

SEQ ID NO: 3601498 - DNA, 25 bp, Homo sapien
gatcccaggacaattgggcctttta

SEQ ID NO: 3601499 - DNA, 25 bp, Homo sapien
ctcacgtaccttggtgggtggagga

SEQ ID NO: 3601500 - DNA, 25 bp, Homo sapien
ccagtgtctcacgtaccttggtggg

SEQ ID NO: 3601501 - DNA, 25 bp, Homo sapien
ctccagtgtctcacgtaccttggtg

SEQ ID NO: 3601502 - DNA, 25 bp, Homo sapien
tcctccagtgtctcacgtaccttgg

SEQ ID NO: 3601503 - DNA, 25 bp, Homo sapien
cgactctccatgcaaaagagtcctg

SEQ ID NO: 3601504 - DNA, 25 bp, Homo sapien
actctccatgcaaaagagtcctgag

SEQ ID NO: 3601505 - DNA, 25 bp, Homo sapien
tctccatgcaaaagagtcctgaggg

SEQ ID NO: 3601506 - DNA, 25 bp, Homo sapien
tccatgcaaaagagtcctgaggggc

SEQ ID NO: 3601507 - DNA, 25 bp, Homo sapien
gttgatgtgtaatgtaaatcgtgcc

SEQ ID NO: 3601508 - DNA, 25 bp, Homo sapien
tccagtaaagcagcctgacagcggg

SEQ ID NO: 3601509 - DNA, 25 bp, Homo sapien
ggcactgcccatcatgagtctctgc

SEQ ID NO: 3601510 - DNA, 25 bp, Homo sapien
gtggcactaggttgttgatgtgtaa

SEQ ID NO: 3601511 - DNA, 25 bp, Homo sapien
cttgaagtcccaaataatgggccgt

SEQ ID NO: 3601512 - DNA, 25 bp, Homo sapien
tctggtcccttgcggtggactcttg

SEQ ID NO: 3601513 - DNA, 25 bp, Homo sapien
gccgtggagcttgtctggtcccttg

SEQ ID NO: 3601514 - DNA, 25 bp, Homo sapien
aaataatgggccgtggagcttgtct

SEQ ID NO: 3601515 - DNA, 25 bp, Homo sapien
gctgcattgatagactttgcagagg

SEQ ID NO: 3601516 - DNA, 25 bp, Homo sapien
gcagactgggccctttcacttctaa

SEQ ID NO: 3601517 - DNA, 25 bp, Homo sapien
ggttctgtgctctagatctgaggcc

SEQ ID NO: 3601518 - DNA, 25 bp, Homo sapien
cagcaggaatgaaatgagattccta

SEQ ID NO: 3601519 - DNA, 25 bp, Homo sapien
gtcggtgttctactagcagcatgga

SEQ ID NO: 3601520 - DNA, 25 bp, Homo sapien
catggacatgagtggctgcgggagc

SEQ ID NO: 3601521 - DNA, 25 bp, Homo sapien
ccacgtggtcggtgttctactagca

SEQ ID NO: 3601522 - DNA, 25 bp, Homo sapien
ctacttgccagagccacgtggtcgg

SEQ ID NO: 3601523 - DNA, 25 bp, Homo sapien
ccatctgtctagcactgtggcacct

SEQ ID NO: 3601524 - DNA, 25 bp, Homo sapien
aacagatgtgggtctcagtctgtgg

SEQ ID NO: 3601525 - DNA, 25 bp, Homo sapien
tctgcagggatctgagactgctctt

SEQ ID NO: 3601526 - DNA, 25 bp, Homo sapien
ttccaggaaccccataacagatgtg

SEQ ID NO: 3601527 - DNA, 25 bp, Homo sapien
aatactgaggtactgtaggaaaggg

SEQ ID NO: 3601528 - DNA, 25 bp, Homo sapien
tgttgcacccacaagtttatcatgg

SEQ ID NO: 3601529 - DNA, 25 bp, Homo sapien
ctggagttaataaaggtgctgtaat

SEQ ID NO: 3601530 - DNA, 25 bp, Homo sapien
taaaggtgctgtaatgagttgtatt

SEQ ID NO: 3601531 - DNA, 25 bp, Homo sapien
cctccaatgggcactgaaatgctca

SEQ ID NO: 3601532 - DNA, 25 bp, Homo sapien
gaagaaattgcaagccctccaatgg

SEQ ID NO: 3601533 - DNA, 25 bp, Homo sapien
attacacaaatgagggcggaagaca

SEQ ID NO: 3601534 - DNA, 25 bp, Homo sapien
cctcctggggctcattacacaaatg

SEQ ID NO: 3601535 - DNA, 25 bp, Homo sapien
tttattctctgatttctaacccatt

SEQ ID NO: 3601536 - DNA, 25 bp, Homo sapien
cgtcagactgccctgcatgctaaga

SEQ ID NO: 3601537 - DNA, 25 bp, Homo sapien
ccttctggggttgccgtcagactgc

SEQ ID NO: 3601538 - DNA, 25 bp, Homo sapien
gggttgccgtcagactgccctgcat

SEQ ID NO: 3601539 - DNA, 25 bp, Homo sapien
ttgcatagtaatgtgggttaaggtg

SEQ ID NO: 3601540 - DNA, 25 bp, Homo sapien
aatgtgggttaaggtggcccatgaa

SEQ ID NO: 3601541 - DNA, 25 bp, Homo sapien
ccatcggaaggacacccttggagaa

SEQ ID NO: 3601542 - DNA, 25 bp, Homo sapien
ggcccatgaagacgccatcggaagg

SEQ ID NO: 3601543 - DNA, 25 bp, Homo sapien
ctttggagtgttataagatgacttc

SEQ ID NO: 3601544 - DNA, 25 bp, Homo sapien
ttctcttacacttattcttctttgg

SEQ ID NO: 3601545 - DNA, 25 bp, Homo sapien
gttataagatgacttcttagcacca

SEQ ID NO: 3601546 - DNA, 25 bp, Homo sapien
ttataagatgacttcttagcaccat

SEQ ID NO: 3601547 - DNA, 25 bp, Homo sapien
ggttcaaccttgagaataatagtct

SEQ ID NO: 3601548 - DNA, 25 bp, Homo sapien
gttcaaccttgagaataatagtctt

SEQ ID NO: 3601549 - DNA, 25 bp, Homo sapien
gacagggcattggttctgcatggat

SEQ ID NO: 3601550 - DNA, 25 bp, Homo sapien
tggtcctcacactgtgacagggcat

SEQ ID NO: 3601551 - DNA, 25 bp, Homo sapien
tgacagggcattggttctgcatgga

SEQ ID NO: 3601552 - DNA, 25 bp, Homo sapien
ccagtggtcctcacactgtgacagg

SEQ ID NO: 3601553 - DNA, 25 bp, Homo sapien
gctctggtcacacgtgattgtgact

SEQ ID NO: 3601554 - DNA, 25 bp, Homo sapien
gagaaggctctggtcacacgtgatt

SEQ ID NO: 3601555 - DNA, 25 bp, Homo sapien
ctggtcacacgtgattgtgactgtg

SEQ ID NO: 3601556 - DNA, 25 bp, Homo sapien
aaggctctggtcacacgtgattgtg

SEQ ID NO: 3601557 - DNA, 25 bp, Homo sapien
ccctcagtgtgatgaccagcacagc

SEQ ID NO: 3601558 - DNA, 25 bp, Homo sapien
ctatggtcatggctatgggcttggg

SEQ ID NO: 3601559 - DNA, 25 bp, Homo sapien
ggcttgggtagcacagcccttgctg

SEQ ID NO: 3601560 - DNA, 25 bp, Homo sapien
agcacagcccttgctatggtcatgg

SEQ ID NO: 3601561 - DNA, 25 bp, Homo sapien
gtgaacagctgttaatgattcctgt

SEQ ID NO: 3601562 - DNA, 25 bp, Homo sapien
tcagtgaacagctgttaatgattcc

SEQ ID NO: 3601563 - DNA, 25 bp, Homo sapien
gctgttaatgattcctgttgtctct

SEQ ID NO: 3601564 - DNA, 25 bp, Homo sapien
cagctgttaatgattcctgttgtct

SEQ ID NO: 3601565 - DNA, 25 bp, Homo sapien
tatagcgagagatgaggttatgagg

SEQ ID NO: 3601566 - DNA, 25 bp, Homo sapien
ctatagcgagagatgaggttatgag

SEQ ID NO: 3601567 - DNA, 25 bp, Homo sapien
tagcgagagatgaggttatgaggaa

SEQ ID NO: 3601568 - DNA, 25 bp, Homo sapien
agcgagagatgaggttatgaggaag

SEQ ID NO: 3601569 - DNA, 25 bp, Homo sapien
agcgataatccaggccattgaagtc

SEQ ID NO: 3601570 - DNA, 25 bp, Homo sapien
ctgccaccacagcataacttgctga

SEQ ID NO: 3601571 - DNA, 25 bp, Homo sapien
gattctgagtcaagcgataatccag

SEQ ID NO: 3601572 - DNA, 25 bp, Homo sapien
accacagcataacttgctgattctg

SEQ ID NO: 3601573 - DNA, 25 bp, Homo sapien
catgctaatcttctctttatcgttc

SEQ ID NO: 3601574 - DNA, 25 bp, Homo sapien
taaaaatatagaatgcttcacgaat

SEQ ID NO: 3601575 - DNA, 25 bp, Homo sapien
caattttagtatatgtgctgccgaa

SEQ ID NO: 3601576 - DNA, 25 bp, Homo sapien
ttgcatgtcatccttgcacaggggc

SEQ ID NO: 3601577 - DNA, 25 bp, Homo sapien
gcattgataagtcctccatgtagcc

SEQ ID NO: 3601578 - DNA, 25 bp, Homo sapien
gtagcacctgcctgtgatagctgtg

SEQ ID NO: 3601579 - DNA, 25 bp, Homo sapien
tctctctataatttgccactgaagt

SEQ ID NO: 3601580 - DNA, 25 bp, Homo sapien
ctggatcctgacccagatctctcta

SEQ ID NO: 3601581 - DNA, 25 bp, Homo sapien
ccttattaattgttcgtcatgttgc

SEQ ID NO: 3601582 - DNA, 25 bp, Homo sapien
actgcactgtgccttattaattgtt

SEQ ID NO: 3601583 - DNA, 25 bp, Homo sapien
tgtctcctctttcgggaattcttcc

SEQ ID NO: 3601584 - DNA, 25 bp, Homo sapien
cttgtctcctctttcgggaattctt

SEQ ID NO: 3601585 - DNA, 25 bp, Homo sapien
tgtcttgcagagaagttcacgaggt

SEQ ID NO: 3601586 - DNA, 25 bp, Homo sapien
aagttcacgaggtggattggcctga

SEQ ID NO: 3601587 - DNA, 25 bp, Homo sapien
ttcttggaggatgggtctctgctct

SEQ ID NO: 3601588 - DNA, 25 bp, Homo sapien
gattggcctgatgggtcctggctcc

SEQ ID NO: 3601589 - DNA, 25 bp, Homo sapien
taaccatgactgtgattagacggca

SEQ ID NO: 3601590 - DNA, 25 bp, Homo sapien
tgtggtgtgaggcaataaccatgac

SEQ ID NO: 3601591 - DNA, 25 bp, Homo sapien
actgaaggagaagtctatgtggtgt

SEQ ID NO: 3601592 - DNA, 25 bp, Homo sapien
tggactgtgcattgtctcagctgtg

SEQ ID NO: 3601593 - DNA, 25 bp, Homo sapien
gccactgagaatgctctgcatcatc

SEQ ID NO: 3601594 - DNA, 25 bp, Homo sapien
cactgagaatgctctgcatcatccc

SEQ ID NO: 3601595 - DNA, 25 bp, Homo sapien
tgagaatgctctgcatcatccccca

SEQ ID NO: 3601596 - DNA, 25 bp, Homo sapien
ctggtatatgccatgctgggaggcc

SEQ ID NO: 3601597 - DNA, 25 bp, Homo sapien
gcgttgatttccctcttcggttcat

SEQ ID NO: 3601598 - DNA, 25 bp, Homo sapien
ttccctgtgttggctgagtccctag

SEQ ID NO: 3601599 - DNA, 25 bp, Homo sapien
ggctgagtccctaggactgtacttg

SEQ ID NO: 3601600 - DNA, 25 bp, Homo sapien
tgttggagcgtctttgctcctcaca

SEQ ID NO: 3601601 - DNA, 25 bp, Homo sapien
catgtgattggagggtgtctctaac

SEQ ID NO: 3601602 - DNA, 25 bp, Homo sapien
tgccatgtgattggagggtgtctct

SEQ ID NO: 3601603 - DNA, 25 bp, Homo sapien
gcttgtaggctcgaatgttggggag

SEQ ID NO: 3601604 - DNA, 25 bp, Homo sapien
aatgttggggagctgcatgccatgt

SEQ ID NO: 3601605 - DNA, 25 bp, Homo sapien
cacagagtcaacagcgctgattggt

SEQ ID NO: 3601606 - DNA, 25 bp, Homo sapien
cgctgattggtatggctcagatgac

SEQ ID NO: 3601607 - DNA, 25 bp, Homo sapien
tctgattttgtgtatagccctatgc

SEQ ID NO: 3601608 - DNA, 25 bp, Homo sapien
gtatagccctatgctgtgggaaatg

SEQ ID NO: 3601609 - DNA, 25 bp, Homo sapien
ggggaagatgtcactgcagagcgtg

SEQ ID NO: 3601610 - DNA, 25 bp, Homo sapien
ggaagatgtcactgcagagcgtgag

SEQ ID NO: 3601611 - DNA, 25 bp, Homo sapien
gggaagatgtcactgcagagcgtga

SEQ ID NO: 3601612 - DNA, 25 bp, Homo sapien
tacagagttcgtggaagggtctcct

SEQ ID NO: 3601613 - DNA, 25 bp, Homo sapien
gctgaattgaataatgacgctgaac

SEQ ID NO: 3601614 - DNA, 25 bp, Homo sapien
aacctataactttcctcttgattgt

SEQ ID NO: 3601615 - DNA, 25 bp, Homo sapien
gaatacagagttcgtggaagggtct

SEQ ID NO: 3601616 - DNA, 25 bp, Homo sapien
tgttgtgctgatattccatcacaga

SEQ ID NO: 3601617 - DNA, 25 bp, Homo sapien
tgttgactacccttgtgttgtgctg

SEQ ID NO: 3601618 - DNA, 25 bp, Homo sapien
tgagtgcccagagaacggtaaggag

SEQ ID NO: 3601619 - DNA, 25 bp, Homo sapien
tgatattccatcacagaggtgagtg

SEQ ID NO: 3601620 - DNA, 25 bp, Homo sapien
gtccaggttctgatggaaactgcac

SEQ ID NO: 3601621 - DNA, 25 bp, Homo sapien
ggtccaggttctgatggaaactgca

SEQ ID NO: 3601622 - DNA, 25 bp, Homo sapien
ccaggttctgatggaaactgcacca

SEQ ID NO: 3601623 - DNA, 25 bp, Homo sapien
tccaggttctgatggaaactgcacc

SEQ ID NO: 3601624 - DNA, 25 bp, Homo sapien
tctccacattcaccaatttcacagg

SEQ ID NO: 3601625 - DNA, 25 bp, Homo sapien
cagttctccacattcaccaatttca

SEQ ID NO: 3601626 - DNA, 25 bp, Homo sapien
cttgcagttctccacattcaccaat

SEQ ID NO: 3601627 - DNA, 25 bp, Homo sapien
gttctccacattcaccaatttcaca

SEQ ID NO: 3601628 - DNA, 25 bp, Homo sapien
ttagagcctgtccaaaatcccctgt

SEQ ID NO: 3601629 - DNA, 25 bp, Homo sapien
cttgaaggcttcctgataaaccaac

SEQ ID NO: 3601630 - DNA, 25 bp, Homo sapien
aagccccatcgatccctcctatgat

SEQ ID NO: 3601631 - DNA, 25 bp, Homo sapien
atttgcattcacccctaggcttttc

SEQ ID NO: 3601632 - DNA, 25 bp, Homo sapien
tgctgggttctatattcaggcatgc

SEQ ID NO: 3601633 - DNA, 25 bp, Homo sapien
tagatgctgggttctatattcaggc

SEQ ID NO: 3601634 - DNA, 25 bp, Homo sapien
cctgtgtagatgctgggttctatat

SEQ ID NO: 3601635 - DNA, 25 bp, Homo sapien
tgtagatgctgggttctatattcag

SEQ ID NO: 3601636 - DNA, 25 bp, Homo sapien
caagacaggtagtttttctcccata

SEQ ID NO: 3601637 - DNA, 25 bp, Homo sapien
ctgggtctgcgcagagaaacaagac

SEQ ID NO: 3601638 - DNA, 25 bp, Homo sapien
tgtgggtggagttctgggtctgcgc

SEQ ID NO: 3601639 - DNA, 25 bp, Homo sapien
tgtgtgggatgtcaggtccagctgg

SEQ ID NO: 3601640 - DNA, 25 bp, Homo sapien
aagtagtccctaccgcatttccagt

SEQ ID NO: 3601641 - DNA, 25 bp, Homo sapien
cagcagaatggagcaaagtagtccc

SEQ ID NO: 3601642 - DNA, 25 bp, Homo sapien
actgatgaaaggtgaattggatgcc

SEQ ID NO: 3601643 - DNA, 25 bp, Homo sapien
tggagatgctcttgcattagtggct

SEQ ID NO: 3601644 - DNA, 25 bp, Homo sapien
tctgaataagtgtgtcgttgtgcat

SEQ ID NO: 3601645 - DNA, 25 bp, Homo sapien
ctcgagcttctcaacttgaggtctg

SEQ ID NO: 3601646 - DNA, 25 bp, Homo sapien
tttctgaataagtgtgtcgttgtgc

SEQ ID NO: 3601647 - DNA, 25 bp, Homo sapien
cgagcttctcaacttgaggtctgtg

SEQ ID NO: 3601648 - DNA, 25 bp, Homo sapien
gctcttggcggtactcgcagaggta

SEQ ID NO: 3601649 - DNA, 25 bp, Homo sapien
cctgtttgctggtttgactgttgtc

SEQ ID NO: 3601650 - DNA, 25 bp, Homo sapien
gcttgaagctcttggcggtactcgc

SEQ ID NO: 3601651 - DNA, 25 bp, Homo sapien
tactcgcagaggtaggtgagaatta

SEQ ID NO: 3601652 - DNA, 25 bp, Homo sapien
ttcttgcagggaatggcaccggctg

SEQ ID NO: 3601653 - DNA, 25 bp, Homo sapien
gaatggcaccggctgcatcggatga

SEQ ID NO: 3601654 - DNA, 25 bp, Homo sapien
ccggctgcatcggatgatctgccat

SEQ ID NO: 3601655 - DNA, 25 bp, Homo sapien
ccctgcctggggcaatcctgttggg

SEQ ID NO: 3601656 - DNA, 25 bp, Homo sapien
atttgggtcactttagagtcttggt

SEQ ID NO: 3601657 - DNA, 25 bp, Homo sapien
tatttgggtcactttagagtcttgg

SEQ ID NO: 3601658 - DNA, 25 bp, Homo sapien
tttgggtcactttagagtcttggtc

SEQ ID NO: 3601659 - DNA, 25 bp, Homo sapien
ctgggcctcgctgaactgaaagtgg

SEQ ID NO: 3601660 - DNA, 25 bp, Homo sapien
cacattcatcccatgccttagctgg

SEQ ID NO: 3601661 - DNA, 25 bp, Homo sapien
gaattttctgtcaggcctagcacat

SEQ ID NO: 3601662 - DNA, 25 bp, Homo sapien
tgggcctcgctgaactgaaagtggc

SEQ ID NO: 3601663 - DNA, 25 bp, Homo sapien
tacttgtcagcttcccttacatcag

SEQ ID NO: 3601664 - DNA, 25 bp, Homo sapien
gcttcccttacatcaggttcccatt

SEQ ID NO: 3601665 - DNA, 25 bp, Homo sapien
tcacattgcagggtacttgtcagct

SEQ ID NO: 3601666 - DNA, 25 bp, Homo sapien
cacattgcagggtacttgtcagctt

SEQ ID NO: 3601667 - DNA, 25 bp, Homo sapien
gagtgatattgtgctgggtcaggca

SEQ ID NO: 3601668 - DNA, 25 bp, Homo sapien
ctgctcctatgtcatcggagggagt

SEQ ID NO: 3601669 - DNA, 25 bp, Homo sapien
agtcaaaatggcaccgcaaatccat

SEQ ID NO: 3601670 - DNA, 25 bp, Homo sapien
gggtcaggcagcacggctcagtggg

SEQ ID NO: 3601671 - DNA, 25 bp, Homo sapien
gctgcttgttgggtttaacaacgac

SEQ ID NO: 3601672 - DNA, 25 bp, Homo sapien
gtttaacaacgacagcaaacacaag

SEQ ID NO: 3601673 - DNA, 25 bp, Homo sapien
gtcctctaccttctttgtggccgac

SEQ ID NO: 3601674 - DNA, 25 bp, Homo sapien
taccttctttgtggccgactcagtg

SEQ ID NO: 3601675 - DNA, 25 bp, Homo sapien
gcacagtggtcaaggttgtttcccc

SEQ ID NO: 3601676 - DNA, 25 bp, Homo sapien
ggcacagtggtcaaggttgtttccc

SEQ ID NO: 3601677 - DNA, 25 bp, Homo sapien
cacagtggtcaaggttgtttcccct

SEQ ID NO: 3601678 - DNA, 25 bp, Homo sapien
atggcacagtggtcaaggttgtttc

SEQ ID NO: 3601679 - DNA, 25 bp, Homo sapien
acagctactgtattcctgggaatct

SEQ ID NO: 3601680 - DNA, 25 bp, Homo sapien
cctgtgacagctactgtattcctgg

SEQ ID NO: 3601681 - DNA, 25 bp, Homo sapien
gtcctcctgtgacagctactgtatt

SEQ ID NO: 3601682 - DNA, 25 bp, Homo sapien
tgacagctactgtattcctgggaat

SEQ ID NO: 3601683 - DNA, 25 bp, Homo sapien
tgtcagatactgtagatgtctctcc

SEQ ID NO: 3601684 - DNA, 25 bp, Homo sapien
gagaagtgctcttgcaggttgccac

SEQ ID NO: 3601685 - DNA, 25 bp, Homo sapien
gagttaccaggcattcccagataaa

SEQ ID NO: 3601686 - DNA, 25 bp, Homo sapien
ggcgacttctaataccctcatggag

SEQ ID NO: 3601687 - DNA, 25 bp, Homo sapien
tccaagcaccggcagtaactgaatg

SEQ ID NO: 3601688 - DNA, 25 bp, Homo sapien
gttccgggaatcctcgcctatggtg

SEQ ID NO: 3601689 - DNA, 25 bp, Homo sapien
aactgaatgtgtagacgaggaccct

SEQ ID NO: 3601690 - DNA, 25 bp, Homo sapien
agacgaggaccctgcagtcaacctt

SEQ ID NO: 3601691 - DNA, 25 bp, Homo sapien
ctcactacactgtccgactctgtct

SEQ ID NO: 3601692 - DNA, 25 bp, Homo sapien
cctttgaaacactcataactggctt

SEQ ID NO: 3601693 - DNA, 25 bp, Homo sapien
actacactgtccgactctgtctcct

SEQ ID NO: 3601694 - DNA, 25 bp, Homo sapien
tgaaacactcataactggcttcaat

SEQ ID NO: 3601695 - DNA, 25 bp, Homo sapien
tactacagagtgtcggactcccggg

SEQ ID NO: 3601696 - DNA, 25 bp, Homo sapien
tttaccctaattagcccaggagctc

SEQ ID NO: 3601697 - DNA, 25 bp, Homo sapien
tccgtatctgatgggagtactacag

SEQ ID NO: 3601698 - DNA, 25 bp, Homo sapien
gagtccagagatgaggatcgcctcc

SEQ ID NO: 3601699 - DNA, 25 bp, Homo sapien
ggagatggaaattaagctcttgcct

SEQ ID NO: 3601700 - DNA, 25 bp, Homo sapien
ccacagtcaaagtgctctaaatgga

SEQ ID NO: 3601701 - DNA, 25 bp, Homo sapien
aattaagctcttgcctatttgaatc

SEQ ID NO: 3601702 - DNA, 25 bp, Homo sapien
caaagtgctctaaatggagatggaa

SEQ ID NO: 3601703 - DNA, 25 bp, Homo sapien
tgaaaggagacagtaggaaaaccag

SEQ ID NO: 3601704 - DNA, 25 bp, Homo sapien
catgaaaggagacagtaggaaaacc

SEQ ID NO: 3601705 - DNA, 25 bp, Homo sapien
atgaaaggagacagtaggaaaacca

SEQ ID NO: 3601706 - DNA, 25 bp, Homo sapien
ttcaaaccccgatggaggcagggtg

SEQ ID NO: 3601707 - DNA, 25 bp, Homo sapien
catcacagatcaggtgtgcagtggg

SEQ ID NO: 3601708 - DNA, 25 bp, Homo sapien
caggaaaacatgtgtactgctaagg

SEQ ID NO: 3601709 - DNA, 25 bp, Homo sapien
tcccacctgtactgtctattgaggg

SEQ ID NO: 3601710 - DNA, 25 bp, Homo sapien
tattgagggtagatccacccgttgg

SEQ ID NO: 3601711 - DNA, 25 bp, Homo sapien
tggctttcttgacagttgttttgcc

SEQ ID NO: 3601712 - DNA, 25 bp, Homo sapien
ctggctttcttgacagttgttttgc

SEQ ID NO: 3601713 - DNA, 25 bp, Homo sapien
ctgccaaacagaaagagaaagtctt

SEQ ID NO: 3601714 - DNA, 25 bp, Homo sapien
caaacagaaagagaaagtctttggt

SEQ ID NO: 3601715 - DNA, 25 bp, Homo sapien
gccaaacagaaagagaaagtctttg

SEQ ID NO: 3601716 - DNA, 25 bp, Homo sapien
acagaaagagaaagtctttggtatg

SEQ ID NO: 3601717 - DNA, 25 bp, Homo sapien
ggacaggtctcagttcccttgggag

SEQ ID NO: 3601718 - DNA, 25 bp, Homo sapien
ccctgaggtgagtggtaagcttgtc

SEQ ID NO: 3601719 - DNA, 25 bp, Homo sapien
ggaaatttgtcctccatagccccaa

SEQ ID NO: 3601720 - DNA, 25 bp, Homo sapien
tagccccaaagtgcagcgtgaaacc

SEQ ID NO: 3601721 - DNA, 25 bp, Homo sapien
gctggtaccaactttctctgtcatt

SEQ ID NO: 3601722 - DNA, 25 bp, Homo sapien
ggctctgatcactattcaggtcaat

SEQ ID NO: 3601723 - DNA, 25 bp, Homo sapien
tgtcatttctacaacaggatccagc

SEQ ID NO: 3601724 - DNA, 25 bp, Homo sapien
tcaaattcagagtcacgtggcttct

SEQ ID NO: 3601725 - DNA, 25 bp, Homo sapien
acatgtctctgagcgggcctgagct

SEQ ID NO: 3601726 - DNA, 25 bp, Homo sapien
gctcccaagccctggacaggagctg

SEQ ID NO: 3601727 - DNA, 25 bp, Homo sapien
ctctggaagggcttaacgtggctgc

SEQ ID NO: 3601728 - DNA, 25 bp, Homo sapien
tgcagccaaggaactcatgacatgt

SEQ ID NO: 3601729 - DNA, 25 bp, Homo sapien
gcttcaatctgaggtctgactaagt

SEQ ID NO: 3601730 - DNA, 25 bp, Homo sapien
tcatcctcagatgcttcaatctgag

SEQ ID NO: 3601731 - DNA, 25 bp, Homo sapien
tctgactaagtcagcaagtgcgagc

SEQ ID NO: 3601732 - DNA, 25 bp, Homo sapien
cagcaagtgcgagcaaagggtgacc

SEQ ID NO: 3601733 - DNA, 25 bp, Homo sapien
cccctgggtaacagcctgcctggag

SEQ ID NO: 3601734 - DNA, 25 bp, Homo sapien
ggctgctcatgctctgtgagcccct

SEQ ID NO: 3601735 - DNA, 25 bp, Homo sapien
atggaggctgctcatgctctgtgag

SEQ ID NO: 3601736 - DNA, 25 bp, Homo sapien
ctgtgagcccctgggtaacagcctg

SEQ ID NO: 3601737 - DNA, 25 bp, Homo sapien
cttgatggatcacagcaatggttcc

SEQ ID NO: 3601738 - DNA, 25 bp, Homo sapien
gatttctgtcgaggttggccaagga

SEQ ID NO: 3601739 - DNA, 25 bp, Homo sapien
ttatgcattagttgtccctctgagg

SEQ ID NO: 3601740 - DNA, 25 bp, Homo sapien
ggcagaaaggagtgtggacccatta

SEQ ID NO: 3601741 - DNA, 25 bp, Homo sapien
aaaggttgggcaataagctttactg

SEQ ID NO: 3601742 - DNA, 25 bp, Homo sapien
gctatttggtacaggctgctgcttc

SEQ ID NO: 3601743 - DNA, 25 bp, Homo sapien
ggcaataagctttactgtttcttca

SEQ ID NO: 3601744 - DNA, 25 bp, Homo sapien
ttctctgaccagtggagctgccatt

SEQ ID NO: 3601745 - DNA, 25 bp, Homo sapien
gctctgcttctgagctgataagcaa

SEQ ID NO: 3601746 - DNA, 25 bp, Homo sapien
tcagctcccagatcctctggcggct

SEQ ID NO: 3601747 - DNA, 25 bp, Homo sapien
gcttctgagctgataagcaaatgta

SEQ ID NO: 3601748 - DNA, 25 bp, Homo sapien
tcccagatcctctggcggctgctgt

SEQ ID NO: 3601749 - DNA, 25 bp, Homo sapien
tggtggttaagacgagcaaagtgaa

SEQ ID NO: 3601750 - DNA, 25 bp, Homo sapien
gatgtttcactttgtgcattcgatg

SEQ ID NO: 3601751 - DNA, 25 bp, Homo sapien
cgatgtatggagatcttttctgtag

SEQ ID NO: 3601752 - DNA, 25 bp, Homo sapien
tttggtggttaagacgagcaaagtg

SEQ ID NO: 3601753 - DNA, 25 bp, Homo sapien
tcagagtgttcagctcagataaacc

SEQ ID NO: 3601754 - DNA, 25 bp, Homo sapien
gtgttcagctcagataaaccaatgg

SEQ ID NO: 3601755 - DNA, 25 bp, Homo sapien
tctttttaaattgcttcacgtcttc

SEQ ID NO: 3601756 - DNA, 25 bp, Homo sapien
aaattgcttcacgtcttcatgtttc

SEQ ID NO: 3601757 - DNA, 25 bp, Homo sapien
ctcctgttgggcttctaagtgcaac

SEQ ID NO: 3601758 - DNA, 25 bp, Homo sapien
aaactcctgttgggcttctaagtgc

SEQ ID NO: 3601759 - DNA, 25 bp, Homo sapien
caaaactcctgttgggcttctaagt

SEQ ID NO: 3601760 - DNA, 25 bp, Homo sapien
actcctgttgggcttctaagtgcaa

SEQ ID NO: 3601761 - DNA, 25 bp, Homo sapien
ctttcccatagagaacatgtcagct

SEQ ID NO: 3601762 - DNA, 25 bp, Homo sapien
agctgttctttctccataaggcaca

SEQ ID NO: 3601763 - DNA, 25 bp, Homo sapien
tgttctttctccataaggcacagtt

SEQ ID NO: 3601764 - DNA, 25 bp, Homo sapien
ctttctccataaggcacagttctgt

SEQ ID NO: 3601765 - DNA, 25 bp, Homo sapien
gtgggacagatagcatgtggggctc

SEQ ID NO: 3601766 - DNA, 25 bp, Homo sapien
tggtgggacagatagcatgtggggc

SEQ ID NO: 3601767 - DNA, 25 bp, Homo sapien
gggacagatagcatgtggggctcac

SEQ ID NO: 3601768 - DNA, 25 bp, Homo sapien
ctggtgggacagatagcatgtgggg

SEQ ID NO: 3601769 - DNA, 25 bp, Homo sapien
gtttgggtcggtcaaggctgatggt

SEQ ID NO: 3601770 - DNA, 25 bp, Homo sapien
tcctgtttgggtcggtcaaggctga

SEQ ID NO: 3601771 - DNA, 25 bp, Homo sapien
ttcctgtttgggtcggtcaaggctg

SEQ ID NO: 3601772 - DNA, 25 bp, Homo sapien
ctgtttgggtcggtcaaggctgatg

SEQ ID NO: 3601773 - DNA, 25 bp, Homo sapien
cagccacacctgctgttcagtacgc

SEQ ID NO: 3601774 - DNA, 25 bp, Homo sapien
acacctgctgttcagtacgcccctg

SEQ ID NO: 3601775 - DNA, 25 bp, Homo sapien
agccacacctgctgttcagtacgcc

SEQ ID NO: 3601776 - DNA, 25 bp, Homo sapien
tgctgttcagtacgcccctgccacc

SEQ ID NO: 3601777 - DNA, 25 bp, Homo sapien
ctgtaggttttcagacagcttcacg

SEQ ID NO: 3601778 - DNA, 25 bp, Homo sapien
gtaggttttcagacagcttcacggc

SEQ ID NO: 3601779 - DNA, 25 bp, Homo sapien
ggttttcagacagcttcacggccat

SEQ ID NO: 3601780 - DNA, 25 bp, Homo sapien
taggttttcagacagcttcacggcc

SEQ ID NO: 3601781 - DNA, 25 bp, Homo sapien
ccccggggttcaggacttggctcat

SEQ ID NO: 3601782 - DNA, 25 bp, Homo sapien
tccccggggttcaggacttggctca

SEQ ID NO: 3601783 - DNA, 25 bp, Homo sapien
tagaggtgccctcaggtcagagtac

SEQ ID NO: 3601784 - DNA, 25 bp, Homo sapien
gtcagagtactgcagatggaactca

SEQ ID NO: 3601785 - DNA, 25 bp, Homo sapien
ccaggaccgtgccatgctagtagca

SEQ ID NO: 3601786 - DNA, 25 bp, Homo sapien
cggtgtgcaccgtctgtctctgtgg

SEQ ID NO: 3601787 - DNA, 25 bp, Homo sapien
tgtgggggctctggttccaggactg

SEQ ID NO: 3601788 - DNA, 25 bp, Homo sapien
gtgggggctctggttccaggactga

SEQ ID NO: 3601789 - DNA, 25 bp, Homo sapien
tgggggctctggttccaggactgac

SEQ ID NO: 3601790 - DNA, 25 bp, Homo sapien
cactagccgggaagggccatcaggt

SEQ ID NO: 3601791 - DNA, 25 bp, Homo sapien
tctatctggccatctgaccggggtg

SEQ ID NO: 3601792 - DNA, 25 bp, Homo sapien
gggaagtgacatagcctcctgccac

SEQ ID NO: 3601793 - DNA, 25 bp, Homo sapien
cctcattaaggtgacattggtagcc

SEQ ID NO: 3601794 - DNA, 25 bp, Homo sapien
tgctgactgagtatggacctcaccc

SEQ ID NO: 3601795 - DNA, 25 bp, Homo sapien
gtatggacctcacccgcagcataca

SEQ ID NO: 3601796 - DNA, 25 bp, Homo sapien
ccatgtgctgactgagtatggacct

SEQ ID NO: 3601797 - DNA, 25 bp, Homo sapien
tgactgagtatggacctcacccgca

SEQ ID NO: 3601798 - DNA, 25 bp, Homo sapien
tgggactggtcgctgtagctttgag

SEQ ID NO: 3601799 - DNA, 25 bp, Homo sapien
actggtcgctgtagctttgagtctg

SEQ ID NO: 3601800 - DNA, 25 bp, Homo sapien
ggtcgctgtagctttgagtctgttt

SEQ ID NO: 3601801 - DNA, 25 bp, Homo sapien
gctggtgggagttgagctggcctgg

SEQ ID NO: 3601802 - DNA, 25 bp, Homo sapien
catgcagcggtaccatccaatgttg

SEQ ID NO: 3601803 - DNA, 25 bp, Homo sapien
taagccaaactgattagccacgtca

SEQ ID NO: 3601804 - DNA, 25 bp, Homo sapien
catctagcagatgagagggagaaca

SEQ ID NO: 3601805 - DNA, 25 bp, Homo sapien
agggagaacacatcacgctcaggag

SEQ ID NO: 3601806 - DNA, 25 bp, Homo sapien
tcgtatcaaggtgaaggtaagtccc

SEQ ID NO: 3601807 - DNA, 25 bp, Homo sapien
aaggaattagagtggatcgtatcaa

SEQ ID NO: 3601808 - DNA, 25 bp, Homo sapien
tagagtggatcgtatcaaggtgaag

SEQ ID NO: 3601809 - DNA, 25 bp, Homo sapien
aggtgaaggtaagtcccattctctc

SEQ ID NO: 3601810 - DNA, 25 bp, Homo sapien
tttaggatgctggaagccatttgct

SEQ ID NO: 3601811 - DNA, 25 bp, Homo sapien
gattgttggtgccagctcagaccct

SEQ ID NO: 3601812 - DNA, 25 bp, Homo sapien
tatggggagataaagtatggctcct

SEQ ID NO: 3601813 - DNA, 25 bp, Homo sapien
aagtatggctccttttcttaggaat

SEQ ID NO: 3601814 - DNA, 25 bp, Homo sapien
cctgggagtctggtattatggtttc

SEQ ID NO: 3601815 - DNA, 25 bp, Homo sapien
ttagtgaggaaatttgacaaccgct

SEQ ID NO: 3601816 - DNA, 25 bp, Homo sapien
accgctgatggatctcaaggtccat

SEQ ID NO: 3601817 - DNA, 25 bp, Homo sapien
aaccgctgatggatctcaaggtcca

SEQ ID NO: 3601818 - DNA, 25 bp, Homo sapien
aatatttagtgaggaaatttgacaa

SEQ ID NO: 3601819 - DNA, 25 bp, Homo sapien
cctgacaatccttgattagtttttg

SEQ ID NO: 3601820 - DNA, 25 bp, Homo sapien
agtttttgtgtcatgcctatggcca

SEQ ID NO: 3601821 - DNA, 25 bp, Homo sapien
tagtttttgtgtcatgcctatggcc

SEQ ID NO: 3601822 - DNA, 25 bp, Homo sapien
gttaaataaaattgtcctgacaatc

SEQ ID NO: 3601823 - DNA, 25 bp, Homo sapien
ttacagctgttgatatgccagtggc

SEQ ID NO: 3601824 - DNA, 25 bp, Homo sapien
ctttgtgctgtatggtccaggttca

SEQ ID NO: 3601825 - DNA, 25 bp, Homo sapien
gggagccagccctgaatacatgact

SEQ ID NO: 3601826 - DNA, 25 bp, Homo sapien
caggttcaggtccttgattgcttaa

SEQ ID NO: 3601827 - DNA, 25 bp, Homo sapien
aatggctttgaatccaacagccgcc

SEQ ID NO: 3601828 - DNA, 25 bp, Homo sapien
ggctttgaatccaacagccgcccat

SEQ ID NO: 3601829 - DNA, 25 bp, Homo sapien
agaatggctttgaatccaacagccg

SEQ ID NO: 3601830 - DNA, 25 bp, Homo sapien
ttgaatccaacagccgcccatcaat

SEQ ID NO: 3601831 - DNA, 25 bp, Homo sapien
tgaaaccaaaccgattaagaacagc

SEQ ID NO: 3601832 - DNA, 25 bp, Homo sapien
ttaaccatccatcaggacatagcct

SEQ ID NO: 3601833 - DNA, 25 bp, Homo sapien
cgattaagaacagcaaggccctgag

SEQ ID NO: 3601834 - DNA, 25 bp, Homo sapien
caggacatagcctacagcttccttt

SEQ ID NO: 3601835 - DNA, 25 bp, Homo sapien
ctagttctgctccttgtgggagcag

SEQ ID NO: 3601836 - DNA, 25 bp, Homo sapien
agttctgctccttgtgggagcagac

SEQ ID NO: 3601837 - DNA, 25 bp, Homo sapien
tagttctgctccttgtgggagcaga

SEQ ID NO: 3601838 - DNA, 25 bp, Homo sapien
tccgtaggaaacgatgcacccctga

SEQ ID NO: 3601839 - DNA, 25 bp, Homo sapien
cacgcatgggtatctttgggctccg

SEQ ID NO: 3601840 - DNA, 25 bp, Homo sapien
tatctttgggctccgtaggaaacga

SEQ ID NO: 3601841 - DNA, 25 bp, Homo sapien
gggctgctctgaacacgcatgggta

SEQ ID NO: 3601842 - DNA, 25 bp, Homo sapien
ggaccagacatttgtctgacacaga

SEQ ID NO: 3601843 - DNA, 25 bp, Homo sapien
tcaggggaccagacatttgtctgac

SEQ ID NO: 3601844 - DNA, 25 bp, Homo sapien
ggggaccagacatttgtctgacaca

SEQ ID NO: 3601845 - DNA, 25 bp, Homo sapien
caggggaccagacatttgtctgaca

SEQ ID NO: 3601846 - DNA, 25 bp, Homo sapien
gtctcctagcaaggcactcacagag

SEQ ID NO: 3601847 - DNA, 25 bp, Homo sapien
cagttggtacatctgttgagctacc

SEQ ID NO: 3601848 - DNA, 25 bp, Homo sapien
gagctaccctgtctcctagcaaggc

SEQ ID NO: 3601849 - DNA, 25 bp, Homo sapien
cacaggacaggtgagctaggatgta

SEQ ID NO: 3601850 - DNA, 25 bp, Homo sapien
cactttgcctatcttgactgtacca

SEQ ID NO: 3601851 - DNA, 25 bp, Homo sapien
cacgattccgttttcagaattcaga

SEQ ID NO: 3601852 - DNA, 25 bp, Homo sapien
tgtaccagaattcacgattccgttt

SEQ ID NO: 3601853 - DNA, 25 bp, Homo sapien
agaattcagaactgacatgctagca

SEQ ID NO: 3601854 - DNA, 25 bp, Homo sapien
cagggtggcacagccctacatgaga

SEQ ID NO: 3601855 - DNA, 25 bp, Homo sapien
gatttctgtttgctagctgagggct

SEQ ID NO: 3601856 - DNA, 25 bp, Homo sapien
aatggctgtagaggctgagatttct

SEQ ID NO: 3601857 - DNA, 25 bp, Homo sapien
acatgagaatggctgtagaggctga

SEQ ID NO: 3601858 - DNA, 25 bp, Homo sapien
ggttggatctgagatttatgtagga

SEQ ID NO: 3601859 - DNA, 25 bp, Homo sapien
gcagcctttcgtttagagatacccc

SEQ ID NO: 3601860 - DNA, 25 bp, Homo sapien
gttttctctcgttggtcttgatcat

SEQ ID NO: 3601861 - DNA, 25 bp, Homo sapien
gccagagagtctgatggttggatct

SEQ ID NO: 3601862 - DNA, 25 bp, Homo sapien
gctttctgagggataggctctgtga

SEQ ID NO: 3601863 - DNA, 25 bp, Homo sapien
ggcttttttcggagggactgtctga

SEQ ID NO: 3601864 - DNA, 25 bp, Homo sapien
agatgaaccgttcctgctgtcgcaa

SEQ ID NO: 3601865 - DNA, 25 bp, Homo sapien
cattcttggttgttgactcctgcac

SEQ ID NO: 3601866 - DNA, 25 bp, Homo sapien
tgtgaatttagtaaagggggagatc

SEQ ID NO: 3601867 - DNA, 25 bp, Homo sapien
tgtccccatgtcagcaccatgaatg

SEQ ID NO: 3601868 - DNA, 25 bp, Homo sapien
catgtcagcaccatgaatgccaggc

SEQ ID NO: 3601869 - DNA, 25 bp, Homo sapien
cttgctgtccccatgtcagcaccat

SEQ ID NO: 3601870 - DNA, 25 bp, Homo sapien
cccatgtcagcaccatgaatgccag

SEQ ID NO: 3601871 - DNA, 25 bp, Homo sapien
caaactccagctttctaagatcagc

SEQ ID NO: 3601872 - DNA, 25 bp, Homo sapien
ttcgagttttgacaccttaagggca

SEQ ID NO: 3601873 - DNA, 25 bp, Homo sapien
ttgacagactgcgttgagcgttggc

SEQ ID NO: 3601874 - DNA, 25 bp, Homo sapien
gagtccttaaatcgtctatcccagt

SEQ ID NO: 3601875 - DNA, 25 bp, Homo sapien
aatccagagctattgcggggagcat

SEQ ID NO: 3601876 - DNA, 25 bp, Homo sapien
cagaaaagcactgggttgaatccag

SEQ ID NO: 3601877 - DNA, 25 bp, Homo sapien
attcatcgtgtatttagcaatgcag

SEQ ID NO: 3601878 - DNA, 25 bp, Homo sapien
acaagtatttgggggcaccttctat

SEQ ID NO: 3601879 - DNA, 25 bp, Homo sapien
gagagtatcaatgcactgctcatat

SEQ ID NO: 3601880 - DNA, 25 bp, Homo sapien
agcatggcactgtgccccgagagta

SEQ ID NO: 3601881 - DNA, 25 bp, Homo sapien
gcactgtgccccgagagtatcaatg

SEQ ID NO: 3601882 - DNA, 25 bp, Homo sapien
gccccgagagtatcaatgcactgct

SEQ ID NO: 3601883 - DNA, 25 bp, Homo sapien
tcttcttcacaggaccagagccaag

SEQ ID NO: 3601884 - DNA, 25 bp, Homo sapien
tccactctgaaaactcctacaccca

SEQ ID NO: 3601885 - DNA, 25 bp, Homo sapien
cttccactctgaaaactcctacacc

SEQ ID NO: 3601886 - DNA, 25 bp, Homo sapien
tcttcacaggaccagagccaagatc

SEQ ID NO: 3601887 - DNA, 25 bp, Homo sapien
tagccagtcaaattcagcagtggcg

SEQ ID NO: 3601888 - DNA, 25 bp, Homo sapien
gtcaaattcagcagtggcggggggt

SEQ ID NO: 3601889 - DNA, 25 bp, Homo sapien
ccagtcaaattcagcagtggcgggg

SEQ ID NO: 3601890 - DNA, 25 bp, Homo sapien
caaattcagcagtggcggggggttg

SEQ ID NO: 3601891 - DNA, 25 bp, Homo sapien
gactcaataggtctgagatatggcc

SEQ ID NO: 3601892 - DNA, 25 bp, Homo sapien
gatatggcctcagaacttgtactgt

SEQ ID NO: 3601893 - DNA, 25 bp, Homo sapien
ggagtaccaagctgtccattgaggc

SEQ ID NO: 3601894 - DNA, 25 bp, Homo sapien
gattcataagcctccatatcagagg

SEQ ID NO: 3601895 - DNA, 25 bp, Homo sapien
tctatttaagttgtcatctgaagcc

SEQ ID NO: 3601896 - DNA, 25 bp, Homo sapien
gatttagggagaagctcaactttat

SEQ ID NO: 3601897 - DNA, 25 bp, Homo sapien
gaagtttgctggatcaacatacaga

SEQ ID NO: 3601898 - DNA, 25 bp, Homo sapien
cacattatttcaggccatgtctaaa

SEQ ID NO: 3601899 - DNA, 25 bp, Homo sapien
caggccttctaagagcttgctacca

SEQ ID NO: 3601900 - DNA, 25 bp, Homo sapien
tgagcagatgcttggaaactcagct

SEQ ID NO: 3601901 - DNA, 25 bp, Homo sapien
tatagtgttaatgactaaggaagcc

SEQ ID NO: 3601902 - DNA, 25 bp, Homo sapien
ctgaagggaacccattttggccagt

SEQ ID NO: 3601903 - DNA, 25 bp, Homo sapien
gaaaactgaatgttacaatccacct

SEQ ID NO: 3601904 - DNA, 25 bp, Homo sapien
tacccaaatagaagaagtagcctct

SEQ ID NO: 3601905 - DNA, 25 bp, Homo sapien
caatccacctcttaatggccatgat

SEQ ID NO: 3601906 - DNA, 25 bp, Homo sapien
ctccagggatcctccgtcagggtct

SEQ ID NO: 3601907 - DNA, 25 bp, Homo sapien
cagccatgggttgcagagcctgtgg

SEQ ID NO: 3601908 - DNA, 25 bp, Homo sapien
tctcctgtagggcagactgtgggca

SEQ ID NO: 3601909 - DNA, 25 bp, Homo sapien
ttggctgacaggcctctcctgtagg

SEQ ID NO: 3601910 - DNA, 25 bp, Homo sapien
ccttggggacaactgagtccctctc

SEQ ID NO: 3601911 - DNA, 25 bp, Homo sapien
ttacaggcactttccttgagtttgg

SEQ ID NO: 3601912 - DNA, 25 bp, Homo sapien
aatgctgtgctaacagaaaccactg

SEQ ID NO: 3601913 - DNA, 25 bp, Homo sapien
cactgctcaccgctgttgggcttca

SEQ ID NO: 3601914 - DNA, 25 bp, Homo sapien
aaagagattgttcataatgctgtgc

SEQ ID NO: 3601915 - DNA, 25 bp, Homo sapien
gataggaagattgtaccacgttctc

SEQ ID NO: 3601916 - DNA, 25 bp, Homo sapien
atctcccacttgttcttgtttattc

SEQ ID NO: 3601917 - DNA, 25 bp, Homo sapien
gggagttattgttaccacaccatgg

SEQ ID NO: 3601918 - DNA, 25 bp, Homo sapien
gttattgttaccacaccatggtggg

SEQ ID NO: 3601919 - DNA, 25 bp, Homo sapien
ctcccacttgttcttgtttattctc

SEQ ID NO: 3601920 - DNA, 25 bp, Homo sapien
tcctccaggattcccacaggcctct

SEQ ID NO: 3601921 - DNA, 25 bp, Homo sapien
cagctcctccaggattcccacaggc

SEQ ID NO: 3601922 - DNA, 25 bp, Homo sapien
gctcctccaggattcccacaggcct

SEQ ID NO: 3601923 - DNA, 25 bp, Homo sapien
tccaggattcccacaggcctctctt

SEQ ID NO: 3601924 - DNA, 25 bp, Homo sapien
ggtttaggggtccatcctctgtgtc

SEQ ID NO: 3601925 - DNA, 25 bp, Homo sapien
tcaggccatcatggtcatcgcccat

SEQ ID NO: 3601926 - DNA, 25 bp, Homo sapien
tgcactcaggccatcatggtcatcg

SEQ ID NO: 3601927 - DNA, 25 bp, Homo sapien
tgtgtcctgcactcaggccatcatg

SEQ ID NO: 3601928 - DNA, 25 bp, Homo sapien
aagacagcacggctttgaagacatg

SEQ ID NO: 3601929 - DNA, 25 bp, Homo sapien
gcactgttatctgcatgcccagaag

SEQ ID NO: 3601930 - DNA, 25 bp, Homo sapien
tcacgggcaccaagataaagacggt

SEQ ID NO: 3601931 - DNA, 25 bp, Homo sapien
catgtctggatctgttcacgggcac

SEQ ID NO: 3601932 - DNA, 25 bp, Homo sapien
tgtccttggtgcagttcttatctag

SEQ ID NO: 3601933 - DNA, 25 bp, Homo sapien
tggtgtggcagaaacgtttctcaac

SEQ ID NO: 3601934 - DNA, 25 bp, Homo sapien
tccaacacctgagccagagtccctg

SEQ ID NO: 3601935 - DNA, 25 bp, Homo sapien
ttatctaggtagcacccaggtgtcc

SEQ ID NO: 3601936 - DNA, 25 bp, Homo sapien
ccctgattcttcaccccctctgcca

SEQ ID NO: 3601937 - DNA, 25 bp, Homo sapien
tgtgcttccatgaaacccgttaact

SEQ ID NO: 3601938 - DNA, 25 bp, Homo sapien
tctcgaatggctttgatcaaggcac

SEQ ID NO: 3601939 - DNA, 25 bp, Homo sapien
cccgttaacttctcgaatggctttg

SEQ ID NO: 3601940 - DNA, 25 bp, Homo sapien
tttccgcacgactgtgcttccatga

SEQ ID NO: 3601941 - DNA, 25 bp, Homo sapien
atgattcattggcttttagtgcatt

SEQ ID NO: 3601942 - DNA, 25 bp, Homo sapien
gcttttagtgcattaggcaaatttg

SEQ ID NO: 3601943 - DNA, 25 bp, Homo sapien
cattggcttttagtgcattaggcaa

SEQ ID NO: 3601944 - DNA, 25 bp, Homo sapien
ttcattggcttttagtgcattaggc

SEQ ID NO: 3601945 - DNA, 25 bp, Homo sapien
gcgtctggtgggcctatggaaatat

SEQ ID NO: 3601946 - DNA, 25 bp, Homo sapien
acaacacaatggctggaactgggag

SEQ ID NO: 3601947 - DNA, 25 bp, Homo sapien
aggggttttgattcctcagatccca

SEQ ID NO: 3601948 - DNA, 25 bp, Homo sapien
cacttcagcacctgcgtctggtggg

SEQ ID NO: 3601949 - DNA, 25 bp, Homo sapien
tgagccaaggccctgagacgcaggc

SEQ ID NO: 3601950 - DNA, 25 bp, Homo sapien
aggcctaggatgaataagtcacccc

SEQ ID NO: 3601951 - DNA, 25 bp, Homo sapien
cgcaggcctaggatgaataagtcac

SEQ ID NO: 3601952 - DNA, 25 bp, Homo sapien
gagacgcaggcctaggatgaataag

SEQ ID NO: 3601953 - DNA, 25 bp, Homo sapien
tctgtgatcactcttcccggaaggt

SEQ ID NO: 3601954 - DNA, 25 bp, Homo sapien
caagtccactggacttagcctctct

SEQ ID NO: 3601955 - DNA, 25 bp, Homo sapien
gcagggtctgcagaaatttctacct

SEQ ID NO: 3601956 - DNA, 25 bp, Homo sapien
ctttctagcccttttctctgcaggg

SEQ ID NO: 3601957 - DNA, 25 bp, Homo sapien
cagccctggcagcagaatgtatgca

SEQ ID NO: 3601958 - DNA, 25 bp, Homo sapien
cctcctcctgttttagtggaagaag

SEQ ID NO: 3601959 - DNA, 25 bp, Homo sapien
gcagcagaatgtatgcacatgggct

SEQ ID NO: 3601960 - DNA, 25 bp, Homo sapien
aatgtatgcacatgggctgggagcc

SEQ ID NO: 3601961 - DNA, 25 bp, Homo sapien
tcatccagagcccactataggtcag

SEQ ID NO: 3601962 - DNA, 25 bp, Homo sapien
aggtctgtaattaatgcacacattt

SEQ ID NO: 3601963 - DNA, 25 bp, Homo sapien
ttaatcaggatgttataggtctagc

SEQ ID NO: 3601964 - DNA, 25 bp, Homo sapien
tgttcagtcccttgaaactgggtaa

SEQ ID NO: 3601965 - DNA, 25 bp, Homo sapien
tctcatcgattggttcccagcccat

SEQ ID NO: 3601966 - DNA, 25 bp, Homo sapien
taattttttctcatcgattggttcc

SEQ ID NO: 3601967 - DNA, 25 bp, Homo sapien
tcaagttgtgtatgatgaaatctaa

SEQ ID NO: 3601968 - DNA, 25 bp, Homo sapien
agttcaagttgtgtatgatgaaatc

SEQ ID NO: 3601969 - DNA, 25 bp, Homo sapien
ctggacccttctaaaaccagatgtg

SEQ ID NO: 3601970 - DNA, 25 bp, Homo sapien
acccttctaaaaccagatgtgaaca

SEQ ID NO: 3601971 - DNA, 25 bp, Homo sapien
ggacccttctaaaaccagatgtgaa

SEQ ID NO: 3601972 - DNA, 25 bp, Homo sapien
accagatgtgaacaccctggttttc

SEQ ID NO: 3601973 - DNA, 25 bp, Homo sapien
cttagaggctgagataggcctacag

SEQ ID NO: 3601974 - DNA, 25 bp, Homo sapien
tcaggatttggcctatctggctttt

SEQ ID NO: 3601975 - DNA, 25 bp, Homo sapien
cctgtggttggtcagacatgtgctc

SEQ ID NO: 3601976 - DNA, 25 bp, Homo sapien
cagagcttggcactgctatgatgtt

SEQ ID NO: 3601977 - DNA, 25 bp, Homo sapien
tttgtgcatataccccatctgtcag

SEQ ID NO: 3601978 - DNA, 25 bp, Homo sapien
atccttcccacaaagccagcctcat

SEQ ID NO: 3601979 - DNA, 25 bp, Homo sapien
aatggcttttcatccccctctgctg

SEQ ID NO: 3601980 - DNA, 25 bp, Homo sapien
ctctgctgctgctacccacagttcc

SEQ ID NO: 3601981 - DNA, 25 bp, Homo sapien
ctagtcccttggcttctgaatggct

SEQ ID NO: 3601982 - DNA, 25 bp, Homo sapien
aagagcagcatggaagagatgatct

SEQ ID NO: 3601983 - DNA, 25 bp, Homo sapien
atctggccgccaggaaaggataaga

SEQ ID NO: 3601984 - DNA, 25 bp, Homo sapien
tggccgccaggaaaggataagagca

SEQ ID NO: 3601985 - DNA, 25 bp, Homo sapien
caagaatacccatctggccgccagg

SEQ ID NO: 3601986 - DNA, 25 bp, Homo sapien
tctgtcacagtgctagaaatgcctg

SEQ ID NO: 3601987 - DNA, 25 bp, Homo sapien
tgtcacagtgctagaaatgcctggc

SEQ ID NO: 3601988 - DNA, 25 bp, Homo sapien
ttctgtcacagtgctagaaatgcct

SEQ ID NO: 3601989 - DNA, 25 bp, Homo sapien
aggttctgtcacagtgctagaaatg

SEQ ID NO: 3601990 - DNA, 25 bp, Homo sapien
caccgccagtgagcctggaccaaag

SEQ ID NO: 3601991 - DNA, 25 bp, Homo sapien
ggaccaaagcaatggtgctgctgct

SEQ ID NO: 3601992 - DNA, 25 bp, Homo sapien
gcatcagaaaaacgcacagcagcag

SEQ ID NO: 3601993 - DNA, 25 bp, Homo sapien
agcagcagctagcacactgagccac

SEQ ID NO: 3601994 - DNA, 25 bp, Homo sapien
tcatgatacaaccatgcagctgtca

SEQ ID NO: 3601995 - DNA, 25 bp, Homo sapien
caagaacagagccggcctctctgat

SEQ ID NO: 3601996 - DNA, 25 bp, Homo sapien
gcagtaggtggcatccgtgaagact

SEQ ID NO: 3601997 - DNA, 25 bp, Homo sapien
gcccagctaggcagtaggtggcatc

SEQ ID NO: 3601998 - DNA, 25 bp, Homo sapien
catccgtgaagactgctttgccctc

SEQ ID NO: 3601999 - DNA, 25 bp, Homo sapien
tttttctagagtgttcaggtagccg

SEQ ID NO: 3602000 - DNA, 25 bp, Homo sapien
cagccatccagggaggagataagta

SEQ ID NO: 3602001 - DNA, 25 bp, Homo sapien
agtgttcaggtagccgtcatctggc

SEQ ID NO: 3602002 - DNA, 25 bp, Homo sapien
tagccgtcatctggcttatacagcc

SEQ ID NO: 3602003 - DNA, 25 bp, Homo sapien
taggaaagctgcatcctcggttggc

SEQ ID NO: 3602004 - DNA, 25 bp, Homo sapien
cctggctatcatcatgcctgaactg

SEQ ID NO: 3602005 - DNA, 25 bp, Homo sapien
gtccgaactgcgtgtgatttagctc

SEQ ID NO: 3602006 - DNA, 25 bp, Homo sapien
tgatgctccagggtaaggccaggga

SEQ ID NO: 3602007 - DNA, 25 bp, Homo sapien
ttaccttctgaacacacatgtaggg

SEQ ID NO: 3602008 - DNA, 25 bp, Homo sapien
gagggatgacggttaccttctgaac

SEQ ID NO: 3602009 - DNA, 25 bp, Homo sapien
gacggttaccttctgaacacacatg

SEQ ID NO: 3602010 - DNA, 25 bp, Homo sapien
gaagagagggatgacggttaccttc

SEQ ID NO: 3602011 - DNA, 25 bp, Homo sapien
tcaacggctttccaagtcctcttgg

SEQ ID NO: 3602012 - DNA, 25 bp, Homo sapien
ctgtcctgaccttgtcaaaggctcc

SEQ ID NO: 3602013 - DNA, 25 bp, Homo sapien
ctgaccttgtcaaaggctcctccag

SEQ ID NO: 3602014 - DNA, 25 bp, Homo sapien
tttcttattccctgtcctgaccttg

SEQ ID NO: 3602015 - DNA, 25 bp, Homo sapien
ggagggaacagcgattgcctccctt

SEQ ID NO: 3602016 - DNA, 25 bp, Homo sapien
ggaacagcgattgcctcccttttcc

SEQ ID NO: 3602017 - DNA, 25 bp, Homo sapien
gagggaacagcgattgcctcccttt

SEQ ID NO: 3602018 - DNA, 25 bp, Homo sapien
ctggagggaacagcgattgcctccc

SEQ ID NO: 3602019 - DNA, 25 bp, Homo sapien
tgtgtgtccctctgtaaggcctgag

SEQ ID NO: 3602020 - DNA, 25 bp, Homo sapien
cccatctgatgaatatggaggagcc

SEQ ID NO: 3602021 - DNA, 25 bp, Homo sapien
gctctctgatcggatgtcactcttt

SEQ ID NO: 3602022 - DNA, 25 bp, Homo sapien
ccggctctgattgctgttgggcttt

SEQ ID NO: 3602023 - DNA, 25 bp, Homo sapien
cttcacccggctctgattgctgttg

SEQ ID NO: 3602024 - DNA, 25 bp, Homo sapien
caggccatttcgtctggagcctcct

SEQ ID NO: 3602025 - DNA, 25 bp, Homo sapien
ctgccagtcactcgcgaaagctgct

SEQ ID NO: 3602026 - DNA, 25 bp, Homo sapien
caggacagggcccaatcgtcttgct

SEQ ID NO: 3602027 - DNA, 25 bp, Homo sapien
gcagactctgttttatgggcttcag

SEQ ID NO: 3602028 - DNA, 25 bp, Homo sapien
ttactggcccttaaccatgtgtctc

SEQ ID NO: 3602029 - DNA, 25 bp, Homo sapien
tgctgtgttactggcccttaaccat

SEQ ID NO: 3602030 - DNA, 25 bp, Homo sapien
gtgttactggcccttaaccatgtgt

SEQ ID NO: 3602031 - DNA, 25 bp, Homo sapien
ctgtccacagatgcttggctccacc

SEQ ID NO: 3602032 - DNA, 25 bp, Homo sapien
cctctgtttctgtgcgggtccccct

SEQ ID NO: 3602033 - DNA, 25 bp, Homo sapien
ctctgtttctgtgcgggtccccctc

SEQ ID NO: 3602034 - DNA, 25 bp, Homo sapien
tctgtttctgtgcgggtccccctcc

SEQ ID NO: 3602035 - DNA, 25 bp, Homo sapien
tgatgtgagtcaccctctcaaatcc

SEQ ID NO: 3602036 - DNA, 25 bp, Homo sapien
catctgatgtgagtcaccctctcaa

SEQ ID NO: 3602037 - DNA, 25 bp, Homo sapien
tgtgagtcaccctctcaaatccagt

SEQ ID NO: 3602038 - DNA, 25 bp, Homo sapien
ctttctccatgaatcgttctctgct

SEQ ID NO: 3602039 - DNA, 25 bp, Homo sapien
acaactgctatgttttgcatgacct

SEQ ID NO: 3602040 - DNA, 25 bp, Homo sapien
caggaactggtatttccccactggc

SEQ ID NO: 3602041 - DNA, 25 bp, Homo sapien
gctagagtaagtaggcgcatttgct

SEQ ID NO: 3602042 - DNA, 25 bp, Homo sapien
ctgctatgttttgcatgacctcggg

SEQ ID NO: 3602043 - DNA, 25 bp, Homo sapien
tgaaccatgaaggagcacactgggc

SEQ ID NO: 3602044 - DNA, 25 bp, Homo sapien
tgcagtgaaccatgaaggagcacac

SEQ ID NO: 3602045 - DNA, 25 bp, Homo sapien
gaaccatgaaggagcacactgggcc

SEQ ID NO: 3602046 - DNA, 25 bp, Homo sapien
agtgaaccatgaaggagcacactgg

SEQ ID NO: 3602047 - DNA, 25 bp, Homo sapien
gaccagctacattagaacctttctg

SEQ ID NO: 3602048 - DNA, 25 bp, Homo sapien
ggcctagatgaccagctacattaga

SEQ ID NO: 3602049 - DNA, 25 bp, Homo sapien
cagctagattatccccaggtccttg

SEQ ID NO: 3602050 - DNA, 25 bp, Homo sapien
agaacctttctgtccagctagatta

SEQ ID NO: 3602051 - DNA, 25 bp, Homo sapien
aaagatcaaagcagcctcttaggac

SEQ ID NO: 3602052 - DNA, 25 bp, Homo sapien
taaatatcagcgaacacatcctcag

SEQ ID NO: 3602053 - DNA, 25 bp, Homo sapien
ggccaccacattgagcaaagaaaag

SEQ ID NO: 3602054 - DNA, 25 bp, Homo sapien
taggacaactgacccgtgacatttg

SEQ ID NO: 3602055 - DNA, 25 bp, Homo sapien
gatgccgtagacagtgaagtgttgg

SEQ ID NO: 3602056 - DNA, 25 bp, Homo sapien
gaaccagccattaacatgcagggat

SEQ ID NO: 3602057 - DNA, 25 bp, Homo sapien
taacatgcagggatgccgtagacag

SEQ ID NO: 3602058 - DNA, 25 bp, Homo sapien
gtgttgggggcagatattaactgta

SEQ ID NO: 3602059 - DNA, 25 bp, Homo sapien
atctgacttcactcggggagggctg

SEQ ID NO: 3602060 - DNA, 25 bp, Homo sapien
tctgacttcactcggggagggctga

SEQ ID NO: 3602061 - DNA, 25 bp, Homo sapien
tcacaccaaggaatatcaataccaa

SEQ ID NO: 3602062 - DNA, 25 bp, Homo sapien
gctaccaagaaggtacgtactagct

SEQ ID NO: 3602063 - DNA, 25 bp, Homo sapien
tactcaggaaaattctacttgcaac

SEQ ID NO: 3602064 - DNA, 25 bp, Homo sapien
gagtctggtcctggtaccagtagca

SEQ ID NO: 3602065 - DNA, 25 bp, Homo sapien
tgcttggcgttgtaccaggtgctgt

SEQ ID NO: 3602066 - DNA, 25 bp, Homo sapien
aacaggcaagtcagtgtgaagccgg

SEQ ID NO: 3602067 - DNA, 25 bp, Homo sapien
tgaagccgggaaccaaagtgagatc

SEQ ID NO: 3602068 - DNA, 25 bp, Homo sapien
aagtgagatctctgccacattcact

SEQ ID NO: 3602069 - DNA, 25 bp, Homo sapien
agagtgttgggaatgccctctttgg

SEQ ID NO: 3602070 - DNA, 25 bp, Homo sapien
tggccaaaagtatcttcacagttac

SEQ ID NO: 3602071 - DNA, 25 bp, Homo sapien
gccctctttggccaaaagtatcttc

SEQ ID NO: 3602072 - DNA, 25 bp, Homo sapien
gagtgttgggaatgccctctttggc

SEQ ID NO: 3602073 - DNA, 25 bp, Homo sapien
gcaaagccctcagcatcctggcatt

SEQ ID NO: 3602074 - DNA, 25 bp, Homo sapien
caaagccctcagcatcctggcattc

SEQ ID NO: 3602075 - DNA, 25 bp, Homo sapien
aagccctcagcatcctggcattcat

SEQ ID NO: 3602076 - DNA, 25 bp, Homo sapien
aaagccctcagcatcctggcattca

SEQ ID NO: 3602077 - DNA, 25 bp, Homo sapien
aaagcctattgtgttggtacctcag

SEQ ID NO: 3602078 - DNA, 25 bp, Homo sapien
tacttggaatgagagaaatagccca

SEQ ID NO: 3602079 - DNA, 25 bp, Homo sapien
taaacccagtggttgctccgcaaat

SEQ ID NO: 3602080 - DNA, 25 bp, Homo sapien
aaaaactgctacagcggctgggtgc

SEQ ID NO: 3602081 - DNA, 25 bp, Homo sapien
tctgctgaagggtgttgtatgtctc

SEQ ID NO: 3602082 - DNA, 25 bp, Homo sapien
gaaatctcttccaaacatcggagtt

SEQ ID NO: 3602083 - DNA, 25 bp, Homo sapien
gacgcttctatatcataatacctat

SEQ ID NO: 3602084 - DNA, 25 bp, Homo sapien
ttttaataaagagaccacagatttc

SEQ ID NO: 3602085 - DNA, 25 bp, Homo sapien
gctgggactgtcactcattctccga

SEQ ID NO: 3602086 - DNA, 25 bp, Homo sapien
tcggctgccgctggcaggaaacaat

SEQ ID NO: 3602087 - DNA, 25 bp, Homo sapien
gggccagcgcaaggatctccgagtt

SEQ ID NO: 3602088 - DNA, 25 bp, Homo sapien
tcagcgcgtgaacgcagctcggctg

SEQ ID NO: 3602089 - DNA, 25 bp, Homo sapien
aaatggagactaggtggtcaccggg

SEQ ID NO: 3602090 - DNA, 25 bp, Homo sapien
ctcgcctctttcacgccgacttgga

SEQ ID NO: 3602091 - DNA, 25 bp, Homo sapien
gcctgcccggcagtttccgaggaaa

SEQ ID NO: 3602092 - DNA, 25 bp, Homo sapien
gcagtttccgaggaaataaaatgga

SEQ ID NO: 3602093 - DNA, 25 bp, Homo sapien
tacgtcaagtgagtccgatgggctg

SEQ ID NO: 3602094 - DNA, 25 bp, Homo sapien
gcaaattaaggtgcgcttccacaaa

SEQ ID NO: 3602095 - DNA, 25 bp, Homo sapien
gctcggctgggtgcatatgaaaatt

SEQ ID NO: 3602096 - DNA, 25 bp, Homo sapien
taactgagtttgtgtgctcggctgg

SEQ ID NO: 3602097 - DNA, 25 bp, Homo sapien
catcctactaaaaaagcaggctgtc

SEQ ID NO: 3602098 - DNA, 25 bp, Homo sapien
cagcgcttggtgttattgtgtaatc

SEQ ID NO: 3602099 - DNA, 25 bp, Homo sapien
gaagcttgccttatttgcattgtgc

SEQ ID NO: 3602100 - DNA, 25 bp, Homo sapien
tattaatcactctgtgaaaggaagc

SEQ ID NO: 3602101 - DNA, 25 bp, Homo sapien
tggtggcagtgagtaaacaagaact

SEQ ID NO: 3602102 - DNA, 25 bp, Homo sapien
caatgtatgcaaaggtttggtggca

SEQ ID NO: 3602103 - DNA, 25 bp, Homo sapien
cagattctgggaatgacttgatggg

SEQ ID NO: 3602104 - DNA, 25 bp, Homo sapien
agtaaggaggtcattggaagcagca

SEQ ID NO: 3602105 - DNA, 25 bp, Homo sapien
ctgaccaccgttgagagggactgta

SEQ ID NO: 3602106 - DNA, 25 bp, Homo sapien
agggactgtagccagtctcagagcc

SEQ ID NO: 3602107 - DNA, 25 bp, Homo sapien
tgaccaccgttgagagggactgtag

SEQ ID NO: 3602108 - DNA, 25 bp, Homo sapien
tctgaccaccgttgagagggactgt

SEQ ID NO: 3602109 - DNA, 25 bp, Homo sapien
ctggcaaaggagaaacctgtgttca

SEQ ID NO: 3602110 - DNA, 25 bp, Homo sapien
aaatgggggagcagttgtttcctca

SEQ ID NO: 3602111 - DNA, 25 bp, Homo sapien
tgaaaatgggggagcagttgtttcc

SEQ ID NO: 3602112 - DNA, 25 bp, Homo sapien
tgtttcctcagagatactggcaaag

SEQ ID NO: 3602113 - DNA, 25 bp, Homo sapien
attccctcagtattttctagttcag

SEQ ID NO: 3602114 - DNA, 25 bp, Homo sapien
cattccctcagtattttctagttca

SEQ ID NO: 3602115 - DNA, 25 bp, Homo sapien
tcattccctcagtattttctagttc

SEQ ID NO: 3602116 - DNA, 25 bp, Homo sapien
tctcattccctcagtattttctagt

SEQ ID NO: 3602117 - DNA, 25 bp, Homo sapien
tctaaaaggtgcctgcgtctccaag

SEQ ID NO: 3602118 - DNA, 25 bp, Homo sapien
gatgaatctgtttgggcaacccttc

SEQ ID NO: 3602119 - DNA, 25 bp, Homo sapien
tattgtgtaacagccatgccatttc

SEQ ID NO: 3602120 - DNA, 25 bp, Homo sapien
catgtgtgcgttccccatagagcaa

SEQ ID NO: 3602121 - DNA, 25 bp, Homo sapien
agacgccacctttggctctttcatt

SEQ ID NO: 3602122 - DNA, 25 bp, Homo sapien
ctagacgccacctttggctctttca

SEQ ID NO: 3602123 - DNA, 25 bp, Homo sapien
tagacgccacctttggctctttcat

SEQ ID NO: 3602124 - DNA, 25 bp, Homo sapien
aacatagcatggcatctgttgcttc

SEQ ID NO: 3602125 - DNA, 25 bp, Homo sapien
aataacatagcatggcatctgttgc

SEQ ID NO: 3602126 - DNA, 25 bp, Homo sapien
tagcatggcatctgttgcttcacat

SEQ ID NO: 3602127 - DNA, 25 bp, Homo sapien
tataataacatagcatggcatctgt

SEQ ID NO: 3602128 - DNA, 25 bp, Homo sapien
tagaatctggtagagagatggccaa

SEQ ID NO: 3602129 - DNA, 25 bp, Homo sapien
tcctaagataatgctgtgcttgccc

SEQ ID NO: 3602130 - DNA, 25 bp, Homo sapien
gatgaaggaatgtagccagcggctt

SEQ ID NO: 3602131 - DNA, 25 bp, Homo sapien
gccaaggaagcagaagtagaatgct

SEQ ID NO: 3602132 - DNA, 25 bp, Homo sapien
caagacctttaaagatgatttcctg

SEQ ID NO: 3602133 - DNA, 25 bp, Homo sapien
taagtcattggcatgaaagttgatc

SEQ ID NO: 3602134 - DNA, 25 bp, Homo sapien
tcaaacagcttctttcggcatttaa

SEQ ID NO: 3602135 - DNA, 25 bp, Homo sapien
gataaattgttggtgtagataagtc

SEQ ID NO: 3602136 - DNA, 25 bp, Homo sapien
ttttgaggtaattgccagattggca

SEQ ID NO: 3602137 - DNA, 25 bp, Homo sapien
ggtgagctgcgcatctgaaataggc

SEQ ID NO: 3602138 - DNA, 25 bp, Homo sapien
taggaccagtaattgcagctgtggg

SEQ ID NO: 3602139 - DNA, 25 bp, Homo sapien
tggaattcagacacatcactgcttc

SEQ ID NO: 3602140 - DNA, 25 bp, Homo sapien
ccatactctggtcctcatgttgaca

SEQ ID NO: 3602141 - DNA, 25 bp, Homo sapien
ttgtactgtgcctgtagcctcctcc

SEQ ID NO: 3602142 - DNA, 25 bp, Homo sapien
cttcactaaatgcataagtccgata

SEQ ID NO: 3602143 - DNA, 25 bp, Homo sapien
gctgcgggcatttctatgttgctcc

SEQ ID NO: 3602144 - DNA, 25 bp, Homo sapien
gactcagactttttcttcgagtgtg

SEQ ID NO: 3602145 - DNA, 25 bp, Homo sapien
ttcctggactcagactttttcttcg

SEQ ID NO: 3602146 - DNA, 25 bp, Homo sapien
gagtgccagatacatctcctgaaaa

SEQ ID NO: 3602147 - DNA, 25 bp, Homo sapien
gactttttcttcgagtgtgtgggaa

SEQ ID NO: 3602148 - DNA, 25 bp, Homo sapien
cttcctgacacccagtcccgggctc

SEQ ID NO: 3602149 - DNA, 25 bp, Homo sapien
cattgtgcatcttgtcagtccctcc

SEQ ID NO: 3602150 - DNA, 25 bp, Homo sapien
ggccctctccatgacccagttctaa

SEQ ID NO: 3602151 - DNA, 25 bp, Homo sapien
gtttctttgtccagcattgaggccc

SEQ ID NO: 3602152 - DNA, 25 bp, Homo sapien
taaagtgacccctgtgtcattggcc

SEQ ID NO: 3602153 - DNA, 25 bp, Homo sapien
cttaaagtgacccctgtgtcattgg

SEQ ID NO: 3602154 - DNA, 25 bp, Homo sapien
aaagtgacccctgtgtcattggcca

SEQ ID NO: 3602155 - DNA, 25 bp, Homo sapien
aagtgacccctgtgtcattggccat

SEQ ID NO: 3602156 - DNA, 25 bp, Homo sapien
ggaggatttgtccagcaaaaaatgc

SEQ ID NO: 3602157 - DNA, 25 bp, Homo sapien
aatgcaaatacggccctggcactcc

SEQ ID NO: 3602158 - DNA, 25 bp, Homo sapien
gctctgggttggagatgtgaataca

SEQ ID NO: 3602159 - DNA, 25 bp, Homo sapien
cccacaagctctgggttggagatgt

SEQ ID NO: 3602160 - DNA, 25 bp, Homo sapien
ttcagttgcctagggattcaggtca

SEQ ID NO: 3602161 - DNA, 25 bp, Homo sapien
ggtcaacatcctgaacagtgaagac

SEQ ID NO: 3602162 - DNA, 25 bp, Homo sapien
taaatgtggtataatgaatgcaaca

SEQ ID NO: 3602163 - DNA, 25 bp, Homo sapien
tgatttggccaatggttacactaat

SEQ ID NO: 3602164 - DNA, 25 bp, Homo sapien
aatggtcttcgttctttggaaggct

SEQ ID NO: 3602165 - DNA, 25 bp, Homo sapien
ttggaaggctttgtgcacaaaggta

SEQ ID NO: 3602166 - DNA, 25 bp, Homo sapien
atggtcttcgttctttggaaggctt

SEQ ID NO: 3602167 - DNA, 25 bp, Homo sapien
tcttcaaaacgaatggtcttcgttc

SEQ ID NO: 3602168 - DNA, 25 bp, Homo sapien
ttactcttgtgaatagttgctaact

SEQ ID NO: 3602169 - DNA, 25 bp, Homo sapien
tagttgctaactataatctgatatt

SEQ ID NO: 3602170 - DNA, 25 bp, Homo sapien
actataatctgatattgactgttac

SEQ ID NO: 3602171 - DNA, 25 bp, Homo sapien
gctaactataatctgatattgactg

SEQ ID NO: 3602172 - DNA, 25 bp, Homo sapien
tgagcgtgcttgacacatctatgac

SEQ ID NO: 3602173 - DNA, 25 bp, Homo sapien
tctgctaattgagctggaggcaagc

SEQ ID NO: 3602174 - DNA, 25 bp, Homo sapien
tgactgaacgcaggacaatgccgga

SEQ ID NO: 3602175 - DNA, 25 bp, Homo sapien
gacgctctgagcgtgcttgacacat

SEQ ID NO: 3602176 - DNA, 25 bp, Homo sapien
ccaagatcacgtttatttagtggtg

SEQ ID NO: 3602177 - DNA, 25 bp, Homo sapien
tttaattgttatgtcctgcagcctc

SEQ ID NO: 3602178 - DNA, 25 bp, Homo sapien
ccctagaaggtaggcgctattactt

SEQ ID NO: 3602179 - DNA, 25 bp, Homo sapien
gacgtatctctcagtgacagtagta

SEQ ID NO: 3602180 - DNA, 25 bp, Homo sapien
tgcactcccttatctggcttgttca

SEQ ID NO: 3602181 - DNA, 25 bp, Homo sapien
ttgcactcccttatctggcttgttc

SEQ ID NO: 3602182 - DNA, 25 bp, Homo sapien
gcactcccttatctggcttgttcat

SEQ ID NO: 3602183 - DNA, 25 bp, Homo sapien
cttgcactcccttatctggcttgtt

SEQ ID NO: 3602184 - DNA, 25 bp, Homo sapien
tctgtatcctgctctatcacaattc

SEQ ID NO: 3602185 - DNA, 25 bp, Homo sapien
tgtatcctgctctatcacaattctt

SEQ ID NO: 3602186 - DNA, 25 bp, Homo sapien
tatcctgctctatcacaattcttac

SEQ ID NO: 3602187 - DNA, 25 bp, Homo sapien
ttctgtatcctgctctatcacaatt

SEQ ID NO: 3602188 - DNA, 25 bp, Homo sapien
acaatctgcttttaaactagcgatg

SEQ ID NO: 3602189 - DNA, 25 bp, Homo sapien
aaactagcgatgtattctgatgccc

SEQ ID NO: 3602190 - DNA, 25 bp, Homo sapien
tgatgcccagtgcttcaagctgttt

SEQ ID NO: 3602191 - DNA, 25 bp, Homo sapien
tgcttcaagctgtttccctttttag

SEQ ID NO: 3602192 - DNA, 25 bp, Homo sapien
gagtaatcattttgaccaaatactc

SEQ ID NO: 3602193 - DNA, 25 bp, Homo sapien
taatcattttgaccaaatactccct

SEQ ID NO: 3602194 - DNA, 25 bp, Homo sapien
tgcttatcacatggggcgtggctga

SEQ ID NO: 3602195 - DNA, 25 bp, Homo sapien
aggagattttgggagggcggctgct

SEQ ID NO: 3602196 - DNA, 25 bp, Homo sapien
ccaaagttctcttgggtgctgctaa

SEQ ID NO: 3602197 - DNA, 25 bp, Homo sapien
tgaggttctgatggtgaaaaagggc

SEQ ID NO: 3602198 - DNA, 25 bp, Homo sapien
cccaaagttctcttgggtgctgcta

SEQ ID NO: 3602199 - DNA, 25 bp, Homo sapien
gttctgatggtgaaaaagggctgtt

SEQ ID NO: 3602200 - DNA, 25 bp, Homo sapien
gcttttgtgtacattcctctgtgtt

SEQ ID NO: 3602201 - DNA, 25 bp, Homo sapien
tgcttttgtgtacattcctctgtgt

SEQ ID NO: 3602202 - DNA, 25 bp, Homo sapien
tgctgagaaagcgagggccagctat

SEQ ID NO: 3602203 - DNA, 25 bp, Homo sapien
tttgctgagaaagcgagggccagct

SEQ ID NO: 3602204 - DNA, 25 bp, Homo sapien
tcagtaatggggagattggataaca

SEQ ID NO: 3602205 - DNA, 25 bp, Homo sapien
gattggataacaggttttctggcat

SEQ ID NO: 3602206 - DNA, 25 bp, Homo sapien
gagcagtgttatagagccttccagt

SEQ ID NO: 3602207 - DNA, 25 bp, Homo sapien
ctcccacacttggaaaaaataccat

SEQ ID NO: 3602208 - DNA, 25 bp, Homo sapien
gggaaccaccttccagagtctgctg

SEQ ID NO: 3602209 - DNA, 25 bp, Homo sapien
tggtgctgacttgggtcacccacag

SEQ ID NO: 3602210 - DNA, 25 bp, Homo sapien
cacttctgtttgagatgtgttatta

SEQ ID NO: 3602211 - DNA, 25 bp, Homo sapien
tcttccacttctgtttgagatgtgt

SEQ ID NO: 3602212 - DNA, 25 bp, Homo sapien
cttccacttctgtttgagatgtgtt

SEQ ID NO: 3602213 - DNA, 25 bp, Homo sapien
tccacttctgtttgagatgtgttat

SEQ ID NO: 3602214 - DNA, 25 bp, Homo sapien
taatagagtttaccagttttgctga

SEQ ID NO: 3602215 - DNA, 25 bp, Homo sapien
gaatgacagcaccacaataaccctt

SEQ ID NO: 3602216 - DNA, 25 bp, Homo sapien
acacgaggagttgatggaagcttaa

SEQ ID NO: 3602217 - DNA, 25 bp, Homo sapien
gaggtctctaatgcaacacgaggag

SEQ ID NO: 3602218 - DNA, 25 bp, Homo sapien
aaagagggattcactagaggagagt

SEQ ID NO: 3602219 - DNA, 25 bp, Homo sapien
agtgaaagagggattcactagagga

SEQ ID NO: 3602220 - DNA, 25 bp, Homo sapien
tgaaagagggattcactagaggaga

SEQ ID NO: 3602221 - DNA, 25 bp, Homo sapien
gcagtgaaagagggattcactagag

SEQ ID NO: 3602222 - DNA, 25 bp, Homo sapien
tggtaatgcattacaaaagcacacc

SEQ ID NO: 3602223 - DNA, 25 bp, Homo sapien
gcattacaaaagcacaccagggcca

SEQ ID NO: 3602224 - DNA, 25 bp, Homo sapien
tgtccagggacgactggtaatgcat

SEQ ID NO: 3602225 - DNA, 25 bp, Homo sapien
cagggacgactggtaatgcattaca

SEQ ID NO: 3602226 - DNA, 25 bp, Homo sapien
gcagttctttttggatgtagcatta

SEQ ID NO: 3602227 - DNA, 25 bp, Homo sapien
agttctttttggatgtagcattatt

SEQ ID NO: 3602228 - DNA, 25 bp, Homo sapien
tagcagttctttttggatgtagcat

SEQ ID NO: 3602229 - DNA, 25 bp, Homo sapien
ttagcagttctttttggatgtagca

SEQ ID NO: 3602230 - DNA, 25 bp, Homo sapien
gacattattgaaaggcacgggcagg

SEQ ID NO: 3602231 - DNA, 25 bp, Homo sapien
tctcaggatgaagttgcatgctagc

SEQ ID NO: 3602232 - DNA, 25 bp, Homo sapien
caacagctggacaaatattgaaaga

SEQ ID NO: 3602233 - DNA, 25 bp, Homo sapien
caattctttgcactggttgttggag

SEQ ID NO: 3602234 - DNA, 25 bp, Homo sapien
aaggccaggcgtctaaatggataac

SEQ ID NO: 3602235 - DNA, 25 bp, Homo sapien
agtatttcagtgcttcgtgtttggg

SEQ ID NO: 3602236 - DNA, 25 bp, Homo sapien
agcattgatttccagagaacctggg

SEQ ID NO: 3602237 - DNA, 25 bp, Homo sapien
ataatcagccattgtgctgcagtgg

SEQ ID NO: 3602238 - DNA, 25 bp, Homo sapien
cagtaagggctgaacgagggtaaca

SEQ ID NO: 3602239 - DNA, 25 bp, Homo sapien
gagatagatcctggccgcatttgga

SEQ ID NO: 3602240 - DNA, 25 bp, Homo sapien
cttaggtgaccgtggcatagacaca

SEQ ID NO: 3602241 - DNA, 25 bp, Homo sapien
tctagtgaatggaaacgttttgccc

SEQ ID NO: 3602242 - DNA, 25 bp, Homo sapien
taatggaacagtattgattgcacgg

SEQ ID NO: 3602243 - DNA, 25 bp, Homo sapien
tgtaggtggcatctcgttaccttgt

SEQ ID NO: 3602244 - DNA, 25 bp, Homo sapien
tcagcattctgtctgccgtaggaaa

SEQ ID NO: 3602245 - DNA, 25 bp, Homo sapien
gccactcagagcaggcagttcctat

SEQ ID NO: 3602246 - DNA, 25 bp, Homo sapien
ggatcgagacttgcccaggactcaa

SEQ ID NO: 3602247 - DNA, 25 bp, Homo sapien
tcaagtccaggtaccatggctctag

SEQ ID NO: 3602248 - DNA, 25 bp, Homo sapien
tatacaactgtacatcaggatcgag

SEQ ID NO: 3602249 - DNA, 25 bp, Homo sapien
gagggtgcccctcttatacaactgt

SEQ ID NO: 3602250 - DNA, 25 bp, Homo sapien
tgccgtgattgtgtgtgatgtggtc

SEQ ID NO: 3602251 - DNA, 25 bp, Homo sapien
gattgtgtgtgatgtggtcagctcc

SEQ ID NO: 3602252 - DNA, 25 bp, Homo sapien
tcatgttcaagaatgcgccaacccc

SEQ ID NO: 3602253 - DNA, 25 bp, Homo sapien
ttccagagaagctcatgttcaagaa

SEQ ID NO: 3602254 - DNA, 25 bp, Homo sapien
gattcatagtcctgtccaacaacta

SEQ ID NO: 3602255 - DNA, 25 bp, Homo sapien
tagtccgattcatagtcctgtccaa

SEQ ID NO: 3602256 - DNA, 25 bp, Homo sapien
tatctcttctagtccgattcatagt

SEQ ID NO: 3602257 - DNA, 25 bp, Homo sapien
tcttctagtccgattcatagtcctg

SEQ ID NO: 3602258 - DNA, 25 bp, Homo sapien
aacttcaagatagcataaccctggc

SEQ ID NO: 3602259 - DNA, 25 bp, Homo sapien
taactttagtggtcgatgggctggc

SEQ ID NO: 3602260 - DNA, 25 bp, Homo sapien
taaccctggctgtcatacacggcgt

SEQ ID NO: 3602261 - DNA, 25 bp, Homo sapien
acggcgttatccctgtgactccaaa

SEQ ID NO: 3602262 - DNA, 25 bp, Homo sapien
taagtaggaattacccagctgaagg

SEQ ID NO: 3602263 - DNA, 25 bp, Homo sapien
tacatatgtggcagggagataagcc

SEQ ID NO: 3602264 - DNA, 25 bp, Homo sapien
gcacaggctatgctgaatgggagct

SEQ ID NO: 3602265 - DNA, 25 bp, Homo sapien
tgtctggcaatactagaatcagtgc

SEQ ID NO: 3602266 - DNA, 25 bp, Homo sapien
gatgccggagagtacatctgcaccg

SEQ ID NO: 3602267 - DNA, 25 bp, Homo sapien
ccggcagactctggatgggcacatg

SEQ ID NO: 3602268 - DNA, 25 bp, Homo sapien
ccagtccatgtaccttgaagtgcaa

SEQ ID NO: 3602269 - DNA, 25 bp, Homo sapien
cgtgtgtcgtcgctgaccctgaaga

SEQ ID NO: 3602270 - DNA, 25 bp, Homo sapien
agcagcgtcgggttttagaggagca

SEQ ID NO: 3602271 - DNA, 25 bp, Homo sapien
atagggcttctcagatccatgaggg

SEQ ID NO: 3602272 - DNA, 25 bp, Homo sapien
caactcagttggtggaaagcagcgt

SEQ ID NO: 3602273 - DNA, 25 bp, Homo sapien
gtggaaagcagcgtcgggttttaga

SEQ ID NO: 3602274 - DNA, 25 bp, Homo sapien
cgaggtctcaggaataacatgggtt

SEQ ID NO: 3602275 - DNA, 25 bp, Homo sapien
gaagtgagataagatcctcaaagcc

SEQ ID NO: 3602276 - DNA, 25 bp, Homo sapien
gataagatcctcaaagccaccatct

SEQ ID NO: 3602277 - DNA, 25 bp, Homo sapien
ctcaggaataacatgggtttgtgga

SEQ ID NO: 3602278 - DNA, 25 bp, Homo sapien
caaatctaaagataagagagtactt

SEQ ID NO: 3602279 - DNA, 25 bp, Homo sapien
cagagtactgtgatagactcagata

SEQ ID NO: 3602280 - DNA, 25 bp, Homo sapien
tagtgttctaactatgtcaaatgtg

SEQ ID NO: 3602281 - DNA, 25 bp, Homo sapien
ttgatggcttttctccgattcaaat

SEQ ID NO: 3602282 - DNA, 25 bp, Homo sapien
atttcaggctgttcctcaagatgtg

SEQ ID NO: 3602283 - DNA, 25 bp, Homo sapien
tgggagtttcctactcaaacacttc

SEQ ID NO: 3602284 - DNA, 25 bp, Homo sapien
gatgtgtcaggcttataaaaattaa

SEQ ID NO: 3602285 - DNA, 25 bp, Homo sapien
ttcagttgtaagaccagctaaaagg

SEQ ID NO: 3602286 - DNA, 25 bp, Homo sapien
ccagaagctctcctccgagtggaaa

SEQ ID NO: 3602287 - DNA, 25 bp, Homo sapien
gaccacgtcatgctgaagtccctgg

SEQ ID NO: 3602288 - DNA, 25 bp, Homo sapien
atgctgagtatgaggtctacgtggt

SEQ ID NO: 3602289 - DNA, 25 bp, Homo sapien
tggtctcttgtatccttcttgccgg

SEQ ID NO: 3602290 - DNA, 25 bp, Homo sapien
ggctgtgttctcggttagactttcc

SEQ ID NO: 3602291 - DNA, 25 bp, Homo sapien
ctcaccggtgacggctctgtggctc

SEQ ID NO: 3602292 - DNA, 25 bp, Homo sapien
caccggtgacggctctgtggctctc

SEQ ID NO: 3602293 - DNA, 25 bp, Homo sapien
ctgtgttctcggttagactttcctg

SEQ ID NO: 3602294 - DNA, 25 bp, Homo sapien
cactagagtgcctggacagagaccc

SEQ ID NO: 3602295 - DNA, 25 bp, Homo sapien
cttggcaaagcctagcgagctgggt

SEQ ID NO: 3602296 - DNA, 25 bp, Homo sapien
tgttacatggctcgcaagctgctga

SEQ ID NO: 3602297 - DNA, 25 bp, Homo sapien
gaggtcaattggtccatcccaggca

SEQ ID NO: 3602298 - DNA, 25 bp, Homo sapien
ttgcggtcaacctgtgtggaaaagc

SEQ ID NO: 3602299 - DNA, 25 bp, Homo sapien
agtgcagacctgtccaccttgctga

SEQ ID NO: 3602300 - DNA, 25 bp, Homo sapien
aaggccgccttctcgtgagtgcaga

SEQ ID NO: 3602301 - DNA, 25 bp, Homo sapien
tcatcttcgtcctgctcctggtggt

SEQ ID NO: 3602302 - DNA, 25 bp, Homo sapien
taaatgtccgtgtaaaatagctgcc

SEQ ID NO: 3602303 - DNA, 25 bp, Homo sapien
ttgagcccagaatctagatttgagc

SEQ ID NO: 3602304 - DNA, 25 bp, Homo sapien
gaaggactccttaggctttgttgaa

SEQ ID NO: 3602305 - DNA, 25 bp, Homo sapien
taggatcatcccacgcttgctttag

SEQ ID NO: 3602306 - DNA, 25 bp, Homo sapien
tcactcaaacggaatcgaagccttt

SEQ ID NO: 3602307 - DNA, 25 bp, Homo sapien
cagaaatcagtactccgcatgcgct

SEQ ID NO: 3602308 - DNA, 25 bp, Homo sapien
tcaccaggctgttcagtggactcag

SEQ ID NO: 3602309 - DNA, 25 bp, Homo sapien
tgcacaggccctcagaatagaggaa

SEQ ID NO: 3602310 - DNA, 25 bp, Homo sapien
tcaaagtggttgtggttaggtcaaa

SEQ ID NO: 3602311 - DNA, 25 bp, Homo sapien
tcttgtaatgtcgatggctttgcca

SEQ ID NO: 3602312 - DNA, 25 bp, Homo sapien
taccttgtcaagactgtcaaagtgg

SEQ ID NO: 3602313 - DNA, 25 bp, Homo sapien
aggccaagcccatgccataccttgt

SEQ ID NO: 3602314 - DNA, 25 bp, Homo sapien
ggctctgccattagctaggacctaa

SEQ ID NO: 3602315 - DNA, 25 bp, Homo sapien
gaagaaacaggtcagccctcagatc

SEQ ID NO: 3602316 - DNA, 25 bp, Homo sapien
taggacctaagactctgcccacatt

SEQ ID NO: 3602317 - DNA, 25 bp, Homo sapien
ttacacataggtttgtctcagcatg

SEQ ID NO: 3602318 - DNA, 25 bp, Homo sapien
ccgagtcccaggttttcacttgagg

SEQ ID NO: 3602319 - DNA, 25 bp, Homo sapien
tattcacatgaagaccggcatggcc

SEQ ID NO: 3602320 - DNA, 25 bp, Homo sapien
tttctatggagccttccgagtccca

SEQ ID NO: 3602321 - DNA, 25 bp, Homo sapien
cactcaagtgtgacgagcagggcca

SEQ ID NO: 3602322 - DNA, 25 bp, Homo sapien
gacatgcgtgtggtagttcctttag

SEQ ID NO: 3602323 - DNA, 25 bp, Homo sapien
cctttaggaccttgtgtgcgaggaa

SEQ ID NO: 3602324 - DNA, 25 bp, Homo sapien
tgccgctccccggttgaccttgaaa

SEQ ID NO: 3602325 - DNA, 25 bp, Homo sapien
gaaggttagcgaagtctcagtgtct

SEQ ID NO: 3602326 - DNA, 25 bp, Homo sapien
cgtagtaatagtcaacacctgagct

SEQ ID NO: 3602327 - DNA, 25 bp, Homo sapien
gaaacaatgtacatgaaggcctagt

SEQ ID NO: 3602328 - DNA, 25 bp, Homo sapien
tcttggcacacagtgggaactcaat

SEQ ID NO: 3602329 - DNA, 25 bp, Homo sapien
gcatcctgggtgtgcgataccatca

SEQ ID NO: 3602330 - DNA, 25 bp, Homo sapien
tgtgattttatttgccccagatttc

SEQ ID NO: 3602331 - DNA, 25 bp, Homo sapien
ctgcatatgacaggctaagactaaa

SEQ ID NO: 3602332 - DNA, 25 bp, Homo sapien
caggctaagactaaaacacattgtt

SEQ ID NO: 3602333 - DNA, 25 bp, Homo sapien
tgacaggctaagactaaaacacatt

SEQ ID NO: 3602334 - DNA, 25 bp, Homo sapien
agcatctccaaggttcttgggatac

SEQ ID NO: 3602335 - DNA, 25 bp, Homo sapien
ttcctctcagattcattcagtattc

SEQ ID NO: 3602336 - DNA, 25 bp, Homo sapien
tccgttggtccatgagggcttgctt

SEQ ID NO: 3602337 - DNA, 25 bp, Homo sapien
gatactgggatacggcagtgagcaa

SEQ ID NO: 3602338 - DNA, 25 bp, Homo sapien
acgaggagttaggtagagatgcata

SEQ ID NO: 3602339 - DNA, 25 bp, Homo sapien
agatgcatagtagcatgtcattata

SEQ ID NO: 3602340 - DNA, 25 bp, Homo sapien
tggctgatttcaatatggcatcacc

SEQ ID NO: 3602341 - DNA, 25 bp, Homo sapien
atggcatcaccagacgaggagttag

SEQ ID NO: 3602342 - DNA, 25 bp, Homo sapien
ctctctcctgaaggtccaccatcat

SEQ ID NO: 3602343 - DNA, 25 bp, Homo sapien
tcgtgaagactttaatctttagccc

SEQ ID NO: 3602344 - DNA, 25 bp, Homo sapien
gactttaatctttagcccatgatcc

SEQ ID NO: 3602345 - DNA, 25 bp, Homo sapien
agtgacttcagtacattatatgggc

SEQ ID NO: 3602346 - DNA, 25 bp, Homo sapien
ggcaggagtttaaaacagggctctc

SEQ ID NO: 3602347 - DNA, 25 bp, Homo sapien
ggaacatagcagctcattaagggct

SEQ ID NO: 3602348 - DNA, 25 bp, Homo sapien
cctgagctctggtgggacacagacc

SEQ ID NO: 3602349 - DNA, 25 bp, Homo sapien
tctcaaggaagactcttggcccctg

SEQ ID NO: 3602350 - DNA, 25 bp, Homo sapien
gtctccccgcgccaggcatcgggca

SEQ ID NO: 3602351 - DNA, 25 bp, Homo sapien
tcgggcatcccaacctcgactttgg

SEQ ID NO: 3602352 - DNA, 25 bp, Homo sapien
ttcctccgtctccccgcgccaggca

SEQ ID NO: 3602353 - DNA, 25 bp, Homo sapien
ccgcgccaggcatcgggcatcccaa

SEQ ID NO: 3602354 - DNA, 25 bp, Homo sapien
tatgaacttcaagattatcgtgtcg

SEQ ID NO: 3602355 - DNA, 25 bp, Homo sapien
taccattgagtgattttggcaccct

SEQ ID NO: 3602356 - DNA, 25 bp, Homo sapien
ggcaagtactgctatctaaacaata

SEQ ID NO: 3602357 - DNA, 25 bp, Homo sapien
gtctacttgtcccattaccattgag

SEQ ID NO: 3602358 - DNA, 25 bp, Homo sapien
taagacgacatatgcaaagtgcccc

SEQ ID NO: 3602359 - DNA, 25 bp, Homo sapien
gatgggtggacgaagcaatgcaact

SEQ ID NO: 3602360 - DNA, 25 bp, Homo sapien
gggacaagggtgcagactctacctg

SEQ ID NO: 3602361 - DNA, 25 bp, Homo sapien
gaagacttgcagttacctctgggtc

SEQ ID NO: 3602362 - DNA, 25 bp, Homo sapien
gcttttaagcgtccatccaggccaa

SEQ ID NO: 3602363 - DNA, 25 bp, Homo sapien
tgttcagggcaagttaagtgctcca

SEQ ID NO: 3602364 - DNA, 25 bp, Homo sapien
tttagcatgcaaattacgccctgac

SEQ ID NO: 3602365 - DNA, 25 bp, Homo sapien
ggtgttatgacccagtccgagttag

SEQ ID NO: 3602366 - DNA, 25 bp, Homo sapien
ttcctgctcacggttcgcaagggtg

SEQ ID NO: 3602367 - DNA, 25 bp, Homo sapien
tttcagcagcctcttagccgtgggc

SEQ ID NO: 3602368 - DNA, 25 bp, Homo sapien
actagcctggaaagtagaggtccac

SEQ ID NO: 3602369 - DNA, 25 bp, Homo sapien
gatgttacagagtctaggccccagg

SEQ ID NO: 3602370 - DNA, 25 bp, Homo sapien
ctgtacaggacaggcgggatgttgc

SEQ ID NO: 3602371 - DNA, 25 bp, Homo sapien
cagtgtatgttcaggatgtgtgtga

SEQ ID NO: 3602372 - DNA, 25 bp, Homo sapien
cagccacgtgaaggcgctgtacagg

SEQ ID NO: 3602373 - DNA, 25 bp, Homo sapien
ttcacggcgctgttgacatagccca

SEQ ID NO: 3602374 - DNA, 25 bp, Homo sapien
tcttctctggtttggcggggctgtc

SEQ ID NO: 3602375 - DNA, 25 bp, Homo sapien
aggtccgggttttgccattgggcat

SEQ ID NO: 3602376 - DNA, 25 bp, Homo sapien
cttcctacggctcatggtcttgagg

SEQ ID NO: 3602377 - DNA, 25 bp, Homo sapien
gatcttggcaatcttggggtggtct

SEQ ID NO: 3602378 - DNA, 25 bp, Homo sapien
gggtcggggagagtcagctggtggt

SEQ ID NO: 3602379 - DNA, 25 bp, Homo sapien
tcggggagagtcagctggtggtggc

SEQ ID NO: 3602380 - DNA, 25 bp, Homo sapien
tgggacgggtcggggagagtcagct

SEQ ID NO: 3602381 - DNA, 25 bp, Homo sapien
acgggtcggggagagtcagctggtg

SEQ ID NO: 3602382 - DNA, 25 bp, Homo sapien
ggtcctctcgggtgggctggtgctg

SEQ ID NO: 3602383 - DNA, 25 bp, Homo sapien
gtgctggagagcatctccatctcca

SEQ ID NO: 3602384 - DNA, 25 bp, Homo sapien
gctggtgctggagagcatctccatc

SEQ ID NO: 3602385 - DNA, 25 bp, Homo sapien
cagctcctgggctcgccgggcagcc

SEQ ID NO: 3602386 - DNA, 25 bp, Homo sapien
cttctgaggtctcagaaccatggcc

SEQ ID NO: 3602387 - DNA, 25 bp, Homo sapien
tgcttggaggtgtgcacggtgagtc

SEQ ID NO: 3602388 - DNA, 25 bp, Homo sapien
tctgaggtctcagaaccatggccag

SEQ ID NO: 3602389 - DNA, 25 bp, Homo sapien
tgtgcacggtgagtctgccttcagc

SEQ ID NO: 3602390 - DNA, 25 bp, Homo sapien
gtttcatgtcctcggggtgagtaca

SEQ ID NO: 3602391 - DNA, 25 bp, Homo sapien
tgtcctcggggtgagtacagttgcc

SEQ ID NO: 3602392 - DNA, 25 bp, Homo sapien
cactctccgcctgttcactgggaaa

SEQ ID NO: 3602393 - DNA, 25 bp, Homo sapien
tcccattagacttcatgataacggt

SEQ ID NO: 3602394 - DNA, 25 bp, Homo sapien
taacccttgctgaggtttcccaagc

SEQ ID NO: 3602395 - DNA, 25 bp, Homo sapien
ttgctgaggtttcccaagcccccac

SEQ ID NO: 3602396 - DNA, 25 bp, Homo sapien
ctaacccttgctgaggtttcccaag

SEQ ID NO: 3602397 - DNA, 25 bp, Homo sapien
cttgctgaggtttcccaagccccca

SEQ ID NO: 3602398 - DNA, 25 bp, Homo sapien
agccctcttggtaatggttaggtgg

SEQ ID NO: 3602399 - DNA, 25 bp, Homo sapien
taagatgagccctcttggtaatggt

SEQ ID NO: 3602400 - DNA, 25 bp, Homo sapien
gatgagccctcttggtaatggttag

SEQ ID NO: 3602401 - DNA, 25 bp, Homo sapien
ctgagcataagatgagccctcttgg

SEQ ID NO: 3602402 - DNA, 25 bp, Homo sapien
accagcagggtgacaatgaagggca

SEQ ID NO: 3602403 - DNA, 25 bp, Homo sapien
tagatcttgatgtagaccagcaggg

SEQ ID NO: 3602404 - DNA, 25 bp, Homo sapien
cgtttggtgttgactcgcttgcggc

SEQ ID NO: 3602405 - DNA, 25 bp, Homo sapien
gccctgaaagctcggctgctgcgtt

SEQ ID NO: 3602406 - DNA, 25 bp, Homo sapien
tattgagtccgaagaggagtgggca

SEQ ID NO: 3602407 - DNA, 25 bp, Homo sapien
gcgttattgagtccgaagaggagtg

SEQ ID NO: 3602408 - DNA, 25 bp, Homo sapien
ctgcgttattgagtccgaagaggag

SEQ ID NO: 3602409 - DNA, 25 bp, Homo sapien
gttattgagtccgaagaggagtggg

SEQ ID NO: 3602410 - DNA, 25 bp, Homo sapien
atggagatcatgacggtgacccggc

SEQ ID NO: 3602411 - DNA, 25 bp, Homo sapien
tattgtacagcatgggcatggccac

SEQ ID NO: 3602412 - DNA, 25 bp, Homo sapien
tcatgacggtgacccggcgcttgga

SEQ ID NO: 3602413 - DNA, 25 bp, Homo sapien
gcttggagctgtagcgcgtattgta

SEQ ID NO: 3602414 - DNA, 25 bp, Homo sapien
gtccagagtgacgaagatgtcacag

SEQ ID NO: 3602415 - DNA, 25 bp, Homo sapien
gatgtcacagtgaatcctgctgaat

SEQ ID NO: 3602416 - DNA, 25 bp, Homo sapien
tggcacacaagttcaggatgctcgc

SEQ ID NO: 3602417 - DNA, 25 bp, Homo sapien
gccgtgcacatcatgacgtccagag

SEQ ID NO: 3602418 - DNA, 25 bp, Homo sapien
tgcgctgaccagtttggcaggagct

SEQ ID NO: 3602419 - DNA, 25 bp, Homo sapien
gaccagtttggcaggagctaacagc

SEQ ID NO: 3602420 - DNA, 25 bp, Homo sapien
gctggatgcccattttgcgggtgga

SEQ ID NO: 3602421 - DNA, 25 bp, Homo sapien
ttggcaggagctaacagctggatgc

SEQ ID NO: 3602422 - DNA, 25 bp, Homo sapien
gtcctggacagggccccaggataag

SEQ ID NO: 3602423 - DNA, 25 bp, Homo sapien
aggtcctggacagggccccaggata

SEQ ID NO: 3602424 - DNA, 25 bp, Homo sapien
tgcaggtcctggacagggccccagg

SEQ ID NO: 3602425 - DNA, 25 bp, Homo sapien
caggtcctggacagggccccaggat

SEQ ID NO: 3602426 - DNA, 25 bp, Homo sapien
aagcaccaggaaactcattggtaaa

SEQ ID NO: 3602427 - DNA, 25 bp, Homo sapien
gaagcaccaggaaactcattggtaa

SEQ ID NO: 3602428 - DNA, 25 bp, Homo sapien
caggaaactcattggtaaaagccag

SEQ ID NO: 3602429 - DNA, 25 bp, Homo sapien
ccaggaaactcattggtaaaagcca

SEQ ID NO: 3602430 - DNA, 25 bp, Homo sapien
cacgttgccgaagacgatgacagcg

SEQ ID NO: 3602431 - DNA, 25 bp, Homo sapien
tccaggtagacaacccagggcatga

SEQ ID NO: 3602432 - DNA, 25 bp, Homo sapien
cgtctgacccgttgaagggccggct

SEQ ID NO: 3602433 - DNA, 25 bp, Homo sapien
tcatcataccaggacagattcagtg

SEQ ID NO: 3602434 - DNA, 25 bp, Homo sapien
cagggcggtggagccactgggtggc

SEQ ID NO: 3602435 - DNA, 25 bp, Homo sapien
gcggtggagccactgggtggccagg

SEQ ID NO: 3602436 - DNA, 25 bp, Homo sapien
ggtggagccactgggtggccaggct

SEQ ID NO: 3602437 - DNA, 25 bp, Homo sapien
gggcggtggagccactgggtggcca

SEQ ID NO: 3602438 - DNA, 25 bp, Homo sapien
aggaaaaatggacacaaggtgtcag

SEQ ID NO: 3602439 - DNA, 25 bp, Homo sapien
aaaatggacacaaggtgtcagtgag

SEQ ID NO: 3602440 - DNA, 25 bp, Homo sapien
ggaaaaatggacacaaggtgtcagt

SEQ ID NO: 3602441 - DNA, 25 bp, Homo sapien
gaaaaatggacacaaggtgtcagtg

SEQ ID NO: 3602442 - DNA, 25 bp, Homo sapien
cagctggtaggacaaatgagcaaac

SEQ ID NO: 3602443 - DNA, 25 bp, Homo sapien
gctagcaagtttttacagctggtag

SEQ ID NO: 3602444 - DNA, 25 bp, Homo sapien
tctaaaaatgttgggccttctgcca

SEQ ID NO: 3602445 - DNA, 25 bp, Homo sapien
gatgagcttgaacagagctgatcca

SEQ ID NO: 3602446 - DNA, 25 bp, Homo sapien
gcagatgcttgcagacaaggttcca

SEQ ID NO: 3602447 - DNA, 25 bp, Homo sapien
tgggtcctctgaggcctcctaggct

SEQ ID NO: 3602448 - DNA, 25 bp, Homo sapien
gcagacaaggttccatgggtcctct

SEQ ID NO: 3602449 - DNA, 25 bp, Homo sapien
tgaggcctcctaggcttttctttct

SEQ ID NO: 3602450 - DNA, 25 bp, Homo sapien
cttgggttgccgagggtgggagtgg

SEQ ID NO: 3602451 - DNA, 25 bp, Homo sapien
gggtagatggacaggcacagtcact

SEQ ID NO: 3602452 - DNA, 25 bp, Homo sapien
tctggagggcaaagcctctaagccc

SEQ ID NO: 3602453 - DNA, 25 bp, Homo sapien
ggagtgggtagatggacaggcacag

SEQ ID NO: 3602454 - DNA, 25 bp, Homo sapien
ggcttctgggcttctggaaggccca

SEQ ID NO: 3602455 - DNA, 25 bp, Homo sapien
aagaaaagcacagagctggtagaga

SEQ ID NO: 3602456 - DNA, 25 bp, Homo sapien
gagatggcttctgggcttctggaag

SEQ ID NO: 3602457 - DNA, 25 bp, Homo sapien
tcagagtgtccaggttggcagcacc

SEQ ID NO: 3602458 - DNA, 25 bp, Homo sapien
agcaggctgacaccggggacctttc

SEQ ID NO: 3602459 - DNA, 25 bp, Homo sapien
ccacgtttctcatccttcggctcca

SEQ ID NO: 3602460 - DNA, 25 bp, Homo sapien
tgtccccacgtttctcatccttcgg

SEQ ID NO: 3602461 - DNA, 25 bp, Homo sapien
tttctcatccttcggctccagcagg

SEQ ID NO: 3602462 - DNA, 25 bp, Homo sapien
ggaatgtgctcaaagatgattcccc

SEQ ID NO: 3602463 - DNA, 25 bp, Homo sapien
aggaatgtgctcaaagatgattccc

SEQ ID NO: 3602464 - DNA, 25 bp, Homo sapien
gattccccccagactttcagggaga

SEQ ID NO: 3602465 - DNA, 25 bp, Homo sapien
aaagatgattccccccagactttca

SEQ ID NO: 3602466 - DNA, 25 bp, Homo sapien
agtgcaatagaaccggcctcactgg

SEQ ID NO: 3602467 - DNA, 25 bp, Homo sapien
gggaccctgttgactatgaatgaaa

SEQ ID NO: 3602468 - DNA, 25 bp, Homo sapien
gcttccaccgagttgaaagagtgca

SEQ ID NO: 3602469 - DNA, 25 bp, Homo sapien
tgccccaggaactgagctccagaat

SEQ ID NO: 3602470 - DNA, 25 bp, Homo sapien
ttcaagccatagggcgcccgggggc

SEQ ID NO: 3602471 - DNA, 25 bp, Homo sapien
gccggctgcttgaggcttccagctc

SEQ ID NO: 3602472 - DNA, 25 bp, Homo sapien
ggcgccggctgcttgaggcttccag

SEQ ID NO: 3602473 - DNA, 25 bp, Homo sapien
tcaagccatagggcgcccgggggca

SEQ ID NO: 3602474 - DNA, 25 bp, Homo sapien
ctccggcagccgtccggggccgcca

SEQ ID NO: 3602475 - DNA, 25 bp, Homo sapien
ccggcagccgtccggggccgccact

SEQ ID NO: 3602476 - DNA, 25 bp, Homo sapien
ggcagccgtccggggccgccactct

SEQ ID NO: 3602477 - DNA, 25 bp, Homo sapien
gcagccgtccggggccgccactctc

SEQ ID NO: 3602478 - DNA, 25 bp, Homo sapien
gccccgccgcgccgttcagagcccc

SEQ ID NO: 3602479 - DNA, 25 bp, Homo sapien
ccgcgccgttcagagccccggcggg

SEQ ID NO: 3602480 - DNA, 25 bp, Homo sapien
gcggggagcagtggacgggccgcgg

SEQ ID NO: 3602481 - DNA, 25 bp, Homo sapien
gcgcggtgcgcgcgtgaggctgccg

SEQ ID NO: 3602482 - DNA, 25 bp, Homo sapien
ggagcagtggacgggccgcggcggg

SEQ ID NO: 3602483 - DNA, 25 bp, Homo sapien
gaggcggcgcggtgcgcgcgtgagg

SEQ ID NO: 3602484 - DNA, 25 bp, Homo sapien
ccaactctattgtgtcatctgaatc

SEQ ID NO: 3602485 - DNA, 25 bp, Homo sapien
aatctggttggatagctaggcagca

SEQ ID NO: 3602486 - DNA, 25 bp, Homo sapien
tgtcatctgaatctggttggatagc

SEQ ID NO: 3602487 - DNA, 25 bp, Homo sapien
cagtcatccaactctattgtgtcat

SEQ ID NO: 3602488 - DNA, 25 bp, Homo sapien
ccattgaggtcttctagacagggaa

SEQ ID NO: 3602489 - DNA, 25 bp, Homo sapien
aatgtaggtgatgattccaagtctc

SEQ ID NO: 3602490 - DNA, 25 bp, Homo sapien
tctcttgctaaagttgctggcttcc

SEQ ID NO: 3602491 - DNA, 25 bp, Homo sapien
gggaatcagtccagcagaggagcct

SEQ ID NO: 3602492 - DNA, 25 bp, Homo sapien
atctgttggctggagctggaaggag

SEQ ID NO: 3602493 - DNA, 25 bp, Homo sapien
tctgttggctggagctggaaggagt

SEQ ID NO: 3602494 - DNA, 25 bp, Homo sapien
gttggctggagctggaaggagtgac

SEQ ID NO: 3602495 - DNA, 25 bp, Homo sapien
tcatctgttggctggagctggaagg

SEQ ID NO: 3602496 - DNA, 25 bp, Homo sapien
gaccaggtgtccaatggcctttacc

SEQ ID NO: 3602497 - DNA, 25 bp, Homo sapien
tcctgttgaccaggtgtccaatggc

SEQ ID NO: 3602498 - DNA, 25 bp, Homo sapien
gtgtccaatggcctttacctctgga

SEQ ID NO: 3602499 - DNA, 25 bp, Homo sapien
tggcctttacctctggacagggcag

SEQ ID NO: 3602500 - DNA, 25 bp, Homo sapien
ctacagcacccttgtaaggcactta

SEQ ID NO: 3602501 - DNA, 25 bp, Homo sapien
cccttgtaaggcacttaaggggctg

SEQ ID NO: 3602502 - DNA, 25 bp, Homo sapien
agcacccttgtaaggcacttaaggg

SEQ ID NO: 3602503 - DNA, 25 bp, Homo sapien
acagcacccttgtaaggcacttaag

SEQ ID NO: 3602504 - DNA, 25 bp, Homo sapien
gtggaggctccccaaatgcccgtca

SEQ ID NO: 3602505 - DNA, 25 bp, Homo sapien
gtacagggtggaggctccccaaatg

SEQ ID NO: 3602506 - DNA, 25 bp, Homo sapien
ctgggtacagggtggaggctcccca

SEQ ID NO: 3602507 - DNA, 25 bp, Homo sapien
agggtggaggctccccaaatgcccg

SEQ ID NO: 3602508 - DNA, 25 bp, Homo sapien
tcatcaggacctgagggcccacttg

SEQ ID NO: 3602509 - DNA, 25 bp, Homo sapien
agggcccacttgcaagtcgggccat

SEQ ID NO: 3602510 - DNA, 25 bp, Homo sapien
gagggcccacttgcaagtcgggcca

SEQ ID NO: 3602511 - DNA, 25 bp, Homo sapien
ggtcatcaggacctgagggcccact

SEQ ID NO: 3602512 - DNA, 25 bp, Homo sapien
agctgtgtggacaagcaagagaagc

SEQ ID NO: 3602513 - DNA, 25 bp, Homo sapien
ccgactcgctcacactcttctttct

SEQ ID NO: 3602514 - DNA, 25 bp, Homo sapien
agagaagcaggctcattgcttgtga

SEQ ID NO: 3602515 - DNA, 25 bp, Homo sapien
cagagggggcacagaagcagcctgg

SEQ ID NO: 3602516 - DNA, 25 bp, Homo sapien
tccttgcagtatactgggaagtctg

SEQ ID NO: 3602517 - DNA, 25 bp, Homo sapien
ttcctccttgcagtatactgggaag

SEQ ID NO: 3602518 - DNA, 25 bp, Homo sapien
gcttcctccttgcagtatactggga

SEQ ID NO: 3602519 - DNA, 25 bp, Homo sapien
cctccttgcagtatactgggaagtc

SEQ ID NO: 3602520 - DNA, 25 bp, Homo sapien
agtgcctttaactacttggccatcc

SEQ ID NO: 3602521 - DNA, 25 bp, Homo sapien
gtgcctttaactacttggccatcct

SEQ ID NO: 3602522 - DNA, 25 bp, Homo sapien
tggatgagtgttacaatcagagcta

SEQ ID NO: 3602523 - DNA, 25 bp, Homo sapien
tcagggggccattgggaaacacagc

SEQ ID NO: 3602524 - DNA, 25 bp, Homo sapien
ggaacaacagggtcacagcacacaa

SEQ ID NO: 3602525 - DNA, 25 bp, Homo sapien
tgagtgttacaatcagagctatatt

SEQ ID NO: 3602526 - DNA, 25 bp, Homo sapien
caaccagtaatatgggttcaaagga

SEQ ID NO: 3602527 - DNA, 25 bp, Homo sapien
ggtagcaaccagtaatatgggttca

SEQ ID NO: 3602528 - DNA, 25 bp, Homo sapien
tagcaaccagtaatatgggttcaaa

SEQ ID NO: 3602529 - DNA, 25 bp, Homo sapien
gcaaccagtaatatgggttcaaagg

SEQ ID NO: 3602530 - DNA, 25 bp, Homo sapien
tgatgcccacataggacatagacat

SEQ ID NO: 3602531 - DNA, 25 bp, Homo sapien
tcacagctttgtctgatctgatgcc

SEQ ID NO: 3602532 - DNA, 25 bp, Homo sapien
tgatctgatgcccacataggacata

SEQ ID NO: 3602533 - DNA, 25 bp, Homo sapien
cacagctttgtctgatctgatgccc

SEQ ID NO: 3602534 - DNA, 25 bp, Homo sapien
ccagcccagtccggcaggtcagaga

SEQ ID NO: 3602535 - DNA, 25 bp, Homo sapien
cagcccagtccggcaggtcagagaa

SEQ ID NO: 3602536 - DNA, 25 bp, Homo sapien
agcccagtccggcaggtcagagaag

SEQ ID NO: 3602537 - DNA, 25 bp, Homo sapien
tggcttgagtctgctcttcctgttc

SEQ ID NO: 3602538 - DNA, 25 bp, Homo sapien
ctgtttctggcttgagtctgctctt

SEQ ID NO: 3602539 - DNA, 25 bp, Homo sapien
gtttctggcttgagtctgctcttcc

SEQ ID NO: 3602540 - DNA, 25 bp, Homo sapien
tctggcttgagtctgctcttcctgt

SEQ ID NO: 3602541 - DNA, 25 bp, Homo sapien
tgctcagtagtttgctgttccccag

SEQ ID NO: 3602542 - DNA, 25 bp, Homo sapien
agggcagcagacctgtgttgctcag

SEQ ID NO: 3602543 - DNA, 25 bp, Homo sapien
ccaaactcaggtcagagatggacat

SEQ ID NO: 3602544 - DNA, 25 bp, Homo sapien
ctgttccccagcaagacagtcactg

SEQ ID NO: 3602545 - DNA, 25 bp, Homo sapien
tggctcagaccaacttgggtctggg

SEQ ID NO: 3602546 - DNA, 25 bp, Homo sapien
ttggctcagaccaacttgggtctgg

SEQ ID NO: 3602547 - DNA, 25 bp, Homo sapien
cttggctcagaccaacttgggtctg

SEQ ID NO: 3602548 - DNA, 25 bp, Homo sapien
tgcagcgggtcttgcaggtggccaa

SEQ ID NO: 3602549 - DNA, 25 bp, Homo sapien
tggccaagtcagtagaaagctccat

SEQ ID NO: 3602550 - DNA, 25 bp, Homo sapien
attgcagcgggtcttgcaggtggcc

SEQ ID NO: 3602551 - DNA, 25 bp, Homo sapien
aggtggccaagtcagtagaaagctc

SEQ ID NO: 3602552 - DNA, 25 bp, Homo sapien
ctgccattaacatgacatcactaaa

SEQ ID NO: 3602553 - DNA, 25 bp, Homo sapien
tcttaagtctgacaatcatcccgaa

SEQ ID NO: 3602554 - DNA, 25 bp, Homo sapien
cacagagttgagatgaagtattcag

SEQ ID NO: 3602555 - DNA, 25 bp, Homo sapien
gctcccggccgacataatgcatttt

SEQ ID NO: 3602556 - DNA, 25 bp, Homo sapien
tcggagctgctgtcgtggcaattgt

SEQ ID NO: 3602557 - DNA, 25 bp, Homo sapien
tgttgtctttgacactcggagctgc

SEQ ID NO: 3602558 - DNA, 25 bp, Homo sapien
tttctcttccaaggagcaccgtgcc

SEQ ID NO: 3602559 - DNA, 25 bp, Homo sapien
caaacgacgggattggatctgcaat

SEQ ID NO: 3602560 - DNA, 25 bp, Homo sapien
ggagatgggcacagtagaggggtca

SEQ ID NO: 3602561 - DNA, 25 bp, Homo sapien
tgggcacagtagaggggtcaaggta

SEQ ID NO: 3602562 - DNA, 25 bp, Homo sapien
gatgggcacagtagaggggtcaagg

SEQ ID NO: 3602563 - DNA, 25 bp, Homo sapien
cacagtagaggggtcaaggtagagg

SEQ ID NO: 3602564 - DNA, 25 bp, Homo sapien
ctcctctgcctggtctccattctgg

SEQ ID NO: 3602565 - DNA, 25 bp, Homo sapien
cctctgcctggtctccattctggga

SEQ ID NO: 3602566 - DNA, 25 bp, Homo sapien
tcagatgtctccctgctcctctgcc

SEQ ID NO: 3602567 - DNA, 25 bp, Homo sapien
tctgcctggtctccattctgggaat

SEQ ID NO: 3602568 - DNA, 25 bp, Homo sapien
tcagatgtcaccttccaggattccc

SEQ ID NO: 3602569 - DNA, 25 bp, Homo sapien
caggattcccagagtctccaagaag

SEQ ID NO: 3602570 - DNA, 25 bp, Homo sapien
ggattcccagagtctccaagaagaa

SEQ ID NO: 3602571 - DNA, 25 bp, Homo sapien
tcccagagtctccaagaagaatgtg

SEQ ID NO: 3602572 - DNA, 25 bp, Homo sapien
gtcgggggtgcctgaccgagggcaa

SEQ ID NO: 3602573 - DNA, 25 bp, Homo sapien
accttccgctccctgacacagctga

SEQ ID NO: 3602574 - DNA, 25 bp, Homo sapien
gggggtgcctgaccgagggcaacca

SEQ ID NO: 3602575 - DNA, 25 bp, Homo sapien
gtgcctgaccgagggcaaccaattc

SEQ ID NO: 3602576 - DNA, 25 bp, Homo sapien
catgcaggagattgaccagatgccc

SEQ ID NO: 3602577 - DNA, 25 bp, Homo sapien
tttaactgtatagacccctgagagg

SEQ ID NO: 3602578 - DNA, 25 bp, Homo sapien
tcgttggctctcatgggtggaccct

SEQ ID NO: 3602579 - DNA, 25 bp, Homo sapien
tagcagtatcatccaagcgaggcac

SEQ ID NO: 3602580 - DNA, 25 bp, Homo sapien
catggtattagggaactgcagtagc

SEQ ID NO: 3602581 - DNA, 25 bp, Homo sapien
taaaagtcagtactcacaggtggtg

SEQ ID NO: 3602582 - DNA, 25 bp, Homo sapien
cagccgacgcctagacactatgaag

SEQ ID NO: 3602583 - DNA, 25 bp, Homo sapien
tgatagctcctaggaacagccgacg

SEQ ID NO: 3602584 - DNA, 25 bp, Homo sapien
cttaggttccagaggaatgtcttca

SEQ ID NO: 3602585 - DNA, 25 bp, Homo sapien
tgaaggtttggaggtctgaactccc

SEQ ID NO: 3602586 - DNA, 25 bp, Homo sapien
tccatattgggctgcaagaataagc

SEQ ID NO: 3602587 - DNA, 25 bp, Homo sapien
tcctccaacctcaatggcaggctgt

SEQ ID NO: 3602588 - DNA, 25 bp, Homo sapien
ggagtaagggtgcttgcatgcccca

SEQ ID NO: 3602589 - DNA, 25 bp, Homo sapien
taaaagttgacgctgaaattccagg

SEQ ID NO: 3602590 - DNA, 25 bp, Homo sapien
tcatccaagggcacagtaaaagttg

SEQ ID NO: 3602591 - DNA, 25 bp, Homo sapien
gaaaggatcagtagctcatccaagg

SEQ ID NO: 3602592 - DNA, 25 bp, Homo sapien
cagagcctgagcattacccttgctg

SEQ ID NO: 3602593 - DNA, 25 bp, Homo sapien
ccagagcctgagcattacccttgct

SEQ ID NO: 3602594 - DNA, 25 bp, Homo sapien
gcagggactgctgaggaaaaacaaa

SEQ ID NO: 3602595 - DNA, 25 bp, Homo sapien
ctctgcagggactgctgaggaaaaa

SEQ ID NO: 3602596 - DNA, 25 bp, Homo sapien
gctctggcagtctggcagtctcttc

SEQ ID NO: 3602597 - DNA, 25 bp, Homo sapien
aaaatccctgtgggctctggcagtc

SEQ ID NO: 3602598 - DNA, 25 bp, Homo sapien
ggggagactccgagcaggcaggcct

SEQ ID NO: 3602599 - DNA, 25 bp, Homo sapien
gagcccacgtgctgttctgggagag

SEQ ID NO: 3602600 - DNA, 25 bp, Homo sapien
tgcagccacgatttctctctccatt

SEQ ID NO: 3602601 - DNA, 25 bp, Homo sapien
ccagccttgaatgtatgagagagac

SEQ ID NO: 3602602 - DNA, 25 bp, Homo sapien
gactcccataggcttcatctgggct

SEQ ID NO: 3602603 - DNA, 25 bp, Homo sapien
gtcctctagggaggcacttagccca

SEQ ID NO: 3602604 - DNA, 25 bp, Homo sapien
gaactccttggaccagttcacagaa

SEQ ID NO: 3602605 - DNA, 25 bp, Homo sapien
taaaaccaatgtcctagaccaactc

SEQ ID NO: 3602606 - DNA, 25 bp, Homo sapien
gcccaagaggagagacctgttggct

SEQ ID NO: 3602607 - DNA, 25 bp, Homo sapien
gaaagaggactctgaaatcagggcc

SEQ ID NO: 3602608 - DNA, 25 bp, Homo sapien
gccagtgggtagtgactgttcctca

SEQ ID NO: 3602609 - DNA, 25 bp, Homo sapien
cacacagtagtaggaggtccatgcg

SEQ ID NO: 3602610 - DNA, 25 bp, Homo sapien
atccagtccagaaactcagctacct

SEQ ID NO: 3602611 - DNA, 25 bp, Homo sapien
taggcgccatgtgtccccatctggg

SEQ ID NO: 3602612 - DNA, 25 bp, Homo sapien
tgagcagtgtcatggatccagtcca

SEQ ID NO: 3602613 - DNA, 25 bp, Homo sapien
taccttggcgtagacacctgggtga

SEQ ID NO: 3602614 - DNA, 25 bp, Homo sapien
atgcatcagcccttccgtccaggta

SEQ ID NO: 3602615 - DNA, 25 bp, Homo sapien
cacgcaagagctgttgcagagctga

SEQ ID NO: 3602616 - DNA, 25 bp, Homo sapien
gtgagggctccgctgtacacgcaag

SEQ ID NO: 3602617 - DNA, 25 bp, Homo sapien
gctgaacaagggcaccaccgtgtcc

SEQ ID NO: 3602618 - DNA, 25 bp, Homo sapien
ctgcagggcacaaagcaaggcccag

SEQ ID NO: 3602619 - DNA, 25 bp, Homo sapien
acgctgagcaaggaagcagtaggct

SEQ ID NO: 3602620 - DNA, 25 bp, Homo sapien
ggtaattcgaagtcccagagacagg

SEQ ID NO: 3602621 - DNA, 25 bp, Homo sapien
caaggaagcagtaggctatcggact

SEQ ID NO: 3602622 - DNA, 25 bp, Homo sapien
gaaaatgctgttccttggccggcag

SEQ ID NO: 3602623 - DNA, 25 bp, Homo sapien
cgagcccttcggaaaatgctgttcc

SEQ ID NO: 3602624 - DNA, 25 bp, Homo sapien
aatgctgttccttggccggcaggca

SEQ ID NO: 3602625 - DNA, 25 bp, Homo sapien
gcaccgcgagcccttcggaaaatgc

SEQ ID NO: 3602626 - DNA, 25 bp, Homo sapien
aggcttggcttcccccactgcagag

SEQ ID NO: 3602627 - DNA, 25 bp, Homo sapien
cctggtccccagtcaggcttggctt

SEQ ID NO: 3602628 - DNA, 25 bp, Homo sapien
tcaggcttggcttcccccactgcag

SEQ ID NO: 3602629 - DNA, 25 bp, Homo sapien
ggtcctggtccccagtcaggcttgg

SEQ ID NO: 3602630 - DNA, 25 bp, Homo sapien
gggagaacgccatgtccttttcaat

SEQ ID NO: 3602631 - DNA, 25 bp, Homo sapien
aaaacgtgacatatcccatgggtgc

SEQ ID NO: 3602632 - DNA, 25 bp, Homo sapien
catgggcacccaacttctaatgagg

SEQ ID NO: 3602633 - DNA, 25 bp, Homo sapien
aaaattctttcaggccatgggcacc

SEQ ID NO: 3602634 - DNA, 25 bp, Homo sapien
tgggataatcctctccaccagagcc

SEQ ID NO: 3602635 - DNA, 25 bp, Homo sapien
aagttgagagcggtctggagcctca

SEQ ID NO: 3602636 - DNA, 25 bp, Homo sapien
gacgtcgtagtcatgattctgggca

SEQ ID NO: 3602637 - DNA, 25 bp, Homo sapien
cctcaggagggcgacgtcgtagtca

SEQ ID NO: 3602638 - DNA, 25 bp, Homo sapien
tgccctgtccggcaccaagagaaga

SEQ ID NO: 3602639 - DNA, 25 bp, Homo sapien
tgtgatcatgggagaggcacttctc

SEQ ID NO: 3602640 - DNA, 25 bp, Homo sapien
tccctctcagcctcggtaaaatggg

SEQ ID NO: 3602641 - DNA, 25 bp, Homo sapien
gatcaaagagctcattcactcatca

SEQ ID NO: 3602642 - DNA, 25 bp, Homo sapien
ttcttgatactgaatgagagaactt

SEQ ID NO: 3602643 - DNA, 25 bp, Homo sapien
tactgaatgagagaacttcacaaac

SEQ ID NO: 3602644 - DNA, 25 bp, Homo sapien
tgaatgagagaacttcacaaacacc

SEQ ID NO: 3602645 - DNA, 25 bp, Homo sapien
atgagagaacttcacaaacaccagt

SEQ ID NO: 3602646 - DNA, 25 bp, Homo sapien
tacaggacataccaacagccgaaca

SEQ ID NO: 3602647 - DNA, 25 bp, Homo sapien
aaagctggagacagttggacacgaa

SEQ ID NO: 3602648 - DNA, 25 bp, Homo sapien
gacacgaacatttgatacaggacat

SEQ ID NO: 3602649 - DNA, 25 bp, Homo sapien
ccaacagccgaacagaaagggcaac

SEQ ID NO: 3602650 - DNA, 25 bp, Homo sapien
ctgtcctcagcagccacagagactt

SEQ ID NO: 3602651 - DNA, 25 bp, Homo sapien
tgaggctctctgtcctcagcagcca

SEQ ID NO: 3602652 - DNA, 25 bp, Homo sapien
ctctgtcctcagcagccacagagac

SEQ ID NO: 3602653 - DNA, 25 bp, Homo sapien
gtcctcagcagccacagagacttgc

SEQ ID NO: 3602654 - DNA, 25 bp, Homo sapien
tgtgcatacaatgtgcagcagtcac

SEQ ID NO: 3602655 - DNA, 25 bp, Homo sapien
ctgtgcatacaatgtgcagcagtca

SEQ ID NO: 3602656 - DNA, 25 bp, Homo sapien
cccaccaactatccgggaagccagg

SEQ ID NO: 3602657 - DNA, 25 bp, Homo sapien
ccccacacgtgtgccggaagcccag

SEQ ID NO: 3602658 - DNA, 25 bp, Homo sapien
cacccagcgtggcgctagcacagag

SEQ ID NO: 3602659 - DNA, 25 bp, Homo sapien
agagcccccacacgtgtgccggaag

SEQ ID NO: 3602660 - DNA, 25 bp, Homo sapien
gctgtgggcccactgaaagcagaaa

SEQ ID NO: 3602661 - DNA, 25 bp, Homo sapien
tagaagtgttgatttcacccctgcc

SEQ ID NO: 3602662 - DNA, 25 bp, Homo sapien
cacagattgcttcccgtttggtacc

SEQ ID NO: 3602663 - DNA, 25 bp, Homo sapien
tgtatctgcactaatggagccctag

SEQ ID NO: 3602664 - DNA, 25 bp, Homo sapien
tcttccacacttgaggcagggggaa

SEQ ID NO: 3602665 - DNA, 25 bp, Homo sapien
ccacacttgaggcagggggaacacc

SEQ ID NO: 3602666 - DNA, 25 bp, Homo sapien
cacacttgaggcagggggaacaccc

SEQ ID NO: 3602667 - DNA, 25 bp, Homo sapien
gggctcttccacacttgaggcaggg

SEQ ID NO: 3602668 - DNA, 25 bp, Homo sapien
agagcatctgagggaaacaacttga

SEQ ID NO: 3602669 - DNA, 25 bp, Homo sapien
cagagcatctgagggaaacaacttg

SEQ ID NO: 3602670 - DNA, 25 bp, Homo sapien
aacttgaccagaagtgcagttgttc

SEQ ID NO: 3602671 - DNA, 25 bp, Homo sapien
cacatccaaggacgtgaagaatggg

SEQ ID NO: 3602672 - DNA, 25 bp, Homo sapien
tgcctagtctcccagagggcaacag

SEQ ID NO: 3602673 - DNA, 25 bp, Homo sapien
tgcaaaacagaggtaccaacaagaa

SEQ ID NO: 3602674 - DNA, 25 bp, Homo sapien
cagttcttaaggctgtcatgtagcc

SEQ ID NO: 3602675 - DNA, 25 bp, Homo sapien
tcagagagcacttagcttggagaca

SEQ ID NO: 3602676 - DNA, 25 bp, Homo sapien
gaagcctaggaaggcacaaagaccc

SEQ ID NO: 3602677 - DNA, 25 bp, Homo sapien
gactacaagcaactcttagccagag

SEQ ID NO: 3602678 - DNA, 25 bp, Homo sapien
cattcaggtatccaagacaagaacc

SEQ ID NO: 3602679 - DNA, 25 bp, Homo sapien
ggaagcctcccagtctaggagagag

SEQ ID NO: 3602680 - DNA, 25 bp, Homo sapien
gcctcccagtctaggagagagctga

SEQ ID NO: 3602681 - DNA, 25 bp, Homo sapien
tgtcagtgaggtttactcccttgtg

SEQ ID NO: 3602682 - DNA, 25 bp, Homo sapien
gcaaactcctgggaactgttgagtt

SEQ ID NO: 3602683 - DNA, 25 bp, Homo sapien
tcacttgcgcttccagcaagaagtc

SEQ ID NO: 3602684 - DNA, 25 bp, Homo sapien
gatccctcacttgcgcttccagcaa

SEQ ID NO: 3602685 - DNA, 25 bp, Homo sapien
cagcaagaagtcttcgctgtttatt

SEQ ID NO: 3602686 - DNA, 25 bp, Homo sapien
gctgatccctcacttgcgcttccag

SEQ ID NO: 3602687 - DNA, 25 bp, Homo sapien
ggtcccggaaatgggctgagaggca

SEQ ID NO: 3602688 - DNA, 25 bp, Homo sapien
atcctgcaaggtcccggaaatgggc

SEQ ID NO: 3602689 - DNA, 25 bp, Homo sapien
caaggtcccggaaatgggctgagag

SEQ ID NO: 3602690 - DNA, 25 bp, Homo sapien
ctcatcctgcaaggtcccggaaatg

SEQ ID NO: 3602691 - DNA, 25 bp, Homo sapien
cagggctcccagcactgcacagcca

SEQ ID NO: 3602692 - DNA, 25 bp, Homo sapien
tcccagcactgcacagccacgtcgc

SEQ ID NO: 3602693 - DNA, 25 bp, Homo sapien
ccagcactgcacagccacgtcgcat

SEQ ID NO: 3602694 - DNA, 25 bp, Homo sapien
gctcccagcactgcacagccacgtc

SEQ ID NO: 3602695 - DNA, 25 bp, Homo sapien
gaacgccagcacactgcctgagaaa

SEQ ID NO: 3602696 - DNA, 25 bp, Homo sapien
ggaacgccagcacactgcctgagaa

SEQ ID NO: 3602697 - DNA, 25 bp, Homo sapien
tgctctgaagatcccaggtcctggg

SEQ ID NO: 3602698 - DNA, 25 bp, Homo sapien
aggctctgctctgaagatcccaggt

SEQ ID NO: 3602699 - DNA, 25 bp, Homo sapien
cctccatagggggttggtcatccag

SEQ ID NO: 3602700 - DNA, 25 bp, Homo sapien
tcctctgcatactgggcctccatag

SEQ ID NO: 3602701 - DNA, 25 bp, Homo sapien
ggaaataagggccagacacccagga

SEQ ID NO: 3602702 - DNA, 25 bp, Homo sapien
gaaataagggccagacacccaggat

SEQ ID NO: 3602703 - DNA, 25 bp, Homo sapien
tggggaaataagggccagacaccca

SEQ ID NO: 3602704 - DNA, 25 bp, Homo sapien
cctcaaaattcaactgcccaagctc

SEQ ID NO: 3602705 - DNA, 25 bp, Homo sapien
ctcaaaattcaactgcccaagctca

SEQ ID NO: 3602706 - DNA, 25 bp, Homo sapien
tcaaaattcaactgcccaagctcat

SEQ ID NO: 3602707 - DNA, 25 bp, Homo sapien
caaaattcaactgcccaagctcatg

SEQ ID NO: 3602708 - DNA, 25 bp, Homo sapien
gacaatgaactctgctgaggaccca

SEQ ID NO: 3602709 - DNA, 25 bp, Homo sapien
tgaggacccatgaataggccccttg

SEQ ID NO: 3602710 - DNA, 25 bp, Homo sapien
cagggtctactaggcaatgttccgc

SEQ ID NO: 3602711 - DNA, 25 bp, Homo sapien
gacagagctgtattggagagaccga

SEQ ID NO: 3602712 - DNA, 25 bp, Homo sapien
gctttagagtcaggccttcatccaa

SEQ ID NO: 3602713 - DNA, 25 bp, Homo sapien
gctgctcaaaaacccctcagaaggg

SEQ ID NO: 3602714 - DNA, 25 bp, Homo sapien
tagacaaggaggcagaataggtcct

SEQ ID NO: 3602715 - DNA, 25 bp, Homo sapien
ttgtttcaaagcacaaggtgaccca

SEQ ID NO: 3602716 - DNA, 25 bp, Homo sapien
ggaagaggatagggtctgcctactc

SEQ ID NO: 3602717 - DNA, 25 bp, Homo sapien
cagggaagaggatagggtctgccta

SEQ ID NO: 3602718 - DNA, 25 bp, Homo sapien
agggaagaggatagggtctgcctac

SEQ ID NO: 3602719 - DNA, 25 bp, Homo sapien
gggaagaggatagggtctgcctact

SEQ ID NO: 3602720 - DNA, 25 bp, Homo sapien
tataaactattcattaggtgaaaca

SEQ ID NO: 3602721 - DNA, 25 bp, Homo sapien
cattaggtgaaacagtcccgaggga

SEQ ID NO: 3602722 - DNA, 25 bp, Homo sapien
tattcattaggtgaaacagtcccga

SEQ ID NO: 3602723 - DNA, 25 bp, Homo sapien
taggtgaaacagtcccgagggactg

SEQ ID NO: 3602724 - DNA, 25 bp, Homo sapien
cagcacctacctcaaaaggacctaa

SEQ ID NO: 3602725 - DNA, 25 bp, Homo sapien
gatacaatccagagtcctagacagg

SEQ ID NO: 3602726 - DNA, 25 bp, Homo sapien
tgtattagcaactttcttcagacag

SEQ ID NO: 3602727 - DNA, 25 bp, Homo sapien
gtcataccccttatcctcttttcag

SEQ ID NO: 3602728 - DNA, 25 bp, Homo sapien
cctgtaaggccaaatatggtggccc

SEQ ID NO: 3602729 - DNA, 25 bp, Homo sapien
tcgttccaaagctagggcctgcatt

SEQ ID NO: 3602730 - DNA, 25 bp, Homo sapien
caatgtatatagctcccagagggct

SEQ ID NO: 3602731 - DNA, 25 bp, Homo sapien
taaacaaagcctcgtacaggccagg

SEQ ID NO: 3602732 - DNA, 25 bp, Homo sapien
taattatgccaagggaagaatccac

SEQ ID NO: 3602733 - DNA, 25 bp, Homo sapien
accaatgggcgattcaaagaagtct

SEQ ID NO: 3602734 - DNA, 25 bp, Homo sapien
caaacttccaagatgtactggttca

SEQ ID NO: 3602735 - DNA, 25 bp, Homo sapien
gaatccacatattcaagacatagct

SEQ ID NO: 3602736 - DNA, 25 bp, Homo sapien
gggcagctgctcttctttctgtgtt

SEQ ID NO: 3602737 - DNA, 25 bp, Homo sapien
atttaattttagcaagggcagctgc

SEQ ID NO: 3602738 - DNA, 25 bp, Homo sapien
ctatttaattttagcaagggcagct

SEQ ID NO: 3602739 - DNA, 25 bp, Homo sapien
ttaattttagcaagggcagctgctc

SEQ ID NO: 3602740 - DNA, 25 bp, Homo sapien
ctgaaacaaggcacgaattaaagct

SEQ ID NO: 3602741 - DNA, 25 bp, Homo sapien
caaggcacgaattaaagcttttact

SEQ ID NO: 3602742 - DNA, 25 bp, Homo sapien
tgaaacaaggcacgaattaaagctt

SEQ ID NO: 3602743 - DNA, 25 bp, Homo sapien
tattacaaagtaaccacaggcaacc

SEQ ID NO: 3602744 - DNA, 25 bp, Homo sapien
gatgaccatactctcatgccttagg

SEQ ID NO: 3602745 - DNA, 25 bp, Homo sapien
ctttatagaactgcccctcaatgtg

SEQ ID NO: 3602746 - DNA, 25 bp, Homo sapien
gccagatgaagagaccaagtgagga

SEQ ID NO: 3602747 - DNA, 25 bp, Homo sapien
aatatttgtacaatggaatgatgcg

SEQ ID NO: 3602748 - DNA, 25 bp, Homo sapien
tttgtacaatggaatgatgcgatgg

SEQ ID NO: 3602749 - DNA, 25 bp, Homo sapien
tatttgtacaatggaatgatgcgat

SEQ ID NO: 3602750 - DNA, 25 bp, Homo sapien
gtacaatggaatgatgcgatggtga

SEQ ID NO: 3602751 - DNA, 25 bp, Homo sapien
tcttagactgcaagaaagcccttta

SEQ ID NO: 3602752 - DNA, 25 bp, Homo sapien
tctgtagtaaaccaagctaaagcag

SEQ ID NO: 3602753 - DNA, 25 bp, Homo sapien
gatggagatgaccttaaggcctcta

SEQ ID NO: 3602754 - DNA, 25 bp, Homo sapien
aattcttatctgctgccctctggag

SEQ ID NO: 3602755 - DNA, 25 bp, Homo sapien
cgatccccaatttcttgcaagctgg

SEQ ID NO: 3602756 - DNA, 25 bp, Homo sapien
catcaattccttgaatggcatccat

SEQ ID NO: 3602757 - DNA, 25 bp, Homo sapien
tcatccatcactgttttgcataagg

SEQ ID NO: 3602758 - DNA, 25 bp, Homo sapien
cattttggcacatagactggaacct

SEQ ID NO: 3602759 - DNA, 25 bp, Homo sapien
ccatagccttgcaatatatattcac

SEQ ID NO: 3602760 - DNA, 25 bp, Homo sapien
gaaattgctgtattgagtaaagtcc

SEQ ID NO: 3602761 - DNA, 25 bp, Homo sapien
ggcagtaattttgccaatgacctca

SEQ ID NO: 3602762 - DNA, 25 bp, Homo sapien
gagtaaagtccccatagccttgcaa

SEQ ID NO: 3602763 - DNA, 25 bp, Homo sapien
tatttgaaaagttcctagcacttga

SEQ ID NO: 3602764 - DNA, 25 bp, Homo sapien
tagcacttgataatctttccagaag

SEQ ID NO: 3602765 - DNA, 25 bp, Homo sapien
ctgccggactgctttacttgctgca

SEQ ID NO: 3602766 - DNA, 25 bp, Homo sapien
gaagttcacctttctgtgcccgcat

SEQ ID NO: 3602767 - DNA, 25 bp, Homo sapien
gggcaagacgcaatctgaactgatg

SEQ ID NO: 3602768 - DNA, 25 bp, Homo sapien
tgaagccaggtacaagatccacaaa

SEQ ID NO: 3602769 - DNA, 25 bp, Homo sapien
tcagcaagtggtgagcaatgtacat

SEQ ID NO: 3602770 - DNA, 25 bp, Homo sapien
actgatgcccgagggtcagcaagtg

SEQ ID NO: 3602771 - DNA, 25 bp, Homo sapien
gttgttgtgatgaatagcagccaac

SEQ ID NO: 3602772 - DNA, 25 bp, Homo sapien
tgttgtgatgaatagcagccaactg

SEQ ID NO: 3602773 - DNA, 25 bp, Homo sapien
aatagcagccaactggggaagtttt

SEQ ID NO: 3602774 - DNA, 25 bp, Homo sapien
ttgtgatgaatagcagccaactggg

SEQ ID NO: 3602775 - DNA, 25 bp, Homo sapien
ggtacaacatcatggaacaaatgga

SEQ ID NO: 3602776 - DNA, 25 bp, Homo sapien
gtacaacatcatggaacaaatggaa

SEQ ID NO: 3602777 - DNA, 25 bp, Homo sapien
ctcactgagtagaaaagttgaacag

SEQ ID NO: 3602778 - DNA, 25 bp, Homo sapien
cctcactgagtagaaaagttgaaca

SEQ ID NO: 3602779 - DNA, 25 bp, Homo sapien
ccttaaaagcttacagggatttcat

SEQ ID NO: 3602780 - DNA, 25 bp, Homo sapien
taagaatatcttaagctacgtacct

SEQ ID NO: 3602781 - DNA, 25 bp, Homo sapien
taggatagaatctagccctcaagat

SEQ ID NO: 3602782 - DNA, 25 bp, Homo sapien
atttcattttcgctgcaggagctgc

SEQ ID NO: 3602783 - DNA, 25 bp, Homo sapien
gatataactattacccactgccaac

SEQ ID NO: 3602784 - DNA, 25 bp, Homo sapien
aagaatgttaagctaaagagcctga

SEQ ID NO: 3602785 - DNA, 25 bp, Homo sapien
tagtctaggagtagggaagaagctt

SEQ ID NO: 3602786 - DNA, 25 bp, Homo sapien
aatcagcttggtccatgctctgcca

SEQ ID NO: 3602787 - DNA, 25 bp, Homo sapien
ctgataaacatctagttagatatgc

SEQ ID NO: 3602788 - DNA, 25 bp, Homo sapien
tagtaaagtctgataggcgagttcc

SEQ ID NO: 3602789 - DNA, 25 bp, Homo sapien
ggttgttgcctctagtaaagtctga

SEQ ID NO: 3602790 - DNA, 25 bp, Homo sapien
gataggcgagttccattaatttctt

SEQ ID NO: 3602791 - DNA, 25 bp, Homo sapien
attgatcactactggttgttgcctc

SEQ ID NO: 3602792 - DNA, 25 bp, Homo sapien
tgtacttccagtttgttatcctcat

SEQ ID NO: 3602793 - DNA, 25 bp, Homo sapien
ggtccaatgtattttcaggctctaa

SEQ ID NO: 3602794 - DNA, 25 bp, Homo sapien
gctctaaattcatcacttcgtggta

SEQ ID NO: 3602795 - DNA, 25 bp, Homo sapien
tgatacggcatgtgggcaaggaaaa

SEQ ID NO: 3602796 - DNA, 25 bp, Homo sapien
ggcacatttatcttagaatcaggaa

SEQ ID NO: 3602797 - DNA, 25 bp, Homo sapien
cacatttatcttagaatcaggaata

SEQ ID NO: 3602798 - DNA, 25 bp, Homo sapien
ctggcacatttatcttagaatcagg

SEQ ID NO: 3602799 - DNA, 25 bp, Homo sapien
catttatcttagaatcaggaataat

SEQ ID NO: 3602800 - DNA, 25 bp, Homo sapien
aaatgagaattgatgttacgagcgt

SEQ ID NO: 3602801 - DNA, 25 bp, Homo sapien
tggctgccacaatcacatcctggca

SEQ ID NO: 3602802 - DNA, 25 bp, Homo sapien
tgttacgagcgtatttcagcaaatc

SEQ ID NO: 3602803 - DNA, 25 bp, Homo sapien
tctgaggtcattagatttctggctg

SEQ ID NO: 3602804 - DNA, 25 bp, Homo sapien
actcagacaagtcctcccagatcat

SEQ ID NO: 3602805 - DNA, 25 bp, Homo sapien
aatttgctgctatttgttggaatcg

SEQ ID NO: 3602806 - DNA, 25 bp, Homo sapien
gctatttgttggaatcgaataaacc

SEQ ID NO: 3602807 - DNA, 25 bp, Homo sapien
gatgaggcactcagacaagtcctcc

SEQ ID NO: 3602808 - DNA, 25 bp, Homo sapien
tcagccaatgggacagtagatgttt

SEQ ID NO: 3602809 - DNA, 25 bp, Homo sapien
cagccaatgggacagtagatgtttt

SEQ ID NO: 3602810 - DNA, 25 bp, Homo sapien
ctcagccaatgggacagtagatgtt

SEQ ID NO: 3602811 - DNA, 25 bp, Homo sapien
tcgtctctgcatagaatctgagtgt

SEQ ID NO: 3602812 - DNA, 25 bp, Homo sapien
tctcaactgcgtgggacaaatcatg

SEQ ID NO: 3602813 - DNA, 25 bp, Homo sapien
tataatcatctagtgctagctgctg

SEQ ID NO: 3602814 - DNA, 25 bp, Homo sapien
ctgtctgtactctgtaacaatgagg

SEQ ID NO: 3602815 - DNA, 25 bp, Homo sapien
ttcgcatactgacggagacactgga

SEQ ID NO: 3602816 - DNA, 25 bp, Homo sapien
tggcttgagcagacacgacaaaagc

SEQ ID NO: 3602817 - DNA, 25 bp, Homo sapien
cgcatactgacggagacactggagg

SEQ ID NO: 3602818 - DNA, 25 bp, Homo sapien
cttgagcagacacgacaaaagcgag

SEQ ID NO: 3602819 - DNA, 25 bp, Homo sapien
ggagcacttctagtaccagtctgat

SEQ ID NO: 3602820 - DNA, 25 bp, Homo sapien
tgtaaaaacttcagatggtgatgga

SEQ ID NO: 3602821 - DNA, 25 bp, Homo sapien
ggatattccaagttagtcattatag

SEQ ID NO: 3602822 - DNA, 25 bp, Homo sapien
ggcaagatgccagcggcctaaggat

SEQ ID NO: 3602823 - DNA, 25 bp, Homo sapien
aagaggacagaactgatgggtggca

SEQ ID NO: 3602824 - DNA, 25 bp, Homo sapien
ggcataggggtcttctcctctttgt

SEQ ID NO: 3602825 - DNA, 25 bp, Homo sapien
tgtaggtaagattccaaactgctgg

SEQ ID NO: 3602826 - DNA, 25 bp, Homo sapien
cctctttgtgcgattgttcagtgta

SEQ ID NO: 3602827 - DNA, 25 bp, Homo sapien
tcttctccaaggtgataaagtatgt

SEQ ID NO: 3602828 - DNA, 25 bp, Homo sapien
tttaataacttcaagcatttctgtg

SEQ ID NO: 3602829 - DNA, 25 bp, Homo sapien
tctccaaggtgataaagtatgttct

SEQ ID NO: 3602830 - DNA, 25 bp, Homo sapien
ccaaggtgataaagtatgttctgtt

SEQ ID NO: 3602831 - DNA, 25 bp, Homo sapien
aaaacaagaagagcacttattgcgc

SEQ ID NO: 3602832 - DNA, 25 bp, Homo sapien
caagaagagcacttattgcgcatgc

SEQ ID NO: 3602833 - DNA, 25 bp, Homo sapien
gcatgctttggggagagcatttagt

SEQ ID NO: 3602834 - DNA, 25 bp, Homo sapien
agagcacttattgcgcatgctttgg

SEQ ID NO: 3602835 - DNA, 25 bp, Homo sapien
ctctgttaatgcacaattatattct

SEQ ID NO: 3602836 - DNA, 25 bp, Homo sapien
cagacgctgagcaccagtgacatac

SEQ ID NO: 3602837 - DNA, 25 bp, Homo sapien
ctgttaatgcacaattatattcttc

SEQ ID NO: 3602838 - DNA, 25 bp, Homo sapien
gacgctgagcaccagtgacatactt

SEQ ID NO: 3602839 - DNA, 25 bp, Homo sapien
taagcaaacttaggacaactgagtc

SEQ ID NO: 3602840 - DNA, 25 bp, Homo sapien
taagtctgtaaattcaccggttgat

SEQ ID NO: 3602841 - DNA, 25 bp, Homo sapien
cggttgatacgtgaagatcccggcg

SEQ ID NO: 3602842 - DNA, 25 bp, Homo sapien
ctgcaactgtttaagcaaacttagg

SEQ ID NO: 3602843 - DNA, 25 bp, Homo sapien
tgctaatcatattgcacacctcacc

SEQ ID NO: 3602844 - DNA, 25 bp, Homo sapien
tatccacctgggtaatcaggccctg

SEQ ID NO: 3602845 - DNA, 25 bp, Homo sapien
gatttcagcaggtcaatgtcttcag

SEQ ID NO: 3602846 - DNA, 25 bp, Homo sapien
gctctgcatgctaggcaggaattca

SEQ ID NO: 3602847 - DNA, 25 bp, Homo sapien
gatgcatcccggcattgtggctcac

SEQ ID NO: 3602848 - DNA, 25 bp, Homo sapien
tggatgatacatgtttgcaagaaaa

SEQ ID NO: 3602849 - DNA, 25 bp, Homo sapien
gatatgaagacagtattttggcttg

SEQ ID NO: 3602850 - DNA, 25 bp, Homo sapien
gcttgcttatgagatgcatatggct

SEQ ID NO: 3602851 - DNA, 25 bp, Homo sapien
caaggccatgcacataaaatgaggg

SEQ ID NO: 3602852 - DNA, 25 bp, Homo sapien
catagggtacagaagcctttctgga

SEQ ID NO: 3602853 - DNA, 25 bp, Homo sapien
gagttagtacttacctgggctggag

SEQ ID NO: 3602854 - DNA, 25 bp, Homo sapien
tttttagcctgtctctattccttgg

SEQ ID NO: 3602855 - DNA, 25 bp, Homo sapien
ggagtgtgccaaaacttctgtcacg

SEQ ID NO: 3602856 - DNA, 25 bp, Homo sapien
aaacttctgtcacgaacgaggccat

SEQ ID NO: 3602857 - DNA, 25 bp, Homo sapien
agcctcccggagtgtgccaaaactt

SEQ ID NO: 3602858 - DNA, 25 bp, Homo sapien
gtcaggcggctgatccgggtcccca

SEQ ID NO: 3602859 - DNA, 25 bp, Homo sapien
tgggtcactctcgtagccagcgccg

SEQ ID NO: 3602860 - DNA, 25 bp, Homo sapien
gaaccaacgctgactgggtcactct

SEQ ID NO: 3602861 - DNA, 25 bp, Homo sapien
tcccgccggccgtcttgacgcgagg

SEQ ID NO: 3602862 - DNA, 25 bp, Homo sapien
ggccaagacgggaaccaacgctgac

SEQ ID NO: 3602863 - DNA, 25 bp, Homo sapien
tacaatcagacagcgtttccacgtt

SEQ ID NO: 3602864 - DNA, 25 bp, Homo sapien
ctgtattcaagaagcaaagtagcga

SEQ ID NO: 3602865 - DNA, 25 bp, Homo sapien
cgtttccacgtttgcacagtatttg

SEQ ID NO: 3602866 - DNA, 25 bp, Homo sapien
catatttctggtagaggacagtaca

SEQ ID NO: 3602867 - DNA, 25 bp, Homo sapien
ctgtagaagctggagggccgccgcc

SEQ ID NO: 3602868 - DNA, 25 bp, Homo sapien
agaagctggagggccgccgcctgga

SEQ ID NO: 3602869 - DNA, 25 bp, Homo sapien
gtagaagctggagggccgccgcctg

SEQ ID NO: 3602870 - DNA, 25 bp, Homo sapien
tgtagaagctggagggccgccgcct

SEQ ID NO: 3602871 - DNA, 25 bp, Homo sapien
catggcgtatcaggggcagcagtac

SEQ ID NO: 3602872 - DNA, 25 bp, Homo sapien
taagccatggcgcttctcagggcat

SEQ ID NO: 3602873 - DNA, 25 bp, Homo sapien
gcagcgttgctgtaaccgacaaaga

SEQ ID NO: 3602874 - DNA, 25 bp, Homo sapien
atggcgcttctcagggcattcagca

SEQ ID NO: 3602875 - DNA, 25 bp, Homo sapien
ccccaccagatactaggagacaaag

SEQ ID NO: 3602876 - DNA, 25 bp, Homo sapien
tattcagctttgtaccaaaggtcct

SEQ ID NO: 3602877 - DNA, 25 bp, Homo sapien
cctagtaagtgtaatcaggcaagaa

SEQ ID NO: 3602878 - DNA, 25 bp, Homo sapien
tgtgtgaaactaacgaactgatcct

SEQ ID NO: 3602879 - DNA, 25 bp, Homo sapien
tctgagaccttagtttgtggaggcc

SEQ ID NO: 3602880 - DNA, 25 bp, Homo sapien
aatgcttagcctgacagctgggtaa

SEQ ID NO: 3602881 - DNA, 25 bp, Homo sapien
ggcagccagctactgttaggaataa

SEQ ID NO: 3602882 - DNA, 25 bp, Homo sapien
ttggttgtacctaaaggcagccagc

SEQ ID NO: 3602883 - DNA, 25 bp, Homo sapien
ttttgttatctcctggcaagagcca

SEQ ID NO: 3602884 - DNA, 25 bp, Homo sapien
ggccgggtacgatgacttgtctgca

SEQ ID NO: 3602885 - DNA, 25 bp, Homo sapien
taaaagggtgcagttcatcagcaac

SEQ ID NO: 3602886 - DNA, 25 bp, Homo sapien
caaggcatttcaggtcttctggcgt

SEQ ID NO: 3602887 - DNA, 25 bp, Homo sapien
cgaacttctgtgcaagaggcaggca

SEQ ID NO: 3602888 - DNA, 25 bp, Homo sapien
ggtgagcactatgacaacgaacttc

SEQ ID NO: 3602889 - DNA, 25 bp, Homo sapien
ccaggaaccagaatgggccttgaac

SEQ ID NO: 3602890 - DNA, 25 bp, Homo sapien
gatcggaatcttatgtgcccaccta

SEQ ID NO: 3602891 - DNA, 25 bp, Homo sapien
gaaactccctgaattgactccatga

SEQ ID NO: 3602892 - DNA, 25 bp, Homo sapien
gctgcaaatcggctacataggtcat

SEQ ID NO: 3602893 - DNA, 25 bp, Homo sapien
tttcactgtcacagttgaaactccc

SEQ ID NO: 3602894 - DNA, 25 bp, Homo sapien
ggtcgaattgttggaggctctttca

SEQ ID NO: 3602895 - DNA, 25 bp, Homo sapien
tgggtagaaactcccctaggcacag

SEQ ID NO: 3602896 - DNA, 25 bp, Homo sapien
gggtagaaactcccctaggcacagc

SEQ ID NO: 3602897 - DNA, 25 bp, Homo sapien
tgcccaaggtaagagcaccaatggt

SEQ ID NO: 3602898 - DNA, 25 bp, Homo sapien
cacattaatgccctcagttacggag

SEQ ID NO: 3602899 - DNA, 25 bp, Homo sapien
caatggcatccagatcatccttgga

SEQ ID NO: 3602900 - DNA, 25 bp, Homo sapien
tattaatgataaggtgaatgcaggg

SEQ ID NO: 3602901 - DNA, 25 bp, Homo sapien
gttatacagtgcaaatcaggccagg

SEQ ID NO: 3602902 - DNA, 25 bp, Homo sapien
tgacccattggcctaaacttgtaag

SEQ ID NO: 3602903 - DNA, 25 bp, Homo sapien
gaaatattggcctgacttctgtgaa

SEQ ID NO: 3602904 - DNA, 25 bp, Homo sapien
gtttaattgctagggagaggcctga

SEQ ID NO: 3602905 - DNA, 25 bp, Homo sapien
gggcagcattgctctggtaggcata

SEQ ID NO: 3602906 - DNA, 25 bp, Homo sapien
caggtaggaaagtgcctcttggtac

SEQ ID NO: 3602907 - DNA, 25 bp, Homo sapien
aagcaatcacggattctttgacccc

SEQ ID NO: 3602908 - DNA, 25 bp, Homo sapien
tttcttcggtataaagcaatcacgg

SEQ ID NO: 3602909 - DNA, 25 bp, Homo sapien
gttctaggcctgttaggagatacac

SEQ ID NO: 3602910 - DNA, 25 bp, Homo sapien
tacacagacacttttcggaacaaac

SEQ ID NO: 3602911 - DNA, 25 bp, Homo sapien
gagttctaggcctgttaggagatac

SEQ ID NO: 3602912 - DNA, 25 bp, Homo sapien
tttcggaacaaactataatcttcat

SEQ ID NO: 3602913 - DNA, 25 bp, Homo sapien
atttccttcagtttcgcttgagcca

SEQ ID NO: 3602914 - DNA, 25 bp, Homo sapien
tccatattcatgtcatctggaccaa

SEQ ID NO: 3602915 - DNA, 25 bp, Homo sapien
ttcatgtcatctggaccaatttcct

SEQ ID NO: 3602916 - DNA, 25 bp, Homo sapien
agtttcgcttgagccaccttcataa

SEQ ID NO: 3602917 - DNA, 25 bp, Homo sapien
tgcaaactgttccagaagggttcgt

SEQ ID NO: 3602918 - DNA, 25 bp, Homo sapien
tgatagagcctggagtattcttcat

SEQ ID NO: 3602919 - DNA, 25 bp, Homo sapien
tctactacccttttgggtgcttcat

SEQ ID NO: 3602920 - DNA, 25 bp, Homo sapien
gctgaagtcgaggatcactgtgaga

SEQ ID NO: 3602921 - DNA, 25 bp, Homo sapien
ggctttagctatggccaggatgacc

SEQ ID NO: 3602922 - DNA, 25 bp, Homo sapien
gatgaccccttgcatggcagggctc

SEQ ID NO: 3602923 - DNA, 25 bp, Homo sapien
tgcttcagacccatctcggtcaaag

SEQ ID NO: 3602924 - DNA, 25 bp, Homo sapien
tcaaaggtctgacgggctttagcta

SEQ ID NO: 3602925 - DNA, 25 bp, Homo sapien
tctgcatcagatctaaccagaatcc

SEQ ID NO: 3602926 - DNA, 25 bp, Homo sapien
gggcatgggcttcttgggttcagct

SEQ ID NO: 3602927 - DNA, 25 bp, Homo sapien
tagactctgcatcattagcctttgg

SEQ ID NO: 3602928 - DNA, 25 bp, Homo sapien
cttcagagacctcagaattaggctg

SEQ ID NO: 3602929 - DNA, 25 bp, Homo sapien
tagcctgggcagtttgctcctttac

SEQ ID NO: 3602930 - DNA, 25 bp, Homo sapien
catgctcagacgacaagcagcgaac

SEQ ID NO: 3602931 - DNA, 25 bp, Homo sapien
gctgtgtttgcaatagcctgggcag

SEQ ID NO: 3602932 - DNA, 25 bp, Homo sapien
gctcttctcataggcacgggctgtg

SEQ ID NO: 3602933 - DNA, 25 bp, Homo sapien
gagggattttgcaagactgctcttc

SEQ ID NO: 3602934 - DNA, 25 bp, Homo sapien
tagagtagtcctgtgatgaggagtt

SEQ ID NO: 3602935 - DNA, 25 bp, Homo sapien
tagggcttccacttctgacatttga

SEQ ID NO: 3602936 - DNA, 25 bp, Homo sapien
tatcctcctgaatgtaatgcttgag

SEQ ID NO: 3602937 - DNA, 25 bp, Homo sapien
aggcctccataggaatctctttcaa

SEQ ID NO: 3602938 - DNA, 25 bp, Homo sapien
gaagtagggtagtttgtcattaatg

SEQ ID NO: 3602939 - DNA, 25 bp, Homo sapien
tgtacatcagacagtaagcactaac

SEQ ID NO: 3602940 - DNA, 25 bp, Homo sapien
ctgcattgaagtagggtagtttgtc

SEQ ID NO: 3602941 - DNA, 25 bp, Homo sapien
agatataggcccaatagtgtccagc

SEQ ID NO: 3602942 - DNA, 25 bp, Homo sapien
gggttgattatagatataggcccaa

SEQ ID NO: 3602943 - DNA, 25 bp, Homo sapien
gattatagatataggcccaatagtg

SEQ ID NO: 3602944 - DNA, 25 bp, Homo sapien
ctgtcggggttgattatagatatag

SEQ ID NO: 3602945 - DNA, 25 bp, Homo sapien
atctaccattagcacatgccttgac

SEQ ID NO: 3602946 - DNA, 25 bp, Homo sapien
ttgtatctaccattagcacatgcct

SEQ ID NO: 3602947 - DNA, 25 bp, Homo sapien
gcacatgccttgactactttcccat

SEQ ID NO: 3602948 - DNA, 25 bp, Homo sapien
gtatctaccattagcacatgccttg

SEQ ID NO: 3602949 - DNA, 25 bp, Homo sapien
acgaaggagaggatcgcagtacatc

SEQ ID NO: 3602950 - DNA, 25 bp, Homo sapien
ttcaatagtctgagtagtacttgca

SEQ ID NO: 3602951 - DNA, 25 bp, Homo sapien
gtctgagtagtacttgcaatacaag

SEQ ID NO: 3602952 - DNA, 25 bp, Homo sapien
tgagtagtacttgcaatacaagtct

SEQ ID NO: 3602953 - DNA, 25 bp, Homo sapien
tctgtgactgttcgtggagctggct

SEQ ID NO: 3602954 - DNA, 25 bp, Homo sapien
tagacttgggtaaagaatcttcagg

SEQ ID NO: 3602955 - DNA, 25 bp, Homo sapien
catttccatggaagaccgagaagat

SEQ ID NO: 3602956 - DNA, 25 bp, Homo sapien
ccgagaagatgtcagtggtttagac

SEQ ID NO: 3602957 - DNA, 25 bp, Homo sapien
ctgagaagagctttctgtacttgta

SEQ ID NO: 3602958 - DNA, 25 bp, Homo sapien
aagtggtaatgtcatatgtgtgtca

SEQ ID NO: 3602959 - DNA, 25 bp, Homo sapien
tggtcagaaaccgagcagtgcactg

SEQ ID NO: 3602960 - DNA, 25 bp, Homo sapien
ttttgtactagcaaattcaataaca

SEQ ID NO: 3602961 - DNA, 25 bp, Homo sapien
tgtgtcactttcaggtggacagctt

SEQ ID NO: 3602962 - DNA, 25 bp, Homo sapien
ctgggcctgagccatatttcacata

SEQ ID NO: 3602963 - DNA, 25 bp, Homo sapien
tgggcctgagccatatttcacatac

SEQ ID NO: 3602964 - DNA, 25 bp, Homo sapien
gctgggcctgagccatatttcacat

SEQ ID NO: 3602965 - DNA, 25 bp, Homo sapien
gaaaggcttattcctagaggctata

SEQ ID NO: 3602966 - DNA, 25 bp, Homo sapien
gagtcgctgacaaaagatctgttta

SEQ ID NO: 3602967 - DNA, 25 bp, Homo sapien
gtggtactctactgcccaaggctgt

SEQ ID NO: 3602968 - DNA, 25 bp, Homo sapien
tagggtcctcaaacaatctataggg

SEQ ID NO: 3602969 - DNA, 25 bp, Homo sapien
tattttcccaggactgtgtcacaca

SEQ ID NO: 3602970 - DNA, 25 bp, Homo sapien
aagtaatgcatgtacctggtacgaa

SEQ ID NO: 3602971 - DNA, 25 bp, Homo sapien
gaaaagttgacttccaagctactgt

SEQ ID NO: 3602972 - DNA, 25 bp, Homo sapien
taacctaccaactgggacctacatg

SEQ ID NO: 3602973 - DNA, 25 bp, Homo sapien
tgagcaatgtcctgaaacaggctag

SEQ ID NO: 3602974 - DNA, 25 bp, Homo sapien
gtcaagtaggaagaatgagcaatgt

SEQ ID NO: 3602975 - DNA, 25 bp, Homo sapien
taggaagaatgagcaatgtcctgaa

SEQ ID NO: 3602976 - DNA, 25 bp, Homo sapien
tgtcctgaaacaggctagatgcaga

SEQ ID NO: 3602977 - DNA, 25 bp, Homo sapien
gaattctgggcaaggtgttcttccc

SEQ ID NO: 3602978 - DNA, 25 bp, Homo sapien
tggtagcctgggtgtcttccacaga

SEQ ID NO: 3602979 - DNA, 25 bp, Homo sapien
aattcaaaacgcttcactggcacag

SEQ ID NO: 3602980 - DNA, 25 bp, Homo sapien
gtgacgttcactgggcaatcagcct

SEQ ID NO: 3602981 - DNA, 25 bp, Homo sapien
gcacatctccgctgtagctgacagt

SEQ ID NO: 3602982 - DNA, 25 bp, Homo sapien
gaaggatgtactcgttatgaagcac

SEQ ID NO: 3602983 - DNA, 25 bp, Homo sapien
gggaaggatgtactcgttatgaagc

SEQ ID NO: 3602984 - DNA, 25 bp, Homo sapien
ttatgaagcacatctccgctgtagc

SEQ ID NO: 3602985 - DNA, 25 bp, Homo sapien
caagaaagtaacatgccccttgggt

SEQ ID NO: 3602986 - DNA, 25 bp, Homo sapien
gtgtccagcatctcacagccaattg

SEQ ID NO: 3602987 - DNA, 25 bp, Homo sapien
tcacagccaattgccactattcttc

SEQ ID NO: 3602988 - DNA, 25 bp, Homo sapien
ctacatggaaccaagaaagtaacat

SEQ ID NO: 3602989 - DNA, 25 bp, Homo sapien
ttatttcgaataagctccttgctcc

SEQ ID NO: 3602990 - DNA, 25 bp, Homo sapien
aagctccttgctcctgtacatgtac

SEQ ID NO: 3602991 - DNA, 25 bp, Homo sapien
caactttcgaatacactctctctta

SEQ ID NO: 3602992 - DNA, 25 bp, Homo sapien
tcctccttcaactttcgaatacact

SEQ ID NO: 3602993 - DNA, 25 bp, Homo sapien
tgaggaaattccagcttattgtgaa

SEQ ID NO: 3602994 - DNA, 25 bp, Homo sapien
taatctgaggaaattccagcttatt

SEQ ID NO: 3602995 - DNA, 25 bp, Homo sapien
gcccaagggactgattaaactcaaa

SEQ ID NO: 3602996 - DNA, 25 bp, Homo sapien
tctgaggaaattccagcttattgtg

SEQ ID NO: 3602997 - DNA, 25 bp, Homo sapien
ggccgaaggtctcattgttacaaaa

SEQ ID NO: 3602998 - DNA, 25 bp, Homo sapien
caaacactcgtctaagttgcgataa

SEQ ID NO: 3602999 - DNA, 25 bp, Homo sapien
tacctgaagaggatactggccgaag

SEQ ID NO: 3603000 - DNA, 25 bp, Homo sapien
tacttcaccgagtgatcggagggaa

SEQ ID NO: 3603001 - DNA, 25 bp, Homo sapien
tgactatctaaagcctatcttctgg

SEQ ID NO: 3603002 - DNA, 25 bp, Homo sapien
tctaaagcctatcttctggctccac

SEQ ID NO: 3603003 - DNA, 25 bp, Homo sapien
tcactatgactatctaaagcctatc

SEQ ID NO: 3603004 - DNA, 25 bp, Homo sapien
tatctaaagcctatcttctggctcc

SEQ ID NO: 3603005 - DNA, 25 bp, Homo sapien
acagctgcaccattggattttcaga

SEQ ID NO: 3603006 - DNA, 25 bp, Homo sapien
aacagctgcaccattggattttcag

SEQ ID NO: 3603007 - DNA, 25 bp, Homo sapien
gaaagtaccatagaacagctgcacc

SEQ ID NO: 3603008 - DNA, 25 bp, Homo sapien
aaagtaccatagaacagctgcacca

SEQ ID NO: 3603009 - DNA, 25 bp, Homo sapien
gacaattctggattgtttggattaa

SEQ ID NO: 3603010 - DNA, 25 bp, Homo sapien
acaattctggattgtttggattaag

SEQ ID NO: 3603011 - DNA, 25 bp, Homo sapien
caattctggattgtttggattaaga

SEQ ID NO: 3603012 - DNA, 25 bp, Homo sapien
attctggattgtttggattaagata

SEQ ID NO: 3603013 - DNA, 25 bp, Homo sapien
tccaagcatcattcaaaagcaaaaa

SEQ ID NO: 3603014 - DNA, 25 bp, Homo sapien
ttttcatcaacccccaaagagccag

SEQ ID NO: 3603015 - DNA, 25 bp, Homo sapien
ctacataaaatccaagcatcattca

SEQ ID NO: 3603016 - DNA, 25 bp, Homo sapien
agcaaaaatagtgcattttcatcaa

SEQ ID NO: 3603017 - DNA, 25 bp, Homo sapien
ctctagccaatccaggagcttgtgt

SEQ ID NO: 3603018 - DNA, 25 bp, Homo sapien
taacattaacagctagctggaatgc

SEQ ID NO: 3603019 - DNA, 25 bp, Homo sapien
taacagctagctggaatgcgtcctc

SEQ ID NO: 3603020 - DNA, 25 bp, Homo sapien
gaatgcgtcctctagccaatccagg

SEQ ID NO: 3603021 - DNA, 25 bp, Homo sapien
ggaacactgaaacccagctactata

SEQ ID NO: 3603022 - DNA, 25 bp, Homo sapien
gaaaacataggaacactgaaaccca

SEQ ID NO: 3603023 - DNA, 25 bp, Homo sapien
tacaggcatcagctattgcgcacag

SEQ ID NO: 3603024 - DNA, 25 bp, Homo sapien
cagcctgaaagcgtttatttttggg

SEQ ID NO: 3603025 - DNA, 25 bp, Homo sapien
cagacgggtctacaaattttctatt

SEQ ID NO: 3603026 - DNA, 25 bp, Homo sapien
gttcctcagatgatcggaatgctcc

SEQ ID NO: 3603027 - DNA, 25 bp, Homo sapien
tgctccctttaatagatccagggct

SEQ ID NO: 3603028 - DNA, 25 bp, Homo sapien
tgatcggaatgctccctttaataga

SEQ ID NO: 3603029 - DNA, 25 bp, Homo sapien
gaacaagtcttcgaaattcaggcaa

SEQ ID NO: 3603030 - DNA, 25 bp, Homo sapien
ttttgtggcagactataactgagaa

SEQ ID NO: 3603031 - DNA, 25 bp, Homo sapien
cgaaattcaggcaattgaaagagag

SEQ ID NO: 3603032 - DNA, 25 bp, Homo sapien
tgtatgacttcgacaattttcaagt

SEQ ID NO: 3603033 - DNA, 25 bp, Homo sapien
cctgcacggtggaactcctgaagaa

SEQ ID NO: 3603034 - DNA, 25 bp, Homo sapien
tgtatgaatatacaactcctcatcc

SEQ ID NO: 3603035 - DNA, 25 bp, Homo sapien
tcctcatcccaacatgctcctcaaa

SEQ ID NO: 3603036 - DNA, 25 bp, Homo sapien
gcctgcacggtggaactcctgaaga

SEQ ID NO: 3603037 - DNA, 25 bp, Homo sapien
gcaggatatctgttctttgacttca

SEQ ID NO: 3603038 - DNA, 25 bp, Homo sapien
tctccatctagctttgatgctacgg

SEQ ID NO: 3603039 - DNA, 25 bp, Homo sapien
gcaggggcccaagcaaattgatctc

SEQ ID NO: 3603040 - DNA, 25 bp, Homo sapien
gatgctacggtcttaactacccttc

SEQ ID NO: 3603041 - DNA, 25 bp, Homo sapien
agcccaactggccaaccatcaactc

SEQ ID NO: 3603042 - DNA, 25 bp, Homo sapien
ctctttgagcgtttagtttctgcag

SEQ ID NO: 3603043 - DNA, 25 bp, Homo sapien
tctccccagacttcacagcgttttc

SEQ ID NO: 3603044 - DNA, 25 bp, Homo sapien
caacatgtattgccaacatttttca

SEQ ID NO: 3603045 - DNA, 25 bp, Homo sapien
gtgctaaagataagagcctccaaat

SEQ ID NO: 3603046 - DNA, 25 bp, Homo sapien
ctgtgctaaagataagagcctccaa

SEQ ID NO: 3603047 - DNA, 25 bp, Homo sapien
gctaaagataagagcctccaaattg

SEQ ID NO: 3603048 - DNA, 25 bp, Homo sapien
gagcctccaaattgcccaggacata

SEQ ID NO: 3603049 - DNA, 25 bp, Homo sapien
cagtagactcaaagcaatggcagcc

SEQ ID NO: 3603050 - DNA, 25 bp, Homo sapien
gactccagtagactcaaagcaatgg

SEQ ID NO: 3603051 - DNA, 25 bp, Homo sapien
tctttgttatcatgagtaaggtcta

SEQ ID NO: 3603052 - DNA, 25 bp, Homo sapien
ttttgggagactccagtagactcaa

SEQ ID NO: 3603053 - DNA, 25 bp, Homo sapien
aaaagtatccatgaaaagcccatag

SEQ ID NO: 3603054 - DNA, 25 bp, Homo sapien
tactagatggagcagtaaaattcac

SEQ ID NO: 3603055 - DNA, 25 bp, Homo sapien
ggcaggcaataagaacttttgggca

SEQ ID NO: 3603056 - DNA, 25 bp, Homo sapien
gcttttattcaccatggttctggaa

SEQ ID NO: 3603057 - DNA, 25 bp, Homo sapien
ttcagatggttctgtagcaacagtg

SEQ ID NO: 3603058 - DNA, 25 bp, Homo sapien
ttgctaatacttccttgttggcagc

SEQ ID NO: 3603059 - DNA, 25 bp, Homo sapien
ttgactgggctccttaactctctca

SEQ ID NO: 3603060 - DNA, 25 bp, Homo sapien
agcactcccctctacttcagatggt

SEQ ID NO: 3603061 - DNA, 25 bp, Homo sapien
aagggtcctgaatgcctgtgatttc

SEQ ID NO: 3603062 - DNA, 25 bp, Homo sapien
ttctctcagttgatttaacagcatt

SEQ ID NO: 3603063 - DNA, 25 bp, Homo sapien
agggtcctgaatgcctgtgatttct

SEQ ID NO: 3603064 - DNA, 25 bp, Homo sapien
aactctggcccatactgttctctcc

SEQ ID NO: 3603065 - DNA, 25 bp, Homo sapien
gaactctggcccatactgttctctc

SEQ ID NO: 3603066 - DNA, 25 bp, Homo sapien
agaactctggcccatactgttctct

SEQ ID NO: 3603067 - DNA, 25 bp, Homo sapien
aagaactctggcccatactgttctc

SEQ ID NO: 3603068 - DNA, 25 bp, Homo sapien
atcatggtcataagctgcatttctc

SEQ ID NO: 3603069 - DNA, 25 bp, Homo sapien
catggtcataagctgcatttctcat

SEQ ID NO: 3603070 - DNA, 25 bp, Homo sapien
tcaatcatggtcataagctgcattt

SEQ ID NO: 3603071 - DNA, 25 bp, Homo sapien
caatcatggtcataagctgcatttc

SEQ ID NO: 3603072 - DNA, 25 bp, Homo sapien
tctgccagctttgtacgacaaatat

SEQ ID NO: 3603073 - DNA, 25 bp, Homo sapien
aactggcacagatttcccgttttct

SEQ ID NO: 3603074 - DNA, 25 bp, Homo sapien
atttgaacaactggcacagatttcc

SEQ ID NO: 3603075 - DNA, 25 bp, Homo sapien
tctgtctgccagctttgtacgacaa

SEQ ID NO: 3603076 - DNA, 25 bp, Homo sapien
cgccggccgcgtcgtcctgctgcag

SEQ ID NO: 3603077 - DNA, 25 bp, Homo sapien
gagccgtggccgtctgccgcgccgg

SEQ ID NO: 3603078 - DNA, 25 bp, Homo sapien
ccggccgcgtcgtcctgctgcagct

SEQ ID NO: 3603079 - DNA, 25 bp, Homo sapien
cgcgccggccgcgtcgtcctgctgc

SEQ ID NO: 3603080 - DNA, 25 bp, Homo sapien
cgcgggtcaccggtctcccgccgca

SEQ ID NO: 3603081 - DNA, 25 bp, Homo sapien
gcgggtcaccggtctcccgccgcag

SEQ ID NO: 3603082 - DNA, 25 bp, Homo sapien
gcgcccagccgcgggtcaccggtct

SEQ ID NO: 3603083 - DNA, 25 bp, Homo sapien
cagccgcgggtcaccggtctcccgc

SEQ ID NO: 3603084 - DNA, 25 bp, Homo sapien
actgggtttgcgaatcctgggagcc

SEQ ID NO: 3603085 - DNA, 25 bp, Homo sapien
tgggagccgcgttcctgagtcttct

SEQ ID NO: 3603086 - DNA, 25 bp, Homo sapien
aactgccgaatgaccgtggaataaa

SEQ ID NO: 3603087 - DNA, 25 bp, Homo sapien
tcatttgtaggactgacctccggct

SEQ ID NO: 3603088 - DNA, 25 bp, Homo sapien
cagggatccgcttcccctggcagat

SEQ ID NO: 3603089 - DNA, 25 bp, Homo sapien
tggagatacagggatccgcttcccc

SEQ ID NO: 3603090 - DNA, 25 bp, Homo sapien
gcttcccctggcagattaactggca

SEQ ID NO: 3603091 - DNA, 25 bp, Homo sapien
ggcagattaactggcagattggcat

SEQ ID NO: 3603092 - DNA, 25 bp, Homo sapien
aaatctctgaacttggagtacactc

SEQ ID NO: 3603093 - DNA, 25 bp, Homo sapien
gagtcaaagggactcatgatctgcc

SEQ ID NO: 3603094 - DNA, 25 bp, Homo sapien
gaacttggagtacactctgagtgag

SEQ ID NO: 3603095 - DNA, 25 bp, Homo sapien
tgatctgcctgcaccggtgtctcat

SEQ ID NO: 3603096 - DNA, 25 bp, Homo sapien
gaaaagaaatatataggcaggccct

SEQ ID NO: 3603097 - DNA, 25 bp, Homo sapien
ctcctgcttgtgtgtactcgtgtgt

SEQ ID NO: 3603098 - DNA, 25 bp, Homo sapien
aacactggtacaatctatagagctt

SEQ ID NO: 3603099 - DNA, 25 bp, Homo sapien
cataattgtatcaacaccacagggc

SEQ ID NO: 3603100 - DNA, 25 bp, Homo sapien
taaatagactccctctgttaggaag

SEQ ID NO: 3603101 - DNA, 25 bp, Homo sapien
cagtccattgactagagcctcccag

SEQ ID NO: 3603102 - DNA, 25 bp, Homo sapien
gcatctgtttctatagtctccggaa

SEQ ID NO: 3603103 - DNA, 25 bp, Homo sapien
aaaaacagggcgagatacacagagg

SEQ ID NO: 3603104 - DNA, 25 bp, Homo sapien
tgctcagcgccaattgtccatgaaa

SEQ ID NO: 3603105 - DNA, 25 bp, Homo sapien
agtgctcagcgccaattgtccatga

SEQ ID NO: 3603106 - DNA, 25 bp, Homo sapien
tcagcgccaattgtccatgaaattc

SEQ ID NO: 3603107 - DNA, 25 bp, Homo sapien
ttagtgctcagcgccaattgtccat

SEQ ID NO: 3603108 - DNA, 25 bp, Homo sapien
ctttacatcagcctctaacaagcag

SEQ ID NO: 3603109 - DNA, 25 bp, Homo sapien
caagcagccctttaagagtgaagcc

SEQ ID NO: 3603110 - DNA, 25 bp, Homo sapien
agagtgaagcctggccgccaaactg

SEQ ID NO: 3603111 - DNA, 25 bp, Homo sapien
gatgacattgcccaggttctttaca

SEQ ID NO: 3603112 - DNA, 25 bp, Homo sapien
ttgtcctgttccctcgatcagactc

SEQ ID NO: 3603113 - DNA, 25 bp, Homo sapien
cttgtcctgttccctcgatcagact

SEQ ID NO: 3603114 - DNA, 25 bp, Homo sapien
tgtcctgttccctcgatcagactcc

SEQ ID NO: 3603115 - DNA, 25 bp, Homo sapien
tcctgttccctcgatcagactccat

SEQ ID NO: 3603116 - DNA, 25 bp, Homo sapien
agttccttacgaaaagcagatgctg

SEQ ID NO: 3603117 - DNA, 25 bp, Homo sapien
tacagcttgcagtaccacgagccaa

SEQ ID NO: 3603118 - DNA, 25 bp, Homo sapien
gaagcttcctgaagttccttacgaa

SEQ ID NO: 3603119 - DNA, 25 bp, Homo sapien
cgccctgccaagacctgattattct

SEQ ID NO: 3603120 - DNA, 25 bp, Homo sapien
gaggcaatttacaccccgccactgg

SEQ ID NO: 3603121 - DNA, 25 bp, Homo sapien
tcatctgaggcaatttacaccccgc

SEQ ID NO: 3603122 - DNA, 25 bp, Homo sapien
atctgaggcaatttacaccccgcca

SEQ ID NO: 3603123 - DNA, 25 bp, Homo sapien
tgaggcaatttacaccccgccactg

SEQ ID NO: 3603124 - DNA, 25 bp, Homo sapien
ctgttgtgccatcaaatccattaat

SEQ ID NO: 3603125 - DNA, 25 bp, Homo sapien
gcaatacatctccatccgaggccat

SEQ ID NO: 3603126 - DNA, 25 bp, Homo sapien
caaatccattaataggacatttctt

SEQ ID NO: 3603127 - DNA, 25 bp, Homo sapien
gggaaacttgattgccgctccatca

SEQ ID NO: 3603128 - DNA, 25 bp, Homo sapien
gggcactccctaagtccactctagt

SEQ ID NO: 3603129 - DNA, 25 bp, Homo sapien
tacacaggcctgataactctgtacg

SEQ ID NO: 3603130 - DNA, 25 bp, Homo sapien
cctcacctgaataagggactttgga

SEQ ID NO: 3603131 - DNA, 25 bp, Homo sapien
caaaaccaactctctactacacagg

SEQ ID NO: 3603132 - DNA, 25 bp, Homo sapien
cattctgaatgggtgagaactgctc

SEQ ID NO: 3603133 - DNA, 25 bp, Homo sapien
tgaatgggtgagaactgctcatagg

SEQ ID NO: 3603134 - DNA, 25 bp, Homo sapien
atgggtgagaactgctcatagggca

SEQ ID NO: 3603135 - DNA, 25 bp, Homo sapien
tctgaatgggtgagaactgctcata

SEQ ID NO: 3603136 - DNA, 25 bp, Homo sapien
tactgggcttcatcattgcagctcc

SEQ ID NO: 3603137 - DNA, 25 bp, Homo sapien
caaaccttcatactttgctttgcgg

SEQ ID NO: 3603138 - DNA, 25 bp, Homo sapien
ttgctttgcggtttattgctccctc

SEQ ID NO: 3603139 - DNA, 25 bp, Homo sapien
gctccctctgcagatatatctttca

SEQ ID NO: 3603140 - DNA, 25 bp, Homo sapien
ttggagcacaaggtgattcacatgg

SEQ ID NO: 3603141 - DNA, 25 bp, Homo sapien
cctctgatcagggctacagcaacaa

SEQ ID NO: 3603142 - DNA, 25 bp, Homo sapien
gtcctctgatcagggctacagcaac

SEQ ID NO: 3603143 - DNA, 25 bp, Homo sapien
ctgtcctctgatcagggctacagca

SEQ ID NO: 3603144 - DNA, 25 bp, Homo sapien
ggcaatctgagcagaggcaccatct

SEQ ID NO: 3603145 - DNA, 25 bp, Homo sapien
ctgggcagaggatgaacgaagctca

SEQ ID NO: 3603146 - DNA, 25 bp, Homo sapien
agctcatgggcagccactgctctgg

SEQ ID NO: 3603147 - DNA, 25 bp, Homo sapien
ctccccgagtcatgcctgggcagag

SEQ ID NO: 3603148 - DNA, 25 bp, Homo sapien
tggtagggtaaatatatggtcactg

SEQ ID NO: 3603149 - DNA, 25 bp, Homo sapien
gggactacacttaactcaactgtct

SEQ ID NO: 3603150 - DNA, 25 bp, Homo sapien
gagagatcttacacagacctcacat

SEQ ID NO: 3603151 - DNA, 25 bp, Homo sapien
gcgcccagcctcagcataataatca

SEQ ID NO: 3603152 - DNA, 25 bp, Homo sapien
taagtatccccatctggattccagg

SEQ ID NO: 3603153 - DNA, 25 bp, Homo sapien
tccccatctggattccaggcacaga

SEQ ID NO: 3603154 - DNA, 25 bp, Homo sapien
gggacagggactctaagtatcccca

SEQ ID NO: 3603155 - DNA, 25 bp, Homo sapien
tgggtcgaagatggttggtgtatgg

SEQ ID NO: 3603156 - DNA, 25 bp, Homo sapien
tcccagaaggcagccacgtggcacc

SEQ ID NO: 3603157 - DNA, 25 bp, Homo sapien
ctcccagaaggcagccacgtggcac

SEQ ID NO: 3603158 - DNA, 25 bp, Homo sapien
ccagaaggcagccacgtggcaccac

SEQ ID NO: 3603159 - DNA, 25 bp, Homo sapien
cccagaaggcagccacgtggcacca

SEQ ID NO: 3603160 - DNA, 25 bp, Homo sapien
cagagctacgcttggctgctgacac

SEQ ID NO: 3603161 - DNA, 25 bp, Homo sapien
gcacctggggcagagctacgcttgg

SEQ ID NO: 3603162 - DNA, 25 bp, Homo sapien
acctggggcagagctacgcttggct

SEQ ID NO: 3603163 - DNA, 25 bp, Homo sapien
ggcagagctacgcttggctgctgac

SEQ ID NO: 3603164 - DNA, 25 bp, Homo sapien
cacaaaggtcaaagtcagtccccac

SEQ ID NO: 3603165 - DNA, 25 bp, Homo sapien
ggacccacaaaggtcaaagtcagtc

SEQ ID NO: 3603166 - DNA, 25 bp, Homo sapien
ccacaaaggtcaaagtcagtcccca

SEQ ID NO: 3603167 - DNA, 25 bp, Homo sapien
tcaggacccacaaaggtcaaagtca

SEQ ID NO: 3603168 - DNA, 25 bp, Homo sapien
cctgggggatctttagacttttgtg

SEQ ID NO: 3603169 - DNA, 25 bp, Homo sapien
ggatctttagacttttgtgagaaag

SEQ ID NO: 3603170 - DNA, 25 bp, Homo sapien
gatgcactggtaactgaatgactgt

SEQ ID NO: 3603171 - DNA, 25 bp, Homo sapien
gagaggtgggtagccacatgcacat

SEQ ID NO: 3603172 - DNA, 25 bp, Homo sapien
tctgacactaccacttaagggctgc

SEQ ID NO: 3603173 - DNA, 25 bp, Homo sapien
ctctgacactaccacttaagggctg

SEQ ID NO: 3603174 - DNA, 25 bp, Homo sapien
ttcctctgacactaccacttaaggg

SEQ ID NO: 3603175 - DNA, 25 bp, Homo sapien
ctgctgttggtcatcaagaaacccc

SEQ ID NO: 3603176 - DNA, 25 bp, Homo sapien
cttgagatcggatgctggagcaggt

SEQ ID NO: 3603177 - DNA, 25 bp, Homo sapien
ttgagatcggatgctggagcaggtg

SEQ ID NO: 3603178 - DNA, 25 bp, Homo sapien
cagccaggaggtccagctgcaggcc

SEQ ID NO: 3603179 - DNA, 25 bp, Homo sapien
aggtccagctgcaggcctcttgcat

SEQ ID NO: 3603180 - DNA, 25 bp, Homo sapien
gaggtccagctgcaggcctcttgca

SEQ ID NO: 3603181 - DNA, 25 bp, Homo sapien
caggaggtccagctgcaggcctctt

SEQ ID NO: 3603182 - DNA, 25 bp, Homo sapien
gcagagccgggagagaaatttgcat

SEQ ID NO: 3603183 - DNA, 25 bp, Homo sapien
tgacctcgcagagccgggagagaaa

SEQ ID NO: 3603184 - DNA, 25 bp, Homo sapien
tcctgctgacctcgcagagccggga

SEQ ID NO: 3603185 - DNA, 25 bp, Homo sapien
gaaatttgcattccaagtcccacag

SEQ ID NO: 3603186 - DNA, 25 bp, Homo sapien
gggagtcttggtccaacttggtcca

SEQ ID NO: 3603187 - DNA, 25 bp, Homo sapien
caacttggtccaactccccactctt

SEQ ID NO: 3603188 - DNA, 25 bp, Homo sapien
tcttggtccaacttggtccaactcc

SEQ ID NO: 3603189 - DNA, 25 bp, Homo sapien
gagtcttggtccaacttggtccaac

SEQ ID NO: 3603190 - DNA, 25 bp, Homo sapien
gccctgtgttgagcaacgcattctg

SEQ ID NO: 3603191 - DNA, 25 bp, Homo sapien
aatgttgccctgtgttgagcaacgc

SEQ ID NO: 3603192 - DNA, 25 bp, Homo sapien
gttgagcaacgcattctgctgccca

SEQ ID NO: 3603193 - DNA, 25 bp, Homo sapien
gccaatgttgccctgtgttgagcaa

SEQ ID NO: 3603194 - DNA, 25 bp, Homo sapien
aacttggggcccttgtggatgtggt

SEQ ID NO: 3603195 - DNA, 25 bp, Homo sapien
ttgaaacttgacctgttgaccaaac

SEQ ID NO: 3603196 - DNA, 25 bp, Homo sapien
acttgacctgttgaccaaacttggg

SEQ ID NO: 3603197 - DNA, 25 bp, Homo sapien
aaacttgacctgttgaccaaacttg

SEQ ID NO: 3603198 - DNA, 25 bp, Homo sapien
cctcctctatgacctgactgtggct

SEQ ID NO: 3603199 - DNA, 25 bp, Homo sapien
tttgggtcacagctaaagcctccat

SEQ ID NO: 3603200 - DNA, 25 bp, Homo sapien
cattccctgctaaagttgaagccca

SEQ ID NO: 3603201 - DNA, 25 bp, Homo sapien
agcctccataaccacaggtgccatg

SEQ ID NO: 3603202 - DNA, 25 bp, Homo sapien
gcaatggaattccatgcaaaggcca

SEQ ID NO: 3603203 - DNA, 25 bp, Homo sapien
aaaggccagctcatctattcctctg

SEQ ID NO: 3603204 - DNA, 25 bp, Homo sapien
ttcctgtatgatctcttagaactgc

SEQ ID NO: 3603205 - DNA, 25 bp, Homo sapien
tattcctctgtctctagcatgatct

SEQ ID NO: 3603206 - DNA, 25 bp, Homo sapien
gggcccagaggttgtccaagcttcc

SEQ ID NO: 3603207 - DNA, 25 bp, Homo sapien
ggacacacttttgaggggcccagag

SEQ ID NO: 3603208 - DNA, 25 bp, Homo sapien
ttctcgggaactgtttccacccaga

SEQ ID NO: 3603209 - DNA, 25 bp, Homo sapien
taccctctgaagtagggcggccagc

SEQ ID NO: 3603210 - DNA, 25 bp, Homo sapien
ggtctctgcacctgatgcgttcggg

SEQ ID NO: 3603211 - DNA, 25 bp, Homo sapien
tctctttgagaaaacgtggtgggct

SEQ ID NO: 3603212 - DNA, 25 bp, Homo sapien
aatcggaggagctgacgagtagatc

SEQ ID NO: 3603213 - DNA, 25 bp, Homo sapien
ttcttgattggacttgatccccacc

SEQ ID NO: 3603214 - DNA, 25 bp, Homo sapien
tactggttgtaactcacaccacagg

SEQ ID NO: 3603215 - DNA, 25 bp, Homo sapien
ggcctgcgcggtctttctaacactc

SEQ ID NO: 3603216 - DNA, 25 bp, Homo sapien
taacactcctgtaagcgaggtttgg

SEQ ID NO: 3603217 - DNA, 25 bp, Homo sapien
caatatcacttccagcgcctctgag

SEQ ID NO: 3603218 - DNA, 25 bp, Homo sapien
gacaggccttgggtctgccagtgct

SEQ ID NO: 3603219 - DNA, 25 bp, Homo sapien
tggtgagaggatagcctttgcggag

SEQ ID NO: 3603220 - DNA, 25 bp, Homo sapien
ggacaggccttgggtctgccagtgc

SEQ ID NO: 3603221 - DNA, 25 bp, Homo sapien
aacctctgcatcccgggttaaggtg

SEQ ID NO: 3603222 - DNA, 25 bp, Homo sapien
cctctgcatcccgggttaaggtgat

SEQ ID NO: 3603223 - DNA, 25 bp, Homo sapien
tctgcatcccgggttaaggtgattc

SEQ ID NO: 3603224 - DNA, 25 bp, Homo sapien
caacctctgcatcccgggttaaggt

SEQ ID NO: 3603225 - DNA, 25 bp, Homo sapien
catcactattggatggagccgctaa

SEQ ID NO: 3603226 - DNA, 25 bp, Homo sapien
gcccactctttcatctcagtgagaa

SEQ ID NO: 3603227 - DNA, 25 bp, Homo sapien
ttcaatggaggaaagttgcccactc

SEQ ID NO: 3603228 - DNA, 25 bp, Homo sapien
cctgctcgttctaggaaaactatta

SEQ ID NO: 3603229 - DNA, 25 bp, Homo sapien
gaaagctcttactctctggcagtta

SEQ ID NO: 3603230 - DNA, 25 bp, Homo sapien
tgctgaaagcccaagtatatatgac

SEQ ID NO: 3603231 - DNA, 25 bp, Homo sapien
gagtcttactaaatgaatacaggtg

SEQ ID NO: 3603232 - DNA, 25 bp, Homo sapien
taagaaatttgctacaactcttccc

SEQ ID NO: 3603233 - DNA, 25 bp, Homo sapien
cataggcgtcaatccgtacagtgct

SEQ ID NO: 3603234 - DNA, 25 bp, Homo sapien
tgagaccgttcttccgcataggcgt

SEQ ID NO: 3603235 - DNA, 25 bp, Homo sapien
gctgtaaaactgctgcctcgggcac

SEQ ID NO: 3603236 - DNA, 25 bp, Homo sapien
tactctttgtcccattgacctgagg

SEQ ID NO: 3603237 - DNA, 25 bp, Homo sapien
gagaagcccaagaggttagtggact

SEQ ID NO: 3603238 - DNA, 25 bp, Homo sapien
tagtaaagagttgtacaggccgggc

SEQ ID NO: 3603239 - DNA, 25 bp, Homo sapien
cctgtaaggtgggtatcagtttcac

SEQ ID NO: 3603240 - DNA, 25 bp, Homo sapien
agtttcacattctcagatgggcgga

SEQ ID NO: 3603241 - DNA, 25 bp, Homo sapien
gctttatggtcaggagaacttgtcc

SEQ ID NO: 3603242 - DNA, 25 bp, Homo sapien
tgaatgttgccgctaaaggtccgcg

SEQ ID NO: 3603243 - DNA, 25 bp, Homo sapien
cgtggccagtgacaagtagccctgt

SEQ ID NO: 3603244 - DNA, 25 bp, Homo sapien
ctcgccgtgcgaggaagttcctatt

SEQ ID NO: 3603245 - DNA, 25 bp, Homo sapien
gaatgctcccaaactggatctgtga

SEQ ID NO: 3603246 - DNA, 25 bp, Homo sapien
tccttgccccgaacacttgaatagt

SEQ ID NO: 3603247 - DNA, 25 bp, Homo sapien
cactgagcccaagattcaccttagg

SEQ ID NO: 3603248 - DNA, 25 bp, Homo sapien
tggactcggctcttttgtgacctaa

SEQ ID NO: 3603249 - DNA, 25 bp, Homo sapien
catggccttgggctacgggtgtttg

SEQ ID NO: 3603250 - DNA, 25 bp, Homo sapien
cctcgctggttccacggatgccttt

SEQ ID NO: 3603251 - DNA, 25 bp, Homo sapien
gtaggccgcccacagcgcagcatgg

SEQ ID NO: 3603252 - DNA, 25 bp, Homo sapien
ggaagctcatgtaggccgcccacag

SEQ ID NO: 3603253 - DNA, 25 bp, Homo sapien
agtgggcgtgggcagtaggactgag

SEQ ID NO: 3603254 - DNA, 25 bp, Homo sapien
gcgtgggcagtaggactgagcagag

SEQ ID NO: 3603255 - DNA, 25 bp, Homo sapien
ggcgtgggcagtaggactgagcaga

SEQ ID NO: 3603256 - DNA, 25 bp, Homo sapien
tgggcgtgggcagtaggactgagca

SEQ ID NO: 3603257 - DNA, 25 bp, Homo sapien
tgaaacaggagacccgagaggctcc

SEQ ID NO: 3603258 - DNA, 25 bp, Homo sapien
ttccagggctggctacaaaggtggg

SEQ ID NO: 3603259 - DNA, 25 bp, Homo sapien
gctggctacaaaggtgggggcaccc

SEQ ID NO: 3603260 - DNA, 25 bp, Homo sapien
gcactgaaggggctttttgtcattg

SEQ ID NO: 3603261 - DNA, 25 bp, Homo sapien
cagaatctctcttggatgactatca

SEQ ID NO: 3603262 - DNA, 25 bp, Homo sapien
gctgtggtttgctgtgcgttttcca

SEQ ID NO: 3603263 - DNA, 25 bp, Homo sapien
gcctctagggaagagtggattggtg

SEQ ID NO: 3603264 - DNA, 25 bp, Homo sapien
tctcttggatgactatcagattcag

SEQ ID NO: 3603265 - DNA, 25 bp, Homo sapien
gactcagcctgcgaaataggaaaca

SEQ ID NO: 3603266 - DNA, 25 bp, Homo sapien
taaatggacatagaccaattcttgc

SEQ ID NO: 3603267 - DNA, 25 bp, Homo sapien
gttccactggaaaaccatctgttaa

SEQ ID NO: 3603268 - DNA, 25 bp, Homo sapien
gaacggtggtgtctcttgtcatcta

SEQ ID NO: 3603269 - DNA, 25 bp, Homo sapien
cttcgtccatgtcggccacaatgtt

SEQ ID NO: 3603270 - DNA, 25 bp, Homo sapien
agacttcgtccatgtcggccacaat

SEQ ID NO: 3603271 - DNA, 25 bp, Homo sapien
ctggagaacatgtccctgagacttc

SEQ ID NO: 3603272 - DNA, 25 bp, Homo sapien
agaacatgtccctgagacttcgtcc

SEQ ID NO: 3603273 - DNA, 25 bp, Homo sapien
tattgttgggacttcaagaggactc

SEQ ID NO: 3603274 - DNA, 25 bp, Homo sapien
tcaagaggactcttagcacatcggc

SEQ ID NO: 3603275 - DNA, 25 bp, Homo sapien
gatgtctattgttgggacttcaaga

SEQ ID NO: 3603276 - DNA, 25 bp, Homo sapien
catcggcaggtgttggttttagtga

SEQ ID NO: 3603277 - DNA, 25 bp, Homo sapien
caccaggagctctctaatgcagtgt

SEQ ID NO: 3603278 - DNA, 25 bp, Homo sapien
gactgctattctcaatgaggcccag

SEQ ID NO: 3603279 - DNA, 25 bp, Homo sapien
cagtgtcgactgctattctcaatga

SEQ ID NO: 3603280 - DNA, 25 bp, Homo sapien
gagctctctaatgcagtgtcgactg

SEQ ID NO: 3603281 - DNA, 25 bp, Homo sapien
tcatcctttaaagccgaatcctctt

SEQ ID NO: 3603282 - DNA, 25 bp, Homo sapien
tctcatcctttaaagccgaatcctc

SEQ ID NO: 3603283 - DNA, 25 bp, Homo sapien
tcagtccaccctggatctcatcctt

SEQ ID NO: 3603284 - DNA, 25 bp, Homo sapien
ggatctcatcctttaaagccgaatc

SEQ ID NO: 3603285 - DNA, 25 bp, Homo sapien
tggctgtgtcgtctttcttattctc

SEQ ID NO: 3603286 - DNA, 25 bp, Homo sapien
caaaaccctggctgtgtcgtctttc

SEQ ID NO: 3603287 - DNA, 25 bp, Homo sapien
atgccaggggttattagaagaagag

SEQ ID NO: 3603288 - DNA, 25 bp, Homo sapien
ctgcgcttatgccaggggttattag

SEQ ID NO: 3603289 - DNA, 25 bp, Homo sapien
ttatgccaggggttattagaagaag

SEQ ID NO: 3603290 - DNA, 25 bp, Homo sapien
gcgcttatgccaggggttattagaa

SEQ ID NO: 3603291 - DNA, 25 bp, Homo sapien
cctctagggcagaagcggtgctggc

SEQ ID NO: 3603292 - DNA, 25 bp, Homo sapien
ccctctagggcagaagcggtgctgg

SEQ ID NO: 3603293 - DNA, 25 bp, Homo sapien
ctctagggcagaagcggtgctggct

SEQ ID NO: 3603294 - DNA, 25 bp, Homo sapien
tcaggtgcccagaatctgtttggcc

SEQ ID NO: 3603295 - DNA, 25 bp, Homo sapien
ccacttggcaccaggtacaattttg

SEQ ID NO: 3603296 - DNA, 25 bp, Homo sapien
tgtttggccactttcatctgggtct

SEQ ID NO: 3603297 - DNA, 25 bp, Homo sapien
ctttgaaaatagtcagcaaaatcct

SEQ ID NO: 3603298 - DNA, 25 bp, Homo sapien
gtcagagacaatctgacgatgacag

SEQ ID NO: 3603299 - DNA, 25 bp, Homo sapien
tcagagacaatctgacgatgacaga

SEQ ID NO: 3603300 - DNA, 25 bp, Homo sapien
cagagacaatctgacgatgacagac

SEQ ID NO: 3603301 - DNA, 25 bp, Homo sapien
ccattgaaggtctccatctgccttt

SEQ ID NO: 3603302 - DNA, 25 bp, Homo sapien
cattgaaggtctccatctgcctttt

SEQ ID NO: 3603303 - DNA, 25 bp, Homo sapien
ggcctgctggcagagtgcccactgg

SEQ ID NO: 3603304 - DNA, 25 bp, Homo sapien
tgggaaaggtgctgcctgactgctc

SEQ ID NO: 3603305 - DNA, 25 bp, Homo sapien
aagggtgcacgggacctgttggcag

SEQ ID NO: 3603306 - DNA, 25 bp, Homo sapien
catgctgtgcatcggtgagaggacc

SEQ ID NO: 3603307 - DNA, 25 bp, Homo sapien
tctgtgcacatctgcatgttggtga

SEQ ID NO: 3603308 - DNA, 25 bp, Homo sapien
actccgcatcatcagcccactctac

SEQ ID NO: 3603309 - DNA, 25 bp, Homo sapien
ggactccgcatcatcagcccactct

SEQ ID NO: 3603310 - DNA, 25 bp, Homo sapien
tcaggactccgcatcatcagcccac

SEQ ID NO: 3603311 - DNA, 25 bp, Homo sapien
aggactccgcatcatcagcccactc

SEQ ID NO: 3603312 - DNA, 25 bp, Homo sapien
ctcgccgctgtcttcaccacctgcc

SEQ ID NO: 3603313 - DNA, 25 bp, Homo sapien
tccgcaggctcctcgccgctgtctt

SEQ ID NO: 3603314 - DNA, 25 bp, Homo sapien
gcctccgcaggctcctcgccgctgt

SEQ ID NO: 3603315 - DNA, 25 bp, Homo sapien
ggctcctcgccgctgtcttcaccac

SEQ ID NO: 3603316 - DNA, 25 bp, Homo sapien
ccagcctcctgaaggcttgcccggc

SEQ ID NO: 3603317 - DNA, 25 bp, Homo sapien
gcctcctgaaggcttgcccggcggg

SEQ ID NO: 3603318 - DNA, 25 bp, Homo sapien
tcctgaaggcttgcccggcggggta

SEQ ID NO: 3603319 - DNA, 25 bp, Homo sapien
agcctcctgaaggcttgcccggcgg

SEQ ID NO: 3603320 - DNA, 25 bp, Homo sapien
tgacatattggcacatcaccacatc

SEQ ID NO: 3603321 - DNA, 25 bp, Homo sapien
gatttgttgacatattggcacatca

SEQ ID NO: 3603322 - DNA, 25 bp, Homo sapien
tgatttgttgacatattggcacatc

SEQ ID NO: 3603323 - DNA, 25 bp, Homo sapien
gaatttatcgctgttgtcaaaactg

SEQ ID NO: 3603324 - DNA, 25 bp, Homo sapien
gaggtgttcaacatatgcgctgttg

SEQ ID NO: 3603325 - DNA, 25 bp, Homo sapien
gcagcatgccgctttagctcagaaa

SEQ ID NO: 3603326 - DNA, 25 bp, Homo sapien
gcgctgttgacataaatttggaatt

SEQ ID NO: 3603327 - DNA, 25 bp, Homo sapien
tgccaccaacccctgtccttttcac

SEQ ID NO: 3603328 - DNA, 25 bp, Homo sapien
caacccctgtccttttcacacaaag

SEQ ID NO: 3603329 - DNA, 25 bp, Homo sapien
ccctgtccttttcacacaaagctcc

SEQ ID NO: 3603330 - DNA, 25 bp, Homo sapien
caccaacccctgtccttttcacaca

SEQ ID NO: 3603331 - DNA, 25 bp, Homo sapien
caggccgttttaattacctgcagct

SEQ ID NO: 3603332 - DNA, 25 bp, Homo sapien
tgaagtgctttctactggggcattt

SEQ ID NO: 3603333 - DNA, 25 bp, Homo sapien
gccttgactggccattgctggaatt

SEQ ID NO: 3603334 - DNA, 25 bp, Homo sapien
cacacagccttgactggccattgct

SEQ ID NO: 3603335 - DNA, 25 bp, Homo sapien
cttgcttacatctgccaggtttttg

SEQ ID NO: 3603336 - DNA, 25 bp, Homo sapien
ccagtagtggtttacatgttctgat

SEQ ID NO: 3603337 - DNA, 25 bp, Homo sapien
tggtggcgctgggtcttcttacaga

SEQ ID NO: 3603338 - DNA, 25 bp, Homo sapien
catttcctgaattgtttggccactg

SEQ ID NO: 3603339 - DNA, 25 bp, Homo sapien
cacaaagggcttagtgaggctagac

SEQ ID NO: 3603340 - DNA, 25 bp, Homo sapien
taatgtttatcgtttgcccaacagg

SEQ ID NO: 3603341 - DNA, 25 bp, Homo sapien
tatgggctgtacagtacactgtgtg

SEQ ID NO: 3603342 - DNA, 25 bp, Homo sapien
taagtagcagtctccctgtactgta

SEQ ID NO: 3603343 - DNA, 25 bp, Homo sapien
tgtagagcatcgaggctttagagcc

SEQ ID NO: 3603344 - DNA, 25 bp, Homo sapien
gatgacggtcttattaggaaatgaa

SEQ ID NO: 3603345 - DNA, 25 bp, Homo sapien
taggaaatgaatggtgccctagagg

SEQ ID NO: 3603346 - DNA, 25 bp, Homo sapien
tagaggatgacggtcttattaggaa

SEQ ID NO: 3603347 - DNA, 25 bp, Homo sapien
agggatggatgctgggacatctgtc

SEQ ID NO: 3603348 - DNA, 25 bp, Homo sapien
caggtgtggcttattagcctcttcc

SEQ ID NO: 3603349 - DNA, 25 bp, Homo sapien
ggagcaggtgtggcttattagcctc

SEQ ID NO: 3603350 - DNA, 25 bp, Homo sapien
gtgtggcttattagcctcttcctgc

SEQ ID NO: 3603351 - DNA, 25 bp, Homo sapien
gagcaggtgtggcttattagcctct

SEQ ID NO: 3603352 - DNA, 25 bp, Homo sapien
gaccacttgggctattactagcgcc

SEQ ID NO: 3603353 - DNA, 25 bp, Homo sapien
tgtgagagctgtgaccacttgggct

SEQ ID NO: 3603354 - DNA, 25 bp, Homo sapien
gccttagacttcaagcgtcttggag

SEQ ID NO: 3603355 - DNA, 25 bp, Homo sapien
cgtcttggagtatgatgcatcagga

SEQ ID NO: 3603356 - DNA, 25 bp, Homo sapien
ccagtgaagctggaccacttgacat

SEQ ID NO: 3603357 - DNA, 25 bp, Homo sapien
atgtccagtgaagctggaccacttg

SEQ ID NO: 3603358 - DNA, 25 bp, Homo sapien
gaagctggaccacttgacatgaggc

SEQ ID NO: 3603359 - DNA, 25 bp, Homo sapien
gctggaccacttgacatgaggctgg

SEQ ID NO: 3603360 - DNA, 25 bp, Homo sapien
ctgcaaggctctttagatccacagc

SEQ ID NO: 3603361 - DNA, 25 bp, Homo sapien
aaacctgcaaggctctttagatcca

SEQ ID NO: 3603362 - DNA, 25 bp, Homo sapien
caattatggtgcagggggtaaggaa

SEQ ID NO: 3603363 - DNA, 25 bp, Homo sapien
ctgaaacctgcaaggctctttagat

SEQ ID NO: 3603364 - DNA, 25 bp, Homo sapien
aggaagccgtgccatagaccccaaa

SEQ ID NO: 3603365 - DNA, 25 bp, Homo sapien
gctgtaagctgtacaagccctgtag

SEQ ID NO: 3603366 - DNA, 25 bp, Homo sapien
ctctgtatgcaagttatctgctgac

SEQ ID NO: 3603367 - DNA, 25 bp, Homo sapien
tatctgctgacaattggctgtaagc

SEQ ID NO: 3603368 - DNA, 25 bp, Homo sapien
aaacaccaagggttgtatgcatttg

SEQ ID NO: 3603369 - DNA, 25 bp, Homo sapien
tatgcatttgagctctcgtgtacgg

SEQ ID NO: 3603370 - DNA, 25 bp, Homo sapien
caccaagggttgtatgcatttgagc

SEQ ID NO: 3603371 - DNA, 25 bp, Homo sapien
gagctctcgtgtacggccacgttta

SEQ ID NO: 3603372 - DNA, 25 bp, Homo sapien
ttctcgatgccagacatggatgctg

SEQ ID NO: 3603373 - DNA, 25 bp, Homo sapien
atgccagacacggatgctgggcccc

SEQ ID NO: 3603374 - DNA, 25 bp, Homo sapien
gattttggacatgtatgctgggacc

SEQ ID NO: 3603375 - DNA, 25 bp, Homo sapien
acctgggaccgggatgccagacacg

SEQ ID NO: 3603376 - DNA, 25 bp, Homo sapien
tggctatttgagaaaggttggctgt

SEQ ID NO: 3603377 - DNA, 25 bp, Homo sapien
gctatttgagaaaggttggctgttc

SEQ ID NO: 3603378 - DNA, 25 bp, Homo sapien
ggctatttgagaaaggttggctgtt

SEQ ID NO: 3603379 - DNA, 25 bp, Homo sapien
ctcagctgagatagaacgtggtgga

SEQ ID NO: 3603380 - DNA, 25 bp, Homo sapien
gacagataaggcttctagaaaggaa

SEQ ID NO: 3603381 - DNA, 25 bp, Homo sapien
caggccacagaaacttgttaggctg

SEQ ID NO: 3603382 - DNA, 25 bp, Homo sapien
gacaccacaaggttttcaagaagta

SEQ ID NO: 3603383 - DNA, 25 bp, Homo sapien
ccacaggcatgaggccagagctctt

SEQ ID NO: 3603384 - DNA, 25 bp, Homo sapien
ttcacatagtctgtcccagtttgac

SEQ ID NO: 3603385 - DNA, 25 bp, Homo sapien
gtgggtcccttttcacatagtctgt

SEQ ID NO: 3603386 - DNA, 25 bp, Homo sapien
tttgtcccagacgaacttctccagc

SEQ ID NO: 3603387 - DNA, 25 bp, Homo sapien
gagtggatgagtgtttgtgttgtaa

SEQ ID NO: 3603388 - DNA, 25 bp, Homo sapien
cttggagcccttctcaactttaaat

SEQ ID NO: 3603389 - DNA, 25 bp, Homo sapien
tacgtgtaagcatcacggtgatccg

SEQ ID NO: 3603390 - DNA, 25 bp, Homo sapien
ggctttgaagcaggactttctgtca

SEQ ID NO: 3603391 - DNA, 25 bp, Homo sapien
cacagcagttacatagagttttggg

SEQ ID NO: 3603392 - DNA, 25 bp, Homo sapien
gcatgtgcaggtcgtagaatacgtg

SEQ ID NO: 3603393 - DNA, 25 bp, Homo sapien
tggcctgaagcctcttcaataggag

SEQ ID NO: 3603394 - DNA, 25 bp, Homo sapien
gcctgaagcctcttcaataggagta

SEQ ID NO: 3603395 - DNA, 25 bp, Homo sapien
gaagcctcttcaataggagtaacaa

SEQ ID NO: 3603396 - DNA, 25 bp, Homo sapien
ctgaagcctcttcaataggagtaac

SEQ ID NO: 3603397 - DNA, 25 bp, Homo sapien
ggaaatggaatgtcatacagatgta

SEQ ID NO: 3603398 - DNA, 25 bp, Homo sapien
tgacggtattgaaaccgtaacattc

SEQ ID NO: 3603399 - DNA, 25 bp, Homo sapien
tacagatgtatagatgccttccatg

SEQ ID NO: 3603400 - DNA, 25 bp, Homo sapien
tgcttttgctcccttgactgacggt

SEQ ID NO: 3603401 - DNA, 25 bp, Homo sapien
gttcggtgggctgatttggccttca

SEQ ID NO: 3603402 - DNA, 25 bp, Homo sapien
ttcattgcccacatagctagccttc

SEQ ID NO: 3603403 - DNA, 25 bp, Homo sapien
tgaggaacgccaggagtacagtagt

SEQ ID NO: 3603404 - DNA, 25 bp, Homo sapien
cagctgattggagtttccagggttc

SEQ ID NO: 3603405 - DNA, 25 bp, Homo sapien
ggaggatgctattttgcaactatag

SEQ ID NO: 3603406 - DNA, 25 bp, Homo sapien
tgaaggccttaaaattgtgtgttgg

SEQ ID NO: 3603407 - DNA, 25 bp, Homo sapien
attgggaggacggtgtcactagact

SEQ ID NO: 3603408 - DNA, 25 bp, Homo sapien
cactagactgtggattagggatggt

SEQ ID NO: 3603409 - DNA, 25 bp, Homo sapien
aactattccatagaactagctggcc

SEQ ID NO: 3603410 - DNA, 25 bp, Homo sapien
gggacacctctgaacttactgtacc

SEQ ID NO: 3603411 - DNA, 25 bp, Homo sapien
cgtaatctggtgttgcagcaatgga

SEQ ID NO: 3603412 - DNA, 25 bp, Homo sapien
tggatggtactaaatcagcacctgg

SEQ ID NO: 3603413 - DNA, 25 bp, Homo sapien
ccttcgtttcgtgtagattgacgcg

SEQ ID NO: 3603414 - DNA, 25 bp, Homo sapien
cgagttgtgcttgccgctccttatc

SEQ ID NO: 3603415 - DNA, 25 bp, Homo sapien
tcactcgaagttgtgcagtcctggt

SEQ ID NO: 3603416 - DNA, 25 bp, Homo sapien
tagttccgaagcagtttcactcgaa

SEQ ID NO: 3603417 - DNA, 25 bp, Homo sapien
acaagaagcttccacacaatcaaag

SEQ ID NO: 3603418 - DNA, 25 bp, Homo sapien
tgcctgcgtctgtagcagccaagag

SEQ ID NO: 3603419 - DNA, 25 bp, Homo sapien
gtccctgcctgcgtctgtagcagcc

SEQ ID NO: 3603420 - DNA, 25 bp, Homo sapien
tcaacaagaagcttccacacaatca

SEQ ID NO: 3603421 - DNA, 25 bp, Homo sapien
gtagggtaaacccacaccgagcatc

SEQ ID NO: 3603422 - DNA, 25 bp, Homo sapien
agggagccatcaccccacgcgccac

SEQ ID NO: 3603423 - DNA, 25 bp, Homo sapien
gtcgcagggagccatcaccccacgc

SEQ ID NO: 3603424 - DNA, 25 bp, Homo sapien
aacccacaccgagcatcaggcctgg

SEQ ID NO: 3603425 - DNA, 25 bp, Homo sapien
accttaagcgggagctccccgcatg

SEQ ID NO: 3603426 - DNA, 25 bp, Homo sapien
gggaggatgccgccgtggggctgca

SEQ ID NO: 3603427 - DNA, 25 bp, Homo sapien
ctccagggaccttaagcgggagctc

SEQ ID NO: 3603428 - DNA, 25 bp, Homo sapien
agaggggacaggcaccgaggcaggg

SEQ ID NO: 3603429 - DNA, 25 bp, Homo sapien
cagtgtggtcttcagcatagagtga

SEQ ID NO: 3603430 - DNA, 25 bp, Homo sapien
tcttcagcatagagtgagcttctag

SEQ ID NO: 3603431 - DNA, 25 bp, Homo sapien
cccctccacgccgaccagtgtggtc

SEQ ID NO: 3603432 - DNA, 25 bp, Homo sapien
cagcatagagtgagcttctagtgac

SEQ ID NO: 3603433 - DNA, 25 bp, Homo sapien
tgtgttccctactttatgaattacc

SEQ ID NO: 3603434 - DNA, 25 bp, Homo sapien
caactcctcgtttctcatcatgtca

SEQ ID NO: 3603435 - DNA, 25 bp, Homo sapien
tccaaatgcaactcctcgtttctca

SEQ ID NO: 3603436 - DNA, 25 bp, Homo sapien
tcaccctcctctaaacctgttcttc

SEQ ID NO: 3603437 - DNA, 25 bp, Homo sapien
ctgccactgtaccctacagataaaa

SEQ ID NO: 3603438 - DNA, 25 bp, Homo sapien
aaatgaagagtagcagcagaaccca

SEQ ID NO: 3603439 - DNA, 25 bp, Homo sapien
cactgtaccctacagataaaacaaa

SEQ ID NO: 3603440 - DNA, 25 bp, Homo sapien
cagcagaacccaggcgtgaatgagc

SEQ ID NO: 3603441 - DNA, 25 bp, Homo sapien
caggcaccaggaaagttctccatag

SEQ ID NO: 3603442 - DNA, 25 bp, Homo sapien
tcaggcaccaggaaagttctccata

SEQ ID NO: 3603443 - DNA, 25 bp, Homo sapien
cttgcgtaatttcaggcaccaggaa

SEQ ID NO: 3603444 - DNA, 25 bp, Homo sapien
gcaccaggaaagttctccatagcat

SEQ ID NO: 3603445 - DNA, 25 bp, Homo sapien
gtgtgtctctgcgatgtgccctttg

SEQ ID NO: 3603446 - DNA, 25 bp, Homo sapien
gaatgtgtgtctctgcgatgtgccc

SEQ ID NO: 3603447 - DNA, 25 bp, Homo sapien
atgtgtgtctctgcgatgtgccctt

SEQ ID NO: 3603448 - DNA, 25 bp, Homo sapien
tgtgtctctgcgatgtgccctttgg

SEQ ID NO: 3603449 - DNA, 25 bp, Homo sapien
tcctgaccactgaatgagggaacca

SEQ ID NO: 3603450 - DNA, 25 bp, Homo sapien
gcagcctgcactcctgttctcccag

SEQ ID NO: 3603451 - DNA, 25 bp, Homo sapien
tgaccaagacctgtttttggattat

SEQ ID NO: 3603452 - DNA, 25 bp, Homo sapien
ggcctgctcatttgccggcagcctg

SEQ ID NO: 3603453 - DNA, 25 bp, Homo sapien
ccccaacatgtcttttctcccatca

SEQ ID NO: 3603454 - DNA, 25 bp, Homo sapien
gcctggccccaacatgtcttttctc

SEQ ID NO: 3603455 - DNA, 25 bp, Homo sapien
cctggccccaacatgtcttttctcc

SEQ ID NO: 3603456 - DNA, 25 bp, Homo sapien
ggccccaacatgtcttttctcccat

SEQ ID NO: 3603457 - DNA, 25 bp, Homo sapien
ctggtctacaatccctggcggctgg

SEQ ID NO: 3603458 - DNA, 25 bp, Homo sapien
ccttttcttgggagattcatggcaa

SEQ ID NO: 3603459 - DNA, 25 bp, Homo sapien
aattttcctgacgagctcaagtgct

SEQ ID NO: 3603460 - DNA, 25 bp, Homo sapien
caagcattgcatacagctcatggcc

SEQ ID NO: 3603461 - DNA, 25 bp, Homo sapien
aatcctttaaggagatcgtcgtcac

SEQ ID NO: 3603462 - DNA, 25 bp, Homo sapien
ccagtggtgacctatgtgtgtgatc

SEQ ID NO: 3603463 - DNA, 25 bp, Homo sapien
cagaggcctttgactggtccccagt

SEQ ID NO: 3603464 - DNA, 25 bp, Homo sapien
actgactactcagaccagaacctgc

SEQ ID NO: 3603465 - DNA, 25 bp, Homo sapien
tgcactccttggtatgtaacccaga

SEQ ID NO: 3603466 - DNA, 25 bp, Homo sapien
ccaaaaagctgtggtatgtctacac

SEQ ID NO: 3603467 - DNA, 25 bp, Homo sapien
cagaaagctgcatgtattacactcc

SEQ ID NO: 3603468 - DNA, 25 bp, Homo sapien
tacacacctattagatctaggccag

SEQ ID NO: 3603469 - DNA, 25 bp, Homo sapien
taacgtagattacagactttgggtg

SEQ ID NO: 3603470 - DNA, 25 bp, Homo sapien
tctgcttgattttgcggtgaaccta

SEQ ID NO: 3603471 - DNA, 25 bp, Homo sapien
caaatccatggaatgtacaatacca

SEQ ID NO: 3603472 - DNA, 25 bp, Homo sapien
tgttttcccttggtgaatgcagtaa

SEQ ID NO: 3603473 - DNA, 25 bp, Homo sapien
taacttacagtttggcagatggatc

SEQ ID NO: 3603474 - DNA, 25 bp, Homo sapien
gagtgccctgttcacagctgtggga

SEQ ID NO: 3603475 - DNA, 25 bp, Homo sapien
aagtccacggtagaagcaggctgct

SEQ ID NO: 3603476 - DNA, 25 bp, Homo sapien
tattctgtatgggtcaagtagccgc

SEQ ID NO: 3603477 - DNA, 25 bp, Homo sapien
gaggctggctacacaatcgaatggt

SEQ ID NO: 3603478 - DNA, 25 bp, Homo sapien
caccatggccaacaacgaaggactt

SEQ ID NO: 3603479 - DNA, 25 bp, Homo sapien
cctggtgatcatggatgcgctcaag

SEQ ID NO: 3603480 - DNA, 25 bp, Homo sapien
ttttctccctggtggcgaggaagct

SEQ ID NO: 3603481 - DNA, 25 bp, Homo sapien
tcaatagtttcagggagggaacaca

SEQ ID NO: 3603482 - DNA, 25 bp, Homo sapien
gagcatggctcatttgaagacacga

SEQ ID NO: 3603483 - DNA, 25 bp, Homo sapien
taattccaagcacaatgaaaggccc

SEQ ID NO: 3603484 - DNA, 25 bp, Homo sapien
tccatgtggctggtctacagaggct

SEQ ID NO: 3603485 - DNA, 25 bp, Homo sapien
ttttcagatgctatgatgtggtaga

SEQ ID NO: 3603486 - DNA, 25 bp, Homo sapien
gatgctatgatgtggtagagctctg

SEQ ID NO: 3603487 - DNA, 25 bp, Homo sapien
gcagtttttcagatgctatgatgtg

SEQ ID NO: 3603488 - DNA, 25 bp, Homo sapien
cagatgctatgatgtggtagagctc

SEQ ID NO: 3603489 - DNA, 25 bp, Homo sapien
tctatggctattttaggaaccccac

SEQ ID NO: 3603490 - DNA, 25 bp, Homo sapien
ccttgtctatggctattttaggaac

SEQ ID NO: 3603491 - DNA, 25 bp, Homo sapien
tgtctatggctattttaggaacccc

SEQ ID NO: 3603492 - DNA, 25 bp, Homo sapien
ctagaactccttgtctatggctatt

SEQ ID NO: 3603493 - DNA, 25 bp, Homo sapien
gttgagcaggtggtggcacaggaac

SEQ ID NO: 3603494 - DNA, 25 bp, Homo sapien
cagcagttgagcaggtggtggcaca

SEQ ID NO: 3603495 - DNA, 25 bp, Homo sapien
ggcacaggaactgggggtttagcat

SEQ ID NO: 3603496 - DNA, 25 bp, Homo sapien
caggcagcagttgagcaggtggtgg

SEQ ID NO: 3603497 - DNA, 25 bp, Homo sapien
cagcaccactaactaagaaagaggc

SEQ ID NO: 3603498 - DNA, 25 bp, Homo sapien
tgttcatatgaactataagtagctt

SEQ ID NO: 3603499 - DNA, 25 bp, Homo sapien
gaaaccgacgcacttgttcatatga

SEQ ID NO: 3603500 - DNA, 25 bp, Homo sapien
ccaaaccagtagaaaccgacgcact

SEQ ID NO: 3603501 - DNA, 25 bp, Homo sapien
catatgaactataagtagcttgttc

SEQ ID NO: 3603502 - DNA, 25 bp, Homo sapien
tggcctggatgcaaaacagaaccca

SEQ ID NO: 3603503 - DNA, 25 bp, Homo sapien
aaacatgtccatgtactggctccag

SEQ ID NO: 3603504 - DNA, 25 bp, Homo sapien
ccagaaatgagagcggtcaagctgt

SEQ ID NO: 3603505 - DNA, 25 bp, Homo sapien
cagagtgactgggaaactgacagct

SEQ ID NO: 3603506 - DNA, 25 bp, Homo sapien
taagtactgtgcttcgggtagtcca

SEQ ID NO: 3603507 - DNA, 25 bp, Homo sapien
tcatggagcgtaggcacaagtgacc

SEQ ID NO: 3603508 - DNA, 25 bp, Homo sapien
tgagaagcgaagtcagtcacgcctc

SEQ ID NO: 3603509 - DNA, 25 bp, Homo sapien
ggtggtgtaccacaactcctggagg

SEQ ID NO: 3603510 - DNA, 25 bp, Homo sapien
ggtacttgaagtacattggcctgta

SEQ ID NO: 3603511 - DNA, 25 bp, Homo sapien
ggcctgtaataaataccacctcaaa

SEQ ID NO: 3603512 - DNA, 25 bp, Homo sapien
agccccactcctagagccatttctg

SEQ ID NO: 3603513 - DNA, 25 bp, Homo sapien
ttcatagatgcccaatacatggtac

SEQ ID NO: 3603514 - DNA, 25 bp, Homo sapien
ggtagatgatagatacggtgtaact

SEQ ID NO: 3603515 - DNA, 25 bp, Homo sapien
gatagatacggtgtaactgaatcaa

SEQ ID NO: 3603516 - DNA, 25 bp, Homo sapien
tacggtgtaactgaatcaaatcctt

SEQ ID NO: 3603517 - DNA, 25 bp, Homo sapien
ttctgaagagtggtagatgatagat

SEQ ID NO: 3603518 - DNA, 25 bp, Homo sapien
tgtaagcgtgacatgcactgctggc

SEQ ID NO: 3603519 - DNA, 25 bp, Homo sapien
agaagatgagactaagttctctcca

SEQ ID NO: 3603520 - DNA, 25 bp, Homo sapien
accaagagatatcataagctttcct

SEQ ID NO: 3603521 - DNA, 25 bp, Homo sapien
tcttaataccagaccaagagatatc

SEQ ID NO: 3603522 - DNA, 25 bp, Homo sapien
ctaggaattatctttcttaagatgc

SEQ ID NO: 3603523 - DNA, 25 bp, Homo sapien
cctaggaattatctttcttaagatg

SEQ ID NO: 3603524 - DNA, 25 bp, Homo sapien
ttcctaggaattatctttcttaaga

SEQ ID NO: 3603525 - DNA, 25 bp, Homo sapien
tcctaggaattatctttcttaagat

SEQ ID NO: 3603526 - DNA, 25 bp, Homo sapien
tatttcattcatataggtaagatca

SEQ ID NO: 3603527 - DNA, 25 bp, Homo sapien
tcattcatataggtaagatcatata

SEQ ID NO: 3603528 - DNA, 25 bp, Homo sapien
tttcattcatataggtaagatcata

SEQ ID NO: 3603529 - DNA, 25 bp, Homo sapien
cattcatataggtaagatcatataa

SEQ ID NO: 3603530 - DNA, 25 bp, Homo sapien
caaaaatatttgaatggctgcatgt

SEQ ID NO: 3603531 - DNA, 25 bp, Homo sapien
cttaaatcaggggttgcagactcag

SEQ ID NO: 3603532 - DNA, 25 bp, Homo sapien
gcagactcagatagcttcagggtcc

SEQ ID NO: 3603533 - DNA, 25 bp, Homo sapien
tgcatgttgaacaccatcttaaatc

SEQ ID NO: 3603534 - DNA, 25 bp, Homo sapien
caaaatgaaagtagagtacccctct

SEQ ID NO: 3603535 - DNA, 25 bp, Homo sapien
gatgaggaacctcatttgaaaggct

SEQ ID NO: 3603536 - DNA, 25 bp, Homo sapien
attagttatatattatccttgggaa

SEQ ID NO: 3603537 - DNA, 25 bp, Homo sapien
ttatctccttcacgctgtttttcag

SEQ ID NO: 3603538 - DNA, 25 bp, Homo sapien
tattctaagtgcttaccgcaggcag

SEQ ID NO: 3603539 - DNA, 25 bp, Homo sapien
tagcaggtacagagtaagttctcaa

SEQ ID NO: 3603540 - DNA, 25 bp, Homo sapien
ctataaacaatagaagtcctagcac

SEQ ID NO: 3603541 - DNA, 25 bp, Homo sapien
tcctatgatctggtttctagaattc

SEQ ID NO: 3603542 - DNA, 25 bp, Homo sapien
ccaggatagtgcagtattatgatga

SEQ ID NO: 3603543 - DNA, 25 bp, Homo sapien
caaataaggagtgatcagccaggta

SEQ ID NO: 3603544 - DNA, 25 bp, Homo sapien
ggaagtctaaacagacaagcgtctg

SEQ ID NO: 3603545 - DNA, 25 bp, Homo sapien
gaaaaagctagtctacctgcttata

SEQ ID NO: 3603546 - DNA, 25 bp, Homo sapien
cgattgctgctacaccaagaaagga

SEQ ID NO: 3603547 - DNA, 25 bp, Homo sapien
tgttcacaagctaagtgagggccag

SEQ ID NO: 3603548 - DNA, 25 bp, Homo sapien
tgtacctaataaacagcccagcgtg

SEQ ID NO: 3603549 - DNA, 25 bp, Homo sapien
tacagtgtttactacagggatcccc

SEQ ID NO: 3603550 - DNA, 25 bp, Homo sapien
ttaaactgaaattcgagctgcgata

SEQ ID NO: 3603551 - DNA, 25 bp, Homo sapien
aaactgaaattcgagctgcgataac

SEQ ID NO: 3603552 - DNA, 25 bp, Homo sapien
taaactgaaattcgagctgcgataa

SEQ ID NO: 3603553 - DNA, 25 bp, Homo sapien
tcctagatgaatcgcttcaggcctg

SEQ ID NO: 3603554 - DNA, 25 bp, Homo sapien
ggcctggaaacgaggaagccgtctc

SEQ ID NO: 3603555 - DNA, 25 bp, Homo sapien
ctctgatcaccggaggacagggaca

SEQ ID NO: 3603556 - DNA, 25 bp, Homo sapien
ttcttaggagatcgggttcaacggc

SEQ ID NO: 3603557 - DNA, 25 bp, Homo sapien
ggaacccataactgagcctgcggaa

SEQ ID NO: 3603558 - DNA, 25 bp, Homo sapien
gacccgatgactaagcacacaggaa

SEQ ID NO: 3603559 - DNA, 25 bp, Homo sapien
ccagatcagtccagcctgtgtcgga

SEQ ID NO: 3603560 - DNA, 25 bp, Homo sapien
agaagccgccttgcctttaacgagg

SEQ ID NO: 3603561 - DNA, 25 bp, Homo sapien
tcccaggtccggaaatccacagtgc

SEQ ID NO: 3603562 - DNA, 25 bp, Homo sapien
gggatgcttcatctatattgacagc

SEQ ID NO: 3603563 - DNA, 25 bp, Homo sapien
tgtcacatctgtattggcactcaaa

SEQ ID NO: 3603564 - DNA, 25 bp, Homo sapien
tcagtgagctgaaagtaaccaaact

SEQ ID NO: 3603565 - DNA, 25 bp, Homo sapien
cagtctaacttacccttggccgaag

SEQ ID NO: 3603566 - DNA, 25 bp, Homo sapien
actgacagtttaatggacccgtagg

SEQ ID NO: 3603567 - DNA, 25 bp, Homo sapien
gacccgtaggttgatatgtaccctg

SEQ ID NO: 3603568 - DNA, 25 bp, Homo sapien
tactgtcagcagtattcagagccag

SEQ ID NO: 3603569 - DNA, 25 bp, Homo sapien
taggattagagttttcagtggtgtg

SEQ ID NO: 3603570 - DNA, 25 bp, Homo sapien
tttgctgacccttgatagatatctg

SEQ ID NO: 3603571 - DNA, 25 bp, Homo sapien
ggctttgagtgcagtcatatgttct

SEQ ID NO: 3603572 - DNA, 25 bp, Homo sapien
aatgaactcataatcaagggttgac

SEQ ID NO: 3603573 - DNA, 25 bp, Homo sapien
ctgccatcttggggagaagaatgaa

SEQ ID NO: 3603574 - DNA, 25 bp, Homo sapien
cccggcctgaaaggaggcttttctg

SEQ ID NO: 3603575 - DNA, 25 bp, Homo sapien
agaagaatgaactggagaaagggca

SEQ ID NO: 3603576 - DNA, 25 bp, Homo sapien
ccatcttggggagaagaatgaactg

SEQ ID NO: 3603577 - DNA, 25 bp, Homo sapien
tggccctcaggaaatccctgccata

SEQ ID NO: 3603578 - DNA, 25 bp, Homo sapien
ctgccatattgcttcctatgtccca

SEQ ID NO: 3603579 - DNA, 25 bp, Homo sapien
ttgaagttgatcacctttcctgaag

SEQ ID NO: 3603580 - DNA, 25 bp, Homo sapien
ttaggtgccattgttgaagttgatc

SEQ ID NO: 3603581 - DNA, 25 bp, Homo sapien
ctgtagtgcgtgtctcgagggttga

SEQ ID NO: 3603582 - DNA, 25 bp, Homo sapien
ctcctgtagtgcgtgtctcgagggt

SEQ ID NO: 3603583 - DNA, 25 bp, Homo sapien
gtagtgcgtgtctcgagggttgagg

SEQ ID NO: 3603584 - DNA, 25 bp, Homo sapien
tcctgtagtgcgtgtctcgagggtt

SEQ ID NO: 3603585 - DNA, 25 bp, Homo sapien
cacagtggtgcttcatggtaggaga

SEQ ID NO: 3603586 - DNA, 25 bp, Homo sapien
ggtgcttcatggtaggagagaatat

SEQ ID NO: 3603587 - DNA, 25 bp, Homo sapien
cctttattcttagcttagtctctgc

SEQ ID NO: 3603588 - DNA, 25 bp, Homo sapien
taggagagaatattaggaaggtatc

SEQ ID NO: 3603589 - DNA, 25 bp, Homo sapien
ctgtgagcccactgaattcgtatta

SEQ ID NO: 3603590 - DNA, 25 bp, Homo sapien
acagggacaagatttccagatttcc

SEQ ID NO: 3603591 - DNA, 25 bp, Homo sapien
gaacaaaaccagaatgtctaggcat

SEQ ID NO: 3603592 - DNA, 25 bp, Homo sapien
cacagccacacacgttttatgagcc

SEQ ID NO: 3603593 - DNA, 25 bp, Homo sapien
catattcctcactgcacaattacct

SEQ ID NO: 3603594 - DNA, 25 bp, Homo sapien
tattcctcactgcacaattaccttt

SEQ ID NO: 3603595 - DNA, 25 bp, Homo sapien
aacatattcctcactgcacaattac

SEQ ID NO: 3603596 - DNA, 25 bp, Homo sapien
acatattcctcactgcacaattacc

SEQ ID NO: 3603597 - DNA, 25 bp, Homo sapien
ccaggcatggtatagtcattcttca

SEQ ID NO: 3603598 - DNA, 25 bp, Homo sapien
taatattttaaacgagcatcagaac

SEQ ID NO: 3603599 - DNA, 25 bp, Homo sapien
caatacatgtgggattatgtgcaga

SEQ ID NO: 3603600 - DNA, 25 bp, Homo sapien
gattggttcctagtgattttgtata

SEQ ID NO: 3603601 - DNA, 25 bp, Homo sapien
acatgttaatctgatttccaatcac

SEQ ID NO: 3603602 - DNA, 25 bp, Homo sapien
aacatgttaatctgatttccaatca

SEQ ID NO: 3603603 - DNA, 25 bp, Homo sapien
gaacatgttaatctgatttccaatc

SEQ ID NO: 3603604 - DNA, 25 bp, Homo sapien
caatagccttttgaacaccgatggc

SEQ ID NO: 3603605 - DNA, 25 bp, Homo sapien
gatagccggtcaatttcccgaggga

SEQ ID NO: 3603606 - DNA, 25 bp, Homo sapien
taaagtgctggccaaaggtgatgac

SEQ ID NO: 3603607 - DNA, 25 bp, Homo sapien
gatggccctgcgaataaaaatgtca

SEQ ID NO: 3603608 - DNA, 25 bp, Homo sapien
gacgaagggatagctatgttttttc

SEQ ID NO: 3603609 - DNA, 25 bp, Homo sapien
cagagagtagagctggaaagtgacg

SEQ ID NO: 3603610 - DNA, 25 bp, Homo sapien
agattccagtttcatgaagatcaaa

SEQ ID NO: 3603611 - DNA, 25 bp, Homo sapien
ctgcatccagaagcaaatgtttctt

SEQ ID NO: 3603612 - DNA, 25 bp, Homo sapien
gagtttgcctttcaaacagccattt

SEQ ID NO: 3603613 - DNA, 25 bp, Homo sapien
tgacgtagtgtagagtctcccagga

SEQ ID NO: 3603614 - DNA, 25 bp, Homo sapien
gaagtagtagatccactgacgtagt

SEQ ID NO: 3603615 - DNA, 25 bp, Homo sapien
tctcccaggaggtaaatgagtttgc

SEQ ID NO: 3603616 - DNA, 25 bp, Homo sapien
tctaactgaacctggttgcaaaatg

SEQ ID NO: 3603617 - DNA, 25 bp, Homo sapien
ggaggcttcattccaacttggcatg

SEQ ID NO: 3603618 - DNA, 25 bp, Homo sapien
attgtgtctaactgaacctggttgc

SEQ ID NO: 3603619 - DNA, 25 bp, Homo sapien
cctggttgcaaaatgttgttatcca

SEQ ID NO: 3603620 - DNA, 25 bp, Homo sapien
tttattttatattccttagtgacat

SEQ ID NO: 3603621 - DNA, 25 bp, Homo sapien
attttatattccttagtgacatttt

SEQ ID NO: 3603622 - DNA, 25 bp, Homo sapien
ttttattttatattccttagtgaca

SEQ ID NO: 3603623 - DNA, 25 bp, Homo sapien
tattttatattccttagtgacattt

SEQ ID NO: 3603624 - DNA, 25 bp, Homo sapien
tcagcatgacacttgagaaccttca

SEQ ID NO: 3603625 - DNA, 25 bp, Homo sapien
tttcaagtctactgaataatcactg

SEQ ID NO: 3603626 - DNA, 25 bp, Homo sapien
ttccacaatatgctcaccccattgg

SEQ ID NO: 3603627 - DNA, 25 bp, Homo sapien
taggcttatcctctgctgcattcca

SEQ ID NO: 3603628 - DNA, 25 bp, Homo sapien
gacatcaatgtgtttacgatccttc

SEQ ID NO: 3603629 - DNA, 25 bp, Homo sapien
caatgtgtttacgatccttcatcat

SEQ ID NO: 3603630 - DNA, 25 bp, Homo sapien
gtttacgatccttcatcatttcaac

SEQ ID NO: 3603631 - DNA, 25 bp, Homo sapien
gtgtttacgatccttcatcatttca

SEQ ID NO: 3603632 - DNA, 25 bp, Homo sapien
tttcctgctatagatgtctctccag

SEQ ID NO: 3603633 - DNA, 25 bp, Homo sapien
cctgctatagatgtctctccaggtg

SEQ ID NO: 3603634 - DNA, 25 bp, Homo sapien
tcctgctatagatgtctctccaggt

SEQ ID NO: 3603635 - DNA, 25 bp, Homo sapien
ctgctatagatgtctctccaggtgc

SEQ ID NO: 3603636 - DNA, 25 bp, Homo sapien
gaagtcttagggcttggctcacagt

SEQ ID NO: 3603637 - DNA, 25 bp, Homo sapien
ccagtttgtggaggcctgttgaacc

SEQ ID NO: 3603638 - DNA, 25 bp, Homo sapien
gatcatgggatcaactggagaaaac

SEQ ID NO: 3603639 - DNA, 25 bp, Homo sapien
ggtttgcaggaatcactaggtcaca

SEQ ID NO: 3603640 - DNA, 25 bp, Homo sapien
ccttgtctgtaagataagatacctc

SEQ ID NO: 3603641 - DNA, 25 bp, Homo sapien
gaggcttcatacaatagaaggcttc

SEQ ID NO: 3603642 - DNA, 25 bp, Homo sapien
tattccgggtggtcatgtaggtcag

SEQ ID NO: 3603643 - DNA, 25 bp, Homo sapien
gatacctctctattccgggtggtca

SEQ ID NO: 3603644 - DNA, 25 bp, Homo sapien
gacatgagaggtgccattaacaaat

SEQ ID NO: 3603645 - DNA, 25 bp, Homo sapien
gagaggtgccattaacaaatttgcc

SEQ ID NO: 3603646 - DNA, 25 bp, Homo sapien
tgaagacatgagaggtgccattaac

SEQ ID NO: 3603647 - DNA, 25 bp, Homo sapien
tcagtgaagacatgagaggtgccat

SEQ ID NO: 3603648 - DNA, 25 bp, Homo sapien
agctggtctcccctgcagtatgtat

SEQ ID NO: 3603649 - DNA, 25 bp, Homo sapien
gctggtctcccctgcagtatgtatc

SEQ ID NO: 3603650 - DNA, 25 bp, Homo sapien
ctggtctcccctgcagtatgtatct

SEQ ID NO: 3603651 - DNA, 25 bp, Homo sapien
cagctggtctcccctgcagtatgta

SEQ ID NO: 3603652 - DNA, 25 bp, Homo sapien
atgatttcctttattctgagttcag

SEQ ID NO: 3603653 - DNA, 25 bp, Homo sapien
ctgctgatctagtttctctatgatt

SEQ ID NO: 3603654 - DNA, 25 bp, Homo sapien
gatttcctttattctgagttcagtc

SEQ ID NO: 3603655 - DNA, 25 bp, Homo sapien
gctgatctagtttctctatgatttc

SEQ ID NO: 3603656 - DNA, 25 bp, Homo sapien
agggaataaggactttgcggagttg

SEQ ID NO: 3603657 - DNA, 25 bp, Homo sapien
tggataagtttagagcagaccaaag

SEQ ID NO: 3603658 - DNA, 25 bp, Homo sapien
gcattgtatttgaggacatgacgaa

SEQ ID NO: 3603659 - DNA, 25 bp, Homo sapien
catccaggttactactgaaaaagag

SEQ ID NO: 3603660 - DNA, 25 bp, Homo sapien
cagcagcgttttttgaagcattgta

SEQ ID NO: 3603661 - DNA, 25 bp, Homo sapien
aaaaagagatcaagatcagcagcgt

SEQ ID NO: 3603662 - DNA, 25 bp, Homo sapien
tcgaggtttcactcaggattgttgc

SEQ ID NO: 3603663 - DNA, 25 bp, Homo sapien
ctattggatacttcttgtcgaggtt

SEQ ID NO: 3603664 - DNA, 25 bp, Homo sapien
ttcactcaggattgttgcttcctcc

SEQ ID NO: 3603665 - DNA, 25 bp, Homo sapien
tacttcttgtcgaggtttcactcag

SEQ ID NO: 3603666 - DNA, 25 bp, Homo sapien
agtctcaattgtgtgaaaggttttg

SEQ ID NO: 3603667 - DNA, 25 bp, Homo sapien
ctggatgcgcagagcaatttagata

SEQ ID NO: 3603668 - DNA, 25 bp, Homo sapien
tgttttgaatctggatgcgcagagc

SEQ ID NO: 3603669 - DNA, 25 bp, Homo sapien
gagtggtttcgttttgtggaatcca

SEQ ID NO: 3603670 - DNA, 25 bp, Homo sapien
ataggtgtcaggtagcacagaatgc

SEQ ID NO: 3603671 - DNA, 25 bp, Homo sapien
ccaataggtgtcaggtagcacagaa

SEQ ID NO: 3603672 - DNA, 25 bp, Homo sapien
caataggtgtcaggtagcacagaat

SEQ ID NO: 3603673 - DNA, 25 bp, Homo sapien
taggtgtcaggtagcacagaatgca

SEQ ID NO: 3603674 - DNA, 25 bp, Homo sapien
caccaacactgctcaatctccacca

SEQ ID NO: 3603675 - DNA, 25 bp, Homo sapien
tgcaccaacactgctcaatctccac

SEQ ID NO: 3603676 - DNA, 25 bp, Homo sapien
accaacactgctcaatctccaccat

SEQ ID NO: 3603677 - DNA, 25 bp, Homo sapien
gcaccaacactgctcaatctccacc

SEQ ID NO: 3603678 - DNA, 25 bp, Homo sapien
tagccgagatacacaacctttcctg

SEQ ID NO: 3603679 - DNA, 25 bp, Homo sapien
cactggtagaggtgagctgaaccca

SEQ ID NO: 3603680 - DNA, 25 bp, Homo sapien
tcaatgtacagagcccgctagttgt

SEQ ID NO: 3603681 - DNA, 25 bp, Homo sapien
tttgactgtggccaggacactgagt

SEQ ID NO: 3603682 - DNA, 25 bp, Homo sapien
taatgatctctcctatctgggtggc

SEQ ID NO: 3603683 - DNA, 25 bp, Homo sapien
ggtggctggaaaagtacctgtgagt

SEQ ID NO: 3603684 - DNA, 25 bp, Homo sapien
aagtacctgtgagttcttaactggc

SEQ ID NO: 3603685 - DNA, 25 bp, Homo sapien
tctcctatctgggtggctggaaaag

SEQ ID NO: 3603686 - DNA, 25 bp, Homo sapien
catctggcctgctagtagacagtca

SEQ ID NO: 3603687 - DNA, 25 bp, Homo sapien
tggctctgatcaagaagggtaggct

SEQ ID NO: 3603688 - DNA, 25 bp, Homo sapien
tacccataggtgtcttgacttccca

SEQ ID NO: 3603689 - DNA, 25 bp, Homo sapien
tctgctcttgctagttgggaattca

SEQ ID NO: 3603690 - DNA, 25 bp, Homo sapien
tgttatatcccaggcatcaatgata

SEQ ID NO: 3603691 - DNA, 25 bp, Homo sapien
ggtgtacattatttgtgccatatgc

SEQ ID NO: 3603692 - DNA, 25 bp, Homo sapien
tctgatttccgactacatgttgagg

SEQ ID NO: 3603693 - DNA, 25 bp, Homo sapien
gttgaggtgggtgtacattatttgt

SEQ ID NO: 3603694 - DNA, 25 bp, Homo sapien
tgcatcattgtacatctccctgatg

SEQ ID NO: 3603695 - DNA, 25 bp, Homo sapien
ctggaaaatgtcctttatgatgaga

SEQ ID NO: 3603696 - DNA, 25 bp, Homo sapien
gaatgtaaccatgaaagtcactaaa

SEQ ID NO: 3603697 - DNA, 25 bp, Homo sapien
tatgatgagatattgaatgtaacca

SEQ ID NO: 3603698 - DNA, 25 bp, Homo sapien
catagtgtctgggcttctcagaaga

SEQ ID NO: 3603699 - DNA, 25 bp, Homo sapien
gcccgggtgaggtactccatctctt

SEQ ID NO: 3603700 - DNA, 25 bp, Homo sapien
aaatccacagcaagctggtgttgca

SEQ ID NO: 3603701 - DNA, 25 bp, Homo sapien
gattcatgcagatccactgacttca

SEQ ID NO: 3603702 - DNA, 25 bp, Homo sapien
ccagttctgtcaatggcccgggtga

SEQ ID NO: 3603703 - DNA, 25 bp, Homo sapien
taacatgggattgtcttagaagcaa

SEQ ID NO: 3603704 - DNA, 25 bp, Homo sapien
ggtaggtaactccataactcagtcc

SEQ ID NO: 3603705 - DNA, 25 bp, Homo sapien
gacccaagagaatcactgttacaga

SEQ ID NO: 3603706 - DNA, 25 bp, Homo sapien
ttagacttttatcagaacatcaggg

SEQ ID NO: 3603707 - DNA, 25 bp, Homo sapien
ttgaagtattccatccactggcgga

SEQ ID NO: 3603708 - DNA, 25 bp, Homo sapien
tactggctttgaagtattccatcca

SEQ ID NO: 3603709 - DNA, 25 bp, Homo sapien
cactggcggatcgtggaatctccca

SEQ ID NO: 3603710 - DNA, 25 bp, Homo sapien
tcccattaggtatatgagttttcct

SEQ ID NO: 3603711 - DNA, 25 bp, Homo sapien
ttgtggatgtcattccaaacttgca

SEQ ID NO: 3603712 - DNA, 25 bp, Homo sapien
tacaggagacaggattccatgtgtt

SEQ ID NO: 3603713 - DNA, 25 bp, Homo sapien
cccactggggattgtggatgtcatt

SEQ ID NO: 3603714 - DNA, 25 bp, Homo sapien
ggagacaggattccatgtgtttctc

SEQ ID NO: 3603715 - DNA, 25 bp, Homo sapien
tgttgcatttggagacactaattgt

SEQ ID NO: 3603716 - DNA, 25 bp, Homo sapien
gttgcatttggagacactaattgta

SEQ ID NO: 3603717 - DNA, 25 bp, Homo sapien
tgcatttggagacactaattgtatt

SEQ ID NO: 3603718 - DNA, 25 bp, Homo sapien
catttggagacactaattgtattga

SEQ ID NO: 3603719 - DNA, 25 bp, Homo sapien
tgttcttagaatacatgtgagtgag

SEQ ID NO: 3603720 - DNA, 25 bp, Homo sapien
gaatacatgtgagtgagtgcagcac

SEQ ID NO: 3603721 - DNA, 25 bp, Homo sapien
gaggctcttttcttgtttgctaaga

SEQ ID NO: 3603722 - DNA, 25 bp, Homo sapien
agataagaaactttcttgttcttag

SEQ ID NO: 3603723 - DNA, 25 bp, Homo sapien
gacttgggaagtgccattgacaaac

SEQ ID NO: 3603724 - DNA, 25 bp, Homo sapien
cacctgccatcagcgctggggaaga

SEQ ID NO: 3603725 - DNA, 25 bp, Homo sapien
gacaaactggccagtgaagatcacc

SEQ ID NO: 3603726 - DNA, 25 bp, Homo sapien
gaagatcaccctgtcatagccttgg

SEQ ID NO: 3603727 - DNA, 25 bp, Homo sapien
ttgcttcctgcgtcccaagtggtcc

SEQ ID NO: 3603728 - DNA, 25 bp, Homo sapien
ctggccctcaggaaatccccgccat

SEQ ID NO: 3603729 - DNA, 25 bp, Homo sapien
aaatccccgccatattgcttcctgc

SEQ ID NO: 3603730 - DNA, 25 bp, Homo sapien
cgccatattgcttcctgcgtcccaa

SEQ ID NO: 3603731 - DNA, 25 bp, Homo sapien
gtgcagctggtctcccctgcagtac

SEQ ID NO: 3603732 - DNA, 25 bp, Homo sapien
agcaggatgtgcagctggtctcccc

SEQ ID NO: 3603733 - DNA, 25 bp, Homo sapien
tggtctcccctgcagtacgtatctc

SEQ ID NO: 3603734 - DNA, 25 bp, Homo sapien
ctccagcaggatgtgcagctggtct

SEQ ID NO: 3603735 - DNA, 25 bp, Homo sapien
tggataagtttagagcagaccaaac

SEQ ID NO: 3603736 - DNA, 25 bp, Homo sapien
caacgttagtgaggactgtccagca

SEQ ID NO: 3603737 - DNA, 25 bp, Homo sapien
gtgaaacttaatgagcagcagatgg

SEQ ID NO: 3603738 - DNA, 25 bp, Homo sapien
cacagcaagcggatgcagagattca

SEQ ID NO: 3603739 - DNA, 25 bp, Homo sapien
ccagattacgtgtctgagcacagca

SEQ ID NO: 3603740 - DNA, 25 bp, Homo sapien
cagtgccaatagtgacttataattt

SEQ ID NO: 3603741 - DNA, 25 bp, Homo sapien
taaacaacagtgccaatagtgactt

SEQ ID NO: 3603742 - DNA, 25 bp, Homo sapien
gccaatagtgacttataatttatca

SEQ ID NO: 3603743 - DNA, 25 bp, Homo sapien
caacagtgccaatagtgacttataa

SEQ ID NO: 3603744 - DNA, 25 bp, Homo sapien
acagaacagataattcatggagccc

SEQ ID NO: 3603745 - DNA, 25 bp, Homo sapien
caggtgctctcttttagctatctgc

SEQ ID NO: 3603746 - DNA, 25 bp, Homo sapien
ctgtacttggtatctcccaggtgct

SEQ ID NO: 3603747 - DNA, 25 bp, Homo sapien
gataattcatggagcccactgtgat

SEQ ID NO: 3603748 - DNA, 25 bp, Homo sapien
ctttaagaaatcgagcagcttaagg

SEQ ID NO: 3603749 - DNA, 25 bp, Homo sapien
agattgttcaatcccatacatagac

SEQ ID NO: 3603750 - DNA, 25 bp, Homo sapien
tcaatcccatacatagactctctgg

SEQ ID NO: 3603751 - DNA, 25 bp, Homo sapien
tacagattgttcaatcccatacata

SEQ ID NO: 3603752 - DNA, 25 bp, Homo sapien
tcccatacatagactctctggcgag

SEQ ID NO: 3603753 - DNA, 25 bp, Homo sapien
gcatggattcacaaccttctgcttg

SEQ ID NO: 3603754 - DNA, 25 bp, Homo sapien
tgaagccaccagtgtgctactggca

SEQ ID NO: 3603755 - DNA, 25 bp, Homo sapien
ggcatacctcttgtctataccaaaa

SEQ ID NO: 3603756 - DNA, 25 bp, Homo sapien
aataaattgcagatataagttgcag

SEQ ID NO: 3603757 - DNA, 25 bp, Homo sapien
ggtaactactgatacctgctggaaa

SEQ ID NO: 3603758 - DNA, 25 bp, Homo sapien
gtaactactgatacctgctggaaaa

SEQ ID NO: 3603759 - DNA, 25 bp, Homo sapien
taactactgatacctgctggaaaat

SEQ ID NO: 3603760 - DNA, 25 bp, Homo sapien
ctggtggataataagtattgccttg

SEQ ID NO: 3603761 - DNA, 25 bp, Homo sapien
taagtattgccttgtgggtaaccac

SEQ ID NO: 3603762 - DNA, 25 bp, Homo sapien
tataataagtgttgactcttgggta

SEQ ID NO: 3603763 - DNA, 25 bp, Homo sapien
gtgttgactcttgggtaaccagtgt

SEQ ID NO: 3603764 - DNA, 25 bp, Homo sapien
aataagtgttgcctcgtgggtaaca

SEQ ID NO: 3603765 - DNA, 25 bp, Homo sapien
gataataagtgttgcctcgtgggta

SEQ ID NO: 3603766 - DNA, 25 bp, Homo sapien
agtgttgcctcgtgggtaacaattc

SEQ ID NO: 3603767 - DNA, 25 bp, Homo sapien
ttgcctcgtgggtaacaattcttac

SEQ ID NO: 3603768 - DNA, 25 bp, Homo sapien
gtaagtattgcctcgtgggtaacca

SEQ ID NO: 3603769 - DNA, 25 bp, Homo sapien
ataagtgttgcctcgtgggtaacca

SEQ ID NO: 3603770 - DNA, 25 bp, Homo sapien
ttgcctcgtgggtaaccattgttac

SEQ ID NO: 3603771 - DNA, 25 bp, Homo sapien
taagtgttgcttcgtgggtaaccac

SEQ ID NO: 3603772 - DNA, 25 bp, Homo sapien
ggtggataataagtgttgcctcttg

SEQ ID NO: 3603773 - DNA, 25 bp, Homo sapien
tggataataagtgttgcctcttggg

SEQ ID NO: 3603774 - DNA, 25 bp, Homo sapien
gataataagtgttgcctcttgggta

SEQ ID NO: 3603775 - DNA, 25 bp, Homo sapien
ctggtggataataagtgttgcctct

SEQ ID NO: 3603776 - DNA, 25 bp, Homo sapien
tatttccttgtggataaccactgtt

SEQ ID NO: 3603777 - DNA, 25 bp, Homo sapien
aataataagtatttccttgtggata

SEQ ID NO: 3603778 - DNA, 25 bp, Homo sapien
tttccttgtggataaccactgttac

SEQ ID NO: 3603779 - DNA, 25 bp, Homo sapien
agtatttccttgtggataaccactg

SEQ ID NO: 3603780 - DNA, 25 bp, Homo sapien
cccaccggatactaagtattgcctt

SEQ ID NO: 3603781 - DNA, 25 bp, Homo sapien
tactcggtggataataagtattgcc

SEQ ID NO: 3603782 - DNA, 25 bp, Homo sapien
cagtggataataagtgttgcctcgc

SEQ ID NO: 3603783 - DNA, 25 bp, Homo sapien
tggtggagaataagtaatgccttgt

SEQ ID NO: 3603784 - DNA, 25 bp, Homo sapien
tgtgggtaaccactgttactcggtg

SEQ ID NO: 3603785 - DNA, 25 bp, Homo sapien
gataattagtgttgcctctagggta

SEQ ID NO: 3603786 - DNA, 25 bp, Homo sapien
ggataattagtgttgcctctagggt

SEQ ID NO: 3603787 - DNA, 25 bp, Homo sapien
tggataattagtgttgcctctaggg

SEQ ID NO: 3603788 - DNA, 25 bp, Homo sapien
ataattgttgcctctagggtaacca

SEQ ID NO: 3603789 - DNA, 25 bp, Homo sapien
gataataattgttgcctctagggta

SEQ ID NO: 3603790 - DNA, 25 bp, Homo sapien
attgttgcctctagggtaaccactg

SEQ ID NO: 3603791 - DNA, 25 bp, Homo sapien
tggataataattgttgcctctaggg

SEQ ID NO: 3603792 - DNA, 25 bp, Homo sapien
ataagtactgcctcgtgggtaacca

SEQ ID NO: 3603793 - DNA, 25 bp, Homo sapien
gataataaatattgcctcgtgggta

SEQ ID NO: 3603794 - DNA, 25 bp, Homo sapien
gtggataataagtactgcctcgtgg

SEQ ID NO: 3603795 - DNA, 25 bp, Homo sapien
tggataataaatattgcctcgtggg

SEQ ID NO: 3603796 - DNA, 25 bp, Homo sapien
taagtgttgccttgtgagaaaccac

SEQ ID NO: 3603797 - DNA, 25 bp, Homo sapien
ttgccttgtgagaaaccactcttac

SEQ ID NO: 3603798 - DNA, 25 bp, Homo sapien
agggataataagtgttgccttgtga

SEQ ID NO: 3603799 - DNA, 25 bp, Homo sapien
ttcccagggataataagtgttgcct

SEQ ID NO: 3603800 - DNA, 25 bp, Homo sapien
aataagtattgcctcgtgggtaact

SEQ ID NO: 3603801 - DNA, 25 bp, Homo sapien
ttgcctcgtgggtaactgctgttac

SEQ ID NO: 3603802 - DNA, 25 bp, Homo sapien
cagcctcgtgggaaaccactgttac

SEQ ID NO: 3603803 - DNA, 25 bp, Homo sapien
ccactggataataagtacagcctcg

SEQ ID NO: 3603804 - DNA, 25 bp, Homo sapien
ttgacttgtgggtaaccactcttac

SEQ ID NO: 3603805 - DNA, 25 bp, Homo sapien
taagtattgacttgtgggtaaccac

SEQ ID NO: 3603806 - DNA, 25 bp, Homo sapien
tggataataagtattgacttgtggg

SEQ ID NO: 3603807 - DNA, 25 bp, Homo sapien
ctggtggataataagtattgacttg

SEQ ID NO: 3603808 - DNA, 25 bp, Homo sapien
taacaactgttgcctttggtaacca

SEQ ID NO: 3603809 - DNA, 25 bp, Homo sapien
actggataacaactgttgcctttgg

SEQ ID NO: 3603810 - DNA, 25 bp, Homo sapien
cccactggataacaactgttgcctt

SEQ ID NO: 3603811 - DNA, 25 bp, Homo sapien
cactggataacaactgttgcctttg

SEQ ID NO: 3603812 - DNA, 25 bp, Homo sapien
ataatgtgttgcctcatgggtaacc

SEQ ID NO: 3603813 - DNA, 25 bp, Homo sapien
taatgtgttgcctcatgggtaacca

SEQ ID NO: 3603814 - DNA, 25 bp, Homo sapien
tggataatgtgttgcctcatgggta

SEQ ID NO: 3603815 - DNA, 25 bp, Homo sapien
ccggtggataatgtgttgcctcatg

SEQ ID NO: 3603816 - DNA, 25 bp, Homo sapien
ataagtgttgcctcgtgggtaacca

SEQ ID NO: 3603817 - DNA, 25 bp, Homo sapien
cggtggataataagtgttgcctcgt

SEQ ID NO: 3603818 - DNA, 25 bp, Homo sapien
ataataagtgttgcctcgtgggtaa

SEQ ID NO: 3603819 - DNA, 25 bp, Homo sapien
tggataataagtgttgcctcgtggg

SEQ ID NO: 3603820 - DNA, 25 bp, Homo sapien
taagtgttgcctcgtgcataaccaa

SEQ ID NO: 3603821 - DNA, 25 bp, Homo sapien
gttgcctcgtgcataaccaatgtta

SEQ ID NO: 3603822 - DNA, 25 bp, Homo sapien
tgcataaccaatgttacccggttta

SEQ ID NO: 3603823 - DNA, 25 bp, Homo sapien
cgtgcataaccaatgttacccggtt

SEQ ID NO: 3603824 - DNA, 25 bp, Homo sapien
gaggataataaggtctgcctcgtgg

SEQ ID NO: 3603825 - DNA, 25 bp, Homo sapien
ggaggataataaggtctgcctcgtg

SEQ ID NO: 3603826 - DNA, 25 bp, Homo sapien
ctcatgggtagccactgttatctgg

SEQ ID NO: 3603827 - DNA, 25 bp, Homo sapien
tatctggtggataataagtattgtc

SEQ ID NO: 3603828 - DNA, 25 bp, Homo sapien
taataagtattacctcatgggtagc

SEQ ID NO: 3603829 - DNA, 25 bp, Homo sapien
gtattgtctctagggtaaccactgt

SEQ ID NO: 3603830 - DNA, 25 bp, Homo sapien
ctggtggataataagtattgccttg

SEQ ID NO: 3603831 - DNA, 25 bp, Homo sapien
cgtattgcctcatgggtaaccactg

SEQ ID NO: 3603832 - DNA, 25 bp, Homo sapien
taagtattgccttgtgggtaatcac

SEQ ID NO: 3603833 - DNA, 25 bp, Homo sapien
cagttacccggtggataatacgtat

SEQ ID NO: 3603834 - DNA, 25 bp, Homo sapien
ataagtattgcctcgtgggtaacca

SEQ ID NO: 3603835 - DNA, 25 bp, Homo sapien
taataagtattgcctcgtgggtaac

SEQ ID NO: 3603836 - DNA, 25 bp, Homo sapien
ctgggagataatgtgttgcctctag

SEQ ID NO: 3603837 - DNA, 25 bp, Homo sapien
tgggagataatgtgttgcctctagg

SEQ ID NO: 3603838 - DNA, 25 bp, Homo sapien
gggagataatgtgttgcctctaggg

SEQ ID NO: 3603839 - DNA, 25 bp, Homo sapien
ctggtttattataagtatttccttg

SEQ ID NO: 3603840 - DNA, 25 bp, Homo sapien
agtatttccttgtgggtaaccactg

SEQ ID NO: 3603841 - DNA, 25 bp, Homo sapien
tattataagtatttccttgtgggta

SEQ ID NO: 3603842 - DNA, 25 bp, Homo sapien
gctggataataagtagtaccacagg

SEQ ID NO: 3603843 - DNA, 25 bp, Homo sapien
cagtattgcctctagagtaatcacg

SEQ ID NO: 3603844 - DNA, 25 bp, Homo sapien
ggtcaccattgttagcccgttgata

SEQ ID NO: 3603845 - DNA, 25 bp, Homo sapien
gataatcagtgttgcatcgtgggtg

SEQ ID NO: 3603846 - DNA, 25 bp, Homo sapien
cggctggatactaagttttgcctgg

SEQ ID NO: 3603847 - DNA, 25 bp, Homo sapien
ggctggatactaagttttgcctggt

SEQ ID NO: 3603848 - DNA, 25 bp, Homo sapien
cggtggataagtgttgcctcgcggt

SEQ ID NO: 3603849 - DNA, 25 bp, Homo sapien
ggtggataagtgttgcctcgcggtt

SEQ ID NO: 3603850 - DNA, 25 bp, Homo sapien
gtggataagtgttgcctcgcggtta

SEQ ID NO: 3603851 - DNA, 25 bp, Homo sapien
gtaagtactgcctcgtgggtaacca

SEQ ID NO: 3603852 - DNA, 25 bp, Homo sapien
cagtggataataagtgttgcctcgt

SEQ ID NO: 3603853 - DNA, 25 bp, Homo sapien
aataagtattgcctcatgtctaacc

SEQ ID NO: 3603854 - DNA, 25 bp, Homo sapien
ggtggatagtaagtactgcctcgtg

SEQ ID NO: 3603855 - DNA, 25 bp, Homo sapien
ataagtgttgcctcgtgggtaacca

SEQ ID NO: 3603856 - DNA, 25 bp, Homo sapien
aataagtattgcctcatgggtaacc

SEQ ID NO: 3603857 - DNA, 25 bp, Homo sapien
taagtattgcctcgtgggtaaccat

SEQ ID NO: 3603858 - DNA, 25 bp, Homo sapien
cagagttaccctgtggataataagt

SEQ ID NO: 3603859 - DNA, 25 bp, Homo sapien
catcgtgtgtatccactgataccca

SEQ ID NO: 3603860 - DNA, 25 bp, Homo sapien
gttgcatcgtgtgtatccactgata

SEQ ID NO: 3603861 - DNA, 25 bp, Homo sapien
tgcatcgtgtgtatccactgatacc

SEQ ID NO: 3603862 - DNA, 25 bp, Homo sapien
ttgttgcatcgtgtgtatccactga

SEQ ID NO: 3603863 - DNA, 25 bp, Homo sapien
ataagtactgcctcgtgggtaacca

SEQ ID NO: 3603864 - DNA, 25 bp, Homo sapien
ataagtgttgcctcgtgggtaacca

SEQ ID NO: 3603865 - DNA, 25 bp, Homo sapien
gaaaataagtgttgcctcgtgggta

SEQ ID NO: 3603866 - DNA, 25 bp, Homo sapien
atgtctcattggtaaccaccgttac

SEQ ID NO: 3603867 - DNA, 25 bp, Homo sapien
tgtggataataagtgttgcctctct

SEQ ID NO: 3603868 - DNA, 25 bp, Homo sapien
ttgcctctagggtaaccattgttac

SEQ ID NO: 3603869 - DNA, 25 bp, Homo sapien
ccaatggataataagtgttgcctct

SEQ ID NO: 3603870 - DNA, 25 bp, Homo sapien
caatggataataagtgttgcctcta

SEQ ID NO: 3603871 - DNA, 25 bp, Homo sapien
tggataataagtgttgcctcgtggg

SEQ ID NO: 3603872 - DNA, 25 bp, Homo sapien
gataataagtgttgcctcgtgggta

SEQ ID NO: 3603873 - DNA, 25 bp, Homo sapien
ggataataagtgttgcctcgtgggt

SEQ ID NO: 3603874 - DNA, 25 bp, Homo sapien
tgtggataataagtgttgcctcgtg

SEQ ID NO: 3603875 - DNA, 25 bp, Homo sapien
agtgtggcctcgtgggtaacgacta

SEQ ID NO: 3603876 - DNA, 25 bp, Homo sapien
tgtggcctcgtgggtaacgactatt

SEQ ID NO: 3603877 - DNA, 25 bp, Homo sapien
gtggcctcgtgggtaacgactatta

SEQ ID NO: 3603878 - DNA, 25 bp, Homo sapien
gtgtggcctcgtgggtaacgactat

SEQ ID NO: 3603879 - DNA, 25 bp, Homo sapien
aagcattgcctggtggattaccatg

SEQ ID NO: 3603880 - DNA, 25 bp, Homo sapien
tgcctggtggattaccatggtaacc

SEQ ID NO: 3603881 - DNA, 25 bp, Homo sapien
gattaccatggtaacccgatggata

SEQ ID NO: 3603882 - DNA, 25 bp, Homo sapien
aataagcattgcctggtggattacc

SEQ ID NO: 3603883 - DNA, 25 bp, Homo sapien
tgcctcctgggtaactaccattaac

SEQ ID NO: 3603884 - DNA, 25 bp, Homo sapien
tacacggtggataatagttgttgcc

SEQ ID NO: 3603885 - DNA, 25 bp, Homo sapien
ataataagtgttgcctcgtggttaa

SEQ ID NO: 3603886 - DNA, 25 bp, Homo sapien
ataagtgttgcctcgtggttaacca

SEQ ID NO: 3603887 - DNA, 25 bp, Homo sapien
tgcctcgtggttaaccactgttacc

SEQ ID NO: 3603888 - DNA, 25 bp, Homo sapien
agtgttgcctcgtggttaaccactg

SEQ ID NO: 3603889 - DNA, 25 bp, Homo sapien
ataaatattgcctcgtgggtaacca

SEQ ID NO: 3603890 - DNA, 25 bp, Homo sapien
gataataaatattgcctcgtgggta

SEQ ID NO: 3603891 - DNA, 25 bp, Homo sapien
ataataaatattgcctcgtgggtaa

SEQ ID NO: 3603892 - DNA, 25 bp, Homo sapien
taataaatattgcctcgtgggtaac

SEQ ID NO: 3603893 - DNA, 25 bp, Homo sapien
cggtggataatacctgtttcctcct

SEQ ID NO: 3603894 - DNA, 25 bp, Homo sapien
taagcattgtctcatgggtaatcaa

SEQ ID NO: 3603895 - DNA, 25 bp, Homo sapien
gataatacctgtttcctcctgggta

SEQ ID NO: 3603896 - DNA, 25 bp, Homo sapien
ttgtctcatgggtaatcaatggtac

SEQ ID NO: 3603897 - DNA, 25 bp, Homo sapien
ataagtgttgcctcgtgggtaacca

SEQ ID NO: 3603898 - DNA, 25 bp, Homo sapien
ataagtattgcctcgtgggtaacca

SEQ ID NO: 3603899 - DNA, 25 bp, Homo sapien
gtttgtaataagtgttgcctcgtgg

SEQ ID NO: 3603900 - DNA, 25 bp, Homo sapien
taataagtattgcctcgtgggtaac

SEQ ID NO: 3603901 - DNA, 25 bp, Homo sapien
taagtgttgcgtcatgggtaaccac

SEQ ID NO: 3603902 - DNA, 25 bp, Homo sapien
gttgcgtcatgggtaaccactgtta

SEQ ID NO: 3603903 - DNA, 25 bp, Homo sapien
ctgtggattataagtgttgcgtcat

SEQ ID NO: 3603904 - DNA, 25 bp, Homo sapien
gattataagtgttgcgtcatgggta

SEQ ID NO: 3603905 - DNA, 25 bp, Homo sapien
tgcctcgtgggaaaccagtggatag

SEQ ID NO: 3603906 - DNA, 25 bp, Homo sapien
tgggaaaccagtggatagttagtat

SEQ ID NO: 3603907 - DNA, 25 bp, Homo sapien
agttagtattgcctcatgggtcctc

SEQ ID NO: 3603908 - DNA, 25 bp, Homo sapien
tagtattgcctcatgggtcctcact

SEQ ID NO: 3603909 - DNA, 25 bp, Homo sapien
gtattgcttctagggtaaccactgt

SEQ ID NO: 3603910 - DNA, 25 bp, Homo sapien
aataagtattgcctcatgggtaacc

SEQ ID NO: 3603911 - DNA, 25 bp, Homo sapien
ccggaggataataaggactgtctca

SEQ ID NO: 3603912 - DNA, 25 bp, Homo sapien
gataataagtgttgcctcgtgggta

SEQ ID NO: 3603913 - DNA, 25 bp, Homo sapien
ctaagtattgcctcatgggtaacca

SEQ ID NO: 3603914 - DNA, 25 bp, Homo sapien
acctggtggataatacgtgttgcct

SEQ ID NO: 3603915 - DNA, 25 bp, Homo sapien
gtggataatacgtgttgcctcgtgg

SEQ ID NO: 3603916 - DNA, 25 bp, Homo sapien
tggataataagtgttgcctcttggg

SEQ ID NO: 3603917 - DNA, 25 bp, Homo sapien
gggtaaacaccattacctgctggat

SEQ ID NO: 3603918 - DNA, 25 bp, Homo sapien
gagaaatattgcctcatgggtaaac

SEQ ID NO: 3603919 - DNA, 25 bp, Homo sapien
tgctggatactaaattttgcccggt

SEQ ID NO: 3603920 - DNA, 25 bp, Homo sapien
acctgctggatactaaattttgccc

SEQ ID NO: 3603921 - DNA, 25 bp, Homo sapien
ctcttacatggtggataataagtgt

SEQ ID NO: 3603922 - DNA, 25 bp, Homo sapien
agaagtgttgcctcgtgggtaacca

SEQ ID NO: 3603923 - DNA, 25 bp, Homo sapien
tgggtaaccactcttacatggtgga

SEQ ID NO: 3603924 - DNA, 25 bp, Homo sapien
taataagtgttgagtcacgggtaac

SEQ ID NO: 3603925 - DNA, 25 bp, Homo sapien
ataattgttgcctcgtgggtaacca

SEQ ID NO: 3603926 - DNA, 25 bp, Homo sapien
taaccactgttacacggtggagaat

SEQ ID NO: 3603927 - DNA, 25 bp, Homo sapien
ttacacggtggagaataagtgttgc

SEQ ID NO: 3603928 - DNA, 25 bp, Homo sapien
ggtaaccactgttacacggtggaga

SEQ ID NO: 3603929 - DNA, 25 bp, Homo sapien
gtaagtactgcctcgtgggtaacca

SEQ ID NO: 3603930 - DNA, 25 bp, Homo sapien
aataagtattgcctcatgtctaacc

SEQ ID NO: 3603931 - DNA, 25 bp, Homo sapien
ggataataagtgttgcctcgtgggt

SEQ ID NO: 3603932 - DNA, 25 bp, Homo sapien
ggtggatagtaagtactgcctcgtg

SEQ ID NO: 3603933 - DNA, 25 bp, Homo sapien
ttgcctcatgggaaaccactgttac

SEQ ID NO: 3603934 - DNA, 25 bp, Homo sapien
gttgcctcatgggaaaccactgtta

SEQ ID NO: 3603935 - DNA, 25 bp, Homo sapien
atggataagtgttgcctcatgggaa

SEQ ID NO: 3603936 - DNA, 25 bp, Homo sapien
ctgatggataagtgttgcctcatgg

SEQ ID NO: 3603937 - DNA, 25 bp, Homo sapien
ataagtattgcctcacgggtaacca

SEQ ID NO: 3603938 - DNA, 25 bp, Homo sapien
aataagtgttgcctcatgggtaacc

SEQ ID NO: 3603939 - DNA, 25 bp, Homo sapien
cagagttaccctgtggataataagt

SEQ ID NO: 3603940 - DNA, 25 bp, Homo sapien
ttaccctgtggataataagtattgc

SEQ ID NO: 3603941 - DNA, 25 bp, Homo sapien
aacaactgttgccctgtgtataatg

SEQ ID NO: 3603942 - DNA, 25 bp, Homo sapien
acaactgttgccctgtgtataatgt

SEQ ID NO: 3603943 - DNA, 25 bp, Homo sapien
caactgttgccctgtgtataatgtg

SEQ ID NO: 3603944 - DNA, 25 bp, Homo sapien
gttgcatcgcatgtatccactgtta

SEQ ID NO: 3603945 - DNA, 25 bp, Homo sapien
aataattgttgccttgcgagtaacc

SEQ ID NO: 3603946 - DNA, 25 bp, Homo sapien
gaaagcactgttacccagaggatag

SEQ ID NO: 3603947 - DNA, 25 bp, Homo sapien
gtactgcctcatagataacgactgt

SEQ ID NO: 3603948 - DNA, 25 bp, Homo sapien
aggtggataataagtactgcctcat

SEQ ID NO: 3603949 - DNA, 25 bp, Homo sapien
tggataataagtactgcctcatggg

SEQ ID NO: 3603950 - DNA, 25 bp, Homo sapien
gtggataataagtactgcctcatgg

SEQ ID NO: 3603951 - DNA, 25 bp, Homo sapien
ggtggataataagtactgcctcatg

SEQ ID NO: 3603952 - DNA, 25 bp, Homo sapien
ataagtattgcctcgtgggtaacca

SEQ ID NO: 3603953 - DNA, 25 bp, Homo sapien
ccagtggataataagtattgcttcg

SEQ ID NO: 3603954 - DNA, 25 bp, Homo sapien
ctggtggataataagtgttgcctct

SEQ ID NO: 3603955 - DNA, 25 bp, Homo sapien
gataataagtattgcttcgtgggta

SEQ ID NO: 3603956 - DNA, 25 bp, Homo sapien
taagtgtcgcctcatgcataaccac

SEQ ID NO: 3603957 - DNA, 25 bp, Homo sapien
tgcataaccactgatacctggttta

SEQ ID NO: 3603958 - DNA, 25 bp, Homo sapien
gtgaataataagtgtcgcctcatgc

SEQ ID NO: 3603959 - DNA, 25 bp, Homo sapien
tgtcgcctcatgcataaccactgat

SEQ ID NO: 3603960 - DNA, 25 bp, Homo sapien
gtaagtattgcttcatgggtaagcc

SEQ ID NO: 3603961 - DNA, 25 bp, Homo sapien
ccggtggatagtaagtattgcctcg

SEQ ID NO: 3603962 - DNA, 25 bp, Homo sapien
taagtattgcctcgtaggtaaccac

SEQ ID NO: 3603963 - DNA, 25 bp, Homo sapien
agtattgcctcgtaggtaaccacgg

SEQ ID NO: 3603964 - DNA, 25 bp, Homo sapien
tagtaagtattgcctcgtaggtaac

SEQ ID NO: 3603965 - DNA, 25 bp, Homo sapien
aagtgttgcctctagggtaaccact

SEQ ID NO: 3603966 - DNA, 25 bp, Homo sapien
agtgttgcctctagggtaaccactg

SEQ ID NO: 3603967 - DNA, 25 bp, Homo sapien
ataagtattgcctcgtgggtaacca

SEQ ID NO: 3603968 - DNA, 25 bp, Homo sapien
taataagtattgcctcgtgggtaac

SEQ ID NO: 3603969 - DNA, 25 bp, Homo sapien
gttacccagtggatactaaatgtta

SEQ ID NO: 3603970 - DNA, 25 bp, Homo sapien
ataagtgttgcctcgtgggtaacca

SEQ ID NO: 3603971 - DNA, 25 bp, Homo sapien
gataagtgttgcctcgtgggtaacc

SEQ ID NO: 3603972 - DNA, 25 bp, Homo sapien
ggataagtgttgcctcgtgggtaac

SEQ ID NO: 3603973 - DNA, 25 bp, Homo sapien
caagtgttgccttatgggttaccac

SEQ ID NO: 3603974 - DNA, 25 bp, Homo sapien
actgttaacaggtgcataataagtg

SEQ ID NO: 3603975 - DNA, 25 bp, Homo sapien
gttaacaggtgcataataagtgtta

SEQ ID NO: 3603976 - DNA, 25 bp, Homo sapien
ttaacaggtgcataataagtgttac

SEQ ID NO: 3603977 - DNA, 25 bp, Homo sapien
agttaccctatggagaataagtaat

SEQ ID NO: 3603978 - DNA, 25 bp, Homo sapien
ccctatggagaataagtaatgcctc

SEQ ID NO: 3603979 - DNA, 25 bp, Homo sapien
tgttagccggtggatactaagtatc

SEQ ID NO: 3603980 - DNA, 25 bp, Homo sapien
cttcgttggtaaccactgttagccg

SEQ ID NO: 3603981 - DNA, 25 bp, Homo sapien
ataatatttgctgcctcatgggtaa

SEQ ID NO: 3603982 - DNA, 25 bp, Homo sapien
gaataatatttgctgcctcatgggt

SEQ ID NO: 3603983 - DNA, 25 bp, Homo sapien
aataatatttgctgcctcatgggta

SEQ ID NO: 3603984 - DNA, 25 bp, Homo sapien
gaaaagcactgtgacccagtggata

SEQ ID NO: 3603985 - DNA, 25 bp, Homo sapien
taataagtattctctcgtggaaaag

SEQ ID NO: 3603986 - DNA, 25 bp, Homo sapien
gtatcgacttatgggtaaccactgt

SEQ ID NO: 3603987 - DNA, 25 bp, Homo sapien
ctggtggataatatgtatcgactta

SEQ ID NO: 3603988 - DNA, 25 bp, Homo sapien
agtattgcctcatgggtaaacactg

SEQ ID NO: 3603989 - DNA, 25 bp, Homo sapien
ttgcctcatgggtaaacactgttac

SEQ ID NO: 3603990 - DNA, 25 bp, Homo sapien
ccggtggataataagtattgcctca

SEQ ID NO: 3603991 - DNA, 25 bp, Homo sapien
aataagtattgcctcatgggtaaac

SEQ ID NO: 3603992 - DNA, 25 bp, Homo sapien
tgtatgataagtaatgtctcatgag

SEQ ID NO: 3603993 - DNA, 25 bp, Homo sapien
gctgcataataagtaatgcatcatg

SEQ ID NO: 3603994 - DNA, 25 bp, Homo sapien
gtaatgtctcatgagtaactgctgt

SEQ ID NO: 3603995 - DNA, 25 bp, Homo sapien
ctgctgcataataagtaatgcatca

SEQ ID NO: 3603996 - DNA, 25 bp, Homo sapien
ttgcctcgtgggtagccactgtaag

SEQ ID NO: 3603997 - DNA, 25 bp, Homo sapien
ctgtaagcccctggataataagtgt

SEQ ID NO: 3603998 - DNA, 25 bp, Homo sapien
gatggataagtgttgcctcacgtgt

SEQ ID NO: 3603999 - DNA, 25 bp, Homo sapien
ctggataataagtgttgtctcacgt

SEQ ID NO: 3604000 - DNA, 25 bp, Homo sapien
ccggtggataatatgtattgtctgg

SEQ ID NO: 3604001 - DNA, 25 bp, Homo sapien
cggtggataatatgtattgtctggt

SEQ ID NO: 3604002 - DNA, 25 bp, Homo sapien
catgggtaatgactgttacccgctg

SEQ ID NO: 3604003 - DNA, 25 bp, Homo sapien
ttacccgctggatactaggtattgt

SEQ ID NO: 3604004 - DNA, 25 bp, Homo sapien
gctggatactaggtattgtctcgtg

SEQ ID NO: 3604005 - DNA, 25 bp, Homo sapien
ctcatgggtaatgactgttacccgc

SEQ ID NO: 3604006 - DNA, 25 bp, Homo sapien
ttgccttgtgggtatccactcttac

SEQ ID NO: 3604007 - DNA, 25 bp, Homo sapien
taagtgttgccttgtgggtatccac

SEQ ID NO: 3604008 - DNA, 25 bp, Homo sapien
ctggtggataataagtgttgccttg

SEQ ID NO: 3604009 - DNA, 25 bp, Homo sapien
agtgttgccttgtgggtatccactc

SEQ ID NO: 3604010 - DNA, 25 bp, Homo sapien
agtgtttccttgtgggtaaccactg

SEQ ID NO: 3604011 - DNA, 25 bp, Homo sapien
tattattagtgtttccttgtgggta

SEQ ID NO: 3604012 - DNA, 25 bp, Homo sapien
gtaacaactgttaatgcatggataa

SEQ ID NO: 3604013 - DNA, 25 bp, Homo sapien
tcttgttggtaaccactgttacgca

SEQ ID NO: 3604014 - DNA, 25 bp, Homo sapien
ttaccctgtggataataagtgacgt

SEQ ID NO: 3604015 - DNA, 25 bp, Homo sapien
agtgacgttttgtgggtaaccattg

SEQ ID NO: 3604016 - DNA, 25 bp, Homo sapien
ttacccaccagatactaagttttgc

SEQ ID NO: 3604017 - DNA, 25 bp, Homo sapien
tgcctcgtggataaccaccattacc

SEQ ID NO: 3604018 - DNA, 25 bp, Homo sapien
ctggtggatgataaatattgcctcg

SEQ ID NO: 3604019 - DNA, 25 bp, Homo sapien
tttgcctcgtgggtaaccactctta

SEQ ID NO: 3604020 - DNA, 25 bp, Homo sapien
tgcgtaataagtattgcctccttgg

SEQ ID NO: 3604021 - DNA, 25 bp, Homo sapien
caaccattggtacccagtggatcct

SEQ ID NO: 3604022 - DNA, 25 bp, Homo sapien
gacccggtggatattaagtgtcgcc

SEQ ID NO: 3604023 - DNA, 25 bp, Homo sapien
tatctgctggatatcaaatgttgcc

SEQ ID NO: 3604024 - DNA, 25 bp, Homo sapien
cagtgcttcccagtggaaaatgtgt

SEQ ID NO: 3604025 - DNA, 25 bp, Homo sapien
ctggtggataatgtgttgcctcgtg

SEQ ID NO: 3604026 - DNA, 25 bp, Homo sapien
tgcctcgtgggtaaccagtgcttcc

SEQ ID NO: 3604027 - DNA, 25 bp, Homo sapien
ttgcctcgtgggtaaccactgttac

SEQ ID NO: 3604028 - DNA, 25 bp, Homo sapien
ataagtgttgcctcgttggtaacca

SEQ ID NO: 3604029 - DNA, 25 bp, Homo sapien
tgcctcgtgagtaaccactgttacc

SEQ ID NO: 3604030 - DNA, 25 bp, Homo sapien
ataataagtgttgcctcgttggtaa

SEQ ID NO: 3604031 - DNA, 25 bp, Homo sapien
ggtggataataagtaatgcctcgtg

SEQ ID NO: 3604032 - DNA, 25 bp, Homo sapien
gataataagtgttgcctcgtgagta

SEQ ID NO: 3604033 - DNA, 25 bp, Homo sapien
taagtgttgcctcgtgagtaaccac

SEQ ID NO: 3604034 - DNA, 25 bp, Homo sapien
ttgcctcgtgagtaaccactgttac

SEQ ID NO: 3604035 - DNA, 25 bp, Homo sapien
cggtggataataagtgttgcctcgt

SEQ ID NO: 3604036 - DNA, 25 bp, Homo sapien
agtattgcctcgtgggtaaccattg

SEQ ID NO: 3604037 - DNA, 25 bp, Homo sapien
ggatagttagtattgcctcgtgggt

SEQ ID NO: 3604038 - DNA, 25 bp, Homo sapien
ttgcctcgtgggtaaccattgttac

SEQ ID NO: 3604039 - DNA, 25 bp, Homo sapien
ctggtggatagttagtattgcctcg

SEQ ID NO: 3604040 - DNA, 25 bp, Homo sapien
tactgcctcgtgggtaaccactgtt

SEQ ID NO: 3604041 - DNA, 25 bp, Homo sapien
actgcctcgtgggtaaccactgtta

SEQ ID NO: 3604042 - DNA, 25 bp, Homo sapien
ctgcctcgtgggtaaccactgttac

SEQ ID NO: 3604043 - DNA, 25 bp, Homo sapien
cgctggatactaacttttgcctgat

SEQ ID NO: 3604044 - DNA, 25 bp, Homo sapien
ccgctggatactaacttttgcctga

SEQ ID NO: 3604045 - DNA, 25 bp, Homo sapien
ataagtgttgcctcgtgggtaacca

SEQ ID NO: 3604046 - DNA, 25 bp, Homo sapien
gaaaataagtgttgcctcgtgggta

SEQ ID NO: 3604047 - DNA, 25 bp, Homo sapien
gttgcctctagagtaacccagtgga

SEQ ID NO: 3604048 - DNA, 25 bp, Homo sapien
cactttaaggcggtagataataagt

SEQ ID NO: 3604049 - DNA, 25 bp, Homo sapien
cagtgggtattaattgttgcctcta

SEQ ID NO: 3604050 - DNA, 25 bp, Homo sapien
cagtggattacccagtggagaataa

SEQ ID NO: 3604051 - DNA, 25 bp, Homo sapien
taataagtattgcctcatgtctaac

SEQ ID NO: 3604052 - DNA, 25 bp, Homo sapien
aataagtattgcctcatgtctaacc

SEQ ID NO: 3604053 - DNA, 25 bp, Homo sapien
ctggtggataataagtgttgcctca

SEQ ID NO: 3604054 - DNA, 25 bp, Homo sapien
ataagtattgcctcacgggtaacca

SEQ ID NO: 3604055 - DNA, 25 bp, Homo sapien
taataagtattgcctcacgggtaac

SEQ ID NO: 3604056 - DNA, 25 bp, Homo sapien
gtggttgaccactgttacgcagtgc

SEQ ID NO: 3604057 - DNA, 25 bp, Homo sapien
tgtctcgtggttgaccactgttacg

SEQ ID NO: 3604058 - DNA, 25 bp, Homo sapien
ataataagtattggcacatgggaaa

SEQ ID NO: 3604059 - DNA, 25 bp, Homo sapien
aataagtattggcacatgggaaacc

SEQ ID NO: 3604060 - DNA, 25 bp, Homo sapien
aataagtgttgcctcatgggtaacc

SEQ ID NO: 3604061 - DNA, 25 bp, Homo sapien
aatacgtgttgcctcatgggtaacc

SEQ ID NO: 3604062 - DNA, 25 bp, Homo sapien
ctggtggataataagtgttgcctca

SEQ ID NO: 3604063 - DNA, 25 bp, Homo sapien
ggtggataatacgtgttgcctcatg

SEQ ID NO: 3604064 - DNA, 25 bp, Homo sapien
tgttgcctcgttagtaaatactgtt

SEQ ID NO: 3604065 - DNA, 25 bp, Homo sapien
atatctgttatctcgtgggtaacca

SEQ ID NO: 3604066 - DNA, 25 bp, Homo sapien
taatatctgttatctcgtgggtaac

SEQ ID NO: 3604067 - DNA, 25 bp, Homo sapien
aataagtgttgcctcgttagtaaat

SEQ ID NO: 3604068 - DNA, 25 bp, Homo sapien
agtattgatttgtgggtaaccagtt

SEQ ID NO: 3604069 - DNA, 25 bp, Homo sapien
gtattgatttgtgggtaaccagtta

SEQ ID NO: 3604070 - DNA, 25 bp, Homo sapien
tattgatttgtgggtaaccagttac

SEQ ID NO: 3604071 - DNA, 25 bp, Homo sapien
taagtattgcctcatgggtaacacc

SEQ ID NO: 3604072 - DNA, 25 bp, Homo sapien
taagtactggctcatgggtaaccac

SEQ ID NO: 3604073 - DNA, 25 bp, Homo sapien
aataagtatggcctcatgggtaacc

SEQ ID NO: 3604074 - DNA, 25 bp, Homo sapien
taagtattccttcatgggtaaccac

SEQ ID NO: 3604075 - DNA, 25 bp, Homo sapien
ataagtattgcctcgtgggtaacca

SEQ ID NO: 3604076 - DNA, 25 bp, Homo sapien
ctggtggataataagtactgcctca

SEQ ID NO: 3604077 - DNA, 25 bp, Homo sapien
taaatattgcctcatgggtagccac

SEQ ID NO: 3604078 - DNA, 25 bp, Homo sapien
gataataaatattgcctcatgggta

SEQ ID NO: 3604079 - DNA, 25 bp, Homo sapien
ataagtgttgcctcgtgggtaacca

SEQ ID NO: 3604080 - DNA, 25 bp, Homo sapien
cagtggataataagtgttgcctcgt

SEQ ID NO: 3604081 - DNA, 25 bp, Homo sapien
gataataagtgttgcctcgtgagta

SEQ ID NO: 3604082 - DNA, 25 bp, Homo sapien
tggataataagtgttgcctcctggt

SEQ ID NO: 3604083 - DNA, 25 bp, Homo sapien
actgctgccttgtggataattagta

SEQ ID NO: 3604084 - DNA, 25 bp, Homo sapien
gataccactgttaaccagttgataa

SEQ ID NO: 3604085 - DNA, 25 bp, Homo sapien
gtaatatgtattgcctcgtaggaaa

SEQ ID NO: 3604086 - DNA, 25 bp, Homo sapien
gcttcatgggataccactgttaacc

SEQ ID NO: 3604087 - DNA, 25 bp, Homo sapien
ccattgggtaatatgtattgcctcg

SEQ ID NO: 3604088 - DNA, 25 bp, Homo sapien
tacatattgcctcgtgggtgacaac

SEQ ID NO: 3604089 - DNA, 25 bp, Homo sapien
gcctggcggataagcactgttaccc

SEQ ID NO: 3604090 - DNA, 25 bp, Homo sapien
tatctggtggataattagcgttgcc

SEQ ID NO: 3604091 - DNA, 25 bp, Homo sapien
agcataaccactgtttcccggtggg

SEQ ID NO: 3604092 - DNA, 25 bp, Homo sapien
tattccctcgtggataaacactgtt

SEQ ID NO: 3604093 - DNA, 25 bp, Homo sapien
gataataagtattccctcatgggta

SEQ ID NO: 3604094 - DNA, 25 bp, Homo sapien
tacccagtggataataagtattccc

SEQ ID NO: 3604095 - DNA, 25 bp, Homo sapien
tgggtaaccactgttatccggtgca

SEQ ID NO: 3604096 - DNA, 25 bp, Homo sapien
catgttgcctcgtgggttaccactc

SEQ ID NO: 3604097 - DNA, 25 bp, Homo sapien
tgggaaaacagtgttacccgatgga

SEQ ID NO: 3604098 - DNA, 25 bp, Homo sapien
cgtgggaaaacagtgttacccgatg

SEQ ID NO: 3604099 - DNA, 25 bp, Homo sapien
tatggataacaagaattgcctcgtg

SEQ ID NO: 3604100 - DNA, 25 bp, Homo sapien
atggataacaagaattgcctcgtgg

SEQ ID NO: 3604101 - DNA, 25 bp, Homo sapien
cctatggataacaagaattgcctcg

SEQ ID NO: 3604102 - DNA, 25 bp, Homo sapien
ctatggataacaagaattgcctcgt

SEQ ID NO: 3604103 - DNA, 25 bp, Homo sapien
ccagtggataataagaacgacctct

SEQ ID NO: 3604104 - DNA, 25 bp, Homo sapien
ccctagggtaatcattgctacccag

SEQ ID NO: 3604105 - DNA, 25 bp, Homo sapien
ccaggggatagtaagtattgcccct

SEQ ID NO: 3604106 - DNA, 25 bp, Homo sapien
gtggataataagaacgacctctggg

SEQ ID NO: 3604107 - DNA, 25 bp, Homo sapien
tgagtgttgtcttgtgggtaaccag

SEQ ID NO: 3604108 - DNA, 25 bp, Homo sapien
ttgtcttgtgggtaaccagtgttac

SEQ ID NO: 3604109 - DNA, 25 bp, Homo sapien
ctggtggataatgagtgttgtcttg

SEQ ID NO: 3604110 - DNA, 25 bp, Homo sapien
gtgttgtcttgtgggtaaccagtgt

SEQ ID NO: 3604111 - DNA, 25 bp, Homo sapien
ctggataataggttttatgtcgtgg

SEQ ID NO: 3604112 - DNA, 25 bp, Homo sapien
gataataggttttatgtcgtgggta

SEQ ID NO: 3604113 - DNA, 25 bp, Homo sapien
tgtgtaaccaatgttatatggtaga

SEQ ID NO: 3604114 - DNA, 25 bp, Homo sapien
tgcctcatgtgtaaccaatgttata

SEQ ID NO: 3604115 - DNA, 25 bp, Homo sapien
gtattgcctctagggtaaccactgt

SEQ ID NO: 3604116 - DNA, 25 bp, Homo sapien
ataagtattgcctctagggtaacca

SEQ ID NO: 3604117 - DNA, 25 bp, Homo sapien
tacccggtggatagtaagtattgcc

SEQ ID NO: 3604118 - DNA, 25 bp, Homo sapien
ttgcctcgtgggtaagcactgttac

SEQ ID NO: 3604119 - DNA, 25 bp, Homo sapien
ataagtgtggcctcatgggtaacca

SEQ ID NO: 3604120 - DNA, 25 bp, Homo sapien
tggataataagtactgcctcatggg

SEQ ID NO: 3604121 - DNA, 25 bp, Homo sapien
ctggtggataataagtactgcctca

SEQ ID NO: 3604122 - DNA, 25 bp, Homo sapien
gataataagtgtggcctcatgggta

SEQ ID NO: 3604123 - DNA, 25 bp, Homo sapien
taagtgttgcctcgtgagtaaccac

SEQ ID NO: 3604124 - DNA, 25 bp, Homo sapien
ctggtggataatacgtgttgcctcg

SEQ ID NO: 3604125 - DNA, 25 bp, Homo sapien
ttgcctcgtgagtaaccactgttac

SEQ ID NO: 3604126 - DNA, 25 bp, Homo sapien
gtgttgcctcgtgagtaaccactgt

SEQ ID NO: 3604127 - DNA, 25 bp, Homo sapien
cctgtggatgataaatattgccccg

SEQ ID NO: 3604128 - DNA, 25 bp, Homo sapien
ggtaaacactgttaccctgtggatg

SEQ ID NO: 3604129 - DNA, 25 bp, Homo sapien
atattgccccgtgggtaaccaccat

SEQ ID NO: 3604130 - DNA, 25 bp, Homo sapien
tgtggatagtaagtgttgcctcggg

SEQ ID NO: 3604131 - DNA, 25 bp, Homo sapien
cacccggtggataatatgtatggcc

SEQ ID NO: 3604132 - DNA, 25 bp, Homo sapien
cgagttgcctcatgcgtaaccacag

SEQ ID NO: 3604133 - DNA, 25 bp, Homo sapien
tgggtaaccacttctaatgactgga

SEQ ID NO: 3604134 - DNA, 25 bp, Homo sapien
tcccagtgggtaatacgagttgcct

SEQ ID NO: 3604135 - DNA, 25 bp, Homo sapien
gataataaatattgcctcgtgggta

SEQ ID NO: 3604136 - DNA, 25 bp, Homo sapien
ggataataaatattgcctcgtgggt

SEQ ID NO: 3604137 - DNA, 25 bp, Homo sapien
ataataaatattgcctcgtgggtaa

SEQ ID NO: 3604138 - DNA, 25 bp, Homo sapien
tggataataaatattgcctcgtggg

SEQ ID NO: 3604139 - DNA, 25 bp, Homo sapien
ctctagaaagctcaagattccagct

SEQ ID NO: 3604140 - DNA, 25 bp, Homo sapien
cctgctactgtggaggtgactaatc

SEQ ID NO: 3604141 - DNA, 25 bp, Homo sapien
ttttcctgctactgtggaggtgact

SEQ ID NO: 3604142 - DNA, 25 bp, Homo sapien
tcctgctactgtggaggtgactaat

SEQ ID NO: 3604143 - DNA, 25 bp, Homo sapien
ttcctgctactgtggaggtgactaa

SEQ ID NO: 3604144 - DNA, 25 bp, Homo sapien
tcttcccaaccatttagtacaaaca

SEQ ID NO: 3604145 - DNA, 25 bp, Homo sapien
tactttcaccactgacagtataaag

SEQ ID NO: 3604146 - DNA, 25 bp, Homo sapien
tcaccactgacagtataaagaacaa

SEQ ID NO: 3604147 - DNA, 25 bp, Homo sapien
ttagtacaaacataatctttcagaa

SEQ ID NO: 3604148 - DNA, 25 bp, Homo sapien
tggtccaagacatccttgcactggc

SEQ ID NO: 3604149 - DNA, 25 bp, Homo sapien
tcatcttcttgatttaacaccagac

SEQ ID NO: 3604150 - DNA, 25 bp, Homo sapien
tccaggttttcatgtaacttccacg

SEQ ID NO: 3604151 - DNA, 25 bp, Homo sapien
tccaagacatccttgcactggctgt

SEQ ID NO: 3604152 - DNA, 25 bp, Homo sapien
tgacaaaactcatcaagttgatact

SEQ ID NO: 3604153 - DNA, 25 bp, Homo sapien
acaaaactcatcaagttgatactgg

SEQ ID NO: 3604154 - DNA, 25 bp, Homo sapien
gacaaaactcatcaagttgatactg

SEQ ID NO: 3604155 - DNA, 25 bp, Homo sapien
ggcttctcttcacattgtccttggt

SEQ ID NO: 3604156 - DNA, 25 bp, Homo sapien
cttggtggacgtttgcccgttctgt

SEQ ID NO: 3604157 - DNA, 25 bp, Homo sapien
ccttggtggacgtttgcccgttctg

SEQ ID NO: 3604158 - DNA, 25 bp, Homo sapien
aatgcatatgggcagagaaggagtt

SEQ ID NO: 3604159 - DNA, 25 bp, Homo sapien
cagagaaggagtttataacagtcac

SEQ ID NO: 3604160 - DNA, 25 bp, Homo sapien
cattgaatgcatatgggcagagaag

SEQ ID NO: 3604161 - DNA, 25 bp, Homo sapien
ctgatgtgaatcagaggtgaccatt

SEQ ID NO: 3604162 - DNA, 25 bp, Homo sapien
ggcatgcggctcctctgaagcagtt

SEQ ID NO: 3604163 - DNA, 25 bp, Homo sapien
cggctcctctgaagcagtttcctgg

SEQ ID NO: 3604164 - DNA, 25 bp, Homo sapien
tttcctggtcgtgtttagaggctgg

SEQ ID NO: 3604165 - DNA, 25 bp, Homo sapien
agcagtttcctggtcgtgtttagag

SEQ ID NO: 3604166 - DNA, 25 bp, Homo sapien
ttaagatgacccctctgaggaccat

SEQ ID NO: 3604167 - DNA, 25 bp, Homo sapien
ggatgttaagatgacccctctgagg

SEQ ID NO: 3604168 - DNA, 25 bp, Homo sapien
gttgtgagtgtactgaggtctgatt

SEQ ID NO: 3604169 - DNA, 25 bp, Homo sapien
tctgattgacggtgattagtgttca

SEQ ID NO: 3604170 - DNA, 25 bp, Homo sapien
ctttaacttgaattacctccagagc

SEQ ID NO: 3604171 - DNA, 25 bp, Homo sapien
tttaacttgaattacctccagagcc

SEQ ID NO: 3604172 - DNA, 25 bp, Homo sapien
ttaacttgaattacctccagagcca

SEQ ID NO: 3604173 - DNA, 25 bp, Homo sapien
taaaatcatcacacttcctttttcc

SEQ ID NO: 3604174 - DNA, 25 bp, Homo sapien
tttcctgtttgagtgactggccatc

SEQ ID NO: 3604175 - DNA, 25 bp, Homo sapien
ggccatcacctccaatgaactcatt

SEQ ID NO: 3604176 - DNA, 25 bp, Homo sapien
caccactgcttatatgattttcctg

SEQ ID NO: 3604177 - DNA, 25 bp, Homo sapien
tgacgatatgacagacatctctggc

SEQ ID NO: 3604178 - DNA, 25 bp, Homo sapien
taggccgtacgcttttaggcagcac

SEQ ID NO: 3604179 - DNA, 25 bp, Homo sapien
aattatagtaagtcctacagctggg

SEQ ID NO: 3604180 - DNA, 25 bp, Homo sapien
gaagctggcgacatacttctggcag

SEQ ID NO: 3604181 - DNA, 25 bp, Homo sapien
aaattcatatcacagacgaaaccag

SEQ ID NO: 3604182 - DNA, 25 bp, Homo sapien
gtagatatcgacagccagtaaaatt

SEQ ID NO: 3604183 - DNA, 25 bp, Homo sapien
gttttccctgtagatatcgacagcc

SEQ ID NO: 3604184 - DNA, 25 bp, Homo sapien
tcatatcacagacgaaaccagcaac

SEQ ID NO: 3604185 - DNA, 25 bp, Homo sapien
gattccagccgccagccataggaga

SEQ ID NO: 3604186 - DNA, 25 bp, Homo sapien
gccgccagccataggagatacctgc

SEQ ID NO: 3604187 - DNA, 25 bp, Homo sapien
gcagagattcctaagggctgggtct

SEQ ID NO: 3604188 - DNA, 25 bp, Homo sapien
gccataggagatacctgcaggcgtt

SEQ ID NO: 3604189 - DNA, 25 bp, Homo sapien
gagattgcaattaagatagcacggg

SEQ ID NO: 3604190 - DNA, 25 bp, Homo sapien
gtattatttactccggctccctgca

SEQ ID NO: 3604191 - DNA, 25 bp, Homo sapien
ggcttttccatttcgtaacctgcag

SEQ ID NO: 3604192 - DNA, 25 bp, Homo sapien
tgcaaagtccaaaacgacaatgggc

SEQ ID NO: 3604193 - DNA, 25 bp, Homo sapien
gatgtgagtggctttataaccagca

SEQ ID NO: 3604194 - DNA, 25 bp, Homo sapien
taaccagcatgaggaagatttccac

SEQ ID NO: 3604195 - DNA, 25 bp, Homo sapien
cgagagcatttgtgtggacccaggt

SEQ ID NO: 3604196 - DNA, 25 bp, Homo sapien
tctctcttcgagagcatttgtgtgg

SEQ ID NO: 3604197 - DNA, 25 bp, Homo sapien
tgtgtcacactttcccggagctccc

SEQ ID NO: 3604198 - DNA, 25 bp, Homo sapien
tccccaggctaatgtcctgctgccg

SEQ ID NO: 3604199 - DNA, 25 bp, Homo sapien
actttcccggagctccctctgacaa

SEQ ID NO: 3604200 - DNA, 25 bp, Homo sapien
caggctaatgtcctgctgccgcccg

SEQ ID NO: 3604201 - DNA, 25 bp, Homo sapien
ttattgcttgcagttaatgggaggg

SEQ ID NO: 3604202 - DNA, 25 bp, Homo sapien
tgcttgcagttaatgggagggtaga

SEQ ID NO: 3604203 - DNA, 25 bp, Homo sapien
attgcttgcagttaatgggagggta

SEQ ID NO: 3604204 - DNA, 25 bp, Homo sapien
cttgcagttaatgggagggtagagg

SEQ ID NO: 3604205 - DNA, 25 bp, Homo sapien
tgttttggagacactggcccactgg

SEQ ID NO: 3604206 - DNA, 25 bp, Homo sapien
tgggcctgggaccattgcagacact

SEQ ID NO: 3604207 - DNA, 25 bp, Homo sapien
ccagttagaggcatgggtttcttcc

SEQ ID NO: 3604208 - DNA, 25 bp, Homo sapien
tgttcatattcccagcaagaaggac

SEQ ID NO: 3604209 - DNA, 25 bp, Homo sapien
gataattacatgttggaacatctgc

SEQ ID NO: 3604210 - DNA, 25 bp, Homo sapien
gccttctggaattgccggcctggct

SEQ ID NO: 3604211 - DNA, 25 bp, Homo sapien
ccaaactgattagttgataattaca

SEQ ID NO: 3604212 - DNA, 25 bp, Homo sapien
tcccgctcggcagcacctggctggg

SEQ ID NO: 3604213 - DNA, 25 bp, Homo sapien
ctgttgacatcaatagctctataaa

SEQ ID NO: 3604214 - DNA, 25 bp, Homo sapien
atagctctataaatagatgctgcca

SEQ ID NO: 3604215 - DNA, 25 bp, Homo sapien
tcactgttgacatcaatagctctat

SEQ ID NO: 3604216 - DNA, 25 bp, Homo sapien
gaaatcactgttgacatcaatagct

SEQ ID NO: 3604217 - DNA, 25 bp, Homo sapien
aatatttggcattcattgtttgagg

SEQ ID NO: 3604218 - DNA, 25 bp, Homo sapien
ttattaggtctaggagacatggctt

SEQ ID NO: 3604219 - DNA, 25 bp, Homo sapien
ggagacatggctttcttagcaaaat

SEQ ID NO: 3604220 - DNA, 25 bp, Homo sapien
agagcatcaagttctagatcatggt

SEQ ID NO: 3604221 - DNA, 25 bp, Homo sapien
agaagttatcagcaatgactgcctc

SEQ ID NO: 3604222 - DNA, 25 bp, Homo sapien
gaagttatcagcaatgactgcctca

SEQ ID NO: 3604223 - DNA, 25 bp, Homo sapien
tttcgaagagttttggcaggctaca

SEQ ID NO: 3604224 - DNA, 25 bp, Homo sapien
tctacaggtaacttctgcctagctt

SEQ ID NO: 3604225 - DNA, 25 bp, Homo sapien
ttcccctgaagctcatttcgaagag

SEQ ID NO: 3604226 - DNA, 25 bp, Homo sapien
ttgaggaacgcatctagcaatcttc

SEQ ID NO: 3604227 - DNA, 25 bp, Homo sapien
taatcacagaggcagccaatgccca

SEQ ID NO: 3604228 - DNA, 25 bp, Homo sapien
aatcacagaggcagccaatgcccat

SEQ ID NO: 3604229 - DNA, 25 bp, Homo sapien
tcacagaggcagccaatgcccattc

SEQ ID NO: 3604230 - DNA, 25 bp, Homo sapien
ctaatcacagaggcagccaatgccc

SEQ ID NO: 3604231 - DNA, 25 bp, Homo sapien
gaagctagccaagctggcaaacacc

SEQ ID NO: 3604232 - DNA, 25 bp, Homo sapien
ctgaagctagccaagctggcaaaca

SEQ ID NO: 3604233 - DNA, 25 bp, Homo sapien
tgaagctagccaagctggcaaacac

SEQ ID NO: 3604234 - DNA, 25 bp, Homo sapien
tctgaagctagccaagctggcaaac

SEQ ID NO: 3604235 - DNA, 25 bp, Homo sapien
gtaacactcaaggtacattctgcat

SEQ ID NO: 3604236 - DNA, 25 bp, Homo sapien
gctcacatataatccctactcgcta

SEQ ID NO: 3604237 - DNA, 25 bp, Homo sapien
tgcactcaagcactcatgtaacact

SEQ ID NO: 3604238 - DNA, 25 bp, Homo sapien
tactcgctaaaacacatgcaccaac

SEQ ID NO: 3604239 - DNA, 25 bp, Homo sapien
gataaaattatgtagttattactga

SEQ ID NO: 3604240 - DNA, 25 bp, Homo sapien
tcagtaataactacataattttatc

SEQ ID NO: 3604241 - DNA, 25 bp, Homo sapien
agacaaacctgacacctcctccaga

SEQ ID NO: 3604242 - DNA, 25 bp, Homo sapien
ccagagggaaggccactctttggct

SEQ ID NO: 3604243 - DNA, 25 bp, Homo sapien
agagggaaggccactctttggctct

SEQ ID NO: 3604244 - DNA, 25 bp, Homo sapien
cagagggaaggccactctttggctc

SEQ ID NO: 3604245 - DNA, 25 bp, Homo sapien
tccacactattgtagcacactgtgc

SEQ ID NO: 3604246 - DNA, 25 bp, Homo sapien
acactattgtagcacactgtgcaca

SEQ ID NO: 3604247 - DNA, 25 bp, Homo sapien
tcctccacactattgtagcacactg

SEQ ID NO: 3604248 - DNA, 25 bp, Homo sapien
tcctctcctccacactattgtagca

SEQ ID NO: 3604249 - DNA, 25 bp, Homo sapien
ttaccacaattccatgaagtatgat

SEQ ID NO: 3604250 - DNA, 25 bp, Homo sapien
taccacaattccatgaagtatgatt

SEQ ID NO: 3604251 - DNA, 25 bp, Homo sapien
aagcggggagtagcctatgggagcc

SEQ ID NO: 3604252 - DNA, 25 bp, Homo sapien
cagattccagcaggatatggagaag

SEQ ID NO: 3604253 - DNA, 25 bp, Homo sapien
cctgccataggcagaaagcctggca

SEQ ID NO: 3604254 - DNA, 25 bp, Homo sapien
aagatttgagaagatcttcttgaag

SEQ ID NO: 3604255 - DNA, 25 bp, Homo sapien
attccctctcctaaccagtgtgact

SEQ ID NO: 3604256 - DNA, 25 bp, Homo sapien
gagttctagtgtctcggcggctcct

SEQ ID NO: 3604257 - DNA, 25 bp, Homo sapien
tatcatacatcaacactaggttgag

SEQ ID NO: 3604258 - DNA, 25 bp, Homo sapien
tgcctttcagtaacgtgccctggtt

SEQ ID NO: 3604259 - DNA, 25 bp, Homo sapien
tgatcggggacagtatgtgctacgc

SEQ ID NO: 3604260 - DNA, 25 bp, Homo sapien
tggacagtgtgggccacgcacttgc

SEQ ID NO: 3604261 - DNA, 25 bp, Homo sapien
cacactcgctgtgtgaccggggaca

SEQ ID NO: 3604262 - DNA, 25 bp, Homo sapien
ggacagcgtggtgcgcgcactggct

SEQ ID NO: 3604263 - DNA, 25 bp, Homo sapien
taccatcagatgcagacgtaaggcc

SEQ ID NO: 3604264 - DNA, 25 bp, Homo sapien
tgggtccttgactgctaccatcaga

SEQ ID NO: 3604265 - DNA, 25 bp, Homo sapien
tgggctcaggacttgttgcagttac

SEQ ID NO: 3604266 - DNA, 25 bp, Homo sapien
cagctgtaggaagtggactttgcct

SEQ ID NO: 3604267 - DNA, 25 bp, Homo sapien
tgaatgatgcactaagacaattctc

SEQ ID NO: 3604268 - DNA, 25 bp, Homo sapien
caatctctgaagctcagcgctgtat

SEQ ID NO: 3604269 - DNA, 25 bp, Homo sapien
tggaccccacgcacatgaatgatgc

SEQ ID NO: 3604270 - DNA, 25 bp, Homo sapien
aagcagtggcatttcgttctggacc

SEQ ID NO: 3604271 - DNA, 25 bp, Homo sapien
agcacaaggactccgggccggttat

SEQ ID NO: 3604272 - DNA, 25 bp, Homo sapien
atgattcacgacacagcggcaggag

SEQ ID NO: 3604273 - DNA, 25 bp, Homo sapien
aagccatcaatcttgagctgagatt

SEQ ID NO: 3604274 - DNA, 25 bp, Homo sapien
tccgggccggttatgaagccatcaa

SEQ ID NO: 3604275 - DNA, 25 bp, Homo sapien
tgaataagccccaagaaactaaggc

SEQ ID NO: 3604276 - DNA, 25 bp, Homo sapien
aaagacataacactttccatggcct

SEQ ID NO: 3604277 - DNA, 25 bp, Homo sapien
tagactctccattttggcaatgggc

SEQ ID NO: 3604278 - DNA, 25 bp, Homo sapien
tggccttcgacagccgataaccctg

SEQ ID NO: 3604279 - DNA, 25 bp, Homo sapien
gctgcccagatctccaatctacaag

SEQ ID NO: 3604280 - DNA, 25 bp, Homo sapien
cccagatctccaatctacaaggtgc

SEQ ID NO: 3604281 - DNA, 25 bp, Homo sapien
tgcccagatctccaatctacaaggt

SEQ ID NO: 3604282 - DNA, 25 bp, Homo sapien
agctgcccagatctccaatctacaa

SEQ ID NO: 3604283 - DNA, 25 bp, Homo sapien
tctgtttccactgtaattcttgcca

SEQ ID NO: 3604284 - DNA, 25 bp, Homo sapien
tgtttccactgtaattcttgccatc

SEQ ID NO: 3604285 - DNA, 25 bp, Homo sapien
aactctgtttccactgtaattcttg

SEQ ID NO: 3604286 - DNA, 25 bp, Homo sapien
cttaactctgtttccactgtaattc

SEQ ID NO: 3604287 - DNA, 25 bp, Homo sapien
gattgctttgcaattgcccagttcc

SEQ ID NO: 3604288 - DNA, 25 bp, Homo sapien
ccagttccagcaatacatatgcagc

SEQ ID NO: 3604289 - DNA, 25 bp, Homo sapien
ttgaatctgttagaaaggaaactcc

SEQ ID NO: 3604290 - DNA, 25 bp, Homo sapien
gtgagaattatctgctgacagtgac

SEQ ID NO: 3604291 - DNA, 25 bp, Homo sapien
tcagtatgttttctgttttctggac

SEQ ID NO: 3604292 - DNA, 25 bp, Homo sapien
gaatcagagccgagcagggcatctc

SEQ ID NO: 3604293 - DNA, 25 bp, Homo sapien
cacatgcaggattcctgctccagag

SEQ ID NO: 3604294 - DNA, 25 bp, Homo sapien
gattcctgctccagagaatcagagc

SEQ ID NO: 3604295 - DNA, 25 bp, Homo sapien
tctctaagtgcagtgtacaccacca

SEQ ID NO: 3604296 - DNA, 25 bp, Homo sapien
tcatcaaaggcaccgtatttccagg

SEQ ID NO: 3604297 - DNA, 25 bp, Homo sapien
ggccctcatcaaaggcaccgtattt

SEQ ID NO: 3604298 - DNA, 25 bp, Homo sapien
cagatggccctcatcaaaggcaccg

SEQ ID NO: 3604299 - DNA, 25 bp, Homo sapien
aaggcaccgtatttccaggccctct

SEQ ID NO: 3604300 - DNA, 25 bp, Homo sapien
tccctgctgaatgattgtcccgaac

SEQ ID NO: 3604301 - DNA, 25 bp, Homo sapien
cgttatataacggagctggaacctt

SEQ ID NO: 3604302 - DNA, 25 bp, Homo sapien
gggtgcattactgtagcgccgttat

SEQ ID NO: 3604303 - DNA, 25 bp, Homo sapien
tgattgtcccgaaccaacaattcag

SEQ ID NO: 3604304 - DNA, 25 bp, Homo sapien
ttaaaagtacagatccaaaccagat

SEQ ID NO: 3604305 - DNA, 25 bp, Homo sapien
taaaagtacagatccaaaccagatc

SEQ ID NO: 3604306 - DNA, 25 bp, Homo sapien
tttctgctgcattctgccagctcag

SEQ ID NO: 3604307 - DNA, 25 bp, Homo sapien
ggactgggaaagagatcccagttcc

SEQ ID NO: 3604308 - DNA, 25 bp, Homo sapien
aaagagatcccagttcctgggccct

SEQ ID NO: 3604309 - DNA, 25 bp, Homo sapien
tctgctgcattctgccagctcaggg

SEQ ID NO: 3604310 - DNA, 25 bp, Homo sapien
gtctgggcccctgataagggcttgt

SEQ ID NO: 3604311 - DNA, 25 bp, Homo sapien
ctgagatgctcagacttcccagcag

SEQ ID NO: 3604312 - DNA, 25 bp, Homo sapien
gagatgctcagacttcccagcagca

SEQ ID NO: 3604313 - DNA, 25 bp, Homo sapien
tgtctgggcccctgataagggcttg

SEQ ID NO: 3604314 - DNA, 25 bp, Homo sapien
cctttgagtactccactccgtccaa

SEQ ID NO: 3604315 - DNA, 25 bp, Homo sapien
tttgagtactccactccgtccaaat

SEQ ID NO: 3604316 - DNA, 25 bp, Homo sapien
tgagtactccactccgtccaaatta

SEQ ID NO: 3604317 - DNA, 25 bp, Homo sapien
gagtactccactccgtccaaattac

SEQ ID NO: 3604318 - DNA, 25 bp, Homo sapien
cacgctttcttgttgggtaccttga

SEQ ID NO: 3604319 - DNA, 25 bp, Homo sapien
tctcgcaggtggacccattaatggc

SEQ ID NO: 3604320 - DNA, 25 bp, Homo sapien
tgcctgctagatttccacgctttct

SEQ ID NO: 3604321 - DNA, 25 bp, Homo sapien
gtacagcctgtcagctctctaatta

SEQ ID NO: 3604322 - DNA, 25 bp, Homo sapien
gaggcctgtctctctcaatggactc

SEQ ID NO: 3604323 - DNA, 25 bp, Homo sapien
ggcctgtctctctcaatggactctg

SEQ ID NO: 3604324 - DNA, 25 bp, Homo sapien
aagaggcctgtctctctcaatggac

SEQ ID NO: 3604325 - DNA, 25 bp, Homo sapien
agaggcctgtctctctcaatggact

SEQ ID NO: 3604326 - DNA, 25 bp, Homo sapien
tgctctggtggatgaatgtcctcgt

SEQ ID NO: 3604327 - DNA, 25 bp, Homo sapien
tttgcctacagtgctctggcccagg

SEQ ID NO: 3604328 - DNA, 25 bp, Homo sapien
gagtcaccctttatctgacaggtca

SEQ ID NO: 3604329 - DNA, 25 bp, Homo sapien
gaatgtcctcgtacaatgagtcacc

SEQ ID NO: 3604330 - DNA, 25 bp, Homo sapien
agctgcctgcgtgatgcccaagcag

SEQ ID NO: 3604331 - DNA, 25 bp, Homo sapien
cagtaggtggaacatctgtacagct

SEQ ID NO: 3604332 - DNA, 25 bp, Homo sapien
agtaggtggaacatctgtacagctg

SEQ ID NO: 3604333 - DNA, 25 bp, Homo sapien
tgcctgcgtgatgcccaagcagccc

SEQ ID NO: 3604334 - DNA, 25 bp, Homo sapien
agagccagacctcccttgcacaaat

SEQ ID NO: 3604335 - DNA, 25 bp, Homo sapien
gaatttgatgctttcactctcttga

SEQ ID NO: 3604336 - DNA, 25 bp, Homo sapien
gctgccccaagatagaatttgatgc

SEQ ID NO: 3604337 - DNA, 25 bp, Homo sapien
gctttcactctcttgagtgaggaag

SEQ ID NO: 3604338 - DNA, 25 bp, Homo sapien
gcccggctgccccaagatagaattt

SEQ ID NO: 3604339 - DNA, 25 bp, Homo sapien
ggccttgcgttatgctcagagcttc

SEQ ID NO: 3604340 - DNA, 25 bp, Homo sapien
cttgcgttatgctcagagcttctct

SEQ ID NO: 3604341 - DNA, 25 bp, Homo sapien
ttttcccacatctcatccctccaac

SEQ ID NO: 3604342 - DNA, 25 bp, Homo sapien
catctcatccctccaacggtaggtg

SEQ ID NO: 3604343 - DNA, 25 bp, Homo sapien
tgcagccatccaagggggagccaag

SEQ ID NO: 3604344 - DNA, 25 bp, Homo sapien
caacgtccatttgacattgtgacaa

SEQ ID NO: 3604345 - DNA, 25 bp, Homo sapien
tcttcctgggaaagactatcttcac

SEQ ID NO: 3604346 - DNA, 25 bp, Homo sapien
catagaaccataagctcaaaaaggg

SEQ ID NO: 3604347 - DNA, 25 bp, Homo sapien
gataaacgatgatgtatggcagcct

SEQ ID NO: 3604348 - DNA, 25 bp, Homo sapien
acgatgatgtatggcagccttcttc

SEQ ID NO: 3604349 - DNA, 25 bp, Homo sapien
taaacgatgatgtatggcagccttc

SEQ ID NO: 3604350 - DNA, 25 bp, Homo sapien
tgataaacgatgatgtatggcagcc

SEQ ID NO: 3604351 - DNA, 25 bp, Homo sapien
catattccacttttaacttgccggg

SEQ ID NO: 3604352 - DNA, 25 bp, Homo sapien
acagccttgcttctggcattcctcc

SEQ ID NO: 3604353 - DNA, 25 bp, Homo sapien
ttcaatatctccactgggccactgg

SEQ ID NO: 3604354 - DNA, 25 bp, Homo sapien
caatatctccactgggccactggac

SEQ ID NO: 3604355 - DNA, 25 bp, Homo sapien
ctgagcacggtcagtgtcggagaaa

SEQ ID NO: 3604356 - DNA, 25 bp, Homo sapien
tgagcacggtcagtgtcggagaaat

SEQ ID NO: 3604357 - DNA, 25 bp, Homo sapien
ccattcaccttttcagtatatagag

SEQ ID NO: 3604358 - DNA, 25 bp, Homo sapien
gccccattcaccttttcagtatata

SEQ ID NO: 3604359 - DNA, 25 bp, Homo sapien
cccattcaccttttcagtatataga

SEQ ID NO: 3604360 - DNA, 25 bp, Homo sapien
ccccattcaccttttcagtatatag

SEQ ID NO: 3604361 - DNA, 25 bp, Homo sapien
tgtcattatgccagttgtatttaat

SEQ ID NO: 3604362 - DNA, 25 bp, Homo sapien
taagggtatccaagagacagctttc

SEQ ID NO: 3604363 - DNA, 25 bp, Homo sapien
tctttaatcactacagccttctttc

SEQ ID NO: 3604364 - DNA, 25 bp, Homo sapien
taaataccaatgttatgaatacgtt

SEQ ID NO: 3604365 - DNA, 25 bp, Homo sapien
aatgtcagcgatgcagaggagccag

SEQ ID NO: 3604366 - DNA, 25 bp, Homo sapien
tctcccacaaggctcgcggaaccac

SEQ ID NO: 3604367 - DNA, 25 bp, Homo sapien
cacagccctgcacacctacgagact

SEQ ID NO: 3604368 - DNA, 25 bp, Homo sapien
cctgcacacctacgagactccacat

SEQ ID NO: 3604369 - DNA, 25 bp, Homo sapien
tacgagactccacatccttgacggc

SEQ ID NO: 3604370 - DNA, 25 bp, Homo sapien
tctcaacctaaagcagagctgccag

SEQ ID NO: 3604371 - DNA, 25 bp, Homo sapien
aatattccaacgcttccccttgagg

SEQ ID NO: 3604372 - DNA, 25 bp, Homo sapien
tagaagtggccttaccctggaggaa

SEQ ID NO: 3604373 - DNA, 25 bp, Homo sapien
cagcacatggagaagatttgaacac

SEQ ID NO: 3604374 - DNA, 25 bp, Homo sapien
aatgttgtctcaatgttatatctgg

SEQ ID NO: 3604375 - DNA, 25 bp, Homo sapien
gatttctccagacaacacttcatgt

SEQ ID NO: 3604376 - DNA, 25 bp, Homo sapien
atgtggttctgaggctcccgcttag

SEQ ID NO: 3604377 - DNA, 25 bp, Homo sapien
ggttctgaggctcccgcttagctgg

SEQ ID NO: 3604378 - DNA, 25 bp, Homo sapien
ctgatcaaagttgttctgaatacaa

SEQ ID NO: 3604379 - DNA, 25 bp, Homo sapien
ttgttctgaatacaaacatggcctc

SEQ ID NO: 3604380 - DNA, 25 bp, Homo sapien
aagttgttctgaatacaaacatggc

SEQ ID NO: 3604381 - DNA, 25 bp, Homo sapien
tcaaagttgttctgaatacaaacat

SEQ ID NO: 3604382 - DNA, 25 bp, Homo sapien
gaaagtggcggagttatagagtact

SEQ ID NO: 3604383 - DNA, 25 bp, Homo sapien
ctaatagtacgcataaaaggcaggg

SEQ ID NO: 3604384 - DNA, 25 bp, Homo sapien
acaggaggaaagtggcggagttata

SEQ ID NO: 3604385 - DNA, 25 bp, Homo sapien
ttatgtctgcagttaggtcctctcc

SEQ ID NO: 3604386 - DNA, 25 bp, Homo sapien
gagaagccagagcatgctgcagtct

SEQ ID NO: 3604387 - DNA, 25 bp, Homo sapien
gcagagaagccagagcatgctgcag

SEQ ID NO: 3604388 - DNA, 25 bp, Homo sapien
agagaagccagagcatgctgcagtc

SEQ ID NO: 3604389 - DNA, 25 bp, Homo sapien
aagccagagcatgctgcagtctgtg

SEQ ID NO: 3604390 - DNA, 25 bp, Homo sapien
agcgatgcccatggcagagtctgtg

SEQ ID NO: 3604391 - DNA, 25 bp, Homo sapien
ttcttctgacaaatccttatcagcg

SEQ ID NO: 3604392 - DNA, 25 bp, Homo sapien
cacagcgcttggctggttcataccg

SEQ ID NO: 3604393 - DNA, 25 bp, Homo sapien
cacagattagctcttcacagcgctt

SEQ ID NO: 3604394 - DNA, 25 bp, Homo sapien
tggaatgctgatgttccaggtagac

SEQ ID NO: 3604395 - DNA, 25 bp, Homo sapien
tgttccaggtagactgttgcttttc

SEQ ID NO: 3604396 - DNA, 25 bp, Homo sapien
tcaagaacagcttttgatggtggaa

SEQ ID NO: 3604397 - DNA, 25 bp, Homo sapien
acaaagcctccctggagctccagcc

SEQ ID NO: 3604398 - DNA, 25 bp, Homo sapien
tctcactccagtccccagaagatga

SEQ ID NO: 3604399 - DNA, 25 bp, Homo sapien
ccctgcaactagaaggcctggaaag

SEQ ID NO: 3604400 - DNA, 25 bp, Homo sapien
cctctcactccagtccccagaagat

SEQ ID NO: 3604401 - DNA, 25 bp, Homo sapien
ctccctgcaactagaaggcctggaa

SEQ ID NO: 3604402 - DNA, 25 bp, Homo sapien
gatttatcttctccccggtagcctg

SEQ ID NO: 3604403 - DNA, 25 bp, Homo sapien
ttgtcaccaggactaatgttgatgg

SEQ ID NO: 3604404 - DNA, 25 bp, Homo sapien
gctttgatttgtcctcttgtcacca

SEQ ID NO: 3604405 - DNA, 25 bp, Homo sapien
atcttctccccggtagcctgcaggg

SEQ ID NO: 3604406 - DNA, 25 bp, Homo sapien
tgccagagacctcaaggaaaatgga

SEQ ID NO: 3604407 - DNA, 25 bp, Homo sapien
gaaaatggatgagcaactgacctgc

SEQ ID NO: 3604408 - DNA, 25 bp, Homo sapien
actgacctgcaaaataaataccagg

SEQ ID NO: 3604409 - DNA, 25 bp, Homo sapien
agcctcctgccagagacctcaagga

SEQ ID NO: 3604410 - DNA, 25 bp, Homo sapien
tgtcatctccagaatcaaaggatgt

SEQ ID NO: 3604411 - DNA, 25 bp, Homo sapien
atgtcatctccagaatcaaaggatg

SEQ ID NO: 3604412 - DNA, 25 bp, Homo sapien
aaggcagcaacttggtggctgtcca

SEQ ID NO: 3604413 - DNA, 25 bp, Homo sapien
gcatccatgccactgccacgtgccc

SEQ ID NO: 3604414 - DNA, 25 bp, Homo sapien
atccatgccactgccacgtgcccag

SEQ ID NO: 3604415 - DNA, 25 bp, Homo sapien
gagaactaggctcagcgtccaggtc

SEQ ID NO: 3604416 - DNA, 25 bp, Homo sapien
ctggataaacatgggcatctgcagg

SEQ ID NO: 3604417 - DNA, 25 bp, Homo sapien
tgggcatctgcaggcgggaccccca

SEQ ID NO: 3604418 - DNA, 25 bp, Homo sapien
acatgggcatctgcaggcgggaccc

SEQ ID NO: 3604419 - DNA, 25 bp, Homo sapien
ataaacatgggcatctgcaggcggg

SEQ ID NO: 3604420 - DNA, 25 bp, Homo sapien
gatgttccacttaacccctgattca

SEQ ID NO: 3604421 - DNA, 25 bp, Homo sapien
tgttccacttaacccctgattcaga

SEQ ID NO: 3604422 - DNA, 25 bp, Homo sapien
cgcatccgggcactctgggcatgat

SEQ ID NO: 3604423 - DNA, 25 bp, Homo sapien
tgtgggcctggctcgcatccgggca

SEQ ID NO: 3604424 - DNA, 25 bp, Homo sapien
tttaccgcgccttggatctgagatg

SEQ ID NO: 3604425 - DNA, 25 bp, Homo sapien
gacagtttgctctgcctacgtggca

SEQ ID NO: 3604426 - DNA, 25 bp, Homo sapien
caaggtcacggctgaatcagaggca

SEQ ID NO: 3604427 - DNA, 25 bp, Homo sapien
gcccagggaagaagcgatttgccca

SEQ ID NO: 3604428 - DNA, 25 bp, Homo sapien
tttaggctgcagtcaaaggttaacc

SEQ ID NO: 3604429 - DNA, 25 bp, Homo sapien
gggtgacactgaaagtccaaactga

SEQ ID NO: 3604430 - DNA, 25 bp, Homo sapien
caacccgaaggatgcagagacattc

SEQ ID NO: 3604431 - DNA, 25 bp, Homo sapien
caggaattgctaaccactggaggca

SEQ ID NO: 3604432 - DNA, 25 bp, Homo sapien
gctgagtctaagtaaatctgtaatc

SEQ ID NO: 3604433 - DNA, 25 bp, Homo sapien
ggttaaactcccatcacccagagct

SEQ ID NO: 3604434 - DNA, 25 bp, Homo sapien
gaggaagtaatgagctagaaataag

SEQ ID NO: 3604435 - DNA, 25 bp, Homo sapien
taagtgctatcggaagctgagtcta

SEQ ID NO: 3604436 - DNA, 25 bp, Homo sapien
tctttttgggtctcacggctgctgc

SEQ ID NO: 3604437 - DNA, 25 bp, Homo sapien
tctcccctcagtagcatccttttat

SEQ ID NO: 3604438 - DNA, 25 bp, Homo sapien
aggtgccatagccagggacttgtgg

SEQ ID NO: 3604439 - DNA, 25 bp, Homo sapien
agctctcatcgggtggctttcctgg

SEQ ID NO: 3604440 - DNA, 25 bp, Homo sapien
taaggcatagcctttgtaactgaag

SEQ ID NO: 3604441 - DNA, 25 bp, Homo sapien
cattggtgtctctgcaaggaaatct

SEQ ID NO: 3604442 - DNA, 25 bp, Homo sapien
caaggcccttctcgatgcattggtg

SEQ ID NO: 3604443 - DNA, 25 bp, Homo sapien
catctcccgggctacatttctggct

SEQ ID NO: 3604444 - DNA, 25 bp, Homo sapien
tattctgggagaggaggttagagaa

SEQ ID NO: 3604445 - DNA, 25 bp, Homo sapien
tctgggagaggaggttagagaaaac

SEQ ID NO: 3604446 - DNA, 25 bp, Homo sapien
tcactttattctgggagaggaggtt

SEQ ID NO: 3604447 - DNA, 25 bp, Homo sapien
ctttattctgggagaggaggttaga

SEQ ID NO: 3604448 - DNA, 25 bp, Homo sapien
cactttgggcctggccagacgttat

SEQ ID NO: 3604449 - DNA, 25 bp, Homo sapien
tcaaggggagatgcacagccttcag

SEQ ID NO: 3604450 - DNA, 25 bp, Homo sapien
tataagatcggccaccatgaagtgt

SEQ ID NO: 3604451 - DNA, 25 bp, Homo sapien
gccagacgttatctgcacatttata

SEQ ID NO: 3604452 - DNA, 25 bp, Homo sapien
aaatcgctgagtccacgtgggagcc

SEQ ID NO: 3604453 - DNA, 25 bp, Homo sapien
tcccaaagtaagagacaggtggagc

SEQ ID NO: 3604454 - DNA, 25 bp, Homo sapien
gaagtctcagcaacctaaacagcaa

SEQ ID NO: 3604455 - DNA, 25 bp, Homo sapien
tgcaaggcaaggacgatgacaacag

SEQ ID NO: 3604456 - DNA, 25 bp, Homo sapien
gagagcgcggcccccagcaacccag

SEQ ID NO: 3604457 - DNA, 25 bp, Homo sapien
gaaggatgagcggagaaggagagag

SEQ ID NO: 3604458 - DNA, 25 bp, Homo sapien
aaggacaggaaggatgagcggagaa

SEQ ID NO: 3604459 - DNA, 25 bp, Homo sapien
gagaacaaggacaggaaggatgagc

SEQ ID NO: 3604460 - DNA, 25 bp, Homo sapien
cagtgcactgtatacttaagaaaaa

SEQ ID NO: 3604461 - DNA, 25 bp, Homo sapien
taagacgtcggtgtgactaaagaac

SEQ ID NO: 3604462 - DNA, 25 bp, Homo sapien
gaaccaatacaaaatgcgaatggga

SEQ ID NO: 3604463 - DNA, 25 bp, Homo sapien
taaagaacaagcttatttggcatca

SEQ ID NO: 3604464 - DNA, 25 bp, Homo sapien
tacctgagacggaaaacaccaatcg

SEQ ID NO: 3604465 - DNA, 25 bp, Homo sapien
catgtaaatggtaacgtgactcctc

SEQ ID NO: 3604466 - DNA, 25 bp, Homo sapien
tatcgagaactgagagcgacagcag

SEQ ID NO: 3604467 - DNA, 25 bp, Homo sapien
gggtatctatactgagccgtctaca

SEQ ID NO: 3604468 - DNA, 25 bp, Homo sapien
catcggctcctttggcttcatgagt

SEQ ID NO: 3604469 - DNA, 25 bp, Homo sapien
tgtctgcgtctgctgcgtcatcggc

SEQ ID NO: 3604470 - DNA, 25 bp, Homo sapien
tttcttcggagttgttctgtcctcc

SEQ ID NO: 3604471 - DNA, 25 bp, Homo sapien
tctgctgcgtcatcggctcctttgg

SEQ ID NO: 3604472 - DNA, 25 bp, Homo sapien
catcagccgaagtggtgtgcaggca

SEQ ID NO: 3604473 - DNA, 25 bp, Homo sapien
aaggggtaaagcaccgtgactgtct

SEQ ID NO: 3604474 - DNA, 25 bp, Homo sapien
tggcctctgtgtaaagtggtacaga

SEQ ID NO: 3604475 - DNA, 25 bp, Homo sapien
ctgaaagatgaaggggtaaagcacc

SEQ ID NO: 3604476 - DNA, 25 bp, Homo sapien
taacctgggcacatcaaaccaaggc

SEQ ID NO: 3604477 - DNA, 25 bp, Homo sapien
tgtgaccagcttacacagagtctgg

SEQ ID NO: 3604478 - DNA, 25 bp, Homo sapien
taagtaccttagacctccactgctg

SEQ ID NO: 3604479 - DNA, 25 bp, Homo sapien
cagtcaagcagtatgcaagcaccta

SEQ ID NO: 3604480 - DNA, 25 bp, Homo sapien
caaccttgtaaagtctccaaaggca

SEQ ID NO: 3604481 - DNA, 25 bp, Homo sapien
agtttcaggaatcagataggccgtg

SEQ ID NO: 3604482 - DNA, 25 bp, Homo sapien
cacatacatcaaattgcctatcaag

SEQ ID NO: 3604483 - DNA, 25 bp, Homo sapien
gataggccgtgtggccacatacatc

SEQ ID NO: 3604484 - DNA, 25 bp, Homo sapien
aaaatagcgccccagaatgatgagc

SEQ ID NO: 3604485 - DNA, 25 bp, Homo sapien
tgatccactgccctgatcgagcctt

SEQ ID NO: 3604486 - DNA, 25 bp, Homo sapien
acgacgccaccgatcacggcatgat

SEQ ID NO: 3604487 - DNA, 25 bp, Homo sapien
aagcacagcatggcgaacaccacca

SEQ ID NO: 3604488 - DNA, 25 bp, Homo sapien
agaggaatagggatgtagagcttat

SEQ ID NO: 3604489 - DNA, 25 bp, Homo sapien
tagagcttattacaaggcaccagaa

SEQ ID NO: 3604490 - DNA, 25 bp, Homo sapien
aagccccggcgacactgtctccagg

SEQ ID NO: 3604491 - DNA, 25 bp, Homo sapien
ttattacaaggcaccagaagccccg

SEQ ID NO: 3604492 - DNA, 25 bp, Homo sapien
cagagaacaatcgagatggatcaag

SEQ ID NO: 3604493 - DNA, 25 bp, Homo sapien
agttacactgaggtaacaggctgac

SEQ ID NO: 3604494 - DNA, 25 bp, Homo sapien
aatcgagatggatcaagttacactg

SEQ ID NO: 3604495 - DNA, 25 bp, Homo sapien
aagttacactgaggtaacaggctga

SEQ ID NO: 3604496 - DNA, 25 bp, Homo sapien
gtgctgaatcgatctgttctcccca

SEQ ID NO: 3604497 - DNA, 25 bp, Homo sapien
atttcatgataagcagcataggagg

SEQ ID NO: 3604498 - DNA, 25 bp, Homo sapien
gttctccccacgaggcaatttcatg

SEQ ID NO: 3604499 - DNA, 25 bp, Homo sapien
cataggagggttaatgcatgtggaa

SEQ ID NO: 3604500 - DNA, 25 bp, Homo sapien
tgacctgactatttgagggtgctct

SEQ ID NO: 3604501 - DNA, 25 bp, Homo sapien
ggccctgacctagtcttagcgttca

SEQ ID NO: 3604502 - DNA, 25 bp, Homo sapien
tccagttgcagagcctaattaaggg

SEQ ID NO: 3604503 - DNA, 25 bp, Homo sapien
gaaggaagaaatagtctatccggcc

SEQ ID NO: 3604504 - DNA, 25 bp, Homo sapien
ggcaacagaagggtacagcatcttt

SEQ ID NO: 3604505 - DNA, 25 bp, Homo sapien
gcatctttctatagacgcccaatga

SEQ ID NO: 3604506 - DNA, 25 bp, Homo sapien
taggagaagtaaggtgctcaaaagc

SEQ ID NO: 3604507 - DNA, 25 bp, Homo sapien
tatctggtagattagggatatgcat

SEQ ID NO: 3604508 - DNA, 25 bp, Homo sapien
tgtggctacatcaccccttgctgaa

SEQ ID NO: 3604509 - DNA, 25 bp, Homo sapien
aataattgtccattgccaccaacgg

SEQ ID NO: 3604510 - DNA, 25 bp, Homo sapien
tattgagtcaagtacgacacctcca

SEQ ID NO: 3604511 - DNA, 25 bp, Homo sapien
tcttctgactgaggaacgacatgtt

SEQ ID NO: 3604512 - DNA, 25 bp, Homo sapien
aagcacatggcctataaatctgtcc

SEQ ID NO: 3604513 - DNA, 25 bp, Homo sapien
caagaagcacatggcctataaatct

SEQ ID NO: 3604514 - DNA, 25 bp, Homo sapien
tgtcccccttgcagttgctggatgc

SEQ ID NO: 3604515 - DNA, 25 bp, Homo sapien
tttcagtacaagaagcacatggcct

SEQ ID NO: 3604516 - DNA, 25 bp, Homo sapien
gaaatgcatttcaccaggaagactg

SEQ ID NO: 3604517 - DNA, 25 bp, Homo sapien
gagaaatgcatttcaccaggaagac

SEQ ID NO: 3604518 - DNA, 25 bp, Homo sapien
aggaagactgagagtgcaaattcaa

SEQ ID NO: 3604519 - DNA, 25 bp, Homo sapien
agaaatgcatttcaccaggaagact

SEQ ID NO: 3604520 - DNA, 25 bp, Homo sapien
tcaagtgtacagatccgtgacagct

SEQ ID NO: 3604521 - DNA, 25 bp, Homo sapien
tccaattctgctccgagattaagta

SEQ ID NO: 3604522 - DNA, 25 bp, Homo sapien
tacaacgctttcagcaggagggcat

SEQ ID NO: 3604523 - DNA, 25 bp, Homo sapien
taatggtgctcttttgagccgaaac

SEQ ID NO: 3604524 - DNA, 25 bp, Homo sapien
gccttccctatgaaaagcagagctg

SEQ ID NO: 3604525 - DNA, 25 bp, Homo sapien
gactgagaacagagagaagcttcga

SEQ ID NO: 3604526 - DNA, 25 bp, Homo sapien
caggacagttctaacccatctaggg

SEQ ID NO: 3604527 - DNA, 25 bp, Homo sapien
ggagagcgcttgacacactggagat

SEQ ID NO: 3604528 - DNA, 25 bp, Homo sapien
gtgcctcactcatgacatgaagcag

SEQ ID NO: 3604529 - DNA, 25 bp, Homo sapien
tgacatgaagcagccgtgcaagatg

SEQ ID NO: 3604530 - DNA, 25 bp, Homo sapien
cctcactcatgacatgaagcagccg

SEQ ID NO: 3604531 - DNA, 25 bp, Homo sapien
actcatgacatgaagcagccgtgca

SEQ ID NO: 3604532 - DNA, 25 bp, Homo sapien
ggctactggagtcgcacgaaaacca

SEQ ID NO: 3604533 - DNA, 25 bp, Homo sapien
actgggctactggagtcgcacgaaa

SEQ ID NO: 3604534 - DNA, 25 bp, Homo sapien
ggagtcgcacgaaaaccagaaatgg

SEQ ID NO: 3604535 - DNA, 25 bp, Homo sapien
tactggagtcgcacgaaaaccagaa

SEQ ID NO: 3604536 - DNA, 25 bp, Homo sapien
tcaggcatatggacatcacttcggt

SEQ ID NO: 3604537 - DNA, 25 bp, Homo sapien
gcaggcaacgaaaccagaggcagat

SEQ ID NO: 3604538 - DNA, 25 bp, Homo sapien
tcattttctgaatcgggcaggcaac

SEQ ID NO: 3604539 - DNA, 25 bp, Homo sapien
ttccctaagaggctacaagtgttcc

SEQ ID NO: 3604540 - DNA, 25 bp, Homo sapien
ctgcctgtcgtgtcccatcccgcag

SEQ ID NO: 3604541 - DNA, 25 bp, Homo sapien
cagttgcagggaggtgttcctgaca

SEQ ID NO: 3604542 - DNA, 25 bp, Homo sapien
tggactctgtagtcgagggcttcag

SEQ ID NO: 3604543 - DNA, 25 bp, Homo sapien
gttgtggtacaaccctccctgcctg

SEQ ID NO: 3604544 - DNA, 25 bp, Homo sapien
gagtgatgccccaaactgctcagat

SEQ ID NO: 3604545 - DNA, 25 bp, Homo sapien
gaaattgcgggacagagaaatctca

SEQ ID NO: 3604546 - DNA, 25 bp, Homo sapien
tccaggtgagagtttaccagctgct

SEQ ID NO: 3604547 - DNA, 25 bp, Homo sapien
taagttggccactactgcttgggtc

SEQ ID NO: 3604548 - DNA, 25 bp, Homo sapien
gccagttgacctggcccgatccatt

SEQ ID NO: 3604549 - DNA, 25 bp, Homo sapien
gggccagttgacctggcccgatcca

SEQ ID NO: 3604550 - DNA, 25 bp, Homo sapien
ttgggccagttgacctggcccgatc

SEQ ID NO: 3604551 - DNA, 25 bp, Homo sapien
tgacctggcccgatccattcctcat

SEQ ID NO: 3604552 - DNA, 25 bp, Homo sapien
tcctcaaactccttgccagagtcgt

SEQ ID NO: 3604553 - DNA, 25 bp, Homo sapien
tccccagggcgtgacaagaaaggtg

SEQ ID NO: 3604554 - DNA, 25 bp, Homo sapien
aaggtgactgctagtggaacttcag

SEQ ID NO: 3604555 - DNA, 25 bp, Homo sapien
agtcgtcttaaacgcagcactctgg

SEQ ID NO: 3604556 - DNA, 25 bp, Homo sapien
gtacatcctagacaagctcctggca

SEQ ID NO: 3604557 - DNA, 25 bp, Homo sapien
tttggcagaaggactcactgagcag

SEQ ID NO: 3604558 - DNA, 25 bp, Homo sapien
taactggagagtggctagtacatcc

SEQ ID NO: 3604559 - DNA, 25 bp, Homo sapien
gctcctggcaaatagggactttggc

SEQ ID NO: 3604560 - DNA, 25 bp, Homo sapien
tctattgtagctcccgtccatggca

SEQ ID NO: 3604561 - DNA, 25 bp, Homo sapien
gcaacagttctgtcacgtggctcag

SEQ ID NO: 3604562 - DNA, 25 bp, Homo sapien
tactcaaatgatcaggactcagggc

SEQ ID NO: 3604563 - DNA, 25 bp, Homo sapien
gacttcaggcaggtcaatgaggcac

SEQ ID NO: 3604564 - DNA, 25 bp, Homo sapien
ttgggtgattgatagaactgcagca

SEQ ID NO: 3604565 - DNA, 25 bp, Homo sapien
gtcctctcctgcgttaattaaattg

SEQ ID NO: 3604566 - DNA, 25 bp, Homo sapien
tgcagtgccttacctaatgactagc

SEQ ID NO: 3604567 - DNA, 25 bp, Homo sapien
ttttgtagaagtggatagagcaccc

SEQ ID NO: 3604568 - DNA, 25 bp, Homo sapien
gattgctcagcaaaccaaatggcca

SEQ ID NO: 3604569 - DNA, 25 bp, Homo sapien
tgagaggtcctcactgtccagttct

SEQ ID NO: 3604570 - DNA, 25 bp, Homo sapien
ctgagaggtcctcactgtccagttc

SEQ ID NO: 3604571 - DNA, 25 bp, Homo sapien
gagaggtcctcactgtccagttctt

SEQ ID NO: 3604572 - DNA, 25 bp, Homo sapien
gcggaattgggcaactgagtaaggc

SEQ ID NO: 3604573 - DNA, 25 bp, Homo sapien
tgcggaattgggcaactgagtaagg

SEQ ID NO: 3604574 - DNA, 25 bp, Homo sapien
ctgcggaattgggcaactgagtaag

SEQ ID NO: 3604575 - DNA, 25 bp, Homo sapien
cattcctcgagggacataaacaaaa

SEQ ID NO: 3604576 - DNA, 25 bp, Homo sapien
caaaacacttaagaactgaggatga

SEQ ID NO: 3604577 - DNA, 25 bp, Homo sapien
acacttaagaactgaggatgaattt

SEQ ID NO: 3604578 - DNA, 25 bp, Homo sapien
ttcttttcattcctcgagggacata

SEQ ID NO: 3604579 - DNA, 25 bp, Homo sapien
tacatagaggcacatacacagatgg

SEQ ID NO: 3604580 - DNA, 25 bp, Homo sapien
tgcagccattcgtaaacctcttgag

SEQ ID NO: 3604581 - DNA, 25 bp, Homo sapien
ggttcacgccgttagacagtagcac

SEQ ID NO: 3604582 - DNA, 25 bp, Homo sapien
gagtcccgtgactgaatgacagcct

SEQ ID NO: 3604583 - DNA, 25 bp, Homo sapien
gaccaaataagatgcccatagctga

SEQ ID NO: 3604584 - DNA, 25 bp, Homo sapien
gtatgctctttaaaacagtggctgg

SEQ ID NO: 3604585 - DNA, 25 bp, Homo sapien
gatgctacgaggattttggacaagg

SEQ ID NO: 3604586 - DNA, 25 bp, Homo sapien
caataaatcccttggctctaggtgt

SEQ ID NO: 3604587 - DNA, 25 bp, Homo sapien
cctgagatgtagcaagcactatggg

SEQ ID NO: 3604588 - DNA, 25 bp, Homo sapien
tagataaaagtcaggaggtgctcaa

SEQ ID NO: 3604589 - DNA, 25 bp, Homo sapien
taactgagcttaatggactgcaatg

SEQ ID NO: 3604590 - DNA, 25 bp, Homo sapien
taatagataaaagtcaggaggtgct

SEQ ID NO: 3604591 - DNA, 25 bp, Homo sapien
gcagtgctgagaaagtagataaaca

SEQ ID NO: 3604592 - DNA, 25 bp, Homo sapien
gtgctgagaaagtagataaacagta

SEQ ID NO: 3604593 - DNA, 25 bp, Homo sapien
ctgagaaagtagataaacagtaatg

SEQ ID NO: 3604594 - DNA, 25 bp, Homo sapien
cagtgctgagaaagtagataaacag

SEQ ID NO: 3604595 - DNA, 25 bp, Homo sapien
gaactgctggttctgtcgtcgccgt

SEQ ID NO: 3604596 - DNA, 25 bp, Homo sapien
cgtgaactgctggttctgtcgtcgc

SEQ ID NO: 3604597 - DNA, 25 bp, Homo sapien
gctggttctgtcgtcgccgttgtgt

SEQ ID NO: 3604598 - DNA, 25 bp, Homo sapien
actgctggttctgtcgtcgccgttg

SEQ ID NO: 3604599 - DNA, 25 bp, Homo sapien
tgttctcaaacacaacgggtgccat

SEQ ID NO: 3604600 - DNA, 25 bp, Homo sapien
tgtggagacgccaaaagactttctg

SEQ ID NO: 3604601 - DNA, 25 bp, Homo sapien
ggtatccaaagaagggcccagcaat

SEQ ID NO: 3604602 - DNA, 25 bp, Homo sapien
tgtgtatctcctagcaagagtggcc

SEQ ID NO: 3604603 - DNA, 25 bp, Homo sapien
catgtgttctggtgtcaagtttccc

SEQ ID NO: 3604604 - DNA, 25 bp, Homo sapien
catcgtgctgtacatattatgggca

SEQ ID NO: 3604605 - DNA, 25 bp, Homo sapien
tttgtctccataagcactagcatcg

SEQ ID NO: 3604606 - DNA, 25 bp, Homo sapien
tgttctcgcaaccacatgataaggg

SEQ ID NO: 3604607 - DNA, 25 bp, Homo sapien
tcgtggcaaatcatagtgaggctct

SEQ ID NO: 3604608 - DNA, 25 bp, Homo sapien
tgaatgaaaccacacggacaatttg

SEQ ID NO: 3604609 - DNA, 25 bp, Homo sapien
tatggtcagactatcaatacacagg

SEQ ID NO: 3604610 - DNA, 25 bp, Homo sapien
cagactccaaggaacctcgtggcaa

SEQ ID NO: 3604611 - DNA, 25 bp, Homo sapien
tctctctgaagggtctccacgatga

SEQ ID NO: 3604612 - DNA, 25 bp, Homo sapien
tcaggcgactcagaacagaatgtca

SEQ ID NO: 3604613 - DNA, 25 bp, Homo sapien
aatacgtattgcttttggaccatcc

SEQ ID NO: 3604614 - DNA, 25 bp, Homo sapien
tagatgtgtgccttcacgtgtaact

SEQ ID NO: 3604615 - DNA, 25 bp, Homo sapien
catacctgggcaagttctgcgaaga

SEQ ID NO: 3604616 - DNA, 25 bp, Homo sapien
taaagccgcagagttagaaccacag

SEQ ID NO: 3604617 - DNA, 25 bp, Homo sapien
tattttgtgcgcagggaggactcaa

SEQ ID NO: 3604618 - DNA, 25 bp, Homo sapien
ttccaatatgtgaccgagggcaggg

SEQ ID NO: 3604619 - DNA, 25 bp, Homo sapien
tatctgacgtactgttaaatgctgg

SEQ ID NO: 3604620 - DNA, 25 bp, Homo sapien
gtatctaatgtcgttggagttccaa

SEQ ID NO: 3604621 - DNA, 25 bp, Homo sapien
aaatgctgggatgtttctgaggtcc

SEQ ID NO: 3604622 - DNA, 25 bp, Homo sapien
gcataagctgcaaaatatctgacgt

SEQ ID NO: 3604623 - DNA, 25 bp, Homo sapien
gtggtggtggttgttgtgggaggag

SEQ ID NO: 3604624 - DNA, 25 bp, Homo sapien
tggttgttgtgggaggagggatagt

SEQ ID NO: 3604625 - DNA, 25 bp, Homo sapien
gtggtggttgttgtgggaggaggga

SEQ ID NO: 3604626 - DNA, 25 bp, Homo sapien
ctgtgatgatggtaaggatggtggt

SEQ ID NO: 3604627 - DNA, 25 bp, Homo sapien
cgtttcagcttttacagatggcagg

SEQ ID NO: 3604628 - DNA, 25 bp, Homo sapien
caaagccttagttggaagagctgag

SEQ ID NO: 3604629 - DNA, 25 bp, Homo sapien
caatggttgtcatttcgtttcagct

SEQ ID NO: 3604630 - DNA, 25 bp, Homo sapien
taaatcaactcagtaccaagagggt

SEQ ID NO: 3604631 - DNA, 25 bp, Homo sapien
gcctttaacaggtggatccctatat

SEQ ID NO: 3604632 - DNA, 25 bp, Homo sapien
actctggcccagacagttaattcta

SEQ ID NO: 3604633 - DNA, 25 bp, Homo sapien
ggttttcagataatgcactctggcc

SEQ ID NO: 3604634 - DNA, 25 bp, Homo sapien
cctagacaaggataggtgtaccatc

SEQ ID NO: 3604635 - DNA, 25 bp, Homo sapien
ttgtaaagagctggactgaaagcca

SEQ ID NO: 3604636 - DNA, 25 bp, Homo sapien
tataacctgcagtttgtaaagagct

SEQ ID NO: 3604637 - DNA, 25 bp, Homo sapien
agcaatgtcggggactcccatgagg

SEQ ID NO: 3604638 - DNA, 25 bp, Homo sapien
gtaaacccgggcaacagcaatgtcg

SEQ ID NO: 3604639 - DNA, 25 bp, Homo sapien
cattgaaatgccgatgcctctggtt

SEQ ID NO: 3604640 - DNA, 25 bp, Homo sapien
cctggttctaagacactgtggtgtg

SEQ ID NO: 3604641 - DNA, 25 bp, Homo sapien
tataaaactagagaggaggtgcaca

SEQ ID NO: 3604642 - DNA, 25 bp, Homo sapien
aaaacctcaggtataggctaaggat

SEQ ID NO: 3604643 - DNA, 25 bp, Homo sapien
ggccaggcttctttaagttctagaa

SEQ ID NO: 3604644 - DNA, 25 bp, Homo sapien
tcaggccaggcttctttaagttcta

SEQ ID NO: 3604645 - DNA, 25 bp, Homo sapien
ggagacactagggtccacctcaggc

SEQ ID NO: 3604646 - DNA, 25 bp, Homo sapien
gaagaaaagtcactatcccaggtgg

SEQ ID NO: 3604647 - DNA, 25 bp, Homo sapien
ttgagagtaaatcacaagtagcagc

SEQ ID NO: 3604648 - DNA, 25 bp, Homo sapien
gactgactctagtagaagagcattt

SEQ ID NO: 3604649 - DNA, 25 bp, Homo sapien
agtaaatcacaagtagcagctccat

SEQ ID NO: 3604650 - DNA, 25 bp, Homo sapien
ctgactctagtagaagagcatttta

SEQ ID NO: 3604651 - DNA, 25 bp, Homo sapien
tattgatgaacaggttgggcccaga

SEQ ID NO: 3604652 - DNA, 25 bp, Homo sapien
tcacagcggtatgtaccattatctg

SEQ ID NO: 3604653 - DNA, 25 bp, Homo sapien
cagtacggcgtgttgaggcatttca

SEQ ID NO: 3604654 - DNA, 25 bp, Homo sapien
ccccactatgtttgaagcttcacag

SEQ ID NO: 3604655 - DNA, 25 bp, Homo sapien
cccaagctcgtgggtagggctctca

SEQ ID NO: 3604656 - DNA, 25 bp, Homo sapien
gggcttcccgatggcttcacatgtt

SEQ ID NO: 3604657 - DNA, 25 bp, Homo sapien
ttaagccttgtagaggataagtcat

SEQ ID NO: 3604658 - DNA, 25 bp, Homo sapien
ggttaagccttgtagaggataagtc

SEQ ID NO: 3604659 - DNA, 25 bp, Homo sapien
atgttaactcaagcgcgtccccttc

SEQ ID NO: 3604660 - DNA, 25 bp, Homo sapien
gatatcatcaggcaaaatcagactc

SEQ ID NO: 3604661 - DNA, 25 bp, Homo sapien
aagtataatgtttagcaaatgatat

SEQ ID NO: 3604662 - DNA, 25 bp, Homo sapien
tcaaaaccacagtaccagcacttac

SEQ ID NO: 3604663 - DNA, 25 bp, Homo sapien
ctcccatccgatgccttcagtaaca

SEQ ID NO: 3604664 - DNA, 25 bp, Homo sapien
gccagagaacgtaaagttaacaagc

SEQ ID NO: 3604665 - DNA, 25 bp, Homo sapien
catactgagaattggtagtgctttc

SEQ ID NO: 3604666 - DNA, 25 bp, Homo sapien
gctgacccttgcaagttacacagtt

SEQ ID NO: 3604667 - DNA, 25 bp, Homo sapien
tacacagttctattcttggacacgt

SEQ ID NO: 3604668 - DNA, 25 bp, Homo sapien
tgtgatcttttcagaagatgaaact

SEQ ID NO: 3604669 - DNA, 25 bp, Homo sapien
aagatgaaactcaagattctgaacc

SEQ ID NO: 3604670 - DNA, 25 bp, Homo sapien
agatgaaactcaagattctgaacct

SEQ ID NO: 3604671 - DNA, 25 bp, Homo sapien
tctgtgatcttttcagaagatgaaa

SEQ ID NO: 3604672 - DNA, 25 bp, Homo sapien
tttttcacataattgggcacaacaa

SEQ ID NO: 3604673 - DNA, 25 bp, Homo sapien
gtatgacagcatacacatctggctg

SEQ ID NO: 3604674 - DNA, 25 bp, Homo sapien
tctcctggtatcacaaataagggtc

SEQ ID NO: 3604675 - DNA, 25 bp, Homo sapien
taaggattattaaaagtatgacagc

SEQ ID NO: 3604676 - DNA, 25 bp, Homo sapien
tcactttcctgcaattaaaggctcg

SEQ ID NO: 3604677 - DNA, 25 bp, Homo sapien
gctcgcagtactttgttagattgaa

SEQ ID NO: 3604678 - DNA, 25 bp, Homo sapien
ttagattgaagtcaaatggattcag

SEQ ID NO: 3604679 - DNA, 25 bp, Homo sapien
tggattcagatgtggagccttattc

SEQ ID NO: 3604680 - DNA, 25 bp, Homo sapien
tctactcaggacgtacaaaggagct

SEQ ID NO: 3604681 - DNA, 25 bp, Homo sapien
tgaattaacgaggaaaccctgcatt

SEQ ID NO: 3604682 - DNA, 25 bp, Homo sapien
tattattaaagctaatgggccccta

SEQ ID NO: 3604683 - DNA, 25 bp, Homo sapien
gttaaattgagccaagctcacggag

SEQ ID NO: 3604684 - DNA, 25 bp, Homo sapien
tacttctagataccgctgggtctgc

SEQ ID NO: 3604685 - DNA, 25 bp, Homo sapien
actgtacttctagataccgctgggt

SEQ ID NO: 3604686 - DNA, 25 bp, Homo sapien
agtgtacatgtctgaccactcttcc

SEQ ID NO: 3604687 - DNA, 25 bp, Homo sapien
ggtcacagtgtacatgtctgaccac

SEQ ID NO: 3604688 - DNA, 25 bp, Homo sapien
tcgatcatcagattacgtggtggga

SEQ ID NO: 3604689 - DNA, 25 bp, Homo sapien
gtgcagttgacttcaatctcctcac

SEQ ID NO: 3604690 - DNA, 25 bp, Homo sapien
gaaccacctgatagtcgtggctggc

SEQ ID NO: 3604691 - DNA, 25 bp, Homo sapien
cgcagtgtctttctggatatcgatc

SEQ ID NO: 3604692 - DNA, 25 bp, Homo sapien
tctcagtggaaagtctttattgcct

SEQ ID NO: 3604693 - DNA, 25 bp, Homo sapien
cagtggaaagtctttattgcctcca

SEQ ID NO: 3604694 - DNA, 25 bp, Homo sapien
actacctcgttcatcttcaatgata

SEQ ID NO: 3604695 - DNA, 25 bp, Homo sapien
cttcactacctcgttcatcttcaat

SEQ ID NO: 3604696 - DNA, 25 bp, Homo sapien
tccttcatcagaaattgagacgttt

SEQ ID NO: 3604697 - DNA, 25 bp, Homo sapien
tgtcaatgatactttgagttcactg

SEQ ID NO: 3604698 - DNA, 25 bp, Homo sapien
ggatcggtatagagctggcaaaagt

SEQ ID NO: 3604699 - DNA, 25 bp, Homo sapien
tatagagctggcaaaagtatcttcc

SEQ ID NO: 3604700 - DNA, 25 bp, Homo sapien
tggacacttctatatgccaaaggct

SEQ ID NO: 3604701 - DNA, 25 bp, Homo sapien
tgggactcgattgcaattcaccttg

SEQ ID NO: 3604702 - DNA, 25 bp, Homo sapien
cttactaagccctgacactgatatg

SEQ ID NO: 3604703 - DNA, 25 bp, Homo sapien
tggaaagatttcagcatgtggacac

SEQ ID NO: 3604704 - DNA, 25 bp, Homo sapien
gtccctgaaataaatggtctgcctg

SEQ ID NO: 3604705 - DNA, 25 bp, Homo sapien
gacttggcaactgatggtcgcaacc

SEQ ID NO: 3604706 - DNA, 25 bp, Homo sapien
gctgaatcacagagtcgtcactctt

SEQ ID NO: 3604707 - DNA, 25 bp, Homo sapien
cgtctttcgtaaacagattctgccc

SEQ ID NO: 3604708 - DNA, 25 bp, Homo sapien
taagctatttggtcagcctcacaga

SEQ ID NO: 3604709 - DNA, 25 bp, Homo sapien
gttagttgatgttgacagtcccaat

SEQ ID NO: 3604710 - DNA, 25 bp, Homo sapien
caatgtataggcagttcatcgtgtg

SEQ ID NO: 3604711 - DNA, 25 bp, Homo sapien
tcaaggagccacttaatagaagtag

SEQ ID NO: 3604712 - DNA, 25 bp, Homo sapien
cataacaaggttccacttttcagtc

SEQ ID NO: 3604713 - DNA, 25 bp, Homo sapien
taaggtctattgtgtcaagctgcat

SEQ ID NO: 3604714 - DNA, 25 bp, Homo sapien
aacatctccttgacaccaattaagg

SEQ ID NO: 3604715 - DNA, 25 bp, Homo sapien
tttcagtcttattgggcattttccc

SEQ ID NO: 3604716 - DNA, 25 bp, Homo sapien
tatcatctccattacacagacaagg

SEQ ID NO: 3604717 - DNA, 25 bp, Homo sapien
gcaaccagcatgttccaatatgtga

SEQ ID NO: 3604718 - DNA, 25 bp, Homo sapien
aaacagccaatctatcagcaaccag

SEQ ID NO: 3604719 - DNA, 25 bp, Homo sapien
tatactgaataagtggttggaacca

SEQ ID NO: 3604720 - DNA, 25 bp, Homo sapien
ttggaacacatcagatatggactca

SEQ ID NO: 3604721 - DNA, 25 bp, Homo sapien
agcaagtaaggatatcagttggaac

SEQ ID NO: 3604722 - DNA, 25 bp, Homo sapien
aagcttagagccgacaggacaagca

SEQ ID NO: 3604723 - DNA, 25 bp, Homo sapien
ggactcagagtgaatgtcagtttca

SEQ ID NO: 3604724 - DNA, 25 bp, Homo sapien
gcagtttcagagagaataacattct

SEQ ID NO: 3604725 - DNA, 25 bp, Homo sapien
ccttcattgcaatgggagcagatct

SEQ ID NO: 3604726 - DNA, 25 bp, Homo sapien
tgcttgtcacatttagagtgtgaat

SEQ ID NO: 3604727 - DNA, 25 bp, Homo sapien
cagttttctgctgggttactaagtg

SEQ ID NO: 3604728 - DNA, 25 bp, Homo sapien
ttaatctacagatgaaagcagagct

SEQ ID NO: 3604729 - DNA, 25 bp, Homo sapien
cttaacgttcggtatagcccaagag

SEQ ID NO: 3604730 - DNA, 25 bp, Homo sapien
agagctacggtctctacctctctgt

SEQ ID NO: 3604731 - DNA, 25 bp, Homo sapien
ggaaagaggtgcttaatctacagat

SEQ ID NO: 3604732 - DNA, 25 bp, Homo sapien
tgattccaacccaaagggatttgag

SEQ ID NO: 3604733 - DNA, 25 bp, Homo sapien
tgtaagtcataagtatgttcgtccc

SEQ ID NO: 3604734 - DNA, 25 bp, Homo sapien
gcactcactttcaaggcatttagaa

SEQ ID NO: 3604735 - DNA, 25 bp, Homo sapien
tgttcgtcccatagaaaacactgaa

SEQ ID NO: 3604736 - DNA, 25 bp, Homo sapien
tgctttctcatgataacaccgaggt

SEQ ID NO: 3604737 - DNA, 25 bp, Homo sapien
gaatgttggtacaacactgcatgat

SEQ ID NO: 3604738 - DNA, 25 bp, Homo sapien
cagtttgaagagtaccggtcagcta

SEQ ID NO: 3604739 - DNA, 25 bp, Homo sapien
aatctgggtttgtttcatgctttct

SEQ ID NO: 3604740 - DNA, 25 bp, Homo sapien
caggctcagagaagcagtggtttca

SEQ ID NO: 3604741 - DNA, 25 bp, Homo sapien
gaaggacacgtgcaaaagaactcag

SEQ ID NO: 3604742 - DNA, 25 bp, Homo sapien
gatatttatgacacggtcaccgggc

SEQ ID NO: 3604743 - DNA, 25 bp, Homo sapien
gaatatatcgttaacacatcccagg

SEQ ID NO: 3604744 - DNA, 25 bp, Homo sapien
tctggaagcactattgagggtaacc

SEQ ID NO: 3604745 - DNA, 25 bp, Homo sapien
gccacaggtccttgaagcagggaaa

SEQ ID NO: 3604746 - DNA, 25 bp, Homo sapien
cagactttgggatatgcatttcagc

SEQ ID NO: 3604747 - DNA, 25 bp, Homo sapien
cacatatttgtgacgcagctggctt

SEQ ID NO: 3604748 - DNA, 25 bp, Homo sapien
aattatcaaactgcagcacgcttcg

SEQ ID NO: 3604749 - DNA, 25 bp, Homo sapien
gcagcacgcttcgatgccctctttg

SEQ ID NO: 3604750 - DNA, 25 bp, Homo sapien
cgcttcgatgccctctttgtaggcc

SEQ ID NO: 3604751 - DNA, 25 bp, Homo sapien
agccaagtgggcaaattatcaaact

SEQ ID NO: 3604752 - DNA, 25 bp, Homo sapien
tctgcaaggaaggtttaggcgacga

SEQ ID NO: 3604753 - DNA, 25 bp, Homo sapien
ggccagtatgaccaaaatgacagcg

SEQ ID NO: 3604754 - DNA, 25 bp, Homo sapien
tgacagcgctctttccaatttagac

SEQ ID NO: 3604755 - DNA, 25 bp, Homo sapien
gtaaaagtgtgcaggcgtcaactcc

SEQ ID NO: 3604756 - DNA, 25 bp, Homo sapien
ctaaaagagaatacgcagacacaca

SEQ ID NO: 3604757 - DNA, 25 bp, Homo sapien
ctctttgaagcccatcactgactgg

SEQ ID NO: 3604758 - DNA, 25 bp, Homo sapien
cctcaatctgctactgttggagtta

SEQ ID NO: 3604759 - DNA, 25 bp, Homo sapien
tcagacactttgatgaatagtagcc

SEQ ID NO: 3604760 - DNA, 25 bp, Homo sapien
gaaagctacttagtcgtcacacatg

SEQ ID NO: 3604761 - DNA, 25 bp, Homo sapien
tcagaggccgtcaatgtcagggcag

SEQ ID NO: 3604762 - DNA, 25 bp, Homo sapien
tcattggtaggctgatcagaggccg

SEQ ID NO: 3604763 - DNA, 25 bp, Homo sapien
gttcaccaatatttcagacagaggg

SEQ ID NO: 3604764 - DNA, 25 bp, Homo sapien
gacataaggtgtgcataattccagc

SEQ ID NO: 3604765 - DNA, 25 bp, Homo sapien
caacattgacataaggtgtgcataa

SEQ ID NO: 3604766 - DNA, 25 bp, Homo sapien
aaggtgtgcataattccagccaact

SEQ ID NO: 3604767 - DNA, 25 bp, Homo sapien
cttttcaacattgacataaggtgtg

SEQ ID NO: 3604768 - DNA, 25 bp, Homo sapien
catccagtaaattgcgagcccgagg

SEQ ID NO: 3604769 - DNA, 25 bp, Homo sapien
ggcttgtcagcaacgaaacatctca

SEQ ID NO: 3604770 - DNA, 25 bp, Homo sapien
aaagccagcttgagtagacgggaac

SEQ ID NO: 3604771 - DNA, 25 bp, Homo sapien
tcacagttggtagccaaaagccagc

SEQ ID NO: 3604772 - DNA, 25 bp, Homo sapien
tacaccaaggcaaatggccccatga

SEQ ID NO: 3604773 - DNA, 25 bp, Homo sapien
ctctgtgggctgaattatgctccac

SEQ ID NO: 3604774 - DNA, 25 bp, Homo sapien
ctggcctttaacgtacaccaaggca

SEQ ID NO: 3604775 - DNA, 25 bp, Homo sapien
ggctgaattatgctccacacgatat

SEQ ID NO: 3604776 - DNA, 25 bp, Homo sapien
aagatggtcctttgagagctccacg

SEQ ID NO: 3604777 - DNA, 25 bp, Homo sapien
gatggtcctttgagagctccacgct

SEQ ID NO: 3604778 - DNA, 25 bp, Homo sapien
aaaaacaagatggtcctttgagagc

SEQ ID NO: 3604779 - DNA, 25 bp, Homo sapien
accagaaaaacaagatggtcctttg

SEQ ID NO: 3604780 - DNA, 25 bp, Homo sapien
cataagggctaagtgctttctgtga

SEQ ID NO: 3604781 - DNA, 25 bp, Homo sapien
tgcacatgtaaacagatggagggaa

SEQ ID NO: 3604782 - DNA, 25 bp, Homo sapien
ccacagcgtcgtgctcagatcctag

SEQ ID NO: 3604783 - DNA, 25 bp, Homo sapien
gacacacagtgtgggtctagagcct

SEQ ID NO: 3604784 - DNA, 25 bp, Homo sapien
aatgctgcagcacaattagccatca

SEQ ID NO: 3604785 - DNA, 25 bp, Homo sapien
aaggacgccccttgctatttgcata

SEQ ID NO: 3604786 - DNA, 25 bp, Homo sapien
tctaatttaggagacaaggacgccc

SEQ ID NO: 3604787 - DNA, 25 bp, Homo sapien
tttaaactactgtgaagaaacgaca

SEQ ID NO: 3604788 - DNA, 25 bp, Homo sapien
ttacactcaatagcccgttctcatc

SEQ ID NO: 3604789 - DNA, 25 bp, Homo sapien
aatgcaactgaactactgaaactac

SEQ ID NO: 3604790 - DNA, 25 bp, Homo sapien
gaaactactctcttgaaacaatttc

SEQ ID NO: 3604791 - DNA, 25 bp, Homo sapien
tcttcttaaacattacactcaatag

SEQ ID NO: 3604792 - DNA, 25 bp, Homo sapien
cactgacagaccgtctaggatcaga

SEQ ID NO: 3604793 - DNA, 25 bp, Homo sapien
tatgatcagaaatggtggaaagcag

SEQ ID NO: 3604794 - DNA, 25 bp, Homo sapien
ttaaaaggtggacagacaggtagac

SEQ ID NO: 3604795 - DNA, 25 bp, Homo sapien
gaccgtctaggatcagagagacctg

SEQ ID NO: 3604796 - DNA, 25 bp, Homo sapien
tcaaagccgcttggcattttttcct

SEQ ID NO: 3604797 - DNA, 25 bp, Homo sapien
tcctgttgattaagccacagataaa

SEQ ID NO: 3604798 - DNA, 25 bp, Homo sapien
gtgtttgtgccggctctcatctcca

SEQ ID NO: 3604799 - DNA, 25 bp, Homo sapien
cactgccagctagtcaaagccgctt

SEQ ID NO: 3604800 - DNA, 25 bp, Homo sapien
gtgctttataatgttagacatgtgc

SEQ ID NO: 3604801 - DNA, 25 bp, Homo sapien
gcttcaggacttactttatattttc

SEQ ID NO: 3604802 - DNA, 25 bp, Homo sapien
gccttgagataaacttaagtaaata

SEQ ID NO: 3604803 - DNA, 25 bp, Homo sapien
ttcacagcttcaggacttactttat

SEQ ID NO: 3604804 - DNA, 25 bp, Homo sapien
gatgattggaagcaggtgcaaatcc

SEQ ID NO: 3604805 - DNA, 25 bp, Homo sapien
cactagtgaccgcatgtagacgtct

SEQ ID NO: 3604806 - DNA, 25 bp, Homo sapien
ggttcttgactttcaagcacctaaa

SEQ ID NO: 3604807 - DNA, 25 bp, Homo sapien
tgcccttgtgttcaaagtggagcca

SEQ ID NO: 3604808 - DNA, 25 bp, Homo sapien
atgctcgataacgtgtcaatttcca

SEQ ID NO: 3604809 - DNA, 25 bp, Homo sapien
atatgctcgataacgtgtcaatttc

SEQ ID NO: 3604810 - DNA, 25 bp, Homo sapien
tatgctcgataacgtgtcaatttcc

SEQ ID NO: 3604811 - DNA, 25 bp, Homo sapien
gcttttctcatacctgcttcataga

SEQ ID NO: 3604812 - DNA, 25 bp, Homo sapien
ccatctaaacatggtgtaattaaaa

SEQ ID NO: 3604813 - DNA, 25 bp, Homo sapien
tgtaatcataacttcatggagcttt

SEQ ID NO: 3604814 - DNA, 25 bp, Homo sapien
taaataaccatctaaacatggtgta

SEQ ID NO: 3604815 - DNA, 25 bp, Homo sapien
tacttatgcagagtttagttttcat

SEQ ID NO: 3604816 - DNA, 25 bp, Homo sapien
attttacttatgcagagtttagttt

SEQ ID NO: 3604817 - DNA, 25 bp, Homo sapien
ttacttatgcagagtttagttttca

SEQ ID NO: 3604818 - DNA, 25 bp, Homo sapien
tttacttatgcagagtttagttttc

SEQ ID NO: 3604819 - DNA, 25 bp, Homo sapien
taaagctcgcgttcccgtgtgaatc

SEQ ID NO: 3604820 - DNA, 25 bp, Homo sapien
gctttgaccagagagctcggacaca

SEQ ID NO: 3604821 - DNA, 25 bp, Homo sapien
gccagaccaggcatccaagttataa

SEQ ID NO: 3604822 - DNA, 25 bp, Homo sapien
ctgaactctggctgacgacatctgg

SEQ ID NO: 3604823 - DNA, 25 bp, Homo sapien
tcccaggcctacttaagaactgatg

SEQ ID NO: 3604824 - DNA, 25 bp, Homo sapien
tctgatcaatttaggtggcctcctc

SEQ ID NO: 3604825 - DNA, 25 bp, Homo sapien
gagtatatttctgttgccggcacta

SEQ ID NO: 3604826 - DNA, 25 bp, Homo sapien
tcaaaaagaatgagttcccaggcct

SEQ ID NO: 3604827 - DNA, 25 bp, Homo sapien
tgccatcagatcataccaacagatt

SEQ ID NO: 3604828 - DNA, 25 bp, Homo sapien
tgtaacttaagtcccatagcaatgc

SEQ ID NO: 3604829 - DNA, 25 bp, Homo sapien
agttgtatgtgtactctggcctgaa

SEQ ID NO: 3604830 - DNA, 25 bp, Homo sapien
tatacttgtaaagccttgccatcag

SEQ ID NO: 3604831 - DNA, 25 bp, Homo sapien
gagattctacatggaggaacagagt

SEQ ID NO: 3604832 - DNA, 25 bp, Homo sapien
agtctccaaagtcaagggctagtat

SEQ ID NO: 3604833 - DNA, 25 bp, Homo sapien
tgagtggagagaagataagctcctt

SEQ ID NO: 3604834 - DNA, 25 bp, Homo sapien
gagaagataagctccttaccggtct

SEQ ID NO: 3604835 - DNA, 25 bp, Homo sapien
taagtttatctacacaagcagcaca

SEQ ID NO: 3604836 - DNA, 25 bp, Homo sapien
gggacaggacaaggttaagagaatc

SEQ ID NO: 3604837 - DNA, 25 bp, Homo sapien
gctgaagtcctgtaagtttatctac

SEQ ID NO: 3604838 - DNA, 25 bp, Homo sapien
agcacaagttctcctggcatattcc

SEQ ID NO: 3604839 - DNA, 25 bp, Homo sapien
tcattccgaagccagattctgttgg

SEQ ID NO: 3604840 - DNA, 25 bp, Homo sapien
gaagatcccagttcaattcagcatc

SEQ ID NO: 3604841 - DNA, 25 bp, Homo sapien
attcagccgcatcccagtaaaacag

SEQ ID NO: 3604842 - DNA, 25 bp, Homo sapien
tcagctgactaatgcacaatgcctg

SEQ ID NO: 3604843 - DNA, 25 bp, Homo sapien
tcatgctctaaatcagatgatctac

SEQ ID NO: 3604844 - DNA, 25 bp, Homo sapien
tgctctaaatcagatgatctactat

SEQ ID NO: 3604845 - DNA, 25 bp, Homo sapien
catgctctaaatcagatgatctact

SEQ ID NO: 3604846 - DNA, 25 bp, Homo sapien
cttcatgctctaaatcagatgatct

SEQ ID NO: 3604847 - DNA, 25 bp, Homo sapien
taagagcccaacatcagtaagactg

SEQ ID NO: 3604848 - DNA, 25 bp, Homo sapien
aactctggccctaatgcttgaggca

SEQ ID NO: 3604849 - DNA, 25 bp, Homo sapien
taggcagttgatagcatgaggcact

SEQ ID NO: 3604850 - DNA, 25 bp, Homo sapien
ttcaatggccacttggagtcccagg

SEQ ID NO: 3604851 - DNA, 25 bp, Homo sapien
tgttccatgatcagcaggacgtggc

SEQ ID NO: 3604852 - DNA, 25 bp, Homo sapien
cactgagtgaacctggcacctgttc

SEQ ID NO: 3604853 - DNA, 25 bp, Homo sapien
gccaagcggctgaggctctttagcc

SEQ ID NO: 3604854 - DNA, 25 bp, Homo sapien
gaatcaatcttataagccaagcggc

SEQ ID NO: 3604855 - DNA, 25 bp, Homo sapien
attccctctgtagaacatgccctga

SEQ ID NO: 3604856 - DNA, 25 bp, Homo sapien
tgtttatggaaaaacgtgacaggct

SEQ ID NO: 3604857 - DNA, 25 bp, Homo sapien
tgtgaagggcattctgcagagtcat

SEQ ID NO: 3604858 - DNA, 25 bp, Homo sapien
ggacttctctaatgtacccaggcat

SEQ ID NO: 3604859 - DNA, 25 bp, Homo sapien
acagtttgtcatagatcctgcaggg

SEQ ID NO: 3604860 - DNA, 25 bp, Homo sapien
cacttgtcgttgtgaggtcatgacc

SEQ ID NO: 3604861 - DNA, 25 bp, Homo sapien
aaattcaggtgtggcacggttacca

SEQ ID NO: 3604862 - DNA, 25 bp, Homo sapien
ggttgtgatctccatagcaatgaca

SEQ ID NO: 3604863 - DNA, 25 bp, Homo sapien
gaagtgataaaatgaccagccagag

SEQ ID NO: 3604864 - DNA, 25 bp, Homo sapien
gaatcagactgagcagttgctcccc

SEQ ID NO: 3604865 - DNA, 25 bp, Homo sapien
cactggaactctcaggtgagcatgg

SEQ ID NO: 3604866 - DNA, 25 bp, Homo sapien
ggcataacctaaaccaggcctggat

SEQ ID NO: 3604867 - DNA, 25 bp, Homo sapien
caaagaaatagtgccagccaccggg

SEQ ID NO: 3604868 - DNA, 25 bp, Homo sapien
ctgagtacaaagaaatagtgccagc

SEQ ID NO: 3604869 - DNA, 25 bp, Homo sapien
agtacaaagaaatagtgccagccac

SEQ ID NO: 3604870 - DNA, 25 bp, Homo sapien
tccacaggacactggtggtcttggt

SEQ ID NO: 3604871 - DNA, 25 bp, Homo sapien
gtttgcaagaaaccacaaggtgatc

SEQ ID NO: 3604872 - DNA, 25 bp, Homo sapien
caacattggcaagggtggctgagaa

SEQ ID NO: 3604873 - DNA, 25 bp, Homo sapien
tccaatcacctatagagagaaacca

SEQ ID NO: 3604874 - DNA, 25 bp, Homo sapien
aataaaaatgcccaggagttacagc

SEQ ID NO: 3604875 - DNA, 25 bp, Homo sapien
gaaagtctctctgtaagtcaaaacc

SEQ ID NO: 3604876 - DNA, 25 bp, Homo sapien
cagacattagtctgttaccatggga

SEQ ID NO: 3604877 - DNA, 25 bp, Homo sapien
ggtatcttgagccaacatatcagga

SEQ ID NO: 3604878 - DNA, 25 bp, Homo sapien
tgctgctactctcccacaaaatgaa

SEQ ID NO: 3604879 - DNA, 25 bp, Homo sapien
aacacaacaatgtgacaattattta

SEQ ID NO: 3604880 - DNA, 25 bp, Homo sapien
atattgctcatctgtttactaggcc

SEQ ID NO: 3604881 - DNA, 25 bp, Homo sapien
ttgtatatacttcccctctcagtga

SEQ ID NO: 3604882 - DNA, 25 bp, Homo sapien
ggccagatagctagataattctaaa

SEQ ID NO: 3604883 - DNA, 25 bp, Homo sapien
tgaatctcagccaaagacccttcag

SEQ ID NO: 3604884 - DNA, 25 bp, Homo sapien
tctgagccatgggatagagctggaa

SEQ ID NO: 3604885 - DNA, 25 bp, Homo sapien
tacaaaatcctttggtgcctggtct

SEQ ID NO: 3604886 - DNA, 25 bp, Homo sapien
tatttacagggattccactaaggcc

SEQ ID NO: 3604887 - DNA, 25 bp, Homo sapien
atccaagcataagattgtcacttac

SEQ ID NO: 3604888 - DNA, 25 bp, Homo sapien
tgggttccttgaccctcaagacgat

SEQ ID NO: 3604889 - DNA, 25 bp, Homo sapien
ttgaccctcaagacgatcttcctca

SEQ ID NO: 3604890 - DNA, 25 bp, Homo sapien
aggaatctgggttccttgaccctca

SEQ ID NO: 3604891 - DNA, 25 bp, Homo sapien
ttccttgaccctcaagacgatcttc

SEQ ID NO: 3604892 - DNA, 25 bp, Homo sapien
gaagcttttagagggcagagtgcac

SEQ ID NO: 3604893 - DNA, 25 bp, Homo sapien
ggtctgtacgcaaaacatggatgca

SEQ ID NO: 3604894 - DNA, 25 bp, Homo sapien
cagatatatagcattagggcaggga

SEQ ID NO: 3604895 - DNA, 25 bp, Homo sapien
gaacactgaatacaacatgctgcac

SEQ ID NO: 3604896 - DNA, 25 bp, Homo sapien
ggaaagtaaccaaacacataagaga

SEQ ID NO: 3604897 - DNA, 25 bp, Homo sapien
taacagatgagtttaacatggagct

SEQ ID NO: 3604898 - DNA, 25 bp, Homo sapien
catgacatacagatgacggcaaaaa

SEQ ID NO: 3604899 - DNA, 25 bp, Homo sapien
agtcctctataatgttgtacccttg

SEQ ID NO: 3604900 - DNA, 25 bp, Homo sapien
taggagagccttactacaatctgcc

SEQ ID NO: 3604901 - DNA, 25 bp, Homo sapien
gaaaaagcatatataccctggtgac

SEQ ID NO: 3604902 - DNA, 25 bp, Homo sapien
tacaataaatcagcatagagcccag

SEQ ID NO: 3604903 - DNA, 25 bp, Homo sapien
tcaatgaatgtgcagtaccctacac

SEQ ID NO: 3604904 - DNA, 25 bp, Homo sapien
tgatgtgagaaagcatagaaacagc

SEQ ID NO: 3604905 - DNA, 25 bp, Homo sapien
taagctggaactccctaagtcagtg

SEQ ID NO: 3604906 - DNA, 25 bp, Homo sapien
aattgcctggtttttatgaagcacc

SEQ ID NO: 3604907 - DNA, 25 bp, Homo sapien
caaataccctcactggtaagctgga

SEQ ID NO: 3604908 - DNA, 25 bp, Homo sapien
agataataatccacaggagggctgt

SEQ ID NO: 3604909 - DNA, 25 bp, Homo sapien
aacagccacgcaccataatggaaga

SEQ ID NO: 3604910 - DNA, 25 bp, Homo sapien
ggttgtcaatccagtgaggtctcta

SEQ ID NO: 3604911 - DNA, 25 bp, Homo sapien
tacaagcatcaagggtctttcccca

SEQ ID NO: 3604912 - DNA, 25 bp, Homo sapien
aatggttagaagacctaaacatatt

SEQ ID NO: 3604913 - DNA, 25 bp, Homo sapien
ctgagattattacttcgttgacaac

SEQ ID NO: 3604914 - DNA, 25 bp, Homo sapien
gagggtgtgcataagaagcatttaa

SEQ ID NO: 3604915 - DNA, 25 bp, Homo sapien
taacattctcatgccaacttaaagc

SEQ ID NO: 3604916 - DNA, 25 bp, Homo sapien
aactgtctccattatcaacacaaga

SEQ ID NO: 3604917 - DNA, 25 bp, Homo sapien
caagaaaattctagcatggagagat

SEQ ID NO: 3604918 - DNA, 25 bp, Homo sapien
tgaggaagatatgataactgtctcc

SEQ ID NO: 3604919 - DNA, 25 bp, Homo sapien
cttgaaacatgatcacacaggtagt

SEQ ID NO: 3604920 - DNA, 25 bp, Homo sapien
aaattaatctcaagctgatttccac

SEQ ID NO: 3604921 - DNA, 25 bp, Homo sapien
tatcacactcataaggaataattcc

SEQ ID NO: 3604922 - DNA, 25 bp, Homo sapien
gctaaaattaatctcaagctgattt

SEQ ID NO: 3604923 - DNA, 25 bp, Homo sapien
tctcatgatatcacactcataagga

SEQ ID NO: 3604924 - DNA, 25 bp, Homo sapien
ctacactatttctgcctgcccttca

SEQ ID NO: 3604925 - DNA, 25 bp, Homo sapien
cagaactcaaagcagacgcgctcac

SEQ ID NO: 3604926 - DNA, 25 bp, Homo sapien
cactatttctgcctgcccttcagaa

SEQ ID NO: 3604927 - DNA, 25 bp, Homo sapien
cccttcagaactcaaagcagacgcg

SEQ ID NO: 3604928 - DNA, 25 bp, Homo sapien
gactcatcaagtttatgaacactgc

SEQ ID NO: 3604929 - DNA, 25 bp, Homo sapien
cagcggtgccaaactgttagactca

SEQ ID NO: 3604930 - DNA, 25 bp, Homo sapien
atttgggcaaacattggcacaggaa

SEQ ID NO: 3604931 - DNA, 25 bp, Homo sapien
taacagcagggagcttaaataaaag

SEQ ID NO: 3604932 - DNA, 25 bp, Homo sapien
atatgttcgtttgacccgaagctgc

SEQ ID NO: 3604933 - DNA, 25 bp, Homo sapien
tacaacactatgctggtttgaagaa

SEQ ID NO: 3604934 - DNA, 25 bp, Homo sapien
aaaacaggcaggcattacaactccc

SEQ ID NO: 3604935 - DNA, 25 bp, Homo sapien
gaagaaatgcctgatgcagcggtga

SEQ ID NO: 3604936 - DNA, 25 bp, Homo sapien
gccatgacttaaggttttgtctcgc

SEQ ID NO: 3604937 - DNA, 25 bp, Homo sapien
aggtgttggtggcacccattccact

SEQ ID NO: 3604938 - DNA, 25 bp, Homo sapien
gaattgcaaatcttcaggttgccac

SEQ ID NO: 3604939 - DNA, 25 bp, Homo sapien
caagttgaagtaatagaggttgcca

SEQ ID NO: 3604940 - DNA, 25 bp, Homo sapien
gacatatcgaggtggggaaacgaca

SEQ ID NO: 3604941 - DNA, 25 bp, Homo sapien
cagttgcagcaattaatcattcctg

SEQ ID NO: 3604942 - DNA, 25 bp, Homo sapien
gcttcttgagctgacatatcgaggt

SEQ ID NO: 3604943 - DNA, 25 bp, Homo sapien
tgtccagttgcagcaattaatcatt

SEQ ID NO: 3604944 - DNA, 25 bp, Homo sapien
gccaaacaggctagcgtaataagtt

SEQ ID NO: 3604945 - DNA, 25 bp, Homo sapien
ttcaacaacagataagcgcctcatt

SEQ ID NO: 3604946 - DNA, 25 bp, Homo sapien
catcgtaacgagacatctctaggca

SEQ ID NO: 3604947 - DNA, 25 bp, Homo sapien
ttccacttgttgctaggtaaccgca

SEQ ID NO: 3604948 - DNA, 25 bp, Homo sapien
tctgtccactgcattcagaatcagg

SEQ ID NO: 3604949 - DNA, 25 bp, Homo sapien
tatagctctgtccactgcattcaga

SEQ ID NO: 3604950 - DNA, 25 bp, Homo sapien
ctgatttatagctctgtccactgca

SEQ ID NO: 3604951 - DNA, 25 bp, Homo sapien
gatttatagctctgtccactgcatt

SEQ ID NO: 3604952 - DNA, 25 bp, Homo sapien
tcaattacccaaacttcctgcacgg

SEQ ID NO: 3604953 - DNA, 25 bp, Homo sapien
tcctgcacggttgttatatgagaag

SEQ ID NO: 3604954 - DNA, 25 bp, Homo sapien
ttctatgaggtcaaggattctccct

SEQ ID NO: 3604955 - DNA, 25 bp, Homo sapien
catgagggccaagtctgctttcgct

SEQ ID NO: 3604956 - DNA, 25 bp, Homo sapien
gtctaccaagccaatctttttccga

SEQ ID NO: 3604957 - DNA, 25 bp, Homo sapien
ctttttccgaacagtgaaaataatg

SEQ ID NO: 3604958 - DNA, 25 bp, Homo sapien
gccaatctttttccgaacagtgaaa

SEQ ID NO: 3604959 - DNA, 25 bp, Homo sapien
caagccaatctttttccgaacagtg

SEQ ID NO: 3604960 - DNA, 25 bp, Homo sapien
cttctactgacaggtcctgaatctt

SEQ ID NO: 3604961 - DNA, 25 bp, Homo sapien
tccttctactgacaggtcctgaatc

SEQ ID NO: 3604962 - DNA, 25 bp, Homo sapien
ggtcctgaatctttatggagaacat

SEQ ID NO: 3604963 - DNA, 25 bp, Homo sapien
aattaaagcgcataataggtttatg

SEQ ID NO: 3604964 - DNA, 25 bp, Homo sapien
tgccattcatttactacaaactgcc

SEQ ID NO: 3604965 - DNA, 25 bp, Homo sapien
atgccattcatttactacaaactgc

SEQ ID NO: 3604966 - DNA, 25 bp, Homo sapien
gcatgccattcatttactacaaact

SEQ ID NO: 3604967 - DNA, 25 bp, Homo sapien
catgccattcatttactacaaactg

SEQ ID NO: 3604968 - DNA, 25 bp, Homo sapien
cttccccatgtgtgagatcaaattt

SEQ ID NO: 3604969 - DNA, 25 bp, Homo sapien
gatcaaatttggacgaggaagaaaa

SEQ ID NO: 3604970 - DNA, 25 bp, Homo sapien
ttaggatctcgagtttttgtgctgc

SEQ ID NO: 3604971 - DNA, 25 bp, Homo sapien
aaattctttcaattaggatctcgag

SEQ ID NO: 3604972 - DNA, 25 bp, Homo sapien
ttcagcaagccaaggcaaacgccta

SEQ ID NO: 3604973 - DNA, 25 bp, Homo sapien
cagcaagccaaggcaaacgcctaag

SEQ ID NO: 3604974 - DNA, 25 bp, Homo sapien
tcttcagcaagccaaggcaaacgcc

SEQ ID NO: 3604975 - DNA, 25 bp, Homo sapien
caagccaaggcaaacgcctaaggac

SEQ ID NO: 3604976 - DNA, 25 bp, Homo sapien
cttctgcttccatgaccttggtcat

SEQ ID NO: 3604977 - DNA, 25 bp, Homo sapien
gaaaggcttatacccagtactctca

SEQ ID NO: 3604978 - DNA, 25 bp, Homo sapien
tattcatatcgcaaataagcatgtg

SEQ ID NO: 3604979 - DNA, 25 bp, Homo sapien
gcaaatcatatatctcatgaaaggc

SEQ ID NO: 3604980 - DNA, 25 bp, Homo sapien
acagtctatgagaaaacgtatgcaa

SEQ ID NO: 3604981 - DNA, 25 bp, Homo sapien
tatctgaagctggttgaatacacag

SEQ ID NO: 3604982 - DNA, 25 bp, Homo sapien
aacagatcaatacggctgccaaagg

SEQ ID NO: 3604983 - DNA, 25 bp, Homo sapien
gagagccacctgtacttatcaaatg

SEQ ID NO: 3604984 - DNA, 25 bp, Homo sapien
tttgactagagagagacaccatgag

SEQ ID NO: 3604985 - DNA, 25 bp, Homo sapien
aactgagagttaacagcatgctgac

SEQ ID NO: 3604986 - DNA, 25 bp, Homo sapien
tactatgccagcaaacaagccatgg

SEQ ID NO: 3604987 - DNA, 25 bp, Homo sapien
caggataggatggtgcacagattaa

SEQ ID NO: 3604988 - DNA, 25 bp, Homo sapien
gcatgctgacgtccactgaaagaga

SEQ ID NO: 3604989 - DNA, 25 bp, Homo sapien
acaatatctcaatccaactgatgtc

SEQ ID NO: 3604990 - DNA, 25 bp, Homo sapien
gcagctgtcagttatggatttgaaa

SEQ ID NO: 3604991 - DNA, 25 bp, Homo sapien
aggtgttgagcagctgtcagttatg

SEQ ID NO: 3604992 - DNA, 25 bp, Homo sapien
atgtcagtaaatccagtctgtccca

SEQ ID NO: 3604993 - DNA, 25 bp, Homo sapien
cattctcctagtcattcaagtccaa

SEQ ID NO: 3604994 - DNA, 25 bp, Homo sapien
gagaacgctaagacacatctctttg

SEQ ID NO: 3604995 - DNA, 25 bp, Homo sapien
gcgctgctctcaacctttctactaa

SEQ ID NO: 3604996 - DNA, 25 bp, Homo sapien
tgttcattagagtagtcattctcct

SEQ ID NO: 3604997 - DNA, 25 bp, Homo sapien
taatgatgcccaacaaccaagtatg

SEQ ID NO: 3604998 - DNA, 25 bp, Homo sapien
gacaagcctctcatgaaagctgagg

SEQ ID NO: 3604999 - DNA, 25 bp, Homo sapien
tctaaagtgacgatatagcctcagc

SEQ ID NO: 3605000 - DNA, 25 bp, Homo sapien
tctaggtatcccaggactgtgaagt

SEQ ID NO: 3605001 - DNA, 25 bp, Homo sapien
gatgacttgtaacatccaggaggct

SEQ ID NO: 3605002 - DNA, 25 bp, Homo sapien
tactagcaagaactgaactctgaag

SEQ ID NO: 3605003 - DNA, 25 bp, Homo sapien
ggaagggtgtcaggcaagcaaaaaa

SEQ ID NO: 3605004 - DNA, 25 bp, Homo sapien
actgtattatcatgctgcatagcct

SEQ ID NO: 3605005 - DNA, 25 bp, Homo sapien
tctggtaactaggtaactacacgca

SEQ ID NO: 3605006 - DNA, 25 bp, Homo sapien
gcaccagacacaagcaccaaatact

SEQ ID NO: 3605007 - DNA, 25 bp, Homo sapien
accaaatactcctctaaggtggtgg

SEQ ID NO: 3605008 - DNA, 25 bp, Homo sapien
caaatactcctctaaggtggtggta

SEQ ID NO: 3605009 - DNA, 25 bp, Homo sapien
tcaacacagtttggcttagcatcaa

SEQ ID NO: 3605010 - DNA, 25 bp, Homo sapien
aatcatggccataatatcaacacag

SEQ ID NO: 3605011 - DNA, 25 bp, Homo sapien
cacagtttggcttagcatcaagaaa

SEQ ID NO: 3605012 - DNA, 25 bp, Homo sapien
tggccataatatcaacacagtttgg

SEQ ID NO: 3605013 - DNA, 25 bp, Homo sapien
gacattcactatcaaccacttcttg

SEQ ID NO: 3605014 - DNA, 25 bp, Homo sapien
cttcttgacacatgtcatagaaaag

SEQ ID NO: 3605015 - DNA, 25 bp, Homo sapien
catagaaaagtgacatctctttccc

SEQ ID NO: 3605016 - DNA, 25 bp, Homo sapien
cctcaacaggtagctagcattgtct

SEQ ID NO: 3605017 - DNA, 25 bp, Homo sapien
taaatgaagccttgtgcgtctccag

SEQ ID NO: 3605018 - DNA, 25 bp, Homo sapien
tgttcctccaaaacgtcccaggcaa

SEQ ID NO: 3605019 - DNA, 25 bp, Homo sapien
taaagtctctatccccggtttgcaa

SEQ ID NO: 3605020 - DNA, 25 bp, Homo sapien
gacaagtgcaagtccctactgcggc

SEQ ID NO: 3605021 - DNA, 25 bp, Homo sapien
tctattatgcgccagttaccgagcc

SEQ ID NO: 3605022 - DNA, 25 bp, Homo sapien
caacatccggagacagtggcatgga

SEQ ID NO: 3605023 - DNA, 25 bp, Homo sapien
tgaagttgtaaccacaccggcatcg

SEQ ID NO: 3605024 - DNA, 25 bp, Homo sapien
tacaatgcagcagcacgagggatct

SEQ ID NO: 3605025 - DNA, 25 bp, Homo sapien
tgtcctctagcgtgtaaacaaaagg

SEQ ID NO: 3605026 - DNA, 25 bp, Homo sapien
cagcgtgtctcctgcggtgtttaca

SEQ ID NO: 3605027 - DNA, 25 bp, Homo sapien
gcctctccgctgaggaagagctccg

SEQ ID NO: 3605028 - DNA, 25 bp, Homo sapien
ccgagtgctcggtgtcttcagggaa

SEQ ID NO: 3605029 - DNA, 25 bp, Homo sapien
cgccgcgggcggctgggagtcagcc

SEQ ID NO: 3605030 - DNA, 25 bp, Homo sapien
tgcgaacggccggagggaaacacga

SEQ ID NO: 3605031 - DNA, 25 bp, Homo sapien
tggagccgggccaaaaagacccgca

SEQ ID NO: 3605032 - DNA, 25 bp, Homo sapien
ggaaacacgagaggcgtgcagtttg

SEQ ID NO: 3605033 - DNA, 25 bp, Homo sapien
ctgtggggatcagtgccgcggcgga

SEQ ID NO: 3605034 - DNA, 25 bp, Homo sapien
ctgggatccgctcggcagcactaca

SEQ ID NO: 3605035 - DNA, 25 bp, Homo sapien
ctgccgccgcacactgggatccgct

SEQ ID NO: 3605036 - DNA, 25 bp, Homo sapien
agtgccgcggcggagaagagcaaca

SEQ ID NO: 3605037 - DNA, 25 bp, Homo sapien
gatgctaatgacatgcgctggaggc

SEQ ID NO: 3605038 - DNA, 25 bp, Homo sapien
tccggagcccgagcggacagctaat

SEQ ID NO: 3605039 - DNA, 25 bp, Homo sapien
aggcggagtccgggcagaccaatca

SEQ ID NO: 3605040 - DNA, 25 bp, Homo sapien
cagactggcggcgttggctgcctcc

SEQ ID NO: 3605041 - DNA, 25 bp, Homo sapien
tgcaccgaaggaatagatctttggg

SEQ ID NO: 3605042 - DNA, 25 bp, Homo sapien
caccgaaggaatagatctttgggaa

SEQ ID NO: 3605043 - DNA, 25 bp, Homo sapien
cgaaggaatagatctttgggaacgg

SEQ ID NO: 3605044 - DNA, 25 bp, Homo sapien
cttgcaccgaaggaatagatctttg

SEQ ID NO: 3605045 - DNA, 25 bp, Homo sapien
ggagtggagagtaagaaggcaggtc

SEQ ID NO: 3605046 - DNA, 25 bp, Homo sapien
caggtccccggattgacaaaacaat

SEQ ID NO: 3605047 - DNA, 25 bp, Homo sapien
ctttattcccttctccaggtcatta

SEQ ID NO: 3605048 - DNA, 25 bp, Homo sapien
tttattcccttctccaggtcattat

SEQ ID NO: 3605049 - DNA, 25 bp, Homo sapien
cctttattcccttctccaggtcatt

SEQ ID NO: 3605050 - DNA, 25 bp, Homo sapien
tcatatttaattatgggaaccaaaa

SEQ ID NO: 3605051 - DNA, 25 bp, Homo sapien
ttcatatttaattatgggaaccaaa

SEQ ID NO: 3605052 - DNA, 25 bp, Homo sapien
tactgtctctagaggactcacattc

SEQ ID NO: 3605053 - DNA, 25 bp, Homo sapien
gttactgtctctagaggactcacat

SEQ ID NO: 3605054 - DNA, 25 bp, Homo sapien
aatgggttggggttactgtctctag

SEQ ID NO: 3605055 - DNA, 25 bp, Homo sapien
ctgtctctagaggactcacattcat

SEQ ID NO: 3605056 - DNA, 25 bp, Homo sapien
tctgatcgctgcttttaatcggcat

SEQ ID NO: 3605057 - DNA, 25 bp, Homo sapien
ttaatcggcatttagccagtctgtc

SEQ ID NO: 3605058 - DNA, 25 bp, Homo sapien
tacccgcagacagttctgatcgctg

SEQ ID NO: 3605059 - DNA, 25 bp, Homo sapien
gctggtgctcagatacccgcagaca

SEQ ID NO: 3605060 - DNA, 25 bp, Homo sapien
cattggacctgagacttcgctcggc

SEQ ID NO: 3605061 - DNA, 25 bp, Homo sapien
cagtaggagaccttcgttcagagag

SEQ ID NO: 3605062 - DNA, 25 bp, Homo sapien
ggaactgtgttcttccagtaggaga

SEQ ID NO: 3605063 - DNA, 25 bp, Homo sapien
cgctcggcatagttgaagtttcttc

SEQ ID NO: 3605064 - DNA, 25 bp, Homo sapien
ttaaagtggtgacttcccctgccca

SEQ ID NO: 3605065 - DNA, 25 bp, Homo sapien
cctgcccatagctgcgtgacgtaat

SEQ ID NO: 3605066 - DNA, 25 bp, Homo sapien
taactcaaacttgccagggaggacg

SEQ ID NO: 3605067 - DNA, 25 bp, Homo sapien
ggttcctcgcccaggtatctgaatg

SEQ ID NO: 3605068 - DNA, 25 bp, Homo sapien
gaatacctggatagagcattttgaa

SEQ ID NO: 3605069 - DNA, 25 bp, Homo sapien
ttgaatacctggatagagcattttg

SEQ ID NO: 3605070 - DNA, 25 bp, Homo sapien
catcttgaatacctggatagagcat

SEQ ID NO: 3605071 - DNA, 25 bp, Homo sapien
tcttgaatacctggatagagcattt

SEQ ID NO: 3605072 - DNA, 25 bp, Homo sapien
gaagaggaatttgcccagcctggcc

SEQ ID NO: 3605073 - DNA, 25 bp, Homo sapien
ctgagggtgagcctttggaagagga

SEQ ID NO: 3605074 - DNA, 25 bp, Homo sapien
agtcatgcctgagggtgagcctttg

SEQ ID NO: 3605075 - DNA, 25 bp, Homo sapien
ctagtcatgcctgagggtgagcctt

SEQ ID NO: 3605076 - DNA, 25 bp, Homo sapien
gtcaggtggttgtccaccttcttga

SEQ ID NO: 3605077 - DNA, 25 bp, Homo sapien
cccaggacatgaagatctaaaagac

SEQ ID NO: 3605078 - DNA, 25 bp, Homo sapien
ggtgacttatggatgtcctggaata

SEQ ID NO: 3605079 - DNA, 25 bp, Homo sapien
tggagctccgtgcttctccttgtcc

SEQ ID NO: 3605080 - DNA, 25 bp, Homo sapien
tatcttcaagagatgcttggagctc

SEQ ID NO: 3605081 - DNA, 25 bp, Homo sapien
caaattgaccaggaggttagtggct

SEQ ID NO: 3605082 - DNA, 25 bp, Homo sapien
atctgggagcttctcattggttggc

SEQ ID NO: 3605083 - DNA, 25 bp, Homo sapien
aactgtgtgggctgatcccagaagc

SEQ ID NO: 3605084 - DNA, 25 bp, Homo sapien
gatcccggagtttgcaagtgaagag

SEQ ID NO: 3605085 - DNA, 25 bp, Homo sapien
ggagtccccgggtctgttccatcca

SEQ ID NO: 3605086 - DNA, 25 bp, Homo sapien
ggtcctgtctttgacatgaacttcc

SEQ ID NO: 3605087 - DNA, 25 bp, Homo sapien
tctgtccctgtaggtgagtccccag

SEQ ID NO: 3605088 - DNA, 25 bp, Homo sapien
gagtccccagcagttgctgccaagt

SEQ ID NO: 3605089 - DNA, 25 bp, Homo sapien
tgctgccagactccactggtccttt

SEQ ID NO: 3605090 - DNA, 25 bp, Homo sapien
ttagttttctggagtctctgtcacc

SEQ ID NO: 3605091 - DNA, 25 bp, Homo sapien
tagttttctggagtctctgtcacca

SEQ ID NO: 3605092 - DNA, 25 bp, Homo sapien
agttttctggagtctctgtcaccac

SEQ ID NO: 3605093 - DNA, 25 bp, Homo sapien
cccacttcccaccaaaatcaactgc

SEQ ID NO: 3605094 - DNA, 25 bp, Homo sapien
tggggttgggttaacaccacagatg

SEQ ID NO: 3605095 - DNA, 25 bp, Homo sapien
tcccacttcccaccaaaatcaactg

SEQ ID NO: 3605096 - DNA, 25 bp, Homo sapien
tctccgtttcttggatgatcacttt

SEQ ID NO: 3605097 - DNA, 25 bp, Homo sapien
gctgtttcatactctccgtttcttg

SEQ ID NO: 3605098 - DNA, 25 bp, Homo sapien
ccgtttcttggatgatcactttctc

SEQ ID NO: 3605099 - DNA, 25 bp, Homo sapien
catactctccgtttcttggatgatc

SEQ ID NO: 3605100 - DNA, 25 bp, Homo sapien
ggcgacctcatggatcactgacagc

SEQ ID NO: 3605101 - DNA, 25 bp, Homo sapien
tggcaagctgcctggaattcaccag

SEQ ID NO: 3605102 - DNA, 25 bp, Homo sapien
gacctcatggatcactgacagccat

SEQ ID NO: 3605103 - DNA, 25 bp, Homo sapien
cttggcgacctcatggatcactgac

SEQ ID NO: 3605104 - DNA, 25 bp, Homo sapien
catacttctgggaggatatgagtgg

SEQ ID NO: 3605105 - DNA, 25 bp, Homo sapien
ttgcgggaattttcttataacttca

SEQ ID NO: 3605106 - DNA, 25 bp, Homo sapien
gctcttgagaccctggatattttga

SEQ ID NO: 3605107 - DNA, 25 bp, Homo sapien
ttcagatgcccaggtggtattcttt

SEQ ID NO: 3605108 - DNA, 25 bp, Homo sapien
gagccccatggggtgactgcagctc

SEQ ID NO: 3605109 - DNA, 25 bp, Homo sapien
ctgcagctctgcctggctctgccat

SEQ ID NO: 3605110 - DNA, 25 bp, Homo sapien
ccccatggggtgactgcagctctgc

SEQ ID NO: 3605111 - DNA, 25 bp, Homo sapien
ccaggctgtagagtgagccccatgg

SEQ ID NO: 3605112 - DNA, 25 bp, Homo sapien
caatataagtcaaccttttatttct

SEQ ID NO: 3605113 - DNA, 25 bp, Homo sapien
agaatgccttgatgtagacttcttt

SEQ ID NO: 3605114 - DNA, 25 bp, Homo sapien
cctattcctcctgcgaagaatgcct

SEQ ID NO: 3605115 - DNA, 25 bp, Homo sapien
ctcttctgaactaactcaatataag

SEQ ID NO: 3605116 - DNA, 25 bp, Homo sapien
ctttcgtgcctttgtgttgagccta

SEQ ID NO: 3605117 - DNA, 25 bp, Homo sapien
tcaacattgcttgacagatgcacca

SEQ ID NO: 3605118 - DNA, 25 bp, Homo sapien
gatgcaccaccaatctttagccaga

SEQ ID NO: 3605119 - DNA, 25 bp, Homo sapien
tgacatcaaagacaacatcgatggc

SEQ ID NO: 3605120 - DNA, 25 bp, Homo sapien
aaagacaacatcgatggcggcgcag

SEQ ID NO: 3605121 - DNA, 25 bp, Homo sapien
cactttagaagttctgatctgtgtt

SEQ ID NO: 3605122 - DNA, 25 bp, Homo sapien
cacactttagaagttctgatctgtg

SEQ ID NO: 3605123 - DNA, 25 bp, Homo sapien
tatcacactttagaagttctgatct

SEQ ID NO: 3605124 - DNA, 25 bp, Homo sapien
tatatatcacactttagaagttctg

SEQ ID NO: 3605125 - DNA, 25 bp, Homo sapien
gtgacagtatcttcaaccgtggcca

SEQ ID NO: 3605126 - DNA, 25 bp, Homo sapien
tgagacccgggtcctgtgacagtat

SEQ ID NO: 3605127 - DNA, 25 bp, Homo sapien
tgttaataaggtgggcaaagggcca

SEQ ID NO: 3605128 - DNA, 25 bp, Homo sapien
tcctaaatggccatgacactgtgct

SEQ ID NO: 3605129 - DNA, 25 bp, Homo sapien
gttgtgtgagacaggagcaagcctc

SEQ ID NO: 3605130 - DNA, 25 bp, Homo sapien
ctgttgtgtgagacaggagcaagcc

SEQ ID NO: 3605131 - DNA, 25 bp, Homo sapien
cagcggctcctgcaaacttggccag

SEQ ID NO: 3605132 - DNA, 25 bp, Homo sapien
ggagcaagcctccacagcggctcct

SEQ ID NO: 3605133 - DNA, 25 bp, Homo sapien
cctgtgattgtgtcatataaaaaat

SEQ ID NO: 3605134 - DNA, 25 bp, Homo sapien
gtaggcctgtgattgtgtcatataa

SEQ ID NO: 3605135 - DNA, 25 bp, Homo sapien
aatgtaggcctgtgattgtgtcata

SEQ ID NO: 3605136 - DNA, 25 bp, Homo sapien
tcaatgtaggcctgtgattgtgtca

SEQ ID NO: 3605137 - DNA, 25 bp, Homo sapien
tggtcttttgaactgcggcagtgga

SEQ ID NO: 3605138 - DNA, 25 bp, Homo sapien
ttaagggtacaaaatctctctcgcc

SEQ ID NO: 3605139 - DNA, 25 bp, Homo sapien
tttgcataactccatacactgccgg

SEQ ID NO: 3605140 - DNA, 25 bp, Homo sapien
cagtgggttccacacatcctgttga

SEQ ID NO: 3605141 - DNA, 25 bp, Homo sapien
tatggcatagggttgttcattgtcc

SEQ ID NO: 3605142 - DNA, 25 bp, Homo sapien
ctatggcatagggttgttcattgtc

SEQ ID NO: 3605143 - DNA, 25 bp, Homo sapien
tggcatagggttgttcattgtcctc

SEQ ID NO: 3605144 - DNA, 25 bp, Homo sapien
tctatggcatagggttgttcattgt

SEQ ID NO: 3605145 - DNA, 25 bp, Homo sapien
gcagtctgcgtaagagtagtacagt

SEQ ID NO: 3605146 - DNA, 25 bp, Homo sapien
ggtccatggcagtctgcgtaagagt

SEQ ID NO: 3605147 - DNA, 25 bp, Homo sapien
gtagtacagtgaaagagcttccttc

SEQ ID NO: 3605148 - DNA, 25 bp, Homo sapien
caagttctcggggtccatggcagtc

SEQ ID NO: 3605149 - DNA, 25 bp, Homo sapien
cacatgtgcctgaacacccaatcat

SEQ ID NO: 3605150 - DNA, 25 bp, Homo sapien
gtcaggcgggtaatgtgctgacgtt

SEQ ID NO: 3605151 - DNA, 25 bp, Homo sapien
acatctcacacatgtgcctgaacac

SEQ ID NO: 3605152 - DNA, 25 bp, Homo sapien
acacccaatcatctcgcttatgaac

SEQ ID NO: 3605153 - DNA, 25 bp, Homo sapien
tccaggtgcctccatagaaagaatg

SEQ ID NO: 3605154 - DNA, 25 bp, Homo sapien
catctggcctagttgggtacacacc

SEQ ID NO: 3605155 - DNA, 25 bp, Homo sapien
ctcccagctactgttttccaggtgc

SEQ ID NO: 3605156 - DNA, 25 bp, Homo sapien
gaatgtagacccaggcaatccgatg

SEQ ID NO: 3605157 - DNA, 25 bp, Homo sapien
gcaggtgacctggttgctcatatca

SEQ ID NO: 3605158 - DNA, 25 bp, Homo sapien
gcaaatacgatcaatgcaacgtttg

SEQ ID NO: 3605159 - DNA, 25 bp, Homo sapien
gacatgcacaggaccttgcaaatac

SEQ ID NO: 3605160 - DNA, 25 bp, Homo sapien
ggttgctcatatcacttgggctcag

SEQ ID NO: 3605161 - DNA, 25 bp, Homo sapien
tggctgctgctaagtctttaagcaa

SEQ ID NO: 3605162 - DNA, 25 bp, Homo sapien
tagtaaacactatcacttagtcctt

SEQ ID NO: 3605163 - DNA, 25 bp, Homo sapien
tattctcactcattaagtacctagt

SEQ ID NO: 3605164 - DNA, 25 bp, Homo sapien
gcaaatacagacatgatataattta

SEQ ID NO: 3605165 - DNA, 25 bp, Homo sapien
attcaaggttcgggccaaggaagct

SEQ ID NO: 3605166 - DNA, 25 bp, Homo sapien
caaggttcgggccaaggaagctgct

SEQ ID NO: 3605167 - DNA, 25 bp, Homo sapien
cagaggatgcccgtgagacagtcct

SEQ ID NO: 3605168 - DNA, 25 bp, Homo sapien
tgagacagtcctggtaaaaattcaa

SEQ ID NO: 3605169 - DNA, 25 bp, Homo sapien
tgcaatcagctccaggtaacctgcg

SEQ ID NO: 3605170 - DNA, 25 bp, Homo sapien
taattaccaagcaaattcccggcga

SEQ ID NO: 3605171 - DNA, 25 bp, Homo sapien
ttacatgtcgcagctgggacacaga

SEQ ID NO: 3605172 - DNA, 25 bp, Homo sapien
ccttagccgtgtgggctgtagcaca

SEQ ID NO: 3605173 - DNA, 25 bp, Homo sapien
cactaggattgaacaggttggtacc

SEQ ID NO: 3605174 - DNA, 25 bp, Homo sapien
gagcttgcaggccacacataagtca

SEQ ID NO: 3605175 - DNA, 25 bp, Homo sapien
gctgcttaacacagagagcactagg

SEQ ID NO: 3605176 - DNA, 25 bp, Homo sapien
ttggcaaaacatgtggcccctcgga

SEQ ID NO: 3605177 - DNA, 25 bp, Homo sapien
gggccctgtgtttactccattagga

SEQ ID NO: 3605178 - DNA, 25 bp, Homo sapien
gaagtggcctgtgcgtgtaaacacc

SEQ ID NO: 3605179 - DNA, 25 bp, Homo sapien
cctgtggccgattttggtattgtaa

SEQ ID NO: 3605180 - DNA, 25 bp, Homo sapien
tccattaggaaaccagatagagcta

SEQ ID NO: 3605181 - DNA, 25 bp, Homo sapien
gggccaggtagcagttaaggagaat

SEQ ID NO: 3605182 - DNA, 25 bp, Homo sapien
tgcagtggcacgcagaccttcaggg

SEQ ID NO: 3605183 - DNA, 25 bp, Homo sapien
gctgcagtggcacgcagaccttcag

SEQ ID NO: 3605184 - DNA, 25 bp, Homo sapien
tgggccaggtagcagttaaggagaa

SEQ ID NO: 3605185 - DNA, 25 bp, Homo sapien
tgtaggatgaccacatgttccagtc

SEQ ID NO: 3605186 - DNA, 25 bp, Homo sapien
gcaaatatgtcagccaaagctcact

SEQ ID NO: 3605187 - DNA, 25 bp, Homo sapien
tctcatctttaggaagggagtggtc

SEQ ID NO: 3605188 - DNA, 25 bp, Homo sapien
caagtatggaatctggcactgggac

SEQ ID NO: 3605189 - DNA, 25 bp, Homo sapien
aaagaggcatctaatggtgtacgca

SEQ ID NO: 3605190 - DNA, 25 bp, Homo sapien
tacagacctggtgcgctaagcagag

SEQ ID NO: 3605191 - DNA, 25 bp, Homo sapien
tttttagttggactctacatggccc

SEQ ID NO: 3605192 - DNA, 25 bp, Homo sapien
ttaagaaccagaacctacagacctg

SEQ ID NO: 3605193 - DNA, 25 bp, Homo sapien
cccgaaagatcccatgcagagggct

SEQ ID NO: 3605194 - DNA, 25 bp, Homo sapien
atactgaggtacgaggtgttaggcc

SEQ ID NO: 3605195 - DNA, 25 bp, Homo sapien
gcttgtatataactccctctgtggg

SEQ ID NO: 3605196 - DNA, 25 bp, Homo sapien
ctcctgggaacgtctgggaaaatca

SEQ ID NO: 3605197 - DNA, 25 bp, Homo sapien
tgacagtagcttcatggaaaggtgt

SEQ ID NO: 3605198 - DNA, 25 bp, Homo sapien
ctgacagtagcttcatggaaaggtg

SEQ ID NO: 3605199 - DNA, 25 bp, Homo sapien
caggcacctgctaccagcctggcta

SEQ ID NO: 3605200 - DNA, 25 bp, Homo sapien
aggcacctgctaccagcctggctaa

SEQ ID NO: 3605201 - DNA, 25 bp, Homo sapien
tcttaaattgcatcaaaaagggaga

SEQ ID NO: 3605202 - DNA, 25 bp, Homo sapien
ttcacagtcagccatgcctttcatt

SEQ ID NO: 3605203 - DNA, 25 bp, Homo sapien
ttcctagggactgaagcccaaagcc

SEQ ID NO: 3605204 - DNA, 25 bp, Homo sapien
agcctcttacaaaactgtcttctga

SEQ ID NO: 3605205 - DNA, 25 bp, Homo sapien
tcagttcggtgaatggataactcca

SEQ ID NO: 3605206 - DNA, 25 bp, Homo sapien
tcggtgaatggataactccagcaaa

SEQ ID NO: 3605207 - DNA, 25 bp, Homo sapien
caaagctgatggttgctattaggtt

SEQ ID NO: 3605208 - DNA, 25 bp, Homo sapien
gcaaagctgatggttgctattaggt

SEQ ID NO: 3605209 - DNA, 25 bp, Homo sapien
gatatgtagatcagggcaacagcgc

SEQ ID NO: 3605210 - DNA, 25 bp, Homo sapien
ctgacattggacacataagctggaa

SEQ ID NO: 3605211 - DNA, 25 bp, Homo sapien
tctcagtgggcctctaaaagcttca

SEQ ID NO: 3605212 - DNA, 25 bp, Homo sapien
tgtacccagcttaaggaagcaaggc

SEQ ID NO: 3605213 - DNA, 25 bp, Homo sapien
ggaagtcctctattggagccaaggg

SEQ ID NO: 3605214 - DNA, 25 bp, Homo sapien
caggagctgtagtcccatggtggca

SEQ ID NO: 3605215 - DNA, 25 bp, Homo sapien
ggcaagttaactctaggcagcagca

SEQ ID NO: 3605216 - DNA, 25 bp, Homo sapien
tggttcactccaggcgaataaggtg

SEQ ID NO: 3605217 - DNA, 25 bp, Homo sapien
aggggctgcacgtgtagcacccaaa

SEQ ID NO: 3605218 - DNA, 25 bp, Homo sapien
gcacgtgtagcacccaaaacattcc

SEQ ID NO: 3605219 - DNA, 25 bp, Homo sapien
gggctgcacgtgtagcacccaaaac

SEQ ID NO: 3605220 - DNA, 25 bp, Homo sapien
gctgcacgtgtagcacccaaaacat

SEQ ID NO: 3605221 - DNA, 25 bp, Homo sapien
tctgacagtcccttatagctattag

SEQ ID NO: 3605222 - DNA, 25 bp, Homo sapien
tagttctggagctgttccccttctg

SEQ ID NO: 3605223 - DNA, 25 bp, Homo sapien
tagtaaaaaggcgagctgctgtccc

SEQ ID NO: 3605224 - DNA, 25 bp, Homo sapien
gaaggtctagtcaggtaaatgtctg

SEQ ID NO: 3605225 - DNA, 25 bp, Homo sapien
gacctttgacaaattctggcagtgt

SEQ ID NO: 3605226 - DNA, 25 bp, Homo sapien
cacgccatctgttcattgaggggag

SEQ ID NO: 3605227 - DNA, 25 bp, Homo sapien
acaaattctggcagtgtccacggca

SEQ ID NO: 3605228 - DNA, 25 bp, Homo sapien
ctatgaggagcgaatgcgaacagtc

SEQ ID NO: 3605229 - DNA, 25 bp, Homo sapien
cccaggagattaatttatgaacgca

SEQ ID NO: 3605230 - DNA, 25 bp, Homo sapien
ctgtcagagctaggcaggcaacacc

SEQ ID NO: 3605231 - DNA, 25 bp, Homo sapien
ggagaacgactctgccgatttttga

SEQ ID NO: 3605232 - DNA, 25 bp, Homo sapien
caaattgatgttggtaagagccaca

SEQ ID NO: 3605233 - DNA, 25 bp, Homo sapien
agcagggcagcttggctacggtcat

SEQ ID NO: 3605234 - DNA, 25 bp, Homo sapien
ttggctacggtcatctttatttcct

SEQ ID NO: 3605235 - DNA, 25 bp, Homo sapien
cccagggtcctttgtgcggagcagg

SEQ ID NO: 3605236 - DNA, 25 bp, Homo sapien
tttgtgcggagcagggcagcttggc

SEQ ID NO: 3605237 - DNA, 25 bp, Homo sapien
cgcgggtcatcagtgtcagcgttga

SEQ ID NO: 3605238 - DNA, 25 bp, Homo sapien
ccgccgcgggtcatcagtgtcagcg

SEQ ID NO: 3605239 - DNA, 25 bp, Homo sapien
gccgcgggtcatcagtgtcagcgtt

SEQ ID NO: 3605240 - DNA, 25 bp, Homo sapien
atcagtgtcagcgttgaggggtccc

SEQ ID NO: 3605241 - DNA, 25 bp, Homo sapien
ccctgatagatgaggctcttctttg

SEQ ID NO: 3605242 - DNA, 25 bp, Homo sapien
tcagtagccctgatagatgaggctc

SEQ ID NO: 3605243 - DNA, 25 bp, Homo sapien
tagccctgatagatgaggctcttct

SEQ ID NO: 3605244 - DNA, 25 bp, Homo sapien
ctttcagtagccctgatagatgagg

SEQ ID NO: 3605245 - DNA, 25 bp, Homo sapien
catggatccctctaggatgttccct

SEQ ID NO: 3605246 - DNA, 25 bp, Homo sapien
ggtcatggatccctctaggatgttc

SEQ ID NO: 3605247 - DNA, 25 bp, Homo sapien
cttgggtcccttcttcagtcttgtg

SEQ ID NO: 3605248 - DNA, 25 bp, Homo sapien
caagggtcatggatccctctaggat

SEQ ID NO: 3605249 - DNA, 25 bp, Homo sapien
gcaagtgcttctgacacccttaatg

SEQ ID NO: 3605250 - DNA, 25 bp, Homo sapien
aagtgcttctgacacccttaatgca

SEQ ID NO: 3605251 - DNA, 25 bp, Homo sapien
cctgcaagtgcttctgacaccctta

SEQ ID NO: 3605252 - DNA, 25 bp, Homo sapien
tgcaagtgcttctgacacccttaat

SEQ ID NO: 3605253 - DNA, 25 bp, Homo sapien
cattacatgcatagaagtagtgaca

SEQ ID NO: 3605254 - DNA, 25 bp, Homo sapien
aaattggaaagttacgaggctcctg

SEQ ID NO: 3605255 - DNA, 25 bp, Homo sapien
cagtgggattcgagtttgcattaca

SEQ ID NO: 3605256 - DNA, 25 bp, Homo sapien
tagtgacagccacggcagtaggttt

SEQ ID NO: 3605257 - DNA, 25 bp, Homo sapien
ttctggcccaggtttccctcagaat

SEQ ID NO: 3605258 - DNA, 25 bp, Homo sapien
cagaattgctgatctgaagattcat

SEQ ID NO: 3605259 - DNA, 25 bp, Homo sapien
atctgttctttctggcccaggtttc

SEQ ID NO: 3605260 - DNA, 25 bp, Homo sapien
gcccaggtttccctcagaattgctg

SEQ ID NO: 3605261 - DNA, 25 bp, Homo sapien
agatggccccggtgcagagacacaa

SEQ ID NO: 3605262 - DNA, 25 bp, Homo sapien
tgccttgctgttgttatgggagttc

SEQ ID NO: 3605263 - DNA, 25 bp, Homo sapien
ccagaacgctctgcagaaactgcct

SEQ ID NO: 3605264 - DNA, 25 bp, Homo sapien
taacttttgacaatggacatctcat

SEQ ID NO: 3605265 - DNA, 25 bp, Homo sapien
tgaggacatattcttatccttcaga

SEQ ID NO: 3605266 - DNA, 25 bp, Homo sapien
tcagagagtcagatttcccattgct

SEQ ID NO: 3605267 - DNA, 25 bp, Homo sapien
cattgctttgtagccccactgggta

SEQ ID NO: 3605268 - DNA, 25 bp, Homo sapien
gggtatcggtacatccctgaggaca

SEQ ID NO: 3605269 - DNA, 25 bp, Homo sapien
ctggaagaggccgtcttgccttcac

SEQ ID NO: 3605270 - DNA, 25 bp, Homo sapien
agctggaagaggccgtcttgccttc

SEQ ID NO: 3605271 - DNA, 25 bp, Homo sapien
tggaagaggccgtcttgccttcacc

SEQ ID NO: 3605272 - DNA, 25 bp, Homo sapien
caccttgattttggaaagggtagag

SEQ ID NO: 3605273 - DNA, 25 bp, Homo sapien
gctggacatccacagtagctgtaga

SEQ ID NO: 3605274 - DNA, 25 bp, Homo sapien
tccacagtagctgtagaagcccaga

SEQ ID NO: 3605275 - DNA, 25 bp, Homo sapien
gtagctgtagaagcccagaaggtca

SEQ ID NO: 3605276 - DNA, 25 bp, Homo sapien
tctttaatgaactggtgagaattag

SEQ ID NO: 3605277 - DNA, 25 bp, Homo sapien
cagacagctctcaaggccctaagtg

SEQ ID NO: 3605278 - DNA, 25 bp, Homo sapien
tgtaatgccctgtgccagactgttg

SEQ ID NO: 3605279 - DNA, 25 bp, Homo sapien
gaacagagttgtgcgtacggcttct

SEQ ID NO: 3605280 - DNA, 25 bp, Homo sapien
gccctaagtgcaaatcccagtgtaa

SEQ ID NO: 3605281 - DNA, 25 bp, Homo sapien
catgtggtttaattaactcgcccaa

SEQ ID NO: 3605282 - DNA, 25 bp, Homo sapien
taataagtcattgaggacatgtggt

SEQ ID NO: 3605283 - DNA, 25 bp, Homo sapien
aagctccaggaagctcgaccagtca

SEQ ID NO: 3605284 - DNA, 25 bp, Homo sapien
gctcgaccagtcacttaataagtca

SEQ ID NO: 3605285 - DNA, 25 bp, Homo sapien
ctgataatgcagtgtagttaattct

SEQ ID NO: 3605286 - DNA, 25 bp, Homo sapien
tgataatgcagtgtagttaattctt

SEQ ID NO: 3605287 - DNA, 25 bp, Homo sapien
gcagactgtacagaggattgaggcc

SEQ ID NO: 3605288 - DNA, 25 bp, Homo sapien
tgacagcaatagctaacttaagcaa

SEQ ID NO: 3605289 - DNA, 25 bp, Homo sapien
gccaccactggactgcgtgtaattg

SEQ ID NO: 3605290 - DNA, 25 bp, Homo sapien
taaactgcatgctttctacaaatgg

SEQ ID NO: 3605291 - DNA, 25 bp, Homo sapien
tgactttttcaaaaggagatttgtc

SEQ ID NO: 3605292 - DNA, 25 bp, Homo sapien
tgtcccaaagaatgtcttcattgag

SEQ ID NO: 3605293 - DNA, 25 bp, Homo sapien
agatttgtcccaaagaatgtcttca

SEQ ID NO: 3605294 - DNA, 25 bp, Homo sapien
cccaaagaatgtcttcattgaggaa

SEQ ID NO: 3605295 - DNA, 25 bp, Homo sapien
ttctagttggcatttccagtagaaa

SEQ ID NO: 3605296 - DNA, 25 bp, Homo sapien
ttcaccccaccacatgctactgtag

SEQ ID NO: 3605297 - DNA, 25 bp, Homo sapien
gctactgtagtgtttgccttcttcc

SEQ ID NO: 3605298 - DNA, 25 bp, Homo sapien
cttgcctttctagttggcatttcca

SEQ ID NO: 3605299 - DNA, 25 bp, Homo sapien
gcttcagtatggtgcccttcgaaca

SEQ ID NO: 3605300 - DNA, 25 bp, Homo sapien
ggtgcccttcgaacagttgttccag

SEQ ID NO: 3605301 - DNA, 25 bp, Homo sapien
tctgtgcttcagtatggtgcccttc

SEQ ID NO: 3605302 - DNA, 25 bp, Homo sapien
cagtatggtgcccttcgaacagttg

SEQ ID NO: 3605303 - DNA, 25 bp, Homo sapien
ccctgaagccctgcgtttctctgtc

SEQ ID NO: 3605304 - DNA, 25 bp, Homo sapien
gccctgaagccctgcgtttctctgt

SEQ ID NO: 3605305 - DNA, 25 bp, Homo sapien
agccctgaagccctgcgtttctctg

SEQ ID NO: 3605306 - DNA, 25 bp, Homo sapien
tccgtagcacggcatataaggatct

SEQ ID NO: 3605307 - DNA, 25 bp, Homo sapien
gtagcacggcatataaggatctctg

SEQ ID NO: 3605308 - DNA, 25 bp, Homo sapien
ctaactccgtagcacggcatataag

SEQ ID NO: 3605309 - DNA, 25 bp, Homo sapien
aactccgtagcacggcatataagga

SEQ ID NO: 3605310 - DNA, 25 bp, Homo sapien
tgtttggctgttctcagattgggcc

SEQ ID NO: 3605311 - DNA, 25 bp, Homo sapien
tgaggtacagaagcccaagcagtag

SEQ ID NO: 3605312 - DNA, 25 bp, Homo sapien
tttccaaactgaggtacagaagccc

SEQ ID NO: 3605313 - DNA, 25 bp, Homo sapien
ttctccctgaagatgttttccaaac

SEQ ID NO: 3605314 - DNA, 25 bp, Homo sapien
tctccctgaagatgttttccaaact

SEQ ID NO: 3605315 - DNA, 25 bp, Homo sapien
tgatggcaaaatcctgtgcacattt

SEQ ID NO: 3605316 - DNA, 25 bp, Homo sapien
ttgtttctctgatggcaaaatcctg

SEQ ID NO: 3605317 - DNA, 25 bp, Homo sapien
tctctgatggcaaaatcctgtgcac

SEQ ID NO: 3605318 - DNA, 25 bp, Homo sapien
tggcaaaatcctgtgcacatttttc

SEQ ID NO: 3605319 - DNA, 25 bp, Homo sapien
gatcaccatgggtccctcggatggc

SEQ ID NO: 3605320 - DNA, 25 bp, Homo sapien
aagcacgcacagttggacagggagc

SEQ ID NO: 3605321 - DNA, 25 bp, Homo sapien
ccagatcaccatgggtccctcggat

SEQ ID NO: 3605322 - DNA, 25 bp, Homo sapien
aaaagcccacaaatttcaaagcacg

SEQ ID NO: 3605323 - DNA, 25 bp, Homo sapien
ggcagctcccagatttgtatttagg

SEQ ID NO: 3605324 - DNA, 25 bp, Homo sapien
atagcaggggagtggtttttgttca

SEQ ID NO: 3605325 - DNA, 25 bp, Homo sapien
ttgaagctgacaacagagacttgtt

SEQ ID NO: 3605326 - DNA, 25 bp, Homo sapien
ctcgtcttgagcatgtgtttgcata

SEQ ID NO: 3605327 - DNA, 25 bp, Homo sapien
agacaggaaccccagaagactggct

SEQ ID NO: 3605328 - DNA, 25 bp, Homo sapien
gctggcaaactcattgaaaatagga

SEQ ID NO: 3605329 - DNA, 25 bp, Homo sapien
taaaatcaccaagtggataagcagc

SEQ ID NO: 3605330 - DNA, 25 bp, Homo sapien
taggaccgttgcacccagctttctt

SEQ ID NO: 3605331 - DNA, 25 bp, Homo sapien
cacagagctagttcctcccctaaaa

SEQ ID NO: 3605332 - DNA, 25 bp, Homo sapien
ggccaggttctgacaagctgtatca

SEQ ID NO: 3605333 - DNA, 25 bp, Homo sapien
ttgacatccatgtctgccttgagag

SEQ ID NO: 3605334 - DNA, 25 bp, Homo sapien
gccttgagagtgtggtggccgctgc

SEQ ID NO: 3605335 - DNA, 25 bp, Homo sapien
cacggtgtctaaagggagtctggcc

SEQ ID NO: 3605336 - DNA, 25 bp, Homo sapien
gagctccttgtacagtttgaactct

SEQ ID NO: 3605337 - DNA, 25 bp, Homo sapien
gctccttgtacagtttgaactcttg

SEQ ID NO: 3605338 - DNA, 25 bp, Homo sapien
tgagctccttgtacagtttgaactc

SEQ ID NO: 3605339 - DNA, 25 bp, Homo sapien
tccttgtacagtttgaactcttgct

SEQ ID NO: 3605340 - DNA, 25 bp, Homo sapien
gcgtaatttgcacttctgagaagca

SEQ ID NO: 3605341 - DNA, 25 bp, Homo sapien
gagaaactgacaggtaatttgggaa

SEQ ID NO: 3605342 - DNA, 25 bp, Homo sapien
agcaccaattcctgcgtaatttgca

SEQ ID NO: 3605343 - DNA, 25 bp, Homo sapien
ccttggactccgtagttaatggaga

SEQ ID NO: 3605344 - DNA, 25 bp, Homo sapien
actcgggagaggatgacttctcctg

SEQ ID NO: 3605345 - DNA, 25 bp, Homo sapien
tgggaattacccacattaagataaa

SEQ ID NO: 3605346 - DNA, 25 bp, Homo sapien
gaaacaacatccctgccacctgttg

SEQ ID NO: 3605347 - DNA, 25 bp, Homo sapien
tgcagcgataaaacagatctgaaac

SEQ ID NO: 3605348 - DNA, 25 bp, Homo sapien
gctctgaattaacttgaaggttgaa

SEQ ID NO: 3605349 - DNA, 25 bp, Homo sapien
gaagcctgtgaacttcgtggagacc

SEQ ID NO: 3605350 - DNA, 25 bp, Homo sapien
acttcgtggagacctgatctgaaac

SEQ ID NO: 3605351 - DNA, 25 bp, Homo sapien
tctgcaatagatctgaagcctgtga

SEQ ID NO: 3605352 - DNA, 25 bp, Homo sapien
ggaaccctcatcttgggcacttctg

SEQ ID NO: 3605353 - DNA, 25 bp, Homo sapien
attggacctcataactccttctggg

SEQ ID NO: 3605354 - DNA, 25 bp, Homo sapien
tcctcaccctcattggacctcataa

SEQ ID NO: 3605355 - DNA, 25 bp, Homo sapien
tctggcagttgtctccattcctcac

SEQ ID NO: 3605356 - DNA, 25 bp, Homo sapien
gctggatctggcagttgtctccatt

SEQ ID NO: 3605357 - DNA, 25 bp, Homo sapien
caccgccatcgccagcaccttcacc

SEQ ID NO: 3605358 - DNA, 25 bp, Homo sapien
ccgccatcgccagcaccttcacctt

SEQ ID NO: 3605359 - DNA, 25 bp, Homo sapien
ccatcgccagcaccttcaccttcat

SEQ ID NO: 3605360 - DNA, 25 bp, Homo sapien
gccatcgccagcaccttcaccttca

SEQ ID NO: 3605361 - DNA, 25 bp, Homo sapien
ggtttgatgtaatgagttccattct

SEQ ID NO: 3605362 - DNA, 25 bp, Homo sapien
ctgctggctaccagcaggtttgatg

SEQ ID NO: 3605363 - DNA, 25 bp, Homo sapien
tccttaaatagctttgaaccacact

SEQ ID NO: 3605364 - DNA, 25 bp, Homo sapien
ccacactgagtggtggataaacatt

SEQ ID NO: 3605365 - DNA, 25 bp, Homo sapien
caatctccctttgatccacctctgt

SEQ ID NO: 3605366 - DNA, 25 bp, Homo sapien
gctgactttggagaaaggatgctga

SEQ ID NO: 3605367 - DNA, 25 bp, Homo sapien
tcagaagtcattgcagctttgtgct

SEQ ID NO: 3605368 - DNA, 25 bp, Homo sapien
gctttaatatttggttgagctgact

SEQ ID NO: 3605369 - DNA, 25 bp, Homo sapien
ggaacattcgctcctccacatggaa

SEQ ID NO: 3605370 - DNA, 25 bp, Homo sapien
tagatggctacatctttagctttct

SEQ ID NO: 3605371 - DNA, 25 bp, Homo sapien
cgttggaacattcgctcctccacat

SEQ ID NO: 3605372 - DNA, 25 bp, Homo sapien
gatggctacatctttagctttctcc

SEQ ID NO: 3605373 - DNA, 25 bp, Homo sapien
attttaattggctgagtgggtctct

SEQ ID NO: 3605374 - DNA, 25 bp, Homo sapien
ctgaagagtattttaattggctgag

SEQ ID NO: 3605375 - DNA, 25 bp, Homo sapien
ttaattggctgagtgggtctctgag

SEQ ID NO: 3605376 - DNA, 25 bp, Homo sapien
agagtattttaattggctgagtggg

SEQ ID NO: 3605377 - DNA, 25 bp, Homo sapien
ggaacagtaaccacaacgctctgca

SEQ ID NO: 3605378 - DNA, 25 bp, Homo sapien
tctgcaactcgggctgcgcccgcat

SEQ ID NO: 3605379 - DNA, 25 bp, Homo sapien
acagtaaccacaacgctctgcaact

SEQ ID NO: 3605380 - DNA, 25 bp, Homo sapien
gtaaccacaacgctctgcaactcgg

SEQ ID NO: 3605381 - DNA, 25 bp, Homo sapien
tgccatatatcactgcttttctgca

SEQ ID NO: 3605382 - DNA, 25 bp, Homo sapien
tgggtgacttaaatggccagctaaa

SEQ ID NO: 3605383 - DNA, 25 bp, Homo sapien
tgtgaatcttgcctctcatggcggt

SEQ ID NO: 3605384 - DNA, 25 bp, Homo sapien
tgatgcaggcaatgccatatatcac

SEQ ID NO: 3605385 - DNA, 25 bp, Homo sapien
aaaacataatggtgtcaccaggaca

SEQ ID NO: 3605386 - DNA, 25 bp, Homo sapien
gtcaccaggacattcacagggtgct

SEQ ID NO: 3605387 - DNA, 25 bp, Homo sapien
ctaaaacataatggtgtcaccagga

SEQ ID NO: 3605388 - DNA, 25 bp, Homo sapien
cataatggtgtcaccaggacattca

SEQ ID NO: 3605389 - DNA, 25 bp, Homo sapien
gcatgctgcatccttgcgctccact

SEQ ID NO: 3605390 - DNA, 25 bp, Homo sapien
ttgggcatgctgcatccttgcgctc

SEQ ID NO: 3605391 - DNA, 25 bp, Homo sapien
gggcatgctgcatccttgcgctcca

SEQ ID NO: 3605392 - DNA, 25 bp, Homo sapien
tgctgcatccttgcgctccactggg

SEQ ID NO: 3605393 - DNA, 25 bp, Homo sapien
agagagccagcagtactgccaacag

SEQ ID NO: 3605394 - DNA, 25 bp, Homo sapien
ccagttggcatgctttatcaggcca

SEQ ID NO: 3605395 - DNA, 25 bp, Homo sapien
tgtagcccagttggcatgctttatc

SEQ ID NO: 3605396 - DNA, 25 bp, Homo sapien
ggggtggggattcctgtgcagagca

SEQ ID NO: 3605397 - DNA, 25 bp, Homo sapien
gtgcaagacatcagactgcctcttc

SEQ ID NO: 3605398 - DNA, 25 bp, Homo sapien
gaactgtttcttataagcagctttg

SEQ ID NO: 3605399 - DNA, 25 bp, Homo sapien
ggtaacacatgtaatctgcagcatt

SEQ ID NO: 3605400 - DNA, 25 bp, Homo sapien
ccatcaggtctggggttatgttgtt

SEQ ID NO: 3605401 - DNA, 25 bp, Homo sapien
ctttgtcatctttcattaggtaaca

SEQ ID NO: 3605402 - DNA, 25 bp, Homo sapien
tagcttgtaccagcacaaatggatg

SEQ ID NO: 3605403 - DNA, 25 bp, Homo sapien
caaaggcattgccaaaaactattga

SEQ ID NO: 3605404 - DNA, 25 bp, Homo sapien
aaatgtgggcactttatagaaaatc

SEQ ID NO: 3605405 - DNA, 25 bp, Homo sapien
cagttcatggtgttgcaaaggcatt

SEQ ID NO: 3605406 - DNA, 25 bp, Homo sapien
ggtgtgcgtatgaattcgtttgtcc

SEQ ID NO: 3605407 - DNA, 25 bp, Homo sapien
tctgaggacagcaggtaggtgtgtg

SEQ ID NO: 3605408 - DNA, 25 bp, Homo sapien
ctctgtgtgtaggtgtgcgtatgaa

SEQ ID NO: 3605409 - DNA, 25 bp, Homo sapien
atgaattcgtttgtcccctgggagc

SEQ ID NO: 3605410 - DNA, 25 bp, Homo sapien
ggtgcagacagataattgaatgctt

SEQ ID NO: 3605411 - DNA, 25 bp, Homo sapien
taggtgcagacagataattgaatgc

SEQ ID NO: 3605412 - DNA, 25 bp, Homo sapien
ctataggtgcagacagataattgaa

SEQ ID NO: 3605413 - DNA, 25 bp, Homo sapien
attttctataggtgcagacagataa

SEQ ID NO: 3605414 - DNA, 25 bp, Homo sapien
ctctgtacctcttacattcagactt

SEQ ID NO: 3605415 - DNA, 25 bp, Homo sapien
acttgagcgtgtgctgggtcatcca

SEQ ID NO: 3605416 - DNA, 25 bp, Homo sapien
gtgttagtgatgaacttgagcgtgt

SEQ ID NO: 3605417 - DNA, 25 bp, Homo sapien
gttagtgatgaacttgagcgtgtgc

SEQ ID NO: 3605418 - DNA, 25 bp, Homo sapien
atgaacttgagcgtgtgctgggtca

SEQ ID NO: 3605419 - DNA, 25 bp, Homo sapien
ggttcagtcttcccatagtacctgc

SEQ ID NO: 3605420 - DNA, 25 bp, Homo sapien
ctggttcagtcttcccatagtacct

SEQ ID NO: 3605421 - DNA, 25 bp, Homo sapien
tggttcagtcttcccatagtacctg

SEQ ID NO: 3605422 - DNA, 25 bp, Homo sapien
ttctgagaatgaggcgttcccacca

SEQ ID NO: 3605423 - DNA, 25 bp, Homo sapien
cacactgtgggaatacaccaccatc

SEQ ID NO: 3605424 - DNA, 25 bp, Homo sapien
agatcgggtatcgttcttggccacc

SEQ ID NO: 3605425 - DNA, 25 bp, Homo sapien
tcctggagaataatctgtgtattgt

SEQ ID NO: 3605426 - DNA, 25 bp, Homo sapien
ggggaggaggtatgcagggaaccac

SEQ ID NO: 3605427 - DNA, 25 bp, Homo sapien
ctggggaggaggtatgcagggaacc

SEQ ID NO: 3605428 - DNA, 25 bp, Homo sapien
tggggaggaggtatgcagggaacca

SEQ ID NO: 3605429 - DNA, 25 bp, Homo sapien
ggagacctatgtcccgactctttta

SEQ ID NO: 3605430 - DNA, 25 bp, Homo sapien
ccaaagtctttgtcatgcgtgggct

SEQ ID NO: 3605431 - DNA, 25 bp, Homo sapien
tatgtctatgaagagcaggtttctg

SEQ ID NO: 3605432 - DNA, 25 bp, Homo sapien
gattgctagcattttgccaaagtct

SEQ ID NO: 3605433 - DNA, 25 bp, Homo sapien
cgcacatacagccgccaaaggaatt

SEQ ID NO: 3605434 - DNA, 25 bp, Homo sapien
tgcgcactcccgcacatacagccgc

SEQ ID NO: 3605435 - DNA, 25 bp, Homo sapien
gccgccaaaggaatttcattctgta

SEQ ID NO: 3605436 - DNA, 25 bp, Homo sapien
tacagccgccaaaggaatttcattc

SEQ ID NO: 3605437 - DNA, 25 bp, Homo sapien
gatgcttctgaggacaatcctgcag

SEQ ID NO: 3605438 - DNA, 25 bp, Homo sapien
tgatgcttctgaggacaatcctgca

SEQ ID NO: 3605439 - DNA, 25 bp, Homo sapien
ggcccttttggttctgagaacctgc

SEQ ID NO: 3605440 - DNA, 25 bp, Homo sapien
cctgatgcttctgaggacaatcctg

SEQ ID NO: 3605441 - DNA, 25 bp, Homo sapien
ctccattcactcggtggtgaaccat

SEQ ID NO: 3605442 - DNA, 25 bp, Homo sapien
gctccattcactcggtggtgaacca

SEQ ID NO: 3605443 - DNA, 25 bp, Homo sapien
tgctccattcactcggtggtgaacc

SEQ ID NO: 3605444 - DNA, 25 bp, Homo sapien
ctgctccattcactcggtggtgaac

SEQ ID NO: 3605445 - DNA, 25 bp, Homo sapien
gacgtggtgggtgaatgagaagcag

SEQ ID NO: 3605446 - DNA, 25 bp, Homo sapien
ctaggaatgcagatccccgagcagc

SEQ ID NO: 3605447 - DNA, 25 bp, Homo sapien
acgtggtgggtgaatgagaagcagc

SEQ ID NO: 3605448 - DNA, 25 bp, Homo sapien
ggaatgcagatccccgagcagctcg

SEQ ID NO: 3605449 - DNA, 25 bp, Homo sapien
cctggaaggtggatagactgttttg

SEQ ID NO: 3605450 - DNA, 25 bp, Homo sapien
cctgtttcctggaaggtggatagac

SEQ ID NO: 3605451 - DNA, 25 bp, Homo sapien
tctccagcacactctcgtgagcttc

SEQ ID NO: 3605452 - DNA, 25 bp, Homo sapien
cacactctcgtgagcttccctgttt

SEQ ID NO: 3605453 - DNA, 25 bp, Homo sapien
ccacagcattgattgggcacccact

SEQ ID NO: 3605454 - DNA, 25 bp, Homo sapien
cacagcattgattgggcacccactg

SEQ ID NO: 3605455 - DNA, 25 bp, Homo sapien
cccacagcattgattgggcacccac

SEQ ID NO: 3605456 - DNA, 25 bp, Homo sapien
cagcattgattgggcacccactgtg

SEQ ID NO: 3605457 - DNA, 25 bp, Homo sapien
tcactatagagaacaagcactgtgc

SEQ ID NO: 3605458 - DNA, 25 bp, Homo sapien
gaacctgccattgtgttgctgaaag

SEQ ID NO: 3605459 - DNA, 25 bp, Homo sapien
taaaaatcaggcgttcgtgtcaccc

SEQ ID NO: 3605460 - DNA, 25 bp, Homo sapien
actggcgtgccggttgctttgaata

SEQ ID NO: 3605461 - DNA, 25 bp, Homo sapien
tgttgcaaagtctgcagttcaattc

SEQ ID NO: 3605462 - DNA, 25 bp, Homo sapien
ttgcaaagtctgcagttcaattcca

SEQ ID NO: 3605463 - DNA, 25 bp, Homo sapien
cttgatgttgcaaagtctgcagttc

SEQ ID NO: 3605464 - DNA, 25 bp, Homo sapien
tgatgttgcaaagtctgcagttcaa

SEQ ID NO: 3605465 - DNA, 25 bp, Homo sapien
ctgttgtcggtattttgtggtccaa

SEQ ID NO: 3605466 - DNA, 25 bp, Homo sapien
ctgttgtcggtattagtgacagtga

SEQ ID NO: 3605467 - DNA, 25 bp, Homo sapien
taaaaaataattgactatctcctca

SEQ ID NO: 3605468 - DNA, 25 bp, Homo sapien
cattgctaatcatgacacatattct

SEQ ID NO: 3605469 - DNA, 25 bp, Homo sapien
catcatcccgttagacaccttgcaa

SEQ ID NO: 3605470 - DNA, 25 bp, Homo sapien
caagggtcagcatattttcagtaaa

SEQ ID NO: 3605471 - DNA, 25 bp, Homo sapien
tctgagttatgcagtctgtgtcacc

SEQ ID NO: 3605472 - DNA, 25 bp, Homo sapien
tattggccacaggatattgtatcac

SEQ ID NO: 3605473 - DNA, 25 bp, Homo sapien
gccctctcgtcggtcactgcagttt

SEQ ID NO: 3605474 - DNA, 25 bp, Homo sapien
tcaggccctctcgtcggtcactgca

SEQ ID NO: 3605475 - DNA, 25 bp, Homo sapien
caatcaggccctctcgtcggtcact

SEQ ID NO: 3605476 - DNA, 25 bp, Homo sapien
aggccctctcgtcggtcactgcagt

SEQ ID NO: 3605477 - DNA, 25 bp, Homo sapien
cacgctatgtttgcagacaaggcat

SEQ ID NO: 3605478 - DNA, 25 bp, Homo sapien
acaagcactgtctgttggaaggatg

SEQ ID NO: 3605479 - DNA, 25 bp, Homo sapien
gacaaggcatgtgtgagcaacacaa

SEQ ID NO: 3605480 - DNA, 25 bp, Homo sapien
cctgcgttgagggatccaggagaca

SEQ ID NO: 3605481 - DNA, 25 bp, Homo sapien
agcagccaggacctgtttctcaaac

SEQ ID NO: 3605482 - DNA, 25 bp, Homo sapien
acagctggagccgacagttctagat

SEQ ID NO: 3605483 - DNA, 25 bp, Homo sapien
cagttctagatgttcccttggaggg

SEQ ID NO: 3605484 - DNA, 25 bp, Homo sapien
tttgttcgacaaagatacgttgttg

SEQ ID NO: 3605485 - DNA, 25 bp, Homo sapien
tcacggggatgcatatgggatgttt

SEQ ID NO: 3605486 - DNA, 25 bp, Homo sapien
cggggatgcatatgggatgtttgaa

SEQ ID NO: 3605487 - DNA, 25 bp, Homo sapien
gatgcatatgggatgtttgaagccc

SEQ ID NO: 3605488 - DNA, 25 bp, Homo sapien
gggatgcatatgggatgtttgaagc

SEQ ID NO: 3605489 - DNA, 25 bp, Homo sapien
cgggcacacctttggtggcatttct

SEQ ID NO: 3605490 - DNA, 25 bp, Homo sapien
tcttctagagtttctgcatcacgca

SEQ ID NO: 3605491 - DNA, 25 bp, Homo sapien
cttctagagtttctgcatcacgcat

SEQ ID NO: 3605492 - DNA, 25 bp, Homo sapien
gctcgtcaccagtgatgtcgggcac

SEQ ID NO: 3605493 - DNA, 25 bp, Homo sapien
atggtgtgggaataaattgttcttc

SEQ ID NO: 3605494 - DNA, 25 bp, Homo sapien
aatggtgtgggaataaattgttctt

SEQ ID NO: 3605495 - DNA, 25 bp, Homo sapien
ggccaggagagcgaatggtgtggga

SEQ ID NO: 3605496 - DNA, 25 bp, Homo sapien
cagggccaggagagcgaatggtgtg

SEQ ID NO: 3605497 - DNA, 25 bp, Homo sapien
gagcttctgagtgtgtcagcctgct

SEQ ID NO: 3605498 - DNA, 25 bp, Homo sapien
tcagcctgcttgaagatgaaatgga

SEQ ID NO: 3605499 - DNA, 25 bp, Homo sapien
agcagcagagcttctgagtgtgtca

SEQ ID NO: 3605500 - DNA, 25 bp, Homo sapien
tctgagtgtgtcagcctgcttgaag

SEQ ID NO: 3605501 - DNA, 25 bp, Homo sapien
agctggtctactccactcattgcac

SEQ ID NO: 3605502 - DNA, 25 bp, Homo sapien
ggcaaagctggtctactccactcat

SEQ ID NO: 3605503 - DNA, 25 bp, Homo sapien
caaagctggtctactccactcattg

SEQ ID NO: 3605504 - DNA, 25 bp, Homo sapien
aggcaaagctggtctactccactca

SEQ ID NO: 3605505 - DNA, 25 bp, Homo sapien
tgacttcttgaactaacttgctgag

SEQ ID NO: 3605506 - DNA, 25 bp, Homo sapien
caaacacaggcccaactggatggat

SEQ ID NO: 3605507 - DNA, 25 bp, Homo sapien
tggatggataccctagcgctctctc

SEQ ID NO: 3605508 - DNA, 25 bp, Homo sapien
tcgaagtcctagatgaaagagaaac

SEQ ID NO: 3605509 - DNA, 25 bp, Homo sapien
cgtcttatctggtctcactggccaa

SEQ ID NO: 3605510 - DNA, 25 bp, Homo sapien
ctagcagttattgtgagttccaacc

SEQ ID NO: 3605511 - DNA, 25 bp, Homo sapien
tacaatgctataggacaccagaatg

SEQ ID NO: 3605512 - DNA, 25 bp, Homo sapien
cactggccaaaacgcagccttggaa

SEQ ID NO: 3605513 - DNA, 25 bp, Homo sapien
tcagcaacagcctccctggaaggaa

SEQ ID NO: 3605514 - DNA, 25 bp, Homo sapien
ctggaaggaagaccaggagagggac

SEQ ID NO: 3605515 - DNA, 25 bp, Homo sapien
ttaacctctctcagcaacagcctcc

SEQ ID NO: 3605516 - DNA, 25 bp, Homo sapien
gcaacagcctccctggaaggaagac

SEQ ID NO: 3605517 - DNA, 25 bp, Homo sapien
gctcgggatccaagaggacattgtc

SEQ ID NO: 3605518 - DNA, 25 bp, Homo sapien
acaacagacgctgcacacagctggc

SEQ ID NO: 3605519 - DNA, 25 bp, Homo sapien
gagagctcgggatccaagaggacat

SEQ ID NO: 3605520 - DNA, 25 bp, Homo sapien
gacattgtcctgaatgctgtacaca

SEQ ID NO: 3605521 - DNA, 25 bp, Homo sapien
acatttccccagaatgcgaccttga

SEQ ID NO: 3605522 - DNA, 25 bp, Homo sapien
cctcattactgcaggcagtttgctg

SEQ ID NO: 3605523 - DNA, 25 bp, Homo sapien
cagtttgctgaaacaaattgcttct

SEQ ID NO: 3605524 - DNA, 25 bp, Homo sapien
taagcagcggtattaataacatggt

SEQ ID NO: 3605525 - DNA, 25 bp, Homo sapien
tatcaattggtttgagagtttctgg

SEQ ID NO: 3605526 - DNA, 25 bp, Homo sapien
cagacagccaatggcattgaacttg

SEQ ID NO: 3605527 - DNA, 25 bp, Homo sapien
atcaattggtttgagagtttctggc

SEQ ID NO: 3605528 - DNA, 25 bp, Homo sapien
attatcaattggtttgagagtttct

SEQ ID NO: 3605529 - DNA, 25 bp, Homo sapien
aatgcagccccgcatctggaaacag

SEQ ID NO: 3605530 - DNA, 25 bp, Homo sapien
gacagctgagcattggaaccacgac

SEQ ID NO: 3605531 - DNA, 25 bp, Homo sapien
tcagacctttgagtgaatgcagccc

SEQ ID NO: 3605532 - DNA, 25 bp, Homo sapien
tgggtgctgtttgggttctgatgcc

SEQ ID NO: 3605533 - DNA, 25 bp, Homo sapien
gaaccagtatccatttggccccgaa

SEQ ID NO: 3605534 - DNA, 25 bp, Homo sapien
catacgggtatttgaaccagtatcc

SEQ ID NO: 3605535 - DNA, 25 bp, Homo sapien
ttaagctccaagaagtttaagacat

SEQ ID NO: 3605536 - DNA, 25 bp, Homo sapien
ttgcccatatcatacgggtatttga

SEQ ID NO: 3605537 - DNA, 25 bp, Homo sapien
ctccgatgtgtgctgtgacctgagc

SEQ ID NO: 3605538 - DNA, 25 bp, Homo sapien
cagaaagcaaagctccgatgtgtgc

SEQ ID NO: 3605539 - DNA, 25 bp, Homo sapien
tcagagattgtgaatgagtgacagc

SEQ ID NO: 3605540 - DNA, 25 bp, Homo sapien
gcatcagagattgtgaatgagtgac

SEQ ID NO: 3605541 - DNA, 25 bp, Homo sapien
tgatgggccatcttggctggaccct

SEQ ID NO: 3605542 - DNA, 25 bp, Homo sapien
gatctgtagtcacaggacaggaggt

SEQ ID NO: 3605543 - DNA, 25 bp, Homo sapien
tggcctggagccagtaggagcagct

SEQ ID NO: 3605544 - DNA, 25 bp, Homo sapien
tgtggcattggtgctcaggctctca

SEQ ID NO: 3605545 - DNA, 25 bp, Homo sapien
gtggcacacacctgtaatcccagct

SEQ ID NO: 3605546 - DNA, 25 bp, Homo sapien
agatacaaaaaattcgccgggcatg

SEQ ID NO: 3605547 - DNA, 25 bp, Homo sapien
tactccagaggctgaggcaggagaa

SEQ ID NO: 3605548 - DNA, 25 bp, Homo sapien
tcacttgaacccaggaggcggaggt

SEQ ID NO: 3605549 - DNA, 25 bp, Homo sapien
gggatgtgcccctatgtccagctaa

SEQ ID NO: 3605550 - DNA, 25 bp, Homo sapien
ttacagggatgtgcccctatgtcca

SEQ ID NO: 3605551 - DNA, 25 bp, Homo sapien
ggattacagggatgtgcccctatgt

SEQ ID NO: 3605552 - DNA, 25 bp, Homo sapien
agggatgtgcccctatgtccagcta

SEQ ID NO: 3605553 - DNA, 25 bp, Homo sapien
cagcctcattagagctgccaacaag

SEQ ID NO: 3605554 - DNA, 25 bp, Homo sapien
ttctccagcctcattagagctgcca

SEQ ID NO: 3605555 - DNA, 25 bp, Homo sapien
tctattattagtattactatgcaga

SEQ ID NO: 3605556 - DNA, 25 bp, Homo sapien
gagctgccaacaagatctattatta

SEQ ID NO: 3605557 - DNA, 25 bp, Homo sapien
tcaccagaggtgcaaaaccagcgtg

SEQ ID NO: 3605558 - DNA, 25 bp, Homo sapien
gtctccagggccatgccagtcacac

SEQ ID NO: 3605559 - DNA, 25 bp, Homo sapien
ggtcaccagaggtgcaaaaccagcg

SEQ ID NO: 3605560 - DNA, 25 bp, Homo sapien
cgtctccagggccatgccagtcaca

SEQ ID NO: 3605561 - DNA, 25 bp, Homo sapien
tccacgggagcaacatgcttggccc

SEQ ID NO: 3605562 - DNA, 25 bp, Homo sapien
gagtggcagcatggcacgcactcca

SEQ ID NO: 3605563 - DNA, 25 bp, Homo sapien
ctgctgcatccacgggagcaacatg

SEQ ID NO: 3605564 - DNA, 25 bp, Homo sapien
gggagcaacatgcttggccctgcca

SEQ ID NO: 3605565 - DNA, 25 bp, Homo sapien
tggggcttgggtagctttgactttc

SEQ ID NO: 3605566 - DNA, 25 bp, Homo sapien
caccatggtgtcaaaaaggtctggg

SEQ ID NO: 3605567 - DNA, 25 bp, Homo sapien
cacatggtcctgagcctgcaatggc

SEQ ID NO: 3605568 - DNA, 25 bp, Homo sapien
gctctatgggtggttgcaccagcca

SEQ ID NO: 3605569 - DNA, 25 bp, Homo sapien
aaaatcctgttacagggcaaaggcg

SEQ ID NO: 3605570 - DNA, 25 bp, Homo sapien
gccgtggagaccgtgaaaatcctgt

SEQ ID NO: 3605571 - DNA, 25 bp, Homo sapien
gcaaaggcgttttagctacagctcc

SEQ ID NO: 3605572 - DNA, 25 bp, Homo sapien
cagcaggtgatgagcgacgttagcc

SEQ ID NO: 3605573 - DNA, 25 bp, Homo sapien
ggtgccgtcggctctaattaacgta

SEQ ID NO: 3605574 - DNA, 25 bp, Homo sapien
gcaggttcggctccgcctctttcat

SEQ ID NO: 3605575 - DNA, 25 bp, Homo sapien
tgtcagctgccagcaggttcggctc

SEQ ID NO: 3605576 - DNA, 25 bp, Homo sapien
ttcagagtatagagtaggctggcat

SEQ ID NO: 3605577 - DNA, 25 bp, Homo sapien
caatactcgtcctctggatctctgt

SEQ ID NO: 3605578 - DNA, 25 bp, Homo sapien
aatactcgtcctctggatctctgtc

SEQ ID NO: 3605579 - DNA, 25 bp, Homo sapien
tcaatactcgtcctctggatctctg

SEQ ID NO: 3605580 - DNA, 25 bp, Homo sapien
ttagtcttccaccagttttgctttg

SEQ ID NO: 3605581 - DNA, 25 bp, Homo sapien
tagtcttccaccagttttgctttgt

SEQ ID NO: 3605582 - DNA, 25 bp, Homo sapien
agtcttccaccagttttgctttgtt

SEQ ID NO: 3605583 - DNA, 25 bp, Homo sapien
ttgctttgtttttataaaatctgtg

SEQ ID NO: 3605584 - DNA, 25 bp, Homo sapien
agcagtattttgcagggtccctgtc

SEQ ID NO: 3605585 - DNA, 25 bp, Homo sapien
gcatagagtccaggaacatctatct

SEQ ID NO: 3605586 - DNA, 25 bp, Homo sapien
ttcgtcgcctgaaggggagttgggc

SEQ ID NO: 3605587 - DNA, 25 bp, Homo sapien
gagtccaggaacatctatctccttg

SEQ ID NO: 3605588 - DNA, 25 bp, Homo sapien
cagctgggtcccctgggttttgcct

SEQ ID NO: 3605589 - DNA, 25 bp, Homo sapien
gcccccggtgacagtgaatggcact

SEQ ID NO: 3605590 - DNA, 25 bp, Homo sapien
aatgccacttgtcaagccgtcaacg

SEQ ID NO: 3605591 - DNA, 25 bp, Homo sapien
tgcagaggtttttatgctaatgcca

SEQ ID NO: 3605592 - DNA, 25 bp, Homo sapien
tctctagagggaaagtggatctgaa

SEQ ID NO: 3605593 - DNA, 25 bp, Homo sapien
ggaaagtggatctgaatggaggatc

SEQ ID NO: 3605594 - DNA, 25 bp, Homo sapien
tctagagggaaagtggatctgaatg

SEQ ID NO: 3605595 - DNA, 25 bp, Homo sapien
agggaaagtggatctgaatggagga

SEQ ID NO: 3605596 - DNA, 25 bp, Homo sapien
aataaccaaagcctccttgcacact

SEQ ID NO: 3605597 - DNA, 25 bp, Homo sapien
tcaacaagccatgtctgcaatgcac

SEQ ID NO: 3605598 - DNA, 25 bp, Homo sapien
ggatacactcagcctcaacaagcca

SEQ ID NO: 3605599 - DNA, 25 bp, Homo sapien
tccagtgcacatgcaccctcacagg

SEQ ID NO: 3605600 - DNA, 25 bp, Homo sapien
atacacatccaccgtaggcagccta

SEQ ID NO: 3605601 - DNA, 25 bp, Homo sapien
gcatacacatccaccgtaggcagcc

SEQ ID NO: 3605602 - DNA, 25 bp, Homo sapien
acacatccaccgtaggcagcctatg

SEQ ID NO: 3605603 - DNA, 25 bp, Homo sapien
acatccaccgtaggcagcctatgtc

SEQ ID NO: 3605604 - DNA, 25 bp, Homo sapien
tcttccccaggtaatgctagagctg

SEQ ID NO: 3605605 - DNA, 25 bp, Homo sapien
taatgctagagctgccactagggcc

SEQ ID NO: 3605606 - DNA, 25 bp, Homo sapien
gccactagggccaggatgttcacct

SEQ ID NO: 3605607 - DNA, 25 bp, Homo sapien
atgttcacctccagccatggttgct

SEQ ID NO: 3605608 - DNA, 25 bp, Homo sapien
tcaaaatccccactggtggtaaagc

SEQ ID NO: 3605609 - DNA, 25 bp, Homo sapien
agagcagcaccctccccagaaatct

SEQ ID NO: 3605610 - DNA, 25 bp, Homo sapien
gctagagcagcaccctccccagaaa

SEQ ID NO: 3605611 - DNA, 25 bp, Homo sapien
gcaaggagaccatgagccagcccca

SEQ ID NO: 3605612 - DNA, 25 bp, Homo sapien
ctttgcaaggagaccatgagccagc

SEQ ID NO: 3605613 - DNA, 25 bp, Homo sapien
aggtttttgatcacatactgggcaa

SEQ ID NO: 3605614 - DNA, 25 bp, Homo sapien
gtttttgatcacatactgggcaaat

SEQ ID NO: 3605615 - DNA, 25 bp, Homo sapien
gggaagtcagaaggtttttgatcac

SEQ ID NO: 3605616 - DNA, 25 bp, Homo sapien
tgggaagtcagaaggtttttgatca

SEQ ID NO: 3605617 - DNA, 25 bp, Homo sapien
tctttctgatccatgaccttctggg

SEQ ID NO: 3605618 - DNA, 25 bp, Homo sapien
gctctttctgatccatgaccttctg

SEQ ID NO: 3605619 - DNA, 25 bp, Homo sapien
gttccttgctctttctgatccatga

SEQ ID NO: 3605620 - DNA, 25 bp, Homo sapien
cttgctctttctgatccatgacctt

SEQ ID NO: 3605621 - DNA, 25 bp, Homo sapien
tttgtggccttggtccaagctgttt

SEQ ID NO: 3605622 - DNA, 25 bp, Homo sapien
agctgtttcaacaagccactctgct

SEQ ID NO: 3605623 - DNA, 25 bp, Homo sapien
tctttgtggccttggtccaagctgt

SEQ ID NO: 3605624 - DNA, 25 bp, Homo sapien
ttcaacaagccactctgcttcttac

SEQ ID NO: 3605625 - DNA, 25 bp, Homo sapien
acagagcaagcgttcccaagagcct

SEQ ID NO: 3605626 - DNA, 25 bp, Homo sapien
gacacagagcaagcgttcccaagag

SEQ ID NO: 3605627 - DNA, 25 bp, Homo sapien
agagcaagcgttcccaagagcctgc

SEQ ID NO: 3605628 - DNA, 25 bp, Homo sapien
agacacagagcaagcgttcccaaga

SEQ ID NO: 3605629 - DNA, 25 bp, Homo sapien
tagccaaattaactaggtaatactc

SEQ ID NO: 3605630 - DNA, 25 bp, Homo sapien
ctctgcattggtgtaaaattctcca

SEQ ID NO: 3605631 - DNA, 25 bp, Homo sapien
tgtaaaatcacagtctattctagcc

SEQ ID NO: 3605632 - DNA, 25 bp, Homo sapien
tcaaaccatgaagactggcgtttaa

SEQ ID NO: 3605633 - DNA, 25 bp, Homo sapien
atagacagatagatcgtattaagca

SEQ ID NO: 3605634 - DNA, 25 bp, Homo sapien
aaagacactgattctaaatggctgt

SEQ ID NO: 3605635 - DNA, 25 bp, Homo sapien
cgtattaagcatacaacattcaggg

SEQ ID NO: 3605636 - DNA, 25 bp, Homo sapien
gatagatcgtattaagcatacaaca

SEQ ID NO: 3605637 - DNA, 25 bp, Homo sapien
attgtttgcacaaagtatctgtcat

SEQ ID NO: 3605638 - DNA, 25 bp, Homo sapien
gtttgcacaaagtatctgtcattgc

SEQ ID NO: 3605639 - DNA, 25 bp, Homo sapien
ttgtttgcacaaagtatctgtcatt

SEQ ID NO: 3605640 - DNA, 25 bp, Homo sapien
tgtttgcacaaagtatctgtcattg

SEQ ID NO: 3605641 - DNA, 25 bp, Homo sapien
cccctgctggctgggggttgtattc

SEQ ID NO: 3605642 - DNA, 25 bp, Homo sapien
tcccctgctggctgggggttgtatt

SEQ ID NO: 3605643 - DNA, 25 bp, Homo sapien
tcagtcccctgctggctgggggttg

SEQ ID NO: 3605644 - DNA, 25 bp, Homo sapien
agtcccctgctggctgggggttgta

SEQ ID NO: 3605645 - DNA, 25 bp, Homo sapien
ggttcagcgtggaggcagtatttct

SEQ ID NO: 3605646 - DNA, 25 bp, Homo sapien
ggcatctgcaccaaactttcaagaa

SEQ ID NO: 3605647 - DNA, 25 bp, Homo sapien
caggttcagcgtggaggcagtattt

SEQ ID NO: 3605648 - DNA, 25 bp, Homo sapien
cagcgtggaggcagtatttcttcca

SEQ ID NO: 3605649 - DNA, 25 bp, Homo sapien
atttcattatttattccagctacta

SEQ ID NO: 3605650 - DNA, 25 bp, Homo sapien
ttattccagctactatgcggtacat

SEQ ID NO: 3605651 - DNA, 25 bp, Homo sapien
cattatttattccagctactatgcg

SEQ ID NO: 3605652 - DNA, 25 bp, Homo sapien
tatttattccagctactatgcggta

SEQ ID NO: 3605653 - DNA, 25 bp, Homo sapien
agctttgtttccctcttctacctgg

SEQ ID NO: 3605654 - DNA, 25 bp, Homo sapien
ctgtccctgtcttgttataagatca

SEQ ID NO: 3605655 - DNA, 25 bp, Homo sapien
tcaacatcgagcactttcgatggtc

SEQ ID NO: 3605656 - DNA, 25 bp, Homo sapien
tctacctgggcactagatcttatct

SEQ ID NO: 3605657 - DNA, 25 bp, Homo sapien
gctccagccagcaagcaatcttcac

SEQ ID NO: 3605658 - DNA, 25 bp, Homo sapien
ctccagccagcaagcaatcttcaca

SEQ ID NO: 3605659 - DNA, 25 bp, Homo sapien
tctgcctgctcatcaagattggcat

SEQ ID NO: 3605660 - DNA, 25 bp, Homo sapien
tctgggttgggatcgagtgtgacca

SEQ ID NO: 3605661 - DNA, 25 bp, Homo sapien
gttgggatcgagtgtgaccaccttc

SEQ ID NO: 3605662 - DNA, 25 bp, Homo sapien
ctcatcaagattggcatgagggtct

SEQ ID NO: 3605663 - DNA, 25 bp, Homo sapien
tcagaaccatttgatgtcgttgagc

SEQ ID NO: 3605664 - DNA, 25 bp, Homo sapien
gtcagaaccatttgatgtcgttgag

SEQ ID NO: 3605665 - DNA, 25 bp, Homo sapien
cgtcttctctttccgggcctctgga

SEQ ID NO: 3605666 - DNA, 25 bp, Homo sapien
ctctttccgggcctctggaacagct

SEQ ID NO: 3605667 - DNA, 25 bp, Homo sapien
caaaatggatctgtgcagacaatca

SEQ ID NO: 3605668 - DNA, 25 bp, Homo sapien
ggaacagctgttccacaaaatggat

SEQ ID NO: 3605669 - DNA, 25 bp, Homo sapien
tagctcttcttgactgagactgtgg

SEQ ID NO: 3605670 - DNA, 25 bp, Homo sapien
cagccagccacggaggcatagctct

SEQ ID NO: 3605671 - DNA, 25 bp, Homo sapien
acggaggcatagctctccctcttag

SEQ ID NO: 3605672 - DNA, 25 bp, Homo sapien
agctcttcttgactgagactgtggc

SEQ ID NO: 3605673 - DNA, 25 bp, Homo sapien
tctcctggatggagagtggagtcat

SEQ ID NO: 3605674 - DNA, 25 bp, Homo sapien
tctggtctcctggatggagagtgga

SEQ ID NO: 3605675 - DNA, 25 bp, Homo sapien
tggtctcctggatggagagtggagt

SEQ ID NO: 3605676 - DNA, 25 bp, Homo sapien
cctctggtctcctggatggagagtg

SEQ ID NO: 3605677 - DNA, 25 bp, Homo sapien
tgccacgacccatggcaaatgtggg

SEQ ID NO: 3605678 - DNA, 25 bp, Homo sapien
catggcaaatgtgggtccccgtgtt

SEQ ID NO: 3605679 - DNA, 25 bp, Homo sapien
cacgacccatggcaaatgtgggtcc

SEQ ID NO: 3605680 - DNA, 25 bp, Homo sapien
gacccatggcaaatgtgggtccccg

SEQ ID NO: 3605681 - DNA, 25 bp, Homo sapien
gaggggataactgtgttttgcaacc

SEQ ID NO: 3605682 - DNA, 25 bp, Homo sapien
gatgcaggagtcaaaaggccagcaa

SEQ ID NO: 3605683 - DNA, 25 bp, Homo sapien
gctgcaggaggctgaccattggccc

SEQ ID NO: 3605684 - DNA, 25 bp, Homo sapien
cattggccctggttcgtaggcagag

SEQ ID NO: 3605685 - DNA, 25 bp, Homo sapien
gggccacgataggccttgatgctta

SEQ ID NO: 3605686 - DNA, 25 bp, Homo sapien
cacgataggccttgatgcttaactg

SEQ ID NO: 3605687 - DNA, 25 bp, Homo sapien
taggccttgatgcttaactggagag

SEQ ID NO: 3605688 - DNA, 25 bp, Homo sapien
gataggccttgatgcttaactggag

SEQ ID NO: 3605689 - DNA, 25 bp, Homo sapien
agtctttaattcctctgaagaacag

SEQ ID NO: 3605690 - DNA, 25 bp, Homo sapien
caaggaagagtctttaattcctctg

SEQ ID NO: 3605691 - DNA, 25 bp, Homo sapien
aagagtctttaattcctctgaagaa

SEQ ID NO: 3605692 - DNA, 25 bp, Homo sapien
aattcctctgaagaacagctctcct

SEQ ID NO: 3605693 - DNA, 25 bp, Homo sapien
tggaggcccagggtgcctccttcct

SEQ ID NO: 3605694 - DNA, 25 bp, Homo sapien
tgcctccttccttcctgcatggcat

SEQ ID NO: 3605695 - DNA, 25 bp, Homo sapien
gggtgcctccttccttcctgcatgg

SEQ ID NO: 3605696 - DNA, 25 bp, Homo sapien
ctggaggcccagggtgcctccttcc

SEQ ID NO: 3605697 - DNA, 25 bp, Homo sapien
tcctagatcaggatcttcacccgct

SEQ ID NO: 3605698 - DNA, 25 bp, Homo sapien
attcctagatcaggatcttcacccg

SEQ ID NO: 3605699 - DNA, 25 bp, Homo sapien
tagatcaggatcttcacccgctggg

SEQ ID NO: 3605700 - DNA, 25 bp, Homo sapien
gatcaggatcttcacccgctgggac

SEQ ID NO: 3605701 - DNA, 25 bp, Homo sapien
tcagccagacctggccaagcatatg

SEQ ID NO: 3605702 - DNA, 25 bp, Homo sapien
aggccacatcgattccctcgatctc

SEQ ID NO: 3605703 - DNA, 25 bp, Homo sapien
cctggccaagcatatgcctgtgtca

SEQ ID NO: 3605704 - DNA, 25 bp, Homo sapien
tcgattccctcgatctccacttccc

SEQ ID NO: 3605705 - DNA, 25 bp, Homo sapien
tctgtctgagggccttctgcccttc

SEQ ID NO: 3605706 - DNA, 25 bp, Homo sapien
cttcccctagtttctgtgtatcttc

SEQ ID NO: 3605707 - DNA, 25 bp, Homo sapien
gtatcttctccgctagcagtttttt

SEQ ID NO: 3605708 - DNA, 25 bp, Homo sapien
tgtgtatcttctccgctagcagttt

SEQ ID NO: 3605709 - DNA, 25 bp, Homo sapien
tccttatctcctggaatataaatga

SEQ ID NO: 3605710 - DNA, 25 bp, Homo sapien
cctgacatccttatctcctggaata

SEQ ID NO: 3605711 - DNA, 25 bp, Homo sapien
gacatccttatctcctggaatataa

SEQ ID NO: 3605712 - DNA, 25 bp, Homo sapien
ttatctcctggaatataaatgactt

SEQ ID NO: 3605713 - DNA, 25 bp, Homo sapien
ggtctttataccaccctgacatctc

SEQ ID NO: 3605714 - DNA, 25 bp, Homo sapien
ccttttccttcttcatcaacatcat

SEQ ID NO: 3605715 - DNA, 25 bp, Homo sapien
aagggtctttataccaccctgacat

SEQ ID NO: 3605716 - DNA, 25 bp, Homo sapien
tccttttccttcttcatcaacatca

SEQ ID NO: 3605717 - DNA, 25 bp, Homo sapien
tatgtcgttatctttgtcaatatta

SEQ ID NO: 3605718 - DNA, 25 bp, Homo sapien
tcgttatctttgtcaatattatcac

SEQ ID NO: 3605719 - DNA, 25 bp, Homo sapien
gtttatcacgtctatgtcgttatct

SEQ ID NO: 3605720 - DNA, 25 bp, Homo sapien
gttatctttgtcaatattatcacca

SEQ ID NO: 3605721 - DNA, 25 bp, Homo sapien
aggctttgaaggcattcgcacggtc

SEQ ID NO: 3605722 - DNA, 25 bp, Homo sapien
tgaggaacctaacaagcagcgccag

SEQ ID NO: 3605723 - DNA, 25 bp, Homo sapien
tttgaaggcattcgcacggtcattt

SEQ ID NO: 3605724 - DNA, 25 bp, Homo sapien
gaacctaacaagcagcgccagctga

SEQ ID NO: 3605725 - DNA, 25 bp, Homo sapien
aatgctgccatggacaggagcactg

SEQ ID NO: 3605726 - DNA, 25 bp, Homo sapien
tgggacacatggacaatgctgccat

SEQ ID NO: 3605727 - DNA, 25 bp, Homo sapien
gacacatggacaatgctgccatgga

SEQ ID NO: 3605728 - DNA, 25 bp, Homo sapien
gccaggaggggttccgtggtggctc

SEQ ID NO: 3605729 - DNA, 25 bp, Homo sapien
tctctgtatttgctgcttcatcatc

SEQ ID NO: 3605730 - DNA, 25 bp, Homo sapien
ctttctctgtatttgctgcttcatc

SEQ ID NO: 3605731 - DNA, 25 bp, Homo sapien
ctgtatttgctgcttcatcatccat

SEQ ID NO: 3605732 - DNA, 25 bp, Homo sapien
tctgtatttgctgcttcatcatcca

SEQ ID NO: 3605733 - DNA, 25 bp, Homo sapien
cacatccttgagacgctgggttgca

SEQ ID NO: 3605734 - DNA, 25 bp, Homo sapien
caagggcctcagacttgcatagcca

SEQ ID NO: 3605735 - DNA, 25 bp, Homo sapien
tactcaagccgatcccttaaaggga

SEQ ID NO: 3605736 - DNA, 25 bp, Homo sapien
gagaatccaggtctgtcaatgctga

SEQ ID NO: 3605737 - DNA, 25 bp, Homo sapien
agagacagaaacactcggggccagg

SEQ ID NO: 3605738 - DNA, 25 bp, Homo sapien
ggtgccccattgttgctgaatccga

SEQ ID NO: 3605739 - DNA, 25 bp, Homo sapien
tcaagttcctgcaaatccagctttc

SEQ ID NO: 3605740 - DNA, 25 bp, Homo sapien
ctgaatccgacgctcagcatcaggg

SEQ ID NO: 3605741 - DNA, 25 bp, Homo sapien
gaaggagatctcaagtggcaccagg

SEQ ID NO: 3605742 - DNA, 25 bp, Homo sapien
cccacagggtccctggcagtttcca

SEQ ID NO: 3605743 - DNA, 25 bp, Homo sapien
cacagggtccctggcagtttccatg

SEQ ID NO: 3605744 - DNA, 25 bp, Homo sapien
ccatggggatggccatggatgatgc

SEQ ID NO: 3605745 - DNA, 25 bp, Homo sapien
atggggatggccatggatgatgctc

SEQ ID NO: 3605746 - DNA, 25 bp, Homo sapien
ttacaatgccggctgtcagcagccc

SEQ ID NO: 3605747 - DNA, 25 bp, Homo sapien
tgtaaagtgtctttgcatttacaat

SEQ ID NO: 3605748 - DNA, 25 bp, Homo sapien
ttttaagctggtggcaattgctatt

SEQ ID NO: 3605749 - DNA, 25 bp, Homo sapien
tttgcatttacaatgccggctgtca

SEQ ID NO: 3605750 - DNA, 25 bp, Homo sapien
gcaggggcttgtgggtatttctgtg

SEQ ID NO: 3605751 - DNA, 25 bp, Homo sapien
caacacaggccacattccaggcagg

SEQ ID NO: 3605752 - DNA, 25 bp, Homo sapien
gcttgtgggtatttctgtgttcaga

SEQ ID NO: 3605753 - DNA, 25 bp, Homo sapien
ttctgtgttcagaaatcttgttcat

SEQ ID NO: 3605754 - DNA, 25 bp, Homo sapien
ggcatggcaaactttgcaacacaaa

SEQ ID NO: 3605755 - DNA, 25 bp, Homo sapien
tgctcttgttcaattagcagtgcgg

SEQ ID NO: 3605756 - DNA, 25 bp, Homo sapien
acttaatgcagatctgaaattgcca

SEQ ID NO: 3605757 - DNA, 25 bp, Homo sapien
cagtgcggtttcaggcatggcaaac

SEQ ID NO: 3605758 - DNA, 25 bp, Homo sapien
tcttgttcatcaagtgggagtcact

SEQ ID NO: 3605759 - DNA, 25 bp, Homo sapien
cttgttcatcaagtgggagtcactc

SEQ ID NO: 3605760 - DNA, 25 bp, Homo sapien
tgttcatcaagtgggagtcactcat

SEQ ID NO: 3605761 - DNA, 25 bp, Homo sapien
atcttgttcatcaagtgggagtcac

SEQ ID NO: 3605762 - DNA, 25 bp, Homo sapien
ggtaaccttatcaagctaaatacag

SEQ ID NO: 3605763 - DNA, 25 bp, Homo sapien
aaaacataacgtgacattactttgc

SEQ ID NO: 3605764 - DNA, 25 bp, Homo sapien
aactgaagaatatatgaatcccaaa

SEQ ID NO: 3605765 - DNA, 25 bp, Homo sapien
tgccaaaactatagcaaagttaaac

SEQ ID NO: 3605766 - DNA, 25 bp, Homo sapien
taaacactcaactataagcaaccag

SEQ ID NO: 3605767 - DNA, 25 bp, Homo sapien
gataaaattgcctctgggcacaagt

SEQ ID NO: 3605768 - DNA, 25 bp, Homo sapien
agaacagttggcactatgagtaaac

SEQ ID NO: 3605769 - DNA, 25 bp, Homo sapien
aaccagtttaaagctctggcacagc

SEQ ID NO: 3605770 - DNA, 25 bp, Homo sapien
cttcagatcatagctttggtcagca

SEQ ID NO: 3605771 - DNA, 25 bp, Homo sapien
gcttcatcatttctcttggaggtca

SEQ ID NO: 3605772 - DNA, 25 bp, Homo sapien
catcatttctcttggaggtcagtgg

SEQ ID NO: 3605773 - DNA, 25 bp, Homo sapien
tcagatcatagctttggtcagcagc

SEQ ID NO: 3605774 - DNA, 25 bp, Homo sapien
ctgtcagctgccctagaaaactcat

SEQ ID NO: 3605775 - DNA, 25 bp, Homo sapien
catgcacgtgcacacgcctgtcagc

SEQ ID NO: 3605776 - DNA, 25 bp, Homo sapien
acacgcctgtcagctgccctagaaa

SEQ ID NO: 3605777 - DNA, 25 bp, Homo sapien
tgcacgtgcacacgcctgtcagctg

SEQ ID NO: 3605778 - DNA, 25 bp, Homo sapien
gcaaagttaacttggcaccaccggc

SEQ ID NO: 3605779 - DNA, 25 bp, Homo sapien
gtttattttagagccggcgactcgc

SEQ ID NO: 3605780 - DNA, 25 bp, Homo sapien
acagccgtcgctttgatccccgaaa

SEQ ID NO: 3605781 - DNA, 25 bp, Homo sapien
tcggagcagatcctagaccgaggaa

SEQ ID NO: 3605782 - DNA, 25 bp, Homo sapien
cactctcagagccataggtggtgtc

SEQ ID NO: 3605783 - DNA, 25 bp, Homo sapien
tcagagccataggtggtgtctgcag

SEQ ID NO: 3605784 - DNA, 25 bp, Homo sapien
ctctcagagccataggtggtgtctg

SEQ ID NO: 3605785 - DNA, 25 bp, Homo sapien
gcactctcagagccataggtggtgt

SEQ ID NO: 3605786 - DNA, 25 bp, Homo sapien
gattccagagctgacttgaccctca

SEQ ID NO: 3605787 - DNA, 25 bp, Homo sapien
caactggcagttagtaccagtgatt

SEQ ID NO: 3605788 - DNA, 25 bp, Homo sapien
ttgaccctcaatatccagttcctca

SEQ ID NO: 3605789 - DNA, 25 bp, Homo sapien
aaaagccaggaataagttcctgcat

SEQ ID NO: 3605790 - DNA, 25 bp, Homo sapien
ctgggtatagaccagatccccagga

SEQ ID NO: 3605791 - DNA, 25 bp, Homo sapien
tgggtatagaccagatccccaggag

SEQ ID NO: 3605792 - DNA, 25 bp, Homo sapien
gctgggtatagaccagatccccagg

SEQ ID NO: 3605793 - DNA, 25 bp, Homo sapien
tgctgggtatagaccagatccccag

SEQ ID NO: 3605794 - DNA, 25 bp, Homo sapien
tcgcaccgagcaaatttggacaggg

SEQ ID NO: 3605795 - DNA, 25 bp, Homo sapien
cctgctcgcaccgagcaaatttgga

SEQ ID NO: 3605796 - DNA, 25 bp, Homo sapien
atgggctcctgctcgcaccgagcaa

SEQ ID NO: 3605797 - DNA, 25 bp, Homo sapien
ggctcctgctcgcaccgagcaaatt

SEQ ID NO: 3605798 - DNA, 25 bp, Homo sapien
ttgttgtcgggctaatgacagagcc

SEQ ID NO: 3605799 - DNA, 25 bp, Homo sapien
gacagagcccagtgtaaagtttagc

SEQ ID NO: 3605800 - DNA, 25 bp, Homo sapien
cagagcccagtgtaaagtttagcag

SEQ ID NO: 3605801 - DNA, 25 bp, Homo sapien
tagtcaaacagggagcttgttgtcg

SEQ ID NO: 3605802 - DNA, 25 bp, Homo sapien
ctgcccccaggggcagcccagcatg

SEQ ID NO: 3605803 - DNA, 25 bp, Homo sapien
tgcccccaggggcagcccagcatga

SEQ ID NO: 3605804 - DNA, 25 bp, Homo sapien
gcccccaggggcagcccagcatgag

SEQ ID NO: 3605805 - DNA, 25 bp, Homo sapien
tccatctgggccctgtaaggggcac

SEQ ID NO: 3605806 - DNA, 25 bp, Homo sapien
cttgggctcatctgggatctggaca

SEQ ID NO: 3605807 - DNA, 25 bp, Homo sapien
tctcagtcaatagcctgagctggga

SEQ ID NO: 3605808 - DNA, 25 bp, Homo sapien
ggtctccgcagaacaatccatctgg

SEQ ID NO: 3605809 - DNA, 25 bp, Homo sapien
actgccaagcatcccttgggtacca

SEQ ID NO: 3605810 - DNA, 25 bp, Homo sapien
aacaactgccaagcatcccttgggt

SEQ ID NO: 3605811 - DNA, 25 bp, Homo sapien
gcctctgctgcaaacaactgccaag

SEQ ID NO: 3605812 - DNA, 25 bp, Homo sapien
caaacaactgccaagcatcccttgg

SEQ ID NO: 3605813 - DNA, 25 bp, Homo sapien
gcaaaaagacacttagctcttcacc

SEQ ID NO: 3605814 - DNA, 25 bp, Homo sapien
cttctaatgattgtaccttttgctg

SEQ ID NO: 3605815 - DNA, 25 bp, Homo sapien
taatgattgtaccttttgctgcagc

SEQ ID NO: 3605816 - DNA, 25 bp, Homo sapien
atgattgtaccttttgctgcagctg

SEQ ID NO: 3605817 - DNA, 25 bp, Homo sapien
gagacttcacttaggtataactcat

SEQ ID NO: 3605818 - DNA, 25 bp, Homo sapien
tgagacttcacttaggtataactca

SEQ ID NO: 3605819 - DNA, 25 bp, Homo sapien
agacttcacttaggtataactcatt

SEQ ID NO: 3605820 - DNA, 25 bp, Homo sapien
gacttcacttaggtataactcattg

SEQ ID NO: 3605821 - DNA, 25 bp, Homo sapien
cggagcaggcgatgaggtagagcca

SEQ ID NO: 3605822 - DNA, 25 bp, Homo sapien
taatgaactgccacttgtcgcactc

SEQ ID NO: 3605823 - DNA, 25 bp, Homo sapien
cagcaacgatggacagacgggagaa

SEQ ID NO: 3605824 - DNA, 25 bp, Homo sapien
gcactttgcgagaatttcagcaacg

SEQ ID NO: 3605825 - DNA, 25 bp, Homo sapien
catatcaccatgttatggatatggt

SEQ ID NO: 3605826 - DNA, 25 bp, Homo sapien
catgttatggatatggtttgatctg

SEQ ID NO: 3605827 - DNA, 25 bp, Homo sapien
tgcattgctattaagcaataccaag

SEQ ID NO: 3605828 - DNA, 25 bp, Homo sapien
gctattaagcaataccaagagtggg

SEQ ID NO: 3605829 - DNA, 25 bp, Homo sapien
gccaagttctctgacgccttataag

SEQ ID NO: 3605830 - DNA, 25 bp, Homo sapien
ggatacacgtcattagaccgaagca

SEQ ID NO: 3605831 - DNA, 25 bp, Homo sapien
tccacagtgtgctttctcaacagag

SEQ ID NO: 3605832 - DNA, 25 bp, Homo sapien
gcttctactgtgatggctgattgga

SEQ ID NO: 3605833 - DNA, 25 bp, Homo sapien
ccagggacattcctaacatctttgt

SEQ ID NO: 3605834 - DNA, 25 bp, Homo sapien
cttcccagggacattcctaacatct

SEQ ID NO: 3605835 - DNA, 25 bp, Homo sapien
cacccagaaagtaagggcggcatag

SEQ ID NO: 3605836 - DNA, 25 bp, Homo sapien
aagagcggggatcatccaggagaac

SEQ ID NO: 3605837 - DNA, 25 bp, Homo sapien
gcggcatagggtgcgggaagagcgg

SEQ ID NO: 3605838 - DNA, 25 bp, Homo sapien
ttgtgggaaaaggacgatcagagct

SEQ ID NO: 3605839 - DNA, 25 bp, Homo sapien
tgcaagcacagacagcccgcaggag

SEQ ID NO: 3605840 - DNA, 25 bp, Homo sapien
acagcccgcaggagcctccggtggg

SEQ ID NO: 3605841 - DNA, 25 bp, Homo sapien
gcaggagcctccggtgggccgacgg

SEQ ID NO: 3605842 - DNA, 25 bp, Homo sapien
ggagcctccggtgggccgacggcat

SEQ ID NO: 3605843 - DNA, 25 bp, Homo sapien
tgtggatttcatgaattcaattaat

SEQ ID NO: 3605844 - DNA, 25 bp, Homo sapien
atttgcatggcaatcgatacgggcg

SEQ ID NO: 3605845 - DNA, 25 bp, Homo sapien
gacattgttctgcacgctattgatt

SEQ ID NO: 3605846 - DNA, 25 bp, Homo sapien
aaaacctctctcctcgaattcatag

SEQ ID NO: 3605847 - DNA, 25 bp, Homo sapien
tgccatacagagtttcttacgaagt

SEQ ID NO: 3605848 - DNA, 25 bp, Homo sapien
ttcttacgaagtggctctttctcac

SEQ ID NO: 3605849 - DNA, 25 bp, Homo sapien
aagtgtattccagtgtgtgcagcca

SEQ ID NO: 3605850 - DNA, 25 bp, Homo sapien
gaggcctctcagttgcgcaacctca

SEQ ID NO: 3605851 - DNA, 25 bp, Homo sapien
tgaggggtgttatcagccaaggaca

SEQ ID NO: 3605852 - DNA, 25 bp, Homo sapien
cacaacagcgtactggaatacagtg

SEQ ID NO: 3605853 - DNA, 25 bp, Homo sapien
tcagccaaggacacaacagcgtact

SEQ ID NO: 3605854 - DNA, 25 bp, Homo sapien
ggtgttatcagccaaggacacaaca

SEQ ID NO: 3605855 - DNA, 25 bp, Homo sapien
cccaaacactgcaaaattctagagg

SEQ ID NO: 3605856 - DNA, 25 bp, Homo sapien
cacagtcgccagaaacaatgacttc

SEQ ID NO: 3605857 - DNA, 25 bp, Homo sapien
tgttggacggcagtgacaccttctc

SEQ ID NO: 3605858 - DNA, 25 bp, Homo sapien
tctagaggtcgccaaggaccacagt

SEQ ID NO: 3605859 - DNA, 25 bp, Homo sapien
ccacctgctcctcccgttctaactg

SEQ ID NO: 3605860 - DNA, 25 bp, Homo sapien
cctgctcctcccgttctaactgcat

SEQ ID NO: 3605861 - DNA, 25 bp, Homo sapien
gctcctcccgttctaactgcatcct

SEQ ID NO: 3605862 - DNA, 25 bp, Homo sapien
tgctcctcccgttctaactgcatcc

SEQ ID NO: 3605863 - DNA, 25 bp, Homo sapien
caccaagcccaagaccttcttagcc

SEQ ID NO: 3605864 - DNA, 25 bp, Homo sapien
ccaagcccaagaccttcttagccct

SEQ ID NO: 3605865 - DNA, 25 bp, Homo sapien
caagcccaagaccttcttagccctg

SEQ ID NO: 3605866 - DNA, 25 bp, Homo sapien
aaaactcctgctgcgggagcagcct

SEQ ID NO: 3605867 - DNA, 25 bp, Homo sapien
ggcacgaaaactcctgctgcgggag

SEQ ID NO: 3605868 - DNA, 25 bp, Homo sapien
tcagcagtcgctgtgacggcacgaa

SEQ ID NO: 3605869 - DNA, 25 bp, Homo sapien
tcgctgtgacggcacgaaaactcct

SEQ ID NO: 3605870 - DNA, 25 bp, Homo sapien
ttggctccaagttggcattcagcat

SEQ ID NO: 3605871 - DNA, 25 bp, Homo sapien
ggttggctccaagttggcattcagc

SEQ ID NO: 3605872 - DNA, 25 bp, Homo sapien
gggttggctccaagttggcattcag

SEQ ID NO: 3605873 - DNA, 25 bp, Homo sapien
ctgggttggctccaagttggcattc

SEQ ID NO: 3605874 - DNA, 25 bp, Homo sapien
cctggatggcatatcggtagcccat

SEQ ID NO: 3605875 - DNA, 25 bp, Homo sapien
ctggatggcatatcggtagcccatc

SEQ ID NO: 3605876 - DNA, 25 bp, Homo sapien
ccctggatggcatatcggtagccca

SEQ ID NO: 3605877 - DNA, 25 bp, Homo sapien
ctgtgggcttgcagggtcctcatgc

SEQ ID NO: 3605878 - DNA, 25 bp, Homo sapien
aagggtcccatttctacagccaggc

SEQ ID NO: 3605879 - DNA, 25 bp, Homo sapien
ccatttctacagccaggccggcgta

SEQ ID NO: 3605880 - DNA, 25 bp, Homo sapien
ggtcccatttctacagccaggccgg

SEQ ID NO: 3605881 - DNA, 25 bp, Homo sapien
gcagctggtttgaagggtgttgatc

SEQ ID NO: 3605882 - DNA, 25 bp, Homo sapien
tttccatggtaaccgcgggagtgcg

SEQ ID NO: 3605883 - DNA, 25 bp, Homo sapien
gtttccatggtaaccgcgggagtgc

SEQ ID NO: 3605884 - DNA, 25 bp, Homo sapien
ggagtgcgccgcagccaacaaggca

SEQ ID NO: 3605885 - DNA, 25 bp, Homo sapien
agccatagactccatccacataggc

SEQ ID NO: 3605886 - DNA, 25 bp, Homo sapien
tcacagccatagactccatccacat

SEQ ID NO: 3605887 - DNA, 25 bp, Homo sapien
cagccatagactccatccacatagg

SEQ ID NO: 3605888 - DNA, 25 bp, Homo sapien
cacttgtggaggacatttggttgag

SEQ ID NO: 3605889 - DNA, 25 bp, Homo sapien
gacacttgtggaggacatttggttg

SEQ ID NO: 3605890 - DNA, 25 bp, Homo sapien
acacttgtggaggacatttggttga

SEQ ID NO: 3605891 - DNA, 25 bp, Homo sapien
acttgtggaggacatttggttgaga

SEQ ID NO: 3605892 - DNA, 25 bp, Homo sapien
tgaagcacatttgaagattcgtggc

SEQ ID NO: 3605893 - DNA, 25 bp, Homo sapien
cttgaagcacatttgaagattcgtg

SEQ ID NO: 3605894 - DNA, 25 bp, Homo sapien
gaagcacatttgaagattcgtggca

SEQ ID NO: 3605895 - DNA, 25 bp, Homo sapien
aagcacatttgaagattcgtggcat

SEQ ID NO: 3605896 - DNA, 25 bp, Homo sapien
atggtgcaatctggccgcgccgcac

SEQ ID NO: 3605897 - DNA, 25 bp, Homo sapien
cgtgacagcgctcgcgccaggtgtc

SEQ ID NO: 3605898 - DNA, 25 bp, Homo sapien
tgtcggtgtgcaggctggtccggga

SEQ ID NO: 3605899 - DNA, 25 bp, Homo sapien
gctccacttccgcacaggcagatgg

SEQ ID NO: 3605900 - DNA, 25 bp, Homo sapien
ccatgcttgcgagttcctttctctg

SEQ ID NO: 3605901 - DNA, 25 bp, Homo sapien
atccagcctgtgttcggaggcagct

SEQ ID NO: 3605902 - DNA, 25 bp, Homo sapien
gaaggacccagtcgtccctattgga

SEQ ID NO: 3605903 - DNA, 25 bp, Homo sapien
cgttcctcagaagccatgcttgcga

SEQ ID NO: 3605904 - DNA, 25 bp, Homo sapien
gcagcggtggtagccatggggacac

SEQ ID NO: 3605905 - DNA, 25 bp, Homo sapien
gggagcccaagggctggcagcggtg

SEQ ID NO: 3605906 - DNA, 25 bp, Homo sapien
ggcagcggtggtagccatggggaca

SEQ ID NO: 3605907 - DNA, 25 bp, Homo sapien
tcatccattccgcaaactgctgcta

SEQ ID NO: 3605908 - DNA, 25 bp, Homo sapien
caggatacatcaggcctttttctaa

SEQ ID NO: 3605909 - DNA, 25 bp, Homo sapien
tgctgctataagtcaccttgcaccc

SEQ ID NO: 3605910 - DNA, 25 bp, Homo sapien
gggacacccatactcagaccataac

SEQ ID NO: 3605911 - DNA, 25 bp, Homo sapien
tcaagacaatctaatagcaagatcc

SEQ ID NO: 3605912 - DNA, 25 bp, Homo sapien
gtcctccacgatgtctagcgcagtt

SEQ ID NO: 3605913 - DNA, 25 bp, Homo sapien
gacaatctaatagcaagatccacag

SEQ ID NO: 3605914 - DNA, 25 bp, Homo sapien
tctcttatgtcctccacgatgtcta

SEQ ID NO: 3605915 - DNA, 25 bp, Homo sapien
gacaaggaagaccatctccctaagg

SEQ ID NO: 3605916 - DNA, 25 bp, Homo sapien
caaggaagaccatctccctaaggtc

SEQ ID NO: 3605917 - DNA, 25 bp, Homo sapien
ggaagaccatctccctaaggtccat

SEQ ID NO: 3605918 - DNA, 25 bp, Homo sapien
tggacaaggaagaccatctccctaa

SEQ ID NO: 3605919 - DNA, 25 bp, Homo sapien
aaaaggccaaatattatatgacagt

SEQ ID NO: 3605920 - DNA, 25 bp, Homo sapien
aactcgaatgcccatcaaatgatgc

SEQ ID NO: 3605921 - DNA, 25 bp, Homo sapien
taggaatatatccacccctaggaat

SEQ ID NO: 3605922 - DNA, 25 bp, Homo sapien
tccagaacgggcaaactatacaggc

SEQ ID NO: 3605923 - DNA, 25 bp, Homo sapien
gctggctgccctacttgatgataat

SEQ ID NO: 3605924 - DNA, 25 bp, Homo sapien
aaaaactgcaatatcgctccctagg

SEQ ID NO: 3605925 - DNA, 25 bp, Homo sapien
gaaatattccatgtagccgggcaca

SEQ ID NO: 3605926 - DNA, 25 bp, Homo sapien
tacaagggtttatataccagagggc

SEQ ID NO: 3605927 - DNA, 25 bp, Homo sapien
caacaagttgctggtctgtgtgggc

SEQ ID NO: 3605928 - DNA, 25 bp, Homo sapien
cactggatatctcgctgcctatgcc

SEQ ID NO: 3605929 - DNA, 25 bp, Homo sapien
caggtacctcagtccaaacatcagg

SEQ ID NO: 3605930 - DNA, 25 bp, Homo sapien
tgtcacacccaagaagtacaggtac

SEQ ID NO: 3605931 - DNA, 25 bp, Homo sapien
gcaaagcgcttctgttcaaatccat

SEQ ID NO: 3605932 - DNA, 25 bp, Homo sapien
tttgtaggcaagttcctccactgcc

SEQ ID NO: 3605933 - DNA, 25 bp, Homo sapien
ttacatatcctcaacactccatttg

SEQ ID NO: 3605934 - DNA, 25 bp, Homo sapien
cactccatttgtaggcaagttcctc

SEQ ID NO: 3605935 - DNA, 25 bp, Homo sapien
ggcagacaatcatatgagcccaaga

SEQ ID NO: 3605936 - DNA, 25 bp, Homo sapien
cagacaatcatatgagcccaagaat

SEQ ID NO: 3605937 - DNA, 25 bp, Homo sapien
gacaatcatatgagcccaagaattc

SEQ ID NO: 3605938 - DNA, 25 bp, Homo sapien
cctgtaatcctgtaagcctgtaata

SEQ ID NO: 3605939 - DNA, 25 bp, Homo sapien
gtgctggaccactgtagcgaggtct

SEQ ID NO: 3605940 - DNA, 25 bp, Homo sapien
gctggaccactgtagcgaggtctca

SEQ ID NO: 3605941 - DNA, 25 bp, Homo sapien
ctgtccactccgtcccagcgatatc

SEQ ID NO: 3605942 - DNA, 25 bp, Homo sapien
tatccaggccagatattaaatctgt

SEQ ID NO: 3605943 - DNA, 25 bp, Homo sapien
tcagcatcctaatgattctctcttc

SEQ ID NO: 3605944 - DNA, 25 bp, Homo sapien
ttatatagaaagaccaattgagttg

SEQ ID NO: 3605945 - DNA, 25 bp, Homo sapien
aagaccaattgagttgaatctaaac

SEQ ID NO: 3605946 - DNA, 25 bp, Homo sapien
gcatatagctatgtatcagcatcct

SEQ ID NO: 3605947 - DNA, 25 bp, Homo sapien
tgttctcttagcatcctatccagat

SEQ ID NO: 3605948 - DNA, 25 bp, Homo sapien
tagcgggccagaggcttttgcatct

SEQ ID NO: 3605949 - DNA, 25 bp, Homo sapien
gatcttcgtcatcaatatagcgggc

SEQ ID NO: 3605950 - DNA, 25 bp, Homo sapien
cttgatgaagttggccatagggtcc

SEQ ID NO: 3605951 - DNA, 25 bp, Homo sapien
gacttatctcgaaatacggtttcag

SEQ ID NO: 3605952 - DNA, 25 bp, Homo sapien
acggtttcagcatattgaaattcag

SEQ ID NO: 3605953 - DNA, 25 bp, Homo sapien
ttcaaattcctcttacgaccagact

SEQ ID NO: 3605954 - DNA, 25 bp, Homo sapien
ctttgctctaaacgttcgagtttca

SEQ ID NO: 3605955 - DNA, 25 bp, Homo sapien
accagagctgaaatttgatagcaat

SEQ ID NO: 3605956 - DNA, 25 bp, Homo sapien
tatcaggtacaataagctaaattaa

SEQ ID NO: 3605957 - DNA, 25 bp, Homo sapien
aaaatatcaggtacaataagctaaa

SEQ ID NO: 3605958 - DNA, 25 bp, Homo sapien
cctgggcgaaatggcatttttcaag

SEQ ID NO: 3605959 - DNA, 25 bp, Homo sapien
ttctcgctgtatgtcagttaacacc

SEQ ID NO: 3605960 - DNA, 25 bp, Homo sapien
ctgctgttctcgctgtatgtcagtt

SEQ ID NO: 3605961 - DNA, 25 bp, Homo sapien
acccagttttagccccagaatacat

SEQ ID NO: 3605962 - DNA, 25 bp, Homo sapien
atgccatggtttcttgatcctgttc

SEQ ID NO: 3605963 - DNA, 25 bp, Homo sapien
taaagaacaggctggtctaccctgc

SEQ ID NO: 3605964 - DNA, 25 bp, Homo sapien
tgatatccttcagcaacgaaattgg

SEQ ID NO: 3605965 - DNA, 25 bp, Homo sapien
ttagcatcaagatagcaaatcagcc

SEQ ID NO: 3605966 - DNA, 25 bp, Homo sapien
cagcccacgaatgaagcacacagta

SEQ ID NO: 3605967 - DNA, 25 bp, Homo sapien
aggtcagaatcagagctccggtgtc

SEQ ID NO: 3605968 - DNA, 25 bp, Homo sapien
ggtctattccgtggaggtgacagat

SEQ ID NO: 3605969 - DNA, 25 bp, Homo sapien
gagctccggtgtctaggtctattcc

SEQ ID NO: 3605970 - DNA, 25 bp, Homo sapien
ccggtgtctaggtctattccgtgga

SEQ ID NO: 3605971 - DNA, 25 bp, Homo sapien
ctggtgccctggactttgtttatgc

SEQ ID NO: 3605972 - DNA, 25 bp, Homo sapien
gaaaggtctgaatcagttgctttct

SEQ ID NO: 3605973 - DNA, 25 bp, Homo sapien
gactttgtttatgccgtggagaaga

SEQ ID NO: 3605974 - DNA, 25 bp, Homo sapien
gaagaaaggtctgaatcagttgctt

SEQ ID NO: 3605975 - DNA, 25 bp, Homo sapien
atccctctcatggacagtcatatgc

SEQ ID NO: 3605976 - DNA, 25 bp, Homo sapien
tttgcttgcttttttcgtggaggag

SEQ ID NO: 3605977 - DNA, 25 bp, Homo sapien
gatgtcagggtcatactcatatttg

SEQ ID NO: 3605978 - DNA, 25 bp, Homo sapien
gcttcttgtctccaaaatgggattt

SEQ ID NO: 3605979 - DNA, 25 bp, Homo sapien
ggaatcaagctgcttcttgtctcca

SEQ ID NO: 3605980 - DNA, 25 bp, Homo sapien
ttgggaatgacaaatgggaggctcc

SEQ ID NO: 3605981 - DNA, 25 bp, Homo sapien
caatgtggagaagtcttgctagagg

SEQ ID NO: 3605982 - DNA, 25 bp, Homo sapien
ggaatgacaaatgggaggctcctga

SEQ ID NO: 3605983 - DNA, 25 bp, Homo sapien
agtcttgctagaggctctttctggg

SEQ ID NO: 3605984 - DNA, 25 bp, Homo sapien
gagtcctcctagatgtgtcagggga

SEQ ID NO: 3605985 - DNA, 25 bp, Homo sapien
gtctgaagagccaagagtcctccta

SEQ ID NO: 3605986 - DNA, 25 bp, Homo sapien
gagtcatgacgggcccttctgagtt

SEQ ID NO: 3605987 - DNA, 25 bp, Homo sapien
aagtgacattaggagccaaatcagg

SEQ ID NO: 3605988 - DNA, 25 bp, Homo sapien
gaatcatgacggactctcctaggag

SEQ ID NO: 3605989 - DNA, 25 bp, Homo sapien
gagatatctgaggaaccatgacggg

SEQ ID NO: 3605990 - DNA, 25 bp, Homo sapien
agggatctggtgaatcatgacggac

SEQ ID NO: 3605991 - DNA, 25 bp, Homo sapien
accatgacgggctcgcctaggagga

SEQ ID NO: 3605992 - DNA, 25 bp, Homo sapien
gtcatgacggatcctcctgggagga

SEQ ID NO: 3605993 - DNA, 25 bp, Homo sapien
agaatcatgacgggccctccttggg

SEQ ID NO: 3605994 - DNA, 25 bp, Homo sapien
tgtgtctgagtcatgacgagcccct

SEQ ID NO: 3605995 - DNA, 25 bp, Homo sapien
aagtgtctgaggagtcatgacggat

SEQ ID NO: 3605996 - DNA, 25 bp, Homo sapien
aaaatgtctgtttgagggtaggtct

SEQ ID NO: 3605997 - DNA, 25 bp, Homo sapien
cctaggagatggatctggggtacca

SEQ ID NO: 3605998 - DNA, 25 bp, Homo sapien
ggtaccatgacggaccctcctagga

SEQ ID NO: 3605999 - DNA, 25 bp, Homo sapien
cctaggagatgaatccggggtatcg

SEQ ID NO: 3606000 - DNA, 25 bp, Homo sapien
tcttctggccgctcatccacaaact

SEQ ID NO: 3606001 - DNA, 25 bp, Homo sapien
ctcttctggccgctcatccacaaac

SEQ ID NO: 3606002 - DNA, 25 bp, Homo sapien
tccatttggcactggaacgaaaggc

SEQ ID NO: 3606003 - DNA, 25 bp, Homo sapien
ttctggccgctcatccacaaactct

SEQ ID NO: 3606004 - DNA, 25 bp, Homo sapien
tagtttggttgtggagatagctgtc

SEQ ID NO: 3606005 - DNA, 25 bp, Homo sapien
gttgtggagatagctgtccagctca

SEQ ID NO: 3606006 - DNA, 25 bp, Homo sapien
gagatagctgtccagctcacatcat

SEQ ID NO: 3606007 - DNA, 25 bp, Homo sapien
tttctagtttggttgtggagatagc

SEQ ID NO: 3606008 - DNA, 25 bp, Homo sapien
tgaatccgctccattattctcgagg

SEQ ID NO: 3606009 - DNA, 25 bp, Homo sapien
gtaccgggccctaaagatccaagca

SEQ ID NO: 3606010 - DNA, 25 bp, Homo sapien
tgctcagaggctcgagatgtaagcg

SEQ ID NO: 3606011 - DNA, 25 bp, Homo sapien
tattcattctctatgggagaggacg

SEQ ID NO: 3606012 - DNA, 25 bp, Homo sapien
tgccccggacaagtaacgcttcaga

SEQ ID NO: 3606013 - DNA, 25 bp, Homo sapien
ttgcgaccggactcagatccccggt

SEQ ID NO: 3606014 - DNA, 25 bp, Homo sapien
atactcggccttggaaagcggcgga

SEQ ID NO: 3606015 - DNA, 25 bp, Homo sapien
cttcggccgctttttgcgacgcttg

SEQ ID NO: 3606016 - DNA, 25 bp, Homo sapien
gcggcgggggcagagagacgggtcg

SEQ ID NO: 3606017 - DNA, 25 bp, Homo sapien
cggcgggggcagagagacgggtcgg

SEQ ID NO: 3606018 - DNA, 25 bp, Homo sapien
gcgggggcagagagacgggtcggcg

SEQ ID NO: 3606019 - DNA, 25 bp, Homo sapien
cagcggcgggggcagagagacgggt

SEQ ID NO: 3606020 - DNA, 25 bp, Homo sapien
gcaggatcagatgccgtgccaatgg

SEQ ID NO: 3606021 - DNA, 25 bp, Homo sapien
tatattagtcaagcagacagggcta

SEQ ID NO: 3606022 - DNA, 25 bp, Homo sapien
tctgactggcatgggtttgacacct

SEQ ID NO: 3606023 - DNA, 25 bp, Homo sapien
ttagcctgacaaggcccaagtgtct

SEQ ID NO: 3606024 - DNA, 25 bp, Homo sapien
tccacacgtctaatgaccgaacatg

SEQ ID NO: 3606025 - DNA, 25 bp, Homo sapien
gtctaatgaccgaacatggctgcat

SEQ ID NO: 3606026 - DNA, 25 bp, Homo sapien
ctgtatgttcgtccacacgtctaat

SEQ ID NO: 3606027 - DNA, 25 bp, Homo sapien
tgttcgtccacacgtctaatgaccg

SEQ ID NO: 3606028 - DNA, 25 bp, Homo sapien
aagtaggaggcgtgccctcatgcat

SEQ ID NO: 3606029 - DNA, 25 bp, Homo sapien
gaaagtaggaggcgtgccctcatgc

SEQ ID NO: 3606030 - DNA, 25 bp, Homo sapien
aaagtaggaggcgtgccctcatgca

SEQ ID NO: 3606031 - DNA, 25 bp, Homo sapien
gcagactgcagggtatttgttcaat

SEQ ID NO: 3606032 - DNA, 25 bp, Homo sapien
tcagttagccctactctcagttaga

SEQ ID NO: 3606033 - DNA, 25 bp, Homo sapien
agtgaacactctgctgcttgggccc

SEQ ID NO: 3606034 - DNA, 25 bp, Homo sapien
cactgtagtctcctgcctctcataa

SEQ ID NO: 3606035 - DNA, 25 bp, Homo sapien
ggaactgcaaatgctagagctgtga

SEQ ID NO: 3606036 - DNA, 25 bp, Homo sapien
tctcataaacaaaaggtgactcctg

SEQ ID NO: 3606037 - DNA, 25 bp, Homo sapien
taacctcacagctctagcatttgca

SEQ ID NO: 3606038 - DNA, 25 bp, Homo sapien
gagtcaccttttgtttatgagaggc

SEQ ID NO: 3606039 - DNA, 25 bp, Homo sapien
tctaactgagagtagggctaactga

SEQ ID NO: 3606040 - DNA, 25 bp, Homo sapien
tatgagaggcaggagactacagtgc

SEQ ID NO: 3606041 - DNA, 25 bp, Homo sapien
gggcccaagcagcagagtgttcact

SEQ ID NO: 3606042 - DNA, 25 bp, Homo sapien
tattgaacaaataccctgcagtctg

SEQ ID NO: 3606043 - DNA, 25 bp, Homo sapien
ccttgtttgatatcatgctgttaga

SEQ ID NO: 3606044 - DNA, 25 bp, Homo sapien
agcacaagtgaaggagttaccattg

SEQ ID NO: 3606045 - DNA, 25 bp, Homo sapien
ggagaccgagtccagcacaagtgaa

SEQ ID NO: 3606046 - DNA, 25 bp, Homo sapien
tgcttgcttatctactttatgccaa

SEQ ID NO: 3606047 - DNA, 25 bp, Homo sapien
aattttcccgtgtatctactgtaat

SEQ ID NO: 3606048 - DNA, 25 bp, Homo sapien
ggcctctgtattgaccctatccttg

SEQ ID NO: 3606049 - DNA, 25 bp, Homo sapien
tctaacagcatgatatcaaacaagg

SEQ ID NO: 3606050 - DNA, 25 bp, Homo sapien
tcacttgtgctggactcggtctccc

SEQ ID NO: 3606051 - DNA, 25 bp, Homo sapien
ttggcataaagtagataagcaagca

SEQ ID NO: 3606052 - DNA, 25 bp, Homo sapien
caaggatagggtcaatacagaggcc

SEQ ID NO: 3606053 - DNA, 25 bp, Homo sapien
caatggtaactccttcacttgtgct

SEQ ID NO: 3606054 - DNA, 25 bp, Homo sapien
ttaaatgccagctgcaatccccaaa

SEQ ID NO: 3606055 - DNA, 25 bp, Homo sapien
ttagtattggatgaaggcgaaggct

SEQ ID NO: 3606056 - DNA, 25 bp, Homo sapien
ccagcgctgctctttctgtaggtta

SEQ ID NO: 3606057 - DNA, 25 bp, Homo sapien
taatgctctatcctctaaggttgga

SEQ ID NO: 3606058 - DNA, 25 bp, Homo sapien
gaagttttgaattggcctaggagga

SEQ ID NO: 3606059 - DNA, 25 bp, Homo sapien
gagcctattgtgttacttgacctta

SEQ ID NO: 3606060 - DNA, 25 bp, Homo sapien
cgaaggctgggagtgtctttcccac

SEQ ID NO: 3606061 - DNA, 25 bp, Homo sapien
gtgggaaagacactcccagccttcg

SEQ ID NO: 3606062 - DNA, 25 bp, Homo sapien
caacttcagagttccaaccttagag

SEQ ID NO: 3606063 - DNA, 25 bp, Homo sapien
taacctacagaaagagcagcgctgg

SEQ ID NO: 3606064 - DNA, 25 bp, Homo sapien
caaccttagaggatagagcattatg

SEQ ID NO: 3606065 - DNA, 25 bp, Homo sapien
taaggtcaagtaacacaataggctc

SEQ ID NO: 3606066 - DNA, 25 bp, Homo sapien
gaaaaaagtgatgacatacccctgg

SEQ ID NO: 3606067 - DNA, 25 bp, Homo sapien
tacaagcgcacctttgaccaaaatg

SEQ ID NO: 3606068 - DNA, 25 bp, Homo sapien
gttacaagcgcacctttgaccaaaa

SEQ ID NO: 3606069 - DNA, 25 bp, Homo sapien
ggagcgttacaagcgcacctttgac

SEQ ID NO: 3606070 - DNA, 25 bp, Homo sapien
gtggagcgttacaagcgcacctttg

SEQ ID NO: 3606071 - DNA, 25 bp, Homo sapien
gcgttacaagcgcacctttgaccaa

SEQ ID NO: 3606072 - DNA, 25 bp, Homo sapien
acaagcgcacctttgaccaaaatga

SEQ ID NO: 3606073 - DNA, 25 bp, Homo sapien
ttggtcaaaggtgcgcttgtaacgc

SEQ ID NO: 3606074 - DNA, 25 bp, Homo sapien
tcattttggtcaaaggtgcgcttgt

SEQ ID NO: 3606075 - DNA, 25 bp, Homo sapien
gtcaaaggtgcgcttgtaacgctcc

SEQ ID NO: 3606076 - DNA, 25 bp, Homo sapien
ttttggtcaaaggtgcgcttgtaac

SEQ ID NO: 3606077 - DNA, 25 bp, Homo sapien
cattttggtcaaaggtgcgcttgta

SEQ ID NO: 3606078 - DNA, 25 bp, Homo sapien
caaaggtgcgcttgtaacgctccac

SEQ ID NO: 3606079 - DNA, 25 bp, Homo sapien
catgaaggcccactttattatggat

SEQ ID NO: 3606080 - DNA, 25 bp, Homo sapien
tcatcgaaggtaacatgaaggccca

SEQ ID NO: 3606081 - DNA, 25 bp, Homo sapien
cccactttattatggatgatccagc

SEQ ID NO: 3606082 - DNA, 25 bp, Homo sapien
tattatggatgatccagcaggaaac

SEQ ID NO: 3606083 - DNA, 25 bp, Homo sapien
cgaaggtaacatgaaggcccacttt

SEQ ID NO: 3606084 - DNA, 25 bp, Homo sapien
tccagcaggaaacagttacttgcag

SEQ ID NO: 3606085 - DNA, 25 bp, Homo sapien
ctgcaagtaactgtttcctgctgga

SEQ ID NO: 3606086 - DNA, 25 bp, Homo sapien
gggccttcatgttaccttcgatgat

SEQ ID NO: 3606087 - DNA, 25 bp, Homo sapien
aaagtgggccttcatgttaccttcg

SEQ ID NO: 3606088 - DNA, 25 bp, Homo sapien
ctgtttcctgctggatcatccataa

SEQ ID NO: 3606089 - DNA, 25 bp, Homo sapien
gctggatcatccataataaagtggg

SEQ ID NO: 3606090 - DNA, 25 bp, Homo sapien
tcatccataataaagtgggccttca

SEQ ID NO: 3606091 - DNA, 25 bp, Homo sapien
caggagtttagccagaagatggacc

SEQ ID NO: 3606092 - DNA, 25 bp, Homo sapien
aggagtttagccagaagatggacca

SEQ ID NO: 3606093 - DNA, 25 bp, Homo sapien
cactgggcgacagttccaatcctgg

SEQ ID NO: 3606094 - DNA, 25 bp, Homo sapien
acactgggcgacagttccaatcctg

SEQ ID NO: 3606095 - DNA, 25 bp, Homo sapien
cacactgggcgacagttccaatcct

SEQ ID NO: 3606096 - DNA, 25 bp, Homo sapien
ccaggattggaactgtcgcccagtg

SEQ ID NO: 3606097 - DNA, 25 bp, Homo sapien
tggtccatcttctggctaaactcct

SEQ ID NO: 3606098 - DNA, 25 bp, Homo sapien
ggtccatcttctggctaaactcctg

SEQ ID NO: 3606099 - DNA, 25 bp, Homo sapien
aggattggaactgtcgcccagtgtg

SEQ ID NO: 3606100 - DNA, 25 bp, Homo sapien
caggattggaactgtcgcccagtgt

SEQ ID NO: 3606101 - DNA, 25 bp, Homo sapien
aatggcagtcctcgggggcaagttc

SEQ ID NO: 3606102 - DNA, 25 bp, Homo sapien
tgaactgggaatggcagtcctcggg

SEQ ID NO: 3606103 - DNA, 25 bp, Homo sapien
ttgaactgggaatggcagtcctcgg

SEQ ID NO: 3606104 - DNA, 25 bp, Homo sapien
tttgaactgggaatggcagtcctcg

SEQ ID NO: 3606105 - DNA, 25 bp, Homo sapien
tggcagtcctcgggggcaagttcac

SEQ ID NO: 3606106 - DNA, 25 bp, Homo sapien
atggcagtcctcgggggcaagttca

SEQ ID NO: 3606107 - DNA, 25 bp, Homo sapien
tgaacttgcccccgaggactgccat

SEQ ID NO: 3606108 - DNA, 25 bp, Homo sapien
ccgaggactgccattcccagttcaa

SEQ ID NO: 3606109 - DNA, 25 bp, Homo sapien
gtgaacttgcccccgaggactgcca

SEQ ID NO: 3606110 - DNA, 25 bp, Homo sapien
cgaggactgccattcccagttcaaa

SEQ ID NO: 3606111 - DNA, 25 bp, Homo sapien
gaacttgcccccgaggactgccatt

SEQ ID NO: 3606112 - DNA, 25 bp, Homo sapien
cccgaggactgccattcccagttca

SEQ ID NO: 3606113 - DNA, 25 bp, Homo sapien
agcagtagaacccttgggcaccagg

SEQ ID NO: 3606114 - DNA, 25 bp, Homo sapien
cctggtgcccaagggttctactgct

SEQ ID NO: 3606115 - DNA, 25 bp, Homo sapien
catggctaccaactgcgagaactgt

SEQ ID NO: 3606116 - DNA, 25 bp, Homo sapien
tggctaccaactgcgagaactgtgg

SEQ ID NO: 3606117 - DNA, 25 bp, Homo sapien
tcatggctaccaactgcgagaactg

SEQ ID NO: 3606118 - DNA, 25 bp, Homo sapien
taccaactgcgagaactgtgggcat

SEQ ID NO: 3606119 - DNA, 25 bp, Homo sapien
gctaccaactgcgagaactgtgggc

SEQ ID NO: 3606120 - DNA, 25 bp, Homo sapien
catcatggctaccaactgcgagaac

SEQ ID NO: 3606121 - DNA, 25 bp, Homo sapien
cacagttctcgcagttggtagccat

SEQ ID NO: 3606122 - DNA, 25 bp, Homo sapien
gttctcgcagttggtagccatgatg

SEQ ID NO: 3606123 - DNA, 25 bp, Homo sapien
tgcccacagttctcgcagttggtag

SEQ ID NO: 3606124 - DNA, 25 bp, Homo sapien
ccacagttctcgcagttggtagcca

SEQ ID NO: 3606125 - DNA, 25 bp, Homo sapien
atgcccacagttctcgcagttggta

SEQ ID NO: 3606126 - DNA, 25 bp, Homo sapien
cagttctcgcagttggtagccatga

SEQ ID NO: 3606127 - DNA, 25 bp, Homo sapien
tggtcttgttcgcctggaagtagat

SEQ ID NO: 3606128 - DNA, 25 bp, Homo sapien
gtggtcttgttcgcctggaagtaga

SEQ ID NO: 3606129 - DNA, 25 bp, Homo sapien
ggtcttgttcgcctggaagtagatt

SEQ ID NO: 3606130 - DNA, 25 bp, Homo sapien
ggtggtcttgttcgcctggaagtag

SEQ ID NO: 3606131 - DNA, 25 bp, Homo sapien
aatctacttccaggcgaacaagacc

SEQ ID NO: 3606132 - DNA, 25 bp, Homo sapien
tctacttccaggcgaacaagaccac

SEQ ID NO: 3606133 - DNA, 25 bp, Homo sapien
atctacttccaggcgaacaagacca

SEQ ID NO: 3606134 - DNA, 25 bp, Homo sapien
ctacttccaggcgaacaagaccacc

SEQ ID NO: 3606135 - DNA, 25 bp, Homo sapien
ggtcttgttcgcctggaagtagatt

SEQ ID NO: 3606136 - DNA, 25 bp, Homo sapien
tggtggtcttgttcgcctggaagta

SEQ ID NO: 3606137 - DNA, 25 bp, Homo sapien
tgttcgcctggaagtagatttcctt

SEQ ID NO: 3606138 - DNA, 25 bp, Homo sapien
tcgcctggaagtagatttccttaac

SEQ ID NO: 3606139 - DNA, 25 bp, Homo sapien
ctggaagtagatttccttaactccg

SEQ ID NO: 3606140 - DNA, 25 bp, Homo sapien
tcttgttcgcctggaagtagatttc

SEQ ID NO: 3606141 - DNA, 25 bp, Homo sapien
acttccaggcgaacaagaccaccat

SEQ ID NO: 3606142 - DNA, 25 bp, Homo sapien
aatctacttccaggcgaacaagacc

SEQ ID NO: 3606143 - DNA, 25 bp, Homo sapien
taaggaaatctacttccaggcgaac

SEQ ID NO: 3606144 - DNA, 25 bp, Homo sapien
cggagttaaggaaatctacttccag

SEQ ID NO: 3606145 - DNA, 25 bp, Homo sapien
gagttaaggaaatctacttccaggc

SEQ ID NO: 3606146 - DNA, 25 bp, Homo sapien
ggaaatctacttccaggcgaacaag

SEQ ID NO: 3606147 - DNA, 25 bp, Homo sapien
tcagcacaaactgcccagaatgcaa

SEQ ID NO: 3606148 - DNA, 25 bp, Homo sapien
agttcagcacaaactgcccagaatg

SEQ ID NO: 3606149 - DNA, 25 bp, Homo sapien
gttcagcacaaactgcccagaatgc

SEQ ID NO: 3606150 - DNA, 25 bp, Homo sapien
gtgctccagttcagcacaaactgcc

SEQ ID NO: 3606151 - DNA, 25 bp, Homo sapien
ttcagcacaaactgcccagaatgca

SEQ ID NO: 3606152 - DNA, 25 bp, Homo sapien
ccagttcagcacaaactgcccagaa

SEQ ID NO: 3606153 - DNA, 25 bp, Homo sapien
gcattctgggcagtttgtgctgaac

SEQ ID NO: 3606154 - DNA, 25 bp, Homo sapien
tgcattctgggcagtttgtgctgaa

SEQ ID NO: 3606155 - DNA, 25 bp, Homo sapien
ggcagtttgtgctgaactggagcac

SEQ ID NO: 3606156 - DNA, 25 bp, Homo sapien
ttgcattctgggcagtttgtgctga

SEQ ID NO: 3606157 - DNA, 25 bp, Homo sapien
ttctgggcagtttgtgctgaactgg

SEQ ID NO: 3606158 - DNA, 25 bp, Homo sapien
cattctgggcagtttgtgctgaact

SEQ ID NO: 3606159 - DNA, 25 bp, Homo sapien
agcagagaagccagaagaggaagat

SEQ ID NO: 3606160 - DNA, 25 bp, Homo sapien
gcagagaagccagaagaggaagatc

SEQ ID NO: 3606161 - DNA, 25 bp, Homo sapien
gccagaagaggaagatctcagaaat

SEQ ID NO: 3606162 - DNA, 25 bp, Homo sapien
cagcagagaagccagaagaggaaga

SEQ ID NO: 3606163 - DNA, 25 bp, Homo sapien
ccagaagaggaagatctcagaaatg

SEQ ID NO: 3606164 - DNA, 25 bp, Homo sapien
cagaagaggaagatctcagaaatga

SEQ ID NO: 3606165 - DNA, 25 bp, Homo sapien
catttctgagatcttcctcttctgg

SEQ ID NO: 3606166 - DNA, 25 bp, Homo sapien
atttctgagatcttcctcttctggc

SEQ ID NO: 3606167 - DNA, 25 bp, Homo sapien
tcttcctcttctggcttctctgctg

SEQ ID NO: 3606168 - DNA, 25 bp, Homo sapien
tcatttctgagatcttcctcttctg

SEQ ID NO: 3606169 - DNA, 25 bp, Homo sapien
atcttcctcttctggcttctctgct

SEQ ID NO: 3606170 - DNA, 25 bp, Homo sapien
ttcatttctgagatcttcctcttct

SEQ ID NO: 3606171 - DNA, 25 bp, Homo sapien
gatgatgccctggtgatcacacact

SEQ ID NO: 3606172 - DNA, 25 bp, Homo sapien
atgatgccctggtgatcacacacta

SEQ ID NO: 3606173 - DNA, 25 bp, Homo sapien
tgatgccctggtgatcacacactac

SEQ ID NO: 3606174 - DNA, 25 bp, Homo sapien
tagtgtgtgatcaccagggcatcat

SEQ ID NO: 3606175 - DNA, 25 bp, Homo sapien
gtagtgtgtgatcaccagggcatca

SEQ ID NO: 3606176 - DNA, 25 bp, Homo sapien
agtgtgtgatcaccagggcatcatc

SEQ ID NO: 3606177 - DNA, 25 bp, Homo sapien
cctcagaaagatgatgccctggtga

SEQ ID NO: 3606178 - DNA, 25 bp, Homo sapien
gaaaacccacatgctcctcagaaag

SEQ ID NO: 3606179 - DNA, 25 bp, Homo sapien
tggtgatcacacactacaaccggac

SEQ ID NO: 3606180 - DNA, 25 bp, Homo sapien
gttttgtggaaaacccacatgctcc

SEQ ID NO: 3606181 - DNA, 25 bp, Homo sapien
cggacccgacagcaggaagagatgc

SEQ ID NO: 3606182 - DNA, 25 bp, Homo sapien
gatccctcagggaacagttttgtgg

SEQ ID NO: 3606183 - DNA, 25 bp, Homo sapien
tctgaggagcatgtgggttttccac

SEQ ID NO: 3606184 - DNA, 25 bp, Homo sapien
cagggcatcatctttctgaggagca

SEQ ID NO: 3606185 - DNA, 25 bp, Homo sapien
tagtgtgtgatcaccagggcatcat

SEQ ID NO: 3606186 - DNA, 25 bp, Homo sapien
ggtccggttgtagtgtgtgatcacc

SEQ ID NO: 3606187 - DNA, 25 bp, Homo sapien
cacaaaactgttccctgagggatca

SEQ ID NO: 3606188 - DNA, 25 bp, Homo sapien
tctcttcctgctgtcgggtccggtt

SEQ ID NO: 3606189 - DNA, 25 bp, Homo sapien
acagctgaaagaattgatgagttca

SEQ ID NO: 3606190 - DNA, 25 bp, Homo sapien
cagctgaaagaattgatgagttcat

SEQ ID NO: 3606191 - DNA, 25 bp, Homo sapien
gctgaaagaattgatgagttcattg

SEQ ID NO: 3606192 - DNA, 25 bp, Homo sapien
attgatgagttcattgtcaaactga

SEQ ID NO: 3606193 - DNA, 25 bp, Homo sapien
gaaagaattgatgagttcattgtca

SEQ ID NO: 3606194 - DNA, 25 bp, Homo sapien
tgaaagaattgatgagttcattgtc

SEQ ID NO: 3606195 - DNA, 25 bp, Homo sapien
caatgaactcatcaattctttcagc

SEQ ID NO: 3606196 - DNA, 25 bp, Homo sapien
tgacaatgaactcatcaattctttc

SEQ ID NO: 3606197 - DNA, 25 bp, Homo sapien
tgaactcatcaattctttcagctgt

SEQ ID NO: 3606198 - DNA, 25 bp, Homo sapien
gacaatgaactcatcaattctttca

SEQ ID NO: 3606199 - DNA, 25 bp, Homo sapien
tcagtttgacaatgaactcatcaat

SEQ ID NO: 3606200 - DNA, 25 bp, Homo sapien
atgaactcatcaattctttcagctg

SEQ ID NO: 3606201 - DNA, 25 bp, Homo sapien
ttgatcacccgtgctatctctggcc

SEQ ID NO: 3606202 - DNA, 25 bp, Homo sapien
gaaggattgatcacccgtgctatct

SEQ ID NO: 3606203 - DNA, 25 bp, Homo sapien
ttgaaggattgatcacccgtgctat

SEQ ID NO: 3606204 - DNA, 25 bp, Homo sapien
tgttgaaggattgatcacccgtgct

SEQ ID NO: 3606205 - DNA, 25 bp, Homo sapien
gattgatcacccgtgctatctctgg

SEQ ID NO: 3606206 - DNA, 25 bp, Homo sapien
cactgttgaaggattgatcacccgt

SEQ ID NO: 3606207 - DNA, 25 bp, Homo sapien
tagcacgggtgatcaatccttcaac

SEQ ID NO: 3606208 - DNA, 25 bp, Homo sapien
gcacgggtgatcaatccttcaacag

SEQ ID NO: 3606209 - DNA, 25 bp, Homo sapien
gagatagcacgggtgatcaatcctt

SEQ ID NO: 3606210 - DNA, 25 bp, Homo sapien
gatagcacgggtgatcaatccttca

SEQ ID NO: 3606211 - DNA, 25 bp, Homo sapien
acgggtgatcaatccttcaacagtg

SEQ ID NO: 3606212 - DNA, 25 bp, Homo sapien
ggccagagatagcacgggtgatcaa

SEQ ID NO: 3606213 - DNA, 25 bp, Homo sapien
agaagtggtgaagactgactctgct

SEQ ID NO: 3606214 - DNA, 25 bp, Homo sapien
agcagagtcagtcttcaccacttct

SEQ ID NO: 3606215 - DNA, 25 bp, Homo sapien
gtgaagactgactctgctgccacaa

SEQ ID NO: 3606216 - DNA, 25 bp, Homo sapien
agtggtgaagactgactctgctgcc

SEQ ID NO: 3606217 - DNA, 25 bp, Homo sapien
gaagtggtgaagactgactctgctg

SEQ ID NO: 3606218 - DNA, 25 bp, Homo sapien
gactctgctgccacaaggattcctg

SEQ ID NO: 3606219 - DNA, 25 bp, Homo sapien
gacatgaacagagaagtggtgaaga

SEQ ID NO: 3606220 - DNA, 25 bp, Homo sapien
tggtgaagactgactctgctgccac

SEQ ID NO: 3606221 - DNA, 25 bp, Homo sapien
ggcagcagagtcagtcttcaccact

SEQ ID NO: 3606222 - DNA, 25 bp, Homo sapien
gcagcagagtcagtcttcaccactt

SEQ ID NO: 3606223 - DNA, 25 bp, Homo sapien
tcttcaccacttctctgttcatgtc

SEQ ID NO: 3606224 - DNA, 25 bp, Homo sapien
caggaatccttgtggcagcagagtc

SEQ ID NO: 3606225 - DNA, 25 bp, Homo sapien
ttgtggcagcagagtcagtcttcac

SEQ ID NO: 3606226 - DNA, 25 bp, Homo sapien
gtggcagcagagtcagtcttcacca

SEQ ID NO: 3606227 - DNA, 25 bp, Homo sapien
accacctgtactattcgaaaggagc

SEQ ID NO: 3606228 - DNA, 25 bp, Homo sapien
tctggttattacttgaggagaagct

SEQ ID NO: 3606229 - DNA, 25 bp, Homo sapien
caccatttggacagcctggctcaca

SEQ ID NO: 3606230 - DNA, 25 bp, Homo sapien
atttggacagcctggctcacaccac

SEQ ID NO: 3606231 - DNA, 25 bp, Homo sapien
gagcagtagttgttatgaatagtat

SEQ ID NO: 3606232 - DNA, 25 bp, Homo sapien
ttacttgaggagaagctgttctgca

SEQ ID NO: 3606233 - DNA, 25 bp, Homo sapien
gtggtgtgagccaggctgtccaaat

SEQ ID NO: 3606234 - DNA, 25 bp, Homo sapien
gctcctttcgaatagtacaggtggt

SEQ ID NO: 3606235 - DNA, 25 bp, Homo sapien
tactattcataacaactactgctca

SEQ ID NO: 3606236 - DNA, 25 bp, Homo sapien
tgagccaggctgtccaaatggtgag

SEQ ID NO: 3606237 - DNA, 25 bp, Homo sapien
tgcagaacagcttctcctcaagtaa

SEQ ID NO: 3606238 - DNA, 25 bp, Homo sapien
gcttctcctcaagtaataaccagac

SEQ ID NO: 3606239 - DNA, 25 bp, Homo sapien
tgcgctacactttgtctgtcagggc

SEQ ID NO: 3606240 - DNA, 25 bp, Homo sapien
gtgcgctacactttgtctgtcaggg

SEQ ID NO: 3606241 - DNA, 25 bp, Homo sapien
gacgcgcctcctgctcaccaagatt

SEQ ID NO: 3606242 - DNA, 25 bp, Homo sapien
cgcctcctgctcaccaagattccct

SEQ ID NO: 3606243 - DNA, 25 bp, Homo sapien
aggaccagggagtgcgctacacttt

SEQ ID NO: 3606244 - DNA, 25 bp, Homo sapien
ggcatgacgcgcctcctgctcacca

SEQ ID NO: 3606245 - DNA, 25 bp, Homo sapien
ggaccagggagtgcgctacactttg

SEQ ID NO: 3606246 - DNA, 25 bp, Homo sapien
atgacgcgcctcctgctcaccaaga

SEQ ID NO: 3606247 - DNA, 25 bp, Homo sapien
tggtgagcaggaggcgcgtcatgcc

SEQ ID NO: 3606248 - DNA, 25 bp, Homo sapien
gaatcttggtgagcaggaggcgcgt

SEQ ID NO: 3606249 - DNA, 25 bp, Homo sapien
agggaatcttggtgagcaggaggcg

SEQ ID NO: 3606250 - DNA, 25 bp, Homo sapien
atcttggtgagcaggaggcgcgtca

SEQ ID NO: 3606251 - DNA, 25 bp, Homo sapien
caaagtgtagcgcactccctggtcc

SEQ ID NO: 3606252 - DNA, 25 bp, Homo sapien
aaagtgtagcgcactccctggtcct

SEQ ID NO: 3606253 - DNA, 25 bp, Homo sapien
ccctgacagacaaagtgtagcgcac

SEQ ID NO: 3606254 - DNA, 25 bp, Homo sapien
gccctgacagacaaagtgtagcgca

SEQ ID NO: 3606255 - DNA, 25 bp, Homo sapien
gaggcgggggcgcggccgcgagcgg

SEQ ID NO: 3606256 - DNA, 25 bp, Homo sapien
gtgaggcgggggcgcggccgcgagc

SEQ ID NO: 3606257 - DNA, 25 bp, Homo sapien
tgaggcgggggcgcggccgcgagcg

SEQ ID NO: 3606258 - DNA, 25 bp, Homo sapien
gcgggggcgcggccgcgagcggcgg

SEQ ID NO: 3606259 - DNA, 25 bp, Homo sapien
aggcgggggcgcggccgcgagcggc

SEQ ID NO: 3606260 - DNA, 25 bp, Homo sapien
ggcgggggcgcggccgcgagcggcg

SEQ ID NO: 3606261 - DNA, 25 bp, Homo sapien
cgccgctcgcggccgcgcccccgcc

SEQ ID NO: 3606262 - DNA, 25 bp, Homo sapien
ccgctcgcggccgcgcccccgcctc

SEQ ID NO: 3606263 - DNA, 25 bp, Homo sapien
cgctcgcggccgcgcccccgcctca

SEQ ID NO: 3606264 - DNA, 25 bp, Homo sapien
gccgctcgcggccgcgcccccgcct

SEQ ID NO: 3606265 - DNA, 25 bp, Homo sapien
ccgccgctcgcggccgcgcccccgc

SEQ ID NO: 3606266 - DNA, 25 bp, Homo sapien
gctcgcggccgcgcccccgcctcac

SEQ ID NO: 3606267 - DNA, 25 bp, Homo sapien
gctatgcatgaactgttactgcaat

SEQ ID NO: 3606268 - DNA, 25 bp, Homo sapien
cagcccaccgagatcgagtcgctat

SEQ ID NO: 3606269 - DNA, 25 bp, Homo sapien
gagatcgagtcgctatgcatgaact

SEQ ID NO: 3606270 - DNA, 25 bp, Homo sapien
cgagtcgctatgcatgaactgttac

SEQ ID NO: 3606271 - DNA, 25 bp, Homo sapien
caccgagatcgagtcgctatgcatg

SEQ ID NO: 3606272 - DNA, 25 bp, Homo sapien
gtcgctatgcatgaactgttactgc

SEQ ID NO: 3606273 - DNA, 25 bp, Homo sapien
attgcagtaacagttcatgcatagc

SEQ ID NO: 3606274 - DNA, 25 bp, Homo sapien
gcagtaacagttcatgcatagcgac

SEQ ID NO: 3606275 - DNA, 25 bp, Homo sapien
tcatgcatagcgactcgatctcggt

SEQ ID NO: 3606276 - DNA, 25 bp, Homo sapien
tgcatagcgactcgatctcggtggg

SEQ ID NO: 3606277 - DNA, 25 bp, Homo sapien
taacagttcatgcatagcgactcga

SEQ ID NO: 3606278 - DNA, 25 bp, Homo sapien
tagcgactcgatctcggtgggctgc

SEQ ID NO: 3606279 - DNA, 25 bp, Homo sapien
gccgcctgcccctgatcacctgttc

SEQ ID NO: 3606280 - DNA, 25 bp, Homo sapien
gcccctgatcacctgttccggccca

SEQ ID NO: 3606281 - DNA, 25 bp, Homo sapien
ccagcggggctgtggaaccagggcc

SEQ ID NO: 3606282 - DNA, 25 bp, Homo sapien
cagcggggctgtggaaccagggccc

SEQ ID NO: 3606283 - DNA, 25 bp, Homo sapien
cctgatcacctgttccggcccatca

SEQ ID NO: 3606284 - DNA, 25 bp, Homo sapien
ctgatcacctgttccggcccatcag

SEQ ID NO: 3606285 - DNA, 25 bp, Homo sapien
ctgatgggccggaacaggtgatcag

SEQ ID NO: 3606286 - DNA, 25 bp, Homo sapien
ggccctggttccacagccccgctgg

SEQ ID NO: 3606287 - DNA, 25 bp, Homo sapien
gatgggccggaacaggtgatcaggg

SEQ ID NO: 3606288 - DNA, 25 bp, Homo sapien
gggccctggttccacagccccgctg

SEQ ID NO: 3606289 - DNA, 25 bp, Homo sapien
tgatgggccggaacaggtgatcagg

SEQ ID NO: 3606290 - DNA, 25 bp, Homo sapien
gaacaggtgatcaggggcaggcggc

SEQ ID NO: 3606291 - DNA, 25 bp, Homo sapien
gccgcctgcccctgatcacctgttc

SEQ ID NO: 3606292 - DNA, 25 bp, Homo sapien
gcccctgatcacctgttccggccca

SEQ ID NO: 3606293 - DNA, 25 bp, Homo sapien
cctgatcacctgttccggcccatca

SEQ ID NO: 3606294 - DNA, 25 bp, Homo sapien
cagcggggctgtggaaccagggccc

SEQ ID NO: 3606295 - DNA, 25 bp, Homo sapien
gcctgcccctgatcacctgttccgg

SEQ ID NO: 3606296 - DNA, 25 bp, Homo sapien
ctgatcacctgttccggcccatcag

SEQ ID NO: 3606297 - DNA, 25 bp, Homo sapien
gccgaggtctgaattgcgcgtggtg

SEQ ID NO: 3606298 - DNA, 25 bp, Homo sapien
gaggtctgaattgcgcgtggtggcc

SEQ ID NO: 3606299 - DNA, 25 bp, Homo sapien
ccgaggtctgaattgcgcgtggtgg

SEQ ID NO: 3606300 - DNA, 25 bp, Homo sapien
cgaggtctgaattgcgcgtggtggc

SEQ ID NO: 3606301 - DNA, 25 bp, Homo sapien
ggccaccacgcgcaattcagacctc

SEQ ID NO: 3606302 - DNA, 25 bp, Homo sapien
caccacgcgcaattcagacctcggc

SEQ ID NO: 3606303 - DNA, 25 bp, Homo sapien
gccaccacgcgcaattcagacctcg

SEQ ID NO: 3606304 - DNA, 25 bp, Homo sapien
ccaccacgcgcaattcagacctcgg

SEQ ID NO: 3606305 - DNA, 25 bp, Homo sapien
tccggcataaaaagaggccattcaa

SEQ ID NO: 3606306 - DNA, 25 bp, Homo sapien
gagagtccggcataaaaagaggcca

SEQ ID NO: 3606307 - DNA, 25 bp, Homo sapien
agagagtccggcataaaaagaggcc

SEQ ID NO: 3606308 - DNA, 25 bp, Homo sapien
gagtccggcataaaaagaggccatt

SEQ ID NO: 3606309 - DNA, 25 bp, Homo sapien
ctcaggaatcttaggtccaccaggg

SEQ ID NO: 3606310 - DNA, 25 bp, Homo sapien
caggaatcttaggtccaccagggcc

SEQ ID NO: 3606311 - DNA, 25 bp, Homo sapien
tcaggaatcttaggtccaccagggc

SEQ ID NO: 3606312 - DNA, 25 bp, Homo sapien
ggaatcttaggtccaccagggccac

SEQ ID NO: 3606313 - DNA, 25 bp, Homo sapien
tatgtcaggaaacatgggctctgcc

SEQ ID NO: 3606314 - DNA, 25 bp, Homo sapien
taggcttcaacttgggaacccagag

SEQ ID NO: 3606315 - DNA, 25 bp, Homo sapien
cacacagtatgctccccagagggtt

SEQ ID NO: 3606316 - DNA, 25 bp, Homo sapien
gacagccgttgtctagccaggatcc

SEQ ID NO: 3606317 - DNA, 25 bp, Homo sapien
gttctccccatgatattctctttct

SEQ ID NO: 3606318 - DNA, 25 bp, Homo sapien
cctggggagacaagtgctcctctct

SEQ ID NO: 3606319 - DNA, 25 bp, Homo sapien
ccagaagtgactagagccaaactcc

SEQ ID NO: 3606320 - DNA, 25 bp, Homo sapien
cagcatcacggcaaacaggcttgca

SEQ ID NO: 3606321 - DNA, 25 bp, Homo sapien
cctcacccttgaatggagtaactca

SEQ ID NO: 3606322 - DNA, 25 bp, Homo sapien
gagtaactcatgagcattcccaaat

SEQ ID NO: 3606323 - DNA, 25 bp, Homo sapien
caaagcctggtgaatgtaatgcatc

SEQ ID NO: 3606324 - DNA, 25 bp, Homo sapien
tcaaggactgaaccatgctagaggc

SEQ ID NO: 3606325 - DNA, 25 bp, Homo sapien
tgtggccctggtcatgaaggctgtg

SEQ ID NO: 3606326 - DNA, 25 bp, Homo sapien
ggccctggtcatgaaggctgtgagt

SEQ ID NO: 3606327 - DNA, 25 bp, Homo sapien
cctggtcatgaaggctgtgagtgat

SEQ ID NO: 3606328 - DNA, 25 bp, Homo sapien
ccctggtcatgaaggctgtgagtga

SEQ ID NO: 3606329 - DNA, 25 bp, Homo sapien
atggcgcgagtgaaggcagctatct

SEQ ID NO: 3606330 - DNA, 25 bp, Homo sapien
tcctcagtctcctggtcgatggcgc

SEQ ID NO: 3606331 - DNA, 25 bp, Homo sapien
ccactgtctgtttgttgaaactctg

SEQ ID NO: 3606332 - DNA, 25 bp, Homo sapien
aggtcatccagacgggcctgcagct

SEQ ID NO: 3606333 - DNA, 25 bp, Homo sapien
tctgctgagctcttcgcgcagctgg

SEQ ID NO: 3606334 - DNA, 25 bp, Homo sapien
tcagatccatcgtgtagggcttcag

SEQ ID NO: 3606335 - DNA, 25 bp, Homo sapien
gttgctgccgcaagccctccaaatt

SEQ ID NO: 3606336 - DNA, 25 bp, Homo sapien
cagctcgtgcgcctctgccatgtag

SEQ ID NO: 3606337 - DNA, 25 bp, Homo sapien
gacagatatccaggccgtcagactg

SEQ ID NO: 3606338 - DNA, 25 bp, Homo sapien
gaaggggacagatatccaggccgtc

SEQ ID NO: 3606339 - DNA, 25 bp, Homo sapien
tgtccccaagtcatcgcgcactgat

SEQ ID NO: 3606340 - DNA, 25 bp, Homo sapien
tttgtccccaagtcatcgcgcactg

SEQ ID NO: 3606341 - DNA, 25 bp, Homo sapien
tttgtccccgctggtctggctgaag

SEQ ID NO: 3606342 - DNA, 25 bp, Homo sapien
ccccgctggtctggctgaagtagtc

SEQ ID NO: 3606343 - DNA, 25 bp, Homo sapien
tgtccccgctggtctggctgaagta

SEQ ID NO: 3606344 - DNA, 25 bp, Homo sapien
cctttgtccccgctggtctggctga

SEQ ID NO: 3606345 - DNA, 25 bp, Homo sapien
gagcccaggtgagcacggcagccat

SEQ ID NO: 3606346 - DNA, 25 bp, Homo sapien
agtcacatagcagggagcgtggtgc

SEQ ID NO: 3606347 - DNA, 25 bp, Homo sapien
ctcagtcacatagcagggagcgtgg

SEQ ID NO: 3606348 - DNA, 25 bp, Homo sapien
tcagtcacatagcagggagcgtggt

SEQ ID NO: 3606349 - DNA, 25 bp, Homo sapien
cagtcacatagcagggagcgtggtg

SEQ ID NO: 3606350 - DNA, 25 bp, Homo sapien
cattgagtgatgaccacatgcaggc

SEQ ID NO: 3606351 - DNA, 25 bp, Homo sapien
ggtgaatcactttacatggctggca

SEQ ID NO: 3606352 - DNA, 25 bp, Homo sapien
caagagaaatcaaggtaggtgccac

SEQ ID NO: 3606353 - DNA, 25 bp, Homo sapien
tgtcatgaggttgcatctgaaggct

SEQ ID NO: 3606354 - DNA, 25 bp, Homo sapien
ggagcacagggcatactatgataac

SEQ ID NO: 3606355 - DNA, 25 bp, Homo sapien
agcaggaggacacggcgtccccatg

SEQ ID NO: 3606356 - DNA, 25 bp, Homo sapien
cagggcatactatgataacagcagg

SEQ ID NO: 3606357 - DNA, 25 bp, Homo sapien
tatgataacagcaggaggacacggc

SEQ ID NO: 3606358 - DNA, 25 bp, Homo sapien
ttagagaatctctgagaagggcagg

SEQ ID NO: 3606359 - DNA, 25 bp, Homo sapien
ggctagattctcagcagctttattg

SEQ ID NO: 3606360 - DNA, 25 bp, Homo sapien
ctagattctcagcagctttattgaa

SEQ ID NO: 3606361 - DNA, 25 bp, Homo sapien
gaggctagattctcagcagctttat

SEQ ID NO: 3606362 - DNA, 25 bp, Homo sapien
ttgaggctagattctcagcagcttt

SEQ ID NO: 3606363 - DNA, 25 bp, Homo sapien
ccactggacatgtgtcctcaagttc

SEQ ID NO: 3606364 - DNA, 25 bp, Homo sapien
tgtcctcaagttcataccagaactt

SEQ ID NO: 3606365 - DNA, 25 bp, Homo sapien
cactggacatgtgtcctcaagttca

SEQ ID NO: 3606366 - DNA, 25 bp, Homo sapien
tgtgtcctcaagttcataccagaac

SEQ ID NO: 3606367 - DNA, 25 bp, Homo sapien
ggcagggcaggtgtccacgagggtg

SEQ ID NO: 3606368 - DNA, 25 bp, Homo sapien
cagggcaggtgtccacgagggtggg

SEQ ID NO: 3606369 - DNA, 25 bp, Homo sapien
gtggggccagtgcaccaggggcagc

SEQ ID NO: 3606370 - DNA, 25 bp, Homo sapien
agggcagggcaggtgtccacgaggg

SEQ ID NO: 3606371 - DNA, 25 bp, Homo sapien
ccttgaaggtgctgaagaaggagtt

SEQ ID NO: 3606372 - DNA, 25 bp, Homo sapien
ctccttgaaggtgctgaagaaggag

SEQ ID NO: 3606373 - DNA, 25 bp, Homo sapien
gagagagtcttgtcctggctctctt

SEQ ID NO: 3606374 - DNA, 25 bp, Homo sapien
tttctccttgaaggtgctgaagaag

SEQ ID NO: 3606375 - DNA, 25 bp, Homo sapien
cactggccgagatcctggccttgag

SEQ ID NO: 3606376 - DNA, 25 bp, Homo sapien
tgcgtgtcctgagcatagggagcca

SEQ ID NO: 3606377 - DNA, 25 bp, Homo sapien
tcagcgtagggcgtaaggcgtccct

SEQ ID NO: 3606378 - DNA, 25 bp, Homo sapien
tccacgttctggtcgatcttggcct

SEQ ID NO: 3606379 - DNA, 25 bp, Homo sapien
ggcgttcatgcagctcggtggcaaa

SEQ ID NO: 3606380 - DNA, 25 bp, Homo sapien
tccttcagtttctccgagtccttgg

SEQ ID NO: 3606381 - DNA, 25 bp, Homo sapien
ttctgcaggtcacctgcgtaagtgt

SEQ ID NO: 3606382 - DNA, 25 bp, Homo sapien
tgctgaagctctcgcaggttgtccc

SEQ ID NO: 3606383 - DNA, 25 bp, Homo sapien
ttctccaagtttgtcctggaagagg

SEQ ID NO: 3606384 - DNA, 25 bp, Homo sapien
tctccaagtttgtcctggaagaggg

SEQ ID NO: 3606385 - DNA, 25 bp, Homo sapien
tccaagtttgtcctggaagagggca

SEQ ID NO: 3606386 - DNA, 25 bp, Homo sapien
ctccaagtttgtcctggaagagggc

SEQ ID NO: 3606387 - DNA, 25 bp, Homo sapien
cctccccttgattccactggggcct

SEQ ID NO: 3606388 - DNA, 25 bp, Homo sapien
cccttgattccactggggcctgtct

SEQ ID NO: 3606389 - DNA, 25 bp, Homo sapien
tccccttgattccactggggcctgt

SEQ ID NO: 3606390 - DNA, 25 bp, Homo sapien
ctccctccccttgattccactgggg

SEQ ID NO: 3606391 - DNA, 25 bp, Homo sapien
tctggagatgttccacggcctcctt

SEQ ID NO: 3606392 - DNA, 25 bp, Homo sapien
agtagtcccacatcaccgtggccac

SEQ ID NO: 3606393 - DNA, 25 bp, Homo sapien
ggagatgttccacggcctccttggc

SEQ ID NO: 3606394 - DNA, 25 bp, Homo sapien
tgctgggtgagttcagatttctgga

SEQ ID NO: 3606395 - DNA, 25 bp, Homo sapien
agggtcaggaccacggccttcagga

SEQ ID NO: 3606396 - DNA, 25 bp, Homo sapien
gggtcaggaccacggccttcaggaa

SEQ ID NO: 3606397 - DNA, 25 bp, Homo sapien
ggccagggtcaggaccacggccttc

SEQ ID NO: 3606398 - DNA, 25 bp, Homo sapien
ccagggtcaggaccacggccttcag

SEQ ID NO: 3606399 - DNA, 25 bp, Homo sapien
gaggagtttcttgccacactggatc

SEQ ID NO: 3606400 - DNA, 25 bp, Homo sapien
gtcctcaggagagctcacctgcgct

SEQ ID NO: 3606401 - DNA, 25 bp, Homo sapien
acactggatcctccctacaatcagg

SEQ ID NO: 3606402 - DNA, 25 bp, Homo sapien
gctcacctgcgctgcagtgggaact

SEQ ID NO: 3606403 - DNA, 25 bp, Homo sapien
tagtgtactcctcgagagcgctcag

SEQ ID NO: 3606404 - DNA, 25 bp, Homo sapien
agcggctccaccttctggcggtaga

SEQ ID NO: 3606405 - DNA, 25 bp, Homo sapien
cagcttctcttgcagctcgtgcagc

SEQ ID NO: 3606406 - DNA, 25 bp, Homo sapien
ccttggcgtggtactcggccagtct

SEQ ID NO: 3606407 - DNA, 25 bp, Homo sapien
caggtagggctgcaccttggccttc

SEQ ID NO: 3606408 - DNA, 25 bp, Homo sapien
gccacttcttctggaagtcgtccag

SEQ ID NO: 3606409 - DNA, 25 bp, Homo sapien
ttctggaagtcgtccaggtagggct

SEQ ID NO: 3606410 - DNA, 25 bp, Homo sapien
ccaggtagggctgcaccttggcctt

SEQ ID NO: 3606411 - DNA, 25 bp, Homo sapien
aaggtggaggtcacgctgtcccagt

SEQ ID NO: 3606412 - DNA, 25 bp, Homo sapien
agggccgagctgttcgcgcagcttg

SEQ ID NO: 3606413 - DNA, 25 bp, Homo sapien
ccgagctgttcgcgcagcttgctga

SEQ ID NO: 3606414 - DNA, 25 bp, Homo sapien
aggtggaggtcacgctgtcccagtt

SEQ ID NO: 3606415 - DNA, 25 bp, Homo sapien
tctgccgctgtctttgagcacatcc

SEQ ID NO: 3606416 - DNA, 25 bp, Homo sapien
ttgagcacatccacgtacacagtgg

SEQ ID NO: 3606417 - DNA, 25 bp, Homo sapien
tggccaggtccttcactcgatccca

SEQ ID NO: 3606418 - DNA, 25 bp, Homo sapien
ccaaggcggagccttcaaactggga

SEQ ID NO: 3606419 - DNA, 25 bp, Homo sapien
tcttgctgccagaaatgccgagcct

SEQ ID NO: 3606420 - DNA, 25 bp, Homo sapien
cttgctgccagaaatgccgagcctg

SEQ ID NO: 3606421 - DNA, 25 bp, Homo sapien
ttgctgccagaaatgccgagcctgg

SEQ ID NO: 3606422 - DNA, 25 bp, Homo sapien
ctgggggggttcatcttgctgccag

SEQ ID NO: 3606423 - DNA, 25 bp, Homo sapien
aggaagagcacggccaaggtcagca

SEQ ID NO: 3606424 - DNA, 25 bp, Homo sapien
ggaagagcacggccaaggtcagcac

SEQ ID NO: 3606425 - DNA, 25 bp, Homo sapien
caggaagagcacggccaaggtcagc

SEQ ID NO: 3606426 - DNA, 25 bp, Homo sapien
cctcaggtacccagaggcccggcct

SEQ ID NO: 3606427 - DNA, 25 bp, Homo sapien
agcatgcagaagccccgtgctcccc

SEQ ID NO: 3606428 - DNA, 25 bp, Homo sapien
agagcgggagaagacctcaggtacc

SEQ ID NO: 3606429 - DNA, 25 bp, Homo sapien
cagcatgcagaagccccgtgctccc

SEQ ID NO: 3606430 - DNA, 25 bp, Homo sapien
tggggagccagagtgaccggggcag

SEQ ID NO: 3606431 - DNA, 25 bp, Homo sapien
aacttaagagttcaaggatcagctc

SEQ ID NO: 3606432 - DNA, 25 bp, Homo sapien
tgggaggctgataagcccagccccg

SEQ ID NO: 3606433 - DNA, 25 bp, Homo sapien
ccagctcttgcagggcctatttatg

SEQ ID NO: 3606434 - DNA, 25 bp, Homo sapien
tctcgcagtctctaagcagccagct

SEQ ID NO: 3606435 - DNA, 25 bp, Homo sapien
cacaacttcctgctgtccaactaag

SEQ ID NO: 3606436 - DNA, 25 bp, Homo sapien
atcaggctcctatctacacaacttc

SEQ ID NO: 3606437 - DNA, 25 bp, Homo sapien
taaccaagttgtaagtaagtgcctc

SEQ ID NO: 3606438 - DNA, 25 bp, Homo sapien
aaggcaggacaaaaggtcttagcaa

SEQ ID NO: 3606439 - DNA, 25 bp, Homo sapien
cagaaataggaaagtatgttcatat

SEQ ID NO: 3606440 - DNA, 25 bp, Homo sapien
tagtttgcaagatggcacggttagt

SEQ ID NO: 3606441 - DNA, 25 bp, Homo sapien
tactgcacatattggttactacaat

SEQ ID NO: 3606442 - DNA, 25 bp, Homo sapien
tatacattcaacgtatactgcacat

SEQ ID NO: 3606443 - DNA, 25 bp, Homo sapien
cccatacatacagtaccatgtaaac

SEQ ID NO: 3606444 - DNA, 25 bp, Homo sapien
tctcccatacatacagtaccatgta

SEQ ID NO: 3606445 - DNA, 25 bp, Homo sapien
tcccatacatacagtaccatgtaaa

SEQ ID NO: 3606446 - DNA, 25 bp, Homo sapien
ctctcccatacatacagtaccatgt

SEQ ID NO: 3606447 - DNA, 25 bp, Homo sapien
gaacaagcgcagataagtcaacagc

SEQ ID NO: 3606448 - DNA, 25 bp, Homo sapien
cactcaagggatcttgggtccagga

SEQ ID NO: 3606449 - DNA, 25 bp, Homo sapien
caggagccgagctgccagtatcagt

SEQ ID NO: 3606450 - DNA, 25 bp, Homo sapien
tgtcactggcacaagtaagagctgt

SEQ ID NO: 3606451 - DNA, 25 bp, Homo sapien
gacctctctgcgttccaggcttggg

SEQ ID NO: 3606452 - DNA, 25 bp, Homo sapien
tgagttatccaccaaaagcaaaggc

SEQ ID NO: 3606453 - DNA, 25 bp, Homo sapien
gacatgttttccgtggatcccagca

SEQ ID NO: 3606454 - DNA, 25 bp, Homo sapien
ccagcaggatgataaaggcaaccaa

SEQ ID NO: 3606455 - DNA, 25 bp, Homo sapien
ttccttggtgacttggtcatacaag

SEQ ID NO: 3606456 - DNA, 25 bp, Homo sapien
tccttggtgacttggtcatacaagc

SEQ ID NO: 3606457 - DNA, 25 bp, Homo sapien
tttccttggtgacttggtcatacaa

SEQ ID NO: 3606458 - DNA, 25 bp, Homo sapien
atttccttggtgacttggtcataca

SEQ ID NO: 3606459 - DNA, 25 bp, Homo sapien
gaaacacaagggcaatttggcacaa

SEQ ID NO: 3606460 - DNA, 25 bp, Homo sapien
tagatactgtgggtttacaatcaac

SEQ ID NO: 3606461 - DNA, 25 bp, Homo sapien
cacggatgaaccaaatgtgaggaaa

SEQ ID NO: 3606462 - DNA, 25 bp, Homo sapien
aaaagaacagcacacggatgaacca

SEQ ID NO: 3606463 - DNA, 25 bp, Homo sapien
acttcggggtgcttgtagctgagca

SEQ ID NO: 3606464 - DNA, 25 bp, Homo sapien
ctgaaggagacttcggggtgcttgt

SEQ ID NO: 3606465 - DNA, 25 bp, Homo sapien
tgaaggagacttcggggtgcttgta

SEQ ID NO: 3606466 - DNA, 25 bp, Homo sapien
ggagacttcggggtgcttgtagctg

SEQ ID NO: 3606467 - DNA, 25 bp, Homo sapien
tggatagcaagaggagtttaaatgc

SEQ ID NO: 3606468 - DNA, 25 bp, Homo sapien
gccatcactcaggtctgggtgctca

SEQ ID NO: 3606469 - DNA, 25 bp, Homo sapien
ctggctgccatcactcaggtctggg

SEQ ID NO: 3606470 - DNA, 25 bp, Homo sapien
ctgtaatacacgtagatggatagca

SEQ ID NO: 3606471 - DNA, 25 bp, Homo sapien
aggaacttctctggagtgccccatg

SEQ ID NO: 3606472 - DNA, 25 bp, Homo sapien
gaacttctctggagtgccccatgca

SEQ ID NO: 3606473 - DNA, 25 bp, Homo sapien
aacttctctggagtgccccatgcat

SEQ ID NO: 3606474 - DNA, 25 bp, Homo sapien
cttctctggagtgccccatgcataa

SEQ ID NO: 3606475 - DNA, 25 bp, Homo sapien
ttcccagccacgagactcattcctg

SEQ ID NO: 3606476 - DNA, 25 bp, Homo sapien
ctgcatccgacatccgggcagagct

SEQ ID NO: 3606477 - DNA, 25 bp, Homo sapien
gactgactgagaactgcatccgaca

SEQ ID NO: 3606478 - DNA, 25 bp, Homo sapien
ggctgcccatgagcgaagactgact

SEQ ID NO: 3606479 - DNA, 25 bp, Homo sapien
taagcatcgtcgctgttctggatcg

SEQ ID NO: 3606480 - DNA, 25 bp, Homo sapien
ttgtgatccggcagctccactgctt

SEQ ID NO: 3606481 - DNA, 25 bp, Homo sapien
ggcgtgctgggtacccgagcccatt

SEQ ID NO: 3606482 - DNA, 25 bp, Homo sapien
ttctggatcgtgtggtgtctctgga

SEQ ID NO: 3606483 - DNA, 25 bp, Homo sapien
ccccaagaaggtcgtgaagctcaga

SEQ ID NO: 3606484 - DNA, 25 bp, Homo sapien
gaatgccgtgatgctaatggaacta

SEQ ID NO: 3606485 - DNA, 25 bp, Homo sapien
gatacaccgtaagatactccattgt

SEQ ID NO: 3606486 - DNA, 25 bp, Homo sapien
tattcccttggatggcaatggtgag

SEQ ID NO: 3606487 - DNA, 25 bp, Homo sapien
ttgattagggcagactggcccagga

SEQ ID NO: 3606488 - DNA, 25 bp, Homo sapien
gttgattagggcagactggcccagg

SEQ ID NO: 3606489 - DNA, 25 bp, Homo sapien
ccaggacttccactgtgaggagaca

SEQ ID NO: 3606490 - DNA, 25 bp, Homo sapien
acttccactgtgaggagacacttac

SEQ ID NO: 3606491 - DNA, 25 bp, Homo sapien
cagcagttggctgatgaccataggg

SEQ ID NO: 3606492 - DNA, 25 bp, Homo sapien
gatgtatccccaattcttgggcatg

SEQ ID NO: 3606493 - DNA, 25 bp, Homo sapien
aggtccaccggtactcaagagcaga

SEQ ID NO: 3606494 - DNA, 25 bp, Homo sapien
atttttactgaatgcagcagttggc

SEQ ID NO: 3606495 - DNA, 25 bp, Homo sapien
ctggtgagcatacccgtggggcggg

SEQ ID NO: 3606496 - DNA, 25 bp, Homo sapien
tggtgagcatacccgtggggcgggg

SEQ ID NO: 3606497 - DNA, 25 bp, Homo sapien
gtcagcattttgataagataaagcc

SEQ ID NO: 3606498 - DNA, 25 bp, Homo sapien
gctggtgtgatggtgataagagtca

SEQ ID NO: 3606499 - DNA, 25 bp, Homo sapien
taagataaagcctggcgctctgtca

SEQ ID NO: 3606500 - DNA, 25 bp, Homo sapien
ctgtgagacacattcttgtgccctg

SEQ ID NO: 3606501 - DNA, 25 bp, Homo sapien
gggcagccggatgtccgagtggccg

SEQ ID NO: 3606502 - DNA, 25 bp, Homo sapien
ttcctggtattcttgctgttgctgc

SEQ ID NO: 3606503 - DNA, 25 bp, Homo sapien
gagtggccggtgagcgaatgccggg

SEQ ID NO: 3606504 - DNA, 25 bp, Homo sapien
gctgggagccagactccccgcatcc

SEQ ID NO: 3606505 - DNA, 25 bp, Homo sapien
gacgtggtatagtgtggcggctgct

SEQ ID NO: 3606506 - DNA, 25 bp, Homo sapien
gcctgctgtagtgccgacgtggtat

SEQ ID NO: 3606507 - DNA, 25 bp, Homo sapien
ctggtgtcttgtatagtctggcggc

SEQ ID NO: 3606508 - DNA, 25 bp, Homo sapien
gtctggcggcgtgggagacagcagg

SEQ ID NO: 3606509 - DNA, 25 bp, Homo sapien
taaatgcgcctggtcgtagttagca

SEQ ID NO: 3606510 - DNA, 25 bp, Homo sapien
gagaaccccactcctgttgaagggc

SEQ ID NO: 3606511 - DNA, 25 bp, Homo sapien
actttcagggcttgggttggagaga

SEQ ID NO: 3606512 - DNA, 25 bp, Homo sapien
cccgggactggtccgaaaacagatg

SEQ ID NO: 3606513 - DNA, 25 bp, Homo sapien
ctcctcagtagggagaacccactgg

SEQ ID NO: 3606514 - DNA, 25 bp, Homo sapien
cacaaaagggagtaccagacatcca

SEQ ID NO: 3606515 - DNA, 25 bp, Homo sapien
tcctcctcagtagggagaacccact

SEQ ID NO: 3606516 - DNA, 25 bp, Homo sapien
taacaagtactagacttcctgggaa

SEQ ID NO: 3606517 - DNA, 25 bp, Homo sapien
tcagcactcagctgcttggacaagg

SEQ ID NO: 3606518 - DNA, 25 bp, Homo sapien
gctgatggagatgccgcgcccactg

SEQ ID NO: 3606519 - DNA, 25 bp, Homo sapien
gacaagggacggtgcccatagctga

SEQ ID NO: 3606520 - DNA, 25 bp, Homo sapien
ccatcaggttggtacggtgctgcat

SEQ ID NO: 3606521 - DNA, 25 bp, Homo sapien
tcttggacttggatggtgacctgct

SEQ ID NO: 3606522 - DNA, 25 bp, Homo sapien
caggttagtgccacgttgggaggag

SEQ ID NO: 3606523 - DNA, 25 bp, Homo sapien
ttagtgccacgttgggaggagagga

SEQ ID NO: 3606524 - DNA, 25 bp, Homo sapien
cagttctcaggttgctgctgaaaga

SEQ ID NO: 3606525 - DNA, 25 bp, Homo sapien
gaggaacagttctcaggttgctgct

SEQ ID NO: 3606526 - DNA, 25 bp, Homo sapien
tgcgggaaggtaagccttgaaactg

SEQ ID NO: 3606527 - DNA, 25 bp, Homo sapien
ctgcgggaaggtaagccttgaaact

SEQ ID NO: 3606528 - DNA, 25 bp, Homo sapien
cgtgaggctggatcatggcactgct

SEQ ID NO: 3606529 - DNA, 25 bp, Homo sapien
aggactattactgggctgcctgaag

SEQ ID NO: 3606530 - DNA, 25 bp, Homo sapien
tgctcatggggggaggactattact

SEQ ID NO: 3606531 - DNA, 25 bp, Homo sapien
gctggatcatggcactgctcatggg

SEQ ID NO: 3606532 - DNA, 25 bp, Homo sapien
tctggagctgatgggtaaggagggc

SEQ ID NO: 3606533 - DNA, 25 bp, Homo sapien
atgcagcctgaagaggtggagatgg

SEQ ID NO: 3606534 - DNA, 25 bp, Homo sapien
agggctggctgattttcacatgcag

SEQ ID NO: 3606535 - DNA, 25 bp, Homo sapien
gctgattttcacatgcagcctgaag

SEQ ID NO: 3606536 - DNA, 25 bp, Homo sapien
aactccaaacaagttggagaaagca

SEQ ID NO: 3606537 - DNA, 25 bp, Homo sapien
gcctgaaagcaaactccaaacaagt

SEQ ID NO: 3606538 - DNA, 25 bp, Homo sapien
cactgagtggtctcctccaaaatgc

SEQ ID NO: 3606539 - DNA, 25 bp, Homo sapien
tttgcactgagtggtctcctccaaa

SEQ ID NO: 3606540 - DNA, 25 bp, Homo sapien
tttcatcaatctgccccccgtacat

SEQ ID NO: 3606541 - DNA, 25 bp, Homo sapien
tcctgctggtataacatatgctgct

SEQ ID NO: 3606542 - DNA, 25 bp, Homo sapien
gctcctgctggtataacatatgctg

SEQ ID NO: 3606543 - DNA, 25 bp, Homo sapien
tgctgctcctgctggtataacatat

SEQ ID NO: 3606544 - DNA, 25 bp, Homo sapien
ttttccaggtgagctttgaaggcct

SEQ ID NO: 3606545 - DNA, 25 bp, Homo sapien
tgagaaccggcgcacaggggagaaa

SEQ ID NO: 3606546 - DNA, 25 bp, Homo sapien
gagaaacgctccgtagggaggtgca

SEQ ID NO: 3606547 - DNA, 25 bp, Homo sapien
cgcacaggggagaaacgctccgtag

SEQ ID NO: 3606548 - DNA, 25 bp, Homo sapien
aaacgctccgtagggaggtgcagag

SEQ ID NO: 3606549 - DNA, 25 bp, Homo sapien
gatcagggtttcatgtccagggcag

SEQ ID NO: 3606550 - DNA, 25 bp, Homo sapien
tttccaagcctggtgaggtcccgag

SEQ ID NO: 3606551 - DNA, 25 bp, Homo sapien
gaaatgatgtgctaccttgccagtg

SEQ ID NO: 3606552 - DNA, 25 bp, Homo sapien
gatgaacataaagacggctggctgc

SEQ ID NO: 3606553 - DNA, 25 bp, Homo sapien
taattatgtcccactctgctcagag

SEQ ID NO: 3606554 - DNA, 25 bp, Homo sapien
taaaatacgctctagtaactggtgg

SEQ ID NO: 3606555 - DNA, 25 bp, Homo sapien
gccaaatgggtaaccagcctcagta

SEQ ID NO: 3606556 - DNA, 25 bp, Homo sapien
aaaatgtgtcaagcttgccagtgca

SEQ ID NO: 3606557 - DNA, 25 bp, Homo sapien
gccagtgtatgtcttttggacctat

SEQ ID NO: 3606558 - DNA, 25 bp, Homo sapien
cagacccgggaacggaaaggctgct

SEQ ID NO: 3606559 - DNA, 25 bp, Homo sapien
gctgctgtcctagctgccgttgtag

SEQ ID NO: 3606560 - DNA, 25 bp, Homo sapien
tcagctgtagggttggtcatggcca

SEQ ID NO: 3606561 - DNA, 25 bp, Homo sapien
ggttttctttccacataggaccagc

SEQ ID NO: 3606562 - DNA, 25 bp, Homo sapien
ctattggccaagctgtagaaggagc

SEQ ID NO: 3606563 - DNA, 25 bp, Homo sapien
catgacccagtagggcccatttgta

SEQ ID NO: 3606564 - DNA, 25 bp, Homo sapien
tattcggaagatctttcagacccag

SEQ ID NO: 3606565 - DNA, 25 bp, Homo sapien
taaacagttcttggcaggtacgagc

SEQ ID NO: 3606566 - DNA, 25 bp, Homo sapien
catggagctaaggaccagggctaac

SEQ ID NO: 3606567 - DNA, 25 bp, Homo sapien
ttaggcatctctcaacaaggttctg

SEQ ID NO: 3606568 - DNA, 25 bp, Homo sapien
tacatgctggattctggtgaaaccc

SEQ ID NO: 3606569 - DNA, 25 bp, Homo sapien
cagaggtgacctttcgctggttgca

SEQ ID NO: 3606570 - DNA, 25 bp, Homo sapien
ggcttgagcaaagagaccacacaaa

SEQ ID NO: 3606571 - DNA, 25 bp, Homo sapien
gcaagcactgccagatgtcacatta

SEQ ID NO: 3606572 - DNA, 25 bp, Homo sapien
tgttgaagctgcactctaccacctc

SEQ ID NO: 3606573 - DNA, 25 bp, Homo sapien
tcctggtctggctccccgtctgagc

SEQ ID NO: 3606574 - DNA, 25 bp, Homo sapien
ggtctggctccccgtctgagctctc

SEQ ID NO: 3606575 - DNA, 25 bp, Homo sapien
gtctggctccccgtctgagctctcc

SEQ ID NO: 3606576 - DNA, 25 bp, Homo sapien
tctggctccccgtctgagctctcct

SEQ ID NO: 3606577 - DNA, 25 bp, Homo sapien
catgcagttggatgttggctcctcc

SEQ ID NO: 3606578 - DNA, 25 bp, Homo sapien
gccaagggggcccattccattcaac

SEQ ID NO: 3606579 - DNA, 25 bp, Homo sapien
catctgatgccctccggccaagggg

SEQ ID NO: 3606580 - DNA, 25 bp, Homo sapien
cattcaacagctgtagcgtgggcgg

SEQ ID NO: 3606581 - DNA, 25 bp, Homo sapien
cccggttggttgcaagttttgcata

SEQ ID NO: 3606582 - DNA, 25 bp, Homo sapien
tgaagttcacattaggggccacctg

SEQ ID NO: 3606583 - DNA, 25 bp, Homo sapien
ttttgcataggcaacaggttgtgca

SEQ ID NO: 3606584 - DNA, 25 bp, Homo sapien
tcaagttgcccggttggttgcaagt

SEQ ID NO: 3606585 - DNA, 25 bp, Homo sapien
ctgcagatcttccataacttccgtg

SEQ ID NO: 3606586 - DNA, 25 bp, Homo sapien
gaaagaatgcaattactcttgtcag

SEQ ID NO: 3606587 - DNA, 25 bp, Homo sapien
gaatgcaattactcttgtcagtgct

SEQ ID NO: 3606588 - DNA, 25 bp, Homo sapien
caattactcttgtcagtgctgatag

SEQ ID NO: 3606589 - DNA, 25 bp, Homo sapien
actcttgtcagtgctgataggacag

SEQ ID NO: 3606590 - DNA, 25 bp, Homo sapien
caaatagcgcaccaatgcttcaggg

SEQ ID NO: 3606591 - DNA, 25 bp, Homo sapien
cgtgggtcagccacacccactgtgt

SEQ ID NO: 3606592 - DNA, 25 bp, Homo sapien
cattgacaaatagcgcaccaatgct

SEQ ID NO: 3606593 - DNA, 25 bp, Homo sapien
ctcctcattgacaaatagcgcacca

SEQ ID NO: 3606594 - DNA, 25 bp, Homo sapien
agctgacagctcccacaggttgcta

SEQ ID NO: 3606595 - DNA, 25 bp, Homo sapien
gctgacagctcccacaggttgctac

SEQ ID NO: 3606596 - DNA, 25 bp, Homo sapien
cacaatttggttctctgggttgatc

SEQ ID NO: 3606597 - DNA, 25 bp, Homo sapien
ccacaatttggttctctgggttgat

SEQ ID NO: 3606598 - DNA, 25 bp, Homo sapien
acaatttggttctctgggttgatca

SEQ ID NO: 3606599 - DNA, 25 bp, Homo sapien
gatgttcatagcagtacctgcctgc

SEQ ID NO: 3606600 - DNA, 25 bp, Homo sapien
ttcatagcagtacctgcctgctccg

SEQ ID NO: 3606601 - DNA, 25 bp, Homo sapien
ctgatgttcatagcagtacctgcct

SEQ ID NO: 3606602 - DNA, 25 bp, Homo sapien
tgttcatagcagtacctgcctgctc

SEQ ID NO: 3606603 - DNA, 25 bp, Homo sapien
ctggaaagcagtacatacatataca

SEQ ID NO: 3606604 - DNA, 25 bp, Homo sapien
tgctaggaagtgctccgagacgcag

SEQ ID NO: 3606605 - DNA, 25 bp, Homo sapien
gatattgactggtgcttgaaaggcc

SEQ ID NO: 3606606 - DNA, 25 bp, Homo sapien
cacagcaggctgtagattgcactat

SEQ ID NO: 3606607 - DNA, 25 bp, Homo sapien
tatgtctcttatgtcgatcacacag

SEQ ID NO: 3606608 - DNA, 25 bp, Homo sapien
agtgtctgttctttgtccagtccca

SEQ ID NO: 3606609 - DNA, 25 bp, Homo sapien
gaggcgcttattgggatctaacacc

SEQ ID NO: 3606610 - DNA, 25 bp, Homo sapien
gatctgctccatggagaggcgctta

SEQ ID NO: 3606611 - DNA, 25 bp, Homo sapien
tgtcaaagttgggatcggcgtcccc

SEQ ID NO: 3606612 - DNA, 25 bp, Homo sapien
catccacttgtgcttgcagatctgc

SEQ ID NO: 3606613 - DNA, 25 bp, Homo sapien
ctgcaatggacaaacagcctgcctt

SEQ ID NO: 3606614 - DNA, 25 bp, Homo sapien
gcaatggacaaacagcctgccttca

SEQ ID NO: 3606615 - DNA, 25 bp, Homo sapien
aatggacaaacagcctgccttcagt

SEQ ID NO: 3606616 - DNA, 25 bp, Homo sapien
tggacaaacagcctgccttcagtct

SEQ ID NO: 3606617 - DNA, 25 bp, Homo sapien
tatatctagacacttaggagctgca

SEQ ID NO: 3606618 - DNA, 25 bp, Homo sapien
tctatttaatcacaaccgtcctgaa

SEQ ID NO: 3606619 - DNA, 25 bp, Homo sapien
actgcaatgcaaggcccatgtcttt

SEQ ID NO: 3606620 - DNA, 25 bp, Homo sapien
tctgttgtacccagtatcaactctc

SEQ ID NO: 3606621 - DNA, 25 bp, Homo sapien
taagctgtgctcttgactaccctat

SEQ ID NO: 3606622 - DNA, 25 bp, Homo sapien
cacaacaaccttaacttagagacta

SEQ ID NO: 3606623 - DNA, 25 bp, Homo sapien
taaagttgggacttctaagctgtgc

SEQ ID NO: 3606624 - DNA, 25 bp, Homo sapien
taccctattatacatctccacatgg

SEQ ID NO: 3606625 - DNA, 25 bp, Homo sapien
gatcagataataagaggccaaagca

SEQ ID NO: 3606626 - DNA, 25 bp, Homo sapien
taatgtccctttggcataccaagag

SEQ ID NO: 3606627 - DNA, 25 bp, Homo sapien
gataagtcttctccataagccgtgt

SEQ ID NO: 3606628 - DNA, 25 bp, Homo sapien
taagccgtgtggatttgactgaaaa

SEQ ID NO: 3606629 - DNA, 25 bp, Homo sapien
tgaaaccctgcatgtgacaccaaag

SEQ ID NO: 3606630 - DNA, 25 bp, Homo sapien
gtaattctaaagcacccagcccaag

SEQ ID NO: 3606631 - DNA, 25 bp, Homo sapien
gcatgctgcttacaggtgctcagaa

SEQ ID NO: 3606632 - DNA, 25 bp, Homo sapien
gaaggcttcccgaatcaaggatcaa

SEQ ID NO: 3606633 - DNA, 25 bp, Homo sapien
aattggcgattaaatctctgaaaca

SEQ ID NO: 3606634 - DNA, 25 bp, Homo sapien
gaacaaggatgctatgcaatacact

SEQ ID NO: 3606635 - DNA, 25 bp, Homo sapien
ctatgcaatacactgcttgatgctg

SEQ ID NO: 3606636 - DNA, 25 bp, Homo sapien
aaatctctgaaacatgtttctatgg

SEQ ID NO: 3606637 - DNA, 25 bp, Homo sapien
tgcaacagcaatctcaggatggagc

SEQ ID NO: 3606638 - DNA, 25 bp, Homo sapien
catggctttgataagagtctatccc

SEQ ID NO: 3606639 - DNA, 25 bp, Homo sapien
aagaccaatggatggcctgcaacag

SEQ ID NO: 3606640 - DNA, 25 bp, Homo sapien
gggagaagtgatgctattatagcaa

SEQ ID NO: 3606641 - DNA, 25 bp, Homo sapien
cactgactgcagtaagatccgactc

SEQ ID NO: 3606642 - DNA, 25 bp, Homo sapien
gaaaaatggaagtcccacacttcag

SEQ ID NO: 3606643 - DNA, 25 bp, Homo sapien
taaacgataatatgcctcctgagtt

SEQ ID NO: 3606644 - DNA, 25 bp, Homo sapien
ccttggaacttaacctatgacagca

SEQ ID NO: 3606645 - DNA, 25 bp, Homo sapien
taagttatttgcatccatcggtgga

SEQ ID NO: 3606646 - DNA, 25 bp, Homo sapien
aaactgctttgaggactctgagccc

SEQ ID NO: 3606647 - DNA, 25 bp, Homo sapien
tatttgccaacacatgaagccaggc

SEQ ID NO: 3606648 - DNA, 25 bp, Homo sapien
tcatgggaatgaacacggctggcct

SEQ ID NO: 3606649 - DNA, 25 bp, Homo sapien
tatggtcataccactaggctctagc

SEQ ID NO: 3606650 - DNA, 25 bp, Homo sapien
gtcataccactaggctctagcttag

SEQ ID NO: 3606651 - DNA, 25 bp, Homo sapien
ataccactaggctctagcttaggtg

SEQ ID NO: 3606652 - DNA, 25 bp, Homo sapien
tggtcataccactaggctctagctt

SEQ ID NO: 3606653 - DNA, 25 bp, Homo sapien
gagtcagtgttcgaacaaccctatg

SEQ ID NO: 3606654 - DNA, 25 bp, Homo sapien
ctggagctcagaaccggaggtgaac

SEQ ID NO: 3606655 - DNA, 25 bp, Homo sapien
ggtaagcaccacgataagagaaagt

SEQ ID NO: 3606656 - DNA, 25 bp, Homo sapien
aaggaaggccctgtgactggagctc

SEQ ID NO: 3606657 - DNA, 25 bp, Homo sapien
ctccttcccgttccttcacatgcag

SEQ ID NO: 3606658 - DNA, 25 bp, Homo sapien
tcactcctgtcaaaaccctccaatc

SEQ ID NO: 3606659 - DNA, 25 bp, Homo sapien
aggcacgcaggcctccttcccgttc

SEQ ID NO: 3606660 - DNA, 25 bp, Homo sapien
aaccctccaatcctgtatacttcag

SEQ ID NO: 3606661 - DNA, 25 bp, Homo sapien
taaatctactccaaggttcacctct

SEQ ID NO: 3606662 - DNA, 25 bp, Homo sapien
aatgcaattaccatgggcttctacc

SEQ ID NO: 3606663 - DNA, 25 bp, Homo sapien
tgcgttctctaaaatgttcccttct

SEQ ID NO: 3606664 - DNA, 25 bp, Homo sapien
caacccagtggacacatgttcttcc

SEQ ID NO: 3606665 - DNA, 25 bp, Homo sapien
ttgcaatgagaacccaataagtgga

SEQ ID NO: 3606666 - DNA, 25 bp, Homo sapien
gcaatgagaacccaataagtggaaa

SEQ ID NO: 3606667 - DNA, 25 bp, Homo sapien
attgcaatgagaacccaataagtgg

SEQ ID NO: 3606668 - DNA, 25 bp, Homo sapien
aatgagaacccaataagtggaaata

SEQ ID NO: 3606669 - DNA, 25 bp, Homo sapien
tagctgtgtgctagcgactccctta

SEQ ID NO: 3606670 - DNA, 25 bp, Homo sapien
attcctgggataactgagtgggtct

SEQ ID NO: 3606671 - DNA, 25 bp, Homo sapien
tgagtgggtctaactttcatgaacc

SEQ ID NO: 3606672 - DNA, 25 bp, Homo sapien
tcctggaggcatcaggtcagcaagc

SEQ ID NO: 3606673 - DNA, 25 bp, Homo sapien
agcacgcgggcccgcagattctgca

SEQ ID NO: 3606674 - DNA, 25 bp, Homo sapien
tgcagtgtgcttccatcaaatggca

SEQ ID NO: 3606675 - DNA, 25 bp, Homo sapien
acacaagcacgtagaggacaactcc

SEQ ID NO: 3606676 - DNA, 25 bp, Homo sapien
aatggcagggcaccgcacacaagca

SEQ ID NO: 3606677 - DNA, 25 bp, Homo sapien
aaacaaaaaagactactgtagtgtg

SEQ ID NO: 3606678 - DNA, 25 bp, Homo sapien
ctgtagtgtgtgtatgcagatgatg

SEQ ID NO: 3606679 - DNA, 25 bp, Homo sapien
ccaaacagagaggatgtacaattaa

SEQ ID NO: 3606680 - DNA, 25 bp, Homo sapien
tgcagatgatggtgagtcatgcata

SEQ ID NO: 3606681 - DNA, 25 bp, Homo sapien
agctaatgctgtggggtataagaga

SEQ ID NO: 3606682 - DNA, 25 bp, Homo sapien
aaccaagggtagctaatgctgtggg

SEQ ID NO: 3606683 - DNA, 25 bp, Homo sapien
tcaaccaagggtagctaatgctgtg

SEQ ID NO: 3606684 - DNA, 25 bp, Homo sapien
gtagctaatgctgtggggtataaga

SEQ ID NO: 3606685 - DNA, 25 bp, Homo sapien
cactttgggcccatcatattctttt

SEQ ID NO: 3606686 - DNA, 25 bp, Homo sapien
gtaagcctactcagctggacccaga

SEQ ID NO: 3606687 - DNA, 25 bp, Homo sapien
taagcctactcagctggacccagaa

SEQ ID NO: 3606688 - DNA, 25 bp, Homo sapien
tactcagctggacccagaatttttt

SEQ ID NO: 3606689 - DNA, 25 bp, Homo sapien
gcctactcagctggacccagaattt

SEQ ID NO: 3606690 - DNA, 25 bp, Homo sapien
actctctgaaacccgtccctctctt

SEQ ID NO: 3606691 - DNA, 25 bp, Homo sapien
ctactctctgaaacccgtccctctc

SEQ ID NO: 3606692 - DNA, 25 bp, Homo sapien
tactctctgaaacccgtccctctct

SEQ ID NO: 3606693 - DNA, 25 bp, Homo sapien
taacctttggctcatgacacactct

SEQ ID NO: 3606694 - DNA, 25 bp, Homo sapien
tttggctcatgacacactctccatg

SEQ ID NO: 3606695 - DNA, 25 bp, Homo sapien
agataaggaatacgaaatatattac

SEQ ID NO: 3606696 - DNA, 25 bp, Homo sapien
agcattattgagataaggaatacga

SEQ ID NO: 3606697 - DNA, 25 bp, Homo sapien
tccatatcccatacaattcacgcat

SEQ ID NO: 3606698 - DNA, 25 bp, Homo sapien
cagcggcttttagcgcattcacaga

SEQ ID NO: 3606699 - DNA, 25 bp, Homo sapien
ttcacgcattgaaagtgtaatgccc

SEQ ID NO: 3606700 - DNA, 25 bp, Homo sapien
tcacagagttgtgcgacgatgacca

SEQ ID NO: 3606701 - DNA, 25 bp, Homo sapien
aatggcccagccctaggctttctac

SEQ ID NO: 3606702 - DNA, 25 bp, Homo sapien
cacccttcaagtctttcaccaatgg

SEQ ID NO: 3606703 - DNA, 25 bp, Homo sapien
aaccctgtgctaattaggagttact

SEQ ID NO: 3606704 - DNA, 25 bp, Homo sapien
ccctgtgctaattaggagttactcc

SEQ ID NO: 3606705 - DNA, 25 bp, Homo sapien
agcaggcaggtgaagtggtaaaata

SEQ ID NO: 3606706 - DNA, 25 bp, Homo sapien
aggcaataaggagttgctaggactt

SEQ ID NO: 3606707 - DNA, 25 bp, Homo sapien
ggcaataaggagttgctaggacttc

SEQ ID NO: 3606708 - DNA, 25 bp, Homo sapien
caaaaatcactgtgacaagatcctt

SEQ ID NO: 3606709 - DNA, 25 bp, Homo sapien
aaaatcactgtgacaagatccttca

SEQ ID NO: 3606710 - DNA, 25 bp, Homo sapien
aaatcactgtgacaagatccttcat

SEQ ID NO: 3606711 - DNA, 25 bp, Homo sapien
aaaaatcactgtgacaagatccttc

SEQ ID NO: 3606712 - DNA, 25 bp, Homo sapien
aaagcttctgaggattcacaatccc

SEQ ID NO: 3606713 - DNA, 25 bp, Homo sapien
gctaaaagcttctgaggattcacaa

SEQ ID NO: 3606714 - DNA, 25 bp, Homo sapien
taaaagcttctgaggattcacaatc

SEQ ID NO: 3606715 - DNA, 25 bp, Homo sapien
aagctaaaagcttctgaggattcac

SEQ ID NO: 3606716 - DNA, 25 bp, Homo sapien
cactttattcaatgctgtgcccaac

SEQ ID NO: 3606717 - DNA, 25 bp, Homo sapien
tatatttacagggtacatcgtacat

SEQ ID NO: 3606718 - DNA, 25 bp, Homo sapien
aatccagtgaattaacatatccagc

SEQ ID NO: 3606719 - DNA, 25 bp, Homo sapien
tggtaggtcagaagcgcatgccatc

SEQ ID NO: 3606720 - DNA, 25 bp, Homo sapien
gggaggaggcaagcttttgggctca

SEQ ID NO: 3606721 - DNA, 25 bp, Homo sapien
cacaagacctcaaagcaaaagcttc

SEQ ID NO: 3606722 - DNA, 25 bp, Homo sapien
tttttctattcccaacctctcattc

SEQ ID NO: 3606723 - DNA, 25 bp, Homo sapien
tgggctcaggcttctcctacacttt

SEQ ID NO: 3606724 - DNA, 25 bp, Homo sapien
ccgtaggctaaatagggtgcacctt

SEQ ID NO: 3606725 - DNA, 25 bp, Homo sapien
ttttcccaagggtcaacgtgcagga

SEQ ID NO: 3606726 - DNA, 25 bp, Homo sapien
caacctgggaggtgcaatgaatgat

SEQ ID NO: 3606727 - DNA, 25 bp, Homo sapien
gagccgcttcttggtaatggtcata

SEQ ID NO: 3606728 - DNA, 25 bp, Homo sapien
tcctggctaaaagcagtacctctcg

SEQ ID NO: 3606729 - DNA, 25 bp, Homo sapien
tgtctgcaactgacaggtgccttat

SEQ ID NO: 3606730 - DNA, 25 bp, Homo sapien
tgaaatcccacatcctaaccacgtg

SEQ ID NO: 3606731 - DNA, 25 bp, Homo sapien
tctgcgtggaatgttttgaagatcc

SEQ ID NO: 3606732 - DNA, 25 bp, Homo sapien
agaacacggatttgttactaataat

SEQ ID NO: 3606733 - DNA, 25 bp, Homo sapien
taagaacacggatttgttactaata

SEQ ID NO: 3606734 - DNA, 25 bp, Homo sapien
ttagccttgatctcaactagctggg

SEQ ID NO: 3606735 - DNA, 25 bp, Homo sapien
tcaaactcctaagtccaagtaagac

SEQ ID NO: 3606736 - DNA, 25 bp, Homo sapien
caaggtatcactatgaggctagact

SEQ ID NO: 3606737 - DNA, 25 bp, Homo sapien
tctcgaagagaactagtatggacag

SEQ ID NO: 3606738 - DNA, 25 bp, Homo sapien
tatctgacatcctcagtacagttct

SEQ ID NO: 3606739 - DNA, 25 bp, Homo sapien
tctgacatcctcagtacagttctca

SEQ ID NO: 3606740 - DNA, 25 bp, Homo sapien
ctatctgacatcctcagtacagttc

SEQ ID NO: 3606741 - DNA, 25 bp, Homo sapien
ctgacatcctcagtacagttctcac

SEQ ID NO: 3606742 - DNA, 25 bp, Homo sapien
caaaaatagacagctgtgacgatct

SEQ ID NO: 3606743 - DNA, 25 bp, Homo sapien
gatctgtttgaacttccgacgtgcc

SEQ ID NO: 3606744 - DNA, 25 bp, Homo sapien
tgccattctaccatgggccaccagg

SEQ ID NO: 3606745 - DNA, 25 bp, Homo sapien
tgatattcagattggcatccagaag

SEQ ID NO: 3606746 - DNA, 25 bp, Homo sapien
caaaactgttatacgggccagaagc

SEQ ID NO: 3606747 - DNA, 25 bp, Homo sapien
taaactctgttgcatgctataccca

SEQ ID NO: 3606748 - DNA, 25 bp, Homo sapien
gctgtaacagcgcactgggtagtac

SEQ ID NO: 3606749 - DNA, 25 bp, Homo sapien
tcaggattctgcagagcttaaaggt

SEQ ID NO: 3606750 - DNA, 25 bp, Homo sapien
aatacgctaaattttcgacttacat

SEQ ID NO: 3606751 - DNA, 25 bp, Homo sapien
gacttacatttaaagagtatgcctc

SEQ ID NO: 3606752 - DNA, 25 bp, Homo sapien
tacatttaaagagtatgcctcctct

SEQ ID NO: 3606753 - DNA, 25 bp, Homo sapien
tttcgacttacatttaaagagtatg

SEQ ID NO: 3606754 - DNA, 25 bp, Homo sapien
aattacattattgctagtggcctca

SEQ ID NO: 3606755 - DNA, 25 bp, Homo sapien
taaacaggatcagtccaattgtctg

SEQ ID NO: 3606756 - DNA, 25 bp, Homo sapien
tgcacatgtcctgtaaactctaaac

SEQ ID NO: 3606757 - DNA, 25 bp, Homo sapien
tcttatttaagatcagtcatcctgg

SEQ ID NO: 3606758 - DNA, 25 bp, Homo sapien
caagggtgctcactatataaacatc

SEQ ID NO: 3606759 - DNA, 25 bp, Homo sapien
gaaatgtgagatatccgtggagaac

SEQ ID NO: 3606760 - DNA, 25 bp, Homo sapien
tccttgagaaaacagtctagaacaa

SEQ ID NO: 3606761 - DNA, 25 bp, Homo sapien
ggagaactctctcccaacaaccttg

SEQ ID NO: 3606762 - DNA, 25 bp, Homo sapien
tacattttatcgtgcaggaaggagc

SEQ ID NO: 3606763 - DNA, 25 bp, Homo sapien
tcacatgaaggcgtaaggaagcact

SEQ ID NO: 3606764 - DNA, 25 bp, Homo sapien
gatctgggtcctagtattctcggca

SEQ ID NO: 3606765 - DNA, 25 bp, Homo sapien
tacctgatcaagttccacaagtggg

SEQ ID NO: 3606766 - DNA, 25 bp, Homo sapien
acacacttgtgtgagttctgtcgca

SEQ ID NO: 3606767 - DNA, 25 bp, Homo sapien
gaggaaaatatagctactgaaggca

SEQ ID NO: 3606768 - DNA, 25 bp, Homo sapien
gctctaagtggctctttctgacaca

SEQ ID NO: 3606769 - DNA, 25 bp, Homo sapien
gtttaaggaacgcactcgggtgaga

SEQ ID NO: 3606770 - DNA, 25 bp, Homo sapien
ttttaggtttgccatagtgtgctca

SEQ ID NO: 3606771 - DNA, 25 bp, Homo sapien
taagtcccacgttcagaaaggatgc

SEQ ID NO: 3606772 - DNA, 25 bp, Homo sapien
ttgaagaacagcatcaagtgactgc

SEQ ID NO: 3606773 - DNA, 25 bp, Homo sapien
tttaatctcaactgtcagcgcctga

SEQ ID NO: 3606774 - DNA, 25 bp, Homo sapien
ctccactagcatattctgtcaccag

SEQ ID NO: 3606775 - DNA, 25 bp, Homo sapien
gataaatcatccgttctgtctccat

SEQ ID NO: 3606776 - DNA, 25 bp, Homo sapien
tattctgtcaccagataaatcatcc

SEQ ID NO: 3606777 - DNA, 25 bp, Homo sapien
cagataaatcatccgttctgtctcc

SEQ ID NO: 3606778 - DNA, 25 bp, Homo sapien
tcacagatataggtcttcaggcagc

SEQ ID NO: 3606779 - DNA, 25 bp, Homo sapien
actaagaggctacgaaagcttgccc

SEQ ID NO: 3606780 - DNA, 25 bp, Homo sapien
tacacatggtcctatgtctgggcca

SEQ ID NO: 3606781 - DNA, 25 bp, Homo sapien
cagcaagtagagttgggcctatgca

SEQ ID NO: 3606782 - DNA, 25 bp, Homo sapien
ggtcttatctatgatcttgatagca

SEQ ID NO: 3606783 - DNA, 25 bp, Homo sapien
tcttcataatttgaacttcccggaa

SEQ ID NO: 3606784 - DNA, 25 bp, Homo sapien
gggggtggcaaagcatcttcataat

SEQ ID NO: 3606785 - DNA, 25 bp, Homo sapien
ccagctgggtcttatctatgatctt

SEQ ID NO: 3606786 - DNA, 25 bp, Homo sapien
agtcttggataatataacccttgac

SEQ ID NO: 3606787 - DNA, 25 bp, Homo sapien
tgtaagaagtcttggataatataac

SEQ ID NO: 3606788 - DNA, 25 bp, Homo sapien
taagaagtcttggataatataaccc

SEQ ID NO: 3606789 - DNA, 25 bp, Homo sapien
gataatataacccttgaccacctgc

SEQ ID NO: 3606790 - DNA, 25 bp, Homo sapien
cttagctgcaaactggaaagtggga

SEQ ID NO: 3606791 - DNA, 25 bp, Homo sapien
gctgcaaactggaaagtgggagttt

SEQ ID NO: 3606792 - DNA, 25 bp, Homo sapien
tagctgcaaactggaaagtgggagt

SEQ ID NO: 3606793 - DNA, 25 bp, Homo sapien
ctgcaaactggaaagtgggagtttt

SEQ ID NO: 3606794 - DNA, 25 bp, Homo sapien
aaattcttccaagacgagaaagagg

SEQ ID NO: 3606795 - DNA, 25 bp, Homo sapien
tcaaagaatatagtgagcagactgc

SEQ ID NO: 3606796 - DNA, 25 bp, Homo sapien
gaggatctccttacactggtatgca

SEQ ID NO: 3606797 - DNA, 25 bp, Homo sapien
ctggtatgcagatgaacatacagta

SEQ ID NO: 3606798 - DNA, 25 bp, Homo sapien
atcctcggatgtcagtagtgtgctc

SEQ ID NO: 3606799 - DNA, 25 bp, Homo sapien
tgtcagtagtgtgctcattgtttgt

SEQ ID NO: 3606800 - DNA, 25 bp, Homo sapien
cagtagtgtgctcattgtttgtcaa

SEQ ID NO: 3606801 - DNA, 25 bp, Homo sapien
cggatgtcagtagtgtgctcattgt

SEQ ID NO: 3606802 - DNA, 25 bp, Homo sapien
taaattcacaggatagtgcaaccat

SEQ ID NO: 3606803 - DNA, 25 bp, Homo sapien
taactgaacatttttgttccgactg

SEQ ID NO: 3606804 - DNA, 25 bp, Homo sapien
tgaactgtggtagctctacttagcc

SEQ ID NO: 3606805 - DNA, 25 bp, Homo sapien
gacaaatatttagcccgaacgagga

SEQ ID NO: 3606806 - DNA, 25 bp, Homo sapien
ccatcttagtggatacgtggtatct

SEQ ID NO: 3606807 - DNA, 25 bp, Homo sapien
aaattctctctcaccagcaatgcca

SEQ ID NO: 3606808 - DNA, 25 bp, Homo sapien
gaaatgacaaagctgctgcatcatt

SEQ ID NO: 3606809 - DNA, 25 bp, Homo sapien
tatcttgggtttatacctaccagtg

SEQ ID NO: 3606810 - DNA, 25 bp, Homo sapien
cctataagcagcatgcgtttccaga

SEQ ID NO: 3606811 - DNA, 25 bp, Homo sapien
ctataagcagcatgcgtttccagat

SEQ ID NO: 3606812 - DNA, 25 bp, Homo sapien
tataagcagcatgcgtttccagatt

SEQ ID NO: 3606813 - DNA, 25 bp, Homo sapien
ataagcagcatgcgtttccagattc

SEQ ID NO: 3606814 - DNA, 25 bp, Homo sapien
ttcaaaaagttatcactaggtcagg

SEQ ID NO: 3606815 - DNA, 25 bp, Homo sapien
agagaagcagggcttttcactgtgc

SEQ ID NO: 3606816 - DNA, 25 bp, Homo sapien
gctttacccagcagaaatggttgtc

SEQ ID NO: 3606817 - DNA, 25 bp, Homo sapien
tgcctaggatgctaaaggatcaagg

SEQ ID NO: 3606818 - DNA, 25 bp, Homo sapien
ctgcactcacccaaaagctagattt

SEQ ID NO: 3606819 - DNA, 25 bp, Homo sapien
cactcacccaaaagctagattttta

SEQ ID NO: 3606820 - DNA, 25 bp, Homo sapien
gcactcacccaaaagctagattttt

SEQ ID NO: 3606821 - DNA, 25 bp, Homo sapien
tgcactcacccaaaagctagatttt

SEQ ID NO: 3606822 - DNA, 25 bp, Homo sapien
gaatatatactttccaggttgttga

SEQ ID NO: 3606823 - DNA, 25 bp, Homo sapien
ccattatggcaagtaaaaaagaatg

SEQ ID NO: 3606824 - DNA, 25 bp, Homo sapien
tccctcttctaaacaacattgcagt

SEQ ID NO: 3606825 - DNA, 25 bp, Homo sapien
cattgaaatcatgcctacctagtcc

SEQ ID NO: 3606826 - DNA, 25 bp, Homo sapien
gtgaataataaaatctatctgcaat

SEQ ID NO: 3606827 - DNA, 25 bp, Homo sapien
tactgtgaataataaaatctatctg

SEQ ID NO: 3606828 - DNA, 25 bp, Homo sapien
ctgtgaataataaaatctatctgca

SEQ ID NO: 3606829 - DNA, 25 bp, Homo sapien
gaataataaaatctatctgcaatta

SEQ ID NO: 3606830 - DNA, 25 bp, Homo sapien
taatgcacagttctgtcatgaagcc

SEQ ID NO: 3606831 - DNA, 25 bp, Homo sapien
caaagtagctttcaggttcaagatt

SEQ ID NO: 3606832 - DNA, 25 bp, Homo sapien
tgccaggaccagctccaaagtgatt

SEQ ID NO: 3606833 - DNA, 25 bp, Homo sapien
tataaaagtaacattagatcccatc

SEQ ID NO: 3606834 - DNA, 25 bp, Homo sapien
aagggacagcccttaagtaggctga

SEQ ID NO: 3606835 - DNA, 25 bp, Homo sapien
taaggtccatctgggcaatagctcc

SEQ ID NO: 3606836 - DNA, 25 bp, Homo sapien
caattggacacccttaagggacagc

SEQ ID NO: 3606837 - DNA, 25 bp, Homo sapien
tcattctacacaataagcctgcatc

SEQ ID NO: 3606838 - DNA, 25 bp, Homo sapien
tctgccttaagcatacacgccgtgt

SEQ ID NO: 3606839 - DNA, 25 bp, Homo sapien
gaaaagcttgactcaggcagatctg

SEQ ID NO: 3606840 - DNA, 25 bp, Homo sapien
tgaagtccggatttgccagcaatga

SEQ ID NO: 3606841 - DNA, 25 bp, Homo sapien
gaattgaccaagctgcatgtgccca

SEQ ID NO: 3606842 - DNA, 25 bp, Homo sapien
ccatgtgttagtactgagagaagct

SEQ ID NO: 3606843 - DNA, 25 bp, Homo sapien
gaagctgtttgggatttactgagga

SEQ ID NO: 3606844 - DNA, 25 bp, Homo sapien
agtcccaacgactgtggcactccag

SEQ ID NO: 3606845 - DNA, 25 bp, Homo sapien
gcaaggtatagctgaacaactacca

SEQ ID NO: 3606846 - DNA, 25 bp, Homo sapien
tgttttcaatgatgccaggcagcac

SEQ ID NO: 3606847 - DNA, 25 bp, Homo sapien
tttttaatgttttcaatgatgccag

SEQ ID NO: 3606848 - DNA, 25 bp, Homo sapien
ccatgcccagtcctcaaatactttt

SEQ ID NO: 3606849 - DNA, 25 bp, Homo sapien
atgcccagtcctcaaatacttttta

SEQ ID NO: 3606850 - DNA, 25 bp, Homo sapien
ctctcaattgggcacttagggaaac

SEQ ID NO: 3606851 - DNA, 25 bp, Homo sapien
taatagtaattgtccagatctctca

SEQ ID NO: 3606852 - DNA, 25 bp, Homo sapien
gaaacaatccttctcactgctcaat

SEQ ID NO: 3606853 - DNA, 25 bp, Homo sapien
cagtcaacaaaaggttctctgtcca

SEQ ID NO: 3606854 - DNA, 25 bp, Homo sapien
taaaactttgtataaggtcaggcac

SEQ ID NO: 3606855 - DNA, 25 bp, Homo sapien
ttctaagttaaagtcagaaggccat

SEQ ID NO: 3606856 - DNA, 25 bp, Homo sapien
cttttacactaacctacagaagagc

SEQ ID NO: 3606857 - DNA, 25 bp, Homo sapien
tataatcctagataggctgggaccc

SEQ ID NO: 3606858 - DNA, 25 bp, Homo sapien
cattaacccatgtccgtagcacgct

SEQ ID NO: 3606859 - DNA, 25 bp, Homo sapien
ggagtcatccacagtcattcgagca

SEQ ID NO: 3606860 - DNA, 25 bp, Homo sapien
cattcgagcagtttctacacgagag

SEQ ID NO: 3606861 - DNA, 25 bp, Homo sapien
gtcagagcacattgtcagaacccca

SEQ ID NO: 3606862 - DNA, 25 bp, Homo sapien
cgcaacatagaaagtcaccctgtga

SEQ ID NO: 3606863 - DNA, 25 bp, Homo sapien
acattcatcaactagagctgcccca

SEQ ID NO: 3606864 - DNA, 25 bp, Homo sapien
gtccttgtgtcaaaacgcaacatag

SEQ ID NO: 3606865 - DNA, 25 bp, Homo sapien
tatctcctctgagacgggttaagag

SEQ ID NO: 3606866 - DNA, 25 bp, Homo sapien
tgcagactgcagagcattatataaa

SEQ ID NO: 3606867 - DNA, 25 bp, Homo sapien
tttaaaagtgctctgcagactgcag

SEQ ID NO: 3606868 - DNA, 25 bp, Homo sapien
taggtgattattaaccaagatgacg

SEQ ID NO: 3606869 - DNA, 25 bp, Homo sapien
ggtgagtcaagtgcacagtcagacc

SEQ ID NO: 3606870 - DNA, 25 bp, Homo sapien
agacagaagacagtgacggtgagaa

SEQ ID NO: 3606871 - DNA, 25 bp, Homo sapien
cagaagacagtgacggtgagaaaca

SEQ ID NO: 3606872 - DNA, 25 bp, Homo sapien
aagacagtgacggtgagaaacatgc

SEQ ID NO: 3606873 - DNA, 25 bp, Homo sapien
gacagtgacggtgagaaacatgctg

SEQ ID NO: 3606874 - DNA, 25 bp, Homo sapien
ttttctagatcatacttttggtgtc

SEQ ID NO: 3606875 - DNA, 25 bp, Homo sapien
tattctagacagtagtctttattgg

SEQ ID NO: 3606876 - DNA, 25 bp, Homo sapien
tctttagcagaccaaaatgttttag

SEQ ID NO: 3606877 - DNA, 25 bp, Homo sapien
cttcagtgaaatgttccttaacatc

SEQ ID NO: 3606878 - DNA, 25 bp, Homo sapien
taaatgatggtgaatgttatacaac

SEQ ID NO: 3606879 - DNA, 25 bp, Homo sapien
tggtgaatgttatacaactttgtga

SEQ ID NO: 3606880 - DNA, 25 bp, Homo sapien
aaccactgaattttacaggtatgta

SEQ ID NO: 3606881 - DNA, 25 bp, Homo sapien
ccactgaattttacaggtatgtaag

SEQ ID NO: 3606882 - DNA, 25 bp, Homo sapien
tcagcacagcgtgactgcctatcag

SEQ ID NO: 3606883 - DNA, 25 bp, Homo sapien
gtcaggccacattctatcagcacag

SEQ ID NO: 3606884 - DNA, 25 bp, Homo sapien
taggaatactatagctgtgcactgg

SEQ ID NO: 3606885 - DNA, 25 bp, Homo sapien
tcgggaccgtatatatctgctcaaa

SEQ ID NO: 3606886 - DNA, 25 bp, Homo sapien
agctttggctatcccccatctgtga

SEQ ID NO: 3606887 - DNA, 25 bp, Homo sapien
gcaaattaaaacttcctgctattcc

SEQ ID NO: 3606888 - DNA, 25 bp, Homo sapien
gttcaacaatcactccaaactaagt

SEQ ID NO: 3606889 - DNA, 25 bp, Homo sapien
taatgaagacctaaattagctgaga

SEQ ID NO: 3606890 - DNA, 25 bp, Homo sapien
caaaatgtgtttattgagatggttt

SEQ ID NO: 3606891 - DNA, 25 bp, Homo sapien
aatgtgtttattgagatggtttccc

SEQ ID NO: 3606892 - DNA, 25 bp, Homo sapien
ggtttcccactcatcttgattcaga

SEQ ID NO: 3606893 - DNA, 25 bp, Homo sapien
atggtttcccactcatcttgattca

SEQ ID NO: 3606894 - DNA, 25 bp, Homo sapien
tggagcagccaacacacaaaactac

SEQ ID NO: 3606895 - DNA, 25 bp, Homo sapien
cagtggagcagccaacacacaaaac

SEQ ID NO: 3606896 - DNA, 25 bp, Homo sapien
tcctcctgaaggaacatccttctgt

SEQ ID NO: 3606897 - DNA, 25 bp, Homo sapien
catccttctgtaagccttgcttttc

SEQ ID NO: 3606898 - DNA, 25 bp, Homo sapien
gtgcatggctaaagaccgtgatgat

SEQ ID NO: 3606899 - DNA, 25 bp, Homo sapien
gcatggctaaagaccgtgatgattt

SEQ ID NO: 3606900 - DNA, 25 bp, Homo sapien
ggctaaagaccgtgatgattttata

SEQ ID NO: 3606901 - DNA, 25 bp, Homo sapien
catggctaaagaccgtgatgatttt

SEQ ID NO: 3606902 - DNA, 25 bp, Homo sapien
gggatgaaggagaccctttgcaaga

SEQ ID NO: 3606903 - DNA, 25 bp, Homo sapien
ggagaccctttgcaagaggcatgtt

SEQ ID NO: 3606904 - DNA, 25 bp, Homo sapien
gaaggagaccctttgcaagaggcat

SEQ ID NO: 3606905 - DNA, 25 bp, Homo sapien
atgaaggagaccctttgcaagaggc

SEQ ID NO: 3606906 - DNA, 25 bp, Homo sapien
gacccattctgactacctaaaggag

SEQ ID NO: 3606907 - DNA, 25 bp, Homo sapien
cctaaaggagagtcagcattctgac

SEQ ID NO: 3606908 - DNA, 25 bp, Homo sapien
aatccaaggtagtaatcatcctggg

SEQ ID NO: 3606909 - DNA, 25 bp, Homo sapien
tcctgaaagttgagggaaagctgag

SEQ ID NO: 3606910 - DNA, 25 bp, Homo sapien
tcaaggccatagcaaacacagcatg

SEQ ID NO: 3606911 - DNA, 25 bp, Homo sapien
tgtgttgcctggtctttatccagaa

SEQ ID NO: 3606912 - DNA, 25 bp, Homo sapien
attactctaggaaaattgtgttgcc

SEQ ID NO: 3606913 - DNA, 25 bp, Homo sapien
gagagttaggaaatcttctaaagga

SEQ ID NO: 3606914 - DNA, 25 bp, Homo sapien
tgaacccgctcaaccaaacaaagaa

SEQ ID NO: 3606915 - DNA, 25 bp, Homo sapien
taagtgaatttgcatatcagaccat

SEQ ID NO: 3606916 - DNA, 25 bp, Homo sapien
tatagaatgactgacctgccttggc

SEQ ID NO: 3606917 - DNA, 25 bp, Homo sapien
gaaacatcctgtatagagactctcc

SEQ ID NO: 3606918 - DNA, 25 bp, Homo sapien
catggaagactggtgatgaataaac

SEQ ID NO: 3606919 - DNA, 25 bp, Homo sapien
gggatccacaagacactggtacttc

SEQ ID NO: 3606920 - DNA, 25 bp, Homo sapien
taaatttgagaaaggctacatgccc

SEQ ID NO: 3606921 - DNA, 25 bp, Homo sapien
caagatcacagactactctggaagt

SEQ ID NO: 3606922 - DNA, 25 bp, Homo sapien
gcaatgagggatactagtgttctac

SEQ ID NO: 3606923 - DNA, 25 bp, Homo sapien
cccactcaatgaggcttaagaggct

SEQ ID NO: 3606924 - DNA, 25 bp, Homo sapien
caacattgcgtgactataacaaagc

SEQ ID NO: 3606925 - DNA, 25 bp, Homo sapien
cagcctggatacttacactgcagtc

SEQ ID NO: 3606926 - DNA, 25 bp, Homo sapien
aactgttcagccatagggtttcatg

SEQ ID NO: 3606927 - DNA, 25 bp, Homo sapien
cagtcaaactatccgatactaaggc

SEQ ID NO: 3606928 - DNA, 25 bp, Homo sapien
tatgattcatttagacaagccaaga

SEQ ID NO: 3606929 - DNA, 25 bp, Homo sapien
aagtggtggtatacgcttgttgtcc

SEQ ID NO: 3606930 - DNA, 25 bp, Homo sapien
tggtaataacatcggcaaatcagcc

SEQ ID NO: 3606931 - DNA, 25 bp, Homo sapien
gaattagggtgtcctgacttccagt

SEQ ID NO: 3606932 - DNA, 25 bp, Homo sapien
taacaagcatgacacaacactgagg

SEQ ID NO: 3606933 - DNA, 25 bp, Homo sapien
gagctaaactaccactcaagggtca

SEQ ID NO: 3606934 - DNA, 25 bp, Homo sapien
caactagacaatgagagaaagccct

SEQ ID NO: 3606935 - DNA, 25 bp, Homo sapien
tatgccatttatcggtctccctgaa

SEQ ID NO: 3606936 - DNA, 25 bp, Homo sapien
tagtcacacacggtggtactcgcct

SEQ ID NO: 3606937 - DNA, 25 bp, Homo sapien
tactatattggtgaggcaaagtggc

SEQ ID NO: 3606938 - DNA, 25 bp, Homo sapien
aaacacaatcgatgaagacaatgca

SEQ ID NO: 3606939 - DNA, 25 bp, Homo sapien
gtagttgattccaaccacctccata

SEQ ID NO: 3606940 - DNA, 25 bp, Homo sapien
ggataaattctagggagggatataa

SEQ ID NO: 3606941 - DNA, 25 bp, Homo sapien
gatactttccatctggacgcagtgg

SEQ ID NO: 3606942 - DNA, 25 bp, Homo sapien
gggttgtcaactctttaataatata

SEQ ID NO: 3606943 - DNA, 25 bp, Homo sapien
ccctcagtcacccaggctggagtgc

SEQ ID NO: 3606944 - DNA, 25 bp, Homo sapien
ccgagtctccctcagtcacccaggc

SEQ ID NO: 3606945 - DNA, 25 bp, Homo sapien
gagactgcagcgaacctaaaggtag

SEQ ID NO: 3606946 - DNA, 25 bp, Homo sapien
aagtcttatagcagcctttgtggcc

SEQ ID NO: 3606947 - DNA, 25 bp, Homo sapien
tattaatatcatagcagtaggcagg

SEQ ID NO: 3606948 - DNA, 25 bp, Homo sapien
gatagtgccactggactcgactggg

SEQ ID NO: 3606949 - DNA, 25 bp, Homo sapien
agcacatctgattgtttactgggtc

SEQ ID NO: 3606950 - DNA, 25 bp, Homo sapien
ttactgggtcccactgtgtactaca

SEQ ID NO: 3606951 - DNA, 25 bp, Homo sapien
acagcacatctgattgtttactggg

SEQ ID NO: 3606952 - DNA, 25 bp, Homo sapien
tacatactgatgacacaaagatgat

SEQ ID NO: 3606953 - DNA, 25 bp, Homo sapien
ggtgcagtcacagaacagtcagtag

SEQ ID NO: 3606954 - DNA, 25 bp, Homo sapien
taatgagggactaactaatgttgcc

SEQ ID NO: 3606955 - DNA, 25 bp, Homo sapien
tgcatatactgtaggacccatgggt

SEQ ID NO: 3606956 - DNA, 25 bp, Homo sapien
ggcaggtacagcaacagcaggtcag

SEQ ID NO: 3606957 - DNA, 25 bp, Homo sapien
taaatacaggctaaatgcaggcttc

SEQ ID NO: 3606958 - DNA, 25 bp, Homo sapien
tcaacaatgaaccatctaagccagg

SEQ ID NO: 3606959 - DNA, 25 bp, Homo sapien
tgccttcaagaaaagtgccaacggg

SEQ ID NO: 3606960 - DNA, 25 bp, Homo sapien
tgccaacgggaggattttcccagaa

SEQ ID NO: 3606961 - DNA, 25 bp, Homo sapien
gattgctgactcaaagccatcttgg

SEQ ID NO: 3606962 - DNA, 25 bp, Homo sapien
caatgtcagggtcattcatgtactg

SEQ ID NO: 3606963 - DNA, 25 bp, Homo sapien
aaactaaggtcaacatccttcaggg

SEQ ID NO: 3606964 - DNA, 25 bp, Homo sapien
aagtacccctgttaaagagcacagc

SEQ ID NO: 3606965 - DNA, 25 bp, Homo sapien
aaaacgaatgttaaacctggcactg

SEQ ID NO: 3606966 - DNA, 25 bp, Homo sapien
tgaaaacaatccatgaaaacgaatg

SEQ ID NO: 3606967 - DNA, 25 bp, Homo sapien
gagggcatggaaactttacagtgac

SEQ ID NO: 3606968 - DNA, 25 bp, Homo sapien
aaaatattctatacagcggagttga

SEQ ID NO: 3606969 - DNA, 25 bp, Homo sapien
gctccttaaggtctataagatcaag

SEQ ID NO: 3606970 - DNA, 25 bp, Homo sapien
gaatgctatccccatattactgtca

SEQ ID NO: 3606971 - DNA, 25 bp, Homo sapien
taaagatgatccgaacatccactgg

SEQ ID NO: 3606972 - DNA, 25 bp, Homo sapien
tcatgtcctttatgaaatgacccca

SEQ ID NO: 3606973 - DNA, 25 bp, Homo sapien
tcaaaggactacatgaagatcgggc

SEQ ID NO: 3606974 - DNA, 25 bp, Homo sapien
taacactaggataaactgcaagctc

SEQ ID NO: 3606975 - DNA, 25 bp, Homo sapien
tcaaagggataggtttgcaagggcc

SEQ ID NO: 3606976 - DNA, 25 bp, Homo sapien
tgcaagctcataaggacagaggcca

SEQ ID NO: 3606977 - DNA, 25 bp, Homo sapien
taaatgtggcaatataatgaggcag

SEQ ID NO: 3606978 - DNA, 25 bp, Homo sapien
aaatgtggcaatataatgaggcagt

SEQ ID NO: 3606979 - DNA, 25 bp, Homo sapien
ggacctagcatttataagcccaaat

SEQ ID NO: 3606980 - DNA, 25 bp, Homo sapien
taacaattccctacaatggtggctg

SEQ ID NO: 3606981 - DNA, 25 bp, Homo sapien
tcctcaaactttacagtgggagaag

SEQ ID NO: 3606982 - DNA, 25 bp, Homo sapien
cagtaaagtctagttggacctagca

SEQ ID NO: 3606983 - DNA, 25 bp, Homo sapien
taaatgagcacaatgcagaccatcc

SEQ ID NO: 3606984 - DNA, 25 bp, Homo sapien
aacttttctgaaccaaggactgagt

SEQ ID NO: 3606985 - DNA, 25 bp, Homo sapien
ccatcacaagccttggaagagctct

SEQ ID NO: 3606986 - DNA, 25 bp, Homo sapien
taccgttgcagggttccatcacaag

SEQ ID NO: 3606987 - DNA, 25 bp, Homo sapien
ctggaatgacatgacaggacatgaa

SEQ ID NO: 3606988 - DNA, 25 bp, Homo sapien
aaacagcagctaatgctacctccat

SEQ ID NO: 3606989 - DNA, 25 bp, Homo sapien
cattcttgctccctatggcaagcag

SEQ ID NO: 3606990 - DNA, 25 bp, Homo sapien
tgcacccggctgccttaaacataat

SEQ ID NO: 3606991 - DNA, 25 bp, Homo sapien
caggaaagtctgaaagtcacaaaac

SEQ ID NO: 3606992 - DNA, 25 bp, Homo sapien
aatgtgcaaagggaagaacccctgt

SEQ ID NO: 3606993 - DNA, 25 bp, Homo sapien
cagttaagactagcattgaggaaaa

SEQ ID NO: 3606994 - DNA, 25 bp, Homo sapien
tgcaagcacagtaaatctcaagggt

SEQ ID NO: 3606995 - DNA, 25 bp, Homo sapien
gcttcccaaactgtggtataatata

SEQ ID NO: 3606996 - DNA, 25 bp, Homo sapien
gactttcagaatggattaagtgttt

SEQ ID NO: 3606997 - DNA, 25 bp, Homo sapien
taataaaggagattatagagcttcc

SEQ ID NO: 3606998 - DNA, 25 bp, Homo sapien
tggtataatatatttaagagtgctt

SEQ ID NO: 3606999 - DNA, 25 bp, Homo sapien
tacagtcaagtaggaataagccatt

SEQ ID NO: 3607000 - DNA, 25 bp, Homo sapien
tagagacctggagaaaaacctagac

SEQ ID NO: 3607001 - DNA, 25 bp, Homo sapien
tacattgccctcatgagacttacag

SEQ ID NO: 3607002 - DNA, 25 bp, Homo sapien
tcaagctgagtgaattggcatggcc

SEQ ID NO: 3607003 - DNA, 25 bp, Homo sapien
agaactacagccacttaccaccatc

SEQ ID NO: 3607004 - DNA, 25 bp, Homo sapien
ccatccaccgctcacttatttttat

SEQ ID NO: 3607005 - DNA, 25 bp, Homo sapien
tggggcctcactactaccgtgctgc

SEQ ID NO: 3607006 - DNA, 25 bp, Homo sapien
tagtttactgcactgtaatctggaa

SEQ ID NO: 3607007 - DNA, 25 bp, Homo sapien
gaccctagaatggaacctgacaaaa

SEQ ID NO: 3607008 - DNA, 25 bp, Homo sapien
ctatgactttctagggagctggcac

SEQ ID NO: 3607009 - DNA, 25 bp, Homo sapien
cacttgtttgctaaggtaccatggc

SEQ ID NO: 3607010 - DNA, 25 bp, Homo sapien
tgaccactctatctgaggcagcagc

SEQ ID NO: 3607011 - DNA, 25 bp, Homo sapien
tcagctctgacctgcagactggagg

SEQ ID NO: 3607012 - DNA, 25 bp, Homo sapien
cagctctgacctgcagactggaggc

SEQ ID NO: 3607013 - DNA, 25 bp, Homo sapien
agctctgacctgcagactggaggcc

SEQ ID NO: 3607014 - DNA, 25 bp, Homo sapien
gatctcgtagtagccgatacgggcg

SEQ ID NO: 3607015 - DNA, 25 bp, Homo sapien
ttgcccttgccgatggtgcggtcga

SEQ ID NO: 3607016 - DNA, 25 bp, Homo sapien
gccttggtgacgaggtgcgtggccc

SEQ ID NO: 3607017 - DNA, 25 bp, Homo sapien
cgatggtgcggtcgatctcgtagta

SEQ ID NO: 3607018 - DNA, 25 bp, Homo sapien
gccgcaggggacacggcagcggggg

SEQ ID NO: 3607019 - DNA, 25 bp, Homo sapien
ggccgcaggggacacggcagcgggg

SEQ ID NO: 3607020 - DNA, 25 bp, Homo sapien
ggtcacgtgccgacgcgcgtcactg

SEQ ID NO: 3607021 - DNA, 25 bp, Homo sapien
tggcaaccgcgggtcacgtgccgac

SEQ ID NO: 3607022 - DNA, 25 bp, Homo sapien
catggcaaccgcgggtcacgtgccg

SEQ ID NO: 3607023 - DNA, 25 bp, Homo sapien
cgctttcgccgaccggcgcccggct

SEQ ID NO: 3607024 - DNA, 25 bp, Homo sapien
cagcgttgtcccactttagcccttg

SEQ ID NO: 3607025 - DNA, 25 bp, Homo sapien
aatgcaggaatagctacactcttga

SEQ ID NO: 3607026 - DNA, 25 bp, Homo sapien
gcccttgaggccacaaatgcaggaa

SEQ ID NO: 3607027 - DNA, 25 bp, Homo sapien
tcaccaaaaataccagcgttgtccc

SEQ ID NO: 3607028 - DNA, 25 bp, Homo sapien
caatggtgtagctatgagcttgtaa

SEQ ID NO: 3607029 - DNA, 25 bp, Homo sapien
attcaaacaatggtgtagctatgag

SEQ ID NO: 3607030 - DNA, 25 bp, Homo sapien
aaacaatggtgtagctatgagcttg

SEQ ID NO: 3607031 - DNA, 25 bp, Homo sapien
tcaaacaatggtgtagctatgagct

SEQ ID NO: 3607032 - DNA, 25 bp, Homo sapien
cctgctatgttactcctcattccaa

SEQ ID NO: 3607033 - DNA, 25 bp, Homo sapien
ggacctacaggcttgtcatcaggga

SEQ ID NO: 3607034 - DNA, 25 bp, Homo sapien
gagtccccacagaaagtgtcccgtg

SEQ ID NO: 3607035 - DNA, 25 bp, Homo sapien
caagtcatggagctagtaagtgccc

SEQ ID NO: 3607036 - DNA, 25 bp, Homo sapien
gaataaacctagatccgtgggactc

SEQ ID NO: 3607037 - DNA, 25 bp, Homo sapien
gactggaaattgagctccaccctcc

SEQ ID NO: 3607038 - DNA, 25 bp, Homo sapien
tcagcctatagactggaaattgagc

SEQ ID NO: 3607039 - DNA, 25 bp, Homo sapien
tccagtcagttaggtattctctagg

SEQ ID NO: 3607040 - DNA, 25 bp, Homo sapien
gtcagttaggtattctctaggccag

SEQ ID NO: 3607041 - DNA, 25 bp, Homo sapien
taaagccgcatgtgtcagagggaag

SEQ ID NO: 3607042 - DNA, 25 bp, Homo sapien
gccaagactcaagctgcgggtagat

SEQ ID NO: 3607043 - DNA, 25 bp, Homo sapien
gagtgcagtagacatcagggacaga

SEQ ID NO: 3607044 - DNA, 25 bp, Homo sapien
gaaaatacctgcacgatgacttcgc

SEQ ID NO: 3607045 - DNA, 25 bp, Homo sapien
ggcattcaggataagggccgccttc

SEQ ID NO: 3607046 - DNA, 25 bp, Homo sapien
gaaaatcgtgcaagtcggttactcc

SEQ ID NO: 3607047 - DNA, 25 bp, Homo sapien
taatggacaacaaagcttcccctgg

SEQ ID NO: 3607048 - DNA, 25 bp, Homo sapien
cataaattatggaggtgctggaccg

SEQ ID NO: 3607049 - DNA, 25 bp, Homo sapien
tctggatcatttatacctttatgaa

SEQ ID NO: 3607050 - DNA, 25 bp, Homo sapien
gatattaaggctacaatgaactata

SEQ ID NO: 3607051 - DNA, 25 bp, Homo sapien
gagcccaggatattaaggctacaat

SEQ ID NO: 3607052 - DNA, 25 bp, Homo sapien
gaagtataccacagttgatttgccc

SEQ ID NO: 3607053 - DNA, 25 bp, Homo sapien
cacatttttgacctaggagccctgt

SEQ ID NO: 3607054 - DNA, 25 bp, Homo sapien
gccctgttgctggaagtatagtctc

SEQ ID NO: 3607055 - DNA, 25 bp, Homo sapien
gtttcccattccatagcacctgaca

SEQ ID NO: 3607056 - DNA, 25 bp, Homo sapien
tgctgttcatattcggagttctggt

SEQ ID NO: 3607057 - DNA, 25 bp, Homo sapien
gcttactgatgcgtgctaagaccga

SEQ ID NO: 3607058 - DNA, 25 bp, Homo sapien
caccgtgaggctacttgaactgtca

SEQ ID NO: 3607059 - DNA, 25 bp, Homo sapien
aaatttgtattccttcgcccacgca

SEQ ID NO: 3607060 - DNA, 25 bp, Homo sapien
cagtccatgtgttctcggtcgccgt

SEQ ID NO: 3607061 - DNA, 25 bp, Homo sapien
caagctcctaaatccgtgtgggtgc

SEQ ID NO: 3607062 - DNA, 25 bp, Homo sapien
gaaatgaggagcatgtccaagctcc

SEQ ID NO: 3607063 - DNA, 25 bp, Homo sapien
agaagtgagttagggcctcttgaaa

SEQ ID NO: 3607064 - DNA, 25 bp, Homo sapien
agctgactggacctccccattggaa

SEQ ID NO: 3607065 - DNA, 25 bp, Homo sapien
aacagcgagctggtcaacatctaca

SEQ ID NO: 3607066 - DNA, 25 bp, Homo sapien
tttgagcgcacctacgtggacgagg

SEQ ID NO: 3607067 - DNA, 25 bp, Homo sapien
cagaaagacgccgagtttgagcgca

SEQ ID NO: 3607068 - DNA, 25 bp, Homo sapien
ggcccaagaacgtctcgcagaaaga

SEQ ID NO: 3607069 - DNA, 25 bp, Homo sapien
tctttgacgaccacgacatctggca

SEQ ID NO: 3607070 - DNA, 25 bp, Homo sapien
gctgacactggatgacgacctggat

SEQ ID NO: 3607071 - DNA, 25 bp, Homo sapien
gagggagcacaaccgggactgcatc

SEQ ID NO: 3607072 - DNA, 25 bp, Homo sapien
catgttcgggtccttcctggtaagc

SEQ ID NO: 3607073 - DNA, 25 bp, Homo sapien
tgggcccttcgcttcacctcaaggg

SEQ ID NO: 3607074 - DNA, 25 bp, Homo sapien
tcaaggggccctgagctcctttgtg

SEQ ID NO: 3607075 - DNA, 25 bp, Homo sapien
tgtgcagcgggacaagatctatgtc

SEQ ID NO: 3607076 - DNA, 25 bp, Homo sapien
ttgtgtcatagaccggtcactctgt

SEQ ID NO: 3607077 - DNA, 25 bp, Homo sapien
ttcaggaagggatgtgctgtttccc

SEQ ID NO: 3607078 - DNA, 25 bp, Homo sapien
tcctagcctcgctctaggacccagg

SEQ ID NO: 3607079 - DNA, 25 bp, Homo sapien
tgtttccctctacgtgcccagtcct

SEQ ID NO: 3607080 - DNA, 25 bp, Homo sapien
gggctggcttctaagtttccgtcca

SEQ ID NO: 3607081 - DNA, 25 bp, Homo sapien
tggatcttttctcagagcgtctcca

SEQ ID NO: 3607082 - DNA, 25 bp, Homo sapien
tctcccaaacttgtttttatagctc

SEQ ID NO: 3607083 - DNA, 25 bp, Homo sapien
ccaaacttgtttttatagctctgct

SEQ ID NO: 3607084 - DNA, 25 bp, Homo sapien
tccatgctatggttgcatttccgtt

SEQ ID NO: 3607085 - DNA, 25 bp, Homo sapien
tccgctcagcgtgcaggccgaggca

SEQ ID NO: 3607086 - DNA, 25 bp, Homo sapien
gtgctccctgatgcggcgtttataa

SEQ ID NO: 3607087 - DNA, 25 bp, Homo sapien
ggcgtttataatccgctcagcgtgc

SEQ ID NO: 3607088 - DNA, 25 bp, Homo sapien
caggcccaagcagtgctccctgatg

SEQ ID NO: 3607089 - DNA, 25 bp, Homo sapien
gaagccaggtacgagcaagatgaga

SEQ ID NO: 3607090 - DNA, 25 bp, Homo sapien
tacgagcaagatgagagtgggttat

SEQ ID NO: 3607091 - DNA, 25 bp, Homo sapien
agagtgggttatctctggagtgaca

SEQ ID NO: 3607092 - DNA, 25 bp, Homo sapien
gatccctgaagccaggtacgagcaa

SEQ ID NO: 3607093 - DNA, 25 bp, Homo sapien
gggatgataccagcctcctgagcct

SEQ ID NO: 3607094 - DNA, 25 bp, Homo sapien
cctgagcagggtggtccaattgaaa

SEQ ID NO: 3607095 - DNA, 25 bp, Homo sapien
ccaattgaaagggtgggtctgacca

SEQ ID NO: 3607096 - DNA, 25 bp, Homo sapien
tagaccctcttattgacactgccca

SEQ ID NO: 3607097 - DNA, 25 bp, Homo sapien
ccatgtggccttgaggaagacgcac

SEQ ID NO: 3607098 - DNA, 25 bp, Homo sapien
tgaggaagacgcactcggggcctca

SEQ ID NO: 3607099 - DNA, 25 bp, Homo sapien
cattcaccatgtggccttgaggaag

SEQ ID NO: 3607100 - DNA, 25 bp, Homo sapien
tgtggccttgaggaagacgcactcg

SEQ ID NO: 3607101 - DNA, 25 bp, Homo sapien
gtattcaatgagagcactgcaaagg

SEQ ID NO: 3607102 - DNA, 25 bp, Homo sapien
tcaggaaaggttggatcccatgtcc

SEQ ID NO: 3607103 - DNA, 25 bp, Homo sapien
cacactgtagctgtgagtattcaat

SEQ ID NO: 3607104 - DNA, 25 bp, Homo sapien
ggatgtaattacaccctcacactgt

SEQ ID NO: 3607105 - DNA, 25 bp, Homo sapien
gcacggtgtcccactctggcgggtc

SEQ ID NO: 3607106 - DNA, 25 bp, Homo sapien
agcacggtgtcccactctggcgggt

SEQ ID NO: 3607107 - DNA, 25 bp, Homo sapien
cacggtgtcccactctggcgggtcc

SEQ ID NO: 3607108 - DNA, 25 bp, Homo sapien
gagcacggtgtcccactctggcggg

SEQ ID NO: 3607109 - DNA, 25 bp, Homo sapien
caaagagtggagacggaaggcctgt

SEQ ID NO: 3607110 - DNA, 25 bp, Homo sapien
gtccttctgacaagcagccccttcc

SEQ ID NO: 3607111 - DNA, 25 bp, Homo sapien
gccacagaactcttgtattccagtc

SEQ ID NO: 3607112 - DNA, 25 bp, Homo sapien
gagacggaaggcctgtccttctgac

SEQ ID NO: 3607113 - DNA, 25 bp, Homo sapien
aatgacgggcacttcgatgagtccg

SEQ ID NO: 3607114 - DNA, 25 bp, Homo sapien
tggagtgggcagcaaagaactgaca

SEQ ID NO: 3607115 - DNA, 25 bp, Homo sapien
gagtccgtgtgaactctgttccgtg

SEQ ID NO: 3607116 - DNA, 25 bp, Homo sapien
cataaggaaacagacgcaaggagga

SEQ ID NO: 3607117 - DNA, 25 bp, Homo sapien
ccctcccaacctctgacccctctga

SEQ ID NO: 3607118 - DNA, 25 bp, Homo sapien
gagccgggggagtgcgctcctgcgt

SEQ ID NO: 3607119 - DNA, 25 bp, Homo sapien
tgcgtccatcctcagaccagcgtgt

SEQ ID NO: 3607120 - DNA, 25 bp, Homo sapien
caggggatgggttcggcttcctttg

SEQ ID NO: 3607121 - DNA, 25 bp, Homo sapien
ctgtgacaagtgtctaggatggccg

SEQ ID NO: 3607122 - DNA, 25 bp, Homo sapien
tccaaagacctggtatcctctttcc

SEQ ID NO: 3607123 - DNA, 25 bp, Homo sapien
caagttcagagaggtgtctggagta

SEQ ID NO: 3607124 - DNA, 25 bp, Homo sapien
gagaccatgtgtcctgcaaagccta

SEQ ID NO: 3607125 - DNA, 25 bp, Homo sapien
gatatgccgagaataacacgccacg

SEQ ID NO: 3607126 - DNA, 25 bp, Homo sapien
aactggtttatgaagtatgtggccc

SEQ ID NO: 3607127 - DNA, 25 bp, Homo sapien
cagaggaccctgatggctttgggca

SEQ ID NO: 3607128 - DNA, 25 bp, Homo sapien
tgatgggcactaccgtggagatccc

SEQ ID NO: 3607129 - DNA, 25 bp, Homo sapien
ggcatgacaggctacggacgacctc

SEQ ID NO: 3607130 - DNA, 25 bp, Homo sapien
tcatcagttagagcggagagggcta

SEQ ID NO: 3607131 - DNA, 25 bp, Homo sapien
tcccaggccggcatgacaggctacg

SEQ ID NO: 3607132 - DNA, 25 bp, Homo sapien
gacgacctcggcagatcatcagtta

SEQ ID NO: 3607133 - DNA, 25 bp, Homo sapien
ggcaaaagcccattgaagaagaacc

SEQ ID NO: 3607134 - DNA, 25 bp, Homo sapien
aacttcttacccgaaagcatcactg

SEQ ID NO: 3607135 - DNA, 25 bp, Homo sapien
cctccttggcggcaaaagcccattg

SEQ ID NO: 3607136 - DNA, 25 bp, Homo sapien
ggatgtgggccaagtccactgtcct

SEQ ID NO: 3607137 - DNA, 25 bp, Homo sapien
gaatggataatggaggcagccgctt

SEQ ID NO: 3607138 - DNA, 25 bp, Homo sapien
gattccctagtgaagcagctcaggc

SEQ ID NO: 3607139 - DNA, 25 bp, Homo sapien
ccaagtgaccccagtgatgtttcca

SEQ ID NO: 3607140 - DNA, 25 bp, Homo sapien
caaaagctcccgtttggctggaggc

SEQ ID NO: 3607141 - DNA, 25 bp, Homo sapien
ccgtgcggtacgtctaggtgctgat

SEQ ID NO: 3607142 - DNA, 25 bp, Homo sapien
tctgtttccacttcgtctggatcct

SEQ ID NO: 3607143 - DNA, 25 bp, Homo sapien
gctgctgcaaagtggcactgattct

SEQ ID NO: 3607144 - DNA, 25 bp, Homo sapien
ccagggcgctcttgttctgggacag

SEQ ID NO: 3607145 - DNA, 25 bp, Homo sapien
cagaagacggtgaaacagcctacca

SEQ ID NO: 3607146 - DNA, 25 bp, Homo sapien
ccagaagacggtgaaacagcctacc

SEQ ID NO: 3607147 - DNA, 25 bp, Homo sapien
gacggtgaaacagcctaccagcacc

SEQ ID NO: 3607148 - DNA, 25 bp, Homo sapien
gaagacggtgaaacagcctaccagc

SEQ ID NO: 3607149 - DNA, 25 bp, Homo sapien
ctaagaactccatcccccagacagg

SEQ ID NO: 3607150 - DNA, 25 bp, Homo sapien
taagaactccatcccccagacagga

SEQ ID NO: 3607151 - DNA, 25 bp, Homo sapien
tccatcccccagacaggacagtccc

SEQ ID NO: 3607152 - DNA, 25 bp, Homo sapien
atcccccagacaggacagtcccatc

SEQ ID NO: 3607153 - DNA, 25 bp, Homo sapien
gcagcttgagtcttggccctagtac

SEQ ID NO: 3607154 - DNA, 25 bp, Homo sapien
ccgcagcttgagtcttggccctagt

SEQ ID NO: 3607155 - DNA, 25 bp, Homo sapien
cgcagcttgagtcttggccctagta

SEQ ID NO: 3607156 - DNA, 25 bp, Homo sapien
ctcaggaattttcagccccggtggg

SEQ ID NO: 3607157 - DNA, 25 bp, Homo sapien
caggaattttcagccccggtgggca

SEQ ID NO: 3607158 - DNA, 25 bp, Homo sapien
gtgatggtgtaaccatcttcctcag

SEQ ID NO: 3607159 - DNA, 25 bp, Homo sapien
gggtgatggtgtaaccatcttcctc

SEQ ID NO: 3607160 - DNA, 25 bp, Homo sapien
tttccactcatggcactctctaaca

SEQ ID NO: 3607161 - DNA, 25 bp, Homo sapien
ttccactcatggcactctctaacag

SEQ ID NO: 3607162 - DNA, 25 bp, Homo sapien
tctgtccctgatgtctactgcactc

SEQ ID NO: 3607163 - DNA, 25 bp, Homo sapien
gccattgccggaggatgccgacctg

SEQ ID NO: 3607164 - DNA, 25 bp, Homo sapien
gatgccgacctggaatgactcatcc

SEQ ID NO: 3607165 - DNA, 25 bp, Homo sapien
cggaggatgccgacctggaatgact

SEQ ID NO: 3607166 - DNA, 25 bp, Homo sapien
ttgccggaggatgccgacctggaat

SEQ ID NO: 3607167 - DNA, 25 bp, Homo sapien
tatacgtaaaaggacttgaaatgtg

SEQ ID NO: 3607168 - DNA, 25 bp, Homo sapien
gctggccgaaggatggttatacgta

SEQ ID NO: 3607169 - DNA, 25 bp, Homo sapien
atgtggtttcgacaaggactttttg

SEQ ID NO: 3607170 - DNA, 25 bp, Homo sapien
cttgaaatgtggtttcgacaaggac

SEQ ID NO: 3607171 - DNA, 25 bp, Homo sapien
caagcctgtaggtccctcgggctct

SEQ ID NO: 3607172 - DNA, 25 bp, Homo sapien
ccagcatcgcacagtggagaaggtc

SEQ ID NO: 3607173 - DNA, 25 bp, Homo sapien
gacatccctgatgacaagcctgtag

SEQ ID NO: 3607174 - DNA, 25 bp, Homo sapien
ccccagcatcgcacagtggagaagg

SEQ ID NO: 3607175 - DNA, 25 bp, Homo sapien
acactttcttactgtagtagccgtg

SEQ ID NO: 3607176 - DNA, 25 bp, Homo sapien
agtagccgtggaaacaacctgggag

SEQ ID NO: 3607177 - DNA, 25 bp, Homo sapien
cttactgtagtagccgtggaaacaa

SEQ ID NO: 3607178 - DNA, 25 bp, Homo sapien
actttcttactgtagtagccgtgga

SEQ ID NO: 3607179 - DNA, 25 bp, Homo sapien
aacatgtatgtgaggtgcagggcct

SEQ ID NO: 3607180 - DNA, 25 bp, Homo sapien
cttccagccgccagggatagccagt

SEQ ID NO: 3607181 - DNA, 25 bp, Homo sapien
ggtatgtgacgaaaggcttccagcc

SEQ ID NO: 3607182 - DNA, 25 bp, Homo sapien
ggcctagcgcttgaagaaggtatgt

SEQ ID NO: 3607183 - DNA, 25 bp, Homo sapien
ctccaagctgccgcgccgtgggtga

SEQ ID NO: 3607184 - DNA, 25 bp, Homo sapien
agctccaagctgccgcgccgtgggt

SEQ ID NO: 3607185 - DNA, 25 bp, Homo sapien
agtgatggagactgtcactgccaca

SEQ ID NO: 3607186 - DNA, 25 bp, Homo sapien
ctgccgcgccgtgggtgagtgatgg

SEQ ID NO: 3607187 - DNA, 25 bp, Homo sapien
taactgggacctcgcctatactagt

SEQ ID NO: 3607188 - DNA, 25 bp, Homo sapien
tcgcctatactagtaaatggaatgg

SEQ ID NO: 3607189 - DNA, 25 bp, Homo sapien
acatctacggcaaccctaactggga

SEQ ID NO: 3607190 - DNA, 25 bp, Homo sapien
agtttacaacgtagcttcgagtgca

SEQ ID NO: 3607191 - DNA, 25 bp, Homo sapien
gggtgcacgggacttctcttgtaca

SEQ ID NO: 3607192 - DNA, 25 bp, Homo sapien
tggtgaactccaaataagctctatg

SEQ ID NO: 3607193 - DNA, 25 bp, Homo sapien
cattaagattgggagaagggtgcac

SEQ ID NO: 3607194 - DNA, 25 bp, Homo sapien
tactgaagaggaagactcaactggg

SEQ ID NO: 3607195 - DNA, 25 bp, Homo sapien
taagcaactaagagctattatagat

SEQ ID NO: 3607196 - DNA, 25 bp, Homo sapien
ttttacagacacagtagctcagaga

SEQ ID NO: 3607197 - DNA, 25 bp, Homo sapien
gaggcactgaaagtaggggctgggt

SEQ ID NO: 3607198 - DNA, 25 bp, Homo sapien
tgggatgcgctttaaagatttttgt

SEQ ID NO: 3607199 - DNA, 25 bp, Homo sapien
tatccatcttcttggctagaccttt

SEQ ID NO: 3607200 - DNA, 25 bp, Homo sapien
gctagacctttttgctagcaccttt

SEQ ID NO: 3607201 - DNA, 25 bp, Homo sapien
tggctagacctttttgctagcacct

SEQ ID NO: 3607202 - DNA, 25 bp, Homo sapien
ttatccatcttcttggctagacctt

SEQ ID NO: 3607203 - DNA, 25 bp, Homo sapien
tttgagatctactccccagaagcaa

SEQ ID NO: 3607204 - DNA, 25 bp, Homo sapien
gaaagctgtttagattcacgatggc

SEQ ID NO: 3607205 - DNA, 25 bp, Homo sapien
taaagcgttcagaatggtacctagc

SEQ ID NO: 3607206 - DNA, 25 bp, Homo sapien
gatctactttcgtgtttctaaacag

SEQ ID NO: 3607207 - DNA, 25 bp, Homo sapien
gaatagtgtcttatccccgagtctc

SEQ ID NO: 3607208 - DNA, 25 bp, Homo sapien
ccaggttgtaagctcgttgaaggca

SEQ ID NO: 3607209 - DNA, 25 bp, Homo sapien
aacactcgcgcgtttcaagtttggg

SEQ ID NO: 3607210 - DNA, 25 bp, Homo sapien
cctgggatgaagtaggcctcgaata

SEQ ID NO: 3607211 - DNA, 25 bp, Homo sapien
cacagaagctacaggaggagagacg

SEQ ID NO: 3607212 - DNA, 25 bp, Homo sapien
tcgctggcttagaggatacaacccc

SEQ ID NO: 3607213 - DNA, 25 bp, Homo sapien
tagggtagacattccgtggcaacgt

SEQ ID NO: 3607214 - DNA, 25 bp, Homo sapien
tatgaaacaagtacctcaggcagag

SEQ ID NO: 3607215 - DNA, 25 bp, Homo sapien
gggactgcggaatcgccttgttttc

SEQ ID NO: 3607216 - DNA, 25 bp, Homo sapien
tttaacacgggactgacgtaggatg

SEQ ID NO: 3607217 - DNA, 25 bp, Homo sapien
tgcggaatcgccttgttttctttta

SEQ ID NO: 3607218 - DNA, 25 bp, Homo sapien
tgacgtaggatgctaagtaagggac

SEQ ID NO: 3607219 - DNA, 25 bp, Homo sapien
gaaacttcagtgatagcattgagcc

SEQ ID NO: 3607220 - DNA, 25 bp, Homo sapien
taaaatggatatcagctgggatgaa

SEQ ID NO: 3607221 - DNA, 25 bp, Homo sapien
tgcttgctcgctggaatgctccgta

SEQ ID NO: 3607222 - DNA, 25 bp, Homo sapien
tacgatcttgaaggtttagctgtct

SEQ ID NO: 3607223 - DNA, 25 bp, Homo sapien
ctccaggcgttgaggaggccgaaac

SEQ ID NO: 3607224 - DNA, 25 bp, Homo sapien
gtggctatggctgaagcctgcctcg

SEQ ID NO: 3607225 - DNA, 25 bp, Homo sapien
tggctgcattcacgagcctccaggc

SEQ ID NO: 3607226 - DNA, 25 bp, Homo sapien
aggccgaaaccgtgctggtggctat

SEQ ID NO: 3607227 - DNA, 25 bp, Homo sapien
gcccttctgaaggtcccagtcagtg

SEQ ID NO: 3607228 - DNA, 25 bp, Homo sapien
ttaaggctatcatgccagctgccag

SEQ ID NO: 3607229 - DNA, 25 bp, Homo sapien
ggcagggccgcacctgcagcattaa

SEQ ID NO: 3607230 - DNA, 25 bp, Homo sapien
tgaagacaatgatgtgctggacgtc

SEQ ID NO: 3607231 - DNA, 25 bp, Homo sapien
ccccacaaccaagctagacagagga

SEQ ID NO: 3607232 - DNA, 25 bp, Homo sapien
tctatcccaactcccaactccaaac

SEQ ID NO: 3607233 - DNA, 25 bp, Homo sapien
caaccaagctagacagaggaagtgg

SEQ ID NO: 3607234 - DNA, 25 bp, Homo sapien
gtaccactgcaccacactaatattc

SEQ ID NO: 3607235 - DNA, 25 bp, Homo sapien
tgcatagaaaggcatgcgtccctcc

SEQ ID NO: 3607236 - DNA, 25 bp, Homo sapien
aatgctccgaagcatcttgtcccca

SEQ ID NO: 3607237 - DNA, 25 bp, Homo sapien
caccactgaaggtgactgccagcat

SEQ ID NO: 3607238 - DNA, 25 bp, Homo sapien
agaaaggcatgcgtccctcctcatc

SEQ ID NO: 3607239 - DNA, 25 bp, Homo sapien
caagcagggctagtcctatctgagc

SEQ ID NO: 3607240 - DNA, 25 bp, Homo sapien
gtgtgatgccctaacccttcggtga

SEQ ID NO: 3607241 - DNA, 25 bp, Homo sapien
aaaggccgcagtcctagtctcgagg

SEQ ID NO: 3607242 - DNA, 25 bp, Homo sapien
ttgaaacatgatctgagcggcccac

SEQ ID NO: 3607243 - DNA, 25 bp, Homo sapien
tgcagttgtcgttgtgttggcctcc

SEQ ID NO: 3607244 - DNA, 25 bp, Homo sapien
gcaatcaccccatgttgtaaggcag

SEQ ID NO: 3607245 - DNA, 25 bp, Homo sapien
ggctaccacaaagatgctcccaaag

SEQ ID NO: 3607246 - DNA, 25 bp, Homo sapien
cgtagccatcgtagttgcagttgtc

SEQ ID NO: 3607247 - DNA, 25 bp, Homo sapien
gctgatgggggccatccactgtctt

SEQ ID NO: 3607248 - DNA, 25 bp, Homo sapien
gtcttcccatcgtcatctggtcccc

SEQ ID NO: 3607249 - DNA, 25 bp, Homo sapien
ctgatgggggccatccactgtcttc

SEQ ID NO: 3607250 - DNA, 25 bp, Homo sapien
cttcccatcgtcatctggtccccag

SEQ ID NO: 3607251 - DNA, 25 bp, Homo sapien
gagaggtccatccagtacccggata

SEQ ID NO: 3607252 - DNA, 25 bp, Homo sapien
tagtgcttgttgaacgccactgcct

SEQ ID NO: 3607253 - DNA, 25 bp, Homo sapien
ctgcagctgtagatgtcattgatct

SEQ ID NO: 3607254 - DNA, 25 bp, Homo sapien
gatgtcattgatctgatagtgcttg

SEQ ID NO: 3607255 - DNA, 25 bp, Homo sapien
tctgtaggttcccaagcacataagg

SEQ ID NO: 3607256 - DNA, 25 bp, Homo sapien
cagacgttgagtgtgaaagaaccac

SEQ ID NO: 3607257 - DNA, 25 bp, Homo sapien
agagcagcccgtgaccatcagtggg

SEQ ID NO: 3607258 - DNA, 25 bp, Homo sapien
caccttttgccttgatggacagacg

SEQ ID NO: 3607259 - DNA, 25 bp, Homo sapien
tgcgatgcggctcccgtaggccacg

SEQ ID NO: 3607260 - DNA, 25 bp, Homo sapien
tctcctgcacatcgcgtgccatggt

SEQ ID NO: 3607261 - DNA, 25 bp, Homo sapien
gggtcattagagttgaggtcatagc

SEQ ID NO: 3607262 - DNA, 25 bp, Homo sapien
ttgttgggcacagccgcgatctctc

SEQ ID NO: 3607263 - DNA, 25 bp, Homo sapien
ggtgtgttccactccgtcatccact

SEQ ID NO: 3607264 - DNA, 25 bp, Homo sapien
cctggatggtgtgttccactccgtc

SEQ ID NO: 3607265 - DNA, 25 bp, Homo sapien
tcacgttgatgtccctgcccgggct

SEQ ID NO: 3607266 - DNA, 25 bp, Homo sapien
cgcccagtcacattgcgttcccaca

SEQ ID NO: 3607267 - DNA, 25 bp, Homo sapien
aagctctccgatgcgtccagcattc

SEQ ID NO: 3607268 - DNA, 25 bp, Homo sapien
ttgaagtggacgctgcgcttggccc

SEQ ID NO: 3607269 - DNA, 25 bp, Homo sapien
caggtgccattgctgcgggtacttg

SEQ ID NO: 3607270 - DNA, 25 bp, Homo sapien
tggacaaagaggtagtgcccctgaa

SEQ ID NO: 3607271 - DNA, 25 bp, Homo sapien
ctgtgccctggccatcaggcccacc

SEQ ID NO: 3607272 - DNA, 25 bp, Homo sapien
tgccctggccatcaggcccacctgt

SEQ ID NO: 3607273 - DNA, 25 bp, Homo sapien
tgtgccctggccatcaggcccacct

SEQ ID NO: 3607274 - DNA, 25 bp, Homo sapien
ccctggccatcaggcccacctgtcc

SEQ ID NO: 3607275 - DNA, 25 bp, Homo sapien
ctgccaggcccatgacccagggaac

SEQ ID NO: 3607276 - DNA, 25 bp, Homo sapien
tgacccagggaaccagtaagaagag

SEQ ID NO: 3607277 - DNA, 25 bp, Homo sapien
cagggaaccagtaagaagagcccgg

SEQ ID NO: 3607278 - DNA, 25 bp, Homo sapien
ccatgacccagggaaccagtaagaa

SEQ ID NO: 3607279 - DNA, 25 bp, Homo sapien
gggcatccaagtgtggcactttctg

SEQ ID NO: 3607280 - DNA, 25 bp, Homo sapien
ggggcatccaagtgtggcactttct

SEQ ID NO: 3607281 - DNA, 25 bp, Homo sapien
tgggcaggcccaggggggcatccaa

SEQ ID NO: 3607282 - DNA, 25 bp, Homo sapien
ggcatccaagtgtggcactttctgc

SEQ ID NO: 3607283 - DNA, 25 bp, Homo sapien
ctggattctacatgaggttgagctc

SEQ ID NO: 3607284 - DNA, 25 bp, Homo sapien
gctcctggtctggctaaccacgtca

SEQ ID NO: 3607285 - DNA, 25 bp, Homo sapien
ggattctacatgaggttgagctcct

SEQ ID NO: 3607286 - DNA, 25 bp, Homo sapien
tcctggtctggctaaccacgtcaca

SEQ ID NO: 3607287 - DNA, 25 bp, Homo sapien
gaaaggaaccttaaatgccttctga

SEQ ID NO: 3607288 - DNA, 25 bp, Homo sapien
ccttctgaaagcaggtctcaacctc

SEQ ID NO: 3607289 - DNA, 25 bp, Homo sapien
gcagcatttttatcccccaggcttc

SEQ ID NO: 3607290 - DNA, 25 bp, Homo sapien
gaaagcaggtctcaacctctcccaa

SEQ ID NO: 3607291 - DNA, 25 bp, Homo sapien
ggcctcgatcgctccgtgcaatgtg

SEQ ID NO: 3607292 - DNA, 25 bp, Homo sapien
aagctactgtcctcgctgttccaca

SEQ ID NO: 3607293 - DNA, 25 bp, Homo sapien
ccggctcctagaagccagcttgggt

SEQ ID NO: 3607294 - DNA, 25 bp, Homo sapien
gagtccaagatcctgctcccaagct

SEQ ID NO: 3607295 - DNA, 25 bp, Homo sapien
cgccgcctccctgcggaaactcgcg

SEQ ID NO: 3607296 - DNA, 25 bp, Homo sapien
ctccctgcggaaactcgcggcttcc

SEQ ID NO: 3607297 - DNA, 25 bp, Homo sapien
gcctccctgcggaaactcgcggctt

SEQ ID NO: 3607298 - DNA, 25 bp, Homo sapien
tgcggaaactcgcggcttcccggga

SEQ ID NO: 3607299 - DNA, 25 bp, Homo sapien
cgacctttaaaagccactcgttgct

SEQ ID NO: 3607300 - DNA, 25 bp, Homo sapien
ccgtgcgggcgctgggggctgaacc

SEQ ID NO: 3607301 - DNA, 25 bp, Homo sapien
cgcgggccacagcaaccggcgcccg

SEQ ID NO: 3607302 - DNA, 25 bp, Homo sapien
tccacatggtccctcttcagaaggc

SEQ ID NO: 3607303 - DNA, 25 bp, Homo sapien
ttctcgcagtcggctctcccttctt

SEQ ID NO: 3607304 - DNA, 25 bp, Homo sapien
gccccgggagagtccacttgtatct

SEQ ID NO: 3607305 - DNA, 25 bp, Homo sapien
gtatctcaggggtctcccgcagcat

SEQ ID NO: 3607306 - DNA, 25 bp, Homo sapien
cgcgccccgggagagtccacttgta

SEQ ID NO: 3607307 - DNA, 25 bp, Homo sapien
actgcgccagaccactcatagactt

SEQ ID NO: 3607308 - DNA, 25 bp, Homo sapien
gaattagatcgatacttattgacaa

SEQ ID NO: 3607309 - DNA, 25 bp, Homo sapien
tgttcggataaattagatacatcca

SEQ ID NO: 3607310 - DNA, 25 bp, Homo sapien
acattcatgtcaagtaaaagaaatc

SEQ ID NO: 3607311 - DNA, 25 bp, Homo sapien
gctttcctggtaggcaattgtcaag

SEQ ID NO: 3607312 - DNA, 25 bp, Homo sapien
tatagtagattagaggtgctgaaac

SEQ ID NO: 3607313 - DNA, 25 bp, Homo sapien
gctgaaacattttagtctaaggacc

SEQ ID NO: 3607314 - DNA, 25 bp, Homo sapien
caaggtcttagtctcatatggatca

SEQ ID NO: 3607315 - DNA, 25 bp, Homo sapien
gaagcctcagtattgttttagccac

SEQ ID NO: 3607316 - DNA, 25 bp, Homo sapien
agatttaaagcctggtgctcaccca

SEQ ID NO: 3607317 - DNA, 25 bp, Homo sapien
gaaattatgatatccctgcccaggg

SEQ ID NO: 3607318 - DNA, 25 bp, Homo sapien
gaacctgctgttgctctaaggccat

SEQ ID NO: 3607319 - DNA, 25 bp, Homo sapien
gaataacaacataaccaggtcccaa

SEQ ID NO: 3607320 - DNA, 25 bp, Homo sapien
caaaattcacagtccgagaataaca

SEQ ID NO: 3607321 - DNA, 25 bp, Homo sapien
ttggcttctaatcaagctctgacag

SEQ ID NO: 3607322 - DNA, 25 bp, Homo sapien
agcacaacccacaggtttttcctgg

SEQ ID NO: 3607323 - DNA, 25 bp, Homo sapien
gccaacattgtgaagtcctcaccct

SEQ ID NO: 3607324 - DNA, 25 bp, Homo sapien
acaaccaagttgtttggtgaccttg

SEQ ID NO: 3607325 - DNA, 25 bp, Homo sapien
tcacttctggtctcctagtctagct

SEQ ID NO: 3607326 - DNA, 25 bp, Homo sapien
gttaaggcagttggttcacaaccaa

SEQ ID NO: 3607327 - DNA, 25 bp, Homo sapien
gcaacacaagtgttggcgacccctg

SEQ ID NO: 3607328 - DNA, 25 bp, Homo sapien
tactcctacagggaatggcctcagc

SEQ ID NO: 3607329 - DNA, 25 bp, Homo sapien
acatgcagaccaatgggaaaggccc

SEQ ID NO: 3607330 - DNA, 25 bp, Homo sapien
gaaaggccccaaatgcagtgagtgg

SEQ ID NO: 3607331 - DNA, 25 bp, Homo sapien
gacagtctccagtcttcctgtcaga

SEQ ID NO: 3607332 - DNA, 25 bp, Homo sapien
cagcaccaagtgcagtgggaatgaa

SEQ ID NO: 3607333 - DNA, 25 bp, Homo sapien
tccgagctagaagtggacagtctcc

SEQ ID NO: 3607334 - DNA, 25 bp, Homo sapien
tcctgtcagactctgtagttatggg

SEQ ID NO: 3607335 - DNA, 25 bp, Homo sapien
tatcaggtaattccacacttagcag

SEQ ID NO: 3607336 - DNA, 25 bp, Homo sapien
catacctggaagcagcgggttgacc

SEQ ID NO: 3607337 - DNA, 25 bp, Homo sapien
gaaagagtgagcctatgaccaggaa

SEQ ID NO: 3607338 - DNA, 25 bp, Homo sapien
cttggctgcaaagctccagaggaag

SEQ ID NO: 3607339 - DNA, 25 bp, Homo sapien
tcccgacttaaatttgaggtgacca

SEQ ID NO: 3607340 - DNA, 25 bp, Homo sapien
ggcaatctttgcaccaatgttaggc

SEQ ID NO: 3607341 - DNA, 25 bp, Homo sapien
ccaaggtaacctgcgtgtgatgcca

SEQ ID NO: 3607342 - DNA, 25 bp, Homo sapien
gagtattcccgccagcagagtgctt

SEQ ID NO: 3607343 - DNA, 25 bp, Homo sapien
tgacataggctatggtcatgagggt

SEQ ID NO: 3607344 - DNA, 25 bp, Homo sapien
agcaccactgacacaccatgaggca

SEQ ID NO: 3607345 - DNA, 25 bp, Homo sapien
gcaccactgacacaccatgaggcag

SEQ ID NO: 3607346 - DNA, 25 bp, Homo sapien
ctatggtcatgagggttgactcatc

SEQ ID NO: 3607347 - DNA, 25 bp, Homo sapien
tgacaaaagggccttccaccgctgc

SEQ ID NO: 3607348 - DNA, 25 bp, Homo sapien
cttccatgtccaaggtgacaaaagg

SEQ ID NO: 3607349 - DNA, 25 bp, Homo sapien
catgtccaaggtgacaaaagggcct

SEQ ID NO: 3607350 - DNA, 25 bp, Homo sapien
acaaaagggccttccaccgctgccg

SEQ ID NO: 3607351 - DNA, 25 bp, Homo sapien
aaaccctcagccctggcactctcac

SEQ ID NO: 3607352 - DNA, 25 bp, Homo sapien
cccaaaccctcagccctggcactct

SEQ ID NO: 3607353 - DNA, 25 bp, Homo sapien
caaaccctcagccctggcactctca

SEQ ID NO: 3607354 - DNA, 25 bp, Homo sapien
ccaaaccctcagccctggcactctc

SEQ ID NO: 3607355 - DNA, 25 bp, Homo sapien
gatcaaagacaacgtagaagccctc

SEQ ID NO: 3607356 - DNA, 25 bp, Homo sapien
tcgtcttgggacgtggccacatctt

SEQ ID NO: 3607357 - DNA, 25 bp, Homo sapien
gataacagctcccataacagtgccc

SEQ ID NO: 3607358 - DNA, 25 bp, Homo sapien
gccaattcgttttcgggcccgatca

SEQ ID NO: 3607359 - DNA, 25 bp, Homo sapien
cccattaggtagagtgagatgactg

SEQ ID NO: 3607360 - DNA, 25 bp, Homo sapien
tgcggaaggactggttggtaacctc

SEQ ID NO: 3607361 - DNA, 25 bp, Homo sapien
tgctctcctagccagaaaccatcag

SEQ ID NO: 3607362 - DNA, 25 bp, Homo sapien
gatgactgggaaaatgttccaaggg

SEQ ID NO: 3607363 - DNA, 25 bp, Homo sapien
cgcctccctctgacactgtaccatc

SEQ ID NO: 3607364 - DNA, 25 bp, Homo sapien
tccctctgacactgtaccatctctt

SEQ ID NO: 3607365 - DNA, 25 bp, Homo sapien
cctctgacactgtaccatctctttt

SEQ ID NO: 3607366 - DNA, 25 bp, Homo sapien
tctgacactgtaccatctcttttac

SEQ ID NO: 3607367 - DNA, 25 bp, Homo sapien
cactttcttgggcaaacgaaggttg

SEQ ID NO: 3607368 - DNA, 25 bp, Homo sapien
gtccacaatgctcttgtcatagttg

SEQ ID NO: 3607369 - DNA, 25 bp, Homo sapien
tgggcaaacgaaggttggtggtgcc

SEQ ID NO: 3607370 - DNA, 25 bp, Homo sapien
tgatggatttgactgcagcttcaaa

SEQ ID NO: 3607371 - DNA, 25 bp, Homo sapien
tagaatcgtgcccagcagagagaag

SEQ ID NO: 3607372 - DNA, 25 bp, Homo sapien
tgtacctgcttggacaagttaacct

SEQ ID NO: 3607373 - DNA, 25 bp, Homo sapien
tgggtgggcaggtagtctccaaact

SEQ ID NO: 3607374 - DNA, 25 bp, Homo sapien
tttggcacctcctaagtgtacctgc

SEQ ID NO: 3607375 - DNA, 25 bp, Homo sapien
ccctgactgttctaggctcaacttc

SEQ ID NO: 3607376 - DNA, 25 bp, Homo sapien
catcctcccaacatgataaccagag

SEQ ID NO: 3607377 - DNA, 25 bp, Homo sapien
tgtgtgaccattaagcccctgactg

SEQ ID NO: 3607378 - DNA, 25 bp, Homo sapien
cattgtactgcctacccccttatgt

SEQ ID NO: 3607379 - DNA, 25 bp, Homo sapien
tcataataccactcccgccggatgg

SEQ ID NO: 3607380 - DNA, 25 bp, Homo sapien
accagagactgcctgtgtacagcga

SEQ ID NO: 3607381 - DNA, 25 bp, Homo sapien
gatgggtgtataccagagactgcct

SEQ ID NO: 3607382 - DNA, 25 bp, Homo sapien
tgtacagcgagtggtcgatacctcc

SEQ ID NO: 3607383 - DNA, 25 bp, Homo sapien
gtcttctacaggctacccttttcat

SEQ ID NO: 3607384 - DNA, 25 bp, Homo sapien
ccaaggaccaagcaataagatcagt

SEQ ID NO: 3607385 - DNA, 25 bp, Homo sapien
gggtggcaaggtcttctacaggcta

SEQ ID NO: 3607386 - DNA, 25 bp, Homo sapien
tacccgtgtcctggcacagaaggag

SEQ ID NO: 3607387 - DNA, 25 bp, Homo sapien
ggttcctcctgattctaagtatcgg

SEQ ID NO: 3607388 - DNA, 25 bp, Homo sapien
agtttaccataggtgccttgattcc

SEQ ID NO: 3607389 - DNA, 25 bp, Homo sapien
aagtatcggagccaaaactgtggtg

SEQ ID NO: 3607390 - DNA, 25 bp, Homo sapien
gccttctgaccatcaaactgaataa

SEQ ID NO: 3607391 - DNA, 25 bp, Homo sapien
cagaggccagcacttcagactggtt

SEQ ID NO: 3607392 - DNA, 25 bp, Homo sapien
aggccagcacttcagactggttgag

SEQ ID NO: 3607393 - DNA, 25 bp, Homo sapien
cagcacttcagactggttgaggggg

SEQ ID NO: 3607394 - DNA, 25 bp, Homo sapien
agcacttcagactggttgaggggga

SEQ ID NO: 3607395 - DNA, 25 bp, Homo sapien
ggtctgctttaccagagagtcaaag

SEQ ID NO: 3607396 - DNA, 25 bp, Homo sapien
agaagaggttgggaacgtgggtctg

SEQ ID NO: 3607397 - DNA, 25 bp, Homo sapien
gggtctgctttaccagagagtcaaa

SEQ ID NO: 3607398 - DNA, 25 bp, Homo sapien
gtctgctttaccagagagtcaaaga

SEQ ID NO: 3607399 - DNA, 25 bp, Homo sapien
aaggagtgagtcctcatacggccct

SEQ ID NO: 3607400 - DNA, 25 bp, Homo sapien
tgagtcctcatacggccctaaaggc

SEQ ID NO: 3607401 - DNA, 25 bp, Homo sapien
tggcaatgcaaacaggacagtattg

SEQ ID NO: 3607402 - DNA, 25 bp, Homo sapien
cagtattgataggttcacagattca

SEQ ID NO: 3607403 - DNA, 25 bp, Homo sapien
gatggcagcaatgttggcacgcaca

SEQ ID NO: 3607404 - DNA, 25 bp, Homo sapien
atgttggcacgcacagtgacgttgg

SEQ ID NO: 3607405 - DNA, 25 bp, Homo sapien
agcaatgttggcacgcacagtgacg

SEQ ID NO: 3607406 - DNA, 25 bp, Homo sapien
tggcaatctcagcataggccagccc

SEQ ID NO: 3607407 - DNA, 25 bp, Homo sapien
ttcccacttgccctgggtgtagggc

SEQ ID NO: 3607408 - DNA, 25 bp, Homo sapien
acttgccctgggtgtagggcacata

SEQ ID NO: 3607409 - DNA, 25 bp, Homo sapien
gccctgggtgtagggcacatacaca

SEQ ID NO: 3607410 - DNA, 25 bp, Homo sapien
ttgccctgggtgtagggcacataca

SEQ ID NO: 3607411 - DNA, 25 bp, Homo sapien
ccttccggaggtcccggtatgtgct

SEQ ID NO: 3607412 - DNA, 25 bp, Homo sapien
ccggaggtcccggtatgtgctggac

SEQ ID NO: 3607413 - DNA, 25 bp, Homo sapien
cttccggaggtcccggtatgtgctg

SEQ ID NO: 3607414 - DNA, 25 bp, Homo sapien
tccggaggtcccggtatgtgctgga

SEQ ID NO: 3607415 - DNA, 25 bp, Homo sapien
cagatagatgaagggaaccattggt

SEQ ID NO: 3607416 - DNA, 25 bp, Homo sapien
gtgaggcttgctctcctatctattg

SEQ ID NO: 3607417 - DNA, 25 bp, Homo sapien
cattggtgaggcttgctctcctatc

SEQ ID NO: 3607418 - DNA, 25 bp, Homo sapien
cacccagaacagagtgtaaagtggg

SEQ ID NO: 3607419 - DNA, 25 bp, Homo sapien
acactgatgtctcagatattggtgt

SEQ ID NO: 3607420 - DNA, 25 bp, Homo sapien
gatgtctcagatattggtgtcctct

SEQ ID NO: 3607421 - DNA, 25 bp, Homo sapien
cacactgatgtctcagatattggtg

SEQ ID NO: 3607422 - DNA, 25 bp, Homo sapien
tgtctcagatattggtgtcctctca

SEQ ID NO: 3607423 - DNA, 25 bp, Homo sapien
cctctggtagtagcgatgcaggaag

SEQ ID NO: 3607424 - DNA, 25 bp, Homo sapien
agctgcctctggtagtagcgatgca

SEQ ID NO: 3607425 - DNA, 25 bp, Homo sapien
agttactgctgcctgtatccaccag

SEQ ID NO: 3607426 - DNA, 25 bp, Homo sapien
tgctgcctgtatccaccaggatgtt

SEQ ID NO: 3607427 - DNA, 25 bp, Homo sapien
tagacaggaggcttcggtcacacca

SEQ ID NO: 3607428 - DNA, 25 bp, Homo sapien
caggaggcttcggtcacaccacctt

SEQ ID NO: 3607429 - DNA, 25 bp, Homo sapien
gacaggaggcttcggtcacaccacc

SEQ ID NO: 3607430 - DNA, 25 bp, Homo sapien
atagacaggaggcttcggtcacacc

SEQ ID NO: 3607431 - DNA, 25 bp, Homo sapien
tccagagtgaagctccacgatgcag

SEQ ID NO: 3607432 - DNA, 25 bp, Homo sapien
cacgatgcaggactggtccaggctg

SEQ ID NO: 3607433 - DNA, 25 bp, Homo sapien
gttaccaccacgaccacagacagga

SEQ ID NO: 3607434 - DNA, 25 bp, Homo sapien
cagtctgccccttagaatgtccaga

SEQ ID NO: 3607435 - DNA, 25 bp, Homo sapien
ggaagtcaaagagatagccagatgg

SEQ ID NO: 3607436 - DNA, 25 bp, Homo sapien
aaaaaggcagattagtagaagaact

SEQ ID NO: 3607437 - DNA, 25 bp, Homo sapien
agccagatggttgatgattttatac

SEQ ID NO: 3607438 - DNA, 25 bp, Homo sapien
gaactaatatgcaagggagtcaaaa

SEQ ID NO: 3607439 - DNA, 25 bp, Homo sapien
ctctacccgtggtctctctccccgg

SEQ ID NO: 3607440 - DNA, 25 bp, Homo sapien
gctgaatgcagccacatgggtgagc

SEQ ID NO: 3607441 - DNA, 25 bp, Homo sapien
ccagctgacgtaccagctgaatgca

SEQ ID NO: 3607442 - DNA, 25 bp, Homo sapien
aaagacttcacagaaccagaggccc

SEQ ID NO: 3607443 - DNA, 25 bp, Homo sapien
gcccaacaggcctgggttagtccag

SEQ ID NO: 3607444 - DNA, 25 bp, Homo sapien
caaggtatcacagcagctattcgcc

SEQ ID NO: 3607445 - DNA, 25 bp, Homo sapien
tgcaggatcctagtgtacaagagag

SEQ ID NO: 3607446 - DNA, 25 bp, Homo sapien
tcagcacctttagcctctgcggaac

SEQ ID NO: 3607447 - DNA, 25 bp, Homo sapien
aatgaagctgaccatggcacctgtg

SEQ ID NO: 3607448 - DNA, 25 bp, Homo sapien
ttaacagaatcactttggacaagac

SEQ ID NO: 3607449 - DNA, 25 bp, Homo sapien
tacttccacgaggatgacccactag

SEQ ID NO: 3607450 - DNA, 25 bp, Homo sapien
tcaaaggcatgtcccagatcgtaga

SEQ ID NO: 3607451 - DNA, 25 bp, Homo sapien
cagctggtggctgaatacttccacg

SEQ ID NO: 3607452 - DNA, 25 bp, Homo sapien
taagccctaacatccataactcatc

SEQ ID NO: 3607453 - DNA, 25 bp, Homo sapien
tgtaatattaacaggactggctctc

SEQ ID NO: 3607454 - DNA, 25 bp, Homo sapien
tcctaaacaaccatgcttaagccct

SEQ ID NO: 3607455 - DNA, 25 bp, Homo sapien
caaacttatctggtcttagcctaaa

SEQ ID NO: 3607456 - DNA, 25 bp, Homo sapien
tattgttctgggtgaaagcacctag

SEQ ID NO: 3607457 - DNA, 25 bp, Homo sapien
gattcgtggactgtctgacctcaaa

SEQ ID NO: 3607458 - DNA, 25 bp, Homo sapien
tacatgtaaaacgtggaggcccagg

SEQ ID NO: 3607459 - DNA, 25 bp, Homo sapien
caggccagacaaggataaagtgact

SEQ ID NO: 3607460 - DNA, 25 bp, Homo sapien
gtgacacgcaccagcatacacagaa

SEQ ID NO: 3607461 - DNA, 25 bp, Homo sapien
gagcacgcacctaggaaggctggct

SEQ ID NO: 3607462 - DNA, 25 bp, Homo sapien
cttctgtaaagtaattgggaggtgg

SEQ ID NO: 3607463 - DNA, 25 bp, Homo sapien
cacagatgtgcaggatcagattcaa

SEQ ID NO: 3607464 - DNA, 25 bp, Homo sapien
ttattcaactgctgccaggattcct

SEQ ID NO: 3607465 - DNA, 25 bp, Homo sapien
tgctgccaggattccttggtcctgg

SEQ ID NO: 3607466 - DNA, 25 bp, Homo sapien
tattcaactgctgccaggattcctt

SEQ ID NO: 3607467 - DNA, 25 bp, Homo sapien
ccaggattccttggtcctggaggta

SEQ ID NO: 3607468 - DNA, 25 bp, Homo sapien
ggtcatctccacgtagtagccctgc

SEQ ID NO: 3607469 - DNA, 25 bp, Homo sapien
acggtcatctccacgtagtagccct

SEQ ID NO: 3607470 - DNA, 25 bp, Homo sapien
tgcccacggtcatctccacgtagta

SEQ ID NO: 3607471 - DNA, 25 bp, Homo sapien
gacttgcccctcaggttgtccacca

SEQ ID NO: 3607472 - DNA, 25 bp, Homo sapien
gctcttcgtcggtctcccggggcag

SEQ ID NO: 3607473 - DNA, 25 bp, Homo sapien
ggctcctcgggctcttcgtcggtct

SEQ ID NO: 3607474 - DNA, 25 bp, Homo sapien
gcagcactcccgcgcccatccacag

SEQ ID NO: 3607475 - DNA, 25 bp, Homo sapien
tcccgcgcccatccacagcaggagc

SEQ ID NO: 3607476 - DNA, 25 bp, Homo sapien
gggagatccgcagagcacgggagca

SEQ ID NO: 3607477 - DNA, 25 bp, Homo sapien
tgggatccggagcccgctacatcgg

SEQ ID NO: 3607478 - DNA, 25 bp, Homo sapien
cactggcccacgtccgtccctggcg

SEQ ID NO: 3607479 - DNA, 25 bp, Homo sapien
ttcgggccctctgggctcgcactgg

SEQ ID NO: 3607480 - DNA, 25 bp, Homo sapien
ctcctgcggctgcgttggctgctca

SEQ ID NO: 3607481 - DNA, 25 bp, Homo sapien
ctgcggctgcgttggctgctcaggc

SEQ ID NO: 3607482 - DNA, 25 bp, Homo sapien
tcaggccaccataatccagctcgcg

SEQ ID NO: 3607483 - DNA, 25 bp, Homo sapien
aggccaccataatccagctcgcggc

SEQ ID NO: 3607484 - DNA, 25 bp, Homo sapien
cagtggctataagcttttgttgtca

SEQ ID NO: 3607485 - DNA, 25 bp, Homo sapien
tctgtgaggctttccctgatcttcc

SEQ ID NO: 3607486 - DNA, 25 bp, Homo sapien
tatatagagcactcagtacagttcc

SEQ ID NO: 3607487 - DNA, 25 bp, Homo sapien
gccgtgaattcccttactccgctta

SEQ ID NO: 3607488 - DNA, 25 bp, Homo sapien
tcagggccatgtgtaatcaggtttg

SEQ ID NO: 3607489 - DNA, 25 bp, Homo sapien
aagtgattacttggcgcggtgactc

SEQ ID NO: 3607490 - DNA, 25 bp, Homo sapien
aggtttgtagccctaacacgtcgca

SEQ ID NO: 3607491 - DNA, 25 bp, Homo sapien
catgtgtttacgtgtttggctttcc

SEQ ID NO: 3607492 - DNA, 25 bp, Homo sapien
tttgcatgcatctgttagaacacgc

SEQ ID NO: 3607493 - DNA, 25 bp, Homo sapien
tgtgctgcttcttgcctcgtgttgc

SEQ ID NO: 3607494 - DNA, 25 bp, Homo sapien
cagggtcgtcttatgttgctcacgg

SEQ ID NO: 3607495 - DNA, 25 bp, Homo sapien
catcattcagttctcagtgtaggca

SEQ ID NO: 3607496 - DNA, 25 bp, Homo sapien
tccctatccattcagggctcaacag

SEQ ID NO: 3607497 - DNA, 25 bp, Homo sapien
gctcccctgctaaactcattagcta

SEQ ID NO: 3607498 - DNA, 25 bp, Homo sapien
tctgatctatccaagcagcaagaag

SEQ ID NO: 3607499 - DNA, 25 bp, Homo sapien
ttttccctatccattcagggctcaa

SEQ ID NO: 3607500 - DNA, 25 bp, Homo sapien
gacccgaggattggcatcctggata

SEQ ID NO: 3607501 - DNA, 25 bp, Homo sapien
gggacccgaggattggcatcctgga

SEQ ID NO: 3607502 - DNA, 25 bp, Homo sapien
ggacccgaggattggcatcctggat

SEQ ID NO: 3607503 - DNA, 25 bp, Homo sapien
cctgggctgagagctaatattctta

SEQ ID NO: 3607504 - DNA, 25 bp, Homo sapien
aatattcttatgagagacggaggcc

SEQ ID NO: 3607505 - DNA, 25 bp, Homo sapien
gacggaggccagaacctttctctgc

SEQ ID NO: 3607506 - DNA, 25 bp, Homo sapien
cctagggtccccagaaaaccacatg

SEQ ID NO: 3607507 - DNA, 25 bp, Homo sapien
ctatctcaggctaaaatgtgtggac

SEQ ID NO: 3607508 - DNA, 25 bp, Homo sapien
ttgacatggcaagctgatggcgtgc

SEQ ID NO: 3607509 - DNA, 25 bp, Homo sapien
actcgtacgagctcttgtcattgac

SEQ ID NO: 3607510 - DNA, 25 bp, Homo sapien
tgtcattgacatggcaagctgatgg

SEQ ID NO: 3607511 - DNA, 25 bp, Homo sapien
ccaagggaagggcagtgtaacgctc

SEQ ID NO: 3607512 - DNA, 25 bp, Homo sapien
caagaagctggtggttcacacgggc

SEQ ID NO: 3607513 - DNA, 25 bp, Homo sapien
gttatctagtgctccccattgaagg

SEQ ID NO: 3607514 - DNA, 25 bp, Homo sapien
aatgtaggatgggacgattgcccca

SEQ ID NO: 3607515 - DNA, 25 bp, Homo sapien
cctctcccttggtgttgccgacaga

SEQ ID NO: 3607516 - DNA, 25 bp, Homo sapien
cacttgtcacaaaggccctggcggg

SEQ ID NO: 3607517 - DNA, 25 bp, Homo sapien
tgagcccggatgtgtccagtcagcg

SEQ ID NO: 3607518 - DNA, 25 bp, Homo sapien
cagtcagcgcgtactggagatgcca

SEQ ID NO: 3607519 - DNA, 25 bp, Homo sapien
gatgtgcatctacgtttgagaccca

SEQ ID NO: 3607520 - DNA, 25 bp, Homo sapien
tattgtttaacgagctcctcaggtg

SEQ ID NO: 3607521 - DNA, 25 bp, Homo sapien
ttgatgtgcatatgggtcccctggg

SEQ ID NO: 3607522 - DNA, 25 bp, Homo sapien
ggccgcataccagcaaattcctatt

SEQ ID NO: 3607523 - DNA, 25 bp, Homo sapien
ttctgcccatgcgtccagcttgctc

SEQ ID NO: 3607524 - DNA, 25 bp, Homo sapien
ggagcccttgatccatcctgtgctg

SEQ ID NO: 3607525 - DNA, 25 bp, Homo sapien
taaagtactttggagcccttgatcc

SEQ ID NO: 3607526 - DNA, 25 bp, Homo sapien
tgctccctggacctggcggactctt

SEQ ID NO: 3607527 - DNA, 25 bp, Homo sapien
tatcgggatccgtcatgtattttca

SEQ ID NO: 3607528 - DNA, 25 bp, Homo sapien
acctggcacgtagtatcgggatccg

SEQ ID NO: 3607529 - DNA, 25 bp, Homo sapien
ctgcaatgaggttacaagcagcacc

SEQ ID NO: 3607530 - DNA, 25 bp, Homo sapien
tctcccaagtctgcaatgaggttac

SEQ ID NO: 3607531 - DNA, 25 bp, Homo sapien
ctctgattcgtgtttgtttgcccaa

SEQ ID NO: 3607532 - DNA, 25 bp, Homo sapien
gagcccttaggctgcttctatcttc

SEQ ID NO: 3607533 - DNA, 25 bp, Homo sapien
ggtggctctgattcgtgtttgtttg

SEQ ID NO: 3607534 - DNA, 25 bp, Homo sapien
cagcgttccccttcggagcccttag

SEQ ID NO: 3607535 - DNA, 25 bp, Homo sapien
tctcttcttctccctctggcctcat

SEQ ID NO: 3607536 - DNA, 25 bp, Homo sapien
ctccgacgacttctcttcttctccc

SEQ ID NO: 3607537 - DNA, 25 bp, Homo sapien
acttctcttcttctccctctggcct

SEQ ID NO: 3607538 - DNA, 25 bp, Homo sapien
gacttctcttcttctccctctggcc

SEQ ID NO: 3607539 - DNA, 25 bp, Homo sapien
tatagatatatagctcgtggacgcg

SEQ ID NO: 3607540 - DNA, 25 bp, Homo sapien
taatgcagaaaaacagccgagctgg

SEQ ID NO: 3607541 - DNA, 25 bp, Homo sapien
taaaatcgcatgcagtgtctctgag

SEQ ID NO: 3607542 - DNA, 25 bp, Homo sapien
taacctttattgcacacggcgctgg

SEQ ID NO: 3607543 - DNA, 25 bp, Homo sapien
ctacaccagggtgtaggatttggag

SEQ ID NO: 3607544 - DNA, 25 bp, Homo sapien
gccccggccccctgcttctgagacc

SEQ ID NO: 3607545 - DNA, 25 bp, Homo sapien
tgtaggatttggagtaggccccggc

SEQ ID NO: 3607546 - DNA, 25 bp, Homo sapien
cccggccccctgcttctgagacctc

SEQ ID NO: 3607547 - DNA, 25 bp, Homo sapien
agccaggttccggatggaggcctca

SEQ ID NO: 3607548 - DNA, 25 bp, Homo sapien
tctgcctttcgaaagaaggcctctg

SEQ ID NO: 3607549 - DNA, 25 bp, Homo sapien
cgatgtgctcatctcgagaagcgag

SEQ ID NO: 3607550 - DNA, 25 bp, Homo sapien
cagagtcctctgaggtaaggtggct

SEQ ID NO: 3607551 - DNA, 25 bp, Homo sapien
ttggcatgctcataggcccgggcca

SEQ ID NO: 3607552 - DNA, 25 bp, Homo sapien
tgatctcaaacttggcgtgctgcag

SEQ ID NO: 3607553 - DNA, 25 bp, Homo sapien
catggatgtcatgctgtcggcgttc

SEQ ID NO: 3607554 - DNA, 25 bp, Homo sapien
tcctcgtaggtggaagaggcactct

SEQ ID NO: 3607555 - DNA, 25 bp, Homo sapien
cactggcttgagtaccggttccggg

SEQ ID NO: 3607556 - DNA, 25 bp, Homo sapien
cgtgacaccatgctgggagcccacg

SEQ ID NO: 3607557 - DNA, 25 bp, Homo sapien
tcctgggacaggctggcactgtagc

SEQ ID NO: 3607558 - DNA, 25 bp, Homo sapien
tggcacttggtcagggtccactggc

SEQ ID NO: 3607559 - DNA, 25 bp, Homo sapien
aaagggctgtctccctggggataat

SEQ ID NO: 3607560 - DNA, 25 bp, Homo sapien
ctgtctccctggggataatgcgtac

SEQ ID NO: 3607561 - DNA, 25 bp, Homo sapien
gaaaagggctgtctccctggggata

SEQ ID NO: 3607562 - DNA, 25 bp, Homo sapien
gggctgtctccctggggataatgcg

SEQ ID NO: 3607563 - DNA, 25 bp, Homo sapien
cagacatgtcgatgaggggtcctgt

SEQ ID NO: 3607564 - DNA, 25 bp, Homo sapien
ggttgacagcttggctgaactcagc

SEQ ID NO: 3607565 - DNA, 25 bp, Homo sapien
tggtgcaaggagacgccagtacaga

SEQ ID NO: 3607566 - DNA, 25 bp, Homo sapien
tacagaagctctgtgggttgacagc

SEQ ID NO: 3607567 - DNA, 25 bp, Homo sapien
ggtggccctttcacaggggtgtcaa

SEQ ID NO: 3607568 - DNA, 25 bp, Homo sapien
tgatgccttctttgtcctcgatgag

SEQ ID NO: 3607569 - DNA, 25 bp, Homo sapien
tcctcgatgagcagctggaccctgg

SEQ ID NO: 3607570 - DNA, 25 bp, Homo sapien
ggtgtcaaagcttctattgttcttg

SEQ ID NO: 3607571 - DNA, 25 bp, Homo sapien
tatcaacatttctgccaaactcttt

SEQ ID NO: 3607572 - DNA, 25 bp, Homo sapien
cttatcaacatttctgccaaactct

SEQ ID NO: 3607573 - DNA, 25 bp, Homo sapien
caacatttctgccaaactctttgca

SEQ ID NO: 3607574 - DNA, 25 bp, Homo sapien
atcaacatttctgccaaactctttg

SEQ ID NO: 3607575 - DNA, 25 bp, Homo sapien
gcaaaacagtagagggagaggaggg

SEQ ID NO: 3607576 - DNA, 25 bp, Homo sapien
ctgcaaaacagtagagggagaggag

SEQ ID NO: 3607577 - DNA, 25 bp, Homo sapien
tgcaaaacagtagagggagaggagg

SEQ ID NO: 3607578 - DNA, 25 bp, Homo sapien
cagccgatggtgaacagcttcttca

SEQ ID NO: 3607579 - DNA, 25 bp, Homo sapien
ccttcctcttcttgcgtacgatgaa

SEQ ID NO: 3607580 - DNA, 25 bp, Homo sapien
ttgcgtacgatgaagagcagtgcca

SEQ ID NO: 3607581 - DNA, 25 bp, Homo sapien
ctcggagtcgcttcagccgtttctc

SEQ ID NO: 3607582 - DNA, 25 bp, Homo sapien
tggcctctcgcagttccgtcagaaa

SEQ ID NO: 3607583 - DNA, 25 bp, Homo sapien
ccatcgtagtccagggtggcgaact

SEQ ID NO: 3607584 - DNA, 25 bp, Homo sapien
ttgggccggtactccagaacgatgg

SEQ ID NO: 3607585 - DNA, 25 bp, Homo sapien
cctgcaggttaagccgagcatgcgt

SEQ ID NO: 3607586 - DNA, 25 bp, Homo sapien
gcctcgatgatctcgctgatgcgcc

SEQ ID NO: 3607587 - DNA, 25 bp, Homo sapien
gagcgctcgctggagctgatgaaca

SEQ ID NO: 3607588 - DNA, 25 bp, Homo sapien
tccaccgagtactgtagcacgaagc

SEQ ID NO: 3607589 - DNA, 25 bp, Homo sapien
actcctcgctgttgtccaccgagta

SEQ ID NO: 3607590 - DNA, 25 bp, Homo sapien
gtgatggacgaagctgaggttttgg

SEQ ID NO: 3607591 - DNA, 25 bp, Homo sapien
cccattgtcacctggaatccaggtc

SEQ ID NO: 3607592 - DNA, 25 bp, Homo sapien
gctgcccccattgtcacctggaatc

SEQ ID NO: 3607593 - DNA, 25 bp, Homo sapien
cagggtgatggacgaagctgaggtt

SEQ ID NO: 3607594 - DNA, 25 bp, Homo sapien
gatgatggtgtcaaagccaccagtg

SEQ ID NO: 3607595 - DNA, 25 bp, Homo sapien
gccgtgcacgtgtagtagccagagt

SEQ ID NO: 3607596 - DNA, 25 bp, Homo sapien
ggacactggaatggccgagtcttca

SEQ ID NO: 3607597 - DNA, 25 bp, Homo sapien
tgcacgcagcagcagtgtgccattg

SEQ ID NO: 3607598 - DNA, 25 bp, Homo sapien
ggctggatctcccactgaattgcaa

SEQ ID NO: 3607599 - DNA, 25 bp, Homo sapien
atccaaggtgttgtcacggtgcccc

SEQ ID NO: 3607600 - DNA, 25 bp, Homo sapien
aattgcaaggcagccgaacatcttt

SEQ ID NO: 3607601 - DNA, 25 bp, Homo sapien
aaggcagccgaacatctttcatcca

SEQ ID NO: 3607602 - DNA, 25 bp, Homo sapien
tggactcgtctcgtactcgctggga

SEQ ID NO: 3607603 - DNA, 25 bp, Homo sapien
ccagcaggctcgatggtcaccttct

SEQ ID NO: 3607604 - DNA, 25 bp, Homo sapien
taggtgggcgatccggtagaagagc

SEQ ID NO: 3607605 - DNA, 25 bp, Homo sapien
cagatactgctgaccgcggtttagg

SEQ ID NO: 3607606 - DNA, 25 bp, Homo sapien
gcggatcaccccgttgggcttggta

SEQ ID NO: 3607607 - DNA, 25 bp, Homo sapien
agaagatggtgtacttgcggatcac

SEQ ID NO: 3607608 - DNA, 25 bp, Homo sapien
cacactgctagctgatgaagggaca

SEQ ID NO: 3607609 - DNA, 25 bp, Homo sapien
aagggacagctttgatgccagcagg

SEQ ID NO: 3607610 - DNA, 25 bp, Homo sapien
gagaaggcctggtcagttgagagaa

SEQ ID NO: 3607611 - DNA, 25 bp, Homo sapien
catccttgagctgtggtttagaagg

SEQ ID NO: 3607612 - DNA, 25 bp, Homo sapien
tggaggtggcatccttgagctgtgg

SEQ ID NO: 3607613 - DNA, 25 bp, Homo sapien
aggtggcatccttgagctgtggttt

SEQ ID NO: 3607614 - DNA, 25 bp, Homo sapien
gccttcagccaaattgtttgggtag

SEQ ID NO: 3607615 - DNA, 25 bp, Homo sapien
ttgggtaggatctagactctgggtc

SEQ ID NO: 3607616 - DNA, 25 bp, Homo sapien
gagtcgttccttttcaacatgtcaa

SEQ ID NO: 3607617 - DNA, 25 bp, Homo sapien
tgggtctccatatccctcgaaaaaa

SEQ ID NO: 3607618 - DNA, 25 bp, Homo sapien
ctgtgaaacaactaaatgatggagc

SEQ ID NO: 3607619 - DNA, 25 bp, Homo sapien
aaacaactaaatgatggagctggta

SEQ ID NO: 3607620 - DNA, 25 bp, Homo sapien
tgtgaaacaactaaatgatggagct

SEQ ID NO: 3607621 - DNA, 25 bp, Homo sapien
tgaaacaactaaatgatggagctgg

SEQ ID NO: 3607622 - DNA, 25 bp, Homo sapien
acactgctgcgtacgccgtccccag

SEQ ID NO: 3607623 - DNA, 25 bp, Homo sapien
tcccgcgtggtggtgatgttctgca

SEQ ID NO: 3607624 - DNA, 25 bp, Homo sapien
gtgatgttctgcatctcgccccact

SEQ ID NO: 3607625 - DNA, 25 bp, Homo sapien
acccgctcccgcgtggtggtgatgt

SEQ ID NO: 3607626 - DNA, 25 bp, Homo sapien
gacccgatagcctttgaggacgcca

SEQ ID NO: 3607627 - DNA, 25 bp, Homo sapien
ccatcaacatagagggaccagaaga

SEQ ID NO: 3607628 - DNA, 25 bp, Homo sapien
cacgtcagaagtgatggacagggcc

SEQ ID NO: 3607629 - DNA, 25 bp, Homo sapien
gctctgaccaggagatgacggccac

SEQ ID NO: 3607630 - DNA, 25 bp, Homo sapien
acgatgctgtactgcccgttgctgc

SEQ ID NO: 3607631 - DNA, 25 bp, Homo sapien
gtagccaatctggtagccccggatg

SEQ ID NO: 3607632 - DNA, 25 bp, Homo sapien
ccagagtggtggcattgatctcgct

SEQ ID NO: 3607633 - DNA, 25 bp, Homo sapien
ccatactgggcgaacttcttgaggt

SEQ ID NO: 3607634 - DNA, 25 bp, Homo sapien
cactggctgcaaggtaacatccatg

SEQ ID NO: 3607635 - DNA, 25 bp, Homo sapien
ctggctgcaaggtaacatccatggg

SEQ ID NO: 3607636 - DNA, 25 bp, Homo sapien
ggtaacatccatggggggcccatcg

SEQ ID NO: 3607637 - DNA, 25 bp, Homo sapien
gcaaggtaacatccatggggggccc

SEQ ID NO: 3607638 - DNA, 25 bp, Homo sapien
tcactgcggccaatcttgttgaaag

SEQ ID NO: 3607639 - DNA, 25 bp, Homo sapien
tgcgtgtggactgcttgaagtccca

SEQ ID NO: 3607640 - DNA, 25 bp, Homo sapien
gagctccttgcttggttcactgcgg

SEQ ID NO: 3607641 - DNA, 25 bp, Homo sapien
agatgccgggtgcaagtccacaatg

SEQ ID NO: 3607642 - DNA, 25 bp, Homo sapien
ccctttcttcatcaaagggtttatg

SEQ ID NO: 3607643 - DNA, 25 bp, Homo sapien
gtctccccagatgcggggtgcccat

SEQ ID NO: 3607644 - DNA, 25 bp, Homo sapien
cccagatgcggggtgcccatggcgc

SEQ ID NO: 3607645 - DNA, 25 bp, Homo sapien
atgcggggtgcccatggcgccccac

SEQ ID NO: 3607646 - DNA, 25 bp, Homo sapien
agtctccccagatgcggggtgccca

SEQ ID NO: 3607647 - DNA, 25 bp, Homo sapien
tgttcttgtattcaatgtcgaagcc

SEQ ID NO: 3607648 - DNA, 25 bp, Homo sapien
gaagcccgtgatgatgctgttcccg

SEQ ID NO: 3607649 - DNA, 25 bp, Homo sapien
ttcccgtcgaatcgctgggtccagc

SEQ ID NO: 3607650 - DNA, 25 bp, Homo sapien
agcgcaggttcatgctccgggcctt

SEQ ID NO: 3607651 - DNA, 25 bp, Homo sapien
tttgaggtggagttagcggtgggcc

SEQ ID NO: 3607652 - DNA, 25 bp, Homo sapien
atcctccaccatggcgtaggctgtg

SEQ ID NO: 3607653 - DNA, 25 bp, Homo sapien
tggagttagcggtgggcccctgggc

SEQ ID NO: 3607654 - DNA, 25 bp, Homo sapien
caccatggcgtaggctgtggcccct

SEQ ID NO: 3607655 - DNA, 25 bp, Homo sapien
gcacagtgagttggatcaagccccg

SEQ ID NO: 3607656 - DNA, 25 bp, Homo sapien
ctgaagaacacagagtccccacggt

SEQ ID NO: 3607657 - DNA, 25 bp, Homo sapien
catacgagttgatggcatggcagct

SEQ ID NO: 3607658 - DNA, 25 bp, Homo sapien
agtccccacggtcagcgggcttgag

SEQ ID NO: 3607659 - DNA, 25 bp, Homo sapien
ttcagtgtggagacgacctcgtcgc

SEQ ID NO: 3607660 - DNA, 25 bp, Homo sapien
catgacgcggtcagggtcgatgact

SEQ ID NO: 3607661 - DNA, 25 bp, Homo sapien
tggcgatggcataccgcatgacgcg

SEQ ID NO: 3607662 - DNA, 25 bp, Homo sapien
ttctcccagcggatgatgatgggcc

SEQ ID NO: 3607663 - DNA, 25 bp, Homo sapien
gagcccgtgtgttcaaggctcggat

SEQ ID NO: 3607664 - DNA, 25 bp, Homo sapien
tcaaggctcggatcgccttttgttt

SEQ ID NO: 3607665 - DNA, 25 bp, Homo sapien
tgtgttcaaggctcggatcgccttt

SEQ ID NO: 3607666 - DNA, 25 bp, Homo sapien
ccgtgtgttcaaggctcggatcgcc

SEQ ID NO: 3607667 - DNA, 25 bp, Homo sapien
caacatacagaacgggtgtggctgg

SEQ ID NO: 3607668 - DNA, 25 bp, Homo sapien
cactctgctgttgtacctggaagca

SEQ ID NO: 3607669 - DNA, 25 bp, Homo sapien
cataggtctccgttgcaaggactcc

SEQ ID NO: 3607670 - DNA, 25 bp, Homo sapien
tggccagatatgagacccggttact

SEQ ID NO: 3607671 - DNA, 25 bp, Homo sapien
ttatggtaccttggagctcagatcc

SEQ ID NO: 3607672 - DNA, 25 bp, Homo sapien
tggagctcagatccatctggaaact

SEQ ID NO: 3607673 - DNA, 25 bp, Homo sapien
actttcccgagtgtattaggggcat

SEQ ID NO: 3607674 - DNA, 25 bp, Homo sapien
tattaggggcattgaggcaaacctt

SEQ ID NO: 3607675 - DNA, 25 bp, Homo sapien
gtgtattaggggcattgaggcaaac

SEQ ID NO: 3607676 - DNA, 25 bp, Homo sapien
tcccgagtgtattaggggcattgag

SEQ ID NO: 3607677 - DNA, 25 bp, Homo sapien
cgatgatgtgggcgtttgagatgga

SEQ ID NO: 3607678 - DNA, 25 bp, Homo sapien
gcgatgatgtgggcgtttgagatgg

SEQ ID NO: 3607679 - DNA, 25 bp, Homo sapien
ggcgatgatgtgggcgtttgagatg

SEQ ID NO: 3607680 - DNA, 25 bp, Homo sapien
ccttcatagatgaaacgacggagac

SEQ ID NO: 3607681 - DNA, 25 bp, Homo sapien
ggtgaggccgctgttttagatgaca

SEQ ID NO: 3607682 - DNA, 25 bp, Homo sapien
catgagcttattgtgaccagggtgg

SEQ ID NO: 3607683 - DNA, 25 bp, Homo sapien
ttttgaatgccccatccaagggtcc

SEQ ID NO: 3607684 - DNA, 25 bp, Homo sapien
tcttctaggacgtggcggatcagca

SEQ ID NO: 3607685 - DNA, 25 bp, Homo sapien
gtgcctacgccgttgctggcctggc

SEQ ID NO: 3607686 - DNA, 25 bp, Homo sapien
tagtagccgatgtcctcttctagga

SEQ ID NO: 3607687 - DNA, 25 bp, Homo sapien
atggacttgctgatgtcggtgccta

SEQ ID NO: 3607688 - DNA, 25 bp, Homo sapien
tgttgggttgcaccacaaatcgagg

SEQ ID NO: 3607689 - DNA, 25 bp, Homo sapien
gcagttgagcacaccagctttgccg

SEQ ID NO: 3607690 - DNA, 25 bp, Homo sapien
agctttgccgtagatgccatcctgg

SEQ ID NO: 3607691 - DNA, 25 bp, Homo sapien
catgcttccacatgaccttgggtgg

SEQ ID NO: 3607692 - DNA, 25 bp, Homo sapien
ccgaggacaccacacagggaatgta

SEQ ID NO: 3607693 - DNA, 25 bp, Homo sapien
tgagatgatcacctgtccgtccttc

SEQ ID NO: 3607694 - DNA, 25 bp, Homo sapien
tatagttgccgttgtgcttgaggga

SEQ ID NO: 3607695 - DNA, 25 bp, Homo sapien
ttcctccaggtgatacggatgggca

SEQ ID NO: 3607696 - DNA, 25 bp, Homo sapien
caccttctcatcccagtgatgcagc

SEQ ID NO: 3607697 - DNA, 25 bp, Homo sapien
cttctcatcccagtgatgcagctca

SEQ ID NO: 3607698 - DNA, 25 bp, Homo sapien
accttctcatcccagtgatgcagct

SEQ ID NO: 3607699 - DNA, 25 bp, Homo sapien
tctcatcccagtgatgcagctcaca

SEQ ID NO: 3607700 - DNA, 25 bp, Homo sapien
aggtccagagatctttttgtcttgt

SEQ ID NO: 3607701 - DNA, 25 bp, Homo sapien
ggtccagagatctttttgtcttgta

SEQ ID NO: 3607702 - DNA, 25 bp, Homo sapien
cacctcaacatcggaaagttctggg

SEQ ID NO: 3607703 - DNA, 25 bp, Homo sapien
tcaacatcggaaagttctgggttga

SEQ ID NO: 3607704 - DNA, 25 bp, Homo sapien
cagccctgaagccttcggtccacac

SEQ ID NO: 3607705 - DNA, 25 bp, Homo sapien
cacacagccctgaagccttcggtcc

SEQ ID NO: 3607706 - DNA, 25 bp, Homo sapien
cacagccctgaagccttcggtccac

SEQ ID NO: 3607707 - DNA, 25 bp, Homo sapien
ttccacacagccctgaagccttcgg

SEQ ID NO: 3607708 - DNA, 25 bp, Homo sapien
tagggcacgtatcacatggctgtcg

SEQ ID NO: 3607709 - DNA, 25 bp, Homo sapien
ttagggcacgtatcacatggctgtc

SEQ ID NO: 3607710 - DNA, 25 bp, Homo sapien
ctggattagggcacgtatcacatgg

SEQ ID NO: 3607711 - DNA, 25 bp, Homo sapien
gattagggcacgtatcacatggctg

SEQ ID NO: 3607712 - DNA, 25 bp, Homo sapien
atccggtcaatacacacaccgggca

SEQ ID NO: 3607713 - DNA, 25 bp, Homo sapien
ccggtcaatacacacaccgggcagc

SEQ ID NO: 3607714 - DNA, 25 bp, Homo sapien
tccggtcaatacacacaccgggcag

SEQ ID NO: 3607715 - DNA, 25 bp, Homo sapien
catctttagcaaggtgctgcaatgg

SEQ ID NO: 3607716 - DNA, 25 bp, Homo sapien
tagcaaggtgctgcaatggtgaaga

SEQ ID NO: 3607717 - DNA, 25 bp, Homo sapien
cagtcatctttagcaaggtgctgca

SEQ ID NO: 3607718 - DNA, 25 bp, Homo sapien
ccacagtcatctttagcaaggtgct

SEQ ID NO: 3607719 - DNA, 25 bp, Homo sapien
tatgcctccactttctgccccgaaa

SEQ ID NO: 3607720 - DNA, 25 bp, Homo sapien
atgcctccactttctgccccgaaaa

SEQ ID NO: 3607721 - DNA, 25 bp, Homo sapien
tgcctccactttctgccccgaaaac

SEQ ID NO: 3607722 - DNA, 25 bp, Homo sapien
gaaaggcccacgcatcctgggtggt

SEQ ID NO: 3607723 - DNA, 25 bp, Homo sapien
tgttcccagtcctgtagaagcagcc

SEQ ID NO: 3607724 - DNA, 25 bp, Homo sapien
gcctcaagcagtactagcaggtgga

SEQ ID NO: 3607725 - DNA, 25 bp, Homo sapien
ccttttttctgaatgccaagctggg

SEQ ID NO: 3607726 - DNA, 25 bp, Homo sapien
ccttgtaccacttgatggagtagta

SEQ ID NO: 3607727 - DNA, 25 bp, Homo sapien
tttgacggctacgtgaacgctctgg

SEQ ID NO: 3607728 - DNA, 25 bp, Homo sapien
tgctgtgatgttccgcatagcccgg

SEQ ID NO: 3607729 - DNA, 25 bp, Homo sapien
tagccgatgaccctgcagttgataa

SEQ ID NO: 3607730 - DNA, 25 bp, Homo sapien
cctcgtgggacagggataggaccaa

SEQ ID NO: 3607731 - DNA, 25 bp, Homo sapien
ggacgcagtatatacatgccttggc

SEQ ID NO: 3607732 - DNA, 25 bp, Homo sapien
ttggccaagagccattcccctcgtg

SEQ ID NO: 3607733 - DNA, 25 bp, Homo sapien
caaagagttgcaaacggacgcagta

SEQ ID NO: 3607734 - DNA, 25 bp, Homo sapien
aggtgtttagcatacttgggcccca

SEQ ID NO: 3607735 - DNA, 25 bp, Homo sapien
caggtgtttagcatacttgggcccc

SEQ ID NO: 3607736 - DNA, 25 bp, Homo sapien
ggcagataccagcaggtgtttagca

SEQ ID NO: 3607737 - DNA, 25 bp, Homo sapien
ctgatatttaaatgtagacaggcac

SEQ ID NO: 3607738 - DNA, 25 bp, Homo sapien
taaccacagagatggcaaaggaact

SEQ ID NO: 3607739 - DNA, 25 bp, Homo sapien
aaggaactcaaaaacctattctgat

SEQ ID NO: 3607740 - DNA, 25 bp, Homo sapien
tcagcacaagaataatggtaaccac

SEQ ID NO: 3607741 - DNA, 25 bp, Homo sapien
ggctgatggtggtgccgtccgacat

SEQ ID NO: 3607742 - DNA, 25 bp, Homo sapien
aagttccgcgctgtgcaccggtaca

SEQ ID NO: 3607743 - DNA, 25 bp, Homo sapien
cctgtgacgttcatgtggctgatgg

SEQ ID NO: 3607744 - DNA, 25 bp, Homo sapien
tgtactggttggtgcggtggctgcc

SEQ ID NO: 3607745 - DNA, 25 bp, Homo sapien
ctcatcgtcgagggcccaggtgacc

SEQ ID NO: 3607746 - DNA, 25 bp, Homo sapien
agtgagaactgctccccggggttga

SEQ ID NO: 3607747 - DNA, 25 bp, Homo sapien
ggcgcccttggccgcacacatcagt

SEQ ID NO: 3607748 - DNA, 25 bp, Homo sapien
ggacgagacgatgcggggcgtgcca

SEQ ID NO: 3607749 - DNA, 25 bp, Homo sapien
aaatgaattaatacatttcagaggc

SEQ ID NO: 3607750 - DNA, 25 bp, Homo sapien
catggatagtctgaggataaaatga

SEQ ID NO: 3607751 - DNA, 25 bp, Homo sapien
taaaatgaattaatacatttcagag

SEQ ID NO: 3607752 - DNA, 25 bp, Homo sapien
atgaattaatacatttcagaggctt

SEQ ID NO: 3607753 - DNA, 25 bp, Homo sapien
tggtaggccccggaatggctcttct

SEQ ID NO: 3607754 - DNA, 25 bp, Homo sapien
tggagatggcctcgtcaggcagcac

SEQ ID NO: 3607755 - DNA, 25 bp, Homo sapien
agaggatgaccgtgctgccaatgcc

SEQ ID NO: 3607756 - DNA, 25 bp, Homo sapien
cagctccgtgttgcgataccagcgg

SEQ ID NO: 3607757 - DNA, 25 bp, Homo sapien
tggcctctgccgaaccgaaggtgtt

SEQ ID NO: 3607758 - DNA, 25 bp, Homo sapien
tggtcagccctgtgatgcgcttggt

SEQ ID NO: 3607759 - DNA, 25 bp, Homo sapien
gacctcacaaatgtaggtgccgctg

SEQ ID NO: 3607760 - DNA, 25 bp, Homo sapien
ctcggtccgcaagtcgctgatggtc

SEQ ID NO: 3607761 - DNA, 25 bp, Homo sapien
ggagtggaagccatccaggatggtg

SEQ ID NO: 3607762 - DNA, 25 bp, Homo sapien
tgtggccggcccacacttcctggga

SEQ ID NO: 3607763 - DNA, 25 bp, Homo sapien
caggatggtggggatcgactcagca

SEQ ID NO: 3607764 - DNA, 25 bp, Homo sapien
gatggtggggatcgactcagcaggg

SEQ ID NO: 3607765 - DNA, 25 bp, Homo sapien
gggcgtcctccttctgtacgtcaga

SEQ ID NO: 3607766 - DNA, 25 bp, Homo sapien
cagcgataggtggagagggcgtcct

SEQ ID NO: 3607767 - DNA, 25 bp, Homo sapien
ctgtcacagagaggcgtgccccatt

SEQ ID NO: 3607768 - DNA, 25 bp, Homo sapien
tacagcccgccgtggtaggtaataa

SEQ ID NO: 3607769 - DNA, 25 bp, Homo sapien
tacttcccggtttcgtacagcctca

SEQ ID NO: 3607770 - DNA, 25 bp, Homo sapien
tcccggtttcgtacagcctcagagg

SEQ ID NO: 3607771 - DNA, 25 bp, Homo sapien
caggacatagttcgttacttcccgg

SEQ ID NO: 3607772 - DNA, 25 bp, Homo sapien
ctggagacacaatcaggacatagtt

SEQ ID NO: 3607773 - DNA, 25 bp, Homo sapien
gatgaggattttcacacacaaacaa

SEQ ID NO: 3607774 - DNA, 25 bp, Homo sapien
ccactggaggccgtagaactgcagg

SEQ ID NO: 3607775 - DNA, 25 bp, Homo sapien
cactggaggccgtagaactgcaggg

SEQ ID NO: 3607776 - DNA, 25 bp, Homo sapien
gccactggaggccgtagaactgcag

SEQ ID NO: 3607777 - DNA, 25 bp, Homo sapien
ccagtggactctgcatgtgccgttt

SEQ ID NO: 3607778 - DNA, 25 bp, Homo sapien
aaggtggagggcgccaagccctgca

SEQ ID NO: 3607779 - DNA, 25 bp, Homo sapien
ctgtcagaggaaccgaggaagcacg

SEQ ID NO: 3607780 - DNA, 25 bp, Homo sapien
aggaagcacggagaaagccagctcc

SEQ ID NO: 3607781 - DNA, 25 bp, Homo sapien
ttgtggggagctagggtttctatag

SEQ ID NO: 3607782 - DNA, 25 bp, Homo sapien
gatgctgccttgatggttgtgggga

SEQ ID NO: 3607783 - DNA, 25 bp, Homo sapien
tggggagctagggtttctatagcaa

SEQ ID NO: 3607784 - DNA, 25 bp, Homo sapien
tctgatgtttcacatccttcattgt

SEQ ID NO: 3607785 - DNA, 25 bp, Homo sapien
tctgcaaggaaggtcccagtaggca

SEQ ID NO: 3607786 - DNA, 25 bp, Homo sapien
taaaaacagtgtcgtcagcctgcag

SEQ ID NO: 3607787 - DNA, 25 bp, Homo sapien
tgagaccaggctttggccacagggt

SEQ ID NO: 3607788 - DNA, 25 bp, Homo sapien
gactaatgagataacttgccccaca

SEQ ID NO: 3607789 - DNA, 25 bp, Homo sapien
tacatcggtacactccggagcttgg

SEQ ID NO: 3607790 - DNA, 25 bp, Homo sapien
ggagcttggagtgactgctgggcca

SEQ ID NO: 3607791 - DNA, 25 bp, Homo sapien
gattctagatcatgcttgactccca

SEQ ID NO: 3607792 - DNA, 25 bp, Homo sapien
ttcccatccaacgtctacatcggta

SEQ ID NO: 3607793 - DNA, 25 bp, Homo sapien
ggtgccagcatctacgtccctcttt

SEQ ID NO: 3607794 - DNA, 25 bp, Homo sapien
ccagggtccccgtgcactgcccatt

SEQ ID NO: 3607795 - DNA, 25 bp, Homo sapien
gtgccagcatctacgtccctctttc

SEQ ID NO: 3607796 - DNA, 25 bp, Homo sapien
cagatattgggtcctggatcaggct

SEQ ID NO: 3607797 - DNA, 25 bp, Homo sapien
cactgggctgaactcactgcatttc

SEQ ID NO: 3607798 - DNA, 25 bp, Homo sapien
ggatcaggctccatttcagagagag

SEQ ID NO: 3607799 - DNA, 25 bp, Homo sapien
gggcactcagtataaacctcaagga

SEQ ID NO: 3607800 - DNA, 25 bp, Homo sapien
ggaagagtttatcaatgtcgcccat

SEQ ID NO: 3607801 - DNA, 25 bp, Homo sapien
caggaagagtttatcaatgtcgccc

SEQ ID NO: 3607802 - DNA, 25 bp, Homo sapien
tcaggaagagtttatcaatgtcgcc

SEQ ID NO: 3607803 - DNA, 25 bp, Homo sapien
agtcaggaagagtttatcaatgtcg

SEQ ID NO: 3607804 - DNA, 25 bp, Homo sapien
ttgtgtgggtcaccctgagttggat

SEQ ID NO: 3607805 - DNA, 25 bp, Homo sapien
ctctatctccacctttgtgtgggtc

SEQ ID NO: 3607806 - DNA, 25 bp, Homo sapien
ctttgtgtgggtcaccctgagttgg

SEQ ID NO: 3607807 - DNA, 25 bp, Homo sapien
tgtgggtcaccctgagttggatttt

SEQ ID NO: 3607808 - DNA, 25 bp, Homo sapien
gcctggctggccaagtggtaacatc

SEQ ID NO: 3607809 - DNA, 25 bp, Homo sapien
taacatcttgcaggcacgtgaccgc

SEQ ID NO: 3607810 - DNA, 25 bp, Homo sapien
tagcacacagggaggatcttcattg

SEQ ID NO: 3607811 - DNA, 25 bp, Homo sapien
gaatctcactctggatcatgtcggg

SEQ ID NO: 3607812 - DNA, 25 bp, Homo sapien
agctagaaaagaaatgcctcgtgtc

SEQ ID NO: 3607813 - DNA, 25 bp, Homo sapien
gcccaggtaaccatgcaggacaaca

SEQ ID NO: 3607814 - DNA, 25 bp, Homo sapien
ggtcctgccactacttgttgaagga

SEQ ID NO: 3607815 - DNA, 25 bp, Homo sapien
aacaccacctgagcacttggcaaag

SEQ ID NO: 3607816 - DNA, 25 bp, Homo sapien
tgccaggcatcatgaaaagggccct

SEQ ID NO: 3607817 - DNA, 25 bp, Homo sapien
ttcaggtttgcgtgggtcagttgcc

SEQ ID NO: 3607818 - DNA, 25 bp, Homo sapien
cacaagtgcttgtaagtaggagccg

SEQ ID NO: 3607819 - DNA, 25 bp, Homo sapien
taaaagggattgctcctgggagccg

SEQ ID NO: 3607820 - DNA, 25 bp, Homo sapien
ccactgctccccgccctcaataagt

SEQ ID NO: 3607821 - DNA, 25 bp, Homo sapien
tctggcaatgttcctctgcaccagg

SEQ ID NO: 3607822 - DNA, 25 bp, Homo sapien
gagccgcggagtccgctcagccgtg

SEQ ID NO: 3607823 - DNA, 25 bp, Homo sapien
gcccctgtgcggtagactccactct

SEQ ID NO: 3607824 - DNA, 25 bp, Homo sapien
tttattaaatacgttcaagagccta

SEQ ID NO: 3607825 - DNA, 25 bp, Homo sapien
tctcagcagggctggctggccaagg

SEQ ID NO: 3607826 - DNA, 25 bp, Homo sapien
tcagcagggctggctggccaaggac

SEQ ID NO: 3607827 - DNA, 25 bp, Homo sapien
tcaagggatctcagcagggctggct

SEQ ID NO: 3607828 - DNA, 25 bp, Homo sapien
gatctcagcagggctggctggccaa

SEQ ID NO: 3607829 - DNA, 25 bp, Homo sapien
gaaaaagcacactcacgctctgtcc

SEQ ID NO: 3607830 - DNA, 25 bp, Homo sapien
aagaaaaagcacactcacgctctgt

SEQ ID NO: 3607831 - DNA, 25 bp, Homo sapien
cgcaggccgcctcagagtcacagac

SEQ ID NO: 3607832 - DNA, 25 bp, Homo sapien
gcccacgctccccgaggtgggatga

SEQ ID NO: 3607833 - DNA, 25 bp, Homo sapien
gagcccccacagtggtggttcatgt

SEQ ID NO: 3607834 - DNA, 25 bp, Homo sapien
tcaagctctcgagatggagccctca

SEQ ID NO: 3607835 - DNA, 25 bp, Homo sapien
acccagaatgtttgatgaggccaga

SEQ ID NO: 3607836 - DNA, 25 bp, Homo sapien
aagtcctactcagagtccctcgctt

SEQ ID NO: 3607837 - DNA, 25 bp, Homo sapien
tctgtctcctgatactgtcagctgt

SEQ ID NO: 3607838 - DNA, 25 bp, Homo sapien
gtcttcgtgtagatctcatcctcca

SEQ ID NO: 3607839 - DNA, 25 bp, Homo sapien
tagccggggctaatagatccatgga

SEQ ID NO: 3607840 - DNA, 25 bp, Homo sapien
ccaaaatgactttgccataagaggg

SEQ ID NO: 3607841 - DNA, 25 bp, Homo sapien
aggcagcaagggcaaagtcttcgtg

SEQ ID NO: 3607842 - DNA, 25 bp, Homo sapien
ttgcaaattagagtcacccagcgtg

SEQ ID NO: 3607843 - DNA, 25 bp, Homo sapien
atttcaaggtagcatgacagacggc

SEQ ID NO: 3607844 - DNA, 25 bp, Homo sapien
tgtatgagagggagcacaattggcc

SEQ ID NO: 3607845 - DNA, 25 bp, Homo sapien
acaattggcccaaatgcccggaggc

SEQ ID NO: 3607846 - DNA, 25 bp, Homo sapien
taagagccgagtgcgtactcaggaa

SEQ ID NO: 3607847 - DNA, 25 bp, Homo sapien
tatttcctgccgaagtctgtgctga

SEQ ID NO: 3607848 - DNA, 25 bp, Homo sapien
gctcgtacgagctgggcagttataa

SEQ ID NO: 3607849 - DNA, 25 bp, Homo sapien
gtacgcgagctgtggtctaagagcc

SEQ ID NO: 3607850 - DNA, 25 bp, Homo sapien
caatacattccaaagccgaatatca

SEQ ID NO: 3607851 - DNA, 25 bp, Homo sapien
aaaatcaatacattccaaagccgaa

SEQ ID NO: 3607852 - DNA, 25 bp, Homo sapien
ttccaaagccgaatatcaatgattt

SEQ ID NO: 3607853 - DNA, 25 bp, Homo sapien
cattccaaagccgaatatcaatgat

SEQ ID NO: 3607854 - DNA, 25 bp, Homo sapien
tggatagcacctgggacatagctgg

SEQ ID NO: 3607855 - DNA, 25 bp, Homo sapien
gaagctgaagcagtacccacgttct

SEQ ID NO: 3607856 - DNA, 25 bp, Homo sapien
cacgttctacagcaaggtaagggag

SEQ ID NO: 3607857 - DNA, 25 bp, Homo sapien
tattttctcatgacctgagccctgg

SEQ ID NO: 3607858 - DNA, 25 bp, Homo sapien
gggagcttcactttacagggccagg

SEQ ID NO: 3607859 - DNA, 25 bp, Homo sapien
taaaggccggctattgacacctgct

SEQ ID NO: 3607860 - DNA, 25 bp, Homo sapien
tgcagccgctaagtacaatgaccct

SEQ ID NO: 3607861 - DNA, 25 bp, Homo sapien
cacaggttggcgtctttcaggacaa

SEQ ID NO: 3607862 - DNA, 25 bp, Homo sapien
cctctgcctgaccgtgcctctgtgc

SEQ ID NO: 3607863 - DNA, 25 bp, Homo sapien
ccatgagccactcattcccctctgc

SEQ ID NO: 3607864 - DNA, 25 bp, Homo sapien
cccctctgcctgaccgtgcctctgt

SEQ ID NO: 3607865 - DNA, 25 bp, Homo sapien
cccatgagccactcattcccctctg

SEQ ID NO: 3607866 - DNA, 25 bp, Homo sapien
cctactgcgtgtaaagtgatctgct

SEQ ID NO: 3607867 - DNA, 25 bp, Homo sapien
ggtaaactggactgcacgcctctaa

SEQ ID NO: 3607868 - DNA, 25 bp, Homo sapien
gaagacagagcacggttggtcccag

SEQ ID NO: 3607869 - DNA, 25 bp, Homo sapien
gagagccgagttcagtcatctgcga

SEQ ID NO: 3607870 - DNA, 25 bp, Homo sapien
taataatgccgtttccctgcttagg

SEQ ID NO: 3607871 - DNA, 25 bp, Homo sapien
gggctaccgaaaggcaatcactcac

SEQ ID NO: 3607872 - DNA, 25 bp, Homo sapien
gaagtcggattcgttccctgctcgg

SEQ ID NO: 3607873 - DNA, 25 bp, Homo sapien
tggaggaccgcttgttgcagaaatg

SEQ ID NO: 3607874 - DNA, 25 bp, Homo sapien
cattccaatctgaaaggtgtttcgg

SEQ ID NO: 3607875 - DNA, 25 bp, Homo sapien
gaaagatcttcagcatcttgccgtg

SEQ ID NO: 3607876 - DNA, 25 bp, Homo sapien
cagaatcgattttttggaacctcag

SEQ ID NO: 3607877 - DNA, 25 bp, Homo sapien
gatcttgattctggagtcccacgta

SEQ ID NO: 3607878 - DNA, 25 bp, Homo sapien
tggtatcatggaaccccaaaacgtg

SEQ ID NO: 3607879 - DNA, 25 bp, Homo sapien
tatgttgggtcaccagtgttccggg

SEQ ID NO: 3607880 - DNA, 25 bp, Homo sapien
gggaagagctcactaagacaacctg

SEQ ID NO: 3607881 - DNA, 25 bp, Homo sapien
caagtgagaagccaacatgcagcag

SEQ ID NO: 3607882 - DNA, 25 bp, Homo sapien
tgcaaacctctgtgaacctgtaata

SEQ ID NO: 3607883 - DNA, 25 bp, Homo sapien
tttgccaacgcacatgacacttacg

SEQ ID NO: 3607884 - DNA, 25 bp, Homo sapien
gtactctagggctacggcactgcaa

SEQ ID NO: 3607885 - DNA, 25 bp, Homo sapien
gctgcctgggttacatccctccaga

SEQ ID NO: 3607886 - DNA, 25 bp, Homo sapien
gggtcaaatacgtgccttgcaagaa

SEQ ID NO: 3607887 - DNA, 25 bp, Homo sapien
taaagggccctcaattcaccactga

SEQ ID NO: 3607888 - DNA, 25 bp, Homo sapien
ccagcgccctgggtagaatagcact

SEQ ID NO: 3607889 - DNA, 25 bp, Homo sapien
cacttattagtaggacttggcgtca

SEQ ID NO: 3607890 - DNA, 25 bp, Homo sapien
aagggtgttccccaagagctctgga

SEQ ID NO: 3607891 - DNA, 25 bp, Homo sapien
cattgcgtggacctatggccaaacg

SEQ ID NO: 3607892 - DNA, 25 bp, Homo sapien
caagtgaagcgataccattgcgtgg

SEQ ID NO: 3607893 - DNA, 25 bp, Homo sapien
ggttgaagcagagactggatgccca

SEQ ID NO: 3607894 - DNA, 25 bp, Homo sapien
tagtctgcaattaaagactgcagtg

SEQ ID NO: 3607895 - DNA, 25 bp, Homo sapien
atatcatcaggggtgaactggcagg

SEQ ID NO: 3607896 - DNA, 25 bp, Homo sapien
gaggagcatcaggaggacatgcggg

SEQ ID NO: 3607897 - DNA, 25 bp, Homo sapien
ctgttttgtgaacctcctgttgctc

SEQ ID NO: 3607898 - DNA, 25 bp, Homo sapien
taaagacagcaagtcctcctgagtg

SEQ ID NO: 3607899 - DNA, 25 bp, Homo sapien
tcatgagggaatccaagctgctgct

SEQ ID NO: 3607900 - DNA, 25 bp, Homo sapien
tggacacactccgtaatggtgagct

SEQ ID NO: 3607901 - DNA, 25 bp, Homo sapien
tattgcctcctacacaatatggcgg

SEQ ID NO: 3607902 - DNA, 25 bp, Homo sapien
tttgatctgggtgatgaaaggcact

SEQ ID NO: 3607903 - DNA, 25 bp, Homo sapien
ttgatctgggtgatgaaaggcactg

SEQ ID NO: 3607904 - DNA, 25 bp, Homo sapien
aggatttgatctgggtgatgaaagg

SEQ ID NO: 3607905 - DNA, 25 bp, Homo sapien
gatttgatctgggtgatgaaaggca

SEQ ID NO: 3607906 - DNA, 25 bp, Homo sapien
cctagaaattggatgatccacgttc

SEQ ID NO: 3607907 - DNA, 25 bp, Homo sapien
cttgttctcgatttgtcctataggg

SEQ ID NO: 3607908 - DNA, 25 bp, Homo sapien
tgtcctatagggttgtgtagccttt

SEQ ID NO: 3607909 - DNA, 25 bp, Homo sapien
tctgggttgcagttctcactcggga

SEQ ID NO: 3607910 - DNA, 25 bp, Homo sapien
tgttgccatggtgattagataaaat

SEQ ID NO: 3607911 - DNA, 25 bp, Homo sapien
tagataaaattcacgccaagtctcc

SEQ ID NO: 3607912 - DNA, 25 bp, Homo sapien
tatttcagacagtttctcacccctc

SEQ ID NO: 3607913 - DNA, 25 bp, Homo sapien
tcacgccaagtctccagggaaggat

SEQ ID NO: 3607914 - DNA, 25 bp, Homo sapien
aagtatgcctgaagctgccgagcca

SEQ ID NO: 3607915 - DNA, 25 bp, Homo sapien
gatgctcttagtgccaagtatgcct

SEQ ID NO: 3607916 - DNA, 25 bp, Homo sapien
ggcgagcagaggaaagcgctcatct

SEQ ID NO: 3607917 - DNA, 25 bp, Homo sapien
gccgagccagcaacacatcctgaaa

SEQ ID NO: 3607918 - DNA, 25 bp, Homo sapien
ttccttgaaaagtgagagactcagc

SEQ ID NO: 3607919 - DNA, 25 bp, Homo sapien
aggcaaagtgcccttggtcaaggtc

SEQ ID NO: 3607920 - DNA, 25 bp, Homo sapien
ccctctcccaagtggagttgagcag

SEQ ID NO: 3607921 - DNA, 25 bp, Homo sapien
tttcatcagggcttccctaggccga

SEQ ID NO: 3607922 - DNA, 25 bp, Homo sapien
gcaaatagggccacccaggatgtgg

SEQ ID NO: 3607923 - DNA, 25 bp, Homo sapien
acttttggatcagggttgagcaagc

SEQ ID NO: 3607924 - DNA, 25 bp, Homo sapien
gcagagattcccgacttttggatca

SEQ ID NO: 3607925 - DNA, 25 bp, Homo sapien
agggagcaaatagggccacccagga

SEQ ID NO: 3607926 - DNA, 25 bp, Homo sapien
tcctgccatacccactaccatcagc

SEQ ID NO: 3607927 - DNA, 25 bp, Homo sapien
tggagttcctgccatacccactacc

SEQ ID NO: 3607928 - DNA, 25 bp, Homo sapien
caagactacagccaccggctcctct

SEQ ID NO: 3607929 - DNA, 25 bp, Homo sapien
tacagccaccggctcctctggagtt

SEQ ID NO: 3607930 - DNA, 25 bp, Homo sapien
ctggagttgggagtaggcttctcca

SEQ ID NO: 3607931 - DNA, 25 bp, Homo sapien
aactttctcttgtaatgtgagctgg

SEQ ID NO: 3607932 - DNA, 25 bp, Homo sapien
gagggcgatcatccgggcctcttga

SEQ ID NO: 3607933 - DNA, 25 bp, Homo sapien
aggcccactctcttgtctacaggct

SEQ ID NO: 3607934 - DNA, 25 bp, Homo sapien
cgccataggaggcctcacacctgga

SEQ ID NO: 3607935 - DNA, 25 bp, Homo sapien
cttccagatgaggcctcacacatgg

SEQ ID NO: 3607936 - DNA, 25 bp, Homo sapien
acatggacacctggccgccatagga

SEQ ID NO: 3607937 - DNA, 25 bp, Homo sapien
cacacatggacacctggccgccata

SEQ ID NO: 3607938 - DNA, 25 bp, Homo sapien
tagacactggtaatgccaccgattt

SEQ ID NO: 3607939 - DNA, 25 bp, Homo sapien
tttgccacgggacattaggcaggtc

SEQ ID NO: 3607940 - DNA, 25 bp, Homo sapien
cattaggcaggtctcccagtgtcct

SEQ ID NO: 3607941 - DNA, 25 bp, Homo sapien
cattccacaggacggttcagtaggg

SEQ ID NO: 3607942 - DNA, 25 bp, Homo sapien
tctttaagctggagatctgttgccc

SEQ ID NO: 3607943 - DNA, 25 bp, Homo sapien
catgagctgaatcctaaattcccag

SEQ ID NO: 3607944 - DNA, 25 bp, Homo sapien
aggatggctgtttcgttcactggtc

SEQ ID NO: 3607945 - DNA, 25 bp, Homo sapien
tccatcagagccgacaacatgagct

SEQ ID NO: 3607946 - DNA, 25 bp, Homo sapien
aaaagatgaaagatacagttgtaca

SEQ ID NO: 3607947 - DNA, 25 bp, Homo sapien
agatgaaagatacagttgtacaccc

SEQ ID NO: 3607948 - DNA, 25 bp, Homo sapien
aaagatgaaagatacagttgtacac

SEQ ID NO: 3607949 - DNA, 25 bp, Homo sapien
aagatgaaagatacagttgtacacc

SEQ ID NO: 3607950 - DNA, 25 bp, Homo sapien
tgaggcacttgaagacggccacgtt

SEQ ID NO: 3607951 - DNA, 25 bp, Homo sapien
cgttgccacgcattgacctttgatc

SEQ ID NO: 3607952 - DNA, 25 bp, Homo sapien
tttgatcctccacccggacggtgta

SEQ ID NO: 3607953 - DNA, 25 bp, Homo sapien
agatacaacgctaacatattcctgc

SEQ ID NO: 3607954 - DNA, 25 bp, Homo sapien
tgtggccaggtaccatcgaagggcc

SEQ ID NO: 3607955 - DNA, 25 bp, Homo sapien
tgtgcggcacgtcgtagatgtcgtc

SEQ ID NO: 3607956 - DNA, 25 bp, Homo sapien
cccacggagctggaaaaggtcacct

SEQ ID NO: 3607957 - DNA, 25 bp, Homo sapien
tccgcggtgcagaagtagtcattgt

SEQ ID NO: 3607958 - DNA, 25 bp, Homo sapien
gtagaggctggtgccaacatcttca

SEQ ID NO: 3607959 - DNA, 25 bp, Homo sapien
ggctggtgccaacatcttcagggcg

SEQ ID NO: 3607960 - DNA, 25 bp, Homo sapien
ctgcaaggagtcatttacaaagtag

SEQ ID NO: 3607961 - DNA, 25 bp, Homo sapien
aaagtagaggctggtgccaacatct

SEQ ID NO: 3607962 - DNA, 25 bp, Homo sapien
taccaggcagctcgttgaggaaggc

SEQ ID NO: 3607963 - DNA, 25 bp, Homo sapien
ggcttaactctgaaccgagcctctg

SEQ ID NO: 3607964 - DNA, 25 bp, Homo sapien
aatgtccacaactttataggatggg

SEQ ID NO: 3607965 - DNA, 25 bp, Homo sapien
ggagggcccacatccggccgtatta

SEQ ID NO: 3607966 - DNA, 25 bp, Homo sapien
gaggaccagccagacggtgtcttgc

SEQ ID NO: 3607967 - DNA, 25 bp, Homo sapien
tgttgcatcttggaaactgtctgag

SEQ ID NO: 3607968 - DNA, 25 bp, Homo sapien
cagcatcagagcatgtaccaggcag

SEQ ID NO: 3607969 - DNA, 25 bp, Homo sapien
gcatcttggaaactgtctgagccca

SEQ ID NO: 3607970 - DNA, 25 bp, Homo sapien
gccatagtagtatcctctcagggcc

SEQ ID NO: 3607971 - DNA, 25 bp, Homo sapien
tctggatcagtggatatgcagaaaa

SEQ ID NO: 3607972 - DNA, 25 bp, Homo sapien
ggctttggagctgcacctgccatag

SEQ ID NO: 3607973 - DNA, 25 bp, Homo sapien
tgcacctgccatagtagtatcctct

SEQ ID NO: 3607974 - DNA, 25 bp, Homo sapien
ccgatgattaaaacaccttcccagt

SEQ ID NO: 3607975 - DNA, 25 bp, Homo sapien
ctggcacgctggatggaacaacgga

SEQ ID NO: 3607976 - DNA, 25 bp, Homo sapien
tattggagactcgataaccgatgat

SEQ ID NO: 3607977 - DNA, 25 bp, Homo sapien
gttcatccggctgcctaaacctgga

SEQ ID NO: 3607978 - DNA, 25 bp, Homo sapien
tgtaacaggctcgaacattcacatt

SEQ ID NO: 3607979 - DNA, 25 bp, Homo sapien
tattgcaagaggatattgttttctg

SEQ ID NO: 3607980 - DNA, 25 bp, Homo sapien
ccgctcctcacagatggacgtacaa

SEQ ID NO: 3607981 - DNA, 25 bp, Homo sapien
ggacgtacaaattattgcaagagga

SEQ ID NO: 3607982 - DNA, 25 bp, Homo sapien
ggataagcgccatgcggtgcgccaa

SEQ ID NO: 3607983 - DNA, 25 bp, Homo sapien
gacgcacggacatagcggaggaatc

SEQ ID NO: 3607984 - DNA, 25 bp, Homo sapien
tagcggaggaatcagccgccgagtc

SEQ ID NO: 3607985 - DNA, 25 bp, Homo sapien
caacattcgcgccagggctggggtc

SEQ ID NO: 3607986 - DNA, 25 bp, Homo sapien
ctttgtgtaaagagtccaggagcag

SEQ ID NO: 3607987 - DNA, 25 bp, Homo sapien
tttgtgtaaagagtccaggagcagg

SEQ ID NO: 3607988 - DNA, 25 bp, Homo sapien
ttgtgtaaagagtccaggagcagga

SEQ ID NO: 3607989 - DNA, 25 bp, Homo sapien
agaggccctattctccggggaggtg

SEQ ID NO: 3607990 - DNA, 25 bp, Homo sapien
aggtggtcctgtggccggccgtgcg

SEQ ID NO: 3607991 - DNA, 25 bp, Homo sapien
gcccgcactcggcgccccgctctct

SEQ ID NO: 3607992 - DNA, 25 bp, Homo sapien
ctcagcccagcgctcggctgcggcg

SEQ ID NO: 3607993 - DNA, 25 bp, Homo sapien
caccggcttggagcctgtggtcgca

SEQ ID NO: 3607994 - DNA, 25 bp, Homo sapien
gagaggcgaggggtccctgtcaccc

SEQ ID NO: 3607995 - DNA, 25 bp, Homo sapien
gcggcaccccgggtggtgagcgccg

SEQ ID NO: 3607996 - DNA, 25 bp, Homo sapien
cccggctccgctgtctgagaggcga

SEQ ID NO: 3607997 - DNA, 25 bp, Homo sapien
gcctcccgactccagagcagagctt

SEQ ID NO: 3607998 - DNA, 25 bp, Homo sapien
ttgctctataagctgcagcatccct

SEQ ID NO: 3607999 - DNA, 25 bp, Homo sapien
caaggccaccaaggttgtatcagaa

SEQ ID NO: 3608000 - DNA, 25 bp, Homo sapien
tgtatcagaagcaagactagaaccc

SEQ ID NO: 3608001 - DNA, 25 bp, Homo sapien
caatttgcaggaggtgttttgtcat

SEQ ID NO: 3608002 - DNA, 25 bp, Homo sapien
gtcacgcagggagtgacagagccct

SEQ ID NO: 3608003 - DNA, 25 bp, Homo sapien
cccgaggtcacgcagggagtgacag

SEQ ID NO: 3608004 - DNA, 25 bp, Homo sapien
agggagtgacagagccctcacgttt

SEQ ID NO: 3608005 - DNA, 25 bp, Homo sapien
ggcttattcttctaccatgccccct

SEQ ID NO: 3608006 - DNA, 25 bp, Homo sapien
ggaaagtcgtagcgaggattaaata

SEQ ID NO: 3608007 - DNA, 25 bp, Homo sapien
cttggaaagtcgtagcgaggattaa

SEQ ID NO: 3608008 - DNA, 25 bp, Homo sapien
tggaaagtcgtagcgaggattaaat

SEQ ID NO: 3608009 - DNA, 25 bp, Homo sapien
gccttggaaagtcgtagcgaggatt

SEQ ID NO: 3608010 - DNA, 25 bp, Homo sapien
cataggtgtatagtgtgtacccaca

SEQ ID NO: 3608011 - DNA, 25 bp, Homo sapien
catagccagctgtgttacctgtgac

SEQ ID NO: 3608012 - DNA, 25 bp, Homo sapien
tattatggctctaagatcactggag

SEQ ID NO: 3608013 - DNA, 25 bp, Homo sapien
tgtagtccggattcgacagagctga

SEQ ID NO: 3608014 - DNA, 25 bp, Homo sapien
tcttaaaacagaatagactcatgaa

SEQ ID NO: 3608015 - DNA, 25 bp, Homo sapien
tatattcaactttagcaatatctcg

SEQ ID NO: 3608016 - DNA, 25 bp, Homo sapien
tagcaatatctcgtccgggcatggt

SEQ ID NO: 3608017 - DNA, 25 bp, Homo sapien
tgaatccggatgaggtctgagcagc

SEQ ID NO: 3608018 - DNA, 25 bp, Homo sapien
tccttggcctgtaatcctgatgtgg

SEQ ID NO: 3608019 - DNA, 25 bp, Homo sapien
gaatgtcatctaaggtcctagccca

SEQ ID NO: 3608020 - DNA, 25 bp, Homo sapien
taacacgctggtgggcattgtcaat

SEQ ID NO: 3608021 - DNA, 25 bp, Homo sapien
aaatggcacttacttacacaatggg

SEQ ID NO: 3608022 - DNA, 25 bp, Homo sapien
tagacgcagcgccagtggagacgct

SEQ ID NO: 3608023 - DNA, 25 bp, Homo sapien
cgccagtggagacgctcagttcttt

SEQ ID NO: 3608024 - DNA, 25 bp, Homo sapien
tccttcactagacgcagcgccagtg

SEQ ID NO: 3608025 - DNA, 25 bp, Homo sapien
gggagcccacttccttcactagacg

SEQ ID NO: 3608026 - DNA, 25 bp, Homo sapien
ttgaatcagactcacggcagctggg

SEQ ID NO: 3608027 - DNA, 25 bp, Homo sapien
cacttcgagttcacctggggaggct

SEQ ID NO: 3608028 - DNA, 25 bp, Homo sapien
tggggaggctgaacaaccaccgatg

SEQ ID NO: 3608029 - DNA, 25 bp, Homo sapien
caccgatgccccatcagttgaatca

SEQ ID NO: 3608030 - DNA, 25 bp, Homo sapien
ttgcggcctcagacgaagactgtca

SEQ ID NO: 3608031 - DNA, 25 bp, Homo sapien
tggtcagaaagggaattgcggcctc

SEQ ID NO: 3608032 - DNA, 25 bp, Homo sapien
gactgtcatggtcggagttgtctga

SEQ ID NO: 3608033 - DNA, 25 bp, Homo sapien
caaaggcccttggaaagattgagtt

SEQ ID NO: 3608034 - DNA, 25 bp, Homo sapien
cagacgctaggtggtgccagaatcc

SEQ ID NO: 3608035 - DNA, 25 bp, Homo sapien
tcagcgaagggaagtgactcatcca

SEQ ID NO: 3608036 - DNA, 25 bp, Homo sapien
aaacctcatattcaaccgggctggg

SEQ ID NO: 3608037 - DNA, 25 bp, Homo sapien
taagggtttggcctacaccaatgag

SEQ ID NO: 3608038 - DNA, 25 bp, Homo sapien
cagaggcctcatgggtatccaatgg

SEQ ID NO: 3608039 - DNA, 25 bp, Homo sapien
tatttgtacttgagcttggagaggc

SEQ ID NO: 3608040 - DNA, 25 bp, Homo sapien
gaggagtggcctacagatgacaaca

SEQ ID NO: 3608041 - DNA, 25 bp, Homo sapien
gacttcccaggtgtataaaagccag

SEQ ID NO: 3608042 - DNA, 25 bp, Homo sapien
tataagcatgaggtggcacgaggca

SEQ ID NO: 3608043 - DNA, 25 bp, Homo sapien
tcagcccaagcgctggcagtgacgg

SEQ ID NO: 3608044 - DNA, 25 bp, Homo sapien
gagcttccttcagcccaagcgctgg

SEQ ID NO: 3608045 - DNA, 25 bp, Homo sapien
ttggcgatgccacctgggggtcaca

SEQ ID NO: 3608046 - DNA, 25 bp, Homo sapien
aattcttatttaccgagtccaggag

SEQ ID NO: 3608047 - DNA, 25 bp, Homo sapien
tgacagaccacctggctgatgtgtg

SEQ ID NO: 3608048 - DNA, 25 bp, Homo sapien
tctgtgatctcctgcggcacacact

SEQ ID NO: 3608049 - DNA, 25 bp, Homo sapien
taaacacacgatgggtgacagacca

SEQ ID NO: 3608050 - DNA, 25 bp, Homo sapien
ttacggctcatcttcattgatttgc

SEQ ID NO: 3608051 - DNA, 25 bp, Homo sapien
ggtgggtctagggatctctgaggct

SEQ ID NO: 3608052 - DNA, 25 bp, Homo sapien
ccactgtgtcagagacaaaatcctc

SEQ ID NO: 3608053 - DNA, 25 bp, Homo sapien
tgtcagagacaaaatcctcagcccg

SEQ ID NO: 3608054 - DNA, 25 bp, Homo sapien
tgggtctagggatctctgaggctgg

SEQ ID NO: 3608055 - DNA, 25 bp, Homo sapien
tgcgcttcttattgcccccacagcg

SEQ ID NO: 3608056 - DNA, 25 bp, Homo sapien
ttattgcccccacagcggaatcttc

SEQ ID NO: 3608057 - DNA, 25 bp, Homo sapien
attgcccccacagcggaatcttctg

SEQ ID NO: 3608058 - DNA, 25 bp, Homo sapien
tcttattgcccccacagcggaatct

SEQ ID NO: 3608059 - DNA, 25 bp, Homo sapien
aaagtggagccccttgcttaggcca

SEQ ID NO: 3608060 - DNA, 25 bp, Homo sapien
cacacgtgcattagaagtccagagc

SEQ ID NO: 3608061 - DNA, 25 bp, Homo sapien
cactggagggtgcacttgagcaagc

SEQ ID NO: 3608062 - DNA, 25 bp, Homo sapien
tatcgagagtagcagcagagactgg

SEQ ID NO: 3608063 - DNA, 25 bp, Homo sapien
atcaggcccccattgcgaacggtct

SEQ ID NO: 3608064 - DNA, 25 bp, Homo sapien
atgaaggccagtccagcgaagatca

SEQ ID NO: 3608065 - DNA, 25 bp, Homo sapien
aaggccagtccagcgaagatcaggc

SEQ ID NO: 3608066 - DNA, 25 bp, Homo sapien
ggccagtccagcgaagatcaggccc

SEQ ID NO: 3608067 - DNA, 25 bp, Homo sapien
ggagcgggatgggtggtctctccca

SEQ ID NO: 3608068 - DNA, 25 bp, Homo sapien
cagcccgtggtaaccaggggagata

SEQ ID NO: 3608069 - DNA, 25 bp, Homo sapien
ccgcagcagcccgtggtaaccaggg

SEQ ID NO: 3608070 - DNA, 25 bp, Homo sapien
caagaggagcgggatgggtggtctc

SEQ ID NO: 3608071 - DNA, 25 bp, Homo sapien
tccacgtcccccttggggctgccgc

SEQ ID NO: 3608072 - DNA, 25 bp, Homo sapien
cctttggagagtgtgacttgaactt

SEQ ID NO: 3608073 - DNA, 25 bp, Homo sapien
tggtttccaggcctgagtcagttcc

SEQ ID NO: 3608074 - DNA, 25 bp, Homo sapien
tctgtcagcaagtgcccctcttggt

SEQ ID NO: 3608075 - DNA, 25 bp, Homo sapien
aacttggcgggctctcaccccaaat

SEQ ID NO: 3608076 - DNA, 25 bp, Homo sapien
aggccgaggaggaacgctcagctct

SEQ ID NO: 3608077 - DNA, 25 bp, Homo sapien
agggcgggtgtgtgccaggaggccg

SEQ ID NO: 3608078 - DNA, 25 bp, Homo sapien
tcccgcccaagttcagacggtctag

SEQ ID NO: 3608079 - DNA, 25 bp, Homo sapien
caagatgcattgaactcagggcggg

SEQ ID NO: 3608080 - DNA, 25 bp, Homo sapien
ggctgcctccactcccctcttcctg

SEQ ID NO: 3608081 - DNA, 25 bp, Homo sapien
ccactcccctcttcctgctgtctct

SEQ ID NO: 3608082 - DNA, 25 bp, Homo sapien
ttccccaggtgaatgggctgcctcc

SEQ ID NO: 3608083 - DNA, 25 bp, Homo sapien
cctccactcccctcttcctgctgtc

SEQ ID NO: 3608084 - DNA, 25 bp, Homo sapien
tgcagtgtggatggaagggctccca

SEQ ID NO: 3608085 - DNA, 25 bp, Homo sapien
ctgcagtgtggatggaagggctccc

SEQ ID NO: 3608086 - DNA, 25 bp, Homo sapien
agcagggaggtgctgcttgcctggg

SEQ ID NO: 3608087 - DNA, 25 bp, Homo sapien
ctgctggttgtgtccaggagtgcag

SEQ ID NO: 3608088 - DNA, 25 bp, Homo sapien
ctggatggagagtggcactccccct

SEQ ID NO: 3608089 - DNA, 25 bp, Homo sapien
tgtgtccaggagtgcaggagagcag

SEQ ID NO: 3608090 - DNA, 25 bp, Homo sapien
caagggatgcacgtgaaagccaggg

SEQ ID NO: 3608091 - DNA, 25 bp, Homo sapien
tcgtgcccacttgctggggcgggtt

SEQ ID NO: 3608092 - DNA, 25 bp, Homo sapien
gggcaagggatgcacgtgaaagcca

SEQ ID NO: 3608093 - DNA, 25 bp, Homo sapien
ccaggggagattttctgacctccac

SEQ ID NO: 3608094 - DNA, 25 bp, Homo sapien
ccagcttcctgtgtcgttctggcag

SEQ ID NO: 3608095 - DNA, 25 bp, Homo sapien
agtctctgttcctcggccaccaagg

SEQ ID NO: 3608096 - DNA, 25 bp, Homo sapien
tgttcctcggccaccaaggccttgc

SEQ ID NO: 3608097 - DNA, 25 bp, Homo sapien
ctctgttcctcggccaccaaggcct

SEQ ID NO: 3608098 - DNA, 25 bp, Homo sapien
cagtctctgttcctcggccaccaag

SEQ ID NO: 3608099 - DNA, 25 bp, Homo sapien
cgtcaggttcctgtagccgccctgg

SEQ ID NO: 3608100 - DNA, 25 bp, Homo sapien
tctccgtcaggttcctgtagccgcc

SEQ ID NO: 3608101 - DNA, 25 bp, Homo sapien
tcaggttcctgtagccgccctggca

SEQ ID NO: 3608102 - DNA, 25 bp, Homo sapien
tccgtcaggttcctgtagccgccct

SEQ ID NO: 3608103 - DNA, 25 bp, Homo sapien
cttaagtgttggcttcaagaaggcc

SEQ ID NO: 3608104 - DNA, 25 bp, Homo sapien
cagctggtgacaagggcaaacccat

SEQ ID NO: 3608105 - DNA, 25 bp, Homo sapien
gcataacccgtatggccactgggca

SEQ ID NO: 3608106 - DNA, 25 bp, Homo sapien
caaagggcaatgtactctgagagtc

SEQ ID NO: 3608107 - DNA, 25 bp, Homo sapien
ggaagacctcgcggagcaagcccac

SEQ ID NO: 3608108 - DNA, 25 bp, Homo sapien
gcaagcccacccctggttactctta

SEQ ID NO: 3608109 - DNA, 25 bp, Homo sapien
ctcgcggagcaagcccacccctggt

SEQ ID NO: 3608110 - DNA, 25 bp, Homo sapien
ggagcaagcccacccctggttactc

SEQ ID NO: 3608111 - DNA, 25 bp, Homo sapien
tgaatggccagcatgtggccgtgtc

SEQ ID NO: 3608112 - DNA, 25 bp, Homo sapien
tggccagcatgtggccgtgtcacca

SEQ ID NO: 3608113 - DNA, 25 bp, Homo sapien
accaccttccggatgccactgacat

SEQ ID NO: 3608114 - DNA, 25 bp, Homo sapien
tggcttgaatggccagcatgtggcc

SEQ ID NO: 3608115 - DNA, 25 bp, Homo sapien
gctgttaaacgtttgtacctgcact

SEQ ID NO: 3608116 - DNA, 25 bp, Homo sapien
ctccttgaggcctcaggtcgggtaa

SEQ ID NO: 3608117 - DNA, 25 bp, Homo sapien
taagctgttaaacgtttgtacctgc

SEQ ID NO: 3608118 - DNA, 25 bp, Homo sapien
ctcaggtcgggtaagctgttaaacg

SEQ ID NO: 3608119 - DNA, 25 bp, Homo sapien
aattgtcacggtgcttcgatgtcca

SEQ ID NO: 3608120 - DNA, 25 bp, Homo sapien
catggagaattgtcacggtgcttcg

SEQ ID NO: 3608121 - DNA, 25 bp, Homo sapien
ggtgcttcgatgtccattgtatcac

SEQ ID NO: 3608122 - DNA, 25 bp, Homo sapien
tggctacatggagaattgtcacggt

SEQ ID NO: 3608123 - DNA, 25 bp, Homo sapien
gaaaccgttcttctggatagtgcag

SEQ ID NO: 3608124 - DNA, 25 bp, Homo sapien
taccccaaagctaggaaggacttga

SEQ ID NO: 3608125 - DNA, 25 bp, Homo sapien
aactgaggcttaagtggcttttcca

SEQ ID NO: 3608126 - DNA, 25 bp, Homo sapien
ccagctcagaggtaggaaaccgttc

SEQ ID NO: 3608127 - DNA, 25 bp, Homo sapien
gaccagatagtttttaatcgccatg

SEQ ID NO: 3608128 - DNA, 25 bp, Homo sapien
tcactgggttgacaggttgagcttg

SEQ ID NO: 3608129 - DNA, 25 bp, Homo sapien
tttaatcgccatgatcactgggttg

SEQ ID NO: 3608130 - DNA, 25 bp, Homo sapien
tgagctctaccataagcctgtgtct

SEQ ID NO: 3608131 - DNA, 25 bp, Homo sapien
tcgaaaccacaaggagcactgactt

SEQ ID NO: 3608132 - DNA, 25 bp, Homo sapien
gcaagagcacacgtagagaaggcac

SEQ ID NO: 3608133 - DNA, 25 bp, Homo sapien
gctatagcttcaggtgccaggttca

SEQ ID NO: 3608134 - DNA, 25 bp, Homo sapien
tctaaacaacttgcggaatccaggc

SEQ ID NO: 3608135 - DNA, 25 bp, Homo sapien
cagagaacagcaatgggtcacagcg

SEQ ID NO: 3608136 - DNA, 25 bp, Homo sapien
tttccgcgggaacacagaggacagg

SEQ ID NO: 3608137 - DNA, 25 bp, Homo sapien
cacagcgcacggtttggttggtttc

SEQ ID NO: 3608138 - DNA, 25 bp, Homo sapien
ggttgagttcccactctcgttatga

SEQ ID NO: 3608139 - DNA, 25 bp, Homo sapien
aaaggatgcgggagttgcctctgct

SEQ ID NO: 3608140 - DNA, 25 bp, Homo sapien
cagagcaaaggatgcgggagttgcc

SEQ ID NO: 3608141 - DNA, 25 bp, Homo sapien
agcaaaggatgcgggagttgcctct

SEQ ID NO: 3608142 - DNA, 25 bp, Homo sapien
caggcagagcaaaggatgcgggagt

SEQ ID NO: 3608143 - DNA, 25 bp, Homo sapien
ttaaccacggaagggcatagcctgc

SEQ ID NO: 3608144 - DNA, 25 bp, Homo sapien
tgggaaagcgagtccacagttcact

SEQ ID NO: 3608145 - DNA, 25 bp, Homo sapien
caaagtgctgcaaaccttcccaggt

SEQ ID NO: 3608146 - DNA, 25 bp, Homo sapien
tgccagagacccaattgcagggact

SEQ ID NO: 3608147 - DNA, 25 bp, Homo sapien
aagcagccgcctcaggttccagagg

SEQ ID NO: 3608148 - DNA, 25 bp, Homo sapien
ttaagcatcgacatttgcatccaaa

SEQ ID NO: 3608149 - DNA, 25 bp, Homo sapien
ttgcatccaaaggttcaagcagccg

SEQ ID NO: 3608150 - DNA, 25 bp, Homo sapien
catccaaaggttcaagcagccgcct

SEQ ID NO: 3608151 - DNA, 25 bp, Homo sapien
tgggatgacgccctatgcactcggc

SEQ ID NO: 3608152 - DNA, 25 bp, Homo sapien
tgagtcaccacggaaagccattatc

SEQ ID NO: 3608153 - DNA, 25 bp, Homo sapien
gggcagggcccataataaaagctgt

SEQ ID NO: 3608154 - DNA, 25 bp, Homo sapien
tattccagggcatgtcataaagcga

SEQ ID NO: 3608155 - DNA, 25 bp, Homo sapien
cactgcgggagcatgtctggctggc

SEQ ID NO: 3608156 - DNA, 25 bp, Homo sapien
tggcaacagtcccttcctgagccac

SEQ ID NO: 3608157 - DNA, 25 bp, Homo sapien
cctggcaacagtcccttcctgagcc

SEQ ID NO: 3608158 - DNA, 25 bp, Homo sapien
ctctcctggcactgcgggagcatgt

SEQ ID NO: 3608159 - DNA, 25 bp, Homo sapien
cattggcggtgatgaggttctccac

SEQ ID NO: 3608160 - DNA, 25 bp, Homo sapien
tctccacctgggcttcctcatctcc

SEQ ID NO: 3608161 - DNA, 25 bp, Homo sapien
ctccacctgggcttcctcatctcct

SEQ ID NO: 3608162 - DNA, 25 bp, Homo sapien
tggcggtgatgaggttctccacctg

SEQ ID NO: 3608163 - DNA, 25 bp, Homo sapien
gattgaaactgcacttgcacctgcg

SEQ ID NO: 3608164 - DNA, 25 bp, Homo sapien
cttctgattgaaactgcacttgcac

SEQ ID NO: 3608165 - DNA, 25 bp, Homo sapien
tctgattgaaactgcacttgcacct

SEQ ID NO: 3608166 - DNA, 25 bp, Homo sapien
ttgaaactgcacttgcacctgcgac

SEQ ID NO: 3608167 - DNA, 25 bp, Homo sapien
ggatcccaaccgagaagaggaccac

SEQ ID NO: 3608168 - DNA, 25 bp, Homo sapien
acaccagtcccccaatcctcagggt

SEQ ID NO: 3608169 - DNA, 25 bp, Homo sapien
gaggaccacagcgaacaccagtccc

SEQ ID NO: 3608170 - DNA, 25 bp, Homo sapien
ttaggataaggaggatcccaaccga

SEQ ID NO: 3608171 - DNA, 25 bp, Homo sapien
cataatgaaaagggtccatttcctt

SEQ ID NO: 3608172 - DNA, 25 bp, Homo sapien
ctcagtctccacaaaggaattccag

SEQ ID NO: 3608173 - DNA, 25 bp, Homo sapien
cagtctccacaaaggaattccagag

SEQ ID NO: 3608174 - DNA, 25 bp, Homo sapien
tccacaaaggaattccagaggagca

SEQ ID NO: 3608175 - DNA, 25 bp, Homo sapien
gtctccacaaaggaattccagagga

SEQ ID NO: 3608176 - DNA, 25 bp, Homo sapien
agaggaagaccagcaccaactccat

SEQ ID NO: 3608177 - DNA, 25 bp, Homo sapien
ggctgcagaggaagaccagcaccaa

SEQ ID NO: 3608178 - DNA, 25 bp, Homo sapien
cactggccaggaccatgggggccag

SEQ ID NO: 3608179 - DNA, 25 bp, Homo sapien
ggccaggaccatgggggccagcagg

SEQ ID NO: 3608180 - DNA, 25 bp, Homo sapien
ctgcacttcacctctcggccaccag

SEQ ID NO: 3608181 - DNA, 25 bp, Homo sapien
ccaccaggggtcagaacgactgcat

SEQ ID NO: 3608182 - DNA, 25 bp, Homo sapien
gggtcagaacgactgcatccacagc

SEQ ID NO: 3608183 - DNA, 25 bp, Homo sapien
gactgcatccacagccacgtcaagg

SEQ ID NO: 3608184 - DNA, 25 bp, Homo sapien
gaagaaacttgtatccatcggcagt

SEQ ID NO: 3608185 - DNA, 25 bp, Homo sapien
caaaatgagtaagtgctagagatct

SEQ ID NO: 3608186 - DNA, 25 bp, Homo sapien
tatgcattcgtcaccaatctcgggt

SEQ ID NO: 3608187 - DNA, 25 bp, Homo sapien
tctgtgtctggctttcaagttagca

SEQ ID NO: 3608188 - DNA, 25 bp, Homo sapien
tggaatgccacaaaccctgactacg

SEQ ID NO: 3608189 - DNA, 25 bp, Homo sapien
ggttaatctgatcaggtctgcctgc

SEQ ID NO: 3608190 - DNA, 25 bp, Homo sapien
gaagggtagcctttgacatcagagg

SEQ ID NO: 3608191 - DNA, 25 bp, Homo sapien
gcatgtgcaagtgctccgaagggta

SEQ ID NO: 3608192 - DNA, 25 bp, Homo sapien
tagccagcacctagactgtagttcg

SEQ ID NO: 3608193 - DNA, 25 bp, Homo sapien
gccagaagccagcaagaagatggga

SEQ ID NO: 3608194 - DNA, 25 bp, Homo sapien
cacaaggagatgaatactgccagca

SEQ ID NO: 3608195 - DNA, 25 bp, Homo sapien
ttatcagaccacaaccttagccagc

SEQ ID NO: 3608196 - DNA, 25 bp, Homo sapien
ccaaccttgctggactcaatgctga

SEQ ID NO: 3608197 - DNA, 25 bp, Homo sapien
aaccttgctggactcaatgctgatt

SEQ ID NO: 3608198 - DNA, 25 bp, Homo sapien
caaccttgctggactcaatgctgat

SEQ ID NO: 3608199 - DNA, 25 bp, Homo sapien
accttgctggactcaatgctgatta

SEQ ID NO: 3608200 - DNA, 25 bp, Homo sapien
gtttatctccatattggcaagcagc

SEQ ID NO: 3608201 - DNA, 25 bp, Homo sapien
tatctccatattggcaagcagctga

SEQ ID NO: 3608202 - DNA, 25 bp, Homo sapien
gggtgtattatgagaacgaattctg

SEQ ID NO: 3608203 - DNA, 25 bp, Homo sapien
cctttctgtgctcttgtttatctcc

SEQ ID NO: 3608204 - DNA, 25 bp, Homo sapien
gtcaccgggcctgggtcttagcagg

SEQ ID NO: 3608205 - DNA, 25 bp, Homo sapien
gcccacggatgacaagctctgaggg

SEQ ID NO: 3608206 - DNA, 25 bp, Homo sapien
gggtcaccgggcctgggtcttagca

SEQ ID NO: 3608207 - DNA, 25 bp, Homo sapien
caccgggcctgggtcttagcaggat

SEQ ID NO: 3608208 - DNA, 25 bp, Homo sapien
ggtctgatctattcgtgctaagcaa

SEQ ID NO: 3608209 - DNA, 25 bp, Homo sapien
taaggcctccttagccctctgtttc

SEQ ID NO: 3608210 - DNA, 25 bp, Homo sapien
gcaagtcttactgtctgggaggaaa

SEQ ID NO: 3608211 - DNA, 25 bp, Homo sapien
tatattcctaagaccttagcaagtc

SEQ ID NO: 3608212 - DNA, 25 bp, Homo sapien
catcagttctctattctccatgctc

SEQ ID NO: 3608213 - DNA, 25 bp, Homo sapien
gttctctattctccatgctcatgaa

SEQ ID NO: 3608214 - DNA, 25 bp, Homo sapien
tttatgggaattaagcctcataatg

SEQ ID NO: 3608215 - DNA, 25 bp, Homo sapien
tttttatgggaattaagcctcataa

SEQ ID NO: 3608216 - DNA, 25 bp, Homo sapien
atgggaattaagcctcataatgctt

SEQ ID NO: 3608217 - DNA, 25 bp, Homo sapien
tatgggaattaagcctcataatgct

SEQ ID NO: 3608218 - DNA, 25 bp, Homo sapien
tctcagatgctttggctgaagttct

SEQ ID NO: 3608219 - DNA, 25 bp, Homo sapien
gggtcatgggagaggcctattctca

SEQ ID NO: 3608220 - DNA, 25 bp, Homo sapien
ggggtcatgggagaggcctattctc

SEQ ID NO: 3608221 - DNA, 25 bp, Homo sapien
tgggagaggcctattctcatcacct

SEQ ID NO: 3608222 - DNA, 25 bp, Homo sapien
ggtcatgggagaggcctattctcat

SEQ ID NO: 3608223 - DNA, 25 bp, Homo sapien
taacagcatgcatctcgggatcagt

SEQ ID NO: 3608224 - DNA, 25 bp, Homo sapien
ccactcgaaccctgctggtctatgg

SEQ ID NO: 3608225 - DNA, 25 bp, Homo sapien
catccccttttggaagggagcctgc

SEQ ID NO: 3608226 - DNA, 25 bp, Homo sapien
tctgcaactgcaagatgggcctaac

SEQ ID NO: 3608227 - DNA, 25 bp, Homo sapien
cggccaatagctgacaggtacagag

SEQ ID NO: 3608228 - DNA, 25 bp, Homo sapien
agtcggccaatagctgacaggtaca

SEQ ID NO: 3608229 - DNA, 25 bp, Homo sapien
gaagtcggccaatagctgacaggta

SEQ ID NO: 3608230 - DNA, 25 bp, Homo sapien
agaagtcggccaatagctgacaggt

SEQ ID NO: 3608231 - DNA, 25 bp, Homo sapien
gatacccctgcttcaactaaattag

SEQ ID NO: 3608232 - DNA, 25 bp, Homo sapien
tgggacagctaaagcaagggacaca

SEQ ID NO: 3608233 - DNA, 25 bp, Homo sapien
cctggcgaatagtaactgctggtga

SEQ ID NO: 3608234 - DNA, 25 bp, Homo sapien
gctggtgaagcatcacctgttagta

SEQ ID NO: 3608235 - DNA, 25 bp, Homo sapien
ctggaactgtcactaattctgctgg

SEQ ID NO: 3608236 - DNA, 25 bp, Homo sapien
tgctggtgccatgcaccttccactc

SEQ ID NO: 3608237 - DNA, 25 bp, Homo sapien
tcaacaagtaagtgccaggaaaacc

SEQ ID NO: 3608238 - DNA, 25 bp, Homo sapien
aaagctttatgacgttggatatggc

SEQ ID NO: 3608239 - DNA, 25 bp, Homo sapien
tggatccatgagctacacgtaaaac

SEQ ID NO: 3608240 - DNA, 25 bp, Homo sapien
tcttgaataggacaacaaaggcaca

SEQ ID NO: 3608241 - DNA, 25 bp, Homo sapien
catctccacactgcatctgtggcaa

SEQ ID NO: 3608242 - DNA, 25 bp, Homo sapien
gcatctgtggcaaagtcctagccat

SEQ ID NO: 3608243 - DNA, 25 bp, Homo sapien
cactgcatctgtggcaaagtcctag

SEQ ID NO: 3608244 - DNA, 25 bp, Homo sapien
ctccacactgcatctgtggcaaagt

SEQ ID NO: 3608245 - DNA, 25 bp, Homo sapien
atggtttggtatgtttgtctcgagg

SEQ ID NO: 3608246 - DNA, 25 bp, Homo sapien
cacagctccaatcaccaggccttga

SEQ ID NO: 3608247 - DNA, 25 bp, Homo sapien
ttgtctcgaggagcggagagaacac

SEQ ID NO: 3608248 - DNA, 25 bp, Homo sapien
tgaggacggccgaaagtgctggctg

SEQ ID NO: 3608249 - DNA, 25 bp, Homo sapien
tgttctaaaaagatagtctattcgt

SEQ ID NO: 3608250 - DNA, 25 bp, Homo sapien
gggagaaaattggaactcatacaat

SEQ ID NO: 3608251 - DNA, 25 bp, Homo sapien
ggaactcatacaatctgcccaagtt

SEQ ID NO: 3608252 - DNA, 25 bp, Homo sapien
gaaactgcatgccaggggagaaaat

SEQ ID NO: 3608253 - DNA, 25 bp, Homo sapien
caagtgctttgggtcgaccagaggc

SEQ ID NO: 3608254 - DNA, 25 bp, Homo sapien
cagctggacagtctaggagcaggac

SEQ ID NO: 3608255 - DNA, 25 bp, Homo sapien
gcaaacaaacaaccatcaagggctt

SEQ ID NO: 3608256 - DNA, 25 bp, Homo sapien
ccagcagtccatggctcaaggaggc

SEQ ID NO: 3608257 - DNA, 25 bp, Homo sapien
aaaactctcttgtcatatagcaggg

SEQ ID NO: 3608258 - DNA, 25 bp, Homo sapien
ggctgagtcgtcaggtaccctggac

SEQ ID NO: 3608259 - DNA, 25 bp, Homo sapien
tggagcgggagaggcaaaactctct

SEQ ID NO: 3608260 - DNA, 25 bp, Homo sapien
tcagtagcccaacggctcgaatgct

SEQ ID NO: 3608261 - DNA, 25 bp, Homo sapien
tggtggagagatcttagcctctggt

SEQ ID NO: 3608262 - DNA, 25 bp, Homo sapien
accataagcggaggcatggtggaga

SEQ ID NO: 3608263 - DNA, 25 bp, Homo sapien
tggaaagatcccaagctggaccata

SEQ ID NO: 3608264 - DNA, 25 bp, Homo sapien
aagatcccaagctggaccataagcg

SEQ ID NO: 3608265 - DNA, 25 bp, Homo sapien
aacagtactgcgaggccaactcagg

SEQ ID NO: 3608266 - DNA, 25 bp, Homo sapien
aggcacaggccaatgccgcgccttg

SEQ ID NO: 3608267 - DNA, 25 bp, Homo sapien
acagaacagtactgcgaggccaact

SEQ ID NO: 3608268 - DNA, 25 bp, Homo sapien
tgcgaggccaactcaggcacaggcc

SEQ ID NO: 3608269 - DNA, 25 bp, Homo sapien
ggcatgaagatgaaccctgacccac

SEQ ID NO: 3608270 - DNA, 25 bp, Homo sapien
gaaatgtgccctgcctttagaggag

SEQ ID NO: 3608271 - DNA, 25 bp, Homo sapien
gcatgtttcagcctacagggcactt

SEQ ID NO: 3608272 - DNA, 25 bp, Homo sapien
gacaaaggcccattcaagacaggac

SEQ ID NO: 3608273 - DNA, 25 bp, Homo sapien
tcaaatcccaactaccaaaatgctg

SEQ ID NO: 3608274 - DNA, 25 bp, Homo sapien
gaacaaccaaaggatctgtagggaa

SEQ ID NO: 3608275 - DNA, 25 bp, Homo sapien
ggacgcttcagcatcattatccctt

SEQ ID NO: 3608276 - DNA, 25 bp, Homo sapien
gatgtgtgaatgaaaggacgcttca

SEQ ID NO: 3608277 - DNA, 25 bp, Homo sapien
gagactgaggtgacgcacggtaata

SEQ ID NO: 3608278 - DNA, 25 bp, Homo sapien
catcttgggaacgcgtggtgtgcac

SEQ ID NO: 3608279 - DNA, 25 bp, Homo sapien
gtgacgcacggtaataaagggatgt

SEQ ID NO: 3608280 - DNA, 25 bp, Homo sapien
gtaataaagggatgtgcatcttggg

SEQ ID NO: 3608281 - DNA, 25 bp, Homo sapien
gggcgtgtccctctgcagctaaaat

SEQ ID NO: 3608282 - DNA, 25 bp, Homo sapien
gcggtgcagtggagcgggcggggtg

SEQ ID NO: 3608283 - DNA, 25 bp, Homo sapien
aggcggggcgtgtccctctgcagct

SEQ ID NO: 3608284 - DNA, 25 bp, Homo sapien
agacctgccattgagaggcggtgca

SEQ ID NO: 3608285 - DNA, 25 bp, Homo sapien
tcctaataatgtgtcattactatca

SEQ ID NO: 3608286 - DNA, 25 bp, Homo sapien
ggagccacgaaggatgatataacaa

SEQ ID NO: 3608287 - DNA, 25 bp, Homo sapien
taataatgccattctaataatccta

SEQ ID NO: 3608288 - DNA, 25 bp, Homo sapien
aataatcctaataatgtgtcattac

SEQ ID NO: 3608289 - DNA, 25 bp, Homo sapien
cagctcgcctcatactgtcctcaca

SEQ ID NO: 3608290 - DNA, 25 bp, Homo sapien
ctttacacagctcgcctcatactgt

SEQ ID NO: 3608291 - DNA, 25 bp, Homo sapien
tacacagctcgcctcatactgtcct

SEQ ID NO: 3608292 - DNA, 25 bp, Homo sapien
cacagctcgcctcatactgtcctca

SEQ ID NO: 3608293 - DNA, 25 bp, Homo sapien
cttgcagcaggtgacgcggcagacc

SEQ ID NO: 3608294 - DNA, 25 bp, Homo sapien
gagggcctgagatgcccactgatcc

SEQ ID NO: 3608295 - DNA, 25 bp, Homo sapien
caaaggaagtagtggcagagagcac

SEQ ID NO: 3608296 - DNA, 25 bp, Homo sapien
tcaaagctggaaatcttagcccagc

SEQ ID NO: 3608297 - DNA, 25 bp, Homo sapien
tcctcctaggagtcgggctggctgg

SEQ ID NO: 3608298 - DNA, 25 bp, Homo sapien
gaggacccgccgagtcccgaggagc

SEQ ID NO: 3608299 - DNA, 25 bp, Homo sapien
ggctggctgggaggcgcgtcctgcg

SEQ ID NO: 3608300 - DNA, 25 bp, Homo sapien
ggacagcccactccgtgctgccgtc

SEQ ID NO: 3608301 - DNA, 25 bp, Homo sapien
tgctcgcgcgcgtcctctgctcctc

SEQ ID NO: 3608302 - DNA, 25 bp, Homo sapien
gcgcgtcctctgctcctctctcctc

SEQ ID NO: 3608303 - DNA, 25 bp, Homo sapien
tctgtgctcgcgcgcgtcctctgct

SEQ ID NO: 3608304 - DNA, 25 bp, Homo sapien
gtgctcgcgcgcgtcctctgctcct

SEQ ID NO: 3608305 - DNA, 25 bp, Homo sapien
ccttttcaagccccatccacctctg

SEQ ID NO: 3608306 - DNA, 25 bp, Homo sapien
cccttttcaagccccatccacctct

SEQ ID NO: 3608307 - DNA, 25 bp, Homo sapien
cccagtccccaagagtcaaaattca

SEQ ID NO: 3608308 - DNA, 25 bp, Homo sapien
gacttgccctggtccccttgtattg

SEQ ID NO: 3608309 - DNA, 25 bp, Homo sapien
tgtcctggtcacaccggacatggag

SEQ ID NO: 3608310 - DNA, 25 bp, Homo sapien
gcaaaatagcccttccgcatgtcag

SEQ ID NO: 3608311 - DNA, 25 bp, Homo sapien
cagagtgacctcctgtgtcctggtc

SEQ ID NO: 3608312 - DNA, 25 bp, Homo sapien
tgtacagtactcggaggggtaccca

SEQ ID NO: 3608313 - DNA, 25 bp, Homo sapien
tacagtactcggaggggtacccaca

SEQ ID NO: 3608314 - DNA, 25 bp, Homo sapien
ccacaagggctgcagatggagtacc

SEQ ID NO: 3608315 - DNA, 25 bp, Homo sapien
aagggctgcagatggagtacccaac

SEQ ID NO: 3608316 - DNA, 25 bp, Homo sapien
tggactgggtggcagccttcctagg

SEQ ID NO: 3608317 - DNA, 25 bp, Homo sapien
acaggagacggggaatgaatggcat

SEQ ID NO: 3608318 - DNA, 25 bp, Homo sapien
gcagccttcctagggacaggaagcc

SEQ ID NO: 3608319 - DNA, 25 bp, Homo sapien
aagcctgggccagtgcacaggagac

SEQ ID NO: 3608320 - DNA, 25 bp, Homo sapien
ttgctgaagaccatcgctggcggct

SEQ ID NO: 3608321 - DNA, 25 bp, Homo sapien
gcctacgcgggaacagcatctgttt

SEQ ID NO: 3608322 - DNA, 25 bp, Homo sapien
tcgtgtcggatttgcttgccagccc

SEQ ID NO: 3608323 - DNA, 25 bp, Homo sapien
aatgagagaggcagtccacctggac

SEQ ID NO: 3608324 - DNA, 25 bp, Homo sapien
agtcttcacagcagccggtgctgtg

SEQ ID NO: 3608325 - DNA, 25 bp, Homo sapien
gaacatccacggtactcaactcttg

SEQ ID NO: 3608326 - DNA, 25 bp, Homo sapien
gtgcccggtggccattagcccagat

SEQ ID NO: 3608327 - DNA, 25 bp, Homo sapien
gaaaaacttgggagagtggcaatgc

SEQ ID NO: 3608328 - DNA, 25 bp, Homo sapien
ttaggattttctgaatcgcacctcg

SEQ ID NO: 3608329 - DNA, 25 bp, Homo sapien
aggattttctgaatcgcacctcgct

SEQ ID NO: 3608330 - DNA, 25 bp, Homo sapien
taggattttctgaatcgcacctcgc

SEQ ID NO: 3608331 - DNA, 25 bp, Homo sapien
aaaactatcacaaaatcctctgcag

SEQ ID NO: 3608332 - DNA, 25 bp, Homo sapien
tgcagaaactgaaacgttttcaaag

SEQ ID NO: 3608333 - DNA, 25 bp, Homo sapien
ttctgggagaacatctgcccagcaa

SEQ ID NO: 3608334 - DNA, 25 bp, Homo sapien
gaaaggccatgaagagcggattccc

SEQ ID NO: 3608335 - DNA, 25 bp, Homo sapien
ccccccgaatatggggacgctgagg

SEQ ID NO: 3608336 - DNA, 25 bp, Homo sapien
gcatcacatttgaccctgtccagaa

SEQ ID NO: 3608337 - DNA, 25 bp, Homo sapien
acagacagctgggattgaccccagg

SEQ ID NO: 3608338 - DNA, 25 bp, Homo sapien
tgaccccaggcatcacatttgaccc

SEQ ID NO: 3608339 - DNA, 25 bp, Homo sapien
cctgggtgctcctccagggtcccca

SEQ ID NO: 3608340 - DNA, 25 bp, Homo sapien
ctgggtgctcctccagggtccccac

SEQ ID NO: 3608341 - DNA, 25 bp, Homo sapien
caacctgggtgctcctccagggtcc

SEQ ID NO: 3608342 - DNA, 25 bp, Homo sapien
ctacaacctgggtgctcctccaggg

SEQ ID NO: 3608343 - DNA, 25 bp, Homo sapien
tgaggaagttcccagcctgctgggt

SEQ ID NO: 3608344 - DNA, 25 bp, Homo sapien
tgtgccccagctggtgacacctgcc

SEQ ID NO: 3608345 - DNA, 25 bp, Homo sapien
taccagcggttgttctgctcacaga

SEQ ID NO: 3608346 - DNA, 25 bp, Homo sapien
tacacaccaggtttgtttctctggc

SEQ ID NO: 3608347 - DNA, 25 bp, Homo sapien
cagcctgtgccccagctggtgacac

SEQ ID NO: 3608348 - DNA, 25 bp, Homo sapien
gcatttcttgaagtcgatgagattg

SEQ ID NO: 3608349 - DNA, 25 bp, Homo sapien
gtaactgtcatagaccaagtagtca

SEQ ID NO: 3608350 - DNA, 25 bp, Homo sapien
cagcacacatcatccttggggtaag

SEQ ID NO: 3608351 - DNA, 25 bp, Homo sapien
gatgagattgacctgcacctcccgg

SEQ ID NO: 3608352 - DNA, 25 bp, Homo sapien
tctccctggtcttgccaaagcctgt

SEQ ID NO: 3608353 - DNA, 25 bp, Homo sapien
ctgtgatccagcaggtctcattgag

SEQ ID NO: 3608354 - DNA, 25 bp, Homo sapien
attgaggctaaaggtctgtccatgc

SEQ ID NO: 3608355 - DNA, 25 bp, Homo sapien
tctgtccatgcatggggaggcaagc

SEQ ID NO: 3608356 - DNA, 25 bp, Homo sapien
ctttgacgtcccctgtccacagtga

SEQ ID NO: 3608357 - DNA, 25 bp, Homo sapien
tctatttgcaactgtactatagggc

SEQ ID NO: 3608358 - DNA, 25 bp, Homo sapien
gaatgaagtcttctttgacgtcccc

SEQ ID NO: 3608359 - DNA, 25 bp, Homo sapien
ggctggccatatagtatttgataag

SEQ ID NO: 3608360 - DNA, 25 bp, Homo sapien
cgactgcagggtaagcaatttgcca

SEQ ID NO: 3608361 - DNA, 25 bp, Homo sapien
tgattaagatcagtacccaagccct

SEQ ID NO: 3608362 - DNA, 25 bp, Homo sapien
gaaatgcctaccatagcgtttggcc

SEQ ID NO: 3608363 - DNA, 25 bp, Homo sapien
acagatgctgacaagtgcgagggct

SEQ ID NO: 3608364 - DNA, 25 bp, Homo sapien
ttgatgatgatctcggcaatggagg

SEQ ID NO: 3608365 - DNA, 25 bp, Homo sapien
gagggcgatgtcatagtcgtcctcc

SEQ ID NO: 3608366 - DNA, 25 bp, Homo sapien
cctcatcggtgtaattgctgttgat

SEQ ID NO: 3608367 - DNA, 25 bp, Homo sapien
gcaggttgctggtgcccgcgtacac

SEQ ID NO: 3608368 - DNA, 25 bp, Homo sapien
tgagcacccactgggcgtcaatgag

SEQ ID NO: 3608369 - DNA, 25 bp, Homo sapien
gtcaatgagcgtgcctccacagatg

SEQ ID NO: 3608370 - DNA, 25 bp, Homo sapien
ggtggtgccgaagtgcagactcact

SEQ ID NO: 3608371 - DNA, 25 bp, Homo sapien
tgccaaggccacttgctatccgagg

SEQ ID NO: 3608372 - DNA, 25 bp, Homo sapien
acactggccacaatccaagaagaag

SEQ ID NO: 3608373 - DNA, 25 bp, Homo sapien
ctggagagagatataccgctgggaa

SEQ ID NO: 3608374 - DNA, 25 bp, Homo sapien
agagatataccgctgggaagggcat

SEQ ID NO: 3608375 - DNA, 25 bp, Homo sapien
atataccgctgggaagggcattcag

SEQ ID NO: 3608376 - DNA, 25 bp, Homo sapien
gggaacactggagagagatataccg

SEQ ID NO: 3608377 - DNA, 25 bp, Homo sapien
ctgtctaccctgtcccctaactgca

SEQ ID NO: 3608378 - DNA, 25 bp, Homo sapien
tccgtagggcaaacaatgctagctg

SEQ ID NO: 3608379 - DNA, 25 bp, Homo sapien
ctggcggtcccctactgctgcctgt

SEQ ID NO: 3608380 - DNA, 25 bp, Homo sapien
cctctgatgcttccaacgtggccct

SEQ ID NO: 3608381 - DNA, 25 bp, Homo sapien
ggcaacctcggttgtccggtgagca

SEQ ID NO: 3608382 - DNA, 25 bp, Homo sapien
gttgtatctcaagattgagaagctg

SEQ ID NO: 3608383 - DNA, 25 bp, Homo sapien
gaagctgttggcaaaatccctgtgg

SEQ ID NO: 3608384 - DNA, 25 bp, Homo sapien
aatccctgtgggcaacctcggttgt

SEQ ID NO: 3608385 - DNA, 25 bp, Homo sapien
aggtcttctctgagtaggagtcatt

SEQ ID NO: 3608386 - DNA, 25 bp, Homo sapien
gaagccactgatgggaggacccaga

SEQ ID NO: 3608387 - DNA, 25 bp, Homo sapien
ttctctgagtaggagtcattccagt

SEQ ID NO: 3608388 - DNA, 25 bp, Homo sapien
atgggaggacccagagtagatttta

SEQ ID NO: 3608389 - DNA, 25 bp, Homo sapien
tctgctccttgtacctgatccctgt

SEQ ID NO: 3608390 - DNA, 25 bp, Homo sapien
tgctccttgtacctgatccctgtgt

SEQ ID NO: 3608391 - DNA, 25 bp, Homo sapien
tcacagcgaacagcgtgcttgggac

SEQ ID NO: 3608392 - DNA, 25 bp, Homo sapien
accaccccgtcacagcgaacagcgt

SEQ ID NO: 3608393 - DNA, 25 bp, Homo sapien
cctccatgggttagtcctgtggctt

SEQ ID NO: 3608394 - DNA, 25 bp, Homo sapien
tcgcccctccatgggttagtcctgt

SEQ ID NO: 3608395 - DNA, 25 bp, Homo sapien
cgtgggtgccatctcgcccctccat

SEQ ID NO: 3608396 - DNA, 25 bp, Homo sapien
ccatgggttagtcctgtggctttca

SEQ ID NO: 3608397 - DNA, 25 bp, Homo sapien
gatgatgagcgaaaccaccagggca

SEQ ID NO: 3608398 - DNA, 25 bp, Homo sapien
gatgagcggtagctgcttctggccc

SEQ ID NO: 3608399 - DNA, 25 bp, Homo sapien
ggagcagggcggcagcaggggaata

SEQ ID NO: 3608400 - DNA, 25 bp, Homo sapien
gagcagggcggcagcaggggaatat

SEQ ID NO: 3608401 - DNA, 25 bp, Homo sapien
agggcggcagcaggggaatatgagg

SEQ ID NO: 3608402 - DNA, 25 bp, Homo sapien
gcagggcggcagcaggggaatatga

SEQ ID NO: 3608403 - DNA, 25 bp, Homo sapien
gggccccaaacttcgagtgatcctc

SEQ ID NO: 3608404 - DNA, 25 bp, Homo sapien
aaagccacgtatcatccaggcctgt

SEQ ID NO: 3608405 - DNA, 25 bp, Homo sapien
tccaaagccacgtatcatccaggcc

SEQ ID NO: 3608406 - DNA, 25 bp, Homo sapien
atcctccaaagccacgtatcatcca

SEQ ID NO: 3608407 - DNA, 25 bp, Homo sapien
ggtggccctggttgctggtgctgac

SEQ ID NO: 3608408 - DNA, 25 bp, Homo sapien
ctgggctctccctggtggccctggt

SEQ ID NO: 3608409 - DNA, 25 bp, Homo sapien
cctggtggccctggttgctggtgct

SEQ ID NO: 3608410 - DNA, 25 bp, Homo sapien
ccctggtggccctggttgctggtgc

SEQ ID NO: 3608411 - DNA, 25 bp, Homo sapien
ggcaggagatgatcggatgggtaca

SEQ ID NO: 3608412 - DNA, 25 bp, Homo sapien
gagatgatcggatgggtacagcccc

SEQ ID NO: 3608413 - DNA, 25 bp, Homo sapien
aggagatgatcggatgggtacagcc

SEQ ID NO: 3608414 - DNA, 25 bp, Homo sapien
ctggcaggagatgatcggatgggta

SEQ ID NO: 3608415 - DNA, 25 bp, Homo sapien
tggggaggttgtcaccgaggctgac

SEQ ID NO: 3608416 - DNA, 25 bp, Homo sapien
caaggtacactctggttggggaggt

SEQ ID NO: 3608417 - DNA, 25 bp, Homo sapien
ttggggaggttgtcaccgaggctga

SEQ ID NO: 3608418 - DNA, 25 bp, Homo sapien
ctaacaaggtacactctggttgggg

SEQ ID NO: 3608419 - DNA, 25 bp, Homo sapien
gatgaggacctggaaagtgatgcca

SEQ ID NO: 3608420 - DNA, 25 bp, Homo sapien
tggcggatgatgacctgccggatga

SEQ ID NO: 3608421 - DNA, 25 bp, Homo sapien
aaagtgatgccagagccggagatgc

SEQ ID NO: 3608422 - DNA, 25 bp, Homo sapien
ccagagccggagatgcccgggctgg

SEQ ID NO: 3608423 - DNA, 25 bp, Homo sapien
tggagatgcctgggctggagatgcc

SEQ ID NO: 3608424 - DNA, 25 bp, Homo sapien
gagatgcctgggctggagatgcccg

SEQ ID NO: 3608425 - DNA, 25 bp, Homo sapien
ctggagatgcctgggctggagatgc

SEQ ID NO: 3608426 - DNA, 25 bp, Homo sapien
gatgcctgggctggagatgcccggc

SEQ ID NO: 3608427 - DNA, 25 bp, Homo sapien
tgggctggagatgcccggcccggag

SEQ ID NO: 3608428 - DNA, 25 bp, Homo sapien
gaaggtgttcttgctggagatgcat

SEQ ID NO: 3608429 - DNA, 25 bp, Homo sapien
tgaaggtgttcttgctggagatgca

SEQ ID NO: 3608430 - DNA, 25 bp, Homo sapien
aaggtgttcttgctggagatgcatt

SEQ ID NO: 3608431 - DNA, 25 bp, Homo sapien
cacgcagtatacagctcagggactt

SEQ ID NO: 3608432 - DNA, 25 bp, Homo sapien
gcacacacgcagtatacagctcagg

SEQ ID NO: 3608433 - DNA, 25 bp, Homo sapien
cagggacttgggtcagcccttgagg

SEQ ID NO: 3608434 - DNA, 25 bp, Homo sapien
gggacttgggtcagcccttgaggca

SEQ ID NO: 3608435 - DNA, 25 bp, Homo sapien
tgacaacatgaaacagaggacaagg

SEQ ID NO: 3608436 - DNA, 25 bp, Homo sapien
acaacatgaaacagaggacaaggtg

SEQ ID NO: 3608437 - DNA, 25 bp, Homo sapien
agaggacaaggtgagggctgcacac

SEQ ID NO: 3608438 - DNA, 25 bp, Homo sapien
aatgacaacatgaaacagaggacaa

SEQ ID NO: 3608439 - DNA, 25 bp, Homo sapien
ccagggtccttggaggacgaggtga

SEQ ID NO: 3608440 - DNA, 25 bp, Homo sapien
ccagggtccttggaggacgaggtga

SEQ ID NO: 3608441 - DNA, 25 bp, Homo sapien
gccagggtccttggaggacgaggtg

SEQ ID NO: 3608442 - DNA, 25 bp, Homo sapien
gtccttggaggacgaggtgagggat

SEQ ID NO: 3608443 - DNA, 25 bp, Homo sapien
ttggaggacgaggtgagggatgcac

SEQ ID NO: 3608444 - DNA, 25 bp, Homo sapien
ggtccttggaggacgaggtgagggc

SEQ ID NO: 3608445 - DNA, 25 bp, Homo sapien
agggtccttggaggacgaggtgagg

SEQ ID NO: 3608446 - DNA, 25 bp, Homo sapien
gccagggtccttggaggacgaggtg

SEQ ID NO: 3608447 - DNA, 25 bp, Homo sapien
ggaggacgaggtgagggctacacac

SEQ ID NO: 3608448 - DNA, 25 bp, Homo sapien
gccagggtccttggaggacgaggtg

SEQ ID NO: 3608449 - DNA, 25 bp, Homo sapien
ccagggtccttggaggacgaggtga

SEQ ID NO: 3608450 - DNA, 25 bp, Homo sapien
gtccttggaggacgaggtgagggat

SEQ ID NO: 3608451 - DNA, 25 bp, Homo sapien
ttggaggacgaggtgagggatgcac

SEQ ID NO: 3608452 - DNA, 25 bp, Homo sapien
agggtccttggaggacgaggtgagg

SEQ ID NO: 3608453 - DNA, 25 bp, Homo sapien
ggtccttggaggacgaggtgagggc

SEQ ID NO: 3608454 - DNA, 25 bp, Homo sapien
gccagggtccttggaggacgaggtg

SEQ ID NO: 3608455 - DNA, 25 bp, Homo sapien
ggaggacgaggtgagggctacacac

SEQ ID NO: 3608456 - DNA, 25 bp, Homo sapien
tgccagggtccttggggtgcctggg

SEQ ID NO: 3608457 - DNA, 25 bp, Homo sapien
ctgggatggggctgggacacggcat

SEQ ID NO: 3608458 - DNA, 25 bp, Homo sapien
gggcatagggcaggtgccagggtcc

SEQ ID NO: 3608459 - DNA, 25 bp, Homo sapien
ctgcaggggcatagggcaggtgcca

SEQ ID NO: 3608460 - DNA, 25 bp, Homo sapien
caggcttagctgatgtcgaggagaa

SEQ ID NO: 3608461 - DNA, 25 bp, Homo sapien
gaagagtcctccaggcttagctgat

SEQ ID NO: 3608462 - DNA, 25 bp, Homo sapien
gctgatgtcgaggagaagatccatc

SEQ ID NO: 3608463 - DNA, 25 bp, Homo sapien
tcctccaggcttagctgatgtcgag

SEQ ID NO: 3608464 - DNA, 25 bp, Homo sapien
cttctgagggatgaccctatcccca

SEQ ID NO: 3608465 - DNA, 25 bp, Homo sapien
gagggatgaccctatccccacaggg

SEQ ID NO: 3608466 - DNA, 25 bp, Homo sapien
agccttctgagggatgaccctatcc

SEQ ID NO: 3608467 - DNA, 25 bp, Homo sapien
tctgagggatgaccctatccccaca

SEQ ID NO: 3608468 - DNA, 25 bp, Homo sapien
cctggcacgcccaggccagatccga

SEQ ID NO: 3608469 - DNA, 25 bp, Homo sapien
acgcccaggccagatccgagggcct

SEQ ID NO: 3608470 - DNA, 25 bp, Homo sapien
ccagatccgagggcctccacttcat

SEQ ID NO: 3608471 - DNA, 25 bp, Homo sapien
tggcacgcccaggccagatccgagg

SEQ ID NO: 3608472 - DNA, 25 bp, Homo sapien
tcaggtgatctggagctccttgtca

SEQ ID NO: 3608473 - DNA, 25 bp, Homo sapien
tgatctggagctccttgtcaaagaa

SEQ ID NO: 3608474 - DNA, 25 bp, Homo sapien
caggtgatctggagctccttgtcaa

SEQ ID NO: 3608475 - DNA, 25 bp, Homo sapien
ggtgatctggagctccttgtcaaag

SEQ ID NO: 3608476 - DNA, 25 bp, Homo sapien
ctgactctgtgcgtgtcctcatgac

SEQ ID NO: 3608477 - DNA, 25 bp, Homo sapien
gaccttcgtcttcagtgaggaacct

SEQ ID NO: 3608478 - DNA, 25 bp, Homo sapien
tgtgcgtgtcctcatgaccttcgtc

SEQ ID NO: 3608479 - DNA, 25 bp, Homo sapien
ctcaggccactaaaacagagcagga

SEQ ID NO: 3608480 - DNA, 25 bp, Homo sapien
aaagcgcatgagtctgataaggcca

SEQ ID NO: 3608481 - DNA, 25 bp, Homo sapien
ttagctaagaaatccgagacctggg

SEQ ID NO: 3608482 - DNA, 25 bp, Homo sapien
tcacggatggcaactgacagacctg

SEQ ID NO: 3608483 - DNA, 25 bp, Homo sapien
tttgtcttcacatgggagtctccct

SEQ ID NO: 3608484 - DNA, 25 bp, Homo sapien
tcagcctgtaacctgcaaaaggatc

SEQ ID NO: 3608485 - DNA, 25 bp, Homo sapien
tcttcaattcatggggggaacgcag

SEQ ID NO: 3608486 - DNA, 25 bp, Homo sapien
aaggaaaatctgctagctgccatgc

SEQ ID NO: 3608487 - DNA, 25 bp, Homo sapien
acctgcaaaaggatctggctgctct

SEQ ID NO: 3608488 - DNA, 25 bp, Homo sapien
tctgcagaataatgactgacttgtc

SEQ ID NO: 3608489 - DNA, 25 bp, Homo sapien
tcaggagccccgaaattctagctct

SEQ ID NO: 3608490 - DNA, 25 bp, Homo sapien
gcacagtgaaagaattctggatatc

SEQ ID NO: 3608491 - DNA, 25 bp, Homo sapien
caaagtactcttaggtgccagtctg

SEQ ID NO: 3608492 - DNA, 25 bp, Homo sapien
tcttgctgtggccttacacggtgga

SEQ ID NO: 3608493 - DNA, 25 bp, Homo sapien
ggagcctgtcatctggttatgaaga

SEQ ID NO: 3608494 - DNA, 25 bp, Homo sapien
cagtgataagtgatgtgaaagaaac

SEQ ID NO: 3608495 - DNA, 25 bp, Homo sapien
cgaagcacttgttatgtgttggaca

SEQ ID NO: 3608496 - DNA, 25 bp, Homo sapien
tgactccacttccaactgcttctgc

SEQ ID NO: 3608497 - DNA, 25 bp, Homo sapien
tgcagcactgacagctccagggaca

SEQ ID NO: 3608498 - DNA, 25 bp, Homo sapien
ttctgcagcactgacagctccaggg

SEQ ID NO: 3608499 - DNA, 25 bp, Homo sapien
tgcttctgcagcactgacagctcca

SEQ ID NO: 3608500 - DNA, 25 bp, Homo sapien
taaatatcacggcttctagatggtt

SEQ ID NO: 3608501 - DNA, 25 bp, Homo sapien
tctgggcaggcagaacattttcact

SEQ ID NO: 3608502 - DNA, 25 bp, Homo sapien
gtaccagatctgtttaaatatcacg

SEQ ID NO: 3608503 - DNA, 25 bp, Homo sapien
cacacctgttgttttgctggcctgc

SEQ ID NO: 3608504 - DNA, 25 bp, Homo sapien
aatctgccctttagagccctcaaca

SEQ ID NO: 3608505 - DNA, 25 bp, Homo sapien
aggccccaagggtgaagaaagctgt

SEQ ID NO: 3608506 - DNA, 25 bp, Homo sapien
tcaacagaaacacgcaaagtccagg

SEQ ID NO: 3608507 - DNA, 25 bp, Homo sapien
gaagaaagctgtgctcgccagtagc

SEQ ID NO: 3608508 - DNA, 25 bp, Homo sapien
agacctggggccagggccacctggg

SEQ ID NO: 3608509 - DNA, 25 bp, Homo sapien
tggggccagggccacctgggtcctg

SEQ ID NO: 3608510 - DNA, 25 bp, Homo sapien
gccagggccacctgggtcctgggtc

SEQ ID NO: 3608511 - DNA, 25 bp, Homo sapien
tgaagccacagacctggggccaggg

SEQ ID NO: 3608512 - DNA, 25 bp, Homo sapien
tcagactagcccgttggagaacttc

SEQ ID NO: 3608513 - DNA, 25 bp, Homo sapien
tgctgctgatgtgaccactgatggt

SEQ ID NO: 3608514 - DNA, 25 bp, Homo sapien
gatggtgaagggtggacccatctcc

SEQ ID NO: 3608515 - DNA, 25 bp, Homo sapien
ttcatgtagccaccatctgtgctgc

SEQ ID NO: 3608516 - DNA, 25 bp, Homo sapien
tataagttgaagacaaaattaggcc

SEQ ID NO: 3608517 - DNA, 25 bp, Homo sapien
ttgatataagttgaagacaaaatta

SEQ ID NO: 3608518 - DNA, 25 bp, Homo sapien
gatataagttgaagacaaaattagg

SEQ ID NO: 3608519 - DNA, 25 bp, Homo sapien
cggatttgatataagttgaagacaa

SEQ ID NO: 3608520 - DNA, 25 bp, Homo sapien
ctgtagccgaggatggacacgagca

SEQ ID NO: 3608521 - DNA, 25 bp, Homo sapien
cacgccaaggatcaggcccaaggtg

SEQ ID NO: 3608522 - DNA, 25 bp, Homo sapien
agtacccgcgctggtaccacttggc

SEQ ID NO: 3608523 - DNA, 25 bp, Homo sapien
agcaagagccccacgccaaggatca

SEQ ID NO: 3608524 - DNA, 25 bp, Homo sapien
tctatatgatgtgcaagcaagtttg

SEQ ID NO: 3608525 - DNA, 25 bp, Homo sapien
atatgatgtgcaagcaagtttgcca

SEQ ID NO: 3608526 - DNA, 25 bp, Homo sapien
ttttctatatgatgtgcaagcaagt

SEQ ID NO: 3608527 - DNA, 25 bp, Homo sapien
tatatgatgtgcaagcaagtttgcc

SEQ ID NO: 3608528 - DNA, 25 bp, Homo sapien
tctagccagggaaatagtcaagaaa

SEQ ID NO: 3608529 - DNA, 25 bp, Homo sapien
tcttcctaggatcagtaacacgacg

SEQ ID NO: 3608530 - DNA, 25 bp, Homo sapien
gataacacagtcttacatatggaaa

SEQ ID NO: 3608531 - DNA, 25 bp, Homo sapien
tgagaaacccacagcaatcatgcta

SEQ ID NO: 3608532 - DNA, 25 bp, Homo sapien
tgaatgtgatgtcttttggtggggc

SEQ ID NO: 3608533 - DNA, 25 bp, Homo sapien
aatgtgatgtcttttggtggggcat

SEQ ID NO: 3608534 - DNA, 25 bp, Homo sapien
gaatgtgatgtcttttggtggggca

SEQ ID NO: 3608535 - DNA, 25 bp, Homo sapien
ctgaatgtgatgtcttttggtgggg

SEQ ID NO: 3608536 - DNA, 25 bp, Homo sapien
gacactgaaggcgcagaaggaactg

SEQ ID NO: 3608537 - DNA, 25 bp, Homo sapien
ctgctggagaaagggcgacactgaa

SEQ ID NO: 3608538 - DNA, 25 bp, Homo sapien
gagaaagggcgacactgaaggcgca

SEQ ID NO: 3608539 - DNA, 25 bp, Homo sapien
aaagggcgacactgaaggcgcagaa

SEQ ID NO: 3608540 - DNA, 25 bp, Homo sapien
agtaaacgatgatattcatctccag

SEQ ID NO: 3608541 - DNA, 25 bp, Homo sapien
ttatcgttcaaagtaaacgatgata

SEQ ID NO: 3608542 - DNA, 25 bp, Homo sapien
aacgatgatattcatctccagttca

SEQ ID NO: 3608543 - DNA, 25 bp, Homo sapien
ttcaaagtaaacgatgatattcatc

SEQ ID NO: 3608544 - DNA, 25 bp, Homo sapien
gcctttcttctaggcttagcatcct

SEQ ID NO: 3608545 - DNA, 25 bp, Homo sapien
gggagactgtccttggccgcctttc

SEQ ID NO: 3608546 - DNA, 25 bp, Homo sapien
tccttggccgcctttcttctaggct

SEQ ID NO: 3608547 - DNA, 25 bp, Homo sapien
ggcttagcatcctgtgttcctctgg

SEQ ID NO: 3608548 - DNA, 25 bp, Homo sapien
aaaatgtctattgcaagagtttctc

SEQ ID NO: 3608549 - DNA, 25 bp, Homo sapien
tttctcataactggagccatgtatg

SEQ ID NO: 3608550 - DNA, 25 bp, Homo sapien
caagctgccacagaaaggatgctca

SEQ ID NO: 3608551 - DNA, 25 bp, Homo sapien
tgtatgattcatctccccggtccca

SEQ ID NO: 3608552 - DNA, 25 bp, Homo sapien
cctctgaatacctggagcgtcttcg

SEQ ID NO: 3608553 - DNA, 25 bp, Homo sapien
agagaatcaaccctatctttcaagg

SEQ ID NO: 3608554 - DNA, 25 bp, Homo sapien
caaccctatctttcaaggaggacag

SEQ ID NO: 3608555 - DNA, 25 bp, Homo sapien
cctggagcgtcttcgctgtcttggg

SEQ ID NO: 3608556 - DNA, 25 bp, Homo sapien
cacgtgcaaccagaaactctcgaag

SEQ ID NO: 3608557 - DNA, 25 bp, Homo sapien
caagatggaaaaccgcaacagtcct

SEQ ID NO: 3608558 - DNA, 25 bp, Homo sapien
gaagggtagcagatgaaaggaacac

SEQ ID NO: 3608559 - DNA, 25 bp, Homo sapien
agcttcctcgcataatccacgtgca

SEQ ID NO: 3608560 - DNA, 25 bp, Homo sapien
tgtgcattgtaggagacatcaggga

SEQ ID NO: 3608561 - DNA, 25 bp, Homo sapien
cattctagcttacggttttgcttta

SEQ ID NO: 3608562 - DNA, 25 bp, Homo sapien
cacaactactactcagtgaatagca

SEQ ID NO: 3608563 - DNA, 25 bp, Homo sapien
taacaagatagtcacagtccctgtc

SEQ ID NO: 3608564 - DNA, 25 bp, Homo sapien
ccccagaaagtgcagaatataagcc

SEQ ID NO: 3608565 - DNA, 25 bp, Homo sapien
cttctagcactattccgggtccatc

SEQ ID NO: 3608566 - DNA, 25 bp, Homo sapien
cgggtccatcaaagttgtatagtca

SEQ ID NO: 3608567 - DNA, 25 bp, Homo sapien
cagaatataagcctcctttgtgcct

SEQ ID NO: 3608568 - DNA, 25 bp, Homo sapien
gattctaacagactggacccagaga

SEQ ID NO: 3608569 - DNA, 25 bp, Homo sapien
catggatccctaatacagcctcaaa

SEQ ID NO: 3608570 - DNA, 25 bp, Homo sapien
ttttcagtaaatgctccaggcagcc

SEQ ID NO: 3608571 - DNA, 25 bp, Homo sapien
cagttgcagattgagatagcctatc

SEQ ID NO: 3608572 - DNA, 25 bp, Homo sapien
atgagccagggcatccggcttttat

SEQ ID NO: 3608573 - DNA, 25 bp, Homo sapien
ggcatgagccagggcatccggcttt

SEQ ID NO: 3608574 - DNA, 25 bp, Homo sapien
ttcattcattcaatatctaatgagc

SEQ ID NO: 3608575 - DNA, 25 bp, Homo sapien
ttgcttaggctggagcgcagcagca

SEQ ID NO: 3608576 - DNA, 25 bp, Homo sapien
taaaagtgtaccaatagatgagtgg

SEQ ID NO: 3608577 - DNA, 25 bp, Homo sapien
agaaaacccagaggctgcatgccct

SEQ ID NO: 3608578 - DNA, 25 bp, Homo sapien
cacattcgaagatgatgttactggc

SEQ ID NO: 3608579 - DNA, 25 bp, Homo sapien
catatcatgggcactcaatgtgtga

SEQ ID NO: 3608580 - DNA, 25 bp, Homo sapien
gctaatgtgagttgtgaatctctga

SEQ ID NO: 3608581 - DNA, 25 bp, Homo sapien
tgagagaaggctaacggcatgcttg

SEQ ID NO: 3608582 - DNA, 25 bp, Homo sapien
gaagagaagaccattctagggtgct

SEQ ID NO: 3608583 - DNA, 25 bp, Homo sapien
gacatcactcagagcctttaatttg

SEQ ID NO: 3608584 - DNA, 25 bp, Homo sapien
cagagtatttgtatgtgccagacac

SEQ ID NO: 3608585 - DNA, 25 bp, Homo sapien
ggagctaaacctggacacactgaag

SEQ ID NO: 3608586 - DNA, 25 bp, Homo sapien
taaaaaacaccttaagtgggcagca

SEQ ID NO: 3608587 - DNA, 25 bp, Homo sapien
tcgagacctatatgaaggctggcag

SEQ ID NO: 3608588 - DNA, 25 bp, Homo sapien
tctagaaatcagcagtagaccctgg

SEQ ID NO: 3608589 - DNA, 25 bp, Homo sapien
gatcggcctgccatatgtagtctga

SEQ ID NO: 3608590 - DNA, 25 bp, Homo sapien
gaaagacggctcctcaaatgtccag

SEQ ID NO: 3608591 - DNA, 25 bp, Homo sapien
tgtgctcgaacacaagtcagtgctg

SEQ ID NO: 3608592 - DNA, 25 bp, Homo sapien
agggagagctctgaggtagacccca

SEQ ID NO: 3608593 - DNA, 25 bp, Homo sapien
acgggcaccctgcaggtactactgg

SEQ ID NO: 3608594 - DNA, 25 bp, Homo sapien
cccttgcgaggcttgcagctgcttt

SEQ ID NO: 3608595 - DNA, 25 bp, Homo sapien
ctctctgaaaaagggggctactcct

SEQ ID NO: 3608596 - DNA, 25 bp, Homo sapien
caattctgcccaacaaggactcagg

SEQ ID NO: 3608597 - DNA, 25 bp, Homo sapien
tagggcaggctagaaaccccaatgg

SEQ ID NO: 3608598 - DNA, 25 bp, Homo sapien
gcaaaggaaaactgtgggcacccac

SEQ ID NO: 3608599 - DNA, 25 bp, Homo sapien
caagcagcagatgtctcaggcacgt

SEQ ID NO: 3608600 - DNA, 25 bp, Homo sapien
attccccgaggagctcacgagacac

SEQ ID NO: 3608601 - DNA, 25 bp, Homo sapien
gttctccgtgttgtcattccccgag

SEQ ID NO: 3608602 - DNA, 25 bp, Homo sapien
gccaggcaagccgttctccgtgttg

SEQ ID NO: 3608603 - DNA, 25 bp, Homo sapien
ttgtcattccccgaggagctcacga

SEQ ID NO: 3608604 - DNA, 25 bp, Homo sapien
gatgaggatgaggagcccgatgacc

SEQ ID NO: 3608605 - DNA, 25 bp, Homo sapien
ccccgcccacgacagccaggatgat

SEQ ID NO: 3608606 - DNA, 25 bp, Homo sapien
tgaggatgaggagcccgatgacccc

SEQ ID NO: 3608607 - DNA, 25 bp, Homo sapien
gatgaccccgcccacgacagccagg

SEQ ID NO: 3608608 - DNA, 25 bp, Homo sapien
caaatgcccgttctcttccttctga

SEQ ID NO: 3608609 - DNA, 25 bp, Homo sapien
agaaaacgctccacaaatgcccgtt

SEQ ID NO: 3608610 - DNA, 25 bp, Homo sapien
tccacaaatgcccgttctcttcctt

SEQ ID NO: 3608611 - DNA, 25 bp, Homo sapien
cacaaatgcccgttctcttccttct

SEQ ID NO: 3608612 - DNA, 25 bp, Homo sapien
caggtccctcagcacaatggaaatg

SEQ ID NO: 3608613 - DNA, 25 bp, Homo sapien
tggcgtggtgctggagattattctc

SEQ ID NO: 3608614 - DNA, 25 bp, Homo sapien
tctatcaacgacttggaggaagatg

SEQ ID NO: 3608615 - DNA, 25 bp, Homo sapien
atttgcccgtgtcgctgaactccag

SEQ ID NO: 3608616 - DNA, 25 bp, Homo sapien
gtagagcctaccagagtgatgcggt

SEQ ID NO: 3608617 - DNA, 25 bp, Homo sapien
catcgtctttcaacgtcaccttggg

SEQ ID NO: 3608618 - DNA, 25 bp, Homo sapien
cattcttcacagtcccctctatgag

SEQ ID NO: 3608619 - DNA, 25 bp, Homo sapien
accttggggtcagacttctcattct

SEQ ID NO: 3608620 - DNA, 25 bp, Homo sapien
gaatgcgtcactgctgttgtaggtc

SEQ ID NO: 3608621 - DNA, 25 bp, Homo sapien
aatcttgaatgcgtcactgctgttg

SEQ ID NO: 3608622 - DNA, 25 bp, Homo sapien
tcttgaatgcgtcactgctgttgta

SEQ ID NO: 3608623 - DNA, 25 bp, Homo sapien
ttgaatgcgtcactgctgttgtagg

SEQ ID NO: 3608624 - DNA, 25 bp, Homo sapien
cggaagtggaggtcctcgaagccaa

SEQ ID NO: 3608625 - DNA, 25 bp, Homo sapien
aagtggaggtcctcgaagccaaagc

SEQ ID NO: 3608626 - DNA, 25 bp, Homo sapien
cagcgtagatgtcggtggcctttcc

SEQ ID NO: 3608627 - DNA, 25 bp, Homo sapien
ggcagcaggatctccgtgccattga

SEQ ID NO: 3608628 - DNA, 25 bp, Homo sapien
cctcagtgccaacctcgggaggatg

SEQ ID NO: 3608629 - DNA, 25 bp, Homo sapien
caggtaggtctctatcaccctcagt

SEQ ID NO: 3608630 - DNA, 25 bp, Homo sapien
cttaggcagggcggagtagcttggc

SEQ ID NO: 3608631 - DNA, 25 bp, Homo sapien
ggatggctgtctactccaatcagca

SEQ ID NO: 3608632 - DNA, 25 bp, Homo sapien
ggtgaagaagagaaacgcggccgcc

SEQ ID NO: 3608633 - DNA, 25 bp, Homo sapien
gctggacctcgctgggccagccgag

SEQ ID NO: 3608634 - DNA, 25 bp, Homo sapien
ggccgccgtccagtagcctctcgtt

SEQ ID NO: 3608635 - DNA, 25 bp, Homo sapien
gaaggacacgttcgggctggacctc

SEQ ID NO: 3608636 - DNA, 25 bp, Homo sapien
cggtgtgcatatccccaagccaggg

SEQ ID NO: 3608637 - DNA, 25 bp, Homo sapien
tggtgtgaagccagaacaggagatt

SEQ ID NO: 3608638 - DNA, 25 bp, Homo sapien
gggcagggatgcctctttcctactt

SEQ ID NO: 3608639 - DNA, 25 bp, Homo sapien
cttgagaaagtcagaggtgccacat

SEQ ID NO: 3608640 - DNA, 25 bp, Homo sapien
ctggtcaagggccaaagggactttg

SEQ ID NO: 3608641 - DNA, 25 bp, Homo sapien
tctcgccggggctttgcctccgtcc

SEQ ID NO: 3608642 - DNA, 25 bp, Homo sapien
gcccagccatctcgccggggctttg

SEQ ID NO: 3608643 - DNA, 25 bp, Homo sapien
catctcgccggggctttgcctccgt

SEQ ID NO: 3608644 - DNA, 25 bp, Homo sapien
gccatctcgccggggctttgcctcc

SEQ ID NO: 3608645 - DNA, 25 bp, Homo sapien
gaggtcggcgttcggccacaaagct

SEQ ID NO: 3608646 - DNA, 25 bp, Homo sapien
aaagctaccccggagctctgcgccg

SEQ ID NO: 3608647 - DNA, 25 bp, Homo sapien
tcctgttctctccggagcgcgcggg

SEQ ID NO: 3608648 - DNA, 25 bp, Homo sapien
tcgcggggatgggatactgggcaca

SEQ ID NO: 3608649 - DNA, 25 bp, Homo sapien
ctcgggaaagttagcgggcagagag

SEQ ID NO: 3608650 - DNA, 25 bp, Homo sapien
tgccgcaacgggtgggcgtgtgcgg

SEQ ID NO: 3608651 - DNA, 25 bp, Homo sapien
ctgccgcaacgggtgggcgtgtgcg

SEQ ID NO: 3608652 - DNA, 25 bp, Homo sapien
tgcagcttgcgcctcctcggtggcg

SEQ ID NO: 3608653 - DNA, 25 bp, Homo sapien
gcgcctcctcggtggcgtgcgacat

SEQ ID NO: 3608654 - DNA, 25 bp, Homo sapien
cttgcgcctcctcggtggcgtgcga

SEQ ID NO: 3608655 - DNA, 25 bp, Homo sapien
agcttgcgcctcctcggtggcgtgc

SEQ ID NO: 3608656 - DNA, 25 bp, Homo sapien
ccctgtgccacagagttgtcagaga

SEQ ID NO: 3608657 - DNA, 25 bp, Homo sapien
tcagaaatacattgaagagccagtt

SEQ ID NO: 3608658 - DNA, 25 bp, Homo sapien
tgtcagagaactgcccgctctcagg

SEQ ID NO: 3608659 - DNA, 25 bp, Homo sapien
gttttcaaagatgcagaggccgatt

SEQ ID NO: 3608660 - DNA, 25 bp, Homo sapien
cctggagcaggatcaccttgtacag

SEQ ID NO: 3608661 - DNA, 25 bp, Homo sapien
tggaatgcttcctcccctgtcagtt

SEQ ID NO: 3608662 - DNA, 25 bp, Homo sapien
cagatgatcagagtgggtacatgga

SEQ ID NO: 3608663 - DNA, 25 bp, Homo sapien
actggaaggcattcaccccctggag

SEQ ID NO: 3608664 - DNA, 25 bp, Homo sapien
cacaagtgttcggtctgcgagagcc

SEQ ID NO: 3608665 - DNA, 25 bp, Homo sapien
gatagaggtgactttgccagggcca

SEQ ID NO: 3608666 - DNA, 25 bp, Homo sapien
caggactctgggaactagtgccaaa

SEQ ID NO: 3608667 - DNA, 25 bp, Homo sapien
gaagaatagcggacttggagcctgc

SEQ ID NO: 3608668 - DNA, 25 bp, Homo sapien
cctggaaggaaccagccagaatccc

SEQ ID NO: 3608669 - DNA, 25 bp, Homo sapien
aatatcaggggcctgtgtccatcct

SEQ ID NO: 3608670 - DNA, 25 bp, Homo sapien
gtgtccctcgcccaaatgttcctat

SEQ ID NO: 3608671 - DNA, 25 bp, Homo sapien
gaaccagccagaatccctggtgcct

SEQ ID NO: 3608672 - DNA, 25 bp, Homo sapien
tccatgaactgcatgagggcagact

SEQ ID NO: 3608673 - DNA, 25 bp, Homo sapien
tcctaactactaaccactggtgagg

SEQ ID NO: 3608674 - DNA, 25 bp, Homo sapien
ttgctgaaaagggttagccagcccg

SEQ ID NO: 3608675 - DNA, 25 bp, Homo sapien
aaaggacaggcaacatccgcatgac

SEQ ID NO: 3608676 - DNA, 25 bp, Homo sapien
tagaatacactaggaaagcccgcaa

SEQ ID NO: 3608677 - DNA, 25 bp, Homo sapien
tccaaggcacctcaaagcagttcag

SEQ ID NO: 3608678 - DNA, 25 bp, Homo sapien
taaatcccatgggttagccagcccg

SEQ ID NO: 3608679 - DNA, 25 bp, Homo sapien
ttccagatgggcttgactcgctcac

SEQ ID NO: 3608680 - DNA, 25 bp, Homo sapien
gcagcaacctgcattcaccatggag

SEQ ID NO: 3608681 - DNA, 25 bp, Homo sapien
taaacagatggaggtaatccacccg

SEQ ID NO: 3608682 - DNA, 25 bp, Homo sapien
ccaccaagggcaactgggagagttc

SEQ ID NO: 3608683 - DNA, 25 bp, Homo sapien
cccaggcgagggtggttaccccatg

SEQ ID NO: 3608684 - DNA, 25 bp, Homo sapien
ctggagctgctcttccagtctggcc

SEQ ID NO: 3608685 - DNA, 25 bp, Homo sapien
ggagctgctcttccagtctggcctc

SEQ ID NO: 3608686 - DNA, 25 bp, Homo sapien
ttccagtctggcctcatccacagtc

SEQ ID NO: 3608687 - DNA, 25 bp, Homo sapien
agctgctcttccagtctggcctcat

SEQ ID NO: 3608688 - DNA, 25 bp, Homo sapien
gagcgctgtcagcacaggaaagccc

SEQ ID NO: 3608689 - DNA, 25 bp, Homo sapien
catggcaggtttctcggatggaaga

SEQ ID NO: 3608690 - DNA, 25 bp, Homo sapien
cactagcaatggaaacgagggccca

SEQ ID NO: 3608691 - DNA, 25 bp, Homo sapien
gggtcctaggtcacgggaagcacac

SEQ ID NO: 3608692 - DNA, 25 bp, Homo sapien
catccgggttgccttcaccgtccgt

SEQ ID NO: 3608693 - DNA, 25 bp, Homo sapien
gggttgccttcaccgtccgtcttgc

SEQ ID NO: 3608694 - DNA, 25 bp, Homo sapien
ttggcgccatcatccgggttgcctt

SEQ ID NO: 3608695 - DNA, 25 bp, Homo sapien
tcacacacttgaccaccatcagcac

SEQ ID NO: 3608696 - DNA, 25 bp, Homo sapien
gaagcccccgacggaggcacccaca

SEQ ID NO: 3608697 - DNA, 25 bp, Homo sapien
agcccccgacggaggcacccacaat

SEQ ID NO: 3608698 - DNA, 25 bp, Homo sapien
ccgacggaggcacccacaatcacgg

SEQ ID NO: 3608699 - DNA, 25 bp, Homo sapien
ccccgacggaggcacccacaatcac

SEQ ID NO: 3608700 - DNA, 25 bp, Homo sapien
taatgatcttcatgcggaactggag

SEQ ID NO: 3608701 - DNA, 25 bp, Homo sapien
tcaccgacacatcgtacttgctggg

SEQ ID NO: 3608702 - DNA, 25 bp, Homo sapien
gaggacctgcagatggatcttgcca

SEQ ID NO: 3608703 - DNA, 25 bp, Homo sapien
cctgagaactccacgcggtcttgaa

SEQ ID NO: 3608704 - DNA, 25 bp, Homo sapien
ctgcccctgccttcagcccaggact

SEQ ID NO: 3608705 - DNA, 25 bp, Homo sapien
gcccctgccttcagcccaggactca

SEQ ID NO: 3608706 - DNA, 25 bp, Homo sapien
cccctgcccctgccttcagcccagg

SEQ ID NO: 3608707 - DNA, 25 bp, Homo sapien
cctgcccctgccttcagcccaggac

SEQ ID NO: 3608708 - DNA, 25 bp, Homo sapien
ctggtaagtccagttcagggagaac

SEQ ID NO: 3608709 - DNA, 25 bp, Homo sapien
tcctcagagcagttgttgcactcct

SEQ ID NO: 3608710 - DNA, 25 bp, Homo sapien
gtgacctccatgctccgtcctggtg

SEQ ID NO: 3608711 - DNA, 25 bp, Homo sapien
gcgtcagagccattgaggacgttga

SEQ ID NO: 3608712 - DNA, 25 bp, Homo sapien
cctcaggcttgcaacagacaagaaa

SEQ ID NO: 3608713 - DNA, 25 bp, Homo sapien
gcttgcaacagacaagaaagagggc

SEQ ID NO: 3608714 - DNA, 25 bp, Homo sapien
tcctcaggcttgcaacagacaagaa

SEQ ID NO: 3608715 - DNA, 25 bp, Homo sapien
caggcttgcaacagacaagaaagag

SEQ ID NO: 3608716 - DNA, 25 bp, Homo sapien
gaggcaccattccaaggaccagctg

SEQ ID NO: 3608717 - DNA, 25 bp, Homo sapien
ctgaaagcatctggcagcgcaccag

SEQ ID NO: 3608718 - DNA, 25 bp, Homo sapien
ctggcagcgcaccagccaaggagga

SEQ ID NO: 3608719 - DNA, 25 bp, Homo sapien
aagcatctggcagcgcaccagccaa

SEQ ID NO: 3608720 - DNA, 25 bp, Homo sapien
tctggcagcgcaccagccaaggagg

SEQ ID NO: 3608721 - DNA, 25 bp, Homo sapien
gccacctccatagtcatccccacaa

SEQ ID NO: 3608722 - DNA, 25 bp, Homo sapien
ttgccacctccatagtcatccccac

SEQ ID NO: 3608723 - DNA, 25 bp, Homo sapien
ctccatagtcatccccacaagccca

SEQ ID NO: 3608724 - DNA, 25 bp, Homo sapien
acctccatagtcatccccacaagcc

SEQ ID NO: 3608725 - DNA, 25 bp, Homo sapien
ggcagggcgaggtagccaggcatct

SEQ ID NO: 3608726 - DNA, 25 bp, Homo sapien
actgagccccgtgaggctgaaggca

SEQ ID NO: 3608727 - DNA, 25 bp, Homo sapien
gaaaaagagactgagccccgtgagg

SEQ ID NO: 3608728 - DNA, 25 bp, Homo sapien
cagggcgaggtagccaggcatctct

SEQ ID NO: 3608729 - DNA, 25 bp, Homo sapien
gagactgagatgttagtcgggtggg

SEQ ID NO: 3608730 - DNA, 25 bp, Homo sapien
agagactgagatgttagtcgggtgg

SEQ ID NO: 3608731 - DNA, 25 bp, Homo sapien
cagagactgagatgttagtcgggtg

SEQ ID NO: 3608732 - DNA, 25 bp, Homo sapien
tctctctaatatggccggcttgtat

SEQ ID NO: 3608733 - DNA, 25 bp, Homo sapien
ggaggaatggttggatgctaaaaaa

SEQ ID NO: 3608734 - DNA, 25 bp, Homo sapien
tatacaacattaaggaagctttatt

SEQ ID NO: 3608735 - DNA, 25 bp, Homo sapien
aaatgcacggatgtacttcaaagac

SEQ ID NO: 3608736 - DNA, 25 bp, Homo sapien
catgctgccgcagacacatgtcagc

SEQ ID NO: 3608737 - DNA, 25 bp, Homo sapien
ttggtttgacgtagccggcctcctc

SEQ ID NO: 3608738 - DNA, 25 bp, Homo sapien
atgtcagctctgccccgttgccaga

SEQ ID NO: 3608739 - DNA, 25 bp, Homo sapien
gctctgccccgttgccagagatttt

SEQ ID NO: 3608740 - DNA, 25 bp, Homo sapien
tctgaaatcactggtagagtggccc

SEQ ID NO: 3608741 - DNA, 25 bp, Homo sapien
cagcctctagtgtgttagcacggtt

SEQ ID NO: 3608742 - DNA, 25 bp, Homo sapien
agcacggtttggctttcctccagga

SEQ ID NO: 3608743 - DNA, 25 bp, Homo sapien
ccaccgctgctgagatgaagggact

SEQ ID NO: 3608744 - DNA, 25 bp, Homo sapien
cttgctgtgtttttggcattccccc

SEQ ID NO: 3608745 - DNA, 25 bp, Homo sapien
tgctgtgtttttggcattcccccac

SEQ ID NO: 3608746 - DNA, 25 bp, Homo sapien
aggcttgctgtgtttttggcattcc

SEQ ID NO: 3608747 - DNA, 25 bp, Homo sapien
tcaaaaggcttgctgtgtttttggc

SEQ ID NO: 3608748 - DNA, 25 bp, Homo sapien
ttcaagtgagttgttccgatctgac

SEQ ID NO: 3608749 - DNA, 25 bp, Homo sapien
ttttcaagtgagttgttccgatctg

SEQ ID NO: 3608750 - DNA, 25 bp, Homo sapien
tttcaagtgagttgttccgatctga

SEQ ID NO: 3608751 - DNA, 25 bp, Homo sapien
ttttttcaagtgagttgttccgatc

SEQ ID NO: 3608752 - DNA, 25 bp, Homo sapien
cagcccaggcctcttctcttactct

SEQ ID NO: 3608753 - DNA, 25 bp, Homo sapien
ggcctcttctcttactctattggat

SEQ ID NO: 3608754 - DNA, 25 bp, Homo sapien
caggcctcttctcttactctattgg

SEQ ID NO: 3608755 - DNA, 25 bp, Homo sapien
cccaggcctcttctcttactctatt

SEQ ID NO: 3608756 - DNA, 25 bp, Homo sapien
caggaatggtgttttcaacagaatc

SEQ ID NO: 3608757 - DNA, 25 bp, Homo sapien
ataatcgcctagcattaaacctggg

SEQ ID NO: 3608758 - DNA, 25 bp, Homo sapien
gctgtgaagacaattgttcctcctg

SEQ ID NO: 3608759 - DNA, 25 bp, Homo sapien
taaacctggggaagttagctgtgaa

SEQ ID NO: 3608760 - DNA, 25 bp, Homo sapien
ctcagggctggtacgataggaacaa

SEQ ID NO: 3608761 - DNA, 25 bp, Homo sapien
cacaaggcagctgtatcagcaggtc

SEQ ID NO: 3608762 - DNA, 25 bp, Homo sapien
taatgtttcactcggtggatccagg

SEQ ID NO: 3608763 - DNA, 25 bp, Homo sapien
gatgaggcctcgcaagttactgcag

SEQ ID NO: 3608764 - DNA, 25 bp, Homo sapien
tgcacgccccgaggtgccttttcca

SEQ ID NO: 3608765 - DNA, 25 bp, Homo sapien
cacgccccgaggtgccttttccagg

SEQ ID NO: 3608766 - DNA, 25 bp, Homo sapien
gcacgccccgaggtgccttttccag

SEQ ID NO: 3608767 - DNA, 25 bp, Homo sapien
tcctcgatcacctcccgtacaatta

SEQ ID NO: 3608768 - DNA, 25 bp, Homo sapien
gatcacctcccgtacaattattggg

SEQ ID NO: 3608769 - DNA, 25 bp, Homo sapien
cttcttcctcgatcacctcccgtac

SEQ ID NO: 3608770 - DNA, 25 bp, Homo sapien
tcgatcacctcccgtacaattattg

SEQ ID NO: 3608771 - DNA, 25 bp, Homo sapien
ctgcaagctgcgacatacaatgggt

SEQ ID NO: 3608772 - DNA, 25 bp, Homo sapien
catggtcctgtcactcgttggtaaa

SEQ ID NO: 3608773 - DNA, 25 bp, Homo sapien
tatttgctaggcatcgaccacccaa

SEQ ID NO: 3608774 - DNA, 25 bp, Homo sapien
cagatcttactgactccaagcgcag

SEQ ID NO: 3608775 - DNA, 25 bp, Homo sapien
ttcacatctttcaaaatggcagggt

SEQ ID NO: 3608776 - DNA, 25 bp, Homo sapien
ctccccttcacatctttcaaaatgg

SEQ ID NO: 3608777 - DNA, 25 bp, Homo sapien
catctttcaaaatggcagggttttt

SEQ ID NO: 3608778 - DNA, 25 bp, Homo sapien
ccccttcacatctttcaaaatggca

SEQ ID NO: 3608779 - DNA, 25 bp, Homo sapien
tcttcgtgttcttcaccaagactgt

SEQ ID NO: 3608780 - DNA, 25 bp, Homo sapien
cttcgtgttcttcaccaagactgta

SEQ ID NO: 3608781 - DNA, 25 bp, Homo sapien
ttcttcgtgttcttcaccaagactg

SEQ ID NO: 3608782 - DNA, 25 bp, Homo sapien
cttcttcgtgttcttcaccaagact

SEQ ID NO: 3608783 - DNA, 25 bp, Homo sapien
caagccactttcagtccgtatggga

SEQ ID NO: 3608784 - DNA, 25 bp, Homo sapien
gagatcccctcttggcttcgtgaag

SEQ ID NO: 3608785 - DNA, 25 bp, Homo sapien
tcagcaagacgccaatccgaagggc

SEQ ID NO: 3608786 - DNA, 25 bp, Homo sapien
gcatgtggaattaaccagcgggcat

SEQ ID NO: 3608787 - DNA, 25 bp, Homo sapien
gcacagacaattcccacaatgatca

SEQ ID NO: 3608788 - DNA, 25 bp, Homo sapien
gtggcacagacaattcccacaatga

SEQ ID NO: 3608789 - DNA, 25 bp, Homo sapien
ggtcttcttcacgatcaatatcaga

SEQ ID NO: 3608790 - DNA, 25 bp, Homo sapien
tatttccacaggtcttcttcacgat

SEQ ID NO: 3608791 - DNA, 25 bp, Homo sapien
aggcctcagggctgccggggtcacc

SEQ ID NO: 3608792 - DNA, 25 bp, Homo sapien
gattaccacccaagaccagaggcct

SEQ ID NO: 3608793 - DNA, 25 bp, Homo sapien
ctgattaccacccaagaccagaggc

SEQ ID NO: 3608794 - DNA, 25 bp, Homo sapien
ctcagggctgccggggtcaccagtg

SEQ ID NO: 3608795 - DNA, 25 bp, Homo sapien
tctgcatgagatctggaggcctgac

SEQ ID NO: 3608796 - DNA, 25 bp, Homo sapien
tttcgctggagagatgacagggtcc

SEQ ID NO: 3608797 - DNA, 25 bp, Homo sapien
gaaagagttcaacgggtctggcaca

SEQ ID NO: 3608798 - DNA, 25 bp, Homo sapien
atcattctcagggttgtgcaaggcc

SEQ ID NO: 3608799 - DNA, 25 bp, Homo sapien
cagcacaatggttttcttgaacacc

SEQ ID NO: 3608800 - DNA, 25 bp, Homo sapien
tccttgaagcatgatggaaccgtca

SEQ ID NO: 3608801 - DNA, 25 bp, Homo sapien
ccaggttccctaggtggatactgca

SEQ ID NO: 3608802 - DNA, 25 bp, Homo sapien
ggaaccgtcattgcggaaaatgtcc

SEQ ID NO: 3608803 - DNA, 25 bp, Homo sapien
ggtagtaacgaaatacaatctcctc

SEQ ID NO: 3608804 - DNA, 25 bp, Homo sapien
tgtggtagtaacgaaatacaatctc

SEQ ID NO: 3608805 - DNA, 25 bp, Homo sapien
tcctgagtttgtggtagtaacgaaa

SEQ ID NO: 3608806 - DNA, 25 bp, Homo sapien
cagacatcctgagtttgtggtagta

SEQ ID NO: 3608807 - DNA, 25 bp, Homo sapien
caaggccctgctaggtgaaggcagt

SEQ ID NO: 3608808 - DNA, 25 bp, Homo sapien
tactcaggctaaaaatcctggagtc

SEQ ID NO: 3608809 - DNA, 25 bp, Homo sapien
tgcgtgtgtacttgtgaaggacatc

SEQ ID NO: 3608810 - DNA, 25 bp, Homo sapien
tccaataggaacctgaaacatgtct

SEQ ID NO: 3608811 - DNA, 25 bp, Homo sapien
cattggagttatctttcccaccaga

SEQ ID NO: 3608812 - DNA, 25 bp, Homo sapien
ggctcttgcaacacctcctcatgtg

SEQ ID NO: 3608813 - DNA, 25 bp, Homo sapien
tccagttctgataagcaccaaagcc

SEQ ID NO: 3608814 - DNA, 25 bp, Homo sapien
gtacaatctcatatcggcatccaaa

SEQ ID NO: 3608815 - DNA, 25 bp, Homo sapien
ctgaatcaatccacccacatggacc

SEQ ID NO: 3608816 - DNA, 25 bp, Homo sapien
tgaaaggtattagggcatagtaaaa

SEQ ID NO: 3608817 - DNA, 25 bp, Homo sapien
cagatgtagcatcaatgtggataac

SEQ ID NO: 3608818 - DNA, 25 bp, Homo sapien
aacatagggtacctataaaatacag

SEQ ID NO: 3608819 - DNA, 25 bp, Homo sapien
ccccagatcacctaacatagggtac

SEQ ID NO: 3608820 - DNA, 25 bp, Homo sapien
tgggctcctctggaagcacatgcag

SEQ ID NO: 3608821 - DNA, 25 bp, Homo sapien
tttgggctcctctggaagcacatgc

SEQ ID NO: 3608822 - DNA, 25 bp, Homo sapien
ctttgggctcctctggaagcacatg

SEQ ID NO: 3608823 - DNA, 25 bp, Homo sapien
gctcctctggaagcacatgcagtac

SEQ ID NO: 3608824 - DNA, 25 bp, Homo sapien
acagatataggttccctggtcagcc

SEQ ID NO: 3608825 - DNA, 25 bp, Homo sapien
ccctttgaggcggatttcacagata

SEQ ID NO: 3608826 - DNA, 25 bp, Homo sapien
tctggaagcgcccaataggcacact

SEQ ID NO: 3608827 - DNA, 25 bp, Homo sapien
ccatcaagtgtacgcggttctggaa

SEQ ID NO: 3608828 - DNA, 25 bp, Homo sapien
gggggcagcagagctatcatcatga

SEQ ID NO: 3608829 - DNA, 25 bp, Homo sapien
aacagtgttggagacaatcaaaaga

SEQ ID NO: 3608830 - DNA, 25 bp, Homo sapien
aaagaggtgccagaccgaggagcct

SEQ ID NO: 3608831 - DNA, 25 bp, Homo sapien
tggatcccaaagactctgttatgtg

SEQ ID NO: 3608832 - DNA, 25 bp, Homo sapien
ggtgacagagtccagtctatcttga

SEQ ID NO: 3608833 - DNA, 25 bp, Homo sapien
agctcaggcggggaaacattcaagt

SEQ ID NO: 3608834 - DNA, 25 bp, Homo sapien
gaatcacccacatggactgttagct

SEQ ID NO: 3608835 - DNA, 25 bp, Homo sapien
atcccatcagagctgaatcacccac

SEQ ID NO: 3608836 - DNA, 25 bp, Homo sapien
tccttgtaattaggccaccacagag

SEQ ID NO: 3608837 - DNA, 25 bp, Homo sapien
gatgctgcccagttcatatcagaga

SEQ ID NO: 3608838 - DNA, 25 bp, Homo sapien
caagcaatttcgagcggtcactaca

SEQ ID NO: 3608839 - DNA, 25 bp, Homo sapien
ctctaggtgcttcacacagggaccc

SEQ ID NO: 3608840 - DNA, 25 bp, Homo sapien
gcaggatgagtttcagtgggcaaaa

SEQ ID NO: 3608841 - DNA, 25 bp, Homo sapien
caggatgagtttcagtgggcaaaac

SEQ ID NO: 3608842 - DNA, 25 bp, Homo sapien
ggatgagtttcagtgggcaaaacat

SEQ ID NO: 3608843 - DNA, 25 bp, Homo sapien
cagcaggatgagtttcagtgggcaa

SEQ ID NO: 3608844 - DNA, 25 bp, Homo sapien
aatcatgtcaagagaagctcattaa

SEQ ID NO: 3608845 - DNA, 25 bp, Homo sapien
tagtgaaggactatacggagcagcc

SEQ ID NO: 3608846 - DNA, 25 bp, Homo sapien
aaaaccaatagtgaaggactatacg

SEQ ID NO: 3608847 - DNA, 25 bp, Homo sapien
aaatcatgtcaagagaagctcatta

SEQ ID NO: 3608848 - DNA, 25 bp, Homo sapien
tacagtgcaaccagtcttgagttcc

SEQ ID NO: 3608849 - DNA, 25 bp, Homo sapien
ggcccatggtgcactttttatctta

SEQ ID NO: 3608850 - DNA, 25 bp, Homo sapien
ctagaatgagagttgggctgtgcat

SEQ ID NO: 3608851 - DNA, 25 bp, Homo sapien
tcttagctaaacagaagaaccctga

SEQ ID NO: 3608852 - DNA, 25 bp, Homo sapien
ggcttcctttatggtgtgtcctaac

SEQ ID NO: 3608853 - DNA, 25 bp, Homo sapien
ttccccagggagttggttgtgctcc

SEQ ID NO: 3608854 - DNA, 25 bp, Homo sapien
tggatgaaggtcataaggggcttcc

SEQ ID NO: 3608855 - DNA, 25 bp, Homo sapien
aacataagttcatcacatctgggac

SEQ ID NO: 3608856 - DNA, 25 bp, Homo sapien
gaaagtgcacccaagtccatcagtg

SEQ ID NO: 3608857 - DNA, 25 bp, Homo sapien
accgattatccggtgcaaggcccca

SEQ ID NO: 3608858 - DNA, 25 bp, Homo sapien
agaaagcagtttgtgtccccagcgg

SEQ ID NO: 3608859 - DNA, 25 bp, Homo sapien
tttcctcagcgagaagcctcaagag

SEQ ID NO: 3608860 - DNA, 25 bp, Homo sapien
cctgcagagccaagtcctctcaatc

SEQ ID NO: 3608861 - DNA, 25 bp, Homo sapien
tgcagagccaagtcctctcaatcta

SEQ ID NO: 3608862 - DNA, 25 bp, Homo sapien
gcagagccaagtcctctcaatctat

SEQ ID NO: 3608863 - DNA, 25 bp, Homo sapien
agagccaagtcctctcaatctatct

SEQ ID NO: 3608864 - DNA, 25 bp, Homo sapien
acccaggggaggcaatgcactgaaa

SEQ ID NO: 3608865 - DNA, 25 bp, Homo sapien
tgcgaggacattacaagaaggccca

SEQ ID NO: 3608866 - DNA, 25 bp, Homo sapien
gaaatgtaaactgccggtcctgtct

SEQ ID NO: 3608867 - DNA, 25 bp, Homo sapien
tgaggtgcagcagttaacagcccaa

SEQ ID NO: 3608868 - DNA, 25 bp, Homo sapien
caagcagtcccaaagtaccgtgagg

SEQ ID NO: 3608869 - DNA, 25 bp, Homo sapien
taggtgactcttcttgtgtcataca

SEQ ID NO: 3608870 - DNA, 25 bp, Homo sapien
ttaggtgactcttcttgtgtcatac

SEQ ID NO: 3608871 - DNA, 25 bp, Homo sapien
tcaatatgtctcttcatagtctgaa

SEQ ID NO: 3608872 - DNA, 25 bp, Homo sapien
aatatgtctcttcatagtctgaatc

SEQ ID NO: 3608873 - DNA, 25 bp, Homo sapien
caatatgtctcttcatagtctgaat

SEQ ID NO: 3608874 - DNA, 25 bp, Homo sapien
actcagcgcaacggacacaaagcct

SEQ ID NO: 3608875 - DNA, 25 bp, Homo sapien
agcctcgccatacacgcctcttcct

SEQ ID NO: 3608876 - DNA, 25 bp, Homo sapien
aaagcctcgccatacacgcctcttc

SEQ ID NO: 3608877 - DNA, 25 bp, Homo sapien
aacggacacaaagcctcgccataca

SEQ ID NO: 3608878 - DNA, 25 bp, Homo sapien
tcatcggaaacctcaatagatgact

SEQ ID NO: 3608879 - DNA, 25 bp, Homo sapien
acttcttatagccagacctgctcct

SEQ ID NO: 3608880 - DNA, 25 bp, Homo sapien
ccacagaggaaagcatggtgccaaa

SEQ ID NO: 3608881 - DNA, 25 bp, Homo sapien
atagatgacttcttatagccagacc

SEQ ID NO: 3608882 - DNA, 25 bp, Homo sapien
caggaaatccgatcccgaaatgtgc

SEQ ID NO: 3608883 - DNA, 25 bp, Homo sapien
ccattgtcctttatggtagggttgc

SEQ ID NO: 3608884 - DNA, 25 bp, Homo sapien
ctttgtatacatttccaacccagga

SEQ ID NO: 3608885 - DNA, 25 bp, Homo sapien
gcttatacttatagatgcatcccct

SEQ ID NO: 3608886 - DNA, 25 bp, Homo sapien
ggctgctgctgggagggcgatatgt

SEQ ID NO: 3608887 - DNA, 25 bp, Homo sapien
gatactgtgtggctgctgctgggag

SEQ ID NO: 3608888 - DNA, 25 bp, Homo sapien
gtggctgctgctgggagggcgatat

SEQ ID NO: 3608889 - DNA, 25 bp, Homo sapien
tgatactgtgtggctgctgctggga

SEQ ID NO: 3608890 - DNA, 25 bp, Homo sapien
tctccaaggaaaagacgatataaac

SEQ ID NO: 3608891 - DNA, 25 bp, Homo sapien
gggcatctgcacgaatctccaagga

SEQ ID NO: 3608892 - DNA, 25 bp, Homo sapien
cataacctcggacatgggcatctgc

SEQ ID NO: 3608893 - DNA, 25 bp, Homo sapien
catctgaagttgacttgaaagtgca

SEQ ID NO: 3608894 - DNA, 25 bp, Homo sapien
tcccaaattccctgatgcggttcat

SEQ ID NO: 3608895 - DNA, 25 bp, Homo sapien
ccttcccaaattccctgatgcggtt

SEQ ID NO: 3608896 - DNA, 25 bp, Homo sapien
aatatcggccccctttgcggtgcct

SEQ ID NO: 3608897 - DNA, 25 bp, Homo sapien
cagctcaaatatcggccccctttgc

SEQ ID NO: 3608898 - DNA, 25 bp, Homo sapien
tttctcctcctaacactaggtacat

SEQ ID NO: 3608899 - DNA, 25 bp, Homo sapien
cgccctttctcctcctaacactagg

SEQ ID NO: 3608900 - DNA, 25 bp, Homo sapien
tcctcctaacactaggtacataatc

SEQ ID NO: 3608901 - DNA, 25 bp, Homo sapien
tctcctcctaacactaggtacataa

SEQ ID NO: 3608902 - DNA, 25 bp, Homo sapien
gatgaactaaaattcagggctggtg

SEQ ID NO: 3608903 - DNA, 25 bp, Homo sapien
gaaaagcattcttgccaggtaaaaa

SEQ ID NO: 3608904 - DNA, 25 bp, Homo sapien
tagacatcagggtgttgactccttt

SEQ ID NO: 3608905 - DNA, 25 bp, Homo sapien
cccgtactggtagataaagcaaact

SEQ ID NO: 3608906 - DNA, 25 bp, Homo sapien
aagcccccaatcttgtatgccccat

SEQ ID NO: 3608907 - DNA, 25 bp, Homo sapien
cacatgaaagaattaaatgtgtcaa

SEQ ID NO: 3608908 - DNA, 25 bp, Homo sapien
aaagcccccaatcttgtatgcccca

SEQ ID NO: 3608909 - DNA, 25 bp, Homo sapien
cccccaatcttgtatgccccatttt

SEQ ID NO: 3608910 - DNA, 25 bp, Homo sapien
ggagacttatgatgacacaggcagc

SEQ ID NO: 3608911 - DNA, 25 bp, Homo sapien
tggtgatgacatcgtcccaacgtcc

SEQ ID NO: 3608912 - DNA, 25 bp, Homo sapien
tctaatcagggtatacagcgcccaa

SEQ ID NO: 3608913 - DNA, 25 bp, Homo sapien
ttattaggagtgacagtaggccagc

SEQ ID NO: 3608914 - DNA, 25 bp, Homo sapien
agcagagggaagagagcgcagccac

SEQ ID NO: 3608915 - DNA, 25 bp, Homo sapien
ggaagagagcgcagccacggcttcc

SEQ ID NO: 3608916 - DNA, 25 bp, Homo sapien
gaacaggacgcccagcagagggaag

SEQ ID NO: 3608917 - DNA, 25 bp, Homo sapien
ctggaagaacaggacgcccagcaga

SEQ ID NO: 3608918 - DNA, 25 bp, Homo sapien
cccggcagctcttcagatgcttgca

SEQ ID NO: 3608919 - DNA, 25 bp, Homo sapien
tcagatgcttgcacaccttgtttac

SEQ ID NO: 3608920 - DNA, 25 bp, Homo sapien
gctcttcagatgcttgcacaccttg

SEQ ID NO: 3608921 - DNA, 25 bp, Homo sapien
gatgcttgcacaccttgtttacagc

SEQ ID NO: 3608922 - DNA, 25 bp, Homo sapien
aggaaggagacactaaacaacaggc

SEQ ID NO: 3608923 - DNA, 25 bp, Homo sapien
tatccgtcactgctcatgaaagacc

SEQ ID NO: 3608924 - DNA, 25 bp, Homo sapien
gattccagtctgcaaatgagcatag

SEQ ID NO: 3608925 - DNA, 25 bp, Homo sapien
gaaacaccgaggaggcttagctcac

SEQ ID NO: 3608926 - DNA, 25 bp, Homo sapien
tgacatttaccccaatactccagta

SEQ ID NO: 3608927 - DNA, 25 bp, Homo sapien
gtttttacaactagcttgttcacac

SEQ ID NO: 3608928 - DNA, 25 bp, Homo sapien
tgaccccaagttgttagataatccc

SEQ ID NO: 3608929 - DNA, 25 bp, Homo sapien
catattcaagactttcccaattgcc

SEQ ID NO: 3608930 - DNA, 25 bp, Homo sapien
taataaatataaccccgaagccaca

SEQ ID NO: 3608931 - DNA, 25 bp, Homo sapien
tgggaaacacctaacagccataaag

SEQ ID NO: 3608932 - DNA, 25 bp, Homo sapien
gatgatctgggagtcctcattagag

SEQ ID NO: 3608933 - DNA, 25 bp, Homo sapien
gaagacttttgtctccctgacccag

SEQ ID NO: 3608934 - DNA, 25 bp, Homo sapien
taatggcagtagagtccagcttctt

SEQ ID NO: 3608935 - DNA, 25 bp, Homo sapien
tgtcttctaaataaacagagacctt

SEQ ID NO: 3608936 - DNA, 25 bp, Homo sapien
cagagacctttttctcttggttgag

SEQ ID NO: 3608937 - DNA, 25 bp, Homo sapien
tctcttggttgagcctttcctcttc

SEQ ID NO: 3608938 - DNA, 25 bp, Homo sapien
tagtctgtgtcttctaaataaacag

SEQ ID NO: 3608939 - DNA, 25 bp, Homo sapien
gaattacatgcacttgggagtagat

SEQ ID NO: 3608940 - DNA, 25 bp, Homo sapien
gggtaaatcccacagaagcttcagg

SEQ ID NO: 3608941 - DNA, 25 bp, Homo sapien
acaagacaagaagcaagtgggtaaa

SEQ ID NO: 3608942 - DNA, 25 bp, Homo sapien
tgtaacaagcagaaaccaaatgtca

SEQ ID NO: 3608943 - DNA, 25 bp, Homo sapien
aattagttctgtttcgccaggcgcg

SEQ ID NO: 3608944 - DNA, 25 bp, Homo sapien
tcagccatatacgaaaacgaactca

SEQ ID NO: 3608945 - DNA, 25 bp, Homo sapien
aaaagagtgaatttggacttctgcc

SEQ ID NO: 3608946 - DNA, 25 bp, Homo sapien
tagatgagacacaaaagcactagca

SEQ ID NO: 3608947 - DNA, 25 bp, Homo sapien
taagccctgactcatagtggccctg

SEQ ID NO: 3608948 - DNA, 25 bp, Homo sapien
ggagggagcttaaaaacgttctgca

SEQ ID NO: 3608949 - DNA, 25 bp, Homo sapien
tgaacacctgctatcagcacaacag

SEQ ID NO: 3608950 - DNA, 25 bp, Homo sapien
aataccaagagtcgccataagagtg

SEQ ID NO: 3608951 - DNA, 25 bp, Homo sapien
cactttatgagctctttcggcccat

SEQ ID NO: 3608952 - DNA, 25 bp, Homo sapien
ccggtaatgctggaagaggaccact

SEQ ID NO: 3608953 - DNA, 25 bp, Homo sapien
ctattatgatcatcagtgcacaggc

SEQ ID NO: 3608954 - DNA, 25 bp, Homo sapien
ggcccatcgctttttccggtaatgc

SEQ ID NO: 3608955 - DNA, 25 bp, Homo sapien
tggaggcatcgtaccgctcaggatt

SEQ ID NO: 3608956 - DNA, 25 bp, Homo sapien
cacctggcaggtgtatgtcccattg

SEQ ID NO: 3608957 - DNA, 25 bp, Homo sapien
tgtcgtcgaactgcagtttccagag

SEQ ID NO: 3608958 - DNA, 25 bp, Homo sapien
tatcaccccatcaacatcaggtggg

SEQ ID NO: 3608959 - DNA, 25 bp, Homo sapien
gcttaaccttgtgcttgctgctaag

SEQ ID NO: 3608960 - DNA, 25 bp, Homo sapien
ggagaaatggactggcttattattt

SEQ ID NO: 3608961 - DNA, 25 bp, Homo sapien
tgggagcggaagtgaaacaccagca

SEQ ID NO: 3608962 - DNA, 25 bp, Homo sapien
tctctgtcccaagaattgtttccga

SEQ ID NO: 3608963 - DNA, 25 bp, Homo sapien
taaccgagcatctgtcccattaaca

SEQ ID NO: 3608964 - DNA, 25 bp, Homo sapien
gggcaaagctggagaaagtgcattt

SEQ ID NO: 3608965 - DNA, 25 bp, Homo sapien
ggtcactgttagagcatcacccaca

SEQ ID NO: 3608966 - DNA, 25 bp, Homo sapien
cccgtctagaggacgaaaattccag

SEQ ID NO: 3608967 - DNA, 25 bp, Homo sapien
cctagaacctttgtaccacgtggca

SEQ ID NO: 3608968 - DNA, 25 bp, Homo sapien
aaatccaaatgccaagtcctgccag

SEQ ID NO: 3608969 - DNA, 25 bp, Homo sapien
tgtaacctgagattagaaagccctc

SEQ ID NO: 3608970 - DNA, 25 bp, Homo sapien
tgggaggttgagaacagccacacac

SEQ ID NO: 3608971 - DNA, 25 bp, Homo sapien
cacgagtagagctcttgccatacat

SEQ ID NO: 3608972 - DNA, 25 bp, Homo sapien
caccgcacgagtagagctcttgcca

SEQ ID NO: 3608973 - DNA, 25 bp, Homo sapien
ccaaggagaagaagcaccgcacgag

SEQ ID NO: 3608974 - DNA, 25 bp, Homo sapien
gaagaagcaccgcacgagtagagct

SEQ ID NO: 3608975 - DNA, 25 bp, Homo sapien
gaacgagcatgagcacgtctgcaca

SEQ ID NO: 3608976 - DNA, 25 bp, Homo sapien
gagttgagttcctcacctgtgcctg

SEQ ID NO: 3608977 - DNA, 25 bp, Homo sapien
gggaggagcaagcaccgcgttttcc

SEQ ID NO: 3608978 - DNA, 25 bp, Homo sapien
tgtgcctgtgactcagcccgctctg

SEQ ID NO: 3608979 - DNA, 25 bp, Homo sapien
tgaagactttaaaaacaaatgagga

SEQ ID NO: 3608980 - DNA, 25 bp, Homo sapien
ctttaaaaacaaatgaggacaccat

SEQ ID NO: 3608981 - DNA, 25 bp, Homo sapien
gtttctgaaaactgtgtggcgtctt

SEQ ID NO: 3608982 - DNA, 25 bp, Homo sapien
tcagattctagttcagaaagggacc

SEQ ID NO: 3608983 - DNA, 25 bp, Homo sapien
agcctttctggtatgtaggtcagaa

SEQ ID NO: 3608984 - DNA, 25 bp, Homo sapien
agggacctaaaatcagtctgctggg

SEQ ID NO: 3608985 - DNA, 25 bp, Homo sapien
tgtaactccacctcttgttctttgc

SEQ ID NO: 3608986 - DNA, 25 bp, Homo sapien
tccatgatgttgtccatcactagct

SEQ ID NO: 3608987 - DNA, 25 bp, Homo sapien
tggcagttttgtcccaagtatactt

SEQ ID NO: 3608988 - DNA, 25 bp, Homo sapien
gatgttgtccatcactagctgctgg

SEQ ID NO: 3608989 - DNA, 25 bp, Homo sapien
tgtcccaagtatacttgattgtgcc

SEQ ID NO: 3608990 - DNA, 25 bp, Homo sapien
tggcgaccacaacttgaggcctcct

SEQ ID NO: 3608991 - DNA, 25 bp, Homo sapien
ccgtacagtcgcctcctaggactgg

SEQ ID NO: 3608992 - DNA, 25 bp, Homo sapien
gaggcccagagttcgcgaagtcaga

SEQ ID NO: 3608993 - DNA, 25 bp, Homo sapien
cagagttcgcgaagtcagaagacaa

SEQ ID NO: 3608994 - DNA, 25 bp, Homo sapien
ctgaagtggtttgggccttgtgaca

SEQ ID NO: 3608995 - DNA, 25 bp, Homo sapien
tacacgggccggtagttctgcagct

SEQ ID NO: 3608996 - DNA, 25 bp, Homo sapien
accagatccagggcgaggtcgtgct

SEQ ID NO: 3608997 - DNA, 25 bp, Homo sapien
tttgggccttgtgacagcaccagat

SEQ ID NO: 3608998 - DNA, 25 bp, Homo sapien
ttggtgaagggcagcgcgtggcgct

SEQ ID NO: 3608999 - DNA, 25 bp, Homo sapien
agggcagcaggtggtgaagaccttg

SEQ ID NO: 3609000 - DNA, 25 bp, Homo sapien
gtgatgttgtggatccaggcctcga

SEQ ID NO: 3609001 - DNA, 25 bp, Homo sapien
ggtgatgttgtggatccaggcctcg

SEQ ID NO: 3609002 - DNA, 25 bp, Homo sapien
tgggtgatgttgtggatccaggcct

SEQ ID NO: 3609003 - DNA, 25 bp, Homo sapien
tgatgttgtggatccaggcctcgag

SEQ ID NO: 3609004 - DNA, 25 bp, Homo sapien
taaaagccgctactccttggtacca

SEQ ID NO: 3609005 - DNA, 25 bp, Homo sapien
cactactagataagaggacagaatc

SEQ ID NO: 3609006 - DNA, 25 bp, Homo sapien
gaagctttcaaaatccctcccagat

SEQ ID NO: 3609007 - DNA, 25 bp, Homo sapien
tacacagttcagaccctagttcata

SEQ ID NO: 3609008 - DNA, 25 bp, Homo sapien
atgatgctgatggaatttccacaga

SEQ ID NO: 3609009 - DNA, 25 bp, Homo sapien
cacagaagaccaataagatactgat

SEQ ID NO: 3609010 - DNA, 25 bp, Homo sapien
ccacagaagaccaataagatactga

SEQ ID NO: 3609011 - DNA, 25 bp, Homo sapien
tgatggaatttccacagaagaccaa

SEQ ID NO: 3609012 - DNA, 25 bp, Homo sapien
cagaggataggagggatacacatta

SEQ ID NO: 3609013 - DNA, 25 bp, Homo sapien
ggaacaccacgttgcatttgaatgc

SEQ ID NO: 3609014 - DNA, 25 bp, Homo sapien
tagattacatatgggatgcagagga

SEQ ID NO: 3609015 - DNA, 25 bp, Homo sapien
ttaagagtgtagaaggcccaagtca

SEQ ID NO: 3609016 - DNA, 25 bp, Homo sapien
ggtaagcacttgacgagacccaaca

SEQ ID NO: 3609017 - DNA, 25 bp, Homo sapien
cacatgtctgtagtgccagagctac

SEQ ID NO: 3609018 - DNA, 25 bp, Homo sapien
ggtttaacatatcgtgccatcaatg

SEQ ID NO: 3609019 - DNA, 25 bp, Homo sapien
tatgtagaatactcaacggtcttac

SEQ ID NO: 3609020 - DNA, 25 bp, Homo sapien
atagtgttaagatgttaattctccc

SEQ ID NO: 3609021 - DNA, 25 bp, Homo sapien
gagccaattcaaatggaagtgcaaa

SEQ ID NO: 3609022 - DNA, 25 bp, Homo sapien
ttcggaataaatctggtaaaatata

SEQ ID NO: 3609023 - DNA, 25 bp, Homo sapien
catttttgtagtaactgaggagcca

SEQ ID NO: 3609024 - DNA, 25 bp, Homo sapien
caagcaagtcaggacaactcccacg

SEQ ID NO: 3609025 - DNA, 25 bp, Homo sapien
agaaacaggtaggtaggagggcgag

SEQ ID NO: 3609026 - DNA, 25 bp, Homo sapien
agggcgagatcccaagcaagtcagg

SEQ ID NO: 3609027 - DNA, 25 bp, Homo sapien
caggtaggtaggagggcgagatccc

SEQ ID NO: 3609028 - DNA, 25 bp, Homo sapien
aaggtacagttggtaatggctgctt

SEQ ID NO: 3609029 - DNA, 25 bp, Homo sapien
gcaagaagggaaggtacagttggta

SEQ ID NO: 3609030 - DNA, 25 bp, Homo sapien
agtgaaagaggatatatttattggc

SEQ ID NO: 3609031 - DNA, 25 bp, Homo sapien
tttattggctgagcaagaagggaag

SEQ ID NO: 3609032 - DNA, 25 bp, Homo sapien
tgagcatcatctcgatctcggaggg

SEQ ID NO: 3609033 - DNA, 25 bp, Homo sapien
tactgagcatcatctcgatctcgga

SEQ ID NO: 3609034 - DNA, 25 bp, Homo sapien
ggctgtactgagcatcatctcgatc

SEQ ID NO: 3609035 - DNA, 25 bp, Homo sapien
tgtactgagcatcatctcgatctcg

SEQ ID NO: 3609036 - DNA, 25 bp, Homo sapien
attcctgcctccttcccctcaacgc

SEQ ID NO: 3609037 - DNA, 25 bp, Homo sapien
tcctgcctccttcccctcaacgctc

SEQ ID NO: 3609038 - DNA, 25 bp, Homo sapien
ctgcctccttcccctcaacgctcac

SEQ ID NO: 3609039 - DNA, 25 bp, Homo sapien
cctcccttcattcctgcctccttcc

SEQ ID NO: 3609040 - DNA, 25 bp, Homo sapien
ctcaacagagcttgtgtgtcggcag

SEQ ID NO: 3609041 - DNA, 25 bp, Homo sapien
ctgatagacctggtcattcctcaac

SEQ ID NO: 3609042 - DNA, 25 bp, Homo sapien
gacctggtcattcctcaacagagct

SEQ ID NO: 3609043 - DNA, 25 bp, Homo sapien
cctcaacagagcttgtgtgtcggca

SEQ ID NO: 3609044 - DNA, 25 bp, Homo sapien
gcaaggagcagagtggcaatgacat

SEQ ID NO: 3609045 - DNA, 25 bp, Homo sapien
ggagcagagtggcaatgacatcagt

SEQ ID NO: 3609046 - DNA, 25 bp, Homo sapien
agccttccagtctcatgtccagcaa

SEQ ID NO: 3609047 - DNA, 25 bp, Homo sapien
tccagtctcatgtccagcaaagcag

SEQ ID NO: 3609048 - DNA, 25 bp, Homo sapien
tctgagagcagtgttcccaccgttc

SEQ ID NO: 3609049 - DNA, 25 bp, Homo sapien
tacccatgtgatgctggtattgcaa

SEQ ID NO: 3609050 - DNA, 25 bp, Homo sapien
cctatatattcctcgtgggtccagg

SEQ ID NO: 3609051 - DNA, 25 bp, Homo sapien
ccaggtccagtcttgtaatgtctga

SEQ ID NO: 3609052 - DNA, 25 bp, Homo sapien
tggaaatgaatccagaccactgatg

SEQ ID NO: 3609053 - DNA, 25 bp, Homo sapien
cttcctggaaatgaatccagaccac

SEQ ID NO: 3609054 - DNA, 25 bp, Homo sapien
tcctggaaatgaatccagaccactg

SEQ ID NO: 3609055 - DNA, 25 bp, Homo sapien
cctggaaatgaatccagaccactga

SEQ ID NO: 3609056 - DNA, 25 bp, Homo sapien
aaagcggggctctcaacactgaagc

SEQ ID NO: 3609057 - DNA, 25 bp, Homo sapien
ttcaaggaaacatctaattccactt

SEQ ID NO: 3609058 - DNA, 25 bp, Homo sapien
gctccattgacaaccaagaaagcgg

SEQ ID NO: 3609059 - DNA, 25 bp, Homo sapien
cattcctcgattggaaatgtctgca

SEQ ID NO: 3609060 - DNA, 25 bp, Homo sapien
tctgcagatctctggcctaaggcct

SEQ ID NO: 3609061 - DNA, 25 bp, Homo sapien
ggtgcctggtgaactgaagctagca

SEQ ID NO: 3609062 - DNA, 25 bp, Homo sapien
tgagagacattctaggcccacatgc

SEQ ID NO: 3609063 - DNA, 25 bp, Homo sapien
tggccagtcccagattcaggtacat

SEQ ID NO: 3609064 - DNA, 25 bp, Homo sapien
caggccagagagaaacgtgctatgt

SEQ ID NO: 3609065 - DNA, 25 bp, Homo sapien
ggtagccagtaccaggccagagaga

SEQ ID NO: 3609066 - DNA, 25 bp, Homo sapien
cttgcgagagaagggtagccagtac

SEQ ID NO: 3609067 - DNA, 25 bp, Homo sapien
ccagagagaaacgtgctatgttcca

SEQ ID NO: 3609068 - DNA, 25 bp, Homo sapien
gactcacaggtaccggaaagaggag

SEQ ID NO: 3609069 - DNA, 25 bp, Homo sapien
tcccagcggaactcatccagtagat

SEQ ID NO: 3609070 - DNA, 25 bp, Homo sapien
aggtcaccgaactatcagcctgggt

SEQ ID NO: 3609071 - DNA, 25 bp, Homo sapien
ccctagctgactcacaggtaccgga

SEQ ID NO: 3609072 - DNA, 25 bp, Homo sapien
agtggagcatgaagagtatctagtc

SEQ ID NO: 3609073 - DNA, 25 bp, Homo sapien
cttctgttccagatacttcctggta

SEQ ID NO: 3609074 - DNA, 25 bp, Homo sapien
tagttagactacatgggcttcccca

SEQ ID NO: 3609075 - DNA, 25 bp, Homo sapien
cagaggtgatcataaggtgagcagc

SEQ ID NO: 3609076 - DNA, 25 bp, Homo sapien
cttttttgtgcagcttcagacaagc

SEQ ID NO: 3609077 - DNA, 25 bp, Homo sapien
gtttcttttttgtgcagcttcagac

SEQ ID NO: 3609078 - DNA, 25 bp, Homo sapien
tttttgtgcagcttcagacaagcag

SEQ ID NO: 3609079 - DNA, 25 bp, Homo sapien
ttcttttttgtgcagcttcagacaa

SEQ ID NO: 3609080 - DNA, 25 bp, Homo sapien
tgtaggactatttgcgcgccgttcc

SEQ ID NO: 3609081 - DNA, 25 bp, Homo sapien
gattctgtcgtgtcgtcgctgctgg

SEQ ID NO: 3609082 - DNA, 25 bp, Homo sapien
gccccggcgcttgttgatgacgtaa

SEQ ID NO: 3609083 - DNA, 25 bp, Homo sapien
cttccggcgcggagatgaacttcca

SEQ ID NO: 3609084 - DNA, 25 bp, Homo sapien
ctgatgtctctttgtacatttctgt

SEQ ID NO: 3609085 - DNA, 25 bp, Homo sapien
gatgtctctttgtacatttctgtcc

SEQ ID NO: 3609086 - DNA, 25 bp, Homo sapien
tgtctctttgtacatttctgtcccc

SEQ ID NO: 3609087 - DNA, 25 bp, Homo sapien
gtctctttgtacatttctgtcccca

SEQ ID NO: 3609088 - DNA, 25 bp, Homo sapien
ttggagacatcagcagattccctgg

SEQ ID NO: 3609089 - DNA, 25 bp, Homo sapien
gccgctttgccgatgacattttgga

SEQ ID NO: 3609090 - DNA, 25 bp, Homo sapien
ttattgacttaacgaccatctctag

SEQ ID NO: 3609091 - DNA, 25 bp, Homo sapien
cagataacctgggtgattttctcat

SEQ ID NO: 3609092 - DNA, 25 bp, Homo sapien
ctggaagcatagaaaggtgaagtgc

SEQ ID NO: 3609093 - DNA, 25 bp, Homo sapien
aagcttggttctgtcactgtttagg

SEQ ID NO: 3609094 - DNA, 25 bp, Homo sapien
agtgctgaaagcttggttctgtcac

SEQ ID NO: 3609095 - DNA, 25 bp, Homo sapien
ctgaaagcttggttctgtcactgtt

SEQ ID NO: 3609096 - DNA, 25 bp, Homo sapien
aacatttttggtgagtgctgctttt

SEQ ID NO: 3609097 - DNA, 25 bp, Homo sapien
taaattagagaactgctcttgctga

SEQ ID NO: 3609098 - DNA, 25 bp, Homo sapien
taagaacttgacaatgctcccctgg

SEQ ID NO: 3609099 - DNA, 25 bp, Homo sapien
tatacttattatagcatcaccaagt

SEQ ID NO: 3609100 - DNA, 25 bp, Homo sapien
tagcttaaggccactactggtaagg

SEQ ID NO: 3609101 - DNA, 25 bp, Homo sapien
gaagactcttttactcagctctggt

SEQ ID NO: 3609102 - DNA, 25 bp, Homo sapien
aaagttatcttggtacaacaccgtg

SEQ ID NO: 3609103 - DNA, 25 bp, Homo sapien
tattgctcataacttaccaagaggc

SEQ ID NO: 3609104 - DNA, 25 bp, Homo sapien
taatggtgcaagtgaaggtgccagt

SEQ ID NO: 3609105 - DNA, 25 bp, Homo sapien
gtgccagttgctatttgatatcaca

SEQ ID NO: 3609106 - DNA, 25 bp, Homo sapien
gaaggtgccagttgctatttgatat

SEQ ID NO: 3609107 - DNA, 25 bp, Homo sapien
ttttaatggtgcaagtgaaggtgcc

SEQ ID NO: 3609108 - DNA, 25 bp, Homo sapien
tatttgatggtggttgctaagcagc

SEQ ID NO: 3609109 - DNA, 25 bp, Homo sapien
tgggtgcctttacatgccagaggct

SEQ ID NO: 3609110 - DNA, 25 bp, Homo sapien
cagagcataagtctactgggtgcct

SEQ ID NO: 3609111 - DNA, 25 bp, Homo sapien
gatgctgcactgttgatgtcatgtg

SEQ ID NO: 3609112 - DNA, 25 bp, Homo sapien
gatcaacgcgactgtattttgaaac

SEQ ID NO: 3609113 - DNA, 25 bp, Homo sapien
taaaacttgatcaacgcgactgtat

SEQ ID NO: 3609114 - DNA, 25 bp, Homo sapien
cttgtcaaacttgcctggcagtgtt

SEQ ID NO: 3609115 - DNA, 25 bp, Homo sapien
cattccaggaaggttacttcttgtc

SEQ ID NO: 3609116 - DNA, 25 bp, Homo sapien
accccaggtctttgtaatcatttgc

SEQ ID NO: 3609117 - DNA, 25 bp, Homo sapien
gatgtcagcctagattaactcagcc

SEQ ID NO: 3609118 - DNA, 25 bp, Homo sapien
gatgaatctcacagtatggttttcc

SEQ ID NO: 3609119 - DNA, 25 bp, Homo sapien
caaatatgtgtgacctggctgaccc

SEQ ID NO: 3609120 - DNA, 25 bp, Homo sapien
aaatggattccaatcgtgatacagc

SEQ ID NO: 3609121 - DNA, 25 bp, Homo sapien
aaactgtgtggccatttttcaagcc

SEQ ID NO: 3609122 - DNA, 25 bp, Homo sapien
cctggcatagtgtgggcgttcaata

SEQ ID NO: 3609123 - DNA, 25 bp, Homo sapien
cagctccttgtggttaactagggaa

SEQ ID NO: 3609124 - DNA, 25 bp, Homo sapien
aaggttctcagaatcgcggcgaaag

SEQ ID NO: 3609125 - DNA, 25 bp, Homo sapien
ctctgtacaacgatcgtgttggact

SEQ ID NO: 3609126 - DNA, 25 bp, Homo sapien
cagcgaatccttctccagtactgac

SEQ ID NO: 3609127 - DNA, 25 bp, Homo sapien
tccagtactgacttcaaaggttctc

SEQ ID NO: 3609128 - DNA, 25 bp, Homo sapien
ccttgtggagaagaccccggcgctg

SEQ ID NO: 3609129 - DNA, 25 bp, Homo sapien
catggcccaatttgtccgtaacctt

SEQ ID NO: 3609130 - DNA, 25 bp, Homo sapien
ttccggcgggtgacattcagccggc

SEQ ID NO: 3609131 - DNA, 25 bp, Homo sapien
aacggtgagcgcgatgtgagaccgc

SEQ ID NO: 3609132 - DNA, 25 bp, Homo sapien
tgggttctctacacaacctagaagt

SEQ ID NO: 3609133 - DNA, 25 bp, Homo sapien
ttgcccggcagctgcaaccattacg

SEQ ID NO: 3609134 - DNA, 25 bp, Homo sapien
cttccactcgtctgacctgcagatt

SEQ ID NO: 3609135 - DNA, 25 bp, Homo sapien
tctaaccacgactgggaagagaggt

SEQ ID NO: 3609136 - DNA, 25 bp, Homo sapien
gagcttttttgaacgttgactttgc

SEQ ID NO: 3609137 - DNA, 25 bp, Homo sapien
caattcggcctcattacatgtggtg

SEQ ID NO: 3609138 - DNA, 25 bp, Homo sapien
tttgctttctgtcctagacggattc

SEQ ID NO: 3609139 - DNA, 25 bp, Homo sapien
gaaatgtttaaggatgggtgagctt

SEQ ID NO: 3609140 - DNA, 25 bp, Homo sapien
agatacctgtcatagagctctacaa

SEQ ID NO: 3609141 - DNA, 25 bp, Homo sapien
gcgccagccgggtaatttatccatt

SEQ ID NO: 3609142 - DNA, 25 bp, Homo sapien
tgcagaacctcacagcctactagtg

SEQ ID NO: 3609143 - DNA, 25 bp, Homo sapien
tatgagttattgaaggctgtcctgc

SEQ ID NO: 3609144 - DNA, 25 bp, Homo sapien
gcctaggaagatcatagaatctgat

SEQ ID NO: 3609145 - DNA, 25 bp, Homo sapien
ctgggctggaatgttaacgtggaaa

SEQ ID NO: 3609146 - DNA, 25 bp, Homo sapien
cttagaaaggaggactcaactgggc

SEQ ID NO: 3609147 - DNA, 25 bp, Homo sapien
aatttatcatcaggtttgcctagga

SEQ ID NO: 3609148 - DNA, 25 bp, Homo sapien
ttgaatatagcctccccaagagaga

SEQ ID NO: 3609149 - DNA, 25 bp, Homo sapien
cacgtctgtttagcccgcaattgga

SEQ ID NO: 3609150 - DNA, 25 bp, Homo sapien
ccagaacagtgagggttaggtcttg

SEQ ID NO: 3609151 - DNA, 25 bp, Homo sapien
gtaacatctttagcagtaggacaga

SEQ ID NO: 3609152 - DNA, 25 bp, Homo sapien
taacaaacctgcacatcctgcacat

SEQ ID NO: 3609153 - DNA, 25 bp, Homo sapien
aaccaccatggcacacgttcaccta

SEQ ID NO: 3609154 - DNA, 25 bp, Homo sapien
ccaccatggcacacgttcacctatg

SEQ ID NO: 3609155 - DNA, 25 bp, Homo sapien
aacctgcacatcctgcacatgtacc

SEQ ID NO: 3609156 - DNA, 25 bp, Homo sapien
tctgcgatatttaagttgtttattg

SEQ ID NO: 3609157 - DNA, 25 bp, Homo sapien
ctattctgcgatatttaagttgttt

SEQ ID NO: 3609158 - DNA, 25 bp, Homo sapien
ctgcgatatttaagttgtttattgt

SEQ ID NO: 3609159 - DNA, 25 bp, Homo sapien
attctgcgatatttaagttgtttat

SEQ ID NO: 3609160 - DNA, 25 bp, Homo sapien
tttgcatcagagagtatgaggcctt

SEQ ID NO: 3609161 - DNA, 25 bp, Homo sapien
tgaggccttgaacaatgatggccat

SEQ ID NO: 3609162 - DNA, 25 bp, Homo sapien
atgaggccttgaacaatgatggcca

SEQ ID NO: 3609163 - DNA, 25 bp, Homo sapien
actattagcaaaatatatactgttt

SEQ ID NO: 3609164 - DNA, 25 bp, Homo sapien
tctgtttttactgtaactattagca

SEQ ID NO: 3609165 - DNA, 25 bp, Homo sapien
actgtaactattagcaaaatatata

SEQ ID NO: 3609166 - DNA, 25 bp, Homo sapien
gtaactattagcaaaatatatactg

SEQ ID NO: 3609167 - DNA, 25 bp, Homo sapien
gggctttctccaagcgacatatttc

SEQ ID NO: 3609168 - DNA, 25 bp, Homo sapien
gctttctccaagcgacatatttctc

SEQ ID NO: 3609169 - DNA, 25 bp, Homo sapien
ggctttctccaagcgacatatttct

SEQ ID NO: 3609170 - DNA, 25 bp, Homo sapien
gaatccacgtggtcgccaatctgta

SEQ ID NO: 3609171 - DNA, 25 bp, Homo sapien
gagagaacgaacaaatcaggatgct

SEQ ID NO: 3609172 - DNA, 25 bp, Homo sapien
tattgcaatggagaaaccgtccaca

SEQ ID NO: 3609173 - DNA, 25 bp, Homo sapien
gggactccacacaatattcgaagac

SEQ ID NO: 3609174 - DNA, 25 bp, Homo sapien
attgcgttgtgcgagtgtgcgcttt

SEQ ID NO: 3609175 - DNA, 25 bp, Homo sapien
gtaaaccacgcgctgtaacaacgga

SEQ ID NO: 3609176 - DNA, 25 bp, Homo sapien
caacggaatcttgttctgtgtattg

SEQ ID NO: 3609177 - DNA, 25 bp, Homo sapien
gagtgtgcgctttgcaaaccatctg

SEQ ID NO: 3609178 - DNA, 25 bp, Homo sapien
tattacatgcagtgcgctgtaccgg

SEQ ID NO: 3609179 - DNA, 25 bp, Homo sapien
caaatgtttcgccagtggagggacg

SEQ ID NO: 3609180 - DNA, 25 bp, Homo sapien
cctgcgcggttggaacgaagatcga

SEQ ID NO: 3609181 - DNA, 25 bp, Homo sapien
tgagtgcaacctgctcacaacgacc

SEQ ID NO: 3609182 - DNA, 25 bp, Homo sapien
tgctccgggtgggcccgggcttcga

SEQ ID NO: 3609183 - DNA, 25 bp, Homo sapien
ctgctccgggtgggcccgggcttcg

SEQ ID NO: 3609184 - DNA, 25 bp, Homo sapien
ttcgtcatcgtcctcagcctcttca

SEQ ID NO: 3609185 - DNA, 25 bp, Homo sapien
cttcgtcatcgtcctcagcctcttc

SEQ ID NO: 3609186 - DNA, 25 bp, Homo sapien
ctgcgccggttccgggccgtgtttg

SEQ ID NO: 3609187 - DNA, 25 bp, Homo sapien
tctcggccgccatcggcaccaacct

SEQ ID NO: 3609188 - DNA, 25 bp, Homo sapien
caacctgcgccggttccgggccgtg

SEQ ID NO: 3609189 - DNA, 25 bp, Homo sapien
gccgccatcggcaccaacctgcgcc

SEQ ID NO: 3609190 - DNA, 25 bp, Homo sapien
gtccagtagcatttatttcaggagc

SEQ ID NO: 3609191 - DNA, 25 bp, Homo sapien
gctggagtttcttccgtatatagtg

SEQ ID NO: 3609192 - DNA, 25 bp, Homo sapien
tcttccgtatatagtgttttatcca

SEQ ID NO: 3609193 - DNA, 25 bp, Homo sapien
ccagtgggcagcatcggtccagtag

SEQ ID NO: 3609194 - DNA, 25 bp, Homo sapien
ccttggagacggttctgaggagact

SEQ ID NO: 3609195 - DNA, 25 bp, Homo sapien
cattattaggaatggtaaccagcgg

SEQ ID NO: 3609196 - DNA, 25 bp, Homo sapien
cttaaaagggatgaggagaccttgg

SEQ ID NO: 3609197 - DNA, 25 bp, Homo sapien
gattggaagtcagtcctatgaggaa

SEQ ID NO: 3609198 - DNA, 25 bp, Homo sapien
aagaagtcagagtgcgaagtcccac

SEQ ID NO: 3609199 - DNA, 25 bp, Homo sapien
aggatgagcaattcttaggttttgg

SEQ ID NO: 3609200 - DNA, 25 bp, Homo sapien
cagagtgcgaagtcccacaaggtct

SEQ ID NO: 3609201 - DNA, 25 bp, Homo sapien
gatgagcaattcttaggttttggct

SEQ ID NO: 3609202 - DNA, 25 bp, Homo sapien
aaggacaccttctgctacgtttcag

SEQ ID NO: 3609203 - DNA, 25 bp, Homo sapien
gaagtggctctgaccgaaattcagc

SEQ ID NO: 3609204 - DNA, 25 bp, Homo sapien
tcgaaaacctcgtgggagacctaga

SEQ ID NO: 3609205 - DNA, 25 bp, Homo sapien
ggacatttcagagttaccaaaggga

SEQ ID NO: 3609206 - DNA, 25 bp, Homo sapien
tgttgtcagtgctatctcctcgcgg

SEQ ID NO: 3609207 - DNA, 25 bp, Homo sapien
cggatcattaagacccctcggcggt

SEQ ID NO: 3609208 - DNA, 25 bp, Homo sapien
tctcgatctagtagccccagtgttg

SEQ ID NO: 3609209 - DNA, 25 bp, Homo sapien
tacttcctgaggagcggagcgatac

SEQ ID NO: 3609210 - DNA, 25 bp, Homo sapien
tagagccggatatcaacagcactgt

SEQ ID NO: 3609211 - DNA, 25 bp, Homo sapien
catgcaagatagtggagtgccgtcc

SEQ ID NO: 3609212 - DNA, 25 bp, Homo sapien
cagggtatactggagcaccacagat

SEQ ID NO: 3609213 - DNA, 25 bp, Homo sapien
tctgtaattaagagggccagggaac

SEQ ID NO: 3609214 - DNA, 25 bp, Homo sapien
caaagtgctgagttccaagagctca

SEQ ID NO: 3609215 - DNA, 25 bp, Homo sapien
gacttcgaagcattggctccaggcg

SEQ ID NO: 3609216 - DNA, 25 bp, Homo sapien
caccgggaccgctactgatcttgaa

SEQ ID NO: 3609217 - DNA, 25 bp, Homo sapien
caaatttgcaaaggacagtggttac

SEQ ID NO: 3609218 - DNA, 25 bp, Homo sapien
gatcctatggtgaagaagacattcc

SEQ ID NO: 3609219 - DNA, 25 bp, Homo sapien
gaaacctaatgcttccagatggccc

SEQ ID NO: 3609220 - DNA, 25 bp, Homo sapien
aaaaggaggtatccccgtcgcagtg

SEQ ID NO: 3609221 - DNA, 25 bp, Homo sapien
tgggcttaccccactctatggagta

SEQ ID NO: 3609222 - DNA, 25 bp, Homo sapien
ggacagacctcagtaccacagtagc

SEQ ID NO: 3609223 - DNA, 25 bp, Homo sapien
atgtattttgaaccggcacccctgt

SEQ ID NO: 3609224 - DNA, 25 bp, Homo sapien
tacaagtagtgcgtcagttccagga

SEQ ID NO: 3609225 - DNA, 25 bp, Homo sapien
caataagccaggatactagccacct

SEQ ID NO: 3609226 - DNA, 25 bp, Homo sapien
gaaagtaatttcagctccccactga

SEQ ID NO: 3609227 - DNA, 25 bp, Homo sapien
caaaagcggaaggaaagcattactg

SEQ ID NO: 3609228 - DNA, 25 bp, Homo sapien
ctaccacagagagcataacttcatg

SEQ ID NO: 3609229 - DNA, 25 bp, Homo sapien
aatgacctaggcaagctctttgagt

SEQ ID NO: 3609230 - DNA, 25 bp, Homo sapien
cagaatattatggtaaattgttcgc

SEQ ID NO: 3609231 - DNA, 25 bp, Homo sapien
tggtaaattgttcgcctaaggcaga

SEQ ID NO: 3609232 - DNA, 25 bp, Homo sapien
gaagtcattgacagataaagtccag

SEQ ID NO: 3609233 - DNA, 25 bp, Homo sapien
agctcgatcaaatgcccgcctaaag

SEQ ID NO: 3609234 - DNA, 25 bp, Homo sapien
tccatatctacctctcctacctcct

SEQ ID NO: 3609235 - DNA, 25 bp, Homo sapien
ctacctcctttcagattgctcctgg

SEQ ID NO: 3609236 - DNA, 25 bp, Homo sapien
tttatgtgacaggtacatgcatggc

SEQ ID NO: 3609237 - DNA, 25 bp, Homo sapien
tgggtgaatgggtacttacaggaat

SEQ ID NO: 3609238 - DNA, 25 bp, Homo sapien
ttttccatattgatagatctgtatc

SEQ ID NO: 3609239 - DNA, 25 bp, Homo sapien
gctatctgatgctaatttcgagcta

SEQ ID NO: 3609240 - DNA, 25 bp, Homo sapien
tgatagatctgtatcagcatcattt

SEQ ID NO: 3609241 - DNA, 25 bp, Homo sapien
cttagccgtctatcacaaacatttt

SEQ ID NO: 3609242 - DNA, 25 bp, Homo sapien
ggcatttctgtaggaccatgctgtt

SEQ ID NO: 3609243 - DNA, 25 bp, Homo sapien
ttcctgttgactgcgctcctcactt

SEQ ID NO: 3609244 - DNA, 25 bp, Homo sapien
taggtgttaacggtttgaggatgct

SEQ ID NO: 3609245 - DNA, 25 bp, Homo sapien
gcagttgtgttcctcattgagcagc

SEQ ID NO: 3609246 - DNA, 25 bp, Homo sapien
tccatctttgtcctaggtctcccat

SEQ ID NO: 3609247 - DNA, 25 bp, Homo sapien
taggtctcccatccatggccggggt

SEQ ID NO: 3609248 - DNA, 25 bp, Homo sapien
tctcccatccatggccggggtcttt

SEQ ID NO: 3609249 - DNA, 25 bp, Homo sapien
ttttccatctttgtcctaggtctcc

SEQ ID NO: 3609250 - DNA, 25 bp, Homo sapien
caaggtttcagagtagtgtagtcca

SEQ ID NO: 3609251 - DNA, 25 bp, Homo sapien
tatggaagtctagcaaagcaatacg

SEQ ID NO: 3609252 - DNA, 25 bp, Homo sapien
gaaggaaggtcacccaactccattg

SEQ ID NO: 3609253 - DNA, 25 bp, Homo sapien
tttccggcgcaacttccagagtggt

SEQ ID NO: 3609254 - DNA, 25 bp, Homo sapien
gatgggtcctgaattcaccttgaga

SEQ ID NO: 3609255 - DNA, 25 bp, Homo sapien
tcaaaagtgaccaagggaatctccg

SEQ ID NO: 3609256 - DNA, 25 bp, Homo sapien
taaccagaatagctgcatggcgctg

SEQ ID NO: 3609257 - DNA, 25 bp, Homo sapien
taacaaagcctagttcagtccatgg

SEQ ID NO: 3609258 - DNA, 25 bp, Homo sapien
tgaaagctctctacgaaagactgaa

SEQ ID NO: 3609259 - DNA, 25 bp, Homo sapien
catcagtgttaactccctgtgacag

SEQ ID NO: 3609260 - DNA, 25 bp, Homo sapien
gtttcaagagctcaacagatgacaa

SEQ ID NO: 3609261 - DNA, 25 bp, Homo sapien
taacagtctctttagtaaatacagg

SEQ ID NO: 3609262 - DNA, 25 bp, Homo sapien
ccctgtttcatccaaggaggttaag

SEQ ID NO: 3609263 - DNA, 25 bp, Homo sapien
caggccacaggttgagcaaatgcta

SEQ ID NO: 3609264 - DNA, 25 bp, Homo sapien
tacagccatggacagggagacactc

SEQ ID NO: 3609265 - DNA, 25 bp, Homo sapien
gaaataaccaagtagtctgccaagc

SEQ ID NO: 3609266 - DNA, 25 bp, Homo sapien
ttcaaccctgacaccccatttggag

SEQ ID NO: 3609267 - DNA, 25 bp, Homo sapien
catggggactccaaatgatcaggca

SEQ ID NO: 3609268 - DNA, 25 bp, Homo sapien
caccccatttggagacattgttgga

SEQ ID NO: 3609269 - DNA, 25 bp, Homo sapien
gggactccaaatgatcaggcagtgc

SEQ ID NO: 3609270 - DNA, 25 bp, Homo sapien
taaggccccttgttccatgattatg

SEQ ID NO: 3609271 - DNA, 25 bp, Homo sapien
tggagtgtagctctgcacataggct

SEQ ID NO: 3609272 - DNA, 25 bp, Homo sapien
ggttggctgctccttagcgcactga

SEQ ID NO: 3609273 - DNA, 25 bp, Homo sapien
gtatgatccaagcttaactgccagg

SEQ ID NO: 3609274 - DNA, 25 bp, Homo sapien
ccacatgatactgctcctcgaaaag

SEQ ID NO: 3609275 - DNA, 25 bp, Homo sapien
cagacacataattctgagaccagca

SEQ ID NO: 3609276 - DNA, 25 bp, Homo sapien
gaccagcaaaacaagttcgagaggg

SEQ ID NO: 3609277 - DNA, 25 bp, Homo sapien
gtgtgtgctcttaatccccacatga

SEQ ID NO: 3609278 - DNA, 25 bp, Homo sapien
aagtggcttggctgtagagcttaac

SEQ ID NO: 3609279 - DNA, 25 bp, Homo sapien
gggcagtgggccagactcataaaca

SEQ ID NO: 3609280 - DNA, 25 bp, Homo sapien
tctgtgtaatgggaataacgatccg

SEQ ID NO: 3609281 - DNA, 25 bp, Homo sapien
ataataggaacaaggcgagacctgg

SEQ ID NO: 3609282 - DNA, 25 bp, Homo sapien
acgacgcccgcagggacttcgagag

SEQ ID NO: 3609283 - DNA, 25 bp, Homo sapien
tgcaaccgcatgctggccgacatga

SEQ ID NO: 3609284 - DNA, 25 bp, Homo sapien
cgggagccgcaagaaccacggtgat

SEQ ID NO: 3609285 - DNA, 25 bp, Homo sapien
gagctttgtgcagcgcggactcctg

SEQ ID NO: 3609286 - DNA, 25 bp, Homo sapien
agggcactcgggggtactcggcgcg

SEQ ID NO: 3609287 - DNA, 25 bp, Homo sapien
actcgggggtactcggcgcgggctg

SEQ ID NO: 3609288 - DNA, 25 bp, Homo sapien
gcactcgggggtactcggcgcgggc

SEQ ID NO: 3609289 - DNA, 25 bp, Homo sapien
ctcgggggtactcggcgcgggctgg

SEQ ID NO: 3609290 - DNA, 25 bp, Homo sapien
ggtgtagatgcattaactccccggg

SEQ ID NO: 3609291 - DNA, 25 bp, Homo sapien
tgcccattactaagcaaagttcctg

SEQ ID NO: 3609292 - DNA, 25 bp, Homo sapien
caacgatctgtccatctcagctggg

SEQ ID NO: 3609293 - DNA, 25 bp, Homo sapien
ggcaggcaggttcattaaacaaaca

SEQ ID NO: 3609294 - DNA, 25 bp, Homo sapien
ggatgaaggagtgaatgctttcttg

SEQ ID NO: 3609295 - DNA, 25 bp, Homo sapien
agctgaaggttaatgtctccatgtc

SEQ ID NO: 3609296 - DNA, 25 bp, Homo sapien
gaattggatgaaggagtgaatgctt

SEQ ID NO: 3609297 - DNA, 25 bp, Homo sapien
tcttgccttcagcgagagctttaaa

SEQ ID NO: 3609298 - DNA, 25 bp, Homo sapien
atattgagtattagggatatgctaa

SEQ ID NO: 3609299 - DNA, 25 bp, Homo sapien
agtattagggatatgctaattgcta

SEQ ID NO: 3609300 - DNA, 25 bp, Homo sapien
tattgagtattagggatatgctaat

SEQ ID NO: 3609301 - DNA, 25 bp, Homo sapien
tgagtattagggatatgctaattgc

SEQ ID NO: 3609302 - DNA, 25 bp, Homo sapien
ggactggatccgactcttgtagaca

SEQ ID NO: 3609303 - DNA, 25 bp, Homo sapien
agttcttgaattctgagtagaggga

SEQ ID NO: 3609304 - DNA, 25 bp, Homo sapien
gatccgactcttgtagacagggatg

SEQ ID NO: 3609305 - DNA, 25 bp, Homo sapien
aagagcagatggagggactggatcc

SEQ ID NO: 3609306 - DNA, 25 bp, Homo sapien
tgtcaatgtactctgccaggctgca

SEQ ID NO: 3609307 - DNA, 25 bp, Homo sapien
ccaggctgcaatcaatctctgccgt

SEQ ID NO: 3609308 - DNA, 25 bp, Homo sapien
caatcaatctctgccgtgggcaggc

SEQ ID NO: 3609309 - DNA, 25 bp, Homo sapien
aatgtactctgccaggctgcaatca

SEQ ID NO: 3609310 - DNA, 25 bp, Homo sapien
cggggaccattcctgcatcagcgtg

SEQ ID NO: 3609311 - DNA, 25 bp, Homo sapien
tcaaactccggggaccattcctgca

SEQ ID NO: 3609312 - DNA, 25 bp, Homo sapien
atcagcgtgtcaatgtcgggcatgg

SEQ ID NO: 3609313 - DNA, 25 bp, Homo sapien
cctgcatcagcgtgtcaatgtcggg

SEQ ID NO: 3609314 - DNA, 25 bp, Homo sapien
tacaatctcagccagtagttgccag

SEQ ID NO: 3609315 - DNA, 25 bp, Homo sapien
cttcaggagaacctagactgggcat

SEQ ID NO: 3609316 - DNA, 25 bp, Homo sapien
tatgaacaagaaacgtgaactgata

SEQ ID NO: 3609317 - DNA, 25 bp, Homo sapien
ttctaggatgaaggagaggtcttca

SEQ ID NO: 3609318 - DNA, 25 bp, Homo sapien
gctctcaatccacgtgtcaatggct

SEQ ID NO: 3609319 - DNA, 25 bp, Homo sapien
tgcacagtcgcagggggcttagaac

SEQ ID NO: 3609320 - DNA, 25 bp, Homo sapien
agagatgctctcaatccacgtgtca

SEQ ID NO: 3609321 - DNA, 25 bp, Homo sapien
cttagaacggtgtaattcagagatg

SEQ ID NO: 3609322 - DNA, 25 bp, Homo sapien
tgagagcaccgtagggtctgactgc

SEQ ID NO: 3609323 - DNA, 25 bp, Homo sapien
gcttagaattctctgttaaccagag

SEQ ID NO: 3609324 - DNA, 25 bp, Homo sapien
ccaataccaataggccaaggttgtc

SEQ ID NO: 3609325 - DNA, 25 bp, Homo sapien
gactgctttgtagaaggttcatcca

SEQ ID NO: 3609326 - DNA, 25 bp, Homo sapien
cagtttgtggtccaggtcaatcaac

SEQ ID NO: 3609327 - DNA, 25 bp, Homo sapien
gcttcagtttgtggtccaggtcaat

SEQ ID NO: 3609328 - DNA, 25 bp, Homo sapien
atgcatcaatatccccgacagctgg

SEQ ID NO: 3609329 - DNA, 25 bp, Homo sapien
ccccgacagctgggataaaatcagg

SEQ ID NO: 3609330 - DNA, 25 bp, Homo sapien
agagttccttaatttcagcagaaac

SEQ ID NO: 3609331 - DNA, 25 bp, Homo sapien
ctactgatgtactggaagagttcct

SEQ ID NO: 3609332 - DNA, 25 bp, Homo sapien
ctggaagagttccttaatttcagca

SEQ ID NO: 3609333 - DNA, 25 bp, Homo sapien
tgtactggaagagttccttaatttc

SEQ ID NO: 3609334 - DNA, 25 bp, Homo sapien
aagagcacccttggcttgggtgttc

SEQ ID NO: 3609335 - DNA, 25 bp, Homo sapien
aaggaggtattctgaagagcaccct

SEQ ID NO: 3609336 - DNA, 25 bp, Homo sapien
gaggtattctgaagagcacccttgg

SEQ ID NO: 3609337 - DNA, 25 bp, Homo sapien
tgaaggaggtattctgaagagcacc

SEQ ID NO: 3609338 - DNA, 25 bp, Homo sapien
ccttccagaggggctccatgctctt

SEQ ID NO: 3609339 - DNA, 25 bp, Homo sapien
cagaggggctccatgctcttcatca

SEQ ID NO: 3609340 - DNA, 25 bp, Homo sapien
ggggctccatgctcttcatcatcat

SEQ ID NO: 3609341 - DNA, 25 bp, Homo sapien
gaggggctccatgctcttcatcatc

SEQ ID NO: 3609342 - DNA, 25 bp, Homo sapien
tcaactgtgaggtcttcttcttctc

SEQ ID NO: 3609343 - DNA, 25 bp, Homo sapien
cagaatcagtttcagatgaatcatc

SEQ ID NO: 3609344 - DNA, 25 bp, Homo sapien
aagccccgttgaggtgtcaactgtg

SEQ ID NO: 3609345 - DNA, 25 bp, Homo sapien
atcagaatcagtttcagatgaatca

SEQ ID NO: 3609346 - DNA, 25 bp, Homo sapien
tgcaagactgcccagcataagctgc

SEQ ID NO: 3609347 - DNA, 25 bp, Homo sapien
tattacttagatcttcagggccctg

SEQ ID NO: 3609348 - DNA, 25 bp, Homo sapien
gtacactttagacagcttcggcccg

SEQ ID NO: 3609349 - DNA, 25 bp, Homo sapien
cttcggcccgaaaagctatggactt

SEQ ID NO: 3609350 - DNA, 25 bp, Homo sapien
ctctctctgtaccatcccaccctct

SEQ ID NO: 3609351 - DNA, 25 bp, Homo sapien
gaacagggtccatgtctttgcctct

SEQ ID NO: 3609352 - DNA, 25 bp, Homo sapien
agtacatgagaaggggtctggtggc

SEQ ID NO: 3609353 - DNA, 25 bp, Homo sapien
tctggtggcacttgagacttgcagg

SEQ ID NO: 3609354 - DNA, 25 bp, Homo sapien
tgaaattcctcaccaaagtcaattg

SEQ ID NO: 3609355 - DNA, 25 bp, Homo sapien
attatgtgaaattcctcaccaaagt

SEQ ID NO: 3609356 - DNA, 25 bp, Homo sapien
tcaattgtagtagtaggctttattc

SEQ ID NO: 3609357 - DNA, 25 bp, Homo sapien
tcctcaccaaagtcaattgtagtag

SEQ ID NO: 3609358 - DNA, 25 bp, Homo sapien
actcatcactgctgttatcagccat

SEQ ID NO: 3609359 - DNA, 25 bp, Homo sapien
cacactcatcactgctgttatcagc

SEQ ID NO: 3609360 - DNA, 25 bp, Homo sapien
ttcacactcatcactgctgttatca

SEQ ID NO: 3609361 - DNA, 25 bp, Homo sapien
cactcatcactgctgttatcagcca

SEQ ID NO: 3609362 - DNA, 25 bp, Homo sapien
agccttgttaggaagatgggcagaa

SEQ ID NO: 3609363 - DNA, 25 bp, Homo sapien
tgttaggaagatgggcagaacgagg

SEQ ID NO: 3609364 - DNA, 25 bp, Homo sapien
cttgttaggaagatgggcagaacga

SEQ ID NO: 3609365 - DNA, 25 bp, Homo sapien
ccttgttaggaagatgggcagaacg

SEQ ID NO: 3609366 - DNA, 25 bp, Homo sapien
ttgagcctagactggacaatatggc

SEQ ID NO: 3609367 - DNA, 25 bp, Homo sapien
ggctctgccagttcaattcaagata

SEQ ID NO: 3609368 - DNA, 25 bp, Homo sapien
cattactgtgcttaaggcattgggt

SEQ ID NO: 3609369 - DNA, 25 bp, Homo sapien
caaggtttattggaacatctggcta

SEQ ID NO: 3609370 - DNA, 25 bp, Homo sapien
aactggttactatcctcagaaatgc

SEQ ID NO: 3609371 - DNA, 25 bp, Homo sapien
cacccaaatataagatgatagttcg

SEQ ID NO: 3609372 - DNA, 25 bp, Homo sapien
ccggcaggtctctgtcgagccgcaa

SEQ ID NO: 3609373 - DNA, 25 bp, Homo sapien
tctgtcgagccgcaaacgcgggtct

SEQ ID NO: 3609374 - DNA, 25 bp, Homo sapien
taaggggaggttatgaagcatcttc

SEQ ID NO: 3609375 - DNA, 25 bp, Homo sapien
caggctaaggggaggttatgaagca

SEQ ID NO: 3609376 - DNA, 25 bp, Homo sapien
gctaaggggaggttatgaagcatct

SEQ ID NO: 3609377 - DNA, 25 bp, Homo sapien
ggctaaggggaggttatgaagcatc

SEQ ID NO: 3609378 - DNA, 25 bp, Homo sapien
aatacttgcaacctcttcggagtcg

SEQ ID NO: 3609379 - DNA, 25 bp, Homo sapien
ttaatctctagacgctcatcatatg

SEQ ID NO: 3609380 - DNA, 25 bp, Homo sapien
tatgtctggttttcaacaaccttgg

SEQ ID NO: 3609381 - DNA, 25 bp, Homo sapien
ttcggagtcgttaatctctagacgc

SEQ ID NO: 3609382 - DNA, 25 bp, Homo sapien
ttatcttgcagataggatcccacct

SEQ ID NO: 3609383 - DNA, 25 bp, Homo sapien
tatcttgcagataggatcccaccta

SEQ ID NO: 3609384 - DNA, 25 bp, Homo sapien
cttatcttgcagataggatcccacc

SEQ ID NO: 3609385 - DNA, 25 bp, Homo sapien
cctgttgtcagtcgctaggcaaaaa

SEQ ID NO: 3609386 - DNA, 25 bp, Homo sapien
ataatggaaagaaccccagcctagg

SEQ ID NO: 3609387 - DNA, 25 bp, Homo sapien
agccaggccactttaggattccacg

SEQ ID NO: 3609388 - DNA, 25 bp, Homo sapien
taaaattcgcgagagttgcttccac

SEQ ID NO: 3609389 - DNA, 25 bp, Homo sapien
gccgcttccggttgaagacgtggct

SEQ ID NO: 3609390 - DNA, 25 bp, Homo sapien
aagacgtggcttggggccgccatct

SEQ ID NO: 3609391 - DNA, 25 bp, Homo sapien
ccatcttggcaagaggcgaagcggc

SEQ ID NO: 3609392 - DNA, 25 bp, Homo sapien
cagtggagccggagtgcgggcgcgc

SEQ ID NO: 3609393 - DNA, 25 bp, Homo sapien
gcccggcgtttttgctctgcgagaa

SEQ ID NO: 3609394 - DNA, 25 bp, Homo sapien
tcctggagatccgatggagctgact

SEQ ID NO: 3609395 - DNA, 25 bp, Homo sapien
agctggactccctcgtttgctggga

SEQ ID NO: 3609396 - DNA, 25 bp, Homo sapien
cagagtgcttttgctccgggctcgg

SEQ ID NO: 3609397 - DNA, 25 bp, Homo sapien
taggcatgcgggccttgatttgatc

SEQ ID NO: 3609398 - DNA, 25 bp, Homo sapien
tgtaggcatgcgggccttgatttga

SEQ ID NO: 3609399 - DNA, 25 bp, Homo sapien
tgtttggttttcgagacggattctc

SEQ ID NO: 3609400 - DNA, 25 bp, Homo sapien
gactgtaggcatgcgggccttgatt

SEQ ID NO: 3609401 - DNA, 25 bp, Homo sapien
caaaaatagtcaaatatgttcttaa

SEQ ID NO: 3609402 - DNA, 25 bp, Homo sapien
tagttaataattcacttatatgtat

SEQ ID NO: 3609403 - DNA, 25 bp, Homo sapien
aaatagttaataattcacttatatg

SEQ ID NO: 3609404 - DNA, 25 bp, Homo sapien
aaggtagcaaaaatagtcaaatatg

SEQ ID NO: 3609405 - DNA, 25 bp, Homo sapien
tttatttggcactcctggaacaagt

SEQ ID NO: 3609406 - DNA, 25 bp, Homo sapien
cactgggatcatctgtttacaggca

SEQ ID NO: 3609407 - DNA, 25 bp, Homo sapien
ctagaagttaaaagatacgcatgtc

SEQ ID NO: 3609408 - DNA, 25 bp, Homo sapien
gatttttggactattcaggtgaact

SEQ ID NO: 3609409 - DNA, 25 bp, Homo sapien
tgttggccctaaactatcaaggagg

SEQ ID NO: 3609410 - DNA, 25 bp, Homo sapien
gctaaaacgtaatggccacagtctg

SEQ ID NO: 3609411 - DNA, 25 bp, Homo sapien
aatggagactacagcgtcagccagc

SEQ ID NO: 3609412 - DNA, 25 bp, Homo sapien
tctggccgtccctgcaaagagtgta

SEQ ID NO: 3609413 - DNA, 25 bp, Homo sapien
cgccagagctgcttactttcttatg

SEQ ID NO: 3609414 - DNA, 25 bp, Homo sapien
gccagagctgcttactttcttatgc

SEQ ID NO: 3609415 - DNA, 25 bp, Homo sapien
ttattctcacttattaagtatctgg

SEQ ID NO: 3609416 - DNA, 25 bp, Homo sapien
ctccgccagagctgcttactttctt

SEQ ID NO: 3609417 - DNA, 25 bp, Homo sapien
taagacagctgaaaagagagctttg

SEQ ID NO: 3609418 - DNA, 25 bp, Homo sapien
tgacttcaggatccagaggccagaa

SEQ ID NO: 3609419 - DNA, 25 bp, Homo sapien
gaaacggacagctttctggaagagg

SEQ ID NO: 3609420 - DNA, 25 bp, Homo sapien
caagttgctgcagggtcattgctac

SEQ ID NO: 3609421 - DNA, 25 bp, Homo sapien
ttttacatacccaaatagcctgaat

SEQ ID NO: 3609422 - DNA, 25 bp, Homo sapien
tctgcctcatgaaggttcatcagaa

SEQ ID NO: 3609423 - DNA, 25 bp, Homo sapien
catgggatacaacagtttgggtttt

SEQ ID NO: 3609424 - DNA, 25 bp, Homo sapien
aaactagagtctcgctcctcaaatc

SEQ ID NO: 3609425 - DNA, 25 bp, Homo sapien
tccattagctatagcaggtggcagc

SEQ ID NO: 3609426 - DNA, 25 bp, Homo sapien
gtggcagcaaagggcggcctctccc

SEQ ID NO: 3609427 - DNA, 25 bp, Homo sapien
tctggatcttgagtgttccacctcc

SEQ ID NO: 3609428 - DNA, 25 bp, Homo sapien
ttggccccggtcagcttcagtctcc

SEQ ID NO: 3609429 - DNA, 25 bp, Homo sapien
gagacggcacaaactaaactcattg

SEQ ID NO: 3609430 - DNA, 25 bp, Homo sapien
ggctttgcaaggtaaggatccactg

SEQ ID NO: 3609431 - DNA, 25 bp, Homo sapien
cagggtccctctagtgcaggtcaaa

SEQ ID NO: 3609432 - DNA, 25 bp, Homo sapien
gagattcctgtagttcagcctcctg

SEQ ID NO: 3609433 - DNA, 25 bp, Homo sapien
ttgggaggttcagtgggagcccgtg

SEQ ID NO: 3609434 - DNA, 25 bp, Homo sapien
tgggagcccgtggaggtttcaggca

SEQ ID NO: 3609435 - DNA, 25 bp, Homo sapien
tgttgtaggggcttcgatttgggag

SEQ ID NO: 3609436 - DNA, 25 bp, Homo sapien
gggcttcgatttgggaggttcagtg

SEQ ID NO: 3609437 - DNA, 25 bp, Homo sapien
tttccaccaccggacacccaagcaa

SEQ ID NO: 3609438 - DNA, 25 bp, Homo sapien
acccaagcaacagccctcgctccat

SEQ ID NO: 3609439 - DNA, 25 bp, Homo sapien
accggacacccaagcaacagccctc

SEQ ID NO: 3609440 - DNA, 25 bp, Homo sapien
agccctcgctccatccgcgctctcc

SEQ ID NO: 3609441 - DNA, 25 bp, Homo sapien
tctcatccttaagttctctcgtccc

SEQ ID NO: 3609442 - DNA, 25 bp, Homo sapien
ggcggccgagaggaccccagctcgg

SEQ ID NO: 3609443 - DNA, 25 bp, Homo sapien
tgtgcgcctggagggcgaaggcggc

SEQ ID NO: 3609444 - DNA, 25 bp, Homo sapien
ctgacggcggccctttctcgagggc

SEQ ID NO: 3609445 - DNA, 25 bp, Homo sapien
gacagcatgagataacccaaggaag

SEQ ID NO: 3609446 - DNA, 25 bp, Homo sapien
tgtgccaaattaactccacgcttgc

SEQ ID NO: 3609447 - DNA, 25 bp, Homo sapien
taggctgctgtcttaggctactgtc

SEQ ID NO: 3609448 - DNA, 25 bp, Homo sapien
taactcagtgggtgcctctgtgccc

SEQ ID NO: 3609449 - DNA, 25 bp, Homo sapien
ttatattccctcctgcgtctggcct

SEQ ID NO: 3609450 - DNA, 25 bp, Homo sapien
tggccttgctccaagtacgtgatgc

SEQ ID NO: 3609451 - DNA, 25 bp, Homo sapien
gtgatgcggggcacctcgcccatgc

SEQ ID NO: 3609452 - DNA, 25 bp, Homo sapien
tgcttgagcagctaaaggtgatgcg

SEQ ID NO: 3609453 - DNA, 25 bp, Homo sapien
aggccattgaggaagtgtactacga

SEQ ID NO: 3609454 - DNA, 25 bp, Homo sapien
gtgtactacgaccacctgcgcagtg

SEQ ID NO: 3609455 - DNA, 25 bp, Homo sapien
ggaagtgtactacgaccacctgcgc

SEQ ID NO: 3609456 - DNA, 25 bp, Homo sapien
cattgaggaagtgtactacgaccac

SEQ ID NO: 3609457 - DNA, 25 bp, Homo sapien
taaagacccatgaccggctgtacta

SEQ ID NO: 3609458 - DNA, 25 bp, Homo sapien
cagaacttgcagtaaccctttaggg

SEQ ID NO: 3609459 - DNA, 25 bp, Homo sapien
cagaggccatgcgtatctggatgga

SEQ ID NO: 3609460 - DNA, 25 bp, Homo sapien
ttcatgaactaactgccgtgggcct

SEQ ID NO: 3609461 - DNA, 25 bp, Homo sapien
tagttgcagactcatcaccatggtt

SEQ ID NO: 3609462 - DNA, 25 bp, Homo sapien
catctgagggtacgtgccatcatct

SEQ ID NO: 3609463 - DNA, 25 bp, Homo sapien
catggttacatactaattgctgcag

SEQ ID NO: 3609464 - DNA, 25 bp, Homo sapien
caagggccagagatctcaagtgtca

SEQ ID NO: 3609465 - DNA, 25 bp, Homo sapien
catgacctccaggtcgtgaccctgc

SEQ ID NO: 3609466 - DNA, 25 bp, Homo sapien
tggggataggtcttccctccagagc

SEQ ID NO: 3609467 - DNA, 25 bp, Homo sapien
caccctattcaaggttccaggaggg

SEQ ID NO: 3609468 - DNA, 25 bp, Homo sapien
gcaggatttccaccctattcaaggt

SEQ ID NO: 3609469 - DNA, 25 bp, Homo sapien
ggtgcagaggtttaatggggcagga

SEQ ID NO: 3609470 - DNA, 25 bp, Homo sapien
tggtgcagaggtttaatggggcagg

SEQ ID NO: 3609471 - DNA, 25 bp, Homo sapien
ctggtgcagaggtttaatggggcag

SEQ ID NO: 3609472 - DNA, 25 bp, Homo sapien
actggtgcagaggtttaatggggca

SEQ ID NO: 3609473 - DNA, 25 bp, Homo sapien
tcaccatggcaggaggcttagcagg

SEQ ID NO: 3609474 - DNA, 25 bp, Homo sapien
gcatcaggaccacgccattcgtcca

SEQ ID NO: 3609475 - DNA, 25 bp, Homo sapien
agcttgggccctgaggtcagccggt

SEQ ID NO: 3609476 - DNA, 25 bp, Homo sapien
tcaccatagcggtccagcagcatca

SEQ ID NO: 3609477 - DNA, 25 bp, Homo sapien
ggctgtccaccgttgctgacgtcat

SEQ ID NO: 3609478 - DNA, 25 bp, Homo sapien
gggctgtccaccgttgctgacgtca

SEQ ID NO: 3609479 - DNA, 25 bp, Homo sapien
gctgtccaccgttgctgacgtcata

SEQ ID NO: 3609480 - DNA, 25 bp, Homo sapien
ccgggctgtccaccgttgctgacgt

SEQ ID NO: 3609481 - DNA, 25 bp, Homo sapien
agcccctgcagtgctcaggagtggc

SEQ ID NO: 3609482 - DNA, 25 bp, Homo sapien
gcccctgcagtgctcaggagtggcc

SEQ ID NO: 3609483 - DNA, 25 bp, Homo sapien
gggacaagcgggtgggctgtatgtc

SEQ ID NO: 3609484 - DNA, 25 bp, Homo sapien
aagcgggtgggctgtatgtcaggta

SEQ ID NO: 3609485 - DNA, 25 bp, Homo sapien
tctcatacatggctgacttctgcga

SEQ ID NO: 3609486 - DNA, 25 bp, Homo sapien
catggctgacttctgcgagtagaca

SEQ ID NO: 3609487 - DNA, 25 bp, Homo sapien
tctgcgagtagacatcaaaattggt

SEQ ID NO: 3609488 - DNA, 25 bp, Homo sapien
cggatccaattctgagccagctgga

SEQ ID NO: 3609489 - DNA, 25 bp, Homo sapien
cccgacgtaaaggtgccttggccag

SEQ ID NO: 3609490 - DNA, 25 bp, Homo sapien
ctgggcccgacgtaaaggtgccttg

SEQ ID NO: 3609491 - DNA, 25 bp, Homo sapien
gcccgacgtaaaggtgccttggcca

SEQ ID NO: 3609492 - DNA, 25 bp, Homo sapien
ggagagaggtcgggatcccatactg

SEQ ID NO: 3609493 - DNA, 25 bp, Homo sapien
tggagagaggtcgggatcccatact

SEQ ID NO: 3609494 - DNA, 25 bp, Homo sapien
actggtaagtcaggatccggttgtc

SEQ ID NO: 3609495 - DNA, 25 bp, Homo sapien
gagagaggtcgggatcccatactgg

SEQ ID NO: 3609496 - DNA, 25 bp, Homo sapien
accgcaggattctgtacttcgtggc

SEQ ID NO: 3609497 - DNA, 25 bp, Homo sapien
tcttcttctcaaggtcgtaatcgaa

SEQ ID NO: 3609498 - DNA, 25 bp, Homo sapien
gtaatcgaaccaggctccggtctgc

SEQ ID NO: 3609499 - DNA, 25 bp, Homo sapien
gttcagggcggccaagcgctgcgac

SEQ ID NO: 3609500 - DNA, 25 bp, Homo sapien
tgaaggcctgtcacacaagggtcct

SEQ ID NO: 3609501 - DNA, 25 bp, Homo sapien
tcgacaggctaagttgctgaaggcc

SEQ ID NO: 3609502 - DNA, 25 bp, Homo sapien
caaatgtgagtgcaggcttccacta

SEQ ID NO: 3609503 - DNA, 25 bp, Homo sapien
agttctattgccaagcctgagcagg

SEQ ID NO: 3609504 - DNA, 25 bp, Homo sapien
taggaaggcattcaggtcaacaggc

SEQ ID NO: 3609505 - DNA, 25 bp, Homo sapien
atgagccagcgtgaagagaagtccc

SEQ ID NO: 3609506 - DNA, 25 bp, Homo sapien
gcctggaatagaagttgctcatcag

SEQ ID NO: 3609507 - DNA, 25 bp, Homo sapien
cagtttgcttgttcggatgccgcta

SEQ ID NO: 3609508 - DNA, 25 bp, Homo sapien
ggtgtcagccaactccacatctttg

SEQ ID NO: 3609509 - DNA, 25 bp, Homo sapien
cttctggcaaggtgtcagccaactc

SEQ ID NO: 3609510 - DNA, 25 bp, Homo sapien
cacatctttgctgtaggactcaggc

SEQ ID NO: 3609511 - DNA, 25 bp, Homo sapien
ccacatctttgctgtaggactcagg

SEQ ID NO: 3609512 - DNA, 25 bp, Homo sapien
gtccaattccaaggctagtgtttca

SEQ ID NO: 3609513 - DNA, 25 bp, Homo sapien
gtcctgttcttggtccaaaagtcca

SEQ ID NO: 3609514 - DNA, 25 bp, Homo sapien
cgattcaggaggtagttctttccct

SEQ ID NO: 3609515 - DNA, 25 bp, Homo sapien
ccccataagggacataatagcgatt

SEQ ID NO: 3609516 - DNA, 25 bp, Homo sapien
aggcggtgtcattggtgtgagtcaa

SEQ ID NO: 3609517 - DNA, 25 bp, Homo sapien
tgtgagtcaagtagcaatccatcat

SEQ ID NO: 3609518 - DNA, 25 bp, Homo sapien
caatccatcatgagggtcaagagtg

SEQ ID NO: 3609519 - DNA, 25 bp, Homo sapien
ggctccgctgcaggtagtacacgcg

SEQ ID NO: 3609520 - DNA, 25 bp, Homo sapien
gaccctccatgacccagtaggagtc

SEQ ID NO: 3609521 - DNA, 25 bp, Homo sapien
aagttctgcagcatgcccttcaccg

SEQ ID NO: 3609522 - DNA, 25 bp, Homo sapien
ttcaccgtctcagccatctctgaga

SEQ ID NO: 3609523 - DNA, 25 bp, Homo sapien
agcagaccctccatgacccagtagg

SEQ ID NO: 3609524 - DNA, 25 bp, Homo sapien
gcacaatgaagggatgttctgagta

SEQ ID NO: 3609525 - DNA, 25 bp, Homo sapien
cagtagtagaactcaacaaagcgac

SEQ ID NO: 3609526 - DNA, 25 bp, Homo sapien
aaagcgaccgccaggcacaatgaag

SEQ ID NO: 3609527 - DNA, 25 bp, Homo sapien
tgagtagatgagagagaaccgctca

SEQ ID NO: 3609528 - DNA, 25 bp, Homo sapien
ctgatctgtgctccgaagacactgt

SEQ ID NO: 3609529 - DNA, 25 bp, Homo sapien
gcccaggcacgcagtttggcatctg

SEQ ID NO: 3609530 - DNA, 25 bp, Homo sapien
ccaggcacgcagtttggcatctgaa

SEQ ID NO: 3609531 - DNA, 25 bp, Homo sapien
tgcccaggcacgcagtttggcatct

SEQ ID NO: 3609532 - DNA, 25 bp, Homo sapien
ttcgtggacaaacgcctgcagctgc

SEQ ID NO: 3609533 - DNA, 25 bp, Homo sapien
gcctggaagtgttcgtggacaaacg

SEQ ID NO: 3609534 - DNA, 25 bp, Homo sapien
cttggcctggaagtgttcgtggaca

SEQ ID NO: 3609535 - DNA, 25 bp, Homo sapien
aagtgttcgtggacaaacgcctgca

SEQ ID NO: 3609536 - DNA, 25 bp, Homo sapien
ccacaaactgcttgtcatcctggta

SEQ ID NO: 3609537 - DNA, 25 bp, Homo sapien
gagctccccgtggcagtaaatctca

SEQ ID NO: 3609538 - DNA, 25 bp, Homo sapien
ctgcttgtcatcctggtagagcttg

SEQ ID NO: 3609539 - DNA, 25 bp, Homo sapien
tatagacagtggcatgtccacaaac

SEQ ID NO: 3609540 - DNA, 25 bp, Homo sapien
ctggttgctaatttgagatggtgta

SEQ ID NO: 3609541 - DNA, 25 bp, Homo sapien
agcccacactggttgctaatttgag

SEQ ID NO: 3609542 - DNA, 25 bp, Homo sapien
cacactggttgctaatttgagatgg

SEQ ID NO: 3609543 - DNA, 25 bp, Homo sapien
gcccacactggttgctaatttgaga

SEQ ID NO: 3609544 - DNA, 25 bp, Homo sapien
taacaaggagaagcatttagagaaa

SEQ ID NO: 3609545 - DNA, 25 bp, Homo sapien
cagtatcaccaatgaatattgatgc

SEQ ID NO: 3609546 - DNA, 25 bp, Homo sapien
tttaacaaggagaagcatttagaga

SEQ ID NO: 3609547 - DNA, 25 bp, Homo sapien
aaataaaactatgggccagtatcac

SEQ ID NO: 3609548 - DNA, 25 bp, Homo sapien
agcagcagtagcaggcacagctccc

SEQ ID NO: 3609549 - DNA, 25 bp, Homo sapien
agtagcaggcacagctcccaggtcc

SEQ ID NO: 3609550 - DNA, 25 bp, Homo sapien
ctctcacagggtgggggtagggcct

SEQ ID NO: 3609551 - DNA, 25 bp, Homo sapien
gcagtagcaggcacagctcccaggt

SEQ ID NO: 3609552 - DNA, 25 bp, Homo sapien
gactgtgactgaatgagcaagccca

SEQ ID NO: 3609553 - DNA, 25 bp, Homo sapien
gggccaggtgaggaggggagggctg

SEQ ID NO: 3609554 - DNA, 25 bp, Homo sapien
ccaggtgaggaggggagggctgtca

SEQ ID NO: 3609555 - DNA, 25 bp, Homo sapien
gagctggggccaggtgaggagggga

SEQ ID NO: 3609556 - DNA, 25 bp, Homo sapien
gtttaatgggacaggagctggggcc

SEQ ID NO: 3609557 - DNA, 25 bp, Homo sapien
aagggtggccgccagacagtggggc

SEQ ID NO: 3609558 - DNA, 25 bp, Homo sapien
aaaagggtggccgccagacagtggg

SEQ ID NO: 3609559 - DNA, 25 bp, Homo sapien
gaaaaagggtggccgccagacagtg

SEQ ID NO: 3609560 - DNA, 25 bp, Homo sapien
agctgggcccctaaggtcagccggt

SEQ ID NO: 3609561 - DNA, 25 bp, Homo sapien
cagcagtccagtagcatcaggacca

SEQ ID NO: 3609562 - DNA, 25 bp, Homo sapien
gtagcatcaggaccacgccattcat

SEQ ID NO: 3609563 - DNA, 25 bp, Homo sapien
cacagcagtccagtagcatcaggac

SEQ ID NO: 3609564 - DNA, 25 bp, Homo sapien
tcaggaccacgccattcatccagcc

SEQ ID NO: 3609565 - DNA, 25 bp, Homo sapien
gcagggcagtggggccaggtttctg

SEQ ID NO: 3609566 - DNA, 25 bp, Homo sapien
acccttggtggtgtgtccggaattg

SEQ ID NO: 3609567 - DNA, 25 bp, Homo sapien
tacagttcttaaagcagcacgtctg

SEQ ID NO: 3609568 - DNA, 25 bp, Homo sapien
gcagtggggccaggtttctggggaa

SEQ ID NO: 3609569 - DNA, 25 bp, Homo sapien
tccaggcccacatgcaggtgagcac

SEQ ID NO: 3609570 - DNA, 25 bp, Homo sapien
tcctccaggcccacatgcaggtgag

SEQ ID NO: 3609571 - DNA, 25 bp, Homo sapien
tagcggtacagggagcaccagtcag

SEQ ID NO: 3609572 - DNA, 25 bp, Homo sapien
gtacagggagcaccagtcagctcct

SEQ ID NO: 3609573 - DNA, 25 bp, Homo sapien
gccaccgggctctccaccgttgcta

SEQ ID NO: 3609574 - DNA, 25 bp, Homo sapien
caccgggctctccaccgttgctaat

SEQ ID NO: 3609575 - DNA, 25 bp, Homo sapien
ccgggctctccaccgttgctaatgt

SEQ ID NO: 3609576 - DNA, 25 bp, Homo sapien
gggctctccaccgttgctaatgtca

SEQ ID NO: 3609577 - DNA, 25 bp, Homo sapien
ggttcggatccaattctggggcata

SEQ ID NO: 3609578 - DNA, 25 bp, Homo sapien
tccagacattcccgtgactgtgggt

SEQ ID NO: 3609579 - DNA, 25 bp, Homo sapien
tggggcatattggtagatcaggatc

SEQ ID NO: 3609580 - DNA, 25 bp, Homo sapien
gatctggctgccctagaaggttcca

SEQ ID NO: 3609581 - DNA, 25 bp, Homo sapien
gcccttctcttctcggctcacagct

SEQ ID NO: 3609582 - DNA, 25 bp, Homo sapien
gctgccccccggtggctccgcggga

SEQ ID NO: 3609583 - DNA, 25 bp, Homo sapien
ctgcaggtcctgctcagggtcggga

SEQ ID NO: 3609584 - DNA, 25 bp, Homo sapien
tgggacaaggggcacagccggagga

SEQ ID NO: 3609585 - DNA, 25 bp, Homo sapien
gggcacagccggaggaagcggcctc

SEQ ID NO: 3609586 - DNA, 25 bp, Homo sapien
tcctgctcagggtcgggagggggca

SEQ ID NO: 3609587 - DNA, 25 bp, Homo sapien
tatttcagagccttgtccgccacgc

SEQ ID NO: 3609588 - DNA, 25 bp, Homo sapien
tcagagccttgtccgccacgccagg

SEQ ID NO: 3609589 - DNA, 25 bp, Homo sapien
ggtatttcagagccttgtccgccac

SEQ ID NO: 3609590 - DNA, 25 bp, Homo sapien
agccttgtccgccacgccagggtca

SEQ ID NO: 3609591 - DNA, 25 bp, Homo sapien
gtagtcgaaccaggcactggtctgc

SEQ ID NO: 3609592 - DNA, 25 bp, Homo sapien
caaggtcgtagtcgaaccaggcact

SEQ ID NO: 3609593 - DNA, 25 bp, Homo sapien
ggtcgtagtcgaaccaggcactggt

SEQ ID NO: 3609594 - DNA, 25 bp, Homo sapien
tcgtagtcgaaccaggcactggtct

SEQ ID NO: 3609595 - DNA, 25 bp, Homo sapien
ccggcaggattctgtactttgtggc

SEQ ID NO: 3609596 - DNA, 25 bp, Homo sapien
gtactttgtggcctgggagtcgttc

SEQ ID NO: 3609597 - DNA, 25 bp, Homo sapien
ctgcgccggcaggattctgtacttt

SEQ ID NO: 3609598 - DNA, 25 bp, Homo sapien
tttgtggcctgggagtcgttccctg

SEQ ID NO: 3609599 - DNA, 25 bp, Homo sapien
ctctagggcaaacgcttcccgacat

SEQ ID NO: 3609600 - DNA, 25 bp, Homo sapien
ctgagctctagggcaaacgcttccc

SEQ ID NO: 3609601 - DNA, 25 bp, Homo sapien
tgagctctagggcaaacgcttcccg

SEQ ID NO: 3609602 - DNA, 25 bp, Homo sapien
agctctagggcaaacgcttcccgac

SEQ ID NO: 3609603 - DNA, 25 bp, Homo sapien
ggtccgcatgcagtccaggcttggc

SEQ ID NO: 3609604 - DNA, 25 bp, Homo sapien
gtccgcatgcagtccaggcttggct

SEQ ID NO: 3609605 - DNA, 25 bp, Homo sapien
tccgcatgcagtccaggcttggctt

SEQ ID NO: 3609606 - DNA, 25 bp, Homo sapien
cgattgtcaataattcccacaaaat

SEQ ID NO: 3609607 - DNA, 25 bp, Homo sapien
tttgggtaacgattgtcaataattc

SEQ ID NO: 3609608 - DNA, 25 bp, Homo sapien
ggtaacgattgtcaataattcccac

SEQ ID NO: 3609609 - DNA, 25 bp, Homo sapien
tattattcataatcttgtctgacca

SEQ ID NO: 3609610 - DNA, 25 bp, Homo sapien
ccttttgctaatacgttactgcatc

SEQ ID NO: 3609611 - DNA, 25 bp, Homo sapien
tgggtctatttttcggctattctgt

SEQ ID NO: 3609612 - DNA, 25 bp, Homo sapien
gtccaaatcaggtagtgactcctcc

SEQ ID NO: 3609613 - DNA, 25 bp, Homo sapien
tcattgaatggcctttgcactgtca

SEQ ID NO: 3609614 - DNA, 25 bp, Homo sapien
cacgtggcaaaggaaagatgctccc

SEQ ID NO: 3609615 - DNA, 25 bp, Homo sapien
cagtggaactggtcccttgtggcta

SEQ ID NO: 3609616 - DNA, 25 bp, Homo sapien
gctgctgggaccaacttcaaacaat

SEQ ID NO: 3609617 - DNA, 25 bp, Homo sapien
catgaactgtgacaacctttggaca

SEQ ID NO: 3609618 - DNA, 25 bp, Homo sapien
tatgggacacgctttgccacagagg

SEQ ID NO: 3609619 - DNA, 25 bp, Homo sapien
caaggcaattgtgggtgagtcgcaa

SEQ ID NO: 3609620 - DNA, 25 bp, Homo sapien
tatggctcctgcaatgatagactgc

SEQ ID NO: 3609621 - DNA, 25 bp, Homo sapien
aagagagctgcatcggtacaagggc

SEQ ID NO: 3609622 - DNA, 25 bp, Homo sapien
gattcctcgggctgtgtctaaaaga

SEQ ID NO: 3609623 - DNA, 25 bp, Homo sapien
cctgggctcgagtactgggtagaaa

SEQ ID NO: 3609624 - DNA, 25 bp, Homo sapien
gaagttgaaatgcacgagagtcagc

SEQ ID NO: 3609625 - DNA, 25 bp, Homo sapien
gaatggtctcatagcataaggcact

SEQ ID NO: 3609626 - DNA, 25 bp, Homo sapien
agagaggagcattccccccaaaacg

SEQ ID NO: 3609627 - DNA, 25 bp, Homo sapien
agatccaaacgagccttttgtaatt

SEQ ID NO: 3609628 - DNA, 25 bp, Homo sapien
gagcattccccccaaaacgatgtgt

SEQ ID NO: 3609629 - DNA, 25 bp, Homo sapien
cgagccttttgtaatttgtcaaagc

SEQ ID NO: 3609630 - DNA, 25 bp, Homo sapien
atcaatgttgctcggaataggttta

SEQ ID NO: 3609631 - DNA, 25 bp, Homo sapien
ccaatacgatggagataggtctctg

SEQ ID NO: 3609632 - DNA, 25 bp, Homo sapien
atcttccaatacgatggagataggt

SEQ ID NO: 3609633 - DNA, 25 bp, Homo sapien
caatacgatggagataggtctctgc

SEQ ID NO: 3609634 - DNA, 25 bp, Homo sapien
gatcttccaatacgatggagatagg

SEQ ID NO: 3609635 - DNA, 25 bp, Homo sapien
cagtgcaaacaagattgcggcataa

SEQ ID NO: 3609636 - DNA, 25 bp, Homo sapien
caagattgcggcataagccatttcg

SEQ ID NO: 3609637 - DNA, 25 bp, Homo sapien
gcaaacaagattgcggcataagcca

SEQ ID NO: 3609638 - DNA, 25 bp, Homo sapien
aagattgcggcataagccatttcgg

SEQ ID NO: 3609639 - DNA, 25 bp, Homo sapien
tgagaaatcttcttggctagcaatt

SEQ ID NO: 3609640 - DNA, 25 bp, Homo sapien
ttacagaaaatgatcgactggttta

SEQ ID NO: 3609641 - DNA, 25 bp, Homo sapien
tacagaaaatgatcgactggtttat

SEQ ID NO: 3609642 - DNA, 25 bp, Homo sapien
gttagttcctccatcaggttaatct

SEQ ID NO: 3609643 - DNA, 25 bp, Homo sapien
tcaggttaatctcatagggtttctg

SEQ ID NO: 3609644 - DNA, 25 bp, Homo sapien
ggttaatctcatagggtttctgcaa

SEQ ID NO: 3609645 - DNA, 25 bp, Homo sapien
gttcctccatcaggttaatctcata

SEQ ID NO: 3609646 - DNA, 25 bp, Homo sapien
tgctgtaagggacgcaactctcttc

SEQ ID NO: 3609647 - DNA, 25 bp, Homo sapien
tataccctatacgtttctgtccgat

SEQ ID NO: 3609648 - DNA, 25 bp, Homo sapien
ggcatgcactgccataacagactaa

SEQ ID NO: 3609649 - DNA, 25 bp, Homo sapien
gagtcgtcgtcttaaatgaaagcag

SEQ ID NO: 3609650 - DNA, 25 bp, Homo sapien
tccattatctgcacaaaatcctgtg

SEQ ID NO: 3609651 - DNA, 25 bp, Homo sapien
cctccattatctgcacaaaatcctg

SEQ ID NO: 3609652 - DNA, 25 bp, Homo sapien
attatctgcacaaaatcctgtgaca

SEQ ID NO: 3609653 - DNA, 25 bp, Homo sapien
cattatctgcacaaaatcctgtgac

SEQ ID NO: 3609654 - DNA, 25 bp, Homo sapien
aattctacactacacagacaacctc

SEQ ID NO: 3609655 - DNA, 25 bp, Homo sapien
gaggtagtatggtgtagtgtttaaa

SEQ ID NO: 3609656 - DNA, 25 bp, Homo sapien
gcccagctccacaacagaattttaa

SEQ ID NO: 3609657 - DNA, 25 bp, Homo sapien
aaaaaaattctacactacacagaca

SEQ ID NO: 3609658 - DNA, 25 bp, Homo sapien
caatactatcatctggacatgatca

SEQ ID NO: 3609659 - DNA, 25 bp, Homo sapien
aatactatcatctggacatgatcaa

SEQ ID NO: 3609660 - DNA, 25 bp, Homo sapien
atactatcatctggacatgatcaac

SEQ ID NO: 3609661 - DNA, 25 bp, Homo sapien
tatgtcatctcgtaaattggttcct

SEQ ID NO: 3609662 - DNA, 25 bp, Homo sapien
ggttcctcctgtggttgccatcact

SEQ ID NO: 3609663 - DNA, 25 bp, Homo sapien
cctcctgtggttgccatcactttgg

SEQ ID NO: 3609664 - DNA, 25 bp, Homo sapien
attatgtcatctcgtaaattggttc

SEQ ID NO: 3609665 - DNA, 25 bp, Homo sapien
ctgacctgtagagcaagttctctag

SEQ ID NO: 3609666 - DNA, 25 bp, Homo sapien
tgacctgtagagcaagttctctagt

SEQ ID NO: 3609667 - DNA, 25 bp, Homo sapien
cctactgagtaaccgccaccacacc

SEQ ID NO: 3609668 - DNA, 25 bp, Homo sapien
agcctactgagtaaccgccaccaca

SEQ ID NO: 3609669 - DNA, 25 bp, Homo sapien
gcctactgagtaaccgccaccacac

SEQ ID NO: 3609670 - DNA, 25 bp, Homo sapien
gctgtcacaagtgtgtatcatataa

SEQ ID NO: 3609671 - DNA, 25 bp, Homo sapien
tacctatagggcactaatacttatt

SEQ ID NO: 3609672 - DNA, 25 bp, Homo sapien
caagtgtgtatcatataagaatact

SEQ ID NO: 3609673 - DNA, 25 bp, Homo sapien
cctcagctttcctacctatagggca

SEQ ID NO: 3609674 - DNA, 25 bp, Homo sapien
aatgaggtaggcaccgctcttgcct

SEQ ID NO: 3609675 - DNA, 25 bp, Homo sapien
atgaggtaggcaccgctcttgcctg

SEQ ID NO: 3609676 - DNA, 25 bp, Homo sapien
ggtaggcaccgctcttgcctgttcc

SEQ ID NO: 3609677 - DNA, 25 bp, Homo sapien
tacaaatgtcccctgcttaacagga

SEQ ID NO: 3609678 - DNA, 25 bp, Homo sapien
cagccagtgtgacaaactgagactc

SEQ ID NO: 3609679 - DNA, 25 bp, Homo sapien
caacctatggttactccagacgagg

SEQ ID NO: 3609680 - DNA, 25 bp, Homo sapien
acctgtaatctcaaccctctgcaag

SEQ ID NO: 3609681 - DNA, 25 bp, Homo sapien
tgaacatctaagactacatgtcccc

SEQ ID NO: 3609682 - DNA, 25 bp, Homo sapien
gccaaactgcaactaaattccatct

SEQ ID NO: 3609683 - DNA, 25 bp, Homo sapien
gaagactcacccatctaatcaaggc

SEQ ID NO: 3609684 - DNA, 25 bp, Homo sapien
cacagccaaactgcaactaaattcc

SEQ ID NO: 3609685 - DNA, 25 bp, Homo sapien
taagtggctgaagagttaattgcct

SEQ ID NO: 3609686 - DNA, 25 bp, Homo sapien
tcctgtgagggagagtacttatttc

SEQ ID NO: 3609687 - DNA, 25 bp, Homo sapien
tatccactaagaatgaggactgggc

SEQ ID NO: 3609688 - DNA, 25 bp, Homo sapien
ctggatgtcagattggttaagtggc

SEQ ID NO: 3609689 - DNA, 25 bp, Homo sapien
gcaattccaactagaaaggtactca

SEQ ID NO: 3609690 - DNA, 25 bp, Homo sapien
ggttgtcccatcttcctctaatgac

SEQ ID NO: 3609691 - DNA, 25 bp, Homo sapien
gggcaatcattacccagcgttctct

SEQ ID NO: 3609692 - DNA, 25 bp, Homo sapien
gaattacctgtacaattagctgtcc

SEQ ID NO: 3609693 - DNA, 25 bp, Homo sapien
caatacgctaagagaactgctctga

SEQ ID NO: 3609694 - DNA, 25 bp, Homo sapien
tcaagcaagaatcaccaatgggtgc

SEQ ID NO: 3609695 - DNA, 25 bp, Homo sapien
gggataatacctagcctgaacatct

SEQ ID NO: 3609696 - DNA, 25 bp, Homo sapien
tgaacatctatcttactgggttgga

SEQ ID NO: 3609697 - DNA, 25 bp, Homo sapien
aaacagtaatcttcaaactcatttc

SEQ ID NO: 3609698 - DNA, 25 bp, Homo sapien
tgaataggagatggcttttcccagc

SEQ ID NO: 3609699 - DNA, 25 bp, Homo sapien
tcccgtttcaaacagtaatcttcaa

SEQ ID NO: 3609700 - DNA, 25 bp, Homo sapien
tcccagcccatttcaaaaattccca

SEQ ID NO: 3609701 - DNA, 25 bp, Homo sapien
aaagtctttttccagtcatcaccag

SEQ ID NO: 3609702 - DNA, 25 bp, Homo sapien
tttaaagtctttttccagtcatcac

SEQ ID NO: 3609703 - DNA, 25 bp, Homo sapien
cgaagttttgattcttagatccttt

SEQ ID NO: 3609704 - DNA, 25 bp, Homo sapien
agttttgattcttagatcctttgga

SEQ ID NO: 3609705 - DNA, 25 bp, Homo sapien
caaaatttgtgtgtatcatctgacc

SEQ ID NO: 3609706 - DNA, 25 bp, Homo sapien
gaaggctgggcaagtctttaaagac

SEQ ID NO: 3609707 - DNA, 25 bp, Homo sapien
tgacctcaggatgactacttgctga

SEQ ID NO: 3609708 - DNA, 25 bp, Homo sapien
tctattgcaaatacctactggccat

SEQ ID NO: 3609709 - DNA, 25 bp, Homo sapien
tgctgagtgccattattgattgtgt

SEQ ID NO: 3609710 - DNA, 25 bp, Homo sapien
gggttctctgttctggccgtgctca

SEQ ID NO: 3609711 - DNA, 25 bp, Homo sapien
taacagggttctctgttctggccgt

SEQ ID NO: 3609712 - DNA, 25 bp, Homo sapien
cagggttctctgttctggccgtgct

SEQ ID NO: 3609713 - DNA, 25 bp, Homo sapien
ggttctctgttctggccgtgctcat

SEQ ID NO: 3609714 - DNA, 25 bp, Homo sapien
taagtcttgctcaataaatgagtcc

SEQ ID NO: 3609715 - DNA, 25 bp, Homo sapien
aatgagtcctttattgcaatgcagg

SEQ ID NO: 3609716 - DNA, 25 bp, Homo sapien
caagcacctgtaagtctctgaacgg

SEQ ID NO: 3609717 - DNA, 25 bp, Homo sapien
tctgaacggtaagcagcagtaactt

SEQ ID NO: 3609718 - DNA, 25 bp, Homo sapien
gagccaagctaggatagacacaact

SEQ ID NO: 3609719 - DNA, 25 bp, Homo sapien
tacttgtaatagcaaccgagagtcc

SEQ ID NO: 3609720 - DNA, 25 bp, Homo sapien
ccatgaattctctaagtctctgaca

SEQ ID NO: 3609721 - DNA, 25 bp, Homo sapien
agctacacttagaccaaatcacgag

SEQ ID NO: 3609722 - DNA, 25 bp, Homo sapien
caaatgcagcgcagtttttctagct

SEQ ID NO: 3609723 - DNA, 25 bp, Homo sapien
gctttgcctgcaagttggagtgact

SEQ ID NO: 3609724 - DNA, 25 bp, Homo sapien
cacagatcgtagttagcaattgaca

SEQ ID NO: 3609725 - DNA, 25 bp, Homo sapien
tcgtcatcgccaacaagagcttttg

SEQ ID NO: 3609726 - DNA, 25 bp, Homo sapien
aggcctccgcccgagagtcccccag

SEQ ID NO: 3609727 - DNA, 25 bp, Homo sapien
cacattcctatattcgcctcctctc

SEQ ID NO: 3609728 - DNA, 25 bp, Homo sapien
attcctatattcgcctcctctcagg

SEQ ID NO: 3609729 - DNA, 25 bp, Homo sapien
tccgcccgagagtcccccagagccg

SEQ ID NO: 3609730 - DNA, 25 bp, Homo sapien
cctttattgttgactcgaagctccc

SEQ ID NO: 3609731 - DNA, 25 bp, Homo sapien
ggcccgtgtcctaccaacgaggcca

SEQ ID NO: 3609732 - DNA, 25 bp, Homo sapien
ctcgaagctcccaaaatggcggacg

SEQ ID NO: 3609733 - DNA, 25 bp, Homo sapien
gctcggcaccctcggtcctttattg

SEQ ID NO: 3609734 - DNA, 25 bp, Homo sapien
cgaagtcgccgcctggctgagctaa

SEQ ID NO: 3609735 - DNA, 25 bp, Homo sapien
ctggctgagctaactcggctcctct

SEQ ID NO: 3609736 - DNA, 25 bp, Homo sapien
tgcccgctctcgtggcgccgccgaa

SEQ ID NO: 3609737 - DNA, 25 bp, Homo sapien
ggctgagctaactcggctcctctgc

SEQ ID NO: 3609738 - DNA, 25 bp, Homo sapien
gtccgagcctctcggggcgcgcctc

SEQ ID NO: 3609739 - DNA, 25 bp, Homo sapien
taaggggccgcgtccgagcctctcg

SEQ ID NO: 3609740 - DNA, 25 bp, Homo sapien
gcctaaggggccgcgtccgagcctc

SEQ ID NO: 3609741 - DNA, 25 bp, Homo sapien
ctcggggcgcgcctccatgcaggaa

SEQ ID NO: 3609742 - DNA, 25 bp, Homo sapien
caccgagcttgagggtgcgcctcgg

SEQ ID NO: 3609743 - DNA, 25 bp, Homo sapien
gaccggactgtgagggcgtatcttg

SEQ ID NO: 3609744 - DNA, 25 bp, Homo sapien
aaggcaccggacttgagcgtgcgcc

SEQ ID NO: 3609745 - DNA, 25 bp, Homo sapien
agcgtgcgccgggagaggacggcgg

SEQ ID NO: 3609746 - DNA, 25 bp, Homo sapien
ctcagcatggtatatgttctggtca

SEQ ID NO: 3609747 - DNA, 25 bp, Homo sapien
tgtccttcggccacatcgggactca

SEQ ID NO: 3609748 - DNA, 25 bp, Homo sapien
caagctagctagctggctcagctca

SEQ ID NO: 3609749 - DNA, 25 bp, Homo sapien
agctcacggtgtccttcggccacat

SEQ ID NO: 3609750 - DNA, 25 bp, Homo sapien
ggcaatcaactctgatctctttgga

SEQ ID NO: 3609751 - DNA, 25 bp, Homo sapien
gcagtagtagagactggcatttcag

SEQ ID NO: 3609752 - DNA, 25 bp, Homo sapien
gaatgctttatcaaatcccctccag

SEQ ID NO: 3609753 - DNA, 25 bp, Homo sapien
tccagcacccgcatcagaatgatca

SEQ ID NO: 3609754 - DNA, 25 bp, Homo sapien
gtgccccatctatatactatttaac

SEQ ID NO: 3609755 - DNA, 25 bp, Homo sapien
catctatatactatttaaccaacgt

SEQ ID NO: 3609756 - DNA, 25 bp, Homo sapien
ggtctttcctgacagttccagccct

SEQ ID NO: 3609757 - DNA, 25 bp, Homo sapien
ttggaaatgttaggtctttcctgac

SEQ ID NO: 3609758 - DNA, 25 bp, Homo sapien
tccatgaagacttgaagataggaat

SEQ ID NO: 3609759 - DNA, 25 bp, Homo sapien
gcccagccaatctaactaatgtatt

SEQ ID NO: 3609760 - DNA, 25 bp, Homo sapien
ccagccaatctaactaatgtattat

SEQ ID NO: 3609761 - DNA, 25 bp, Homo sapien
tgaagacttgaagataggaatcctt

SEQ ID NO: 3609762 - DNA, 25 bp, Homo sapien
tatgcgaccctcgatctgagagcct

SEQ ID NO: 3609763 - DNA, 25 bp, Homo sapien
tatagcgcacggtgaagctggtcca

SEQ ID NO: 3609764 - DNA, 25 bp, Homo sapien
tacaaactgcagagtctccgtcagg

SEQ ID NO: 3609765 - DNA, 25 bp, Homo sapien
tggaaaggccgatcctggcagacct

SEQ ID NO: 3609766 - DNA, 25 bp, Homo sapien
ccagagtctcagatggtctttaggg

SEQ ID NO: 3609767 - DNA, 25 bp, Homo sapien
ttctgatggccaaaacccgtgggta

SEQ ID NO: 3609768 - DNA, 25 bp, Homo sapien
agtctcacagacttgtccctgaagg

SEQ ID NO: 3609769 - DNA, 25 bp, Homo sapien
gctgtgggcctcctgaagaaagacg

SEQ ID NO: 3609770 - DNA, 25 bp, Homo sapien
gatgcccgggcatccaaagtggaaa

SEQ ID NO: 3609771 - DNA, 25 bp, Homo sapien
cagagggacaaccttgccggtgagt

SEQ ID NO: 3609772 - DNA, 25 bp, Homo sapien
ggtcctggtagaagacaccctgtct

SEQ ID NO: 3609773 - DNA, 25 bp, Homo sapien
gaccaaaggcggatagggagctctc

SEQ ID NO: 3609774 - DNA, 25 bp, Homo sapien
gacccaggccatcccaacattgagg

SEQ ID NO: 3609775 - DNA, 25 bp, Homo sapien
tccagcaatgcggacacgaggagac

SEQ ID NO: 3609776 - DNA, 25 bp, Homo sapien
tatcgtatttgcaacattgccccgg

SEQ ID NO: 3609777 - DNA, 25 bp, Homo sapien
cagggatgcacggaaagaggtaaaa

SEQ ID NO: 3609778 - DNA, 25 bp, Homo sapien
aggacatctgtccagggtggcacat

SEQ ID NO: 3609779 - DNA, 25 bp, Homo sapien
gccccgctgcttcatcagcatgaaa

SEQ ID NO: 3609780 - DNA, 25 bp, Homo sapien
cctggtgccgggaggtagcccatct

SEQ ID NO: 3609781 - DNA, 25 bp, Homo sapien
caggttcatgagatgcagattaggg

SEQ ID NO: 3609782 - DNA, 25 bp, Homo sapien
gccggatcacctcgctcagctcggg

SEQ ID NO: 3609783 - DNA, 25 bp, Homo sapien
gtgggtatgcgtcgcccatgcgccc

SEQ ID NO: 3609784 - DNA, 25 bp, Homo sapien
cccagggagcacacccggtgggtat

SEQ ID NO: 3609785 - DNA, 25 bp, Homo sapien
tgatcctcgacaagtcgaactcggg

SEQ ID NO: 3609786 - DNA, 25 bp, Homo sapien
cagggccatgcctgacgggtagtgc

SEQ ID NO: 3609787 - DNA, 25 bp, Homo sapien
atgcctgacgggtagtgctgctgca

SEQ ID NO: 3609788 - DNA, 25 bp, Homo sapien
gccatgcctgacgggtagtgctgct

SEQ ID NO: 3609789 - DNA, 25 bp, Homo sapien
gcctggcggctggttgggcaggtcc

SEQ ID NO: 3609790 - DNA, 25 bp, Homo sapien
tctgggcagcggctgagttcaggtg

SEQ ID NO: 3609791 - DNA, 25 bp, Homo sapien
tggcaggttcatgcccatagggctc

SEQ ID NO: 3609792 - DNA, 25 bp, Homo sapien
gagttcaggtgcatctggctgggct

SEQ ID NO: 3609793 - DNA, 25 bp, Homo sapien
cccctgtgcgttgggatgcagtgga

SEQ ID NO: 3609794 - DNA, 25 bp, Homo sapien
tgggcatggcgtacttggacatctg

SEQ ID NO: 3609795 - DNA, 25 bp, Homo sapien
tggcccggagccctgcggtggtggt

SEQ ID NO: 3609796 - DNA, 25 bp, Homo sapien
ccggtcgggcagcagctcgtcgtct

SEQ ID NO: 3609797 - DNA, 25 bp, Homo sapien
ctcgtcgtctgaggtggcgatggtc

SEQ ID NO: 3609798 - DNA, 25 bp, Homo sapien
ctggggttcatgaggccgctgggag

SEQ ID NO: 3609799 - DNA, 25 bp, Homo sapien
gcccggtgagcccatctgattaata

SEQ ID NO: 3609800 - DNA, 25 bp, Homo sapien
catggccgtcttaggtgaggcaacc

SEQ ID NO: 3609801 - DNA, 25 bp, Homo sapien
gctgaatgcacggtcccaggaggat

SEQ ID NO: 3609802 - DNA, 25 bp, Homo sapien
caagggcaccatctgtgagggagtc

SEQ ID NO: 3609803 - DNA, 25 bp, Homo sapien
ttgaggttgcctggccccatgggtg

SEQ ID NO: 3609804 - DNA, 25 bp, Homo sapien
ggttgcctggccccatgggtgggtc

SEQ ID NO: 3609805 - DNA, 25 bp, Homo sapien
gaggttgcctggccccatgggtggg

SEQ ID NO: 3609806 - DNA, 25 bp, Homo sapien
tgttgaggttgcctggccccatggg

SEQ ID NO: 3609807 - DNA, 25 bp, Homo sapien
ttgtatctggttgcctgggaaacgg

SEQ ID NO: 3609808 - DNA, 25 bp, Homo sapien
tgggcacctccatgggcatactctg

SEQ ID NO: 3609809 - DNA, 25 bp, Homo sapien
ggtctcacgggcctctgcatggcat

SEQ ID NO: 3609810 - DNA, 25 bp, Homo sapien
gcaggatccatctgtcggtgcgcct

SEQ ID NO: 3609811 - DNA, 25 bp, Homo sapien
gaggacggctcccatgcagcccaat

SEQ ID NO: 3609812 - DNA, 25 bp, Homo sapien
gcaagggttcctcatatttcttcag

SEQ ID NO: 3609813 - DNA, 25 bp, Homo sapien
tctgtgtctgtgaaatcatggactg

SEQ ID NO: 3609814 - DNA, 25 bp, Homo sapien
gtttctcttcgtagtactcctcctg

SEQ ID NO: 3609815 - DNA, 25 bp, Homo sapien
gagggggggcttgtgctggtgggcc

SEQ ID NO: 3609816 - DNA, 25 bp, Homo sapien
gcttgtgctggtgggcccccctcac

SEQ ID NO: 3609817 - DNA, 25 bp, Homo sapien
ggagggggggcttgtgctggtgggc

SEQ ID NO: 3609818 - DNA, 25 bp, Homo sapien
gggcttgtgctggtgggcccccctc

SEQ ID NO: 3609819 - DNA, 25 bp, Homo sapien
tctggagggaccgttcccgatgctc

SEQ ID NO: 3609820 - DNA, 25 bp, Homo sapien
caatgtctcgcagcgtctggaggga

SEQ ID NO: 3609821 - DNA, 25 bp, Homo sapien
tgcggagcagcagtcgctcaatgtc

SEQ ID NO: 3609822 - DNA, 25 bp, Homo sapien
cagtctctccgctgcggagcagcag

SEQ ID NO: 3609823 - DNA, 25 bp, Homo sapien
tgacggcgtgctcaggggtagcggt

SEQ ID NO: 3609824 - DNA, 25 bp, Homo sapien
ggggtgcctgctgacggcgtgctca

SEQ ID NO: 3609825 - DNA, 25 bp, Homo sapien
ggtgcctgctgacggcgtgctcagg

SEQ ID NO: 3609826 - DNA, 25 bp, Homo sapien
gcggggtgcctgctgacggcgtgct

SEQ ID NO: 3609827 - DNA, 25 bp, Homo sapien
taggcgaggatggagtcggcccggc

SEQ ID NO: 3609828 - DNA, 25 bp, Homo sapien
tcaagcttggcccggggcacgttct

SEQ ID NO: 3609829 - DNA, 25 bp, Homo sapien
ggtaggcgaggatggagtcggcccg

SEQ ID NO: 3609830 - DNA, 25 bp, Homo sapien
tggtggtaggcgaggatggagtcgg

SEQ ID NO: 3609831 - DNA, 25 bp, Homo sapien
ggtgggtggtgaagacatatacgaa

SEQ ID NO: 3609832 - DNA, 25 bp, Homo sapien
aggtgggtggtgaagacatatacga

SEQ ID NO: 3609833 - DNA, 25 bp, Homo sapien
gagggccgtgcggggcgcctggcac

SEQ ID NO: 3609834 - DNA, 25 bp, Homo sapien
tggtttggccgggacccagctgtgg

SEQ ID NO: 3609835 - DNA, 25 bp, Homo sapien
catggctgggtctgctacattacaa

SEQ ID NO: 3609836 - DNA, 25 bp, Homo sapien
cgccatggctgggtctgctacatta

SEQ ID NO: 3609837 - DNA, 25 bp, Homo sapien
gtggtttggccgggacccagctgtg

SEQ ID NO: 3609838 - DNA, 25 bp, Homo sapien
cagtatctggtgttctcaccaggct

SEQ ID NO: 3609839 - DNA, 25 bp, Homo sapien
ttgatgtcagtatctggtgttctca

SEQ ID NO: 3609840 - DNA, 25 bp, Homo sapien
gctggtttccacgatggcaagagtg

SEQ ID NO: 3609841 - DNA, 25 bp, Homo sapien
tggtttccacgatggcaagagtggt

SEQ ID NO: 3609842 - DNA, 25 bp, Homo sapien
tcaatgtgtgaaggctgctgagtag

SEQ ID NO: 3609843 - DNA, 25 bp, Homo sapien
ctcaatgtgtgaaggctgctgagta

SEQ ID NO: 3609844 - DNA, 25 bp, Homo sapien
ctgctgagtagctcttggatacgag

SEQ ID NO: 3609845 - DNA, 25 bp, Homo sapien
tgaaggctgctgagtagctcttgga

SEQ ID NO: 3609846 - DNA, 25 bp, Homo sapien
tagagacacggccaagtggcaactc

SEQ ID NO: 3609847 - DNA, 25 bp, Homo sapien
gtgacacaccctgggtacttgccag

SEQ ID NO: 3609848 - DNA, 25 bp, Homo sapien
gaaggacaagatataggcgaatcca

SEQ ID NO: 3609849 - DNA, 25 bp, Homo sapien
tcaattagaggttagggaagggcac

SEQ ID NO: 3609850 - DNA, 25 bp, Homo sapien
gaggtgcaggtgacgtgaccaagaa

SEQ ID NO: 3609851 - DNA, 25 bp, Homo sapien
tagaggtgcaggtgacgtgaccaag

SEQ ID NO: 3609852 - DNA, 25 bp, Homo sapien
agaggtgcaggtgacgtgaccaaga

SEQ ID NO: 3609853 - DNA, 25 bp, Homo sapien
cccaggaacatcacgggctacagca

SEQ ID NO: 3609854 - DNA, 25 bp, Homo sapien
aacatcacgggctacagcaccctgg

SEQ ID NO: 3609855 - DNA, 25 bp, Homo sapien
aggcgaggcagttgcagtgtaggga

SEQ ID NO: 3609856 - DNA, 25 bp, Homo sapien
ttgcagtgtagggagggacagagtc

SEQ ID NO: 3609857 - DNA, 25 bp, Homo sapien
ggtggccccaatgggcttgtcgtcc

SEQ ID NO: 3609858 - DNA, 25 bp, Homo sapien
attcgtccccactgtacggctgctt

SEQ ID NO: 3609859 - DNA, 25 bp, Homo sapien
acacagcgccgcttactccgcggcg

SEQ ID NO: 3609860 - DNA, 25 bp, Homo sapien
cctcctcactgtccggtccagagca

SEQ ID NO: 3609861 - DNA, 25 bp, Homo sapien
tgcaggtgggtccttggttcacatt

SEQ ID NO: 3609862 - DNA, 25 bp, Homo sapien
cccttcgagcccacgttgcaggtgg

SEQ ID NO: 3609863 - DNA, 25 bp, Homo sapien
tttggcctctgaatccagggatggg

SEQ ID NO: 3609864 - DNA, 25 bp, Homo sapien
tcagacttgagttgctaggcgagat

SEQ ID NO: 3609865 - DNA, 25 bp, Homo sapien
cttgtcttgttagccaggatcctca

SEQ ID NO: 3609866 - DNA, 25 bp, Homo sapien
ttgtcttgttagccaggatcctcat

SEQ ID NO: 3609867 - DNA, 25 bp, Homo sapien
cagccaggtactcggtactggagca

SEQ ID NO: 3609868 - DNA, 25 bp, Homo sapien
cacacagtggggctacggcccctgt

SEQ ID NO: 3609869 - DNA, 25 bp, Homo sapien
caggtactcggtactggagcacgga

SEQ ID NO: 3609870 - DNA, 25 bp, Homo sapien
gggctacggcccctgtgcgtgccca

SEQ ID NO: 3609871 - DNA, 25 bp, Homo sapien
agcaacaagccccaaagagaaaact

SEQ ID NO: 3609872 - DNA, 25 bp, Homo sapien
caacaagccccaaagagaaaactcg

SEQ ID NO: 3609873 - DNA, 25 bp, Homo sapien
acaagccccaaagagaaaactcgtg

SEQ ID NO: 3609874 - DNA, 25 bp, Homo sapien
caagccccaaagagaaaactcgtga

SEQ ID NO: 3609875 - DNA, 25 bp, Homo sapien
cccgaccgcaagaatgcaggagcct

SEQ ID NO: 3609876 - DNA, 25 bp, Homo sapien
tcttctggagaccagtaacgctggc

SEQ ID NO: 3609877 - DNA, 25 bp, Homo sapien
taaaaggctaggtagcaaaggtgcc

SEQ ID NO: 3609878 - DNA, 25 bp, Homo sapien
ggcactggaaaaagaggattacgag

SEQ ID NO: 3609879 - DNA, 25 bp, Homo sapien
ggtgatcggcggttttgcccattct

SEQ ID NO: 3609880 - DNA, 25 bp, Homo sapien
tctagtctgggattgttgaacaggg

SEQ ID NO: 3609881 - DNA, 25 bp, Homo sapien
ctggagcctgcacagacaagtggca

SEQ ID NO: 3609882 - DNA, 25 bp, Homo sapien
agtggcattgcttggacaggcctga

SEQ ID NO: 3609883 - DNA, 25 bp, Homo sapien
cagcccgatcccaaaaatagcccca

SEQ ID NO: 3609884 - DNA, 25 bp, Homo sapien
cattttctcgtgttcacattggaac

SEQ ID NO: 3609885 - DNA, 25 bp, Homo sapien
aacatctgaaaccggccccagagcc

SEQ ID NO: 3609886 - DNA, 25 bp, Homo sapien
ctgttcccattttctcgtgttcaca

SEQ ID NO: 3609887 - DNA, 25 bp, Homo sapien
caggaataatgtcgggctcaggctc

SEQ ID NO: 3609888 - DNA, 25 bp, Homo sapien
tcaggaataatgtcgggctcaggct

SEQ ID NO: 3609889 - DNA, 25 bp, Homo sapien
ctcaggaataatgtcgggctcaggc

SEQ ID NO: 3609890 - DNA, 25 bp, Homo sapien
catcggaggtcagcacccgggcagt

SEQ ID NO: 3609891 - DNA, 25 bp, Homo sapien
ccctccccccatcggaggtcagcac

SEQ ID NO: 3609892 - DNA, 25 bp, Homo sapien
ttcccacggtgccatcccccttctg

SEQ ID NO: 3609893 - DNA, 25 bp, Homo sapien
ccccatcggaggtcagcacccgggc

SEQ ID NO: 3609894 - DNA, 25 bp, Homo sapien
cttcctcacccattctctccctgtc

SEQ ID NO: 3609895 - DNA, 25 bp, Homo sapien
caccaggaagacagggcctgagcat

SEQ ID NO: 3609896 - DNA, 25 bp, Homo sapien
caattcctggttcgtagtaggtcca

SEQ ID NO: 3609897 - DNA, 25 bp, Homo sapien
taggctagtacctgacccatggaaa

SEQ ID NO: 3609898 - DNA, 25 bp, Homo sapien
tacatgtcctatggagcagccacgc

SEQ ID NO: 3609899 - DNA, 25 bp, Homo sapien
tatgatctctttggcacaattcctg

SEQ ID NO: 3609900 - DNA, 25 bp, Homo sapien
gggattcggagctgagctctgggca

SEQ ID NO: 3609901 - DNA, 25 bp, Homo sapien
agcggaggttccaggttgggattcg

SEQ ID NO: 3609902 - DNA, 25 bp, Homo sapien
cagcggaggttccaggttgggattc

SEQ ID NO: 3609903 - DNA, 25 bp, Homo sapien
cccagcggaggttccaggttgggat

SEQ ID NO: 3609904 - DNA, 25 bp, Homo sapien
tgccacacagagcctgctgccgggt

SEQ ID NO: 3609905 - DNA, 25 bp, Homo sapien
cggcgccccccagcaacgcctccat

SEQ ID NO: 3609906 - DNA, 25 bp, Homo sapien
tgctgccgggttctgccggcgcccc

SEQ ID NO: 3609907 - DNA, 25 bp, Homo sapien
cctgctgccgggttctgccggcgcc

SEQ ID NO: 3609908 - DNA, 25 bp, Homo sapien
ggctggaaatcctgcagcccaccct

SEQ ID NO: 3609909 - DNA, 25 bp, Homo sapien
ggaaaaactgagcaggcagcaaggc

SEQ ID NO: 3609910 - DNA, 25 bp, Homo sapien
gcagcaaggcttggctggaaatcct

SEQ ID NO: 3609911 - DNA, 25 bp, Homo sapien
cactgccgccttccccgactggagg

SEQ ID NO: 3609912 - DNA, 25 bp, Homo sapien
gagtgtgcctcttgcgggaacagca

SEQ ID NO: 3609913 - DNA, 25 bp, Homo sapien
ggattcgcggaagaagaacactggc

SEQ ID NO: 3609914 - DNA, 25 bp, Homo sapien
tggcgacgacagtagagtgtgcctc

SEQ ID NO: 3609915 - DNA, 25 bp, Homo sapien
cggaagaagaacactggcgacgaca

SEQ ID NO: 3609916 - DNA, 25 bp, Homo sapien
ccttggtctggcagttctgcgtcct

SEQ ID NO: 3609917 - DNA, 25 bp, Homo sapien
tggcagttctgcgtcctgggaacat

SEQ ID NO: 3609918 - DNA, 25 bp, Homo sapien
gcagttctgcgtcctgggaacattt

SEQ ID NO: 3609919 - DNA, 25 bp, Homo sapien
gtctggcagttctgcgtcctgggaa

SEQ ID NO: 3609920 - DNA, 25 bp, Homo sapien
acatttggtgagcaccgcatcttac

SEQ ID NO: 3609921 - DNA, 25 bp, Homo sapien
cacttcccaatggaccaacatttgg

SEQ ID NO: 3609922 - DNA, 25 bp, Homo sapien
tctcaaggatagaggtgccaccact

SEQ ID NO: 3609923 - DNA, 25 bp, Homo sapien
tcctccaaccctgaatgactggtat

SEQ ID NO: 3609924 - DNA, 25 bp, Homo sapien
tccaaatccaatcctccaggactcc

SEQ ID NO: 3609925 - DNA, 25 bp, Homo sapien
ctccaaatccaatcctccaggactc

SEQ ID NO: 3609926 - DNA, 25 bp, Homo sapien
caaatccaatcctccaggactcccc

SEQ ID NO: 3609927 - DNA, 25 bp, Homo sapien
atccaatcctccaggactcccccat

SEQ ID NO: 3609928 - DNA, 25 bp, Homo sapien
tacatggtatctcatcaacaagagg

SEQ ID NO: 3609929 - DNA, 25 bp, Homo sapien
tgacatggccatgcagccaagtaga

SEQ ID NO: 3609930 - DNA, 25 bp, Homo sapien
cagcctagaaagagtgggtccaaga

SEQ ID NO: 3609931 - DNA, 25 bp, Homo sapien
gccacagtccagaaagaagtttgtt

SEQ ID NO: 3609932 - DNA, 25 bp, Homo sapien
tgcacctggtccctaaaatgggaga

SEQ ID NO: 3609933 - DNA, 25 bp, Homo sapien
aaagcatgggggatctgtgccaaag

SEQ ID NO: 3609934 - DNA, 25 bp, Homo sapien
gacatacaaaggtgctatccttggg

SEQ ID NO: 3609935 - DNA, 25 bp, Homo sapien
ttgggtcgcaatgagatcaccagtc

SEQ ID NO: 3609936 - DNA, 25 bp, Homo sapien
agctaccgtgtccagcctatagttt

SEQ ID NO: 3609937 - DNA, 25 bp, Homo sapien
gagctaccgtgtccagcctatagtt

SEQ ID NO: 3609938 - DNA, 25 bp, Homo sapien
ctcgcagactgggtggcgatcgggc

SEQ ID NO: 3609939 - DNA, 25 bp, Homo sapien
acctcgcagactgggtggcgatcgg

SEQ ID NO: 3609940 - DNA, 25 bp, Homo sapien
cctcacctcgcagactgggtggcga

SEQ ID NO: 3609941 - DNA, 25 bp, Homo sapien
cctcgcagactgggtggcgatcggg

SEQ ID NO: 3609942 - DNA, 25 bp, Homo sapien
gagcccatttggtagcttgatacta

SEQ ID NO: 3609943 - DNA, 25 bp, Homo sapien
tttaaggaaagctacccatgagccc

SEQ ID NO: 3609944 - DNA, 25 bp, Homo sapien
tgcactaactcccaccactaaaggg

SEQ ID NO: 3609945 - DNA, 25 bp, Homo sapien
tactactaattagcaggctgttagc

SEQ ID NO: 3609946 - DNA, 25 bp, Homo sapien
ctcacctcctgagtagctgggacta

SEQ ID NO: 3609947 - DNA, 25 bp, Homo sapien
caggtgcccaccaccatgcctggct

SEQ ID NO: 3609948 - DNA, 25 bp, Homo sapien
ttcaccccattctcttgcctcacct

SEQ ID NO: 3609949 - DNA, 25 bp, Homo sapien
accccattctcttgcctcacctcct

SEQ ID NO: 3609950 - DNA, 25 bp, Homo sapien
ttctagactgtaatgcattatgcag

SEQ ID NO: 3609951 - DNA, 25 bp, Homo sapien
tatgcagtttgggtgtccacactaa

SEQ ID NO: 3609952 - DNA, 25 bp, Homo sapien
gactatccaggttgtctatggaggg

SEQ ID NO: 3609953 - DNA, 25 bp, Homo sapien
gctgagtgaggctcggtctcagaaa

SEQ ID NO: 3609954 - DNA, 25 bp, Homo sapien
ccatttgacacaagccgaattccga

SEQ ID NO: 3609955 - DNA, 25 bp, Homo sapien
gctttaacttggtggtgtcattcac

SEQ ID NO: 3609956 - DNA, 25 bp, Homo sapien
tccgatgccagctgactacttggtg

SEQ ID NO: 3609957 - DNA, 25 bp, Homo sapien
gatgtcctgaagaggaagatgttga

SEQ ID NO: 3609958 - DNA, 25 bp, Homo sapien
tcaaagactaggctgacggtaaggc

SEQ ID NO: 3609959 - DNA, 25 bp, Homo sapien
cacacttcgaaaacccctggtggag

SEQ ID NO: 3609960 - DNA, 25 bp, Homo sapien
tcagcagcaggcagacgttgaatca

SEQ ID NO: 3609961 - DNA, 25 bp, Homo sapien
taggcagagccgaacttcagagtct

SEQ ID NO: 3609962 - DNA, 25 bp, Homo sapien
gcgattgagtttagttcgtggtccc

SEQ ID NO: 3609963 - DNA, 25 bp, Homo sapien
tttataggaaccacggcgagcacac

SEQ ID NO: 3609964 - DNA, 25 bp, Homo sapien
tcagcaacaacgctgcacgctgtgt

SEQ ID NO: 3609965 - DNA, 25 bp, Homo sapien
tccaaccgccgtactgatgagtgac

SEQ ID NO: 3609966 - DNA, 25 bp, Homo sapien
ctatgagcctcacgttgcggcgggc

SEQ ID NO: 3609967 - DNA, 25 bp, Homo sapien
cacagtgaggtggttaacgtaaagc

SEQ ID NO: 3609968 - DNA, 25 bp, Homo sapien
cagagttgcgtgtggcctatgagcc

SEQ ID NO: 3609969 - DNA, 25 bp, Homo sapien
tcaggtttcccgcttaaaaatgcgc

SEQ ID NO: 3609970 - DNA, 25 bp, Homo sapien
catatcagttagtgtaaccagttgg

SEQ ID NO: 3609971 - DNA, 25 bp, Homo sapien
acaggcataagaagtaagatttctc

SEQ ID NO: 3609972 - DNA, 25 bp, Homo sapien
cccagtttgtgggtcagtaaaaatg

SEQ ID NO: 3609973 - DNA, 25 bp, Homo sapien
gatttctcccatgcgaaattttgta

SEQ ID NO: 3609974 - DNA, 25 bp, Homo sapien
tgctgtggcttaacattcacagtga

SEQ ID NO: 3609975 - DNA, 25 bp, Homo sapien
gagccagtcgaacatgttccttctc

SEQ ID NO: 3609976 - DNA, 25 bp, Homo sapien
acaagtgcgtgtgtcttctgtcttc

SEQ ID NO: 3609977 - DNA, 25 bp, Homo sapien
agaaggctagtgatacgcggatctt

SEQ ID NO: 3609978 - DNA, 25 bp, Homo sapien
aagctggagtgcagtggtacgatct

SEQ ID NO: 3609979 - DNA, 25 bp, Homo sapien
cacaggccaccacacccaacctttt

SEQ ID NO: 3609980 - DNA, 25 bp, Homo sapien
aggcacaggccaccacacccaacct

SEQ ID NO: 3609981 - DNA, 25 bp, Homo sapien
agctggagtgcagtggtacgatctc

SEQ ID NO: 3609982 - DNA, 25 bp, Homo sapien
gaacctgggagttgatgagaaacca

SEQ ID NO: 3609983 - DNA, 25 bp, Homo sapien
ggatatattcaaggctctcagggaa

SEQ ID NO: 3609984 - DNA, 25 bp, Homo sapien
caattcggtaaggtgtggctcaagc

SEQ ID NO: 3609985 - DNA, 25 bp, Homo sapien
accatttgatgacaacctcctaggg

SEQ ID NO: 3609986 - DNA, 25 bp, Homo sapien
taatgcacgtttttgagacgaggga

SEQ ID NO: 3609987 - DNA, 25 bp, Homo sapien
caaaaaggacgtgtgtctgtacaaa

SEQ ID NO: 3609988 - DNA, 25 bp, Homo sapien
gagacctaatagctggattccatgt

SEQ ID NO: 3609989 - DNA, 25 bp, Homo sapien
gaaatgtgaatatagcctgtatgcc

SEQ ID NO: 3609990 - DNA, 25 bp, Homo sapien
cactacatatgtattggaatggcag

SEQ ID NO: 3609991 - DNA, 25 bp, Homo sapien
gaattattgatacgtacgacacaga

SEQ ID NO: 3609992 - DNA, 25 bp, Homo sapien
aacagtttgggatacacctaccaca

SEQ ID NO: 3609993 - DNA, 25 bp, Homo sapien
tcagaacagcttcacttgtagcagc

SEQ ID NO: 3609994 - DNA, 25 bp, Homo sapien
gtctgtttcctaagaaagacaatga

SEQ ID NO: 3609995 - DNA, 25 bp, Homo sapien
agtatgtctgtttcctaagaaagac

SEQ ID NO: 3609996 - DNA, 25 bp, Homo sapien
tctgtttcctaagaaagacaatgat

SEQ ID NO: 3609997 - DNA, 25 bp, Homo sapien
gtatgtctgtttcctaagaaagaca

SEQ ID NO: 3609998 - DNA, 25 bp, Homo sapien
gagtatgtctgtttcctaagaaaga

SEQ ID NO: 3609999 - DNA, 25 bp, Homo sapien
tgagtatgtctgtttcctaagaaag

SEQ ID NO: 3610000 - DNA, 25 bp, Homo sapien
gtctttcttaggaaacagacatact

SEQ ID NO: 3610001 - DNA, 25 bp, Homo sapien
atcattgtctttcttaggaaacaga

SEQ ID NO: 3610002 - DNA, 25 bp, Homo sapien
tgtctttcttaggaaacagacatac

SEQ ID NO: 3610003 - DNA, 25 bp, Homo sapien
tctttcttaggaaacagacatactc

SEQ ID NO: 3610004 - DNA, 25 bp, Homo sapien
tcattgtctttcttaggaaacagac

SEQ ID NO: 3610005 - DNA, 25 bp, Homo sapien
ctttcttaggaaacagacatactca

SEQ ID NO: 3610006 - DNA, 25 bp, Homo sapien
gtgagtaggaatgtgtgggctcatg

SEQ ID NO: 3610007 - DNA, 25 bp, Homo sapien
gagtaggaatgtgtgggctcatggt

SEQ ID NO: 3610008 - DNA, 25 bp, Homo sapien
gtgggctcatggtgtaggaggtaga

SEQ ID NO: 3610009 - DNA, 25 bp, Homo sapien
gctcatggtgtaggaggtagataca

SEQ ID NO: 3610010 - DNA, 25 bp, Homo sapien
agtaggaatgtgtgggctcatggtg

SEQ ID NO: 3610011 - DNA, 25 bp, Homo sapien
tgagtaggaatgtgtgggctcatgg

SEQ ID NO: 3610012 - DNA, 25 bp, Homo sapien
caccatgagcccacacattcctact

SEQ ID NO: 3610013 - DNA, 25 bp, Homo sapien
ccatgagcccacacattcctactca

SEQ ID NO: 3610014 - DNA, 25 bp, Homo sapien
tgtatctacctcctacaccatgagc

SEQ ID NO: 3610015 - DNA, 25 bp, Homo sapien
accatgagcccacacattcctactc

SEQ ID NO: 3610016 - DNA, 25 bp, Homo sapien
tctacctcctacaccatgagcccac

SEQ ID NO: 3610017 - DNA, 25 bp, Homo sapien
catgagcccacacattcctactcac

SEQ ID NO: 3610018 - DNA, 25 bp, Homo sapien
tacaaagctttatggttctgattct

SEQ ID NO: 3610019 - DNA, 25 bp, Homo sapien
ggaggtagatacaaagctttatggt

SEQ ID NO: 3610020 - DNA, 25 bp, Homo sapien
gagtaggaatgtgtgggctcatggt

SEQ ID NO: 3610021 - DNA, 25 bp, Homo sapien
gctcatggtgtaggaggtagataca

SEQ ID NO: 3610022 - DNA, 25 bp, Homo sapien
tggtgtaggaggtagatacaaagct

SEQ ID NO: 3610023 - DNA, 25 bp, Homo sapien
ggtagatacaaagctttatggttct

SEQ ID NO: 3610024 - DNA, 25 bp, Homo sapien
caccatgagcccacacattcctact

SEQ ID NO: 3610025 - DNA, 25 bp, Homo sapien
gaaccataaagctttgtatctacct

SEQ ID NO: 3610026 - DNA, 25 bp, Homo sapien
agaatcagaaccataaagctttgta

SEQ ID NO: 3610027 - DNA, 25 bp, Homo sapien
tgtatctacctcctacaccatgagc

SEQ ID NO: 3610028 - DNA, 25 bp, Homo sapien
attaaaagaatcagaaccataaagc

SEQ ID NO: 3610029 - DNA, 25 bp, Homo sapien
taaagctttgtatctacctcctaca

SEQ ID NO: 3610030 - DNA, 25 bp, Homo sapien
tatcaaactggtttcaaagcacaga

SEQ ID NO: 3610031 - DNA, 25 bp, Homo sapien
gcacagagctcaagtaatttacacc

SEQ ID NO: 3610032 - DNA, 25 bp, Homo sapien
tccagctgctggtgaagatgcatga

SEQ ID NO: 3610033 - DNA, 25 bp, Homo sapien
ccaagggtggagatgctccagctgc

SEQ ID NO: 3610034 - DNA, 25 bp, Homo sapien
gagatgctccagctgctggtgaaga

SEQ ID NO: 3610035 - DNA, 25 bp, Homo sapien
ttacaccagaaataccaagggtgga

SEQ ID NO: 3610036 - DNA, 25 bp, Homo sapien
gcagctggagcatctccacccttgg

SEQ ID NO: 3610037 - DNA, 25 bp, Homo sapien
tcatgcatcttcaccagcagctgga

SEQ ID NO: 3610038 - DNA, 25 bp, Homo sapien
tcttcaccagcagctggagcatctc

SEQ ID NO: 3610039 - DNA, 25 bp, Homo sapien
cacccttggtatttctggtgtaaat

SEQ ID NO: 3610040 - DNA, 25 bp, Homo sapien
tctgtgctttgaaaccagtttgata

SEQ ID NO: 3610041 - DNA, 25 bp, Homo sapien
ggtgtaaattacttgagctctgtgc

SEQ ID NO: 3610042 - DNA, 25 bp, Homo sapien
catctcatcgtgctattctctcccc

SEQ ID NO: 3610043 - DNA, 25 bp, Homo sapien
ctcatcgtgctattctctcccccta

SEQ ID NO: 3610044 - DNA, 25 bp, Homo sapien
tcatcgtgctattctctccccctag

SEQ ID NO: 3610045 - DNA, 25 bp, Homo sapien
tctcatcgtgctattctctccccct

SEQ ID NO: 3610046 - DNA, 25 bp, Homo sapien
atctcatcgtgctattctctccccc

SEQ ID NO: 3610047 - DNA, 25 bp, Homo sapien
ctagggggagagaatagcacgatga

SEQ ID NO: 3610048 - DNA, 25 bp, Homo sapien
ggggagagaatagcacgatgagatg

SEQ ID NO: 3610049 - DNA, 25 bp, Homo sapien
tagggggagagaatagcacgatgag

SEQ ID NO: 3610050 - DNA, 25 bp, Homo sapien
agggggagagaatagcacgatgaga

SEQ ID NO: 3610051 - DNA, 25 bp, Homo sapien
gggggagagaatagcacgatgagat

SEQ ID NO: 3610052 - DNA, 25 bp, Homo sapien
cccaaagcagtgggattataagcat

SEQ ID NO: 3610053 - DNA, 25 bp, Homo sapien
agtttctattgtagcatctgttaag

SEQ ID NO: 3610054 - DNA, 25 bp, Homo sapien
gtctccacctcccaaagcagtggga

SEQ ID NO: 3610055 - DNA, 25 bp, Homo sapien
ggctggtgtgcaactccttacctca

SEQ ID NO: 3610056 - DNA, 25 bp, Homo sapien
aaccttactagtttctattgtagca

SEQ ID NO: 3610057 - DNA, 25 bp, Homo sapien
cgcgcccagccaaaaaccttactag

SEQ ID NO: 3610058 - DNA, 25 bp, Homo sapien
cttaacagatgctacaatagaaact

SEQ ID NO: 3610059 - DNA, 25 bp, Homo sapien
gatgctacaatagaaactagtaagg

SEQ ID NO: 3610060 - DNA, 25 bp, Homo sapien
tgaggtaaggagttgcacaccagcc

SEQ ID NO: 3610061 - DNA, 25 bp, Homo sapien
ctagtaaggtttttggctgggcgcg

SEQ ID NO: 3610062 - DNA, 25 bp, Homo sapien
tcccactgctttgggaggtggagac

SEQ ID NO: 3610063 - DNA, 25 bp, Homo sapien
gggaggtggagacgggcagatagct

SEQ ID NO: 3610064 - DNA, 25 bp, Homo sapien
gagagactgaagattcgaggctccc

SEQ ID NO: 3610065 - DNA, 25 bp, Homo sapien
ctgagagactgaagattcgaggctc

SEQ ID NO: 3610066 - DNA, 25 bp, Homo sapien
gaagattcgaggctccctggccagg

SEQ ID NO: 3610067 - DNA, 25 bp, Homo sapien
gcccttcaggagctccttagtaaag

SEQ ID NO: 3610068 - DNA, 25 bp, Homo sapien
gagactgaagattcgaggctccctg

SEQ ID NO: 3610069 - DNA, 25 bp, Homo sapien
tctgagagactgaagattcgaggct

SEQ ID NO: 3610070 - DNA, 25 bp, Homo sapien
cagggagcctcgaatcttcagtctc

SEQ ID NO: 3610071 - DNA, 25 bp, Homo sapien
ctttactaaggagctcctgaagggc

SEQ ID NO: 3610072 - DNA, 25 bp, Homo sapien
ggagcctcgaatcttcagtctctca

SEQ ID NO: 3610073 - DNA, 25 bp, Homo sapien
gagcctcgaatcttcagtctctcag

SEQ ID NO: 3610074 - DNA, 25 bp, Homo sapien
gggagcctcgaatcttcagtctctc

SEQ ID NO: 3610075 - DNA, 25 bp, Homo sapien
cctggccagggagcctcgaatcttc

SEQ ID NO: 3610076 - DNA, 25 bp, Homo sapien
tctgtaaggaagttcccaactataa

SEQ ID NO: 3610077 - DNA, 25 bp, Homo sapien
cgggacaagctcaataacttagtct

SEQ ID NO: 3610078 - DNA, 25 bp, Homo sapien
caaaggcaaagttcgggacaagctc

SEQ ID NO: 3610079 - DNA, 25 bp, Homo sapien
gataaactctgtaaggaagttccca

SEQ ID NO: 3610080 - DNA, 25 bp, Homo sapien
cttgtttgacaaagctacctatgat

SEQ ID NO: 3610081 - DNA, 25 bp, Homo sapien
caaagctacctatgataaactctgt

SEQ ID NO: 3610082 - DNA, 25 bp, Homo sapien
tatcataggtagctttgtcaaacaa

SEQ ID NO: 3610083 - DNA, 25 bp, Homo sapien
gggaacttccttacagagtttatca

SEQ ID NO: 3610084 - DNA, 25 bp, Homo sapien
ccttacagagtttatcataggtagc

SEQ ID NO: 3610085 - DNA, 25 bp, Homo sapien
gactaagttattgagcttgtcccga

SEQ ID NO: 3610086 - DNA, 25 bp, Homo sapien
gagcttgtcccgaactttgcctttg

SEQ ID NO: 3610087 - DNA, 25 bp, Homo sapien
tatagttgggaacttccttacagag

SEQ ID NO: 3610088 - DNA, 25 bp, Homo sapien
ttatccttgataacggtggaacaga

SEQ ID NO: 3610089 - DNA, 25 bp, Homo sapien
catgaaaatgggtctgttgtgcgaa

SEQ ID NO: 3610090 - DNA, 25 bp, Homo sapien
gtggaacagatttctctgacgcaga

SEQ ID NO: 3610091 - DNA, 25 bp, Homo sapien
ctgacgcagattactcgagagggaa

SEQ ID NO: 3610092 - DNA, 25 bp, Homo sapien
ttgtgcgaagtgtctgccgctgtgc

SEQ ID NO: 3610093 - DNA, 25 bp, Homo sapien
gctcggcccctgtttgaaggccaaa

SEQ ID NO: 3610094 - DNA, 25 bp, Homo sapien
ttccctctcgagtaatctgcgtcag

SEQ ID NO: 3610095 - DNA, 25 bp, Homo sapien
tctgcgtcagagaaatctgttccac

SEQ ID NO: 3610096 - DNA, 25 bp, Homo sapien
tatcaaggataaattacacattact

SEQ ID NO: 3610097 - DNA, 25 bp, Homo sapien
gcacaacagacccattttcatgatc

SEQ ID NO: 3610098 - DNA, 25 bp, Homo sapien
agcggcagacacttcgcacaacaga

SEQ ID NO: 3610099 - DNA, 25 bp, Homo sapien
gaaatctgttccaccgttatcaagg

SEQ ID NO: 3610100 - DNA, 25 bp, Homo sapien
tcctctagtaataggtaacttgtat

SEQ ID NO: 3610101 - DNA, 25 bp, Homo sapien
caccactcgttctttttcccattag

SEQ ID NO: 3610102 - DNA, 25 bp, Homo sapien
caggtgtagatttctagagtcaaaa

SEQ ID NO: 3610103 - DNA, 25 bp, Homo sapien
gagagtttatcttcccgtcaccact

SEQ ID NO: 3610104 - DNA, 25 bp, Homo sapien
gtaactctctcgtaatcctctagta

SEQ ID NO: 3610105 - DNA, 25 bp, Homo sapien
aaatgtgagagtttatcttcccgtc

SEQ ID NO: 3610106 - DNA, 25 bp, Homo sapien
gacgggaagataaactctcacattt

SEQ ID NO: 3610107 - DNA, 25 bp, Homo sapien
tacaagttacctattactagaggat

SEQ ID NO: 3610108 - DNA, 25 bp, Homo sapien
ttttgactctagaaatctacacctg

SEQ ID NO: 3610109 - DNA, 25 bp, Homo sapien
tactagaggattacgagagagttac

SEQ ID NO: 3610110 - DNA, 25 bp, Homo sapien
agtggtgacgggaagataaactctc

SEQ ID NO: 3610111 - DNA, 25 bp, Homo sapien
ctaatgggaaaaagaacgagtggtg

SEQ ID NO: 3610112 - DNA, 25 bp, Homo sapien
gaaataagacctctctgaaagagac

SEQ ID NO: 3610113 - DNA, 25 bp, Homo sapien
aagacctctctgaaagagactaggg

SEQ ID NO: 3610114 - DNA, 25 bp, Homo sapien
taagacctctctgaaagagactagg

SEQ ID NO: 3610115 - DNA, 25 bp, Homo sapien
agaaataagacctctctgaaagaga

SEQ ID NO: 3610116 - DNA, 25 bp, Homo sapien
tagaaataagacctctctgaaagag

SEQ ID NO: 3610117 - DNA, 25 bp, Homo sapien
gtagaaataagacctctctgaaaga

SEQ ID NO: 3610118 - DNA, 25 bp, Homo sapien
ctctttcagagaggtcttatttcta

SEQ ID NO: 3610119 - DNA, 25 bp, Homo sapien
tctttcagagaggtcttatttctac

SEQ ID NO: 3610120 - DNA, 25 bp, Homo sapien
ccctagtctctttcagagaggtctt

SEQ ID NO: 3610121 - DNA, 25 bp, Homo sapien
cctagtctctttcagagaggtctta

SEQ ID NO: 3610122 - DNA, 25 bp, Homo sapien
tctctttcagagaggtcttatttct

SEQ ID NO: 3610123 - DNA, 25 bp, Homo sapien
gtctctttcagagaggtcttatttc

SEQ ID NO: 3610124 - DNA, 25 bp, Homo sapien
cgcctaaggacgacaagaagaagaa

SEQ ID NO: 3610125 - DNA, 25 bp, Homo sapien
ccgcctaaggacgacaagaagaaga

SEQ ID NO: 3610126 - DNA, 25 bp, Homo sapien
tcttcttcttgtcgtccttaggcgg

SEQ ID NO: 3610127 - DNA, 25 bp, Homo sapien
ttcttcttcttgtcgtccttaggcg

SEQ ID NO: 3610128 - DNA, 25 bp, Homo sapien
gacgacaagaagaagaaggacgctg

SEQ ID NO: 3610129 - DNA, 25 bp, Homo sapien
agaaggacgctggaaagtcggccaa

SEQ ID NO: 3610130 - DNA, 25 bp, Homo sapien
ggacgctggaaagtcggccaagaaa

SEQ ID NO: 3610131 - DNA, 25 bp, Homo sapien
gcctaaggacgacaagaagaagaag

SEQ ID NO: 3610132 - DNA, 25 bp, Homo sapien
cgcctaaggacgacaagaagaagaa

SEQ ID NO: 3610133 - DNA, 25 bp, Homo sapien
ccgcctaaggacgacaagaagaaga

SEQ ID NO: 3610134 - DNA, 25 bp, Homo sapien
cagcgtccttcttcttcttgtcgtc

SEQ ID NO: 3610135 - DNA, 25 bp, Homo sapien
cttcttcttcttgtcgtccttaggc

SEQ ID NO: 3610136 - DNA, 25 bp, Homo sapien
tcttcttcttgtcgtccttaggcgg

SEQ ID NO: 3610137 - DNA, 25 bp, Homo sapien
ttggccgactttccagcgtccttct

SEQ ID NO: 3610138 - DNA, 25 bp, Homo sapien
tttcttggccgactttccagcgtcc

SEQ ID NO: 3610139 - DNA, 25 bp, Homo sapien
ttcttcttcttgtcgtccttaggcg

SEQ ID NO: 3610140 - DNA, 25 bp, Homo sapien
tgaggacctggttgcattcccgctg

SEQ ID NO: 3610141 - DNA, 25 bp, Homo sapien
cggcgttcttgggtttgaggactca

SEQ ID NO: 3610142 - DNA, 25 bp, Homo sapien
agagccttcggcgggagcgctcctt

SEQ ID NO: 3610143 - DNA, 25 bp, Homo sapien
tttggcgctatttgaggacctggtt

SEQ ID NO: 3610144 - DNA, 25 bp, Homo sapien
cggttattgcttggcccatgtgctc

SEQ ID NO: 3610145 - DNA, 25 bp, Homo sapien
cgggcgcggttattgcttggcccat

SEQ ID NO: 3610146 - DNA, 25 bp, Homo sapien
ggcagcgggaatgcaaccaggtcct

SEQ ID NO: 3610147 - DNA, 25 bp, Homo sapien
gagcacatgggccaagcaataaccg

SEQ ID NO: 3610148 - DNA, 25 bp, Homo sapien
gcgggaatgcaaccaggtcctcaaa

SEQ ID NO: 3610149 - DNA, 25 bp, Homo sapien
aaccaggtcctcaaatagcgccaaa

SEQ ID NO: 3610150 - DNA, 25 bp, Homo sapien
acatgggccaagcaataaccgcgcc

SEQ ID NO: 3610151 - DNA, 25 bp, Homo sapien
tgagtcctcaaacccaagaacgccg

SEQ ID NO: 3610152 - DNA, 25 bp, Homo sapien
cggtgtctgctgctattctccgagc

SEQ ID NO: 3610153 - DNA, 25 bp, Homo sapien
tgtctgctgctattctccgagcttc

SEQ ID NO: 3610154 - DNA, 25 bp, Homo sapien
ctgctgctattctccgagcttcgca

SEQ ID NO: 3610155 - DNA, 25 bp, Homo sapien
gtctgctgctattctccgagcttcg

SEQ ID NO: 3610156 - DNA, 25 bp, Homo sapien
ggtgtctgctgctattctccgagct

SEQ ID NO: 3610157 - DNA, 25 bp, Homo sapien
cgaggctgcggtgtctgctgctatt

SEQ ID NO: 3610158 - DNA, 25 bp, Homo sapien
cgaagctcggagaatagcagcagac

SEQ ID NO: 3610159 - DNA, 25 bp, Homo sapien
tgcgaagctcggagaatagcagcag

SEQ ID NO: 3610160 - DNA, 25 bp, Homo sapien
gcgaagctcggagaatagcagcaga

SEQ ID NO: 3610161 - DNA, 25 bp, Homo sapien
agctcggagaatagcagcagacacc

SEQ ID NO: 3610162 - DNA, 25 bp, Homo sapien
gaagctcggagaatagcagcagaca

SEQ ID NO: 3610163 - DNA, 25 bp, Homo sapien
gctcggagaatagcagcagacaccg

SEQ ID NO: 3610164 - DNA, 25 bp, Homo sapien
cagactccggcagtatttaggcggt

SEQ ID NO: 3610165 - DNA, 25 bp, Homo sapien
tagtatgcgtcacaactagcgcaga

SEQ ID NO: 3610166 - DNA, 25 bp, Homo sapien
agttagctgccgagacctggtggat

SEQ ID NO: 3610167 - DNA, 25 bp, Homo sapien
tcagtgcaggaaaacagcgctatag

SEQ ID NO: 3610168 - DNA, 25 bp, Homo sapien
taagtagtgccggaaagttagctgc

SEQ ID NO: 3610169 - DNA, 25 bp, Homo sapien
tttttgggcccgtttctgagcagcg

SEQ ID NO: 3610170 - DNA, 25 bp, Homo sapien
tacttatgcccgagcgtgtcgctcc

SEQ ID NO: 3610171 - DNA, 25 bp, Homo sapien
catactatagcgctgttttcctgca

SEQ ID NO: 3610172 - DNA, 25 bp, Homo sapien
caaaaaccaccgtccgctgtgagta

SEQ ID NO: 3610173 - DNA, 25 bp, Homo sapien
gataaacgaaaagcaatccaccagg

SEQ ID NO: 3610174 - DNA, 25 bp, Homo sapien
aaaggaagcgctgctcagaaacggg

SEQ ID NO: 3610175 - DNA, 25 bp, Homo sapien
taaatactgccggagtctgcgctag

SEQ ID NO: 3610176 - DNA, 25 bp, Homo sapien
tatttgctccagtgtctacgctttg

SEQ ID NO: 3610177 - DNA, 25 bp, Homo sapien
tgccacccagcatgttcagcagagg

SEQ ID NO: 3610178 - DNA, 25 bp, Homo sapien
ggtctctctccagggatcaagtttg

SEQ ID NO: 3610179 - DNA, 25 bp, Homo sapien
tcatcggtagattcaaagtcttgcc

SEQ ID NO: 3610180 - DNA, 25 bp, Homo sapien
atggtgccatcacggctcaccacaa

SEQ ID NO: 3610181 - DNA, 25 bp, Homo sapien
cctctgccttccgggttcaggcgat

SEQ ID NO: 3610182 - DNA, 25 bp, Homo sapien
ggaatgcaatggtgccatcacggct

SEQ ID NO: 3610183 - DNA, 25 bp, Homo sapien
ttcaggcgattcttttgtctcagcc

SEQ ID NO: 3610184 - DNA, 25 bp, Homo sapien
gaggcatgagttttaaaggagtcca

SEQ ID NO: 3610185 - DNA, 25 bp, Homo sapien
ccccattccagggaaatgaagtctt

SEQ ID NO: 3610186 - DNA, 25 bp, Homo sapien
tgtccacaacccaatagctttatct

SEQ ID NO: 3610187 - DNA, 25 bp, Homo sapien
gagcaggtattgacaatatttccca

SEQ ID NO: 3610188 - DNA, 25 bp, Homo sapien
cagggatagcctcacttcaggtggg

SEQ ID NO: 3610189 - DNA, 25 bp, Homo sapien
tgaggtattggcaacagcagtcacc

SEQ ID NO: 3610190 - DNA, 25 bp, Homo sapien
gagctaacggagtctaaggccaaag

SEQ ID NO: 3610191 - DNA, 25 bp, Homo sapien
gatggtgctccggaacctggactct

SEQ ID NO: 3610192 - DNA, 25 bp, Homo sapien
cttggcaatggtgctgaagggcagc

SEQ ID NO: 3610193 - DNA, 25 bp, Homo sapien
catcttggtgcggatgtttcgtagg

SEQ ID NO: 3610194 - DNA, 25 bp, Homo sapien
gtgctggccgcacaaatcacttcag

SEQ ID NO: 3610195 - DNA, 25 bp, Homo sapien
ttcttggacactcggcccatcttgg

SEQ ID NO: 3610196 - DNA, 25 bp, Homo sapien
aagggaagaacctaagccagtggtg

SEQ ID NO: 3610197 - DNA, 25 bp, Homo sapien
gggaagaacctaagccagtggtgct

SEQ ID NO: 3610198 - DNA, 25 bp, Homo sapien
aagaacctaagccagtggtgctagc

SEQ ID NO: 3610199 - DNA, 25 bp, Homo sapien
acctaagccagtggtgctagctcca

SEQ ID NO: 3610200 - DNA, 25 bp, Homo sapien
ggcactctcgttggctatgactcca

SEQ ID NO: 3610201 - DNA, 25 bp, Homo sapien
ccacaatggcgtgggaggtgccaca

SEQ ID NO: 3610202 - DNA, 25 bp, Homo sapien
tacagctcccaataccaggatccag

SEQ ID NO: 3610203 - DNA, 25 bp, Homo sapien
gggccatacgaggagaaaccaaata

SEQ ID NO: 3610204 - DNA, 25 bp, Homo sapien
catgctctgtaaagcctgtgagctc

SEQ ID NO: 3610205 - DNA, 25 bp, Homo sapien
tgtgagctccgcgagagggtgaaga

SEQ ID NO: 3610206 - DNA, 25 bp, Homo sapien
agcctgtgagctccgcgagagggtg

SEQ ID NO: 3610207 - DNA, 25 bp, Homo sapien
tcatgctctgtaaagcctgtgagct

SEQ ID NO: 3610208 - DNA, 25 bp, Homo sapien
catggacactgtcatgccagccatc

SEQ ID NO: 3610209 - DNA, 25 bp, Homo sapien
catgaacagcaacaggccatggcga

SEQ ID NO: 3610210 - DNA, 25 bp, Homo sapien
gccagccatcatgaacagcaacagg

SEQ ID NO: 3610211 - DNA, 25 bp, Homo sapien
tcactggtcactgttacccggaaga

SEQ ID NO: 3610212 - DNA, 25 bp, Homo sapien
tgtcccagccacgccgtgaagactg

SEQ ID NO: 3610213 - DNA, 25 bp, Homo sapien
ccagccacgccgtgaagactgaaag

SEQ ID NO: 3610214 - DNA, 25 bp, Homo sapien
tcccagccacgccgtgaagactgaa

SEQ ID NO: 3610215 - DNA, 25 bp, Homo sapien
cagccacgccgtgaagactgaaagg

SEQ ID NO: 3610216 - DNA, 25 bp, Homo sapien
ttccagggcactcatgtaggagcta

SEQ ID NO: 3610217 - DNA, 25 bp, Homo sapien
aggtagccagctgcgatgctgccta

SEQ ID NO: 3610218 - DNA, 25 bp, Homo sapien
tccagggcactcatgtaggagctac

SEQ ID NO: 3610219 - DNA, 25 bp, Homo sapien
agctgcgatgctgcctacaaggccc

SEQ ID NO: 3610220 - DNA, 25 bp, Homo sapien
cagcaggtctttactccaaacacca

SEQ ID NO: 3610221 - DNA, 25 bp, Homo sapien
tacaagggctgactgtcctttctcc

SEQ ID NO: 3610222 - DNA, 25 bp, Homo sapien
gtacagcaggtctttactccaaaca

SEQ ID NO: 3610223 - DNA, 25 bp, Homo sapien
cctggataaggaagaactggcccca

SEQ ID NO: 3610224 - DNA, 25 bp, Homo sapien
cggagtccaacatcagcaggttcat

SEQ ID NO: 3610225 - DNA, 25 bp, Homo sapien
gtccaggttgcggagtccaacatca

SEQ ID NO: 3610226 - DNA, 25 bp, Homo sapien
tcagcaggttcattgtggatgagca

SEQ ID NO: 3610227 - DNA, 25 bp, Homo sapien
ggttgcggagtccaacatcagcagg

SEQ ID NO: 3610228 - DNA, 25 bp, Homo sapien
gccccagatagggccagcgtgctgc

SEQ ID NO: 3610229 - DNA, 25 bp, Homo sapien
cccagatagggccagcgtgctgcgc

SEQ ID NO: 3610230 - DNA, 25 bp, Homo sapien
cagatagggccagcgtgctgcgcca

SEQ ID NO: 3610231 - DNA, 25 bp, Homo sapien
agatagggccagcgtgctgcgccag

SEQ ID NO: 3610232 - DNA, 25 bp, Homo sapien
gttcatgctggttgacaggatggcc

SEQ ID NO: 3610233 - DNA, 25 bp, Homo sapien
ggttgccaggatagggcccagccct

SEQ ID NO: 3610234 - DNA, 25 bp, Homo sapien
ctccagccaggttcatgctggttga

SEQ ID NO: 3610235 - DNA, 25 bp, Homo sapien
atggttgccaggatagggcccagcc

SEQ ID NO: 3610236 - DNA, 25 bp, Homo sapien
gtgccaaactgagatggctcaaacc

SEQ ID NO: 3610237 - DNA, 25 bp, Homo sapien
tgccaaactgagatggctcaaacca

SEQ ID NO: 3610238 - DNA, 25 bp, Homo sapien
aagtgccaaactgagatggctcaaa

SEQ ID NO: 3610239 - DNA, 25 bp, Homo sapien
caagtgccaaactgagatggctcaa

SEQ ID NO: 3610240 - DNA, 25 bp, Homo sapien
gctctttaggcatcctctatgacaa

SEQ ID NO: 3610241 - DNA, 25 bp, Homo sapien
tgggtaagaaagggcgctcccacat

SEQ ID NO: 3610242 - DNA, 25 bp, Homo sapien
tgtccagcctactgcccatgttgag

SEQ ID NO: 3610243 - DNA, 25 bp, Homo sapien
tctatgacaatccaaacaggctctt

SEQ ID NO: 3610244 - DNA, 25 bp, Homo sapien
cctgggccaggccattaaggaacca

SEQ ID NO: 3610245 - DNA, 25 bp, Homo sapien
gcaaagacaggtactgtggagctcc

SEQ ID NO: 3610246 - DNA, 25 bp, Homo sapien
agcgagcactcatctggtcagacag

SEQ ID NO: 3610247 - DNA, 25 bp, Homo sapien
gagctccaggcaaagaatatgttga

SEQ ID NO: 3610248 - DNA, 25 bp, Homo sapien
ctgccgactggctgctggtgatgaa

SEQ ID NO: 3610249 - DNA, 25 bp, Homo sapien
tgccgactggctgctggtgatgaac

SEQ ID NO: 3610250 - DNA, 25 bp, Homo sapien
gccgactggctgctggtgatgaacc

SEQ ID NO: 3610251 - DNA, 25 bp, Homo sapien
gattctcagctacagttgtcaggga

SEQ ID NO: 3610252 - DNA, 25 bp, Homo sapien
ccctccctgggatttgcatatggga

SEQ ID NO: 3610253 - DNA, 25 bp, Homo sapien
tgtgctgcaatctgacactcatggg

SEQ ID NO: 3610254 - DNA, 25 bp, Homo sapien
ggtgagacaggttacttcccagagg

SEQ ID NO: 3610255 - DNA, 25 bp, Homo sapien
cagtcccgggcctctagcagttctg

SEQ ID NO: 3610256 - DNA, 25 bp, Homo sapien
aagggctcaggattggagtcaggga

SEQ ID NO: 3610257 - DNA, 25 bp, Homo sapien
caaagggctcaggattggagtcagg

SEQ ID NO: 3610258 - DNA, 25 bp, Homo sapien
ccgggcctctagcagttctgttgct

SEQ ID NO: 3610259 - DNA, 25 bp, Homo sapien
agaagcccctcaaacactctcggaa

SEQ ID NO: 3610260 - DNA, 25 bp, Homo sapien
caggccacatgaagtcgttgtgcca

SEQ ID NO: 3610261 - DNA, 25 bp, Homo sapien
caactttttagttcccagtgctcac

SEQ ID NO: 3610262 - DNA, 25 bp, Homo sapien
tgaagggtagcatgccaggccacat

SEQ ID NO: 3610263 - DNA, 25 bp, Homo sapien
caatgatggcatgacaaaggagaag

SEQ ID NO: 3610264 - DNA, 25 bp, Homo sapien
tccttgtccaaagggatctcttcca

SEQ ID NO: 3610265 - DNA, 25 bp, Homo sapien
agtgcgataatagccatagccctgg

SEQ ID NO: 3610266 - DNA, 25 bp, Homo sapien
ttgaagtaatacaggctgtagcccc

SEQ ID NO: 3610267 - DNA, 25 bp, Homo sapien
gccgctctcacagttcccagatctg

SEQ ID NO: 3610268 - DNA, 25 bp, Homo sapien
ctttatagccgccttctggacaatc

SEQ ID NO: 3610269 - DNA, 25 bp, Homo sapien
gaccacagttcctgcttgccgctct

SEQ ID NO: 3610270 - DNA, 25 bp, Homo sapien
ctggacaatcattaagcctggggag

SEQ ID NO: 3610271 - DNA, 25 bp, Homo sapien
tccgtggaactctcaatacttagca

SEQ ID NO: 3610272 - DNA, 25 bp, Homo sapien
gttcaggtcccacggtgtcacacag

SEQ ID NO: 3610273 - DNA, 25 bp, Homo sapien
taacttactagttgacaggcactgc

SEQ ID NO: 3610274 - DNA, 25 bp, Homo sapien
tagagagggcctcaatccgtggaac

SEQ ID NO: 3610275 - DNA, 25 bp, Homo sapien
agtctgggcttccttcgggctagct

SEQ ID NO: 3610276 - DNA, 25 bp, Homo sapien
tctgggcttccttcgggctagctgg

SEQ ID NO: 3610277 - DNA, 25 bp, Homo sapien
tgggcttccttcgggctagctgggg

SEQ ID NO: 3610278 - DNA, 25 bp, Homo sapien
gtctgggcttccttcgggctagctg

SEQ ID NO: 3610279 - DNA, 25 bp, Homo sapien
tgggcagctcgtgggcgggaaggtg

SEQ ID NO: 3610280 - DNA, 25 bp, Homo sapien
tggcaggggccgcaagcagagggac

SEQ ID NO: 3610281 - DNA, 25 bp, Homo sapien
actgggcagctcgtgggcgggaagg

SEQ ID NO: 3610282 - DNA, 25 bp, Homo sapien
ctgtgggacgttggcaggggccgca

SEQ ID NO: 3610283 - DNA, 25 bp, Homo sapien
gcgaccgcacgtattctcccggagg

SEQ ID NO: 3610284 - DNA, 25 bp, Homo sapien
tgccccggcttttccgctcaattgg

SEQ ID NO: 3610285 - DNA, 25 bp, Homo sapien
caattgggaaagcaactggagcaga

SEQ ID NO: 3610286 - DNA, 25 bp, Homo sapien
agcagaaggcgtaggcgcacgcgga

SEQ ID NO: 3610287 - DNA, 25 bp, Homo sapien
gaggcggcgggctcgtggcacctgc

SEQ ID NO: 3610288 - DNA, 25 bp, Homo sapien
cggcgggctcgtggcacctgcccag

SEQ ID NO: 3610289 - DNA, 25 bp, Homo sapien
aggcggcgggctcgtggcacctgcc

SEQ ID NO: 3610290 - DNA, 25 bp, Homo sapien
gcggcgggctcgtggcacctgccca

SEQ ID NO: 3610291 - DNA, 25 bp, Homo sapien
ggttcgccaacaatggctccccaag

SEQ ID NO: 3610292 - DNA, 25 bp, Homo sapien
ggtggccccaagacccatgaattgt

SEQ ID NO: 3610293 - DNA, 25 bp, Homo sapien
acacgctactgtgcggctgggaacc

SEQ ID NO: 3610294 - DNA, 25 bp, Homo sapien
gaccacaggactggcgcgatagaaa

SEQ ID NO: 3610295 - DNA, 25 bp, Homo sapien
gctagcgaaggctgcgcaagcgcgg

SEQ ID NO: 3610296 - DNA, 25 bp, Homo sapien
gctgcttcgcttgccggccagtgga

SEQ ID NO: 3610297 - DNA, 25 bp, Homo sapien
gccagtggagttccccgccccacat

SEQ ID NO: 3610298 - DNA, 25 bp, Homo sapien
acagaggcgggagcccgaataggac

SEQ ID NO: 3610299 - DNA, 25 bp, Homo sapien
cgaacgagcatagcgccccttaggg

SEQ ID NO: 3610300 - DNA, 25 bp, Homo sapien
cgctggtcacgctgctccttggacg

SEQ ID NO: 3610301 - DNA, 25 bp, Homo sapien
ctgctccttggacgaacgagcatag

SEQ ID NO: 3610302 - DNA, 25 bp, Homo sapien
tccttggacgaacgagcatagcgcc

SEQ ID NO: 3610303 - DNA, 25 bp, Homo sapien
ctacagacggaatactggaggacgg

SEQ ID NO: 3610304 - DNA, 25 bp, Homo sapien
ccccaacctagcagagtgatgcaca

SEQ ID NO: 3610305 - DNA, 25 bp, Homo sapien
caggatcttgggatagggactcaca

SEQ ID NO: 3610306 - DNA, 25 bp, Homo sapien
caaccagcatcaacagctactgaaa

SEQ ID NO: 3610307 - DNA, 25 bp, Homo sapien
tcagggggtgagggaaaggctctgt

SEQ ID NO: 3610308 - DNA, 25 bp, Homo sapien
cagcccagggggtcagggggtgagg

SEQ ID NO: 3610309 - DNA, 25 bp, Homo sapien
gtcagggggtgagggaaaggctctg

SEQ ID NO: 3610310 - DNA, 25 bp, Homo sapien
tcagcccagggggtcagggggtgag

SEQ ID NO: 3610311 - DNA, 25 bp, Homo sapien
tatgacagagcttgcacgatgctgg

SEQ ID NO: 3610312 - DNA, 25 bp, Homo sapien
tacttccgccaatccagaggtacag

SEQ ID NO: 3610313 - DNA, 25 bp, Homo sapien
gaaatacgagtgagaatccttccag

SEQ ID NO: 3610314 - DNA, 25 bp, Homo sapien
tacgtggctttcctcttcggagagg

SEQ ID NO: 3610315 - DNA, 25 bp, Homo sapien
aacctggtaactgaggctctgcaga

SEQ ID NO: 3610316 - DNA, 25 bp, Homo sapien
caaacctggtaactgaggctctgca

SEQ ID NO: 3610317 - DNA, 25 bp, Homo sapien
tcagaaaccaaacctggtaactgag

SEQ ID NO: 3610318 - DNA, 25 bp, Homo sapien
aaccaaacctggtaactgaggctct

SEQ ID NO: 3610319 - DNA, 25 bp, Homo sapien
ggagggaaggaacaatcaccagaga

SEQ ID NO: 3610320 - DNA, 25 bp, Homo sapien
ggaaggaacaatcaccagagaagag

SEQ ID NO: 3610321 - DNA, 25 bp, Homo sapien
aaaggatgctcatcgcatggtggga

SEQ ID NO: 3610322 - DNA, 25 bp, Homo sapien
cctgaaaggatgctcatcgcatggt

SEQ ID NO: 3610323 - DNA, 25 bp, Homo sapien
cagcaacctgatacccttcccatca

SEQ ID NO: 3610324 - DNA, 25 bp, Homo sapien
cccacaggcaaaggattcagaaatt

SEQ ID NO: 3610325 - DNA, 25 bp, Homo sapien
ttagggcctatatgggtagggaaca

SEQ ID NO: 3610326 - DNA, 25 bp, Homo sapien
gacccatcagccactggcagccatt

SEQ ID NO: 3610327 - DNA, 25 bp, Homo sapien
atttttaaccacagaggtactgcag

SEQ ID NO: 3610328 - DNA, 25 bp, Homo sapien
ttttaaccacagaggtactgcagaa

SEQ ID NO: 3610329 - DNA, 25 bp, Homo sapien
tttttaaccacagaggtactgcaga

SEQ ID NO: 3610330 - DNA, 25 bp, Homo sapien
accagtgagctgtccctcccttccc

SEQ ID NO: 3610331 - DNA, 25 bp, Homo sapien
aaccagtgagctgtccctcccttcc

SEQ ID NO: 3610332 - DNA, 25 bp, Homo sapien
agaaaggaactccagccgagggcag

SEQ ID NO: 3610333 - DNA, 25 bp, Homo sapien
tgagaaaggaactccagccgagggc

SEQ ID NO: 3610334 - DNA, 25 bp, Homo sapien
gagaaaggaactccagccgagggca

SEQ ID NO: 3610335 - DNA, 25 bp, Homo sapien
gtgagaaaggaactccagccgaggg

SEQ ID NO: 3610336 - DNA, 25 bp, Homo sapien
ggccgcttctgtcctgtcgattgtt

SEQ ID NO: 3610337 - DNA, 25 bp, Homo sapien
gcttctgtcctgtcgattgttcttt

SEQ ID NO: 3610338 - DNA, 25 bp, Homo sapien
ttatagttcgtcgttcttcaaaggc

SEQ ID NO: 3610339 - DNA, 25 bp, Homo sapien
cgtcgttcttcaaaggccgcttctg

SEQ ID NO: 3610340 - DNA, 25 bp, Homo sapien
caccaggcttcccaccgtagccccg

SEQ ID NO: 3610341 - DNA, 25 bp, Homo sapien
cagaggaaccaaccccagttctttg

SEQ ID NO: 3610342 - DNA, 25 bp, Homo sapien
ccaaccccagttctttgcaaaggat

SEQ ID NO: 3610343 - DNA, 25 bp, Homo sapien
ttgggggagcaaaggaatcaccgca

SEQ ID NO: 3610344 - DNA, 25 bp, Homo sapien
ctccaggacctcctaactccaaagg

SEQ ID NO: 3610345 - DNA, 25 bp, Homo sapien
tccaggacctcctaactccaaaggc

SEQ ID NO: 3610346 - DNA, 25 bp, Homo sapien
caggacctcctaactccaaaggctc

SEQ ID NO: 3610347 - DNA, 25 bp, Homo sapien
aggacctcctaactccaaaggctca

SEQ ID NO: 3610348 - DNA, 25 bp, Homo sapien
gaaggctgggccagtttttccatga

SEQ ID NO: 3610349 - DNA, 25 bp, Homo sapien
caggttagtctcctcagaagggagg

SEQ ID NO: 3610350 - DNA, 25 bp, Homo sapien
aaggctgggccagtttttccatgaa

SEQ ID NO: 3610351 - DNA, 25 bp, Homo sapien
ggaagaaacaggttagtctcctcag

SEQ ID NO: 3610352 - DNA, 25 bp, Homo sapien
caagctcatgggctgtctagaaaca

SEQ ID NO: 3610353 - DNA, 25 bp, Homo sapien
gctcaaccatggttgctccaactca

SEQ ID NO: 3610354 - DNA, 25 bp, Homo sapien
tgggctaatgcaacatccacgtgct

SEQ ID NO: 3610355 - DNA, 25 bp, Homo sapien
aacgcaaaggccattcaagctcatg

SEQ ID NO: 3610356 - DNA, 25 bp, Homo sapien
cagtctctactttctcaggttctga

SEQ ID NO: 3610357 - DNA, 25 bp, Homo sapien
aggttctgaaatgggctctgcatct

SEQ ID NO: 3610358 - DNA, 25 bp, Homo sapien
agtctctactttctcaggttctgaa

SEQ ID NO: 3610359 - DNA, 25 bp, Homo sapien
ctcaggttctgaaatgggctctgca

SEQ ID NO: 3610360 - DNA, 25 bp, Homo sapien
gggtaagacatagcctcaggaagga

SEQ ID NO: 3610361 - DNA, 25 bp, Homo sapien
aaccaggggtaagacatagcctcag

SEQ ID NO: 3610362 - DNA, 25 bp, Homo sapien
caggggtaagacatagcctcaggaa

SEQ ID NO: 3610363 - DNA, 25 bp, Homo sapien
gaaaccaggggtaagacatagcctc

SEQ ID NO: 3610364 - DNA, 25 bp, Homo sapien
tctgtggcgggcagcttagcctgct

SEQ ID NO: 3610365 - DNA, 25 bp, Homo sapien
tcaatgtcttttgagagcaacacag

SEQ ID NO: 3610366 - DNA, 25 bp, Homo sapien
ttgagcagatactgcacctctcggt

SEQ ID NO: 3610367 - DNA, 25 bp, Homo sapien
gtaaacttggccttattgagcagat

SEQ ID NO: 3610368 - DNA, 25 bp, Homo sapien
tgatgactcttatggccatggccct

SEQ ID NO: 3610369 - DNA, 25 bp, Homo sapien
cacagtacctaggatggcagctaag

SEQ ID NO: 3610370 - DNA, 25 bp, Homo sapien
tcttcaggttagatgctaagccagg

SEQ ID NO: 3610371 - DNA, 25 bp, Homo sapien
cttgggactaatcagaggtgggctc

SEQ ID NO: 3610372 - DNA, 25 bp, Homo sapien
tcagtgaagatctggtccatctctg

SEQ ID NO: 3610373 - DNA, 25 bp, Homo sapien
catctctgggatgagccgggccccc

SEQ ID NO: 3610374 - DNA, 25 bp, Homo sapien
ccacctcagtgaagatctggtccat

SEQ ID NO: 3610375 - DNA, 25 bp, Homo sapien
gactttctctaacgttgtcatctcc

SEQ ID NO: 3610376 - DNA, 25 bp, Homo sapien
ttatcgagggcagacagccgttcgg

SEQ ID NO: 3610377 - DNA, 25 bp, Homo sapien
ttgaggagattatcgagggcagaca

SEQ ID NO: 3610378 - DNA, 25 bp, Homo sapien
agccgttcgggccacttcttgcgct

SEQ ID NO: 3610379 - DNA, 25 bp, Homo sapien
tgcgctcctctacccgaaaaaacag

SEQ ID NO: 3610380 - DNA, 25 bp, Homo sapien
tgtggtggctccaacaccctcatcc

SEQ ID NO: 3610381 - DNA, 25 bp, Homo sapien
tgagcttcccagagatctcctcacg

SEQ ID NO: 3610382 - DNA, 25 bp, Homo sapien
tctcctcacgctgctcctctgtgga

SEQ ID NO: 3610383 - DNA, 25 bp, Homo sapien
gtggacacttcctggtactcgggct

SEQ ID NO: 3610384 - DNA, 25 bp, Homo sapien
gtctcggagtgtcaagtcctgaagt

SEQ ID NO: 3610385 - DNA, 25 bp, Homo sapien
gttggcagctttttcccgttcctgc

SEQ ID NO: 3610386 - DNA, 25 bp, Homo sapien
ttctccaggtctcggagtgtcaagt

SEQ ID NO: 3610387 - DNA, 25 bp, Homo sapien
tccaggtctcggagtgtcaagtcct

SEQ ID NO: 3610388 - DNA, 25 bp, Homo sapien
agcttatcctctggcaagtcaggca

SEQ ID NO: 3610389 - DNA, 25 bp, Homo sapien
ctccaccccgatctcctctaccatt

SEQ ID NO: 3610390 - DNA, 25 bp, Homo sapien
tgcaccgactgagccagcttatcct

SEQ ID NO: 3610391 - DNA, 25 bp, Homo sapien
ttcgccgcttcctggcgggcttctg

SEQ ID NO: 3610392 - DNA, 25 bp, Homo sapien
ccctcaggggttgcatctcccttag

SEQ ID NO: 3610393 - DNA, 25 bp, Homo sapien
ggcctcagacttgtccccattttct

SEQ ID NO: 3610394 - DNA, 25 bp, Homo sapien
aggggttgcatctcccttaggttca

SEQ ID NO: 3610395 - DNA, 25 bp, Homo sapien
ggttgcatctcccttaggttcaggg

SEQ ID NO: 3610396 - DNA, 25 bp, Homo sapien
ttgggagcaccagtcaagaaacagc

SEQ ID NO: 3610397 - DNA, 25 bp, Homo sapien
tatggaaacggtcaatggcctgctt

SEQ ID NO: 3610398 - DNA, 25 bp, Homo sapien
tacaggtgactgctgtatggaaacg

SEQ ID NO: 3610399 - DNA, 25 bp, Homo sapien
gactgtggcaatctagctggacaaa

SEQ ID NO: 3610400 - DNA, 25 bp, Homo sapien
ctggacagtatcagtaccattctcc

SEQ ID NO: 3610401 - DNA, 25 bp, Homo sapien
ttggcatctggtgtggtaccgcctc

SEQ ID NO: 3610402 - DNA, 25 bp, Homo sapien
gtggtaccgcctccaaacaggctgg

SEQ ID NO: 3610403 - DNA, 25 bp, Homo sapien
acagtatcagtaccattctccttgg

SEQ ID NO: 3610404 - DNA, 25 bp, Homo sapien
ttctgcgctgtcctctaccagtgtc

SEQ ID NO: 3610405 - DNA, 25 bp, Homo sapien
gagagtagattcctcttctgcgctg

SEQ ID NO: 3610406 - DNA, 25 bp, Homo sapien
tagattcctcttctgcgctgtcctc

SEQ ID NO: 3610407 - DNA, 25 bp, Homo sapien
tcttctgcgctgtcctctaccagtg

SEQ ID NO: 3610408 - DNA, 25 bp, Homo sapien
ctgtctagactgagcacgccactct

SEQ ID NO: 3610409 - DNA, 25 bp, Homo sapien
agccttgatgcccttggactcgtag

SEQ ID NO: 3610410 - DNA, 25 bp, Homo sapien
ttgaagctgtcacccacccctttta

SEQ ID NO: 3610411 - DNA, 25 bp, Homo sapien
ctcatccaggttgaagtgagccttg

SEQ ID NO: 3610412 - DNA, 25 bp, Homo sapien
catccgagagaagagtacccgttta

SEQ ID NO: 3610413 - DNA, 25 bp, Homo sapien
taaaggtgatgactttgcgttgagg

SEQ ID NO: 3610414 - DNA, 25 bp, Homo sapien
ccaggtcgccgtagttgatgtggaa

SEQ ID NO: 3610415 - DNA, 25 bp, Homo sapien
aaatcatggctgtagcggttaaagg

SEQ ID NO: 3610416 - DNA, 25 bp, Homo sapien
catctgcattgatgttcttccccag

SEQ ID NO: 3610417 - DNA, 25 bp, Homo sapien
aaggctttgctgagcgcagctgcct

SEQ ID NO: 3610418 - DNA, 25 bp, Homo sapien
catctcggacgacaaatggcttcac

SEQ ID NO: 3610419 - DNA, 25 bp, Homo sapien
gggtagaccactgcatctcggacga

SEQ ID NO: 3610420 - DNA, 25 bp, Homo sapien
tgaactctggggacccgagtggccc

SEQ ID NO: 3610421 - DNA, 25 bp, Homo sapien
ggcctgctgtacaggcccaggcacc

SEQ ID NO: 3610422 - DNA, 25 bp, Homo sapien
ccaggcacccgctcaaacaagtctg

SEQ ID NO: 3610423 - DNA, 25 bp, Homo sapien
aaattccacacgagtcacttttgcc

SEQ ID NO: 3610424 - DNA, 25 bp, Homo sapien
gactcatttcggcactctggagggc

SEQ ID NO: 3610425 - DNA, 25 bp, Homo sapien
gactgtcagggggttcttgcccagc

SEQ ID NO: 3610426 - DNA, 25 bp, Homo sapien
tggggactgtcagggggttcttgcc

SEQ ID NO: 3610427 - DNA, 25 bp, Homo sapien
gaggatggggactgtcagggggttc

SEQ ID NO: 3610428 - DNA, 25 bp, Homo sapien
tgtcagggggttcttgcccagctcc

SEQ ID NO: 3610429 - DNA, 25 bp, Homo sapien
acgagcagcccagttcagtggcagg

SEQ ID NO: 3610430 - DNA, 25 bp, Homo sapien
gatggtagcgggaggagcatgggcc

SEQ ID NO: 3610431 - DNA, 25 bp, Homo sapien
agcatgggccatgccaggcacgagc

SEQ ID NO: 3610432 - DNA, 25 bp, Homo sapien
tgggaggatggtagcgggaggagca

SEQ ID NO: 3610433 - DNA, 25 bp, Homo sapien
ggacaaaatatagcctcaaccagcc

SEQ ID NO: 3610434 - DNA, 25 bp, Homo sapien
tgggacaaaatatagcctcaaccag

SEQ ID NO: 3610435 - DNA, 25 bp, Homo sapien
tagcctcaaccagccacttgtgggc

SEQ ID NO: 3610436 - DNA, 25 bp, Homo sapien
aaatatagcctcaaccagccacttg

SEQ ID NO: 3610437 - DNA, 25 bp, Homo sapien
gcttggccatggcacgcgggttctc

SEQ ID NO: 3610438 - DNA, 25 bp, Homo sapien
gacccttgcgctgctcattgaaaag

SEQ ID NO: 3610439 - DNA, 25 bp, Homo sapien
tttgagccgattagcctcacgcagc

SEQ ID NO: 3610440 - DNA, 25 bp, Homo sapien
gccatgtggtcagcgttggcactga

SEQ ID NO: 3610441 - DNA, 25 bp, Homo sapien
cctactccccggatctgcagctgtg

SEQ ID NO: 3610442 - DNA, 25 bp, Homo sapien
tcttcaccatctggtaggtcacaat

SEQ ID NO: 3610443 - DNA, 25 bp, Homo sapien
ctgcctgagcccatgtcatagaaca

SEQ ID NO: 3610444 - DNA, 25 bp, Homo sapien
tggtgcatacggtgctgcctgagcc

SEQ ID NO: 3610445 - DNA, 25 bp, Homo sapien
tgatgagctgcagcactttgaggcc

SEQ ID NO: 3610446 - DNA, 25 bp, Homo sapien
tttgaggccagccatacgagcagcc

SEQ ID NO: 3610447 - DNA, 25 bp, Homo sapien
gaagaagactggcacggtgatcact

SEQ ID NO: 3610448 - DNA, 25 bp, Homo sapien
gcgctcggcctggttgaagaagact

SEQ ID NO: 3610449 - DNA, 25 bp, Homo sapien
gagaacgagaataattgagaaccat

SEQ ID NO: 3610450 - DNA, 25 bp, Homo sapien
aatcttcagctagagaacgagaata

SEQ ID NO: 3610451 - DNA, 25 bp, Homo sapien
gcaaaatcttcagctagagaacgag

SEQ ID NO: 3610452 - DNA, 25 bp, Homo sapien
agaataattgagaaccatgcccaac

SEQ ID NO: 3610453 - DNA, 25 bp, Homo sapien
gcccagcagcgttgccgagaccacc

SEQ ID NO: 3610454 - DNA, 25 bp, Homo sapien
agcagcgttgccgagaccaccttcc

SEQ ID NO: 3610455 - DNA, 25 bp, Homo sapien
gaaggtagttggagccaaggaaagc

SEQ ID NO: 3610456 - DNA, 25 bp, Homo sapien
ggtagttggagccaaggaaagccag

SEQ ID NO: 3610457 - DNA, 25 bp, Homo sapien
tagcgtagcctttggattcttaatc

SEQ ID NO: 3610458 - DNA, 25 bp, Homo sapien
tctgaaagtgcacagtctgcctctg

SEQ ID NO: 3610459 - DNA, 25 bp, Homo sapien
tgctggaagtaacgtagcgtagcct

SEQ ID NO: 3610460 - DNA, 25 bp, Homo sapien
tcgaaagtcagctcgtgctccggga

SEQ ID NO: 3610461 - DNA, 25 bp, Homo sapien
tcaccggtgttttcctccgagattc

SEQ ID NO: 3610462 - DNA, 25 bp, Homo sapien
ctgcactgtctccaaagaatctttc

SEQ ID NO: 3610463 - DNA, 25 bp, Homo sapien
ttttctttcagggtcacgatcaccg

SEQ ID NO: 3610464 - DNA, 25 bp, Homo sapien
cagggtcacgatcaccggtgttttc

SEQ ID NO: 3610465 - DNA, 25 bp, Homo sapien
gaaaagagattttgggcccaggtgc

SEQ ID NO: 3610466 - DNA, 25 bp, Homo sapien
atttccatgggcactccaggtttga

SEQ ID NO: 3610467 - DNA, 25 bp, Homo sapien
tttccatgggcactccaggtttgac

SEQ ID NO: 3610468 - DNA, 25 bp, Homo sapien
aatttccatgggcactccaggtttg

SEQ ID NO: 3610469 - DNA, 25 bp, Homo sapien
caccttcatggactcactgcccagg

SEQ ID NO: 3610470 - DNA, 25 bp, Homo sapien
accttcatggactcactgcccaggt

SEQ ID NO: 3610471 - DNA, 25 bp, Homo sapien
cactcagtgccaacaggtctgccaa

SEQ ID NO: 3610472 - DNA, 25 bp, Homo sapien
tgccaacaggtctgccaagagcaca

SEQ ID NO: 3610473 - DNA, 25 bp, Homo sapien
ctctgcctcctaactttgtctgcca

SEQ ID NO: 3610474 - DNA, 25 bp, Homo sapien
aggcccaacagactcgcctcctcgg

SEQ ID NO: 3610475 - DNA, 25 bp, Homo sapien
ccccgctgacggggaaagccagctg

SEQ ID NO: 3610476 - DNA, 25 bp, Homo sapien
gagctcccccgctgacggggaaagc

SEQ ID NO: 3610477 - DNA, 25 bp, Homo sapien
ccgctgacggggaaagccagctggg

SEQ ID NO: 3610478 - DNA, 25 bp, Homo sapien
ctggagctcccccgctgacggggaa

SEQ ID NO: 3610479 - DNA, 25 bp, Homo sapien
ccccggagctcgcacgctgtctccc

SEQ ID NO: 3610480 - DNA, 25 bp, Homo sapien
cggcccgccccagcaagtggggaca

SEQ ID NO: 3610481 - DNA, 25 bp, Homo sapien
gcggccctcccttgcgctcccgacc

SEQ ID NO: 3610482 - DNA, 25 bp, Homo sapien
tcgcacgctgtctcccctaggaggg

SEQ ID NO: 3610483 - DNA, 25 bp, Homo sapien
acgaacgtacccacgaggccggcag

SEQ ID NO: 3610484 - DNA, 25 bp, Homo sapien
gaacgtacccacgaggccggcagcg

SEQ ID NO: 3610485 - DNA, 25 bp, Homo sapien
acgcggcacgaacgtacccacgagg

SEQ ID NO: 3610486 - DNA, 25 bp, Homo sapien
gacagacgcggcacgaacgtaccca

SEQ ID NO: 3610487 - DNA, 25 bp, Homo sapien
tcctctcggtttgcaaactgttaca

SEQ ID NO: 3610488 - DNA, 25 bp, Homo sapien
cctctcggtttgcaaactgttacat

SEQ ID NO: 3610489 - DNA, 25 bp, Homo sapien
ctctcggtttgcaaactgttacatt

SEQ ID NO: 3610490 - DNA, 25 bp, Homo sapien
ctcctctcggtttgcaaactgttac

SEQ ID NO: 3610491 - DNA, 25 bp, Homo sapien
cggccccggacgcggcgcgcgctca

SEQ ID NO: 3610492 - DNA, 25 bp, Homo sapien
cagccggccccggacgcggcgcgcg

SEQ ID NO: 3610493 - DNA, 25 bp, Homo sapien
ggccccggacgcggcgcgcgctcat

SEQ ID NO: 3610494 - DNA, 25 bp, Homo sapien
gccggccccggacgcggcgcgcgct

SEQ ID NO: 3610495 - DNA, 25 bp, Homo sapien
tctctcttgtggaggcacctgctat

SEQ ID NO: 3610496 - DNA, 25 bp, Homo sapien
tacgctgtcagttcaattccacagg

SEQ ID NO: 3610497 - DNA, 25 bp, Homo sapien
ttttggccaactatccagtagagtc

SEQ ID NO: 3610498 - DNA, 25 bp, Homo sapien
gctgtagaacattccatagcatggg

SEQ ID NO: 3610499 - DNA, 25 bp, Homo sapien
gctgctagccatgttctcattgctg

SEQ ID NO: 3610500 - DNA, 25 bp, Homo sapien
gctagccatgttctcattgctgatt

SEQ ID NO: 3610501 - DNA, 25 bp, Homo sapien
ctggctgctagccatgttctcattg

SEQ ID NO: 3610502 - DNA, 25 bp, Homo sapien
tggctgctagccatgttctcattgc

SEQ ID NO: 3610503 - DNA, 25 bp, Homo sapien
gggcatttggtacaattcctggact

SEQ ID NO: 3610504 - DNA, 25 bp, Homo sapien
gagcttctgccattggacaacaggg

SEQ ID NO: 3610505 - DNA, 25 bp, Homo sapien
ctcatcaataagaggatccaatggg

SEQ ID NO: 3610506 - DNA, 25 bp, Homo sapien
tcctggactaggagtgctcaataca

SEQ ID NO: 3610507 - DNA, 25 bp, Homo sapien
caggctctgctaggcctcgttcaca

SEQ ID NO: 3610508 - DNA, 25 bp, Homo sapien
tgctaggcctcgttcacagttacgg

SEQ ID NO: 3610509 - DNA, 25 bp, Homo sapien
cagttacggtacaagatgtagcccc

SEQ ID NO: 3610510 - DNA, 25 bp, Homo sapien
cgttcacagttacggtacaagatgt

SEQ ID NO: 3610511 - DNA, 25 bp, Homo sapien
ccggtatccgcgcattttaggaaga

SEQ ID NO: 3610512 - DNA, 25 bp, Homo sapien
gttacagtcacatccggcaaactcg

SEQ ID NO: 3610513 - DNA, 25 bp, Homo sapien
tcacgtgacaaagctcccggaggtg

SEQ ID NO: 3610514 - DNA, 25 bp, Homo sapien
cgtcattcacttacgcacggcgggt

SEQ ID NO: 3610515 - DNA, 25 bp, Homo sapien
cagactgacctccagcctggaggct

SEQ ID NO: 3610516 - DNA, 25 bp, Homo sapien
cctggaggctgggctgcaacgcgac

SEQ ID NO: 3610517 - DNA, 25 bp, Homo sapien
cgaccctcccacagccagactgacc

SEQ ID NO: 3610518 - DNA, 25 bp, Homo sapien
agcctggaggctgggctgcaacgcg

SEQ ID NO: 3610519 - DNA, 25 bp, Homo sapien
cgtggaagggttagctgcagaattc

SEQ ID NO: 3610520 - DNA, 25 bp, Homo sapien
ttccagttcagaagccaacggaggc

SEQ ID NO: 3610521 - DNA, 25 bp, Homo sapien
caatgcctaaggttctagtcgtgga

SEQ ID NO: 3610522 - DNA, 25 bp, Homo sapien
gacagggattaaccgacttgtgctg

SEQ ID NO: 3610523 - DNA, 25 bp, Homo sapien
cttggattgccgagttgagtttgct

SEQ ID NO: 3610524 - DNA, 25 bp, Homo sapien
cagtcactcgggaggaagatgtgcc

SEQ ID NO: 3610525 - DNA, 25 bp, Homo sapien
gcctgttaccaagtgcttcgtcccg

SEQ ID NO: 3610526 - DNA, 25 bp, Homo sapien
ggcttccgcgaaaacgactcttgct

SEQ ID NO: 3610527 - DNA, 25 bp, Homo sapien
cagcggccgcgtctgaaagtcctgg

SEQ ID NO: 3610528 - DNA, 25 bp, Homo sapien
gaaagtcctgggctaagcaccacgc

SEQ ID NO: 3610529 - DNA, 25 bp, Homo sapien
ggggtaccagacaccccggctgcag

SEQ ID NO: 3610530 - DNA, 25 bp, Homo sapien
gaaatcggcgatcgcgtctctccca

SEQ ID NO: 3610531 - DNA, 25 bp, Homo sapien
ccgccggcctctcggcctggactgc

SEQ ID NO: 3610532 - DNA, 25 bp, Homo sapien
ggccgccggcctctcggcctggact

SEQ ID NO: 3610533 - DNA, 25 bp, Homo sapien
gccggcctctcggcctggactgccc

SEQ ID NO: 3610534 - DNA, 25 bp, Homo sapien
cggcctctcggcctggactgcccac

SEQ ID NO: 3610535 - DNA, 25 bp, Homo sapien
cagccccttagcgactcgggatggg

SEQ ID NO: 3610536 - DNA, 25 bp, Homo sapien
aagagcgcccaagccgcatccggaa

SEQ ID NO: 3610537 - DNA, 25 bp, Homo sapien
aggctcgggtcttccgcgccacgga

SEQ ID NO: 3610538 - DNA, 25 bp, Homo sapien
gcgtcagagcggaaggccaagtctt

SEQ ID NO: 3610539 - DNA, 25 bp, Homo sapien
gcggcaggcggtgcgggacgggagc

SEQ ID NO: 3610540 - DNA, 25 bp, Homo sapien
ctcagctctttccatgagggcggtg

SEQ ID NO: 3610541 - DNA, 25 bp, Homo sapien
cgcttgccccgcagtctgaagcggc

SEQ ID NO: 3610542 - DNA, 25 bp, Homo sapien
aggccgacgcggcaggcggtgcggg

SEQ ID NO: 3610543 - DNA, 25 bp, Homo sapien
cccacggtggcgctggtcttcttgg

SEQ ID NO: 3610544 - DNA, 25 bp, Homo sapien
aacgcgctcggcgtagtggcccttc

SEQ ID NO: 3610545 - DNA, 25 bp, Homo sapien
aggacgcctccctgggcgatcgtca

SEQ ID NO: 3610546 - DNA, 25 bp, Homo sapien
agccggtgtacacggcccactggga

SEQ ID NO: 3610547 - DNA, 25 bp, Homo sapien
tctgaggccacctagagagcgtctg

SEQ ID NO: 3610548 - DNA, 25 bp, Homo sapien
cgcccgctgattggtcgaatttgaa

SEQ ID NO: 3610549 - DNA, 25 bp, Homo sapien
gaagcacgacggctcaaacactaga

SEQ ID NO: 3610550 - DNA, 25 bp, Homo sapien
tagccaatccttgtaaagcgcgcga

SEQ ID NO: 3610551 - DNA, 25 bp, Homo sapien
ggcatcctgttggaggaagtacccc

SEQ ID NO: 3610552 - DNA, 25 bp, Homo sapien
acccaaaaatgcccatataggaaat

SEQ ID NO: 3610553 - DNA, 25 bp, Homo sapien
tctgtttggtctcagttctgttcac

SEQ ID NO: 3610554 - DNA, 25 bp, Homo sapien
tatgttctgtttggtctcagttctg

SEQ ID NO: 3610555 - DNA, 25 bp, Homo sapien
aaaccagtggttccttgagagtcag

SEQ ID NO: 3610556 - DNA, 25 bp, Homo sapien
tgtatcccaccctatgaggctgcaa

SEQ ID NO: 3610557 - DNA, 25 bp, Homo sapien
aaatgacatgtcaccgtggagcctg

SEQ ID NO: 3610558 - DNA, 25 bp, Homo sapien
caagaaacgcccaggatgccaatga

SEQ ID NO: 3610559 - DNA, 25 bp, Homo sapien
cgaacgagctgatatcgaatggaga

SEQ ID NO: 3610560 - DNA, 25 bp, Homo sapien
gacatcatagaagagtcgaacgagc

SEQ ID NO: 3610561 - DNA, 25 bp, Homo sapien
agctgatatcgaatggagaaggtga

SEQ ID NO: 3610562 - DNA, 25 bp, Homo sapien
tagaagagtcgaacgagctgatatc

SEQ ID NO: 3610563 - DNA, 25 bp, Homo sapien
ggagaaatggactggagtaagaatc

SEQ ID NO: 3610564 - DNA, 25 bp, Homo sapien
gagtaagaatcacgcagaaagggag

SEQ ID NO: 3610565 - DNA, 25 bp, Homo sapien
ggtataaactcgattcccatcctca

SEQ ID NO: 3610566 - DNA, 25 bp, Homo sapien
agggagacacggaggtataaactcg

SEQ ID NO: 3610567 - DNA, 25 bp, Homo sapien
gtgaggtttctctcatgtatgggcc

SEQ ID NO: 3610568 - DNA, 25 bp, Homo sapien
agggtcatgttgttacattcagtga

SEQ ID NO: 3610569 - DNA, 25 bp, Homo sapien
ttaagtagcaagttgatgagggtca

SEQ ID NO: 3610570 - DNA, 25 bp, Homo sapien
tctctcatgtatgggcccaaggact

SEQ ID NO: 3610571 - DNA, 25 bp, Homo sapien
cctatgctttaggaatgtggatcta

SEQ ID NO: 3610572 - DNA, 25 bp, Homo sapien
gatctgatgtaggactaggttcccc

SEQ ID NO: 3610573 - DNA, 25 bp, Homo sapien
gcagcctagggccttacctccttgt

SEQ ID NO: 3610574 - DNA, 25 bp, Homo sapien
agagaacctcagctaatacctatgc

SEQ ID NO: 3610575 - DNA, 25 bp, Homo sapien
aaggtgcccaagaaagagaggctct

SEQ ID NO: 3610576 - DNA, 25 bp, Homo sapien
tcctccctgtggctaataggaagag

SEQ ID NO: 3610577 - DNA, 25 bp, Homo sapien
ttgaatgtggagtcaacctgagatc

SEQ ID NO: 3610578 - DNA, 25 bp, Homo sapien
tgtataggctggcattagatatccc

SEQ ID NO: 3610579 - DNA, 25 bp, Homo sapien
gaagatagcttcatgtgactgggcc

SEQ ID NO: 3610580 - DNA, 25 bp, Homo sapien
ctgggtatgcggtggcgagggcagg

SEQ ID NO: 3610581 - DNA, 25 bp, Homo sapien
gggcaggggatgatatgcaggagct

SEQ ID NO: 3610582 - DNA, 25 bp, Homo sapien
gcaggggatgatatgcaggagctga

SEQ ID NO: 3610583 - DNA, 25 bp, Homo sapien
caggggatgatatgcaggagctgag

SEQ ID NO: 3610584 - DNA, 25 bp, Homo sapien
caaaggtcatgccagcaaagtaaca

SEQ ID NO: 3610585 - DNA, 25 bp, Homo sapien
gtgtcccaagatgcccaccacggca

SEQ ID NO: 3610586 - DNA, 25 bp, Homo sapien
gggcatgaagaatagtagcatggtc

SEQ ID NO: 3610587 - DNA, 25 bp, Homo sapien
tcccacaaacacccgtgatgggtac

SEQ ID NO: 3610588 - DNA, 25 bp, Homo sapien
ggtagttgtccccttatccacaggc

SEQ ID NO: 3610589 - DNA, 25 bp, Homo sapien
gaaaactccatagaggtatgcgcag

SEQ ID NO: 3610590 - DNA, 25 bp, Homo sapien
tatgcgcaggtttagcttcaccacc

SEQ ID NO: 3610591 - DNA, 25 bp, Homo sapien
gaatacgaccaactgaagacgcaga

SEQ ID NO: 3610592 - DNA, 25 bp, Homo sapien
ggtatcatgaagtagagggaaaaga

SEQ ID NO: 3610593 - DNA, 25 bp, Homo sapien
cagttgtggtagagcaatcccaaag

SEQ ID NO: 3610594 - DNA, 25 bp, Homo sapien
gaaaagacatgatcatcccgacaat

SEQ ID NO: 3610595 - DNA, 25 bp, Homo sapien
gagcaatcccaaagtggtgaaaaaa

SEQ ID NO: 3610596 - DNA, 25 bp, Homo sapien
gaaacacatctatagttcaaagcta

SEQ ID NO: 3610597 - DNA, 25 bp, Homo sapien
aacagggctgattataacatctgcc

SEQ ID NO: 3610598 - DNA, 25 bp, Homo sapien
cttgttgtaaaaagggagacttcag

SEQ ID NO: 3610599 - DNA, 25 bp, Homo sapien
gggaaccacggaatgtctcagtaag

SEQ ID NO: 3610600 - DNA, 25 bp, Homo sapien
tattgatggcattggtacagaacac

SEQ ID NO: 3610601 - DNA, 25 bp, Homo sapien
taggccgttaattcctgctaggata

SEQ ID NO: 3610602 - DNA, 25 bp, Homo sapien
cagccccatgtagacatagtacagg

SEQ ID NO: 3610603 - DNA, 25 bp, Homo sapien
aagcagaaatgactagtgactggcc

SEQ ID NO: 3610604 - DNA, 25 bp, Homo sapien
ccaaagttggtgaaatagaccatga

SEQ ID NO: 3610605 - DNA, 25 bp, Homo sapien
agcttatggcgccagcgcagattca

SEQ ID NO: 3610606 - DNA, 25 bp, Homo sapien
caccacaatggtcgtgttgccaaag

SEQ ID NO: 3610607 - DNA, 25 bp, Homo sapien
ttcagtacatcatccgcaaagccca

SEQ ID NO: 3610608 - DNA, 25 bp, Homo sapien
gaggctcgggcaggtccatgactca

SEQ ID NO: 3610609 - DNA, 25 bp, Homo sapien
ctgggggaggctcgggcaggtccat

SEQ ID NO: 3610610 - DNA, 25 bp, Homo sapien
ggggaggctcgggcaggtccatgac

SEQ ID NO: 3610611 - DNA, 25 bp, Homo sapien
aggctcgggcaggtccatgactcaa

SEQ ID NO: 3610612 - DNA, 25 bp, Homo sapien
gcaatcacccccacgaacccactta

SEQ ID NO: 3610613 - DNA, 25 bp, Homo sapien
aggcaatcacccccacgaacccact

SEQ ID NO: 3610614 - DNA, 25 bp, Homo sapien
gccacaggcaatcacccccacgaac

SEQ ID NO: 3610615 - DNA, 25 bp, Homo sapien
acaggcaatcacccccacgaaccca

SEQ ID NO: 3610616 - DNA, 25 bp, Homo sapien
ataaggaaaacagcaccgctgatca

SEQ ID NO: 3610617 - DNA, 25 bp, Homo sapien
aggaaaacagcaccgctgatcactc

SEQ ID NO: 3610618 - DNA, 25 bp, Homo sapien
aaacagcaccgctgatcactccctg

SEQ ID NO: 3610619 - DNA, 25 bp, Homo sapien
aaaacagcaccgctgatcactccct

SEQ ID NO: 3610620 - DNA, 25 bp, Homo sapien
cagagtcccagatatacccaagggt

SEQ ID NO: 3610621 - DNA, 25 bp, Homo sapien
tagttctgagtcttcacgtgtggtc

SEQ ID NO: 3610622 - DNA, 25 bp, Homo sapien
tttccccaatgcgagtaagttctgc

SEQ ID NO: 3610623 - DNA, 25 bp, Homo sapien
ctagtgcaggtgttacagtaaccca

SEQ ID NO: 3610624 - DNA, 25 bp, Homo sapien
tctgctgtcggctggttttgttgag

SEQ ID NO: 3610625 - DNA, 25 bp, Homo sapien
cccagcagcgagacgatcaaattga

SEQ ID NO: 3610626 - DNA, 25 bp, Homo sapien
cacagaggcgcgcagcaatgaagtg

SEQ ID NO: 3610627 - DNA, 25 bp, Homo sapien
cagcaatgaagtggccccggaaggc

SEQ ID NO: 3610628 - DNA, 25 bp, Homo sapien
gcctcagcagtatggagtggccgct

SEQ ID NO: 3610629 - DNA, 25 bp, Homo sapien
cgccgcctcttcaggtaacgggcaa

SEQ ID NO: 3610630 - DNA, 25 bp, Homo sapien
tcagcagtatggagtggccgctccc

SEQ ID NO: 3610631 - DNA, 25 bp, Homo sapien
taacgggcaagctgagcagcagtcc

SEQ ID NO: 3610632 - DNA, 25 bp, Homo sapien
tcaccgagagagtactggaaacgca

SEQ ID NO: 3610633 - DNA, 25 bp, Homo sapien
gctgaacaaccattactgcggaagg

SEQ ID NO: 3610634 - DNA, 25 bp, Homo sapien
ggcggcggccgccatttttaatatg

SEQ ID NO: 3610635 - DNA, 25 bp, Homo sapien
ggaacctctctaaggcaacctatgt

SEQ ID NO: 3610636 - DNA, 25 bp, Homo sapien
ggatgcctccggctccaggaagatg

SEQ ID NO: 3610637 - DNA, 25 bp, Homo sapien
gatgaatgcctccttgtaccacgtg

SEQ ID NO: 3610638 - DNA, 25 bp, Homo sapien
gaaatgccaattgcccggttccaag

SEQ ID NO: 3610639 - DNA, 25 bp, Homo sapien
tccataggtcaagcttaaagggccc

SEQ ID NO: 3610640 - DNA, 25 bp, Homo sapien
gaaattgtgtgccttccctggtaaa

SEQ ID NO: 3610641 - DNA, 25 bp, Homo sapien
ggccctaggattcacagaccagttg

SEQ ID NO: 3610642 - DNA, 25 bp, Homo sapien
tttcctgaatgctgaagccggccct

SEQ ID NO: 3610643 - DNA, 25 bp, Homo sapien
tctaagtagccttgagtggctccca

SEQ ID NO: 3610644 - DNA, 25 bp, Homo sapien
cgactgctgaccaagctaggagaga

SEQ ID NO: 3610645 - DNA, 25 bp, Homo sapien
catttctgtgggcaaggtactctgg

SEQ ID NO: 3610646 - DNA, 25 bp, Homo sapien
cctcccggatcagagaaaagggtgc

SEQ ID NO: 3610647 - DNA, 25 bp, Homo sapien
gactgactgctcgtgctaggaggcc

SEQ ID NO: 3610648 - DNA, 25 bp, Homo sapien
gcctgagccaatcacacgatgacct

SEQ ID NO: 3610649 - DNA, 25 bp, Homo sapien
tctgggccacgggactgatcctgtc

SEQ ID NO: 3610650 - DNA, 25 bp, Homo sapien
tgtccgaaagaaggccggcagcttt

SEQ ID NO: 3610651 - DNA, 25 bp, Homo sapien
tgcgcagcggcactaagctcatctt

SEQ ID NO: 3610652 - DNA, 25 bp, Homo sapien
tgatgatgtccattgctgtgtgatg

SEQ ID NO: 3610653 - DNA, 25 bp, Homo sapien
ttaggaccctccgtgaacagatgat

SEQ ID NO: 3610654 - DNA, 25 bp, Homo sapien
tgtgatgatggagccacgcaaggct

SEQ ID NO: 3610655 - DNA, 25 bp, Homo sapien
ccgttttttgtacttgatgccttct

SEQ ID NO: 3610656 - DNA, 25 bp, Homo sapien
tggtgaatcagaccaatgcccaagg

SEQ ID NO: 3610657 - DNA, 25 bp, Homo sapien
cagccgttgccaatggatgccttta

SEQ ID NO: 3610658 - DNA, 25 bp, Homo sapien
gatccagatggtttgaaggccgcag

SEQ ID NO: 3610659 - DNA, 25 bp, Homo sapien
ggccagcaagagatcgtctactatg

SEQ ID NO: 3610660 - DNA, 25 bp, Homo sapien
tgcaagggtcctttctttgtcacca

SEQ ID NO: 3610661 - DNA, 25 bp, Homo sapien
gctccttaggcccaaggatggcatg

SEQ ID NO: 3610662 - DNA, 25 bp, Homo sapien
tgtcaccagccaaggcattgataac

SEQ ID NO: 3610663 - DNA, 25 bp, Homo sapien
tggcatgtgactggtccctgcaagg

SEQ ID NO: 3610664 - DNA, 25 bp, Homo sapien
cacagcgcccggcaacactgcactt

SEQ ID NO: 3610665 - DNA, 25 bp, Homo sapien
tgtctgggcctagggaaacatgccc

SEQ ID NO: 3610666 - DNA, 25 bp, Homo sapien
caatggttctcagaaggtggtccct

SEQ ID NO: 3610667 - DNA, 25 bp, Homo sapien
tatcatcaacccttacatgtctggg

SEQ ID NO: 3610668 - DNA, 25 bp, Homo sapien
tccacctggacgttgagggaaagtc

SEQ ID NO: 3610669 - DNA, 25 bp, Homo sapien
gaaagattccttcaggtctggaggc

SEQ ID NO: 3610670 - DNA, 25 bp, Homo sapien
aatgggcatagctgagccagttgcc

SEQ ID NO: 3610671 - DNA, 25 bp, Homo sapien
cggcaggcacctagctatgtgacca

SEQ ID NO: 3610672 - DNA, 25 bp, Homo sapien
tatgtgaccactggccctaaacctt

SEQ ID NO: 3610673 - DNA, 25 bp, Homo sapien
cacagctttggcagagtggacagca

SEQ ID NO: 3610674 - DNA, 25 bp, Homo sapien
tcacaaccaactcaccaggaaggtg

SEQ ID NO: 3610675 - DNA, 25 bp, Homo sapien
aggctccacttagtgcctgggagga

SEQ ID NO: 3610676 - DNA, 25 bp, Homo sapien
ggtgttatactgatgccctgctggg

SEQ ID NO: 3610677 - DNA, 25 bp, Homo sapien
cagtgaggatgtctatgccccagga

SEQ ID NO: 3610678 - DNA, 25 bp, Homo sapien
tatacacctttcagtgcaccgaaga

SEQ ID NO: 3610679 - DNA, 25 bp, Homo sapien
tacacagtggcctaggatagctgga

SEQ ID NO: 3610680 - DNA, 25 bp, Homo sapien
gggtgggcacacaagcgtatataca

SEQ ID NO: 3610681 - DNA, 25 bp, Homo sapien
gcctggcgtgaagtctcagtgctgc

SEQ ID NO: 3610682 - DNA, 25 bp, Homo sapien
tacatcaagacactttattgctggg

SEQ ID NO: 3610683 - DNA, 25 bp, Homo sapien
ggtgagtccaaactggcgttgctgc

SEQ ID NO: 3610684 - DNA, 25 bp, Homo sapien
gcttgatggctctcagcttggccaa

SEQ ID NO: 3610685 - DNA, 25 bp, Homo sapien
gagagcttgttcagcctcttcccgg

SEQ ID NO: 3610686 - DNA, 25 bp, Homo sapien
gtcccgctctccgagagcttgttca

SEQ ID NO: 3610687 - DNA, 25 bp, Homo sapien
agggcctggtcccgctctccgagag

SEQ ID NO: 3610688 - DNA, 25 bp, Homo sapien
ctcatacttcgcctccatgtctgcc

SEQ ID NO: 3610689 - DNA, 25 bp, Homo sapien
ctgcttgctgcgggtttgcatatcc

SEQ ID NO: 3610690 - DNA, 25 bp, Homo sapien
gcttgctgcgggtttgcatatcctc

SEQ ID NO: 3610691 - DNA, 25 bp, Homo sapien
ccagctgcttgctgcgggtttgcat

SEQ ID NO: 3610692 - DNA, 25 bp, Homo sapien
ctgcccccgaaggcctttgacttct

SEQ ID NO: 3610693 - DNA, 25 bp, Homo sapien
gctgcagaccatgaaaacctgagga

SEQ ID NO: 3610694 - DNA, 25 bp, Homo sapien
tctacttggtctagtggaacaggag

SEQ ID NO: 3610695 - DNA, 25 bp, Homo sapien
ggctatgactgcatgtgtatcctac

SEQ ID NO: 3610696 - DNA, 25 bp, Homo sapien
acagcatcaagcacatggcaccagg

SEQ ID NO: 3610697 - DNA, 25 bp, Homo sapien
ttccttgcatcaactgaccctgttg

SEQ ID NO: 3610698 - DNA, 25 bp, Homo sapien
gcagtcggaagccctccttgtttcc

SEQ ID NO: 3610699 - DNA, 25 bp, Homo sapien
aagaccaagaccaggcctggcagtc

SEQ ID NO: 3610700 - DNA, 25 bp, Homo sapien
gatccttcctgatttgtactgtttg

SEQ ID NO: 3610701 - DNA, 25 bp, Homo sapien
ctctgcctcagctggtcttcggaag

SEQ ID NO: 3610702 - DNA, 25 bp, Homo sapien
aagccttggctcgacgggcttcatc

SEQ ID NO: 3610703 - DNA, 25 bp, Homo sapien
gtcttcggaagccttggctcgacgg

SEQ ID NO: 3610704 - DNA, 25 bp, Homo sapien
cgacgggcttcatccctccgtagag

SEQ ID NO: 3610705 - DNA, 25 bp, Homo sapien
accaccagcctgtgcctggactcgg

SEQ ID NO: 3610706 - DNA, 25 bp, Homo sapien
ccaagtggtctcggagcagctcctt

SEQ ID NO: 3610707 - DNA, 25 bp, Homo sapien
caagtggtctcggagcagctccttc

SEQ ID NO: 3610708 - DNA, 25 bp, Homo sapien
agcctgtgcctggactcggccacca

SEQ ID NO: 3610709 - DNA, 25 bp, Homo sapien
gagagcgtgggtgaccatttcccca

SEQ ID NO: 3610710 - DNA, 25 bp, Homo sapien
aacagatatgcaaaatacacatgac

SEQ ID NO: 3610711 - DNA, 25 bp, Homo sapien
ggcacagagctagatggggcttaaa

SEQ ID NO: 3610712 - DNA, 25 bp, Homo sapien
tacacatgacaaatatattaggaag

SEQ ID NO: 3610713 - DNA, 25 bp, Homo sapien
ctggaggagctctgcgtggtcttca

SEQ ID NO: 3610714 - DNA, 25 bp, Homo sapien
ctgcgtggtcttcatggcagaacat

SEQ ID NO: 3610715 - DNA, 25 bp, Homo sapien
gctctgcgtggtcttcatggcagaa

SEQ ID NO: 3610716 - DNA, 25 bp, Homo sapien
aggagctctgcgtggtcttcatggc

SEQ ID NO: 3610717 - DNA, 25 bp, Homo sapien
tttcttcttctgtgccccagatttc

SEQ ID NO: 3610718 - DNA, 25 bp, Homo sapien
tcttcttctgtgccccagatttctt

SEQ ID NO: 3610719 - DNA, 25 bp, Homo sapien
ttttcttcttctgtgccccagattt

SEQ ID NO: 3610720 - DNA, 25 bp, Homo sapien
ttcttctgtgccccagatttcttcc

SEQ ID NO: 3610721 - DNA, 25 bp, Homo sapien
ccttatgtttaggtctggacacagg

SEQ ID NO: 3610722 - DNA, 25 bp, Homo sapien
caggagactctcctgagtccaaatt

SEQ ID NO: 3610723 - DNA, 25 bp, Homo sapien
aagtcagttcacagtctctttggaa

SEQ ID NO: 3610724 - DNA, 25 bp, Homo sapien
tgagctttagactgaaccaggagac

SEQ ID NO: 3610725 - DNA, 25 bp, Homo sapien
tccccgtggagtgacccactcgtgg

SEQ ID NO: 3610726 - DNA, 25 bp, Homo sapien
atcctctcctgccagcgttggggct

SEQ ID NO: 3610727 - DNA, 25 bp, Homo sapien
agagagaaggcccaactagcgagga

SEQ ID NO: 3610728 - DNA, 25 bp, Homo sapien
ttccagaggctgtatgttgtccagg

SEQ ID NO: 3610729 - DNA, 25 bp, Homo sapien
tgagacgcagaggaatagtggaccc

SEQ ID NO: 3610730 - DNA, 25 bp, Homo sapien
cagggagtttcccacttcagagaaa

SEQ ID NO: 3610731 - DNA, 25 bp, Homo sapien
taagtgcaggaataggtagtccagg

SEQ ID NO: 3610732 - DNA, 25 bp, Homo sapien
tcagtacactgtagaatgagggtaa

SEQ ID NO: 3610733 - DNA, 25 bp, Homo sapien
gcactcccaccagcgtcatcacagt

SEQ ID NO: 3610734 - DNA, 25 bp, Homo sapien
tgcactcccaccagcgtcatcacag

SEQ ID NO: 3610735 - DNA, 25 bp, Homo sapien
ctgggcgggagagagaaccccctcg

SEQ ID NO: 3610736 - DNA, 25 bp, Homo sapien
agagaaccccctcgggcggagccag

SEQ ID NO: 3610737 - DNA, 25 bp, Homo sapien
ttctgttccctgggcgggagagaga

SEQ ID NO: 3610738 - DNA, 25 bp, Homo sapien
gagagaaccccctcgggcggagcca

SEQ ID NO: 3610739 - DNA, 25 bp, Homo sapien
ccggcaacgtgaagaagagctctgg

SEQ ID NO: 3610740 - DNA, 25 bp, Homo sapien
gccatggccggcaacgtgaagaaga

SEQ ID NO: 3610741 - DNA, 25 bp, Homo sapien
attgggctcatgaaggacgccttcc

SEQ ID NO: 3610742 - DNA, 25 bp, Homo sapien
tcgggttcgggtggcctgattgggc

SEQ ID NO: 3610743 - DNA, 25 bp, Homo sapien
cagctttgtccccacagtgctcctt

SEQ ID NO: 3610744 - DNA, 25 bp, Homo sapien
gcactggtggtgcacatccactggg

SEQ ID NO: 3610745 - DNA, 25 bp, Homo sapien
ctgcagcagcttccgcaaggaggga

SEQ ID NO: 3610746 - DNA, 25 bp, Homo sapien
tgctaatgatggcactggtggtgca

SEQ ID NO: 3610747 - DNA, 25 bp, Homo sapien
tctctatttcttggttaccagagac

SEQ ID NO: 3610748 - DNA, 25 bp, Homo sapien
ctatttcttggttaccagagaccat

SEQ ID NO: 3610749 - DNA, 25 bp, Homo sapien
tttctctatttcttggttaccagag

SEQ ID NO: 3610750 - DNA, 25 bp, Homo sapien
tctatttcttggttaccagagacca

SEQ ID NO: 3610751 - DNA, 25 bp, Homo sapien
gataggactaatgctaccaggttct

SEQ ID NO: 3610752 - DNA, 25 bp, Homo sapien
catcaaagggtgatatgaggtccac

SEQ ID NO: 3610753 - DNA, 25 bp, Homo sapien
tctttagtaggtaattcttgcctcc

SEQ ID NO: 3610754 - DNA, 25 bp, Homo sapien
gttatgggcccaaatgataggacta

SEQ ID NO: 3610755 - DNA, 25 bp, Homo sapien
taaacaggaccgtgaagtaacatag

SEQ ID NO: 3610756 - DNA, 25 bp, Homo sapien
tcagagctcgggttaagtgaactca

SEQ ID NO: 3610757 - DNA, 25 bp, Homo sapien
cagtactgagggttaatatgctttc

SEQ ID NO: 3610758 - DNA, 25 bp, Homo sapien
caattgtgggcaaatgctccagtgc

SEQ ID NO: 3610759 - DNA, 25 bp, Homo sapien
agcctggtgccacagtgagactccg

SEQ ID NO: 3610760 - DNA, 25 bp, Homo sapien
ctggaaggcagaggttgcagtgagc

SEQ ID NO: 3610761 - DNA, 25 bp, Homo sapien
ttgtggtcccagctgctcggtaggc

SEQ ID NO: 3610762 - DNA, 25 bp, Homo sapien
tgaggcaggagaatcgcttgaacct

SEQ ID NO: 3610763 - DNA, 25 bp, Homo sapien
gcattgctgcctcccgatgatgtgg

SEQ ID NO: 3610764 - DNA, 25 bp, Homo sapien
gtggctttgggaatgtaacatctct

SEQ ID NO: 3610765 - DNA, 25 bp, Homo sapien
tatgctgataaatgatccctcgagt

SEQ ID NO: 3610766 - DNA, 25 bp, Homo sapien
tagcagtgtgtaagctttctccatg

SEQ ID NO: 3610767 - DNA, 25 bp, Homo sapien
ctaataacgggttccactgtagcca

SEQ ID NO: 3610768 - DNA, 25 bp, Homo sapien
taataacgggttccactgtagccac

SEQ ID NO: 3610769 - DNA, 25 bp, Homo sapien
tcactgtgtcccaggaaatctgggt

SEQ ID NO: 3610770 - DNA, 25 bp, Homo sapien
tggttccagtgggaaataccagtat

SEQ ID NO: 3610771 - DNA, 25 bp, Homo sapien
agtgccatgtgccttcactgtgtcc

SEQ ID NO: 3610772 - DNA, 25 bp, Homo sapien
aagcagcagagggacagcagtgcca

SEQ ID NO: 3610773 - DNA, 25 bp, Homo sapien
ccttcctgggtacagagcttgagaa

SEQ ID NO: 3610774 - DNA, 25 bp, Homo sapien
taagctgtgtggtgctcttgccgcc

SEQ ID NO: 3610775 - DNA, 25 bp, Homo sapien
tcccaaaaatgaatgtcaggccccg

SEQ ID NO: 3610776 - DNA, 25 bp, Homo sapien
tgcgtgctatgtgcaactcctcagg

SEQ ID NO: 3610777 - DNA, 25 bp, Homo sapien
aagcttagttatcaggttgcatgcc

SEQ ID NO: 3610778 - DNA, 25 bp, Homo sapien
ccaggctgcattttaggacttaata

SEQ ID NO: 3610779 - DNA, 25 bp, Homo sapien
gaatgtttcacaattcccaggtaaa

SEQ ID NO: 3610780 - DNA, 25 bp, Homo sapien
tatggaaataccagagtctgagctc

SEQ ID NO: 3610781 - DNA, 25 bp, Homo sapien
ttgaaattcttagcctgggagtgct

SEQ ID NO: 3610782 - DNA, 25 bp, Homo sapien
tttttgctggatcctgaactggtct

SEQ ID NO: 3610783 - DNA, 25 bp, Homo sapien
taaagcattaagcagctagtgccct

SEQ ID NO: 3610784 - DNA, 25 bp, Homo sapien
gaagcctgtcctcagtaatgtgact

SEQ ID NO: 3610785 - DNA, 25 bp, Homo sapien
gttgggaggcaatactcgagttgcc

SEQ ID NO: 3610786 - DNA, 25 bp, Homo sapien
aggcccccttcctcatggcggtgag

SEQ ID NO: 3610787 - DNA, 25 bp, Homo sapien
ccttcctcatggcggtgagcctgag

SEQ ID NO: 3610788 - DNA, 25 bp, Homo sapien
tgccgtaggaccaaatgccaaggcc

SEQ ID NO: 3610789 - DNA, 25 bp, Homo sapien
ggacatagctcctgctaacagcctg

SEQ ID NO: 3610790 - DNA, 25 bp, Homo sapien
ccttcgtgctgcgtcatcagggcag

SEQ ID NO: 3610791 - DNA, 25 bp, Homo sapien
caggttcctgtggtacccatgatga

SEQ ID NO: 3610792 - DNA, 25 bp, Homo sapien
tgctgccaactggaaacggttttgt

SEQ ID NO: 3610793 - DNA, 25 bp, Homo sapien
gagcgggtgtgaacagcgcacttca

SEQ ID NO: 3610794 - DNA, 25 bp, Homo sapien
gcacttcaacatgagcaggcgcctg

SEQ ID NO: 3610795 - DNA, 25 bp, Homo sapien
tcacttcagtggtgcacctggatgg

SEQ ID NO: 3610796 - DNA, 25 bp, Homo sapien
gctttaatccccatgaaggacagtg

SEQ ID NO: 3610797 - DNA, 25 bp, Homo sapien
agctcagagaggctacccagctcag

SEQ ID NO: 3610798 - DNA, 25 bp, Homo sapien
agagaggctacccagctcagctgct

SEQ ID NO: 3610799 - DNA, 25 bp, Homo sapien
gagaggctacccagctcagctgctg

SEQ ID NO: 3610800 - DNA, 25 bp, Homo sapien
tcagagaggctacccagctcagctg

SEQ ID NO: 3610801 - DNA, 25 bp, Homo sapien
aaacacgttctgcaagaaactctcc

SEQ ID NO: 3610802 - DNA, 25 bp, Homo sapien
aaaacacgttctgcaagaaactctc

SEQ ID NO: 3610803 - DNA, 25 bp, Homo sapien
aaaaacacgttctgcaagaaactct

SEQ ID NO: 3610804 - DNA, 25 bp, Homo sapien
aaaagcgggccttgcagggccaagt

SEQ ID NO: 3610805 - DNA, 25 bp, Homo sapien
tgagcttcactcaacgtggaggaga

SEQ ID NO: 3610806 - DNA, 25 bp, Homo sapien
agtgaggtcctcaggtcctaaccca

SEQ ID NO: 3610807 - DNA, 25 bp, Homo sapien
tggactggtccctgaaaagcgggcc

SEQ ID NO: 3610808 - DNA, 25 bp, Homo sapien
tgcctcagatcgatgtatttctctc

SEQ ID NO: 3610809 - DNA, 25 bp, Homo sapien
gcctcagatcgatgtatttctctcc

SEQ ID NO: 3610810 - DNA, 25 bp, Homo sapien
ctaatgcctcagatcgatgtatttc

SEQ ID NO: 3610811 - DNA, 25 bp, Homo sapien
aatgcctcagatcgatgtatttctc

SEQ ID NO: 3610812 - DNA, 25 bp, Homo sapien
cccagagccacgggcattggtcagg

SEQ ID NO: 3610813 - DNA, 25 bp, Homo sapien
cctgccatctgtgagtagtgttaag

SEQ ID NO: 3610814 - DNA, 25 bp, Homo sapien
ggcccccgtctgactgcactggtga

SEQ ID NO: 3610815 - DNA, 25 bp, Homo sapien
catctgtgagtagtgttaagaaggc

SEQ ID NO: 3610816 - DNA, 25 bp, Homo sapien
gagagaaccgttagtccctactgcc

SEQ ID NO: 3610817 - DNA, 25 bp, Homo sapien
gcccccggtccctgaggatgtggca

SEQ ID NO: 3610818 - DNA, 25 bp, Homo sapien
tagagagaaccgttagtccctactg

SEQ ID NO: 3610819 - DNA, 25 bp, Homo sapien
aggatagagagaaccgttagtccct

SEQ ID NO: 3610820 - DNA, 25 bp, Homo sapien
ctggtctcccggagccctcttgtca

SEQ ID NO: 3610821 - DNA, 25 bp, Homo sapien
ggagccctcttgtcaccgctgctgc

SEQ ID NO: 3610822 - DNA, 25 bp, Homo sapien
tcccggagccctcttgtcaccgctg

SEQ ID NO: 3610823 - DNA, 25 bp, Homo sapien
tggtctcccggagccctcttgtcac

SEQ ID NO: 3610824 - DNA, 25 bp, Homo sapien
ctgggagcttatctgacttaacttc

SEQ ID NO: 3610825 - DNA, 25 bp, Homo sapien
tacaagttcgctcttacgagacggg

SEQ ID NO: 3610826 - DNA, 25 bp, Homo sapien
tctcttctgggagcttatctgactt

SEQ ID NO: 3610827 - DNA, 25 bp, Homo sapien
taacttcaactacaagttcgctctt

SEQ ID NO: 3610828 - DNA, 25 bp, Homo sapien
gaagggcccgctgtgaaggatgtgg

SEQ ID NO: 3610829 - DNA, 25 bp, Homo sapien
aggttggtatctcagggccacagga

SEQ ID NO: 3610830 - DNA, 25 bp, Homo sapien
gaaggatgtggaatggatgagggct

SEQ ID NO: 3610831 - DNA, 25 bp, Homo sapien
tgagaggttggtatctcagggccac

SEQ ID NO: 3610832 - DNA, 25 bp, Homo sapien
gcttgcccttcttatagaggaaata

SEQ ID NO: 3610833 - DNA, 25 bp, Homo sapien
cagcttgcccttcttatagaggaaa

SEQ ID NO: 3610834 - DNA, 25 bp, Homo sapien
caccgccaggaccaggatgcacaca

SEQ ID NO: 3610835 - DNA, 25 bp, Homo sapien
agcaccgccaggaccaggatgcaca

SEQ ID NO: 3610836 - DNA, 25 bp, Homo sapien
ggccgacaagatggggctgctactc

SEQ ID NO: 3610837 - DNA, 25 bp, Homo sapien
gtcaccatcgttggcccagccagtc

SEQ ID NO: 3610838 - DNA, 25 bp, Homo sapien
cacaaagacactcctcgtcactccc

SEQ ID NO: 3610839 - DNA, 25 bp, Homo sapien
ctgccccaggccacttcgtcaccat

SEQ ID NO: 3610840 - DNA, 25 bp, Homo sapien
ggcagaaaggatgccctggcacagc

SEQ ID NO: 3610841 - DNA, 25 bp, Homo sapien
gggcagaaaggatgccctggcacag

SEQ ID NO: 3610842 - DNA, 25 bp, Homo sapien
gcagaaaggatgccctggcacagcc

SEQ ID NO: 3610843 - DNA, 25 bp, Homo sapien
agggcagaaaggatgccctggcaca

SEQ ID NO: 3610844 - DNA, 25 bp, Homo sapien
ctggtatgaggactggcagtggaag

SEQ ID NO: 3610845 - DNA, 25 bp, Homo sapien
ggtatgaggactggcagtggaagtg

SEQ ID NO: 3610846 - DNA, 25 bp, Homo sapien
tggtatgaggactggcagtggaagt

SEQ ID NO: 3610847 - DNA, 25 bp, Homo sapien
aggccagtggttgtgttggagtctg

SEQ ID NO: 3610848 - DNA, 25 bp, Homo sapien
agcgcaagttactgcccgtgcctgg

SEQ ID NO: 3610849 - DNA, 25 bp, Homo sapien
aagttactgcccgtgcctgggcctg

SEQ ID NO: 3610850 - DNA, 25 bp, Homo sapien
taggagaagcgcaagttactgcccg

SEQ ID NO: 3610851 - DNA, 25 bp, Homo sapien
gaagcgcaagttactgcccgtgcct

SEQ ID NO: 3610852 - DNA, 25 bp, Homo sapien
cgttggaggccgtgcattcaacacc

SEQ ID NO: 3610853 - DNA, 25 bp, Homo sapien
gctccggggtcacgaggacattcag

SEQ ID NO: 3610854 - DNA, 25 bp, Homo sapien
ggactcgctgtggatcttggtcttg

SEQ ID NO: 3610855 - DNA, 25 bp, Homo sapien
gaggccgtgcattcaacacctgtct

SEQ ID NO: 3610856 - DNA, 25 bp, Homo sapien
gccctgacgcttcacaagacagatt

SEQ ID NO: 3610857 - DNA, 25 bp, Homo sapien
gacagattcaacaccatattctctt

SEQ ID NO: 3610858 - DNA, 25 bp, Homo sapien
cgtgccgttgacgttccaggagatg

SEQ ID NO: 3610859 - DNA, 25 bp, Homo sapien
tcacaagacagattcaacaccatat

SEQ ID NO: 3610860 - DNA, 25 bp, Homo sapien
gggcacagacgccacgcagcgatag

SEQ ID NO: 3610861 - DNA, 25 bp, Homo sapien
cacgcagcgatagccgcctcctgcc

SEQ ID NO: 3610862 - DNA, 25 bp, Homo sapien
tgtgtgcggttcaggccgggtatgc

SEQ ID NO: 3610863 - DNA, 25 bp, Homo sapien
gccacgttgaccagctgtgtgcggt

SEQ ID NO: 3610864 - DNA, 25 bp, Homo sapien
cagccactggaactcgaggtcctgg

SEQ ID NO: 3610865 - DNA, 25 bp, Homo sapien
ggactcactcggacgtcagacacat

SEQ ID NO: 3610866 - DNA, 25 bp, Homo sapien
cttctctcagccactggaactcgag

SEQ ID NO: 3610867 - DNA, 25 bp, Homo sapien
ggctgcgggactcactcggacgtca

SEQ ID NO: 3610868 - DNA, 25 bp, Homo sapien
agtccaggccctgacattcatagcg

SEQ ID NO: 3610869 - DNA, 25 bp, Homo sapien
tagttcctgtggttcactcagcagc

SEQ ID NO: 3610870 - DNA, 25 bp, Homo sapien
actgtgttccttccgggcaggctcc

SEQ ID NO: 3610871 - DNA, 25 bp, Homo sapien
actcagcagcgatatcatggtgtcc

SEQ ID NO: 3610872 - DNA, 25 bp, Homo sapien
agcattcccacgggctccacttcca

SEQ ID NO: 3610873 - DNA, 25 bp, Homo sapien
aagtgtggtggagggttgccatcag

SEQ ID NO: 3610874 - DNA, 25 bp, Homo sapien
gtggtggagggttgccatcagccaa

SEQ ID NO: 3610875 - DNA, 25 bp, Homo sapien
acacctgatttccacgcggtcccct

SEQ ID NO: 3610876 - DNA, 25 bp, Homo sapien
tgcataggcaaagggggtagctctt

SEQ ID NO: 3610877 - DNA, 25 bp, Homo sapien
gcataggcaaagggggtagctcttg

SEQ ID NO: 3610878 - DNA, 25 bp, Homo sapien
gggggtagctcttggcccatgagtc

SEQ ID NO: 3610879 - DNA, 25 bp, Homo sapien
cagccggtagttgagctcacagtaa

SEQ ID NO: 3610880 - DNA, 25 bp, Homo sapien
caaggtgtacaaaccactcgactcc

SEQ ID NO: 3610881 - DNA, 25 bp, Homo sapien
gctgtgccttcagaatactctgcaa

SEQ ID NO: 3610882 - DNA, 25 bp, Homo sapien
gtctgggacgactgaatgtggaccc

SEQ ID NO: 3610883 - DNA, 25 bp, Homo sapien
ggtgaactcgactacctgctatgcg

SEQ ID NO: 3610884 - DNA, 25 bp, Homo sapien
gagcagccgtctagatgtccactaa

SEQ ID NO: 3610885 - DNA, 25 bp, Homo sapien
tactgctcagtgtcaaccctagaaa

SEQ ID NO: 3610886 - DNA, 25 bp, Homo sapien
ggcttgaaagaacacaccctgatag

SEQ ID NO: 3610887 - DNA, 25 bp, Homo sapien
cacacctggcccaagggtggctttt

SEQ ID NO: 3610888 - DNA, 25 bp, Homo sapien
cacctggcccaagggtggcttttgg

SEQ ID NO: 3610889 - DNA, 25 bp, Homo sapien
tggcccaagggtggcttttgggaga

SEQ ID NO: 3610890 - DNA, 25 bp, Homo sapien
gcttttgggagaaagggctactcac

SEQ ID NO: 3610891 - DNA, 25 bp, Homo sapien
cattcttgtaccagatgacttgagg

SEQ ID NO: 3610892 - DNA, 25 bp, Homo sapien
tcttgtaccagatgacttgaggaat

SEQ ID NO: 3610893 - DNA, 25 bp, Homo sapien
tgtaccagatgacttgaggaatggg

SEQ ID NO: 3610894 - DNA, 25 bp, Homo sapien
ccggccattcttgtaccagatgact

SEQ ID NO: 3610895 - DNA, 25 bp, Homo sapien
gggttgacctggatgtttggctcct

SEQ ID NO: 3610896 - DNA, 25 bp, Homo sapien
cctcaggctccttactgttcacagg

SEQ ID NO: 3610897 - DNA, 25 bp, Homo sapien
gctccttactgttcacagggatgcc

SEQ ID NO: 3610898 - DNA, 25 bp, Homo sapien
gacctggatgtttggctcctccgga

SEQ ID NO: 3610899 - DNA, 25 bp, Homo sapien
agctggatgcggtactcctgggacc

SEQ ID NO: 3610900 - DNA, 25 bp, Homo sapien
ttgccctggcacaagaagatgcgct

SEQ ID NO: 3610901 - DNA, 25 bp, Homo sapien
cacggaagatgagcgtccgcttctc

SEQ ID NO: 3610902 - DNA, 25 bp, Homo sapien
tgacttgagtcagggccagagtagc

SEQ ID NO: 3610903 - DNA, 25 bp, Homo sapien
agaaaaccagtcgacatggctgagg

SEQ ID NO: 3610904 - DNA, 25 bp, Homo sapien
aaaccagtcgacatggctgaggttg

SEQ ID NO: 3610905 - DNA, 25 bp, Homo sapien
cagtcgacatggctgaggttgcctt

SEQ ID NO: 3610906 - DNA, 25 bp, Homo sapien
gggagaggccgcacttcagaagggc

SEQ ID NO: 3610907 - DNA, 25 bp, Homo sapien
gtgacgtcagtggtgccagcgtgct

SEQ ID NO: 3610908 - DNA, 25 bp, Homo sapien
gaggaggtgatgtcactcgacacca

SEQ ID NO: 3610909 - DNA, 25 bp, Homo sapien
ccgcggaccccaccctaggtagctg

SEQ ID NO: 3610910 - DNA, 25 bp, Homo sapien
caggagtgacgtcagtggtgccagc

SEQ ID NO: 3610911 - DNA, 25 bp, Homo sapien
cttggctctcggacaaggagggcag

SEQ ID NO: 3610912 - DNA, 25 bp, Homo sapien
agcctcagacccctgactcctccca

SEQ ID NO: 3610913 - DNA, 25 bp, Homo sapien
gagcctcagacccctgactcctccc

SEQ ID NO: 3610914 - DNA, 25 bp, Homo sapien
ggcgagcaagaaggcgcagaccagc

SEQ ID NO: 3610915 - DNA, 25 bp, Homo sapien
cgagcaagaaggcgcagaccagcct

SEQ ID NO: 3610916 - DNA, 25 bp, Homo sapien
caggcggcgagcaagaaggcgcaga

SEQ ID NO: 3610917 - DNA, 25 bp, Homo sapien
gcggcgagcaagaaggcgcagacca

SEQ ID NO: 3610918 - DNA, 25 bp, Homo sapien
ggctgaattcgcaggcccaaggtgt

SEQ ID NO: 3610919 - DNA, 25 bp, Homo sapien
aacgcaagctcctgcaagtctagcc

SEQ ID NO: 3610920 - DNA, 25 bp, Homo sapien
tgggctgtcccttcaaacgcaagct

SEQ ID NO: 3610921 - DNA, 25 bp, Homo sapien
tgttcacacttgtccagacctgggc

SEQ ID NO: 3610922 - DNA, 25 bp, Homo sapien
gggaggtgctcttgcctcactctga

SEQ ID NO: 3610923 - DNA, 25 bp, Homo sapien
ctcccaaaacgccggcttctccctg

SEQ ID NO: 3610924 - DNA, 25 bp, Homo sapien
ctcttgaactaaggctctagggagg

SEQ ID NO: 3610925 - DNA, 25 bp, Homo sapien
tccctgggtcttctggcctcttgaa

SEQ ID NO: 3610926 - DNA, 25 bp, Homo sapien
actgatcgccacaggatttttgatc

SEQ ID NO: 3610927 - DNA, 25 bp, Homo sapien
atgagcccactactgatcgccacag

SEQ ID NO: 3610928 - DNA, 25 bp, Homo sapien
tgatcgccacaggatttttgatctg

SEQ ID NO: 3610929 - DNA, 25 bp, Homo sapien
ggtatgagcccactactgatcgcca

SEQ ID NO: 3610930 - DNA, 25 bp, Homo sapien
gcagacccctattggtatagtgcac

SEQ ID NO: 3610931 - DNA, 25 bp, Homo sapien
gtgcagacccctattggtatagtgc

SEQ ID NO: 3610932 - DNA, 25 bp, Homo sapien
ttagtgcagacccctattggtatag

SEQ ID NO: 3610933 - DNA, 25 bp, Homo sapien
tagtgcagacccctattggtatagt

SEQ ID NO: 3610934 - DNA, 25 bp, Homo sapien
ccttttgggtgcaaagcgccgctag

SEQ ID NO: 3610935 - DNA, 25 bp, Homo sapien
tattctcagttaggacccggagaca

SEQ ID NO: 3610936 - DNA, 25 bp, Homo sapien
cgtcttcgagaggatgtcatgcggc

SEQ ID NO: 3610937 - DNA, 25 bp, Homo sapien
tcattgctggccttgatcgaagccg

SEQ ID NO: 3610938 - DNA, 25 bp, Homo sapien
cctgcagaccctcaatgtctacctc

SEQ ID NO: 3610939 - DNA, 25 bp, Homo sapien
atgtctacctctgaagcctccttcc

SEQ ID NO: 3610940 - DNA, 25 bp, Homo sapien
gggcatcctgcagaccctcaatgtc

SEQ ID NO: 3610941 - DNA, 25 bp, Homo sapien
gcatcctgcagaccctcaatgtcta

SEQ ID NO: 3610942 - DNA, 25 bp, Homo sapien
ttttgcggccacaacacatcagtgt

SEQ ID NO: 3610943 - DNA, 25 bp, Homo sapien
cagtctcaggagtttacccctggga

SEQ ID NO: 3610944 - DNA, 25 bp, Homo sapien
ggttagtatctctcgggtgccctca

SEQ ID NO: 3610945 - DNA, 25 bp, Homo sapien
cctgtgatcgtctgatgaggctccc

SEQ ID NO: 3610946 - DNA, 25 bp, Homo sapien
tctcaggagggataaccggatttct

SEQ ID NO: 3610947 - DNA, 25 bp, Homo sapien
catggagagggcagactgtgcacat

SEQ ID NO: 3610948 - DNA, 25 bp, Homo sapien
cactagggtccaaatacagaagggc

SEQ ID NO: 3610949 - DNA, 25 bp, Homo sapien
ccagctcactgggagtctcaggagg

SEQ ID NO: 3610950 - DNA, 25 bp, Homo sapien
gcagaggaccaggaagagagcaccc

SEQ ID NO: 3610951 - DNA, 25 bp, Homo sapien
cctggaccagagcaactgggggact

SEQ ID NO: 3610952 - DNA, 25 bp, Homo sapien
ctcctggaccagagcaactggggga

SEQ ID NO: 3610953 - DNA, 25 bp, Homo sapien
aggaagagagcaccccaccgtgggc

SEQ ID NO: 3610954 - DNA, 25 bp, Homo sapien
gcagcaggacggagagtgctctacc

SEQ ID NO: 3610955 - DNA, 25 bp, Homo sapien
tcattcacaatattccaggggggcc

SEQ ID NO: 3610956 - DNA, 25 bp, Homo sapien
tccttctaggagtgagagcatgagc

SEQ ID NO: 3610957 - DNA, 25 bp, Homo sapien
gacctgatcgcagacagccactgtt

SEQ ID NO: 3610958 - DNA, 25 bp, Homo sapien
ggtgacggcgtcgtaatgtccctgc

SEQ ID NO: 3610959 - DNA, 25 bp, Homo sapien
gagtacaccagaaatccggagaagg

SEQ ID NO: 3610960 - DNA, 25 bp, Homo sapien
gcatggacggcgaagtagtagaccc

SEQ ID NO: 3610961 - DNA, 25 bp, Homo sapien
gcatagatgccaatgtagtcaccca

SEQ ID NO: 3610962 - DNA, 25 bp, Homo sapien
ggatcgcggaggcaccgagcactcc

SEQ ID NO: 3610963 - DNA, 25 bp, Homo sapien
gcggatcgcggaggcaccgagcact

SEQ ID NO: 3610964 - DNA, 25 bp, Homo sapien
aaggcggatcgcggaggcaccgagc

SEQ ID NO: 3610965 - DNA, 25 bp, Homo sapien
aggcggatcgcggaggcaccgagca

SEQ ID NO: 3610966 - DNA, 25 bp, Homo sapien
gctgcaaagcgcggggagtggcgcc

SEQ ID NO: 3610967 - DNA, 25 bp, Homo sapien
agggctgcaaagcgcggggagtggc

SEQ ID NO: 3610968 - DNA, 25 bp, Homo sapien
caaagcgcggggagtggcgccccct

SEQ ID NO: 3610969 - DNA, 25 bp, Homo sapien
tgcctgagcttcggccagcgcctcc

SEQ ID NO: 3610970 - DNA, 25 bp, Homo sapien
cgccaccgatagccgcggcggtgcc

SEQ ID NO: 3610971 - DNA, 25 bp, Homo sapien
cgtcgcggccatcgcggcccggcaa

SEQ ID NO: 3610972 - DNA, 25 bp, Homo sapien
agcagcaggacgaggagtggcctca

SEQ ID NO: 3610973 - DNA, 25 bp, Homo sapien
cagtgggggcgagccggccgccagg

SEQ ID NO: 3610974 - DNA, 25 bp, Homo sapien
aggctggggatcttgttgtcgtcca

SEQ ID NO: 3610975 - DNA, 25 bp, Homo sapien
gcccggacgccggggtcctctcgca

SEQ ID NO: 3610976 - DNA, 25 bp, Homo sapien
cccggacgccggggtcctctcgcag

SEQ ID NO: 3610977 - DNA, 25 bp, Homo sapien
ccggacgccggggtcctctcgcagt

SEQ ID NO: 3610978 - DNA, 25 bp, Homo sapien
gactggagtcgggacccagaatcct

SEQ ID NO: 3610979 - DNA, 25 bp, Homo sapien
caggactggagtcgggacccagaat

SEQ ID NO: 3610980 - DNA, 25 bp, Homo sapien
ggactggagtcgggacccagaatcc

SEQ ID NO: 3610981 - DNA, 25 bp, Homo sapien
ctggagtcgggacccagaatcctgg

SEQ ID NO: 3610982 - DNA, 25 bp, Homo sapien
accccactgccgtgcccctgaggct

SEQ ID NO: 3610983 - DNA, 25 bp, Homo sapien
aggcgcgagagggtgggagcggcca

SEQ ID NO: 3610984 - DNA, 25 bp, Homo sapien
cccctgaggctgagcgctcgcaggg

SEQ ID NO: 3610985 - DNA, 25 bp, Homo sapien
cagggccgagcatccggagagcaca

SEQ ID NO: 3610986 - DNA, 25 bp, Homo sapien
aagtggtctcgattgtccggtggca

SEQ ID NO: 3610987 - DNA, 25 bp, Homo sapien
gaggcagaacttcgagagacggaca

SEQ ID NO: 3610988 - DNA, 25 bp, Homo sapien
gaaatagctgggaaataactcgtgg

SEQ ID NO: 3610989 - DNA, 25 bp, Homo sapien
cagacagccagttggatccctaggg

SEQ ID NO: 3610990 - DNA, 25 bp, Homo sapien
aaggatgggtagagaccctgctgat

SEQ ID NO: 3610991 - DNA, 25 bp, Homo sapien
tcagcagcctgggaccggtaaaggg

SEQ ID NO: 3610992 - DNA, 25 bp, Homo sapien
cctgaccggcaaaagaggacgggca

SEQ ID NO: 3610993 - DNA, 25 bp, Homo sapien
tggtagggtcccatgagccccagct

SEQ ID NO: 3610994 - DNA, 25 bp, Homo sapien
tccggaaatgctggtagcagggcag

SEQ ID NO: 3610995 - DNA, 25 bp, Homo sapien
aggccagactggcactggtgctccg

SEQ ID NO: 3610996 - DNA, 25 bp, Homo sapien
gtgcccagtagtgccaggccagact

SEQ ID NO: 3610997 - DNA, 25 bp, Homo sapien
agcctgttgcagttgaagggccagg

SEQ ID NO: 3610998 - DNA, 25 bp, Homo sapien
gccctccttccctccacccagaaga

SEQ ID NO: 3610999 - DNA, 25 bp, Homo sapien
ctgcggagggagagtggccttcagg

SEQ ID NO: 3611000 - DNA, 25 bp, Homo sapien
gcggagggagagtggccttcaggca

SEQ ID NO: 3611001 - DNA, 25 bp, Homo sapien
ttcaggcacctgctcccaggctcct

SEQ ID NO: 3611002 - DNA, 25 bp, Homo sapien
cttgtaaccgctgaggacctctacc

SEQ ID NO: 3611003 - DNA, 25 bp, Homo sapien
tggtgttgtagctcagaccgaggca

SEQ ID NO: 3611004 - DNA, 25 bp, Homo sapien
tgggtgatcatgcccacccagatgt

SEQ ID NO: 3611005 - DNA, 25 bp, Homo sapien
ccacccagatgttagggaaggctgt

SEQ ID NO: 3611006 - DNA, 25 bp, Homo sapien
catcgctgccatcggtgcagtctct

SEQ ID NO: 3611007 - DNA, 25 bp, Homo sapien
gggtgggaacaaggggccgctgcag

SEQ ID NO: 3611008 - DNA, 25 bp, Homo sapien
atccactgcacacccttacaccctc

SEQ ID NO: 3611009 - DNA, 25 bp, Homo sapien
atcggtgcagtctctccacatgtca

SEQ ID NO: 3611010 - DNA, 25 bp, Homo sapien
aaggccaggtaggtggctgagaagc

SEQ ID NO: 3611011 - DNA, 25 bp, Homo sapien
tctccgtggcattgaaggccaggta

SEQ ID NO: 3611012 - DNA, 25 bp, Homo sapien
gctgagaagcctccactgctgatgc

SEQ ID NO: 3611013 - DNA, 25 bp, Homo sapien
tccactgctgatgccatgatctgtc

SEQ ID NO: 3611014 - DNA, 25 bp, Homo sapien
gctcatggtgcgaggagacgaggtg

SEQ ID NO: 3611015 - DNA, 25 bp, Homo sapien
ccagctcatggtgcgaggagacgag

SEQ ID NO: 3611016 - DNA, 25 bp, Homo sapien
agccagctcatggtgcgaggagacg

SEQ ID NO: 3611017 - DNA, 25 bp, Homo sapien
tcatggtgcgaggagacgaggtggg

SEQ ID NO: 3611018 - DNA, 25 bp, Homo sapien
ggctgaagttgtggaactgtagttc

SEQ ID NO: 3611019 - DNA, 25 bp, Homo sapien
tgtggaactgtagttctatgctgtg

SEQ ID NO: 3611020 - DNA, 25 bp, Homo sapien
gcaggcaccgagatatgccaggtgc

SEQ ID NO: 3611021 - DNA, 25 bp, Homo sapien
cctgagctgctggtctcatacacct

SEQ ID NO: 3611022 - DNA, 25 bp, Homo sapien
gttggtgagggtactgctgcaggta

SEQ ID NO: 3611023 - DNA, 25 bp, Homo sapien
ttggtgagggtactgctgcaggtag

SEQ ID NO: 3611024 - DNA, 25 bp, Homo sapien
agtagagaaagtgccctggaggcca

SEQ ID NO: 3611025 - DNA, 25 bp, Homo sapien
tgccctggaggccagtcagattccc

SEQ ID NO: 3611026 - DNA, 25 bp, Homo sapien
ggagtagagaaagtgccctggaggc

SEQ ID NO: 3611027 - DNA, 25 bp, Homo sapien
ctgggagtagagaaagtgccctgga

SEQ ID NO: 3611028 - DNA, 25 bp, Homo sapien
gcacagttggcaaaaccatcacaca

SEQ ID NO: 3611029 - DNA, 25 bp, Homo sapien
agaacttggcactgcaattggtctc

SEQ ID NO: 3611030 - DNA, 25 bp, Homo sapien
cttggcactgcaattggtctcatca

SEQ ID NO: 3611031 - DNA, 25 bp, Homo sapien
catcactgccgtcagcacagttggc

SEQ ID NO: 3611032 - DNA, 25 bp, Homo sapien
tgctgtcagagacgaagaccaccag

SEQ ID NO: 3611033 - DNA, 25 bp, Homo sapien
tagcctggtaccaggcatggaaacc

SEQ ID NO: 3611034 - DNA, 25 bp, Homo sapien
ggaaaccaaatccttccacactgct

SEQ ID NO: 3611035 - DNA, 25 bp, Homo sapien
tcagagacgaagaccaccaggaggt

SEQ ID NO: 3611036 - DNA, 25 bp, Homo sapien
agctgtattgcatggtctgtggcca

SEQ ID NO: 3611037 - DNA, 25 bp, Homo sapien
gaggccacactctctatgctgaggg

SEQ ID NO: 3611038 - DNA, 25 bp, Homo sapien
tatgctgagggcttcgatcttgagc

SEQ ID NO: 3611039 - DNA, 25 bp, Homo sapien
ttccaagcgatcaaaaaggcaagag

SEQ ID NO: 3611040 - DNA, 25 bp, Homo sapien
atatgccacacgcagtgggtgttgg

SEQ ID NO: 3611041 - DNA, 25 bp, Homo sapien
taagggtctgggtagttagggctgc

SEQ ID NO: 3611042 - DNA, 25 bp, Homo sapien
ctggatatgccacacgcagtgggtg

SEQ ID NO: 3611043 - DNA, 25 bp, Homo sapien
tctgggtagttagggctgctgaaga

SEQ ID NO: 3611044 - DNA, 25 bp, Homo sapien
tggtcgtggtaaggcctccggcagg

SEQ ID NO: 3611045 - DNA, 25 bp, Homo sapien
tggtggtcgtggtaaggcctccggc

SEQ ID NO: 3611046 - DNA, 25 bp, Homo sapien
gcaggcagtgggctatgggacgccc

SEQ ID NO: 3611047 - DNA, 25 bp, Homo sapien
tgggctatgggacgccccagatggg

SEQ ID NO: 3611048 - DNA, 25 bp, Homo sapien
atgatggccaccagcagcccaagca

SEQ ID NO: 3611049 - DNA, 25 bp, Homo sapien
gggccaggatgatggccaccagcag

SEQ ID NO: 3611050 - DNA, 25 bp, Homo sapien
caggatgatggccaccagcagccca

SEQ ID NO: 3611051 - DNA, 25 bp, Homo sapien
gatgatggccaccagcagcccaagc

SEQ ID NO: 3611052 - DNA, 25 bp, Homo sapien
gcagtctggccgtagccctcgagga

SEQ ID NO: 3611053 - DNA, 25 bp, Homo sapien
tggccgtagccctcgaggacgccga

SEQ ID NO: 3611054 - DNA, 25 bp, Homo sapien
ggagaagcggcagtctggccgtagc

SEQ ID NO: 3611055 - DNA, 25 bp, Homo sapien
agaagcggcagtctggccgtagccc

SEQ ID NO: 3611056 - DNA, 25 bp, Homo sapien
actcaggctcgaaggcaggattgca

SEQ ID NO: 3611057 - DNA, 25 bp, Homo sapien
cccagactcaggctcgaaggcagga

SEQ ID NO: 3611058 - DNA, 25 bp, Homo sapien
gctgtagctggcatcctctgggaaa

SEQ ID NO: 3611059 - DNA, 25 bp, Homo sapien
cagggagctgggacgctgtagctgg

SEQ ID NO: 3611060 - DNA, 25 bp, Homo sapien
cttgctcgattctgttgcctccatg

SEQ ID NO: 3611061 - DNA, 25 bp, Homo sapien
catgcagaggatgacatctgagaag

SEQ ID NO: 3611062 - DNA, 25 bp, Homo sapien
tccatgcagaggatgacatctgaga

SEQ ID NO: 3611063 - DNA, 25 bp, Homo sapien
ttgctcgattctgttgcctccatgc

SEQ ID NO: 3611064 - DNA, 25 bp, Homo sapien
ggctctgcatggctttctggagtcc

SEQ ID NO: 3611065 - DNA, 25 bp, Homo sapien
caaggctctgcatggctttctggag

SEQ ID NO: 3611066 - DNA, 25 bp, Homo sapien
gcacaaggctctgcatggctttctg

SEQ ID NO: 3611067 - DNA, 25 bp, Homo sapien
ggcacaaggctctgcatggctttct

SEQ ID NO: 3611068 - DNA, 25 bp, Homo sapien
gggcagcctctactacccgagggaa

SEQ ID NO: 3611069 - DNA, 25 bp, Homo sapien
tctactacccgagggaaaaggctgc

SEQ ID NO: 3611070 - DNA, 25 bp, Homo sapien
agggaaaaggctgccaggctagacc

SEQ ID NO: 3611071 - DNA, 25 bp, Homo sapien
gctgccaggctagaccagttcttgg

SEQ ID NO: 3611072 - DNA, 25 bp, Homo sapien
cgactacacccaggatgtagtagag

SEQ ID NO: 3611073 - DNA, 25 bp, Homo sapien
catcctcgactacacccaggatgta

SEQ ID NO: 3611074 - DNA, 25 bp, Homo sapien
tcctgcaactgtctgcgttatgaag

SEQ ID NO: 3611075 - DNA, 25 bp, Homo sapien
ctgcaactgtctgcgttatgaaggg

SEQ ID NO: 3611076 - DNA, 25 bp, Homo sapien
tccctagttctaagaccagcagcag

SEQ ID NO: 3611077 - DNA, 25 bp, Homo sapien
gggtcaccgagtgcaccaaaggcat

SEQ ID NO: 3611078 - DNA, 25 bp, Homo sapien
tgacaccaaaggagacgtgggtcac

SEQ ID NO: 3611079 - DNA, 25 bp, Homo sapien
tgaacagtgctaatgaagaggtgac

SEQ ID NO: 3611080 - DNA, 25 bp, Homo sapien
gaacttgatgccctgtcggaaggaa

SEQ ID NO: 3611081 - DNA, 25 bp, Homo sapien
caacgtcccagctatgaagaggcct

SEQ ID NO: 3611082 - DNA, 25 bp, Homo sapien
tttacaaatgcaaacgccgagggca

SEQ ID NO: 3611083 - DNA, 25 bp, Homo sapien
tgagaaactcggtccaaagggccta

SEQ ID NO: 3611084 - DNA, 25 bp, Homo sapien
ctggccagttcgtagaagagcaggt

SEQ ID NO: 3611085 - DNA, 25 bp, Homo sapien
gctggtgcgcacttggctggaggac

SEQ ID NO: 3611086 - DNA, 25 bp, Homo sapien
gaagagcaggtaggcgtcgctggtg

SEQ ID NO: 3611087 - DNA, 25 bp, Homo sapien
taggcgtcgctggtgcgcacttggc

SEQ ID NO: 3611088 - DNA, 25 bp, Homo sapien
ccacgggcagcggcttcgtggcctt

SEQ ID NO: 3611089 - DNA, 25 bp, Homo sapien
tcgtggccttaaactttgccatcca

SEQ ID NO: 3611090 - DNA, 25 bp, Homo sapien
ggccggcctgcctttcagggagcct

SEQ ID NO: 3611091 - DNA, 25 bp, Homo sapien
ggcagcggcttcgtggccttaaact

SEQ ID NO: 3611092 - DNA, 25 bp, Homo sapien
gactgcgacagtaggctgtatagtg

SEQ ID NO: 3611093 - DNA, 25 bp, Homo sapien
ctggagtcgttgaaagtgtgccatt

SEQ ID NO: 3611094 - DNA, 25 bp, Homo sapien
tgtccctggactgcgacagtaggct

SEQ ID NO: 3611095 - DNA, 25 bp, Homo sapien
cgttgaaagtgtgccattctcctgt

SEQ ID NO: 3611096 - DNA, 25 bp, Homo sapien
tgattggacacagcgtacaggttgt

SEQ ID NO: 3611097 - DNA, 25 bp, Homo sapien
cacagcgtacaggttgtaaacagca

SEQ ID NO: 3611098 - DNA, 25 bp, Homo sapien
gcgtacaggttgtaaacagcatggt

SEQ ID NO: 3611099 - DNA, 25 bp, Homo sapien
tggttccggagtgattggacacagc

SEQ ID NO: 3611100 - DNA, 25 bp, Homo sapien
cttgctggttcggatcctggattct

SEQ ID NO: 3611101 - DNA, 25 bp, Homo sapien
tccaggtctcttagggggaagttca

SEQ ID NO: 3611102 - DNA, 25 bp, Homo sapien
tagggggaagttcacaaatgttgtg

SEQ ID NO: 3611103 - DNA, 25 bp, Homo sapien
ttgctggttcggatcctggattctg

SEQ ID NO: 3611104 - DNA, 25 bp, Homo sapien
ctacaaggtccgtttcttccgactg

SEQ ID NO: 3611105 - DNA, 25 bp, Homo sapien
ccgactgttcccctcacctatgggc

SEQ ID NO: 3611106 - DNA, 25 bp, Homo sapien
ggatagtcaaaccaatgcagaaggg

SEQ ID NO: 3611107 - DNA, 25 bp, Homo sapien
ctggcattgacgtgagtcaaggata

SEQ ID NO: 3611108 - DNA, 25 bp, Homo sapien
cccagccctgatggatcttaaggat

SEQ ID NO: 3611109 - DNA, 25 bp, Homo sapien
tctttatacaccgttttctgcctcg

SEQ ID NO: 3611110 - DNA, 25 bp, Homo sapien
tatacaccgttttctgcctcggcag

SEQ ID NO: 3611111 - DNA, 25 bp, Homo sapien
ttctgcctcggcagcgacagcatgt

SEQ ID NO: 3611112 - DNA, 25 bp, Homo sapien
tggatggagaacttctttatacacc

SEQ ID NO: 3611113 - DNA, 25 bp, Homo sapien
aaatttgttcttgctattaccgaag

SEQ ID NO: 3611114 - DNA, 25 bp, Homo sapien
ttcttgctattaccgaagggtgact

SEQ ID NO: 3611115 - DNA, 25 bp, Homo sapien
ttgctattaccgaagggtgacttac

SEQ ID NO: 3611116 - DNA, 25 bp, Homo sapien
tgttcttgctattaccgaagggtga

SEQ ID NO: 3611117 - DNA, 25 bp, Homo sapien
tggtgaagagcctcatgcagtccat

SEQ ID NO: 3611118 - DNA, 25 bp, Homo sapien
gcctcatgcagtccattaatgtcac

SEQ ID NO: 3611119 - DNA, 25 bp, Homo sapien
atctccatcaagcacatcctctttg

SEQ ID NO: 3611120 - DNA, 25 bp, Homo sapien
gcagtccattaatgtcacctcagga

SEQ ID NO: 3611121 - DNA, 25 bp, Homo sapien
agcgagctctttagctgcccaacaa

SEQ ID NO: 3611122 - DNA, 25 bp, Homo sapien
caatgggcagtgagaggtcccagaa

SEQ ID NO: 3611123 - DNA, 25 bp, Homo sapien
gtcgaagaccgtagaacagtaacca

SEQ ID NO: 3611124 - DNA, 25 bp, Homo sapien
taaccacaatctgtacacgtcagcg

SEQ ID NO: 3611125 - DNA, 25 bp, Homo sapien
cttccccgggagagtgattcttagg

SEQ ID NO: 3611126 - DNA, 25 bp, Homo sapien
acactaggcagaaacaggcttcccc

SEQ ID NO: 3611127 - DNA, 25 bp, Homo sapien
tcttagggcttttcatgctccactc

SEQ ID NO: 3611128 - DNA, 25 bp, Homo sapien
tccactcaggcaagagcaggcaaca

SEQ ID NO: 3611129 - DNA, 25 bp, Homo sapien
tactgtcttcccgttctagatattt

SEQ ID NO: 3611130 - DNA, 25 bp, Homo sapien
cccgatcctactgtcttcccgttct

SEQ ID NO: 3611131 - DNA, 25 bp, Homo sapien
gatcctactgtcttcccgttctaga

SEQ ID NO: 3611132 - DNA, 25 bp, Homo sapien
tgtcttcccgttctagatattttct

SEQ ID NO: 3611133 - DNA, 25 bp, Homo sapien
gacttaggtctcagtgtcactcggt

SEQ ID NO: 3611134 - DNA, 25 bp, Homo sapien
acctcgttatggagcccatccagaa

SEQ ID NO: 3611135 - DNA, 25 bp, Homo sapien
catccagaagaaagcgaaggaactc

SEQ ID NO: 3611136 - DNA, 25 bp, Homo sapien
gaagatgatcgaggttctcagggtt

SEQ ID NO: 3611137 - DNA, 25 bp, Homo sapien
cacctcttgtcctaagaacctgctc

SEQ ID NO: 3611138 - DNA, 25 bp, Homo sapien
acctcttgtcctaagaacctgctcc

SEQ ID NO: 3611139 - DNA, 25 bp, Homo sapien
cacccacctgagaggacatgtctgc

SEQ ID NO: 3611140 - DNA, 25 bp, Homo sapien
acacctcttgtcctaagaacctgct

SEQ ID NO: 3611141 - DNA, 25 bp, Homo sapien
tgggctcaccacatcattgggggat

SEQ ID NO: 3611142 - DNA, 25 bp, Homo sapien
aacaaagcgcggtgcgtatctctgg

SEQ ID NO: 3611143 - DNA, 25 bp, Homo sapien
gggatgaagtccatatggtctgaat

SEQ ID NO: 3611144 - DNA, 25 bp, Homo sapien
tatggtctgaattagttttgcaaac

SEQ ID NO: 3611145 - DNA, 25 bp, Homo sapien
tgcaggtcccgcatgtagagcctct

SEQ ID NO: 3611146 - DNA, 25 bp, Homo sapien
tgcattgctgccgtggtgcaggtcc

SEQ ID NO: 3611147 - DNA, 25 bp, Homo sapien
cgagtgttgctcaggcactgcagaa

SEQ ID NO: 3611148 - DNA, 25 bp, Homo sapien
tccacgagggctgtgtgtgcattgc

SEQ ID NO: 3611149 - DNA, 25 bp, Homo sapien
ttcccaaggtttcgaagaccagcca

SEQ ID NO: 3611150 - DNA, 25 bp, Homo sapien
tgttcccaaggtttcgaagaccagc

SEQ ID NO: 3611151 - DNA, 25 bp, Homo sapien
gagccaccgcgtcctgcctaaatgc

SEQ ID NO: 3611152 - DNA, 25 bp, Homo sapien
ccaccgcgtcctgcctaaatgcctg

SEQ ID NO: 3611153 - DNA, 25 bp, Homo sapien
gtgagccaccgcgtcctgcctaaat

SEQ ID NO: 3611154 - DNA, 25 bp, Homo sapien
gcgtgagccaccgcgtcctgcctaa

SEQ ID NO: 3611155 - DNA, 25 bp, Homo sapien
tcagcaaatagacagctttcacctt

SEQ ID NO: 3611156 - DNA, 25 bp, Homo sapien
atcagcaaatagacagctttcacct

SEQ ID NO: 3611157 - DNA, 25 bp, Homo sapien
agccccacgaaggtggagagcagca

SEQ ID NO: 3611158 - DNA, 25 bp, Homo sapien
gggtcacggtgtacgaggtgcgcat

SEQ ID NO: 3611159 - DNA, 25 bp, Homo sapien
agctccttggcgagggcgggaaagg

SEQ ID NO: 3611160 - DNA, 25 bp, Homo sapien
ggcagggtcacggtgtacgaggtgc

SEQ ID NO: 3611161 - DNA, 25 bp, Homo sapien
gccctcgcttaacgttggcagcggg

SEQ ID NO: 3611162 - DNA, 25 bp, Homo sapien
cggcgagaccgctacaggacagcgt

SEQ ID NO: 3611163 - DNA, 25 bp, Homo sapien
ctttggccctcgcttaacgttggca

SEQ ID NO: 3611164 - DNA, 25 bp, Homo sapien
cggtgccacagtccggacgccgagg

SEQ ID NO: 3611165 - DNA, 25 bp, Homo sapien
ctaacggccaggatacagcccacag

SEQ ID NO: 3611166 - DNA, 25 bp, Homo sapien
taacggccaggatacagcccacagc

SEQ ID NO: 3611167 - DNA, 25 bp, Homo sapien
ctgctccaggaaatgacgataaggg

SEQ ID NO: 3611168 - DNA, 25 bp, Homo sapien
gcattcccggctaaagtgccttatg

SEQ ID NO: 3611169 - DNA, 25 bp, Homo sapien
gaaacactagctcaactgcagggca

SEQ ID NO: 3611170 - DNA, 25 bp, Homo sapien
gagtttgtcccagggcaatctgcca

SEQ ID NO: 3611171 - DNA, 25 bp, Homo sapien
gccctccaagcagtatttcttgctg

SEQ ID NO: 3611172 - DNA, 25 bp, Homo sapien
cagccctccaagcagtatttcttgc

SEQ ID NO: 3611173 - DNA, 25 bp, Homo sapien
agccctccaagcagtatttcttgct

SEQ ID NO: 3611174 - DNA, 25 bp, Homo sapien
atatgcttgcctgtccatctgtcca

SEQ ID NO: 3611175 - DNA, 25 bp, Homo sapien
gtccacccgccatctacccgtgtat

SEQ ID NO: 3611176 - DNA, 25 bp, Homo sapien
ggaggagacacagcatccagccctt

SEQ ID NO: 3611177 - DNA, 25 bp, Homo sapien
gcccttctgcccatatgcttgcctg

SEQ ID NO: 3611178 - DNA, 25 bp, Homo sapien
cccccattgtgggaggcacgtggca

SEQ ID NO: 3611179 - DNA, 25 bp, Homo sapien
gcaggggatctagagataggatttc

SEQ ID NO: 3611180 - DNA, 25 bp, Homo sapien
cagcccccattgtgggaggcacgtg

SEQ ID NO: 3611181 - DNA, 25 bp, Homo sapien
gagagcttgccacctaatgggcaca

SEQ ID NO: 3611182 - DNA, 25 bp, Homo sapien
tacagaaaaggcagatgtcgtcagt

SEQ ID NO: 3611183 - DNA, 25 bp, Homo sapien
tcagtgccccaagagaggcgtgtgc

SEQ ID NO: 3611184 - DNA, 25 bp, Homo sapien
cgtgtgcgggcattagttggcgagc

SEQ ID NO: 3611185 - DNA, 25 bp, Homo sapien
gttggcgagcgagcccatgccagcc

SEQ ID NO: 3611186 - DNA, 25 bp, Homo sapien
tactggactatcctcgagtgcgcgg

SEQ ID NO: 3611187 - DNA, 25 bp, Homo sapien
catcagtcaggttgggagtcgagcc

SEQ ID NO: 3611188 - DNA, 25 bp, Homo sapien
tctccaccaggagcagcctgtcagt

SEQ ID NO: 3611189 - DNA, 25 bp, Homo sapien
ggagtcgagccctcagcctggctgt

SEQ ID NO: 3611190 - DNA, 25 bp, Homo sapien
tggtcactccataagggaatccgct

SEQ ID NO: 3611191 - DNA, 25 bp, Homo sapien
tctatccggtagctatctgaggtcc

SEQ ID NO: 3611192 - DNA, 25 bp, Homo sapien
tgtaggcaccatagcccgacttggc

SEQ ID NO: 3611193 - DNA, 25 bp, Homo sapien
tccaggtagtcgaccaggtattcag

SEQ ID NO: 3611194 - DNA, 25 bp, Homo sapien
gcactcagtggggactgggagcctc

SEQ ID NO: 3611195 - DNA, 25 bp, Homo sapien
ccttcagggtggcactcagtgggga

SEQ ID NO: 3611196 - DNA, 25 bp, Homo sapien
gggtggcactcagtggggactggga

SEQ ID NO: 3611197 - DNA, 25 bp, Homo sapien
cagtggggactgggagcctcatggg

SEQ ID NO: 3611198 - DNA, 25 bp, Homo sapien
ccaggtctttaaaatcctggccagt

SEQ ID NO: 3611199 - DNA, 25 bp, Homo sapien
gggaaaagtgatgcttatttgcccc

SEQ ID NO: 3611200 - DNA, 25 bp, Homo sapien
agtgatgcttatttgcccccggcca

SEQ ID NO: 3611201 - DNA, 25 bp, Homo sapien
cccagaggatcatgaattttaatct

SEQ ID NO: 3611202 - DNA, 25 bp, Homo sapien
tcagatttagggtcagttggggacc

SEQ ID NO: 3611203 - DNA, 25 bp, Homo sapien
cagaggccttccatcaccgtaaacg

SEQ ID NO: 3611204 - DNA, 25 bp, Homo sapien
ggccttccatcaccgtaaacgtgca

SEQ ID NO: 3611205 - DNA, 25 bp, Homo sapien
catcaccgtaaacgtgcagcctgta

SEQ ID NO: 3611206 - DNA, 25 bp, Homo sapien
agtggcagaggagcaagtagggtca

SEQ ID NO: 3611207 - DNA, 25 bp, Homo sapien
tggagtggcagaggagcaagtaggg

SEQ ID NO: 3611208 - DNA, 25 bp, Homo sapien
gcaagtagggtcagacgcctttccc

SEQ ID NO: 3611209 - DNA, 25 bp, Homo sapien
gtcagacgcctttccccgagggcat

SEQ ID NO: 3611210 - DNA, 25 bp, Homo sapien
tataggcccggaacagcattccttg

SEQ ID NO: 3611211 - DNA, 25 bp, Homo sapien
aaagctctagaatcccagtccacac

SEQ ID NO: 3611212 - DNA, 25 bp, Homo sapien
cagcagttttcagtccaggctgaca

SEQ ID NO: 3611213 - DNA, 25 bp, Homo sapien
aggcagtgggcagacatctggccac

SEQ ID NO: 3611214 - DNA, 25 bp, Homo sapien
ggcccttcatgtacactcctttgcc

SEQ ID NO: 3611215 - DNA, 25 bp, Homo sapien
cccttcatgtacactcctttgccca

SEQ ID NO: 3611216 - DNA, 25 bp, Homo sapien
gcccttcatgtacactcctttgccc

SEQ ID NO: 3611217 - DNA, 25 bp, Homo sapien
aggaaaaggtaactgggggatgatg

SEQ ID NO: 3611218 - DNA, 25 bp, Homo sapien
gaaaaggtaactgggggatgatgtc

SEQ ID NO: 3611219 - DNA, 25 bp, Homo sapien
gaatgcagtggaaagcccagaagct

SEQ ID NO: 3611220 - DNA, 25 bp, Homo sapien
tgtgtccaggggcactggatgggag

SEQ ID NO: 3611221 - DNA, 25 bp, Homo sapien
agggcagggaatgcagtggaaagcc

SEQ ID NO: 3611222 - DNA, 25 bp, Homo sapien
cagggaatgcagtggaaagcccaga

SEQ ID NO: 3611223 - DNA, 25 bp, Homo sapien
cggatccccgacaggtggcacgtac

SEQ ID NO: 3611224 - DNA, 25 bp, Homo sapien
tcccggatccccgacaggtggcacg

SEQ ID NO: 3611225 - DNA, 25 bp, Homo sapien
tgagctccaaaccggcactgatccc

SEQ ID NO: 3611226 - DNA, 25 bp, Homo sapien
tccaaaccggcactgatccccgaat

SEQ ID NO: 3611227 - DNA, 25 bp, Homo sapien
cctcttcttggagtatggacgagtc

SEQ ID NO: 3611228 - DNA, 25 bp, Homo sapien
tcttggagtatggacgagtcgaacc

SEQ ID NO: 3611229 - DNA, 25 bp, Homo sapien
ggacgagtcgaaccgggcacaagca

SEQ ID NO: 3611230 - DNA, 25 bp, Homo sapien
agtatggacgagtcgaaccgggcac

SEQ ID NO: 3611231 - DNA, 25 bp, Homo sapien
gcgctggcgcggcgcagtgagcacc

SEQ ID NO: 3611232 - DNA, 25 bp, Homo sapien
gctgcgggtgagtcccggctggcgc

SEQ ID NO: 3611233 - DNA, 25 bp, Homo sapien
gctggcgcggcgcagtgagcaccag

SEQ ID NO: 3611234 - DNA, 25 bp, Homo sapien
gcgggtgagtcccggctggcgctgg

SEQ ID NO: 3611235 - DNA, 25 bp, Homo sapien
gcctgactctctcccacctccgccg

SEQ ID NO: 3611236 - DNA, 25 bp, Homo sapien
ctgcctgactctctcccacctccgc

SEQ ID NO: 3611237 - DNA, 25 bp, Homo sapien
ctgactctctcccacctccgccggg

SEQ ID NO: 3611238 - DNA, 25 bp, Homo sapien
cccgggaaatcggcgccacccagcg

SEQ ID NO: 3611239 - DNA, 25 bp, Homo sapien
caacagttgcattggaatgtaaggt

SEQ ID NO: 3611240 - DNA, 25 bp, Homo sapien
tgcagttgcagagtcatcataggct

SEQ ID NO: 3611241 - DNA, 25 bp, Homo sapien
gttactggaacaaagaatcgtgtag

SEQ ID NO: 3611242 - DNA, 25 bp, Homo sapien
gggttgttgcgttcttctagttgtc

SEQ ID NO: 3611243 - DNA, 25 bp, Homo sapien
aattcctcaacacgttccttaggca

SEQ ID NO: 3611244 - DNA, 25 bp, Homo sapien
tggctgttctgcacgaaacaattcc

SEQ ID NO: 3611245 - DNA, 25 bp, Homo sapien
agtgttggctgttctgcacgaaaca

SEQ ID NO: 3611246 - DNA, 25 bp, Homo sapien
tgcacgaaacaattcctcaacacgt

SEQ ID NO: 3611247 - DNA, 25 bp, Homo sapien
tggttgctgcaaggcttgctctctg

SEQ ID NO: 3611248 - DNA, 25 bp, Homo sapien
gctggttgctgcaaggcttgctctc

SEQ ID NO: 3611249 - DNA, 25 bp, Homo sapien
ggctggttgctgcaaggcttgctct

SEQ ID NO: 3611250 - DNA, 25 bp, Homo sapien
tcgggctggttgctgcaaggcttgc

SEQ ID NO: 3611251 - DNA, 25 bp, Homo sapien
tgtgccgggcaaagatgcctcctgt

SEQ ID NO: 3611252 - DNA, 25 bp, Homo sapien
caggtccccggacgctgtgtagatt

SEQ ID NO: 3611253 - DNA, 25 bp, Homo sapien
tattgcaaacttgacaggtggcctc

SEQ ID NO: 3611254 - DNA, 25 bp, Homo sapien
taaagacaccttcacagcacgaaag

SEQ ID NO: 3611255 - DNA, 25 bp, Homo sapien
gagatgcagacattgcgcgtctcag

SEQ ID NO: 3611256 - DNA, 25 bp, Homo sapien
gtctcagtggacaatccagtccaga

SEQ ID NO: 3611257 - DNA, 25 bp, Homo sapien
tctgttgctcttgagcgggaattcc

SEQ ID NO: 3611258 - DNA, 25 bp, Homo sapien
ttgagcgggaattccacggccctag

SEQ ID NO: 3611259 - DNA, 25 bp, Homo sapien
cggctgtcgcggcctgtggctgaaa

SEQ ID NO: 3611260 - DNA, 25 bp, Homo sapien
ctgctgacttgaccagggagggacc

SEQ ID NO: 3611261 - DNA, 25 bp, Homo sapien
cctgctgacttgaccagggagggac

SEQ ID NO: 3611262 - DNA, 25 bp, Homo sapien
gggagggacccacggctgtcgcggc

SEQ ID NO: 3611263 - DNA, 25 bp, Homo sapien
tcgtgctcaccctcgcaatagtgga

SEQ ID NO: 3611264 - DNA, 25 bp, Homo sapien
tcagaaacaatcatcctacccagtg

SEQ ID NO: 3611265 - DNA, 25 bp, Homo sapien
gccttgaggacatgggcatctccca

SEQ ID NO: 3611266 - DNA, 25 bp, Homo sapien
catagcttagcgcagattcacgcaa

SEQ ID NO: 3611267 - DNA, 25 bp, Homo sapien
tctcgttagggtcattctgaaaaga

SEQ ID NO: 3611268 - DNA, 25 bp, Homo sapien
gtagcgttgctactaagtggttggg

SEQ ID NO: 3611269 - DNA, 25 bp, Homo sapien
tgggcaaatgtgtctcgttagggtc

SEQ ID NO: 3611270 - DNA, 25 bp, Homo sapien
cagtgtgcagtcattagcccctggg

SEQ ID NO: 3611271 - DNA, 25 bp, Homo sapien
aggagcgaaggccaggtggacacga

SEQ ID NO: 3611272 - DNA, 25 bp, Homo sapien
actgctggaggagcgaaggccaggt

SEQ ID NO: 3611273 - DNA, 25 bp, Homo sapien
ggagcgaaggccaggtggacacgag

SEQ ID NO: 3611274 - DNA, 25 bp, Homo sapien
ggcaggcactgctggaggagcgaag

SEQ ID NO: 3611275 - DNA, 25 bp, Homo sapien
tgtcctcaatgagatgccataagct

SEQ ID NO: 3611276 - DNA, 25 bp, Homo sapien
tctttgtcctcaatgagatgccata

SEQ ID NO: 3611277 - DNA, 25 bp, Homo sapien
gagatgccataagctgtggtggcac

SEQ ID NO: 3611278 - DNA, 25 bp, Homo sapien
caatgagatgccataagctgtggtg

SEQ ID NO: 3611279 - DNA, 25 bp, Homo sapien
tgcctcccttagaaacttgggccaa

SEQ ID NO: 3611280 - DNA, 25 bp, Homo sapien
tcctgagaagtgtccggctcctggg

SEQ ID NO: 3611281 - DNA, 25 bp, Homo sapien
cagcagggccatgcttttagcttcc

SEQ ID NO: 3611282 - DNA, 25 bp, Homo sapien
gtctcactccatggcttgcctcagg

SEQ ID NO: 3611283 - DNA, 25 bp, Homo sapien
gcagggagggatgatgaaccctcat

SEQ ID NO: 3611284 - DNA, 25 bp, Homo sapien
ggtagataatcgcatgcagcactgg

SEQ ID NO: 3611285 - DNA, 25 bp, Homo sapien
ccaggtttctggtcccgatgggcaa

SEQ ID NO: 3611286 - DNA, 25 bp, Homo sapien
tctctgcactggaacttgaggcttc

SEQ ID NO: 3611287 - DNA, 25 bp, Homo sapien
catgcctgccgaggagtgctgtcag

SEQ ID NO: 3611288 - DNA, 25 bp, Homo sapien
gacatgaaatccgtggcctggagga

SEQ ID NO: 3611289 - DNA, 25 bp, Homo sapien
agcaggctgatgccctcacacttga

SEQ ID NO: 3611290 - DNA, 25 bp, Homo sapien
tgatgccctcacacttgaccagttt

SEQ ID NO: 3611291 - DNA, 25 bp, Homo sapien
agggacatgaaatccgtggcctgga

SEQ ID NO: 3611292 - DNA, 25 bp, Homo sapien
ctctgagcactgtgacgttctggga

SEQ ID NO: 3611293 - DNA, 25 bp, Homo sapien
tctgagcactgtgacgttctgggag

SEQ ID NO: 3611294 - DNA, 25 bp, Homo sapien
tgagcactgtgacgttctgggagga

SEQ ID NO: 3611295 - DNA, 25 bp, Homo sapien
ctgagcactgtgacgttctgggagg

SEQ ID NO: 3611296 - DNA, 25 bp, Homo sapien
cctcgtccttgctagtgaaggcgga

SEQ ID NO: 3611297 - DNA, 25 bp, Homo sapien
ccttgctagtgaaggcggataagta

SEQ ID NO: 3611298 - DNA, 25 bp, Homo sapien
cgtgtaggtgccctcgtccttgcta

SEQ ID NO: 3611299 - DNA, 25 bp, Homo sapien
ggcggataagtagaggaccttcatg

SEQ ID NO: 3611300 - DNA, 25 bp, Homo sapien
tgtatttgctggtgaagttggttcg

SEQ ID NO: 3611301 - DNA, 25 bp, Homo sapien
gagcggtatgtgtgctcaggcaccc

SEQ ID NO: 3611302 - DNA, 25 bp, Homo sapien
aactcgtactggatgggtgaactgc

SEQ ID NO: 3611303 - DNA, 25 bp, Homo sapien
ttctttgtctcacgggtcaggctga

SEQ ID NO: 3611304 - DNA, 25 bp, Homo sapien
tggcggcagtccagacgaaggctct

SEQ ID NO: 3611305 - DNA, 25 bp, Homo sapien
cggcagtccagacgaaggctctggt

SEQ ID NO: 3611306 - DNA, 25 bp, Homo sapien
atggcggcagtccagacgaaggctc

SEQ ID NO: 3611307 - DNA, 25 bp, Homo sapien
gcagtccagacgaaggctctggtcc

SEQ ID NO: 3611308 - DNA, 25 bp, Homo sapien
caggccgttaggctggtcaccttct

SEQ ID NO: 3611309 - DNA, 25 bp, Homo sapien
taggcaggccgttaggctggtcacc

SEQ ID NO: 3611310 - DNA, 25 bp, Homo sapien
ggcaggccgttaggctggtcacctt

SEQ ID NO: 3611311 - DNA, 25 bp, Homo sapien
ctaggcaggccgttaggctggtcac

SEQ ID NO: 3611312 - DNA, 25 bp, Homo sapien
accagcagtgcctccttcaaactgg

SEQ ID NO: 3611313 - DNA, 25 bp, Homo sapien
cagcagtgcctccttcaaactggag

SEQ ID NO: 3611314 - DNA, 25 bp, Homo sapien
ctggcaccagcagtgcctccttcaa

SEQ ID NO: 3611315 - DNA, 25 bp, Homo sapien
gcagtgcctccttcaaactggaggg

SEQ ID NO: 3611316 - DNA, 25 bp, Homo sapien
ctgcggcacaggggcctcccaccca

SEQ ID NO: 3611317 - DNA, 25 bp, Homo sapien
tgcggcacaggggcctcccacccac

SEQ ID NO: 3611318 - DNA, 25 bp, Homo sapien
ccacctcaggccgtcagaatatcag

SEQ ID NO: 3611319 - DNA, 25 bp, Homo sapien
tgagccttggatcctatcaatgtgt

SEQ ID NO: 3611320 - DNA, 25 bp, Homo sapien
caggagatcttagggagttgatgct

SEQ ID NO: 3611321 - DNA, 25 bp, Homo sapien
caatgtgtttcaaggacaggagatc

SEQ ID NO: 3611322 - DNA, 25 bp, Homo sapien
ttttctgagactgtgagggagaagc

SEQ ID NO: 3611323 - DNA, 25 bp, Homo sapien
ctgcgcttttctgagactgtgaggg

SEQ ID NO: 3611324 - DNA, 25 bp, Homo sapien
cccagtcctgccccatgccgggtac

SEQ ID NO: 3611325 - DNA, 25 bp, Homo sapien
ggaaggaagccagggcgcctggagc

SEQ ID NO: 3611326 - DNA, 25 bp, Homo sapien
ctgttagcaggagagcgatgctgat

SEQ ID NO: 3611327 - DNA, 25 bp, Homo sapien
tgttagcaggagagcgatgctgatg

SEQ ID NO: 3611328 - DNA, 25 bp, Homo sapien
ttagcaggagagcgatgctgatggc

SEQ ID NO: 3611329 - DNA, 25 bp, Homo sapien
gttagcaggagagcgatgctgatgg

SEQ ID NO: 3611330 - DNA, 25 bp, Homo sapien
tatggcagtcatctaagtccctctc

SEQ ID NO: 3611331 - DNA, 25 bp, Homo sapien
tggcatagtggctatggcagtcatc

SEQ ID NO: 3611332 - DNA, 25 bp, Homo sapien
tgaacatgatactgccactggctct

SEQ ID NO: 3611333 - DNA, 25 bp, Homo sapien
ccctgcatctcactgaacatgatac

SEQ ID NO: 3611334 - DNA, 25 bp, Homo sapien
tagctaaggatgctcccagataggg

SEQ ID NO: 3611335 - DNA, 25 bp, Homo sapien
ttggctgaaccaacccttggcgagg

SEQ ID NO: 3611336 - DNA, 25 bp, Homo sapien
gagccggtagtctagcctatctgca

SEQ ID NO: 3611337 - DNA, 25 bp, Homo sapien
tgtatgtgagccaaggatgcttccc

SEQ ID NO: 3611338 - DNA, 25 bp, Homo sapien
tctggcttttgaatcgaggactctt

SEQ ID NO: 3611339 - DNA, 25 bp, Homo sapien
ccttgacgggtgaggctaggatccc

SEQ ID NO: 3611340 - DNA, 25 bp, Homo sapien
tcttgtttgagatgttgtgcgggct

SEQ ID NO: 3611341 - DNA, 25 bp, Homo sapien
ctagacgagttcagggtccctggcg

SEQ ID NO: 3611342 - DNA, 25 bp, Homo sapien
cggcgggcctcatccttaatccatt

SEQ ID NO: 3611343 - DNA, 25 bp, Homo sapien
gggaggtgcagtctgtattcatttc

SEQ ID NO: 3611344 - DNA, 25 bp, Homo sapien
ggaggtgcagtctgtattcatttcc

SEQ ID NO: 3611345 - DNA, 25 bp, Homo sapien
taatccatttccgtattccaatcct

SEQ ID NO: 3611346 - DNA, 25 bp, Homo sapien
ttccctctagctcgccatcctccat

SEQ ID NO: 3611347 - DNA, 25 bp, Homo sapien
aggtcacccggcagattccctctag

SEQ ID NO: 3611348 - DNA, 25 bp, Homo sapien
agcccgccgcgaggtcacccggcag

SEQ ID NO: 3611349 - DNA, 25 bp, Homo sapien
gccgcgaggtcacccggcagattcc

SEQ ID NO: 3611350 - DNA, 25 bp, Homo sapien
tatggaccccagctctcaagggtga

SEQ ID NO: 3611351 - DNA, 25 bp, Homo sapien
tgagccccgcaatggttgttcccct

SEQ ID NO: 3611352 - DNA, 25 bp, Homo sapien
ggtgcggcagcccaaagaacattat

SEQ ID NO: 3611353 - DNA, 25 bp, Homo sapien
gagctggagaactgacctgggctat

SEQ ID NO: 3611354 - DNA, 25 bp, Homo sapien
gaaacctggcctaccatctccagaa

SEQ ID NO: 3611355 - DNA, 25 bp, Homo sapien
ccagaccgggtcaatagctctatga

SEQ ID NO: 3611356 - DNA, 25 bp, Homo sapien
gagcccagggcaacaccgtcagata

SEQ ID NO: 3611357 - DNA, 25 bp, Homo sapien
tatgaggtgcctcttgcaatgcttc

SEQ ID NO: 3611358 - DNA, 25 bp, Homo sapien
gtggtgctttctaaagtgagttagt

SEQ ID NO: 3611359 - DNA, 25 bp, Homo sapien
agtggtgctttctaaagtgagttag

SEQ ID NO: 3611360 - DNA, 25 bp, Homo sapien
tggtgctttctaaagtgagttagtt

SEQ ID NO: 3611361 - DNA, 25 bp, Homo sapien
cagtggtgctttctaaagtgagtta

SEQ ID NO: 3611362 - DNA, 25 bp, Homo sapien
tttcaatggatcctccgtgactttg

SEQ ID NO: 3611363 - DNA, 25 bp, Homo sapien
gtgagactgcgcctaccacgtgtag

SEQ ID NO: 3611364 - DNA, 25 bp, Homo sapien
ttcttgtttgcagagttgtcctggg

SEQ ID NO: 3611365 - DNA, 25 bp, Homo sapien
ccacgtgtagctgcattcttgtttg

SEQ ID NO: 3611366 - DNA, 25 bp, Homo sapien
gtgggacagactgtgccccggcccc

SEQ ID NO: 3611367 - DNA, 25 bp, Homo sapien
tgggacagactgtgccccggcccca

SEQ ID NO: 3611368 - DNA, 25 bp, Homo sapien
gtcttgttgtcgcattcgtccttgc

SEQ ID NO: 3611369 - DNA, 25 bp, Homo sapien
cattcgtccttgcattgtgcctcca

SEQ ID NO: 3611370 - DNA, 25 bp, Homo sapien
tgtcgcattcgtccttgcattgtgc

SEQ ID NO: 3611371 - DNA, 25 bp, Homo sapien
tgttgtcgcattcgtccttgcattg

SEQ ID NO: 3611372 - DNA, 25 bp, Homo sapien
aagtatctcggaataaaaatctgac

SEQ ID NO: 3611373 - DNA, 25 bp, Homo sapien
tctgacttcagaatcaattgatgga

SEQ ID NO: 3611374 - DNA, 25 bp, Homo sapien
aattaaattccaatcggagaagatg

SEQ ID NO: 3611375 - DNA, 25 bp, Homo sapien
aggttctccaaacattcgctggtga

SEQ ID NO: 3611376 - DNA, 25 bp, Homo sapien
tatatcaccttgtgctcactgggaa

SEQ ID NO: 3611377 - DNA, 25 bp, Homo sapien
cacagtgtgggtgcctaatgaccca

SEQ ID NO: 3611378 - DNA, 25 bp, Homo sapien
aatagtaacagaaggtcacagtgtg

SEQ ID NO: 3611379 - DNA, 25 bp, Homo sapien
cgtggacagaggaagtatatcacct

SEQ ID NO: 3611380 - DNA, 25 bp, Homo sapien
aaaacctggattgacctctctcagg

SEQ ID NO: 3611381 - DNA, 25 bp, Homo sapien
gaaaacctggattgacctctctcag

SEQ ID NO: 3611382 - DNA, 25 bp, Homo sapien
agaaaacctggattgacctctctca

SEQ ID NO: 3611383 - DNA, 25 bp, Homo sapien
cagaaaacctggattgacctctctc

SEQ ID NO: 3611384 - DNA, 25 bp, Homo sapien
caaactaattttctggtacattata

SEQ ID NO: 3611385 - DNA, 25 bp, Homo sapien
cattatacacttggccttttgaaca

SEQ ID NO: 3611386 - DNA, 25 bp, Homo sapien
ctaattttctggtacattatacact

SEQ ID NO: 3611387 - DNA, 25 bp, Homo sapien
gccttttgaacaatcaatggcctta

SEQ ID NO: 3611388 - DNA, 25 bp, Homo sapien
cttccccgccgttctggggccagca

SEQ ID NO: 3611389 - DNA, 25 bp, Homo sapien
caggcagcaaagaggaaacagcgga

SEQ ID NO: 3611390 - DNA, 25 bp, Homo sapien
agcaaagaggaaacagcggagacat

SEQ ID NO: 3611391 - DNA, 25 bp, Homo sapien
agcagcccaggcagcaaagaggaaa

SEQ ID NO: 3611392 - DNA, 25 bp, Homo sapien
catagctttgtgttggacctctcca

SEQ ID NO: 3611393 - DNA, 25 bp, Homo sapien
taaggcgttcattcctacaggcagc

SEQ ID NO: 3611394 - DNA, 25 bp, Homo sapien
tgatatataaaaggcggcaggcaga

SEQ ID NO: 3611395 - DNA, 25 bp, Homo sapien
tagatactggccgtttgcatcccca

SEQ ID NO: 3611396 - DNA, 25 bp, Homo sapien
cgacgcgccgccaacgaccgcagct

SEQ ID NO: 3611397 - DNA, 25 bp, Homo sapien
ttctccgcggaggaggcgacgcgcc

SEQ ID NO: 3611398 - DNA, 25 bp, Homo sapien
gctccacgtcctggcgcttctggga

SEQ ID NO: 3611399 - DNA, 25 bp, Homo sapien
ttgttctccgcggaggaggcgacgc

SEQ ID NO: 3611400 - DNA, 25 bp, Homo sapien
gtcagtcgcgctttcccggcagcct

SEQ ID NO: 3611401 - DNA, 25 bp, Homo sapien
aacctgcagatcacaacctgtcagt

SEQ ID NO: 3611402 - DNA, 25 bp, Homo sapien
gagcccggcgccgaaacctgcagat

SEQ ID NO: 3611403 - DNA, 25 bp, Homo sapien
agcccgcagcagacggacagccttc

SEQ ID NO: 3611404 - DNA, 25 bp, Homo sapien
aacatggcaatcaccttcccggcag

SEQ ID NO: 3611405 - DNA, 25 bp, Homo sapien
gcctccagatctttccaaacaagga

SEQ ID NO: 3611406 - DNA, 25 bp, Homo sapien
ggagctgcaaacatggcaatcacct

SEQ ID NO: 3611407 - DNA, 25 bp, Homo sapien
caaacaaggaaaggagctgcaaaca

SEQ ID NO: 3611408 - DNA, 25 bp, Homo sapien
agcaggcgacgagccagcccagtca

SEQ ID NO: 3611409 - DNA, 25 bp, Homo sapien
taccgagctagagctcgggcggacc

SEQ ID NO: 3611410 - DNA, 25 bp, Homo sapien
gacgtgatcaggctgcggcagcccc

SEQ ID NO: 3611411 - DNA, 25 bp, Homo sapien
tcagggaggcggagacgtgatcagg

SEQ ID NO: 3611412 - DNA, 25 bp, Homo sapien
gccatcagatatggtggccctgctg

SEQ ID NO: 3611413 - DNA, 25 bp, Homo sapien
agcctctggcagtaggacgagccca

SEQ ID NO: 3611414 - DNA, 25 bp, Homo sapien
gcagtaggacgagcccaaagcaaag

SEQ ID NO: 3611415 - DNA, 25 bp, Homo sapien
tctgccatcagatatggtggccctg

SEQ ID NO: 3611416 - DNA, 25 bp, Homo sapien
ctgggtggatttcataaaggacgaa

SEQ ID NO: 3611417 - DNA, 25 bp, Homo sapien
gaacgtttgtgtttctgcagacaca

SEQ ID NO: 3611418 - DNA, 25 bp, Homo sapien
acgaagcccttgggatggtgtatga

SEQ ID NO: 3611419 - DNA, 25 bp, Homo sapien
tggatttcataaaggacgaagccct

SEQ ID NO: 3611420 - DNA, 25 bp, Homo sapien
cagccctggtggagccggtgctgct

SEQ ID NO: 3611421 - DNA, 25 bp, Homo sapien
ttcgtatggatgctcatgttcagca

SEQ ID NO: 3611422 - DNA, 25 bp, Homo sapien
gcatagctgctggtggtcttcgtat

SEQ ID NO: 3611423 - DNA, 25 bp, Homo sapien
gctggtggtcttcgtatggatgctc

SEQ ID NO: 3611424 - DNA, 25 bp, Homo sapien
gtcttcgtatggatgctcatgttca

SEQ ID NO: 3611425 - DNA, 25 bp, Homo sapien
cagctccgacagctcggcgttggca

SEQ ID NO: 3611426 - DNA, 25 bp, Homo sapien
tccgacagctcggcgttggcatcct

SEQ ID NO: 3611427 - DNA, 25 bp, Homo sapien
cttggcccgctcctgggcggcctcc

SEQ ID NO: 3611428 - DNA, 25 bp, Homo sapien
gcctccagctccgacagctcggcgt

SEQ ID NO: 3611429 - DNA, 25 bp, Homo sapien
cattcccgtgcttcccaaccagcgt

SEQ ID NO: 3611430 - DNA, 25 bp, Homo sapien
agggaagtcctctggcccttgagac

SEQ ID NO: 3611431 - DNA, 25 bp, Homo sapien
tcagcctcagcctggagtcggctga

SEQ ID NO: 3611432 - DNA, 25 bp, Homo sapien
tttgtgcgccgcaggtcattcccgt

SEQ ID NO: 3611433 - DNA, 25 bp, Homo sapien
gctgtggttggtgatctcctcgtac

SEQ ID NO: 3611434 - DNA, 25 bp, Homo sapien
ctcagcctggctgtggttggtgatc

SEQ ID NO: 3611435 - DNA, 25 bp, Homo sapien
gtggttggtgatctcctcgtactgc

SEQ ID NO: 3611436 - DNA, 25 bp, Homo sapien
tcagcctggctgtggttggtgatct

SEQ ID NO: 3611437 - DNA, 25 bp, Homo sapien
agtcagtccttccaggcgagacccc

SEQ ID NO: 3611438 - DNA, 25 bp, Homo sapien
cgcagatgtgtctgagatctggcac

SEQ ID NO: 3611439 - DNA, 25 bp, Homo sapien
gcagatgtgtctgagatctggcact

SEQ ID NO: 3611440 - DNA, 25 bp, Homo sapien
tctcatcagtcagtccttccaggcg

SEQ ID NO: 3611441 - DNA, 25 bp, Homo sapien
tctaggaaccgtatcttgtctgtga

SEQ ID NO: 3611442 - DNA, 25 bp, Homo sapien
catgtaagcttcgtccacctccttc

SEQ ID NO: 3611443 - DNA, 25 bp, Homo sapien
gctctaggaaccgtatcttgtctgt

SEQ ID NO: 3611444 - DNA, 25 bp, Homo sapien
ctgctctaggaaccgtatcttgtct

SEQ ID NO: 3611445 - DNA, 25 bp, Homo sapien
ccgtgacagtggtgatgcctcctat

SEQ ID NO: 3611446 - DNA, 25 bp, Homo sapien
gaccgtgacagtggtgatgcctcct

SEQ ID NO: 3611447 - DNA, 25 bp, Homo sapien
tgacagtggtgatgcctcctatgcc

SEQ ID NO: 3611448 - DNA, 25 bp, Homo sapien
gacagtggtgatgcctcctatgccg

SEQ ID NO: 3611449 - DNA, 25 bp, Homo sapien
caggccaccccggaagctgctgctg

SEQ ID NO: 3611450 - DNA, 25 bp, Homo sapien
ctgcccaggccaccccggaagctgc

SEQ ID NO: 3611451 - DNA, 25 bp, Homo sapien
ccaccccggaagctgctgctgccca

SEQ ID NO: 3611452 - DNA, 25 bp, Homo sapien
ggccaccccggaagctgctgctgcc

SEQ ID NO: 3611453 - DNA, 25 bp, Homo sapien
cgaggagctgatgcgggcactgggc

SEQ ID NO: 3611454 - DNA, 25 bp, Homo sapien
gctcgaggagctgatgcgggcactg

SEQ ID NO: 3611455 - DNA, 25 bp, Homo sapien
tcaggagaagctcgaggagctgatg

SEQ ID NO: 3611456 - DNA, 25 bp, Homo sapien
agctcgaggagctgatgcgggcact

SEQ ID NO: 3611457 - DNA, 25 bp, Homo sapien
gctgaaggcccggggttcagaggtg

SEQ ID NO: 3611458 - DNA, 25 bp, Homo sapien
tgaaggcccggggttcagaggtgga

SEQ ID NO: 3611459 - DNA, 25 bp, Homo sapien
tggtgtagaagtggctgctgaaggc

SEQ ID NO: 3611460 - DNA, 25 bp, Homo sapien
ctgctgaaggcccggggttcagagg

SEQ ID NO: 3611461 - DNA, 25 bp, Homo sapien
cttgtaggacttctgagtcaccctg

SEQ ID NO: 3611462 - DNA, 25 bp, Homo sapien
acttctgagtcaccctgatggacat

SEQ ID NO: 3611463 - DNA, 25 bp, Homo sapien
taggacttctgagtcaccctgatgg

SEQ ID NO: 3611464 - DNA, 25 bp, Homo sapien
ggacttctgagtcaccctgatggac

SEQ ID NO: 3611465 - DNA, 25 bp, Homo sapien
ggcaggtgggctgaaccaggtggag

SEQ ID NO: 3611466 - DNA, 25 bp, Homo sapien
agtggaggcaggtgggctgaaccag

SEQ ID NO: 3611467 - DNA, 25 bp, Homo sapien
gaggcaggtgggctgaaccaggtgg

SEQ ID NO: 3611468 - DNA, 25 bp, Homo sapien
tggaggcaggtgggctgaaccaggt

SEQ ID NO: 3611469 - DNA, 25 bp, Homo sapien
cctcatagaaatggtagcacgatta

SEQ ID NO: 3611470 - DNA, 25 bp, Homo sapien
gattaccttgtgctacgtactgtgc

SEQ ID NO: 3611471 - DNA, 25 bp, Homo sapien
agatgagctcatgtcgattgcctgc

SEQ ID NO: 3611472 - DNA, 25 bp, Homo sapien
cgattattcctacgctcagatgagc

SEQ ID NO: 3611473 - DNA, 25 bp, Homo sapien
tccaggttcttgtgcgtgcgcttct

SEQ ID NO: 3611474 - DNA, 25 bp, Homo sapien
gttcttgtgcgtgcgcttctctctg

SEQ ID NO: 3611475 - DNA, 25 bp, Homo sapien
aggttcttgtgcgtgcgcttctctc

SEQ ID NO: 3611476 - DNA, 25 bp, Homo sapien
tccatccaggttcttgtgcgtgcgc

SEQ ID NO: 3611477 - DNA, 25 bp, Homo sapien
ctctttggagaaatcagaccccctt

SEQ ID NO: 3611478 - DNA, 25 bp, Homo sapien
ccagagacaagtaatcatatccttt

SEQ ID NO: 3611479 - DNA, 25 bp, Homo sapien
ttttccatgccccagctaaacctgt

SEQ ID NO: 3611480 - DNA, 25 bp, Homo sapien
aaatcagacccccttgttctgaggc

SEQ ID NO: 3611481 - DNA, 25 bp, Homo sapien
tcacttagaggtcagaactccaggg

SEQ ID NO: 3611482 - DNA, 25 bp, Homo sapien
tctccgtatctttagaatctagcaa

SEQ ID NO: 3611483 - DNA, 25 bp, Homo sapien
tgctcggcacgtagtagggaccaat

SEQ ID NO: 3611484 - DNA, 25 bp, Homo sapien
ggcagaaccattgtttggaaggagc

SEQ ID NO: 3611485 - DNA, 25 bp, Homo sapien
aatgtttgttgatgccgtccctggc

SEQ ID NO: 3611486 - DNA, 25 bp, Homo sapien
cagttgtggaacaccttggacacca

SEQ ID NO: 3611487 - DNA, 25 bp, Homo sapien
cccagctagctggtgtagaagccct

SEQ ID NO: 3611488 - DNA, 25 bp, Homo sapien
taaatatgtgttgactgagcccgtc

SEQ ID NO: 3611489 - DNA, 25 bp, Homo sapien
tcattgtgtaggaacaggatcgctg

SEQ ID NO: 3611490 - DNA, 25 bp, Homo sapien
tgcacggccactgttgtagtcattg

SEQ ID NO: 3611491 - DNA, 25 bp, Homo sapien
cggccactgttgtagtcattgtgta

SEQ ID NO: 3611492 - DNA, 25 bp, Homo sapien
cacggccactgttgtagtcattgtg

SEQ ID NO: 3611493 - DNA, 25 bp, Homo sapien
gctcactcccatgggctcagcaggt

SEQ ID NO: 3611494 - DNA, 25 bp, Homo sapien
taattaccatctgtaggctgctggc

SEQ ID NO: 3611495 - DNA, 25 bp, Homo sapien
gagaaacagcccagcagcttaagag

SEQ ID NO: 3611496 - DNA, 25 bp, Homo sapien
tgatttgacccaatcgccccttagg

SEQ ID NO: 3611497 - DNA, 25 bp, Homo sapien
tatgcctcagtctcctcttatgtaa

SEQ ID NO: 3611498 - DNA, 25 bp, Homo sapien
gctctatgcctcagtctcctcttat

SEQ ID NO: 3611499 - DNA, 25 bp, Homo sapien
ctgctctatgcctcagtctcctctt

SEQ ID NO: 3611500 - DNA, 25 bp, Homo sapien
tgcctcagtctcctcttatgtaaat

SEQ ID NO: 3611501 - DNA, 25 bp, Homo sapien
ggagatttattctacctgggactga

SEQ ID NO: 3611502 - DNA, 25 bp, Homo sapien
ggctcctgtccccaccattggagat

SEQ ID NO: 3611503 - DNA, 25 bp, Homo sapien
gcaatggtggccttataggactgta

SEQ ID NO: 3611504 - DNA, 25 bp, Homo sapien
accattggagatccggtctcttccc

SEQ ID NO: 3611505 - DNA, 25 bp, Homo sapien
tatccccgtgatcggggtggaggga

SEQ ID NO: 3611506 - DNA, 25 bp, Homo sapien
ccccacaggtttatccccgtgatcg

SEQ ID NO: 3611507 - DNA, 25 bp, Homo sapien
ccacaggtttatccccgtgatcggg

SEQ ID NO: 3611508 - DNA, 25 bp, Homo sapien
tcaccccacaggtttatccccgtga

SEQ ID NO: 3611509 - DNA, 25 bp, Homo sapien
aggagggaaccgagatataggatgg

SEQ ID NO: 3611510 - DNA, 25 bp, Homo sapien
gaggagggaaccgagatataggatg

SEQ ID NO: 3611511 - DNA, 25 bp, Homo sapien
ggaggccagtgaaaagaggctggag

SEQ ID NO: 3611512 - DNA, 25 bp, Homo sapien
atgtcagggtagctctggaggtcct

SEQ ID NO: 3611513 - DNA, 25 bp, Homo sapien
tcttcccagatgtcagggtagctct

SEQ ID NO: 3611514 - DNA, 25 bp, Homo sapien
cagctggccccaggtcgtggtcttc

SEQ ID NO: 3611515 - DNA, 25 bp, Homo sapien
catcctgaaatcccctcaccctgtc

SEQ ID NO: 3611516 - DNA, 25 bp, Homo sapien
atcctgaaatcccctcaccctgtcc

SEQ ID NO: 3611517 - DNA, 25 bp, Homo sapien
caggcctgcaagcagcgcatcctga

SEQ ID NO: 3611518 - DNA, 25 bp, Homo sapien
acagtggtctgtccagcaccgggtg

SEQ ID NO: 3611519 - DNA, 25 bp, Homo sapien
cctgtcagggagagttacagtctga

SEQ ID NO: 3611520 - DNA, 25 bp, Homo sapien
cacaatcaactccataatagcccta

SEQ ID NO: 3611521 - DNA, 25 bp, Homo sapien
taaaacctaatgtaactgtgagtca

SEQ ID NO: 3611522 - DNA, 25 bp, Homo sapien
cctggctgaggccttatccaatggc

SEQ ID NO: 3611523 - DNA, 25 bp, Homo sapien
gtccagaagttccagtgaggtcctg

SEQ ID NO: 3611524 - DNA, 25 bp, Homo sapien
cagtgtccaatggtccagaagttcc

SEQ ID NO: 3611525 - DNA, 25 bp, Homo sapien
atgggctgactctcagtgtccaatg

SEQ ID NO: 3611526 - DNA, 25 bp, Homo sapien
cacctgttcctatctgacatcctgg

SEQ ID NO: 3611527 - DNA, 25 bp, Homo sapien
ggcaggaagggctaattcccagcta

SEQ ID NO: 3611528 - DNA, 25 bp, Homo sapien
aactccacgtacttcagagaggctg

SEQ ID NO: 3611529 - DNA, 25 bp, Homo sapien
tgtctgccgcatggcggtgcacctg

SEQ ID NO: 3611530 - DNA, 25 bp, Homo sapien
agctgcagtagccaagcatgcctcc

SEQ ID NO: 3611531 - DNA, 25 bp, Homo sapien
cagtagccaagcatgcctcctttca

SEQ ID NO: 3611532 - DNA, 25 bp, Homo sapien
tgcagtagccaagcatgcctccttt

SEQ ID NO: 3611533 - DNA, 25 bp, Homo sapien
aaggagctgcagtagccaagcatgc

SEQ ID NO: 3611534 - DNA, 25 bp, Homo sapien
tgtgtacctcgcagtatcttccagg

SEQ ID NO: 3611535 - DNA, 25 bp, Homo sapien
gaaactcctctgatcttaccacgtc

SEQ ID NO: 3611536 - DNA, 25 bp, Homo sapien
gagtccccagcgctcaaattccagt

SEQ ID NO: 3611537 - DNA, 25 bp, Homo sapien
ttccagggcccacggtagagacagc

SEQ ID NO: 3611538 - DNA, 25 bp, Homo sapien
caggggtgggtggctaggggttatg

SEQ ID NO: 3611539 - DNA, 25 bp, Homo sapien
ggtccagaagcaggggtgggtggct

SEQ ID NO: 3611540 - DNA, 25 bp, Homo sapien
ctgtggtccagaagcaggggtgggt

SEQ ID NO: 3611541 - DNA, 25 bp, Homo sapien
cagaagcaggggtgggtggctaggg

SEQ ID NO: 3611542 - DNA, 25 bp, Homo sapien
cacgggggtccgcagccctggcacg

SEQ ID NO: 3611543 - DNA, 25 bp, Homo sapien
caactggatggtggcatattccaca

SEQ ID NO: 3611544 - DNA, 25 bp, Homo sapien
cgggggtccgcagccctggcacgag

SEQ ID NO: 3611545 - DNA, 25 bp, Homo sapien
gggtccgcagccctggcacgagttc

SEQ ID NO: 3611546 - DNA, 25 bp, Homo sapien
gctgtgagtgtcctttaggccagag

SEQ ID NO: 3611547 - DNA, 25 bp, Homo sapien
tgtgagtgtcctttaggccagagcc

SEQ ID NO: 3611548 - DNA, 25 bp, Homo sapien
ctgtgagtgtcctttaggccagagc

SEQ ID NO: 3611549 - DNA, 25 bp, Homo sapien
gctgtaccacggagacaaaggcctg

SEQ ID NO: 3611550 - DNA, 25 bp, Homo sapien
gctgcactgtatgggtaacacccct

SEQ ID NO: 3611551 - DNA, 25 bp, Homo sapien
gaactaaggtgcagggtacagagct

SEQ ID NO: 3611552 - DNA, 25 bp, Homo sapien
gatttggcacctccagatgggttca

SEQ ID NO: 3611553 - DNA, 25 bp, Homo sapien
tctcctcgaggttcggttgtcctta

SEQ ID NO: 3611554 - DNA, 25 bp, Homo sapien
gggcactctcctcgaggttcggttg

SEQ ID NO: 3611555 - DNA, 25 bp, Homo sapien
taggggcactctcctcgaggttcgg

SEQ ID NO: 3611556 - DNA, 25 bp, Homo sapien
cactctcctcgaggttcggttgtcc

SEQ ID NO: 3611557 - DNA, 25 bp, Homo sapien
cccagatcatagtaggggggctgca

SEQ ID NO: 3611558 - DNA, 25 bp, Homo sapien
ccccagatcatagtaggggggctgc

SEQ ID NO: 3611559 - DNA, 25 bp, Homo sapien
gagggggagacccccagatcatagt

SEQ ID NO: 3611560 - DNA, 25 bp, Homo sapien
gggagacccccagatcatagtaggg

SEQ ID NO: 3611561 - DNA, 25 bp, Homo sapien
ctggatatcctcaggcacaagggag

SEQ ID NO: 3611562 - DNA, 25 bp, Homo sapien
cacaagggagctttgcctgctggga

SEQ ID NO: 3611563 - DNA, 25 bp, Homo sapien
cctgctgggagaaggctccggcttc

SEQ ID NO: 3611564 - DNA, 25 bp, Homo sapien
tgctgggagaaggctccggcttctg

SEQ ID NO: 3611565 - DNA, 25 bp, Homo sapien
cagtgagcacagcaactaggatgag

SEQ ID NO: 3611566 - DNA, 25 bp, Homo sapien
atgaggaacacggccacggtgcccg

SEQ ID NO: 3611567 - DNA, 25 bp, Homo sapien
tctgctgccggttgtacaggaagaa

SEQ ID NO: 3611568 - DNA, 25 bp, Homo sapien
ccgtctccggtgggctcttctgctg

SEQ ID NO: 3611569 - DNA, 25 bp, Homo sapien
gctctgatcctgggatctggggcat

SEQ ID NO: 3611570 - DNA, 25 bp, Homo sapien
ctgctctgatcctgggatctggggc

SEQ ID NO: 3611571 - DNA, 25 bp, Homo sapien
tgctctgatcctgggatctggggca

SEQ ID NO: 3611572 - DNA, 25 bp, Homo sapien
cctgctctgatcctgggatctgggg

SEQ ID NO: 3611573 - DNA, 25 bp, Homo sapien
cctgaataggggggccctggttgct

SEQ ID NO: 3611574 - DNA, 25 bp, Homo sapien
ctgaataggggggccctggttgctt

SEQ ID NO: 3611575 - DNA, 25 bp, Homo sapien
tgtccttgcaatgatcctgggaggt

SEQ ID NO: 3611576 - DNA, 25 bp, Homo sapien
gaggttggctatgtgcctcttgctg

SEQ ID NO: 3611577 - DNA, 25 bp, Homo sapien
gaccctgtccttgcaatgatcctgg

SEQ ID NO: 3611578 - DNA, 25 bp, Homo sapien
gggagcacttattgcccaccaggct

SEQ ID NO: 3611579 - DNA, 25 bp, Homo sapien
gataagggctgtcctggagtcacct

SEQ ID NO: 3611580 - DNA, 25 bp, Homo sapien
ctttctcatgagctggattgataag

SEQ ID NO: 3611581 - DNA, 25 bp, Homo sapien
catgagctggattgataagggctgt

SEQ ID NO: 3611582 - DNA, 25 bp, Homo sapien
caggctgggtgtttggacttggtgc

SEQ ID NO: 3611583 - DNA, 25 bp, Homo sapien
tgttgtttccatgacgagttctgtt

SEQ ID NO: 3611584 - DNA, 25 bp, Homo sapien
tgatgttgtttccatgacgagttct

SEQ ID NO: 3611585 - DNA, 25 bp, Homo sapien
tgtttccatgacgagttctgtttcc

SEQ ID NO: 3611586 - DNA, 25 bp, Homo sapien
gatgttgtttccatgacgagttctg

SEQ ID NO: 3611587 - DNA, 25 bp, Homo sapien
cctctgcgatgctgtcgtcaaagtc

SEQ ID NO: 3611588 - DNA, 25 bp, Homo sapien
tccctcctgtgtctgtggacgccca

SEQ ID NO: 3611589 - DNA, 25 bp, Homo sapien
ctgtgtctgtggacgcccacccctc

SEQ ID NO: 3611590 - DNA, 25 bp, Homo sapien
acccctccctctgcgatgctgtcgt

SEQ ID NO: 3611591 - DNA, 25 bp, Homo sapien
catctgtgctgagtggccatctggc

SEQ ID NO: 3611592 - DNA, 25 bp, Homo sapien
ggctttcagcaggatcagaccattc

SEQ ID NO: 3611593 - DNA, 25 bp, Homo sapien
cactgtgggcacacgtactgggtct

SEQ ID NO: 3611594 - DNA, 25 bp, Homo sapien
gggactcggctggttctattacaca

SEQ ID NO: 3611595 - DNA, 25 bp, Homo sapien
gggccttcaaagtccaacacagaat

SEQ ID NO: 3611596 - DNA, 25 bp, Homo sapien
tctgctgggctagacctcccttttg

SEQ ID NO: 3611597 - DNA, 25 bp, Homo sapien
cctaggtccaagtgctgactcctgc

SEQ ID NO: 3611598 - DNA, 25 bp, Homo sapien
tctgtgggcccagcagtagtgccca

SEQ ID NO: 3611599 - DNA, 25 bp, Homo sapien
ggaagcttctataggcagaccccat

SEQ ID NO: 3611600 - DNA, 25 bp, Homo sapien
cctgagatcctagggtggaggcacc

SEQ ID NO: 3611601 - DNA, 25 bp, Homo sapien
caggtacacaagacgagaacagggc

SEQ ID NO: 3611602 - DNA, 25 bp, Homo sapien
agacttctgctacgtggctactggg

SEQ ID NO: 3611603 - DNA, 25 bp, Homo sapien
ggccgcttggcgtcctcgtcatatt

SEQ ID NO: 3611604 - DNA, 25 bp, Homo sapien
cagctgctcagggtcgtactggtag

SEQ ID NO: 3611605 - DNA, 25 bp, Homo sapien
tcatccacggtgaagtagggccgct

SEQ ID NO: 3611606 - DNA, 25 bp, Homo sapien
tggaaatgaaagacccgtcgttctg

SEQ ID NO: 3611607 - DNA, 25 bp, Homo sapien
ctcctcctcctcctcatagctgctt

SEQ ID NO: 3611608 - DNA, 25 bp, Homo sapien
tcctcctcctcctcatagctgcttc

SEQ ID NO: 3611609 - DNA, 25 bp, Homo sapien
ctcctcctcctcatagctgcttcca

SEQ ID NO: 3611610 - DNA, 25 bp, Homo sapien
tcctcctcctcatagctgcttccac

SEQ ID NO: 3611611 - DNA, 25 bp, Homo sapien
gccatacacgtgcttcttggtgctg

SEQ ID NO: 3611612 - DNA, 25 bp, Homo sapien
tagccgttgccatacacgtgcttct

SEQ ID NO: 3611613 - DNA, 25 bp, Homo sapien
tcgtctgagtcgtcggggtactgca

SEQ ID NO: 3611614 - DNA, 25 bp, Homo sapien
tgccttgctgtagccgttgccatac

SEQ ID NO: 3611615 - DNA, 25 bp, Homo sapien
gccgcccatgttcgggaggagacgg

SEQ ID NO: 3611616 - DNA, 25 bp, Homo sapien
ccttgaaggtgtgccggcgccgacg

SEQ ID NO: 3611617 - DNA, 25 bp, Homo sapien
acgcccccaatgatggccgtgggca

SEQ ID NO: 3611618 - DNA, 25 bp, Homo sapien
gccgaccacaatcaacaccagcagg

SEQ ID NO: 3611619 - DNA, 25 bp, Homo sapien
gaggggacagcatcagcgtgtgctc

SEQ ID NO: 3611620 - DNA, 25 bp, Homo sapien
tcacgtagaattctgacaacagccc

SEQ ID NO: 3611621 - DNA, 25 bp, Homo sapien
catgctcctttcacgtcccaggtga

SEQ ID NO: 3611622 - DNA, 25 bp, Homo sapien
gctaggtgcttgacttacatcacgt

SEQ ID NO: 3611623 - DNA, 25 bp, Homo sapien
tcaaggtacatcatactgtccccgt

SEQ ID NO: 3611624 - DNA, 25 bp, Homo sapien
tccctttgcccggatagataagttg

SEQ ID NO: 3611625 - DNA, 25 bp, Homo sapien
catcctagctcttgtcctccctttg

SEQ ID NO: 3611626 - DNA, 25 bp, Homo sapien
tgtcctccctttgcccggatagata

SEQ ID NO: 3611627 - DNA, 25 bp, Homo sapien
gcccggatagataagttgacagaaa

SEQ ID NO: 3611628 - DNA, 25 bp, Homo sapien
gaggtaagcctcactttctggccca

SEQ ID NO: 3611629 - DNA, 25 bp, Homo sapien
tgctggcagatctacgggcaggttc

SEQ ID NO: 3611630 - DNA, 25 bp, Homo sapien
tgccagcatcccacagcgtgttctg

SEQ ID NO: 3611631 - DNA, 25 bp, Homo sapien
gaggtccttgaccacaggtgcagag

SEQ ID NO: 3611632 - DNA, 25 bp, Homo sapien
ggcctcacagatgtaggtccctgcc

SEQ ID NO: 3611633 - DNA, 25 bp, Homo sapien
ctccacctggcctgagcgtgtaccg

SEQ ID NO: 3611634 - DNA, 25 bp, Homo sapien
tggcctcacagatgtaggtccctgc

SEQ ID NO: 3611635 - DNA, 25 bp, Homo sapien
cacctggcctgagcgtgtaccgatg

SEQ ID NO: 3611636 - DNA, 25 bp, Homo sapien
agcgtagggttatgactctccagcc

SEQ ID NO: 3611637 - DNA, 25 bp, Homo sapien
agggaaccacagctagcaggcagca

SEQ ID NO: 3611638 - DNA, 25 bp, Homo sapien
caattctcgggactcctggtaaagt

SEQ ID NO: 3611639 - DNA, 25 bp, Homo sapien
catgggagctccagccaattctcgg

SEQ ID NO: 3611640 - DNA, 25 bp, Homo sapien
gggttagcatcagctttgcaggtga

SEQ ID NO: 3611641 - DNA, 25 bp, Homo sapien
aggtgagcttcacgtccatccgctg

SEQ ID NO: 3611642 - DNA, 25 bp, Homo sapien
gttgccatcaaacccctcaatggtt

SEQ ID NO: 3611643 - DNA, 25 bp, Homo sapien
tccatccgctgcaggtaccagttgc

SEQ ID NO: 3611644 - DNA, 25 bp, Homo sapien
cccaggaggcccctggcagccagcc

SEQ ID NO: 3611645 - DNA, 25 bp, Homo sapien
aggcccctggcagccagccctgctc

SEQ ID NO: 3611646 - DNA, 25 bp, Homo sapien
gcccctggcagccagccctgctcac

SEQ ID NO: 3611647 - DNA, 25 bp, Homo sapien
caggaggcccctggcagccagccct

SEQ ID NO: 3611648 - DNA, 25 bp, Homo sapien
ttcttggctcgaagcactgcctggg

SEQ ID NO: 3611649 - DNA, 25 bp, Homo sapien
tagcggctgatgaccgtcactgtgc

SEQ ID NO: 3611650 - DNA, 25 bp, Homo sapien
ccatgtggtagttgacgatgcaggc

SEQ ID NO: 3611651 - DNA, 25 bp, Homo sapien
tgggtaccctctatccaattggtgg

SEQ ID NO: 3611652 - DNA, 25 bp, Homo sapien
ccgtagggaaggtagcaaactcgca

SEQ ID NO: 3611653 - DNA, 25 bp, Homo sapien
gaattccacacgctcgcggtaggga

SEQ ID NO: 3611654 - DNA, 25 bp, Homo sapien
tacatggagtcgttcacctggacca

SEQ ID NO: 3611655 - DNA, 25 bp, Homo sapien
tagatggccacgttctgcttggagc

SEQ ID NO: 3611656 - DNA, 25 bp, Homo sapien
tcccaccataccagactgggcccat

SEQ ID NO: 3611657 - DNA, 25 bp, Homo sapien
acactttcccaccataccagactgg

SEQ ID NO: 3611658 - DNA, 25 bp, Homo sapien
tccatcagccacactttcccaccat

SEQ ID NO: 3611659 - DNA, 25 bp, Homo sapien
gcctcttgtccacatctctccatca

SEQ ID NO: 3611660 - DNA, 25 bp, Homo sapien
ctctgtgctgattcacatccacaca

SEQ ID NO: 3611661 - DNA, 25 bp, Homo sapien
cgtgttctgaaagtttccctgaggt

SEQ ID NO: 3611662 - DNA, 25 bp, Homo sapien
cccttctctgtgctgattcacatcc

SEQ ID NO: 3611663 - DNA, 25 bp, Homo sapien
ttctctgtgctgattcacatccaca

SEQ ID NO: 3611664 - DNA, 25 bp, Homo sapien
gataatgtgggcataattggggaac

SEQ ID NO: 3611665 - DNA, 25 bp, Homo sapien
ttggggaacttgcaccacacaaagc

SEQ ID NO: 3611666 - DNA, 25 bp, Homo sapien
cacacaaagctaggaacaggaaaag

SEQ ID NO: 3611667 - DNA, 25 bp, Homo sapien
gcaccacacaaagctaggaacagga

SEQ ID NO: 3611668 - DNA, 25 bp, Homo sapien
cttctgaagccaaggccagctccgc

SEQ ID NO: 3611669 - DNA, 25 bp, Homo sapien
caaactccatccctgaggccctgct

SEQ ID NO: 3611670 - DNA, 25 bp, Homo sapien
caagcaaactccatccctgaggccc

SEQ ID NO: 3611671 - DNA, 25 bp, Homo sapien
cctgaggccctgctctggagatctt

SEQ ID NO: 3611672 - DNA, 25 bp, Homo sapien
tgaggccctgctctggagatcttag

SEQ ID NO: 3611673 - DNA, 25 bp, Homo sapien
tatccgatgtgcttcaatgaccagg

SEQ ID NO: 3611674 - DNA, 25 bp, Homo sapien
ggcagtctttatccgatgtgcttca

SEQ ID NO: 3611675 - DNA, 25 bp, Homo sapien
ctttatccgatgtgcttcaatgacc

SEQ ID NO: 3611676 - DNA, 25 bp, Homo sapien
gggtggcagtctttatccgatgtgc

SEQ ID NO: 3611677 - DNA, 25 bp, Homo sapien
caccagggcttctaatcgcttggaa

SEQ ID NO: 3611678 - DNA, 25 bp, Homo sapien
caaataaacggcatgatattgcccc

SEQ ID NO: 3611679 - DNA, 25 bp, Homo sapien
gagaactgctggttgcctaggaaga

SEQ ID NO: 3611680 - DNA, 25 bp, Homo sapien
gcacgcattgcacccttggagtaag

SEQ ID NO: 3611681 - DNA, 25 bp, Homo sapien
caggcagagtcattgcacagacaca

SEQ ID NO: 3611682 - DNA, 25 bp, Homo sapien
acatgctcaggaacacgcgggagca

SEQ ID NO: 3611683 - DNA, 25 bp, Homo sapien
tatgcacacaggtcgacatgctcag

SEQ ID NO: 3611684 - DNA, 25 bp, Homo sapien
catgtgcagctgaacgctgcggtat

SEQ ID NO: 3611685 - DNA, 25 bp, Homo sapien
cagctgggaggctctttccagacct

SEQ ID NO: 3611686 - DNA, 25 bp, Homo sapien
tgggaggctctttccagacctgggt

SEQ ID NO: 3611687 - DNA, 25 bp, Homo sapien
gcaggcccagctgggaggctctttc

SEQ ID NO: 3611688 - DNA, 25 bp, Homo sapien
gctgggaggctctttccagacctgg

SEQ ID NO: 3611689 - DNA, 25 bp, Homo sapien
cttcgccggttctctaactggcggc

SEQ ID NO: 3611690 - DNA, 25 bp, Homo sapien
gcagtgtagaccttgcccggacagt

SEQ ID NO: 3611691 - DNA, 25 bp, Homo sapien
cgccggttctctaactggcggctgg

SEQ ID NO: 3611692 - DNA, 25 bp, Homo sapien
agtgtagaccttgcccggacagtca

SEQ ID NO: 3611693 - DNA, 25 bp, Homo sapien
caggccccaggtaatgccaggttcc

SEQ ID NO: 3611694 - DNA, 25 bp, Homo sapien
aatgccaggttccagtgctgctatg

SEQ ID NO: 3611695 - DNA, 25 bp, Homo sapien
aggtaatgccaggttccagtgctgc

SEQ ID NO: 3611696 - DNA, 25 bp, Homo sapien
tcatgagaactcgtggggcaggcca

SEQ ID NO: 3611697 - DNA, 25 bp, Homo sapien
gctacctgtcccatatgctctgaag

SEQ ID NO: 3611698 - DNA, 25 bp, Homo sapien
gaatttcaaagaccacatggcagca

SEQ ID NO: 3611699 - DNA, 25 bp, Homo sapien
tcatcagcactagggttctggccgg

SEQ ID NO: 3611700 - DNA, 25 bp, Homo sapien
acaggtcttccgagggtgtgcatga

SEQ ID NO: 3611701 - DNA, 25 bp, Homo sapien
ggaattaaccatgaaggaatcacaa

SEQ ID NO: 3611702 - DNA, 25 bp, Homo sapien
cccccaatgaaggaattaaccatga

SEQ ID NO: 3611703 - DNA, 25 bp, Homo sapien
tctgggggcagggtgggcagtgaca

SEQ ID NO: 3611704 - DNA, 25 bp, Homo sapien
ctgggggcagggtgggcagtgacac

SEQ ID NO: 3611705 - DNA, 25 bp, Homo sapien
caagaccaccctctgggggcagggt

SEQ ID NO: 3611706 - DNA, 25 bp, Homo sapien
ccctctgggggcagggtgggcagtg

SEQ ID NO: 3611707 - DNA, 25 bp, Homo sapien
caggcttcacgggtggaggcacccc

SEQ ID NO: 3611708 - DNA, 25 bp, Homo sapien
ccccaggcttcacgggtggaggcac

SEQ ID NO: 3611709 - DNA, 25 bp, Homo sapien
tccaccacttagtgagattggcggg

SEQ ID NO: 3611710 - DNA, 25 bp, Homo sapien
ttcccagacatccaccacttagtga

SEQ ID NO: 3611711 - DNA, 25 bp, Homo sapien
tccaggaaaggaaccgcaggtgagc

SEQ ID NO: 3611712 - DNA, 25 bp, Homo sapien
gcctctgccgcagcagccgactctc

SEQ ID NO: 3611713 - DNA, 25 bp, Homo sapien
gcaggtgagcgaggagccgcctctg

SEQ ID NO: 3611714 - DNA, 25 bp, Homo sapien
cgcagcagccgactctccgcgcccg

SEQ ID NO: 3611715 - DNA, 25 bp, Homo sapien
agggggcccgagcgtcctgagccgt

SEQ ID NO: 3611716 - DNA, 25 bp, Homo sapien
ggagggggcccgagcgtcctgagcc

SEQ ID NO: 3611717 - DNA, 25 bp, Homo sapien
gagggggcccgagcgtcctgagccg

SEQ ID NO: 3611718 - DNA, 25 bp, Homo sapien
ctgggaggaagaatgcggtcaagcc

SEQ ID NO: 3611719 - DNA, 25 bp, Homo sapien
ggtcaagccgagagcgagtccccac

SEQ ID NO: 3611720 - DNA, 25 bp, Homo sapien
ggaagaatgcggtcaagccgagagc

SEQ ID NO: 3611721 - DNA, 25 bp, Homo sapien
caccagcgtccagcggcgcccgcaa

SEQ ID NO: 3611722 - DNA, 25 bp, Homo sapien
ggcagcgctcctcgcgcagcagaaa

SEQ ID NO: 3611723 - DNA, 25 bp, Homo sapien
gggaagatcgctggcggtcggcggg

SEQ ID NO: 3611724 - DNA, 25 bp, Homo sapien
ggcgctcgaaggatccaggtcagct

SEQ ID NO: 3611725 - DNA, 25 bp, Homo sapien
gaagatgagggaagatcgctggcgg

SEQ ID NO: 3611726 - DNA, 25 bp, Homo sapien
cgctcggctccaacttgcaggcgtc

SEQ ID NO: 3611727 - DNA, 25 bp, Homo sapien
gctcggctccaacttgcaggcgtcc

SEQ ID NO: 3611728 - DNA, 25 bp, Homo sapien
ctcggctccaacttgcaggcgtcca

SEQ ID NO: 3611729 - DNA, 25 bp, Homo sapien
tcggctccaacttgcaggcgtccat

SEQ ID NO: 3611730 - DNA, 25 bp, Homo sapien
gggcagctcttgaacaaaccttcct

SEQ ID NO: 3611731 - DNA, 25 bp, Homo sapien
gcagctcttgaacaaaccttcctct

SEQ ID NO: 3611732 - DNA, 25 bp, Homo sapien
aggggcagctcttgaacaaaccttc

SEQ ID NO: 3611733 - DNA, 25 bp, Homo sapien
ggcagctcttgaacaaaccttcctc

SEQ ID NO: 3611734 - DNA, 25 bp, Homo sapien
agagagagacccgagtggaggggct

SEQ ID NO: 3611735 - DNA, 25 bp, Homo sapien
agacccgagtggaggggctcctctg

SEQ ID NO: 3611736 - DNA, 25 bp, Homo sapien
ctggagagagagacccgagtggagg

SEQ ID NO: 3611737 - DNA, 25 bp, Homo sapien
agagagacccgagtggaggggctcc

SEQ ID NO: 3611738 - DNA, 25 bp, Homo sapien
ctgaggcctctgagctggccatgag

SEQ ID NO: 3611739 - DNA, 25 bp, Homo sapien
gaggcctctgagctggccatgagct

SEQ ID NO: 3611740 - DNA, 25 bp, Homo sapien
cttcctgaggcctctgagctggcca

SEQ ID NO: 3611741 - DNA, 25 bp, Homo sapien
gcctctgagctggccatgagctgac

SEQ ID NO: 3611742 - DNA, 25 bp, Homo sapien
tggggcagccttggactcggccata

SEQ ID NO: 3611743 - DNA, 25 bp, Homo sapien
tacctgactccacagccgaggggtg

SEQ ID NO: 3611744 - DNA, 25 bp, Homo sapien
ttggactcggccatacctgactcca

SEQ ID NO: 3611745 - DNA, 25 bp, Homo sapien
cacagccgaggggtgtctcttgatg

SEQ ID NO: 3611746 - DNA, 25 bp, Homo sapien
tgatggcaccctcaggatagtcaga

SEQ ID NO: 3611747 - DNA, 25 bp, Homo sapien
gaccttcaaggtggccaaattttgc

SEQ ID NO: 3611748 - DNA, 25 bp, Homo sapien
catgttaggaacgttggtgctgcct

SEQ ID NO: 3611749 - DNA, 25 bp, Homo sapien
tcttgactggacaatgtgaggactc

SEQ ID NO: 3611750 - DNA, 25 bp, Homo sapien
cagctgggtacagagctgggcaggc

SEQ ID NO: 3611751 - DNA, 25 bp, Homo sapien
ctctcagtctgtgtagccttttggg

SEQ ID NO: 3611752 - DNA, 25 bp, Homo sapien
ctggaagtggcagccgtaggagcag

SEQ ID NO: 3611753 - DNA, 25 bp, Homo sapien
tcagtctgtgtagccttttgggtcc

SEQ ID NO: 3611754 - DNA, 25 bp, Homo sapien
gacccgaatcctgagtcttgctctt

SEQ ID NO: 3611755 - DNA, 25 bp, Homo sapien
ctaagattaaagacccgaatcctga

SEQ ID NO: 3611756 - DNA, 25 bp, Homo sapien
taaagacccgaatcctgagtcttgc

SEQ ID NO: 3611757 - DNA, 25 bp, Homo sapien
gattaaagacccgaatcctgagtct

SEQ ID NO: 3611758 - DNA, 25 bp, Homo sapien
ctgcgcaggtgtaggtgcacgccag

SEQ ID NO: 3611759 - DNA, 25 bp, Homo sapien
aggccatcctttggctggccctgac

SEQ ID NO: 3611760 - DNA, 25 bp, Homo sapien
aaggccatcctttggctggccctga

SEQ ID NO: 3611761 - DNA, 25 bp, Homo sapien
ccagaaagctttacatcactcacag

SEQ ID NO: 3611762 - DNA, 25 bp, Homo sapien
gtgagggacagccctcggaatgttc

SEQ ID NO: 3611763 - DNA, 25 bp, Homo sapien
agaaagctttacatcactcacagat

SEQ ID NO: 3611764 - DNA, 25 bp, Homo sapien
gagggacagccctcggaatgttctt

SEQ ID NO: 3611765 - DNA, 25 bp, Homo sapien
ctgggctgatacaagtctaccctct

SEQ ID NO: 3611766 - DNA, 25 bp, Homo sapien
ttgatcctccagcagcttttggggg

SEQ ID NO: 3611767 - DNA, 25 bp, Homo sapien
tgggctgatacaagtctaccctctt

SEQ ID NO: 3611768 - DNA, 25 bp, Homo sapien
ttctgctagggggaaatcaatgccc

SEQ ID NO: 3611769 - DNA, 25 bp, Homo sapien
ctgctagggggaaatcaatgcccat

SEQ ID NO: 3611770 - DNA, 25 bp, Homo sapien
tctgctagggggaaatcaatgccca

SEQ ID NO: 3611771 - DNA, 25 bp, Homo sapien
ttttctgctagggggaaatcaatgc

SEQ ID NO: 3611772 - DNA, 25 bp, Homo sapien
tgcccttgcactccttgagcccagg

SEQ ID NO: 3611773 - DNA, 25 bp, Homo sapien
tgtgggtagacacgcttccaggcct

SEQ ID NO: 3611774 - DNA, 25 bp, Homo sapien
tgagcccaggcagccgacaggcaca

SEQ ID NO: 3611775 - DNA, 25 bp, Homo sapien
ttctgccaagcgcacatttgtgggt

SEQ ID NO: 3611776 - DNA, 25 bp, Homo sapien
cacccttcatcctgtgctcgtgcag

SEQ ID NO: 3611777 - DNA, 25 bp, Homo sapien
ttgctcgagtgggcatcagcccacc

SEQ ID NO: 3611778 - DNA, 25 bp, Homo sapien
cttgctcgagtgggcatcagcccac

SEQ ID NO: 3611779 - DNA, 25 bp, Homo sapien
gaccctgcagggcgagagccaacat

SEQ ID NO: 3611780 - DNA, 25 bp, Homo sapien
caggagtcctgtgccccgggccggt

SEQ ID NO: 3611781 - DNA, 25 bp, Homo sapien
cagctcctttggttgtcgaggcggc

SEQ ID NO: 3611782 - DNA, 25 bp, Homo sapien
gatgttgacagctcctttggttgtc

SEQ ID NO: 3611783 - DNA, 25 bp, Homo sapien
ccgggccggtgggatgttgacagct

SEQ ID NO: 3611784 - DNA, 25 bp, Homo sapien
ctctgggtgcctggcggctgtcagg

SEQ ID NO: 3611785 - DNA, 25 bp, Homo sapien
ggtgcctggcggctgtcagggtgga

SEQ ID NO: 3611786 - DNA, 25 bp, Homo sapien
cctggcggctgtcagggtggaggtc

SEQ ID NO: 3611787 - DNA, 25 bp, Homo sapien
gcggctgtcagggtggaggtcttac

SEQ ID NO: 3611788 - DNA, 25 bp, Homo sapien
tctgtccttcacgaaggtcgtggga

SEQ ID NO: 3611789 - DNA, 25 bp, Homo sapien
ggtcgtgggaggatggctgatggtg

SEQ ID NO: 3611790 - DNA, 25 bp, Homo sapien
tgtccttcacgaaggtcgtgggagg

SEQ ID NO: 3611791 - DNA, 25 bp, Homo sapien
aggtcgtgggaggatggctgatggt

SEQ ID NO: 3611792 - DNA, 25 bp, Homo sapien
tgcaaaattcatggagcataggatt

SEQ ID NO: 3611793 - DNA, 25 bp, Homo sapien
tgaacctgatgcaaaattcatggag

SEQ ID NO: 3611794 - DNA, 25 bp, Homo sapien
gaacctgatgcaaaattcatggagc

SEQ ID NO: 3611795 - DNA, 25 bp, Homo sapien
tgttccacattgagctccaagttgg

SEQ ID NO: 3611796 - DNA, 25 bp, Homo sapien
ttagttcttctgttccacattgagc

SEQ ID NO: 3611797 - DNA, 25 bp, Homo sapien
tcttctgttccacattgagctccaa

SEQ ID NO: 3611798 - DNA, 25 bp, Homo sapien
tctgttccacattgagctccaagtt

SEQ ID NO: 3611799 - DNA, 25 bp, Homo sapien
aggatcaatactctaatcaacacca

SEQ ID NO: 3611800 - DNA, 25 bp, Homo sapien
tactctaatcaacaccacatggacc

SEQ ID NO: 3611801 - DNA, 25 bp, Homo sapien
tgatggatgcccaggcgggtgactg

SEQ ID NO: 3611802 - DNA, 25 bp, Homo sapien
tcaatactctaatcaacaccacatg

SEQ ID NO: 3611803 - DNA, 25 bp, Homo sapien
tgagagatagctcctccattgcaat

SEQ ID NO: 3611804 - DNA, 25 bp, Homo sapien
attgcaataaccaccgccccagagt

SEQ ID NO: 3611805 - DNA, 25 bp, Homo sapien
gaatatccaatctgaagatgttgag

SEQ ID NO: 3611806 - DNA, 25 bp, Homo sapien
cttgtcatgagttttgtgcaggtat

SEQ ID NO: 3611807 - DNA, 25 bp, Homo sapien
aaaccatattatctggtggaggtga

SEQ ID NO: 3611808 - DNA, 25 bp, Homo sapien
agaccaaaaccatattatctggtgg

SEQ ID NO: 3611809 - DNA, 25 bp, Homo sapien
accatattatctggtggaggtgatg

SEQ ID NO: 3611810 - DNA, 25 bp, Homo sapien
ccaaaaccatattatctggtggagg

SEQ ID NO: 3611811 - DNA, 25 bp, Homo sapien
catcaggcagatcactacgattgac

SEQ ID NO: 3611812 - DNA, 25 bp, Homo sapien
tctcatcaggcagatcactacgatt

SEQ ID NO: 3611813 - DNA, 25 bp, Homo sapien
tcatcaggcagatcactacgattga

SEQ ID NO: 3611814 - DNA, 25 bp, Homo sapien
caaagcaggagaagatgtctctctc

SEQ ID NO: 3611815 - DNA, 25 bp, Homo sapien
ccaagctcttggtgccaaaccggct

SEQ ID NO: 3611816 - DNA, 25 bp, Homo sapien
attgaggatcttggcatcattctcg

SEQ ID NO: 3611817 - DNA, 25 bp, Homo sapien
ctcaaagcgatcctgcatgtcattg

SEQ ID NO: 3611818 - DNA, 25 bp, Homo sapien
ctcgtcagacacaaatgtgatagcc

SEQ ID NO: 3611819 - DNA, 25 bp, Homo sapien
taattaaaagcaatgttcacccgct

SEQ ID NO: 3611820 - DNA, 25 bp, Homo sapien
aattaaaagcaatgttcacccgctc

SEQ ID NO: 3611821 - DNA, 25 bp, Homo sapien
atcctcaggcatgtcataattaaaa

SEQ ID NO: 3611822 - DNA, 25 bp, Homo sapien
aaactgctgatactgagacagcctc

SEQ ID NO: 3611823 - DNA, 25 bp, Homo sapien
actgctgatactgagacagcctctg

SEQ ID NO: 3611824 - DNA, 25 bp, Homo sapien
ctgccctggggcatcccgcggtgga

SEQ ID NO: 3611825 - DNA, 25 bp, Homo sapien
tgctgatactgagacagcctctgcc

SEQ ID NO: 3611826 - DNA, 25 bp, Homo sapien
ggctgaggcaatgcgccgctgcaca

SEQ ID NO: 3611827 - DNA, 25 bp, Homo sapien
gggctgaggcaatgcgccgctgcac

SEQ ID NO: 3611828 - DNA, 25 bp, Homo sapien
gctgaggcaatgcgccgctgcacag

SEQ ID NO: 3611829 - DNA, 25 bp, Homo sapien
ggacattcagaaggtcatagcgctt

SEQ ID NO: 3611830 - DNA, 25 bp, Homo sapien
cattcagaaggtcatagcgcttcca

SEQ ID NO: 3611831 - DNA, 25 bp, Homo sapien
cagaaggtcatagcgcttccagttc

SEQ ID NO: 3611832 - DNA, 25 bp, Homo sapien
catgaagatctccactggatcttgc

SEQ ID NO: 3611833 - DNA, 25 bp, Homo sapien
ggacatcccgacacatgttgagctg

SEQ ID NO: 3611834 - DNA, 25 bp, Homo sapien
ctggacatcccgacacatgttgagc

SEQ ID NO: 3611835 - DNA, 25 bp, Homo sapien
acatcccgacacatgttgagctgtt

SEQ ID NO: 3611836 - DNA, 25 bp, Homo sapien
ttccctggacatcccgacacatgtt

SEQ ID NO: 3611837 - DNA, 25 bp, Homo sapien
ggctaggatacggcctggagtcccc

SEQ ID NO: 3611838 - DNA, 25 bp, Homo sapien
ggcctggagtccccacgacgatatg

SEQ ID NO: 3611839 - DNA, 25 bp, Homo sapien
gcctggagtccccacgacgatatgc

SEQ ID NO: 3611840 - DNA, 25 bp, Homo sapien
agccagggctaggatacggcctgga

SEQ ID NO: 3611841 - DNA, 25 bp, Homo sapien
cttgatagaccaccaaaaaatacag

SEQ ID NO: 3611842 - DNA, 25 bp, Homo sapien
tgatagaccaccaaaaaatacagca

SEQ ID NO: 3611843 - DNA, 25 bp, Homo sapien
gatagaccaccaaaaaatacagcaa

SEQ ID NO: 3611844 - DNA, 25 bp, Homo sapien
atagaccaccaaaaaatacagcaac

SEQ ID NO: 3611845 - DNA, 25 bp, Homo sapien
cagcccgttgaagttatgtcctcca

SEQ ID NO: 3611846 - DNA, 25 bp, Homo sapien
caggcaagcttggttgaaagtctcc

SEQ ID NO: 3611847 - DNA, 25 bp, Homo sapien
tcttctatggttgctcaggaggtga

SEQ ID NO: 3611848 - DNA, 25 bp, Homo sapien
tcctgacaggaatagcagcccgttg

SEQ ID NO: 3611849 - DNA, 25 bp, Homo sapien
gtaggacaaattcccctctgatttg

SEQ ID NO: 3611850 - DNA, 25 bp, Homo sapien
taggacaaattcccctctgatttgc

SEQ ID NO: 3611851 - DNA, 25 bp, Homo sapien
tgtaggacaaattcccctctgattt

SEQ ID NO: 3611852 - DNA, 25 bp, Homo sapien
tcacaaccggcatgatcaatcaggc

SEQ ID NO: 3611853 - DNA, 25 bp, Homo sapien
tagcataaacctcacaaccggcatg

SEQ ID NO: 3611854 - DNA, 25 bp, Homo sapien
cccgggcagctcctgttgactagca

SEQ ID NO: 3611855 - DNA, 25 bp, Homo sapien
tcctgttgactagcataaacctcac

SEQ ID NO: 3611856 - DNA, 25 bp, Homo sapien
tgattagtttggctcgcactgcacc

SEQ ID NO: 3611857 - DNA, 25 bp, Homo sapien
tgtaaagagcgttaaaaacctgcag

SEQ ID NO: 3611858 - DNA, 25 bp, Homo sapien
caggcccgggtaaacgacagtgatg

SEQ ID NO: 3611859 - DNA, 25 bp, Homo sapien
tcctggaatcgagagcctgagctgg

SEQ ID NO: 3611860 - DNA, 25 bp, Homo sapien
tgcactgggcgtttccatttgattc

SEQ ID NO: 3611861 - DNA, 25 bp, Homo sapien
taacagggctgcactgggcgtttcc

SEQ ID NO: 3611862 - DNA, 25 bp, Homo sapien
tcagcccaagatggcggtaacaggg

SEQ ID NO: 3611863 - DNA, 25 bp, Homo sapien
aagatggcggtaacagggctgcact

SEQ ID NO: 3611864 - DNA, 25 bp, Homo sapien
tgaaggcagaatgggagaggaagca

SEQ ID NO: 3611865 - DNA, 25 bp, Homo sapien
gaaggcagaatgggagaggaagcag

SEQ ID NO: 3611866 - DNA, 25 bp, Homo sapien
ctgaaggcagaatgggagaggaagc

SEQ ID NO: 3611867 - DNA, 25 bp, Homo sapien
ctggccatccggctgtcttgcctat

SEQ ID NO: 3611868 - DNA, 25 bp, Homo sapien
gctgtcttgcctatggaaaagccca

SEQ ID NO: 3611869 - DNA, 25 bp, Homo sapien
gccatccggctgtcttgcctatgga

SEQ ID NO: 3611870 - DNA, 25 bp, Homo sapien
tccggctgtcttgcctatggaaaag

SEQ ID NO: 3611871 - DNA, 25 bp, Homo sapien
tcaaagagcaaattcgctggcagcc

SEQ ID NO: 3611872 - DNA, 25 bp, Homo sapien
aaagagcaaattcgctggcagccgt

SEQ ID NO: 3611873 - DNA, 25 bp, Homo sapien
agagcaaattcgctggcagccgtga

SEQ ID NO: 3611874 - DNA, 25 bp, Homo sapien
gagcaaattcgctggcagccgtgat

SEQ ID NO: 3611875 - DNA, 25 bp, Homo sapien
ccggagccttgctccagactcatcc

SEQ ID NO: 3611876 - DNA, 25 bp, Homo sapien
gactcatccaagttcccgtggtcca

SEQ ID NO: 3611877 - DNA, 25 bp, Homo sapien
cagactcatccaagttcccgtggtc

SEQ ID NO: 3611878 - DNA, 25 bp, Homo sapien
gagccttgctccagactcatccaag

SEQ ID NO: 3611879 - DNA, 25 bp, Homo sapien
gcgcccttcttatttcctgatctgg

SEQ ID NO: 3611880 - DNA, 25 bp, Homo sapien
ggcatatcctgcaagccatggccag

SEQ ID NO: 3611881 - DNA, 25 bp, Homo sapien
gatttgcctggcagagcttctagac

SEQ ID NO: 3611882 - DNA, 25 bp, Homo sapien
ccatggctatctggggtgatttgcc

SEQ ID NO: 3611883 - DNA, 25 bp, Homo sapien
ggcagcagctgctcctgctcagcac

SEQ ID NO: 3611884 - DNA, 25 bp, Homo sapien
aaggcagcagctgctcctgctcagc

SEQ ID NO: 3611885 - DNA, 25 bp, Homo sapien
ttagaggccataaggcagcagctgc

SEQ ID NO: 3611886 - DNA, 25 bp, Homo sapien
ataaggcagcagctgctcctgctca

SEQ ID NO: 3611887 - DNA, 25 bp, Homo sapien
cttgcgctagaacttggactttttg

SEQ ID NO: 3611888 - DNA, 25 bp, Homo sapien
tcttgcgctagaacttggacttttt

SEQ ID NO: 3611889 - DNA, 25 bp, Homo sapien
ttcttgcgctagaacttggactttt

SEQ ID NO: 3611890 - DNA, 25 bp, Homo sapien
ggagctgccacaggccgacagccat

SEQ ID NO: 3611891 - DNA, 25 bp, Homo sapien
ctgcttctcgttgggtgggagctgc

SEQ ID NO: 3611892 - DNA, 25 bp, Homo sapien
gggagctgccacaggccgacagcca

SEQ ID NO: 3611893 - DNA, 25 bp, Homo sapien
cttctcgttgggtgggagctgccac

SEQ ID NO: 3611894 - DNA, 25 bp, Homo sapien
tggacaattttgttccacagaggct

SEQ ID NO: 3611895 - DNA, 25 bp, Homo sapien
ctcccctggaagctggctgaccagg

SEQ ID NO: 3611896 - DNA, 25 bp, Homo sapien
acaattttgttccacagaggctggg

SEQ ID NO: 3611897 - DNA, 25 bp, Homo sapien
gggccctcccctggaagctggctga

SEQ ID NO: 3611898 - DNA, 25 bp, Homo sapien
cagcggtggaaggagatgacgtgtc

SEQ ID NO: 3611899 - DNA, 25 bp, Homo sapien
gggtacacgggcagcggtggaagga

SEQ ID NO: 3611900 - DNA, 25 bp, Homo sapien
gcctgggcggtcctgaaggggtaca

SEQ ID NO: 3611901 - DNA, 25 bp, Homo sapien
gatgacgtgtctggagaaataagct

SEQ ID NO: 3611902 - DNA, 25 bp, Homo sapien
ctagctgtggcttcccgcaggtgga

SEQ ID NO: 3611903 - DNA, 25 bp, Homo sapien
gagagtacgcattcctgctgggcga

SEQ ID NO: 3611904 - DNA, 25 bp, Homo sapien
cttcgcaccacggtaaggagggcca

SEQ ID NO: 3611905 - DNA, 25 bp, Homo sapien
tggacgttgagccagacagaagccc

SEQ ID NO: 3611906 - DNA, 25 bp, Homo sapien
cagcgccgccagtggacggattcta

SEQ ID NO: 3611907 - DNA, 25 bp, Homo sapien
caactcctgaagacatgtgctaagg

SEQ ID NO: 3611908 - DNA, 25 bp, Homo sapien
tgtttgtgcccaatcgagtccagcg

SEQ ID NO: 3611909 - DNA, 25 bp, Homo sapien
taaggctttcggtgctcaagccgcc

SEQ ID NO: 3611910 - DNA, 25 bp, Homo sapien
atttccttaacaatctatcactggg

SEQ ID NO: 3611911 - DNA, 25 bp, Homo sapien
ggatttccttaacaatctatcactg

SEQ ID NO: 3611912 - DNA, 25 bp, Homo sapien
tatgaaatgcctttaaacctggatt

SEQ ID NO: 3611913 - DNA, 25 bp, Homo sapien
aacctggatttccttaacaatctat

SEQ ID NO: 3611914 - DNA, 25 bp, Homo sapien
ctcgggttacagaggttttctgaag

SEQ ID NO: 3611915 - DNA, 25 bp, Homo sapien
tctgaaggtcatactgtctgtccat

SEQ ID NO: 3611916 - DNA, 25 bp, Homo sapien
ctccattttgctgatggcttgagca

SEQ ID NO: 3611917 - DNA, 25 bp, Homo sapien
caagcccaggtgagactcctcgggt

SEQ ID NO: 3611918 - DNA, 25 bp, Homo sapien
tgacagtgtaactctcagcctgagg

SEQ ID NO: 3611919 - DNA, 25 bp, Homo sapien
tgtatctacaagaagggatttatta

SEQ ID NO: 3611920 - DNA, 25 bp, Homo sapien
ctctgggaagccggtagcatggttc

SEQ ID NO: 3611921 - DNA, 25 bp, Homo sapien
gggaattggctcccacaataggcca

SEQ ID NO: 3611922 - DNA, 25 bp, Homo sapien
ccaatcttctttgcactgtggttat

SEQ ID NO: 3611923 - DNA, 25 bp, Homo sapien
tggttatgcggttttcagctgatgt

SEQ ID NO: 3611924 - DNA, 25 bp, Homo sapien
ggccttagtgttgatcaggttcaga

SEQ ID NO: 3611925 - DNA, 25 bp, Homo sapien
cacgtgggcggccttagtgttgatc

SEQ ID NO: 3611926 - DNA, 25 bp, Homo sapien
tgaactgctgtgctggttttcctct

SEQ ID NO: 3611927 - DNA, 25 bp, Homo sapien
gctgtgctggttttcctctagacat

SEQ ID NO: 3611928 - DNA, 25 bp, Homo sapien
ccaagagcatgaactgctgtgctgg

SEQ ID NO: 3611929 - DNA, 25 bp, Homo sapien
actgctgtgctggttttcctctaga

SEQ ID NO: 3611930 - DNA, 25 bp, Homo sapien
gccctcaggtttgtgctgataagcc

SEQ ID NO: 3611931 - DNA, 25 bp, Homo sapien
gggtttatcattggagtcatttcat

SEQ ID NO: 3611932 - DNA, 25 bp, Homo sapien
tcctccaggtcatgatgtcccaggt

SEQ ID NO: 3611933 - DNA, 25 bp, Homo sapien
cttgggtcctggcatgggtttatca

SEQ ID NO: 3611934 - DNA, 25 bp, Homo sapien
ccttatatgcgcagaacaacgtgtc

SEQ ID NO: 3611935 - DNA, 25 bp, Homo sapien
gggatgagatctgtgcaaaaaccga

SEQ ID NO: 3611936 - DNA, 25 bp, Homo sapien
gggtggatgtaacatcacagatgct

SEQ ID NO: 3611937 - DNA, 25 bp, Homo sapien
tgggtacccgagtttccttatatgc

SEQ ID NO: 3611938 - DNA, 25 bp, Homo sapien
cagctttacggcgaggcatccggcc

SEQ ID NO: 3611939 - DNA, 25 bp, Homo sapien
ctttcagctttacggcgaggcatcc

SEQ ID NO: 3611940 - DNA, 25 bp, Homo sapien
ttcagctttacggcgaggcatccgg

SEQ ID NO: 3611941 - DNA, 25 bp, Homo sapien
agctttacggcgaggcatccggcct

SEQ ID NO: 3611942 - DNA, 25 bp, Homo sapien
tagaaatgaccagcttgcatgtggc

SEQ ID NO: 3611943 - DNA, 25 bp, Homo sapien
gttcaggtagcctccggtgctcaac

SEQ ID NO: 3611944 - DNA, 25 bp, Homo sapien
ctctgatgtcctgcctaaggttcag

SEQ ID NO: 3611945 - DNA, 25 bp, Homo sapien
ggtgctcaaccctgtcatagaaatg

SEQ ID NO: 3611946 - DNA, 25 bp, Homo sapien
cctgggcctgttgtttgagaaattc

SEQ ID NO: 3611947 - DNA, 25 bp, Homo sapien
cattggaaattacttgtagggagag

SEQ ID NO: 3611948 - DNA, 25 bp, Homo sapien
cagtttttatgatttagcaagtcca

SEQ ID NO: 3611949 - DNA, 25 bp, Homo sapien
gggctccacagagcataaacattgg

SEQ ID NO: 3611950 - DNA, 25 bp, Homo sapien
gatgttcgcatttgacaactcacca

SEQ ID NO: 3611951 - DNA, 25 bp, Homo sapien
agatgctgtgcagctgatgttcgca

SEQ ID NO: 3611952 - DNA, 25 bp, Homo sapien
gcagctgatgttcgcatttgacaac

SEQ ID NO: 3611953 - DNA, 25 bp, Homo sapien
ctcctcataaagatgctgtgcagct

SEQ ID NO: 3611954 - DNA, 25 bp, Homo sapien
taacctccagcaggtaccaggaaag

SEQ ID NO: 3611955 - DNA, 25 bp, Homo sapien
acattcctgggaggcccccatgaaa

SEQ ID NO: 3611956 - DNA, 25 bp, Homo sapien
gcaggtaccaggaaagccacgggcc

SEQ ID NO: 3611957 - DNA, 25 bp, Homo sapien
ctttcatcacctctcccataacctc

SEQ ID NO: 3611958 - DNA, 25 bp, Homo sapien
aatccttactactgacaggccctgg

SEQ ID NO: 3611959 - DNA, 25 bp, Homo sapien
ggtgtccgtcataatccttactact

SEQ ID NO: 3611960 - DNA, 25 bp, Homo sapien
caagctctcgccttggatttcttca

SEQ ID NO: 3611961 - DNA, 25 bp, Homo sapien
tttaggaggacagaagtttggtatg

SEQ ID NO: 3611962 - DNA, 25 bp, Homo sapien
gctgctggtgagtgttgccagggaa

SEQ ID NO: 3611963 - DNA, 25 bp, Homo sapien
gtgacctgtggtcgggcttccatct

SEQ ID NO: 3611964 - DNA, 25 bp, Homo sapien
tcattggtgactcccccctcggtga

SEQ ID NO: 3611965 - DNA, 25 bp, Homo sapien
agaagctgtcattggtgactccccc

SEQ ID NO: 3611966 - DNA, 25 bp, Homo sapien
cccctcggtgacctgtggtcgggct

SEQ ID NO: 3611967 - DNA, 25 bp, Homo sapien
cacacaaggaaacgggaggaagcct

SEQ ID NO: 3611968 - DNA, 25 bp, Homo sapien
gattgttgattggtcgaggagtcca

SEQ ID NO: 3611969 - DNA, 25 bp, Homo sapien
taatgacagggcttccacacaagga

SEQ ID NO: 3611970 - DNA, 25 bp, Homo sapien
tcttcaaacttgttagtatcatctg

SEQ ID NO: 3611971 - DNA, 25 bp, Homo sapien
ctcagagtcgcctcacctataaggg

SEQ ID NO: 3611972 - DNA, 25 bp, Homo sapien
gcaccgaggagagaccagaacttct

SEQ ID NO: 3611973 - DNA, 25 bp, Homo sapien
gaggcagcttcgtcagatgagatca

SEQ ID NO: 3611974 - DNA, 25 bp, Homo sapien
gaaagagaacgaatatgctctccct

SEQ ID NO: 3611975 - DNA, 25 bp, Homo sapien
cctggcatttctggccagacatcgg

SEQ ID NO: 3611976 - DNA, 25 bp, Homo sapien
gacatcggccagtcccgagtccact

SEQ ID NO: 3611977 - DNA, 25 bp, Homo sapien
ggccagtcccgagtccactttgctg

SEQ ID NO: 3611978 - DNA, 25 bp, Homo sapien
ctgaccccactagagtcactgtttc

SEQ ID NO: 3611979 - DNA, 25 bp, Homo sapien
ttctgggacaaaggcggggacaaca

SEQ ID NO: 3611980 - DNA, 25 bp, Homo sapien
aggcggggacaacagggatttccag

SEQ ID NO: 3611981 - DNA, 25 bp, Homo sapien
ctgggacaaaggcggggacaacagg

SEQ ID NO: 3611982 - DNA, 25 bp, Homo sapien
gcggggacaacagggatttccagga

SEQ ID NO: 3611983 - DNA, 25 bp, Homo sapien
gccctgcatgttcagggggcagctc

SEQ ID NO: 3611984 - DNA, 25 bp, Homo sapien
ccctgcatgttcagggggcagctct

SEQ ID NO: 3611985 - DNA, 25 bp, Homo sapien
tcatacagcaccctcacagctgatg

SEQ ID NO: 3611986 - DNA, 25 bp, Homo sapien
agagcgtcatacagcaccctcacag

SEQ ID NO: 3611987 - DNA, 25 bp, Homo sapien
cgtcatacagcaccctcacagctga

SEQ ID NO: 3611988 - DNA, 25 bp, Homo sapien
atacagcaccctcacagctgatgtc

SEQ ID NO: 3611989 - DNA, 25 bp, Homo sapien
actcagattcattgtgagaacaaac

SEQ ID NO: 3611990 - DNA, 25 bp, Homo sapien
aatagcccacatatagagcatgcag

SEQ ID NO: 3611991 - DNA, 25 bp, Homo sapien
caaggtgtgtggctctttataggca

SEQ ID NO: 3611992 - DNA, 25 bp, Homo sapien
gggcatgctatatctactactcaga

SEQ ID NO: 3611993 - DNA, 25 bp, Homo sapien
cagcgatgatgatcggctgagctct

SEQ ID NO: 3611994 - DNA, 25 bp, Homo sapien
gatgatgatcggctgagctctttca

SEQ ID NO: 3611995 - DNA, 25 bp, Homo sapien
gatcggctgagctctttcattagaa

SEQ ID NO: 3611996 - DNA, 25 bp, Homo sapien
actgcagcgatgatgatcggctgag

SEQ ID NO: 3611997 - DNA, 25 bp, Homo sapien
aactgaggcaccacaaggtacttcc

SEQ ID NO: 3611998 - DNA, 25 bp, Homo sapien
cctttgtcttgataggggatttgct

SEQ ID NO: 3611999 - DNA, 25 bp, Homo sapien
acttccttgtgacagaggcaaccac

SEQ ID NO: 3612000 - DNA, 25 bp, Homo sapien
agaggcaaccactgaatccaagact

SEQ ID NO: 3612001 - DNA, 25 bp, Homo sapien
gcaacttctgggaagcagctctcta

SEQ ID NO: 3612002 - DNA, 25 bp, Homo sapien
cagcgtattttccaggagagctccc

SEQ ID NO: 3612003 - DNA, 25 bp, Homo sapien
tgtctctcccaagcccacatttggg

SEQ ID NO: 3612004 - DNA, 25 bp, Homo sapien
atgggcgacagggaagatgcaactt

SEQ ID NO: 3612005 - DNA, 25 bp, Homo sapien
acctccaggaggcaatttgaaacaa

SEQ ID NO: 3612006 - DNA, 25 bp, Homo sapien
ctccacctccaggaggcaatttgaa

SEQ ID NO: 3612007 - DNA, 25 bp, Homo sapien
ccacctccaggaggcaatttgaaac

SEQ ID NO: 3612008 - DNA, 25 bp, Homo sapien
cggcatccatctgagactccacctc

SEQ ID NO: 3612009 - DNA, 25 bp, Homo sapien
ccctggtcgctgtgtaaatgagtgc

SEQ ID NO: 3612010 - DNA, 25 bp, Homo sapien
cgagttctcggtgagtgccctgtca

SEQ ID NO: 3612011 - DNA, 25 bp, Homo sapien
ggtcaagacgctcaaaatgtccagt

SEQ ID NO: 3612012 - DNA, 25 bp, Homo sapien
cagaggcccagcttatgtccggtca

SEQ ID NO: 3612013 - DNA, 25 bp, Homo sapien
tataaccacatgtccatatagtata

SEQ ID NO: 3612014 - DNA, 25 bp, Homo sapien
ataaccacatgtccatatagtatat

SEQ ID NO: 3612015 - DNA, 25 bp, Homo sapien
taaccacatgtccatatagtatata

SEQ ID NO: 3612016 - DNA, 25 bp, Homo sapien
cagggcaggcattgttatatttcca

SEQ ID NO: 3612017 - DNA, 25 bp, Homo sapien
tgacttgccaaggatgacgtcctgg

SEQ ID NO: 3612018 - DNA, 25 bp, Homo sapien
taaaatgctttaacgtgcctcacac

SEQ ID NO: 3612019 - DNA, 25 bp, Homo sapien
tcatctccaggtgcaagtcttggct

SEQ ID NO: 3612020 - DNA, 25 bp, Homo sapien
cataagccaagctagggaattcagc

SEQ ID NO: 3612021 - DNA, 25 bp, Homo sapien
gcatcctctataaggtctccagagc

SEQ ID NO: 3612022 - DNA, 25 bp, Homo sapien
atctttttgctcctccataagccaa

SEQ ID NO: 3612023 - DNA, 25 bp, Homo sapien
ctccataagccaagctagggaattc

SEQ ID NO: 3612024 - DNA, 25 bp, Homo sapien
cagtcatttgtctccatgataggcc

SEQ ID NO: 3612025 - DNA, 25 bp, Homo sapien
gtcacccggtatcatggcacaggca

SEQ ID NO: 3612026 - DNA, 25 bp, Homo sapien
ggcacaggcatccatactccatctt

SEQ ID NO: 3612027 - DNA, 25 bp, Homo sapien
tggcaatccagctggacaagtttct

SEQ ID NO: 3612028 - DNA, 25 bp, Homo sapien
ggacaggcctgcagacatgaagcac

SEQ ID NO: 3612029 - DNA, 25 bp, Homo sapien
gcacctcatattgcatctgatccat

SEQ ID NO: 3612030 - DNA, 25 bp, Homo sapien
agcacctcatattgcatctgatcca

SEQ ID NO: 3612031 - DNA, 25 bp, Homo sapien
tgcagacatgaagcacctcatattg

SEQ ID NO: 3612032 - DNA, 25 bp, Homo sapien
gatcctcttacaaacccatacggtc

SEQ ID NO: 3612033 - DNA, 25 bp, Homo sapien
tcaggtcaggtacagagtggcacat

SEQ ID NO: 3612034 - DNA, 25 bp, Homo sapien
tatcaagtgatgatgcaccaggcac

SEQ ID NO: 3612035 - DNA, 25 bp, Homo sapien
catacggtcactatgattagcccta

SEQ ID NO: 3612036 - DNA, 25 bp, Homo sapien
ttgtctcctctccaatccttgagca

SEQ ID NO: 3612037 - DNA, 25 bp, Homo sapien
ggggaaagcccaagctggatgtctc

SEQ ID NO: 3612038 - DNA, 25 bp, Homo sapien
ctgttgagacgggagatgtccccac

SEQ ID NO: 3612039 - DNA, 25 bp, Homo sapien
aacccctgcaagctggcccatcctt

SEQ ID NO: 3612040 - DNA, 25 bp, Homo sapien
catggggggtaatcagaaggaggag

SEQ ID NO: 3612041 - DNA, 25 bp, Homo sapien
cctctgatggggcaacggctgaggg

SEQ ID NO: 3612042 - DNA, 25 bp, Homo sapien
tctgatggggcaacggctgagggtg

SEQ ID NO: 3612043 - DNA, 25 bp, Homo sapien
tgatatgcaacatggggggtaatca

SEQ ID NO: 3612044 - DNA, 25 bp, Homo sapien
gtagctgggccagtagctatttgca

SEQ ID NO: 3612045 - DNA, 25 bp, Homo sapien
ggctaaggtcatcctgccagtcagg

SEQ ID NO: 3612046 - DNA, 25 bp, Homo sapien
cactccatcgccagagagaatgcca

SEQ ID NO: 3612047 - DNA, 25 bp, Homo sapien
gggaattctttatctcagcagaggg

SEQ ID NO: 3612048 - DNA, 25 bp, Homo sapien
catgctgggcattgataggtaggac

SEQ ID NO: 3612049 - DNA, 25 bp, Homo sapien
gaaacgtctataggcctggagacag

SEQ ID NO: 3612050 - DNA, 25 bp, Homo sapien
taccatgcgggtactcactgctagc

SEQ ID NO: 3612051 - DNA, 25 bp, Homo sapien
gatagggccttggagagaaacgtct

SEQ ID NO: 3612052 - DNA, 25 bp, Homo sapien
gggaagtcggagaggccggaactgc

SEQ ID NO: 3612053 - DNA, 25 bp, Homo sapien
gcacagtagcttagaaggcaagagc

SEQ ID NO: 3612054 - DNA, 25 bp, Homo sapien
cacccagacaagcacagtagcttag

SEQ ID NO: 3612055 - DNA, 25 bp, Homo sapien
caggaaaggagtctgaatggagtgt

SEQ ID NO: 3612056 - DNA, 25 bp, Homo sapien
ttgttgacgtagaatggccggtagt

SEQ ID NO: 3612057 - DNA, 25 bp, Homo sapien
gacccaatcccgttgcctttgttga

SEQ ID NO: 3612058 - DNA, 25 bp, Homo sapien
tgcctttgttgacgtagaatggccg

SEQ ID NO: 3612059 - DNA, 25 bp, Homo sapien
cccgttgcctttgttgacgtagaat

SEQ ID NO: 3612060 - DNA, 25 bp, Homo sapien
tgcagagagggtaaagaactgcccc

SEQ ID NO: 3612061 - DNA, 25 bp, Homo sapien
gatccaagacccgacaattctaggg

SEQ ID NO: 3612062 - DNA, 25 bp, Homo sapien
catagttagtgggtgagcttgaacc

SEQ ID NO: 3612063 - DNA, 25 bp, Homo sapien
gaaacaagagtggtcagcgaggcca

SEQ ID NO: 3612064 - DNA, 25 bp, Homo sapien
ggacttgagggatgctcagaccttg

SEQ ID NO: 3612065 - DNA, 25 bp, Homo sapien
tcaagggtacactgcctttggccct

SEQ ID NO: 3612066 - DNA, 25 bp, Homo sapien
tggccctgtctctcagggaactgac

SEQ ID NO: 3612067 - DNA, 25 bp, Homo sapien
ctttgtgtggtccacagcaggactt

SEQ ID NO: 3612068 - DNA, 25 bp, Homo sapien
tgctcttctgatatgcctggcctcg

SEQ ID NO: 3612069 - DNA, 25 bp, Homo sapien
gagagggtatctaattcatccagga

SEQ ID NO: 3612070 - DNA, 25 bp, Homo sapien
gacagcaagaaacaagggctccggc

SEQ ID NO: 3612071 - DNA, 25 bp, Homo sapien
tagcagggcctagaatggaccttca

SEQ ID NO: 3612072 - DNA, 25 bp, Homo sapien
ccttggggctttggctccgcatgag

SEQ ID NO: 3612073 - DNA, 25 bp, Homo sapien
ttggctccgcatgagggagggatag

SEQ ID NO: 3612074 - DNA, 25 bp, Homo sapien
gccttggggctttggctccgcatga

SEQ ID NO: 3612075 - DNA, 25 bp, Homo sapien
gctttggctccgcatgagggaggga

SEQ ID NO: 3612076 - DNA, 25 bp, Homo sapien
cacccagggttaggatggcaagccc

SEQ ID NO: 3612077 - DNA, 25 bp, Homo sapien
gctgcatgcggtctgtctcgggaaa

SEQ ID NO: 3612078 - DNA, 25 bp, Homo sapien
tggacgatgcttcccattcacggag

SEQ ID NO: 3612079 - DNA, 25 bp, Homo sapien
ggccccgtatctatgagctcagcag

SEQ ID NO: 3612080 - DNA, 25 bp, Homo sapien
ggattatttttagacagcccactgc

SEQ ID NO: 3612081 - DNA, 25 bp, Homo sapien
cccactgcgacccagtggtttggaa

SEQ ID NO: 3612082 - DNA, 25 bp, Homo sapien
ctgataaggggttttcccagtgcct

SEQ ID NO: 3612083 - DNA, 25 bp, Homo sapien
tagacagcccactgcgacccagtgg

SEQ ID NO: 3612084 - DNA, 25 bp, Homo sapien
gagagagaggcattagtggcacagc

SEQ ID NO: 3612085 - DNA, 25 bp, Homo sapien
gagagagagaggcattagtggcaca

SEQ ID NO: 3612086 - DNA, 25 bp, Homo sapien
agagaggcattagtggcacagcgct

SEQ ID NO: 3612087 - DNA, 25 bp, Homo sapien
gagagaggcattagtggcacagcgc

SEQ ID NO: 3612088 - DNA, 25 bp, Homo sapien
gacttagggtcgtctggtcctgcct

SEQ ID NO: 3612089 - DNA, 25 bp, Homo sapien
tctttcaggagatacatgagggtct

SEQ ID NO: 3612090 - DNA, 25 bp, Homo sapien
gagcggtgaaacaagccctgggaaa

SEQ ID NO: 3612091 - DNA, 25 bp, Homo sapien
ccggtcctgaccactgagagctgtt

SEQ ID NO: 3612092 - DNA, 25 bp, Homo sapien
gaggagctgccttggacgacgggca

SEQ ID NO: 3612093 - DNA, 25 bp, Homo sapien
cgacgggcaggtcattgtcagagtt

SEQ ID NO: 3612094 - DNA, 25 bp, Homo sapien
ctgccttggacgacgggcaggtcat

SEQ ID NO: 3612095 - DNA, 25 bp, Homo sapien
ttggacgacgggcaggtcattgtca

SEQ ID NO: 3612096 - DNA, 25 bp, Homo sapien
ctccttggtgaagcggccaggagac

SEQ ID NO: 3612097 - DNA, 25 bp, Homo sapien
agggctggtatgatgtccggacccc

SEQ ID NO: 3612098 - DNA, 25 bp, Homo sapien
gccatagagattgttgaaattcttc

SEQ ID NO: 3612099 - DNA, 25 bp, Homo sapien
ggtgccatagagattgttgaaattc

SEQ ID NO: 3612100 - DNA, 25 bp, Homo sapien
ttttgagagtagaaggactctgtta

SEQ ID NO: 3612101 - DNA, 25 bp, Homo sapien
cataagtcaatcaactaatttatca

SEQ ID NO: 3612102 - DNA, 25 bp, Homo sapien
gtcaatcaactaatttatcacccaa

SEQ ID NO: 3612103 - DNA, 25 bp, Homo sapien
ctctgttagtaaccgtgcagagagc

SEQ ID NO: 3612104 - DNA, 25 bp, Homo sapien
gctgggaagtctcccagcatgtgag

SEQ ID NO: 3612105 - DNA, 25 bp, Homo sapien
catcatagactgactcacagtgcag

SEQ ID NO: 3612106 - DNA, 25 bp, Homo sapien
aggagagacccgcaggagcctgtca

SEQ ID NO: 3612107 - DNA, 25 bp, Homo sapien
gtcagggcactcgatggcaccccag

SEQ ID NO: 3612108 - DNA, 25 bp, Homo sapien
ttatgtaacgggtattgctgtggtt

SEQ ID NO: 3612109 - DNA, 25 bp, Homo sapien
tgtggtttgttgctggcgcccaaga

SEQ ID NO: 3612110 - DNA, 25 bp, Homo sapien
ctggtctgtgctaggccggcacctt

SEQ ID NO: 3612111 - DNA, 25 bp, Homo sapien
gcactggtctgtgctaggccggcac

SEQ ID NO: 3612112 - DNA, 25 bp, Homo sapien
gaagctgttcgtgtagttgttcaca

SEQ ID NO: 3612113 - DNA, 25 bp, Homo sapien
gttgttcacatagcgatggtcacca

SEQ ID NO: 3612114 - DNA, 25 bp, Homo sapien
gagtatctcttcatggtgtccggtg

SEQ ID NO: 3612115 - DNA, 25 bp, Homo sapien
ggtgtcaggtacatggagtatctct

SEQ ID NO: 3612116 - DNA, 25 bp, Homo sapien
tgcccagcattcactcggttcctga

SEQ ID NO: 3612117 - DNA, 25 bp, Homo sapien
aatatgacgccctgcccagcattca

SEQ ID NO: 3612118 - DNA, 25 bp, Homo sapien
ccagcattcactcggttcctgagct

SEQ ID NO: 3612119 - DNA, 25 bp, Homo sapien
ctcagagaatatgacgccctgccca

SEQ ID NO: 3612120 - DNA, 25 bp, Homo sapien
ctttacaaggtgctattaatgccca

SEQ ID NO: 3612121 - DNA, 25 bp, Homo sapien
aattgtggttgtatccccctgagac

SEQ ID NO: 3612122 - DNA, 25 bp, Homo sapien
atttgatccatacatcaattgtggt

SEQ ID NO: 3612123 - DNA, 25 bp, Homo sapien
ggtgctattaatgcccatttcttat

SEQ ID NO: 3612124 - DNA, 25 bp, Homo sapien
cgcctatcagtgtcctggtgcacag

SEQ ID NO: 3612125 - DNA, 25 bp, Homo sapien
tgtcctggtgcacagcagatactca

SEQ ID NO: 3612126 - DNA, 25 bp, Homo sapien
gtcctggtgcacagcagatactcaa

SEQ ID NO: 3612127 - DNA, 25 bp, Homo sapien
ctgcgcctatcagtgtcctggtgca

SEQ ID NO: 3612128 - DNA, 25 bp, Homo sapien
acacctgtacagaggccgtggccag

SEQ ID NO: 3612129 - DNA, 25 bp, Homo sapien
gggccacacctgtacagaggccgtg

SEQ ID NO: 3612130 - DNA, 25 bp, Homo sapien
agggccacacctgtacagaggccgt

SEQ ID NO: 3612131 - DNA, 25 bp, Homo sapien
gccacacctgtacagaggccgtggc

SEQ ID NO: 3612132 - DNA, 25 bp, Homo sapien
gaagttgcctagtgactgtcccagg

SEQ ID NO: 3612133 - DNA, 25 bp, Homo sapien
tcaatgaagttacggctcaggtccg

SEQ ID NO: 3612134 - DNA, 25 bp, Homo sapien
aacgtggcgcatgcatacattgagc

SEQ ID NO: 3612135 - DNA, 25 bp, Homo sapien
tacattgagcaggtcgtccttgaag

SEQ ID NO: 3612136 - DNA, 25 bp, Homo sapien
gaaacaacacagagtcgctgatgct

SEQ ID NO: 3612137 - DNA, 25 bp, Homo sapien
cgctgatgctatgcagctgctcccg

SEQ ID NO: 3612138 - DNA, 25 bp, Homo sapien
tctcatccagagcatccatgatcac

SEQ ID NO: 3612139 - DNA, 25 bp, Homo sapien
ggctctctcatccagagcatccatg

SEQ ID NO: 3612140 - DNA, 25 bp, Homo sapien
tccaggatggccttctcattggtgg

SEQ ID NO: 3612141 - DNA, 25 bp, Homo sapien
tcccggaagttctgctccaggatgg

SEQ ID NO: 3612142 - DNA, 25 bp, Homo sapien
ccggaagttctgctccaggatggcc

SEQ ID NO: 3612143 - DNA, 25 bp, Homo sapien
caggtcccggaagttctgctccagg

SEQ ID NO: 3612144 - DNA, 25 bp, Homo sapien
tcctcttggtgggttgatatgagcc

SEQ ID NO: 3612145 - DNA, 25 bp, Homo sapien
gatatgagccatcattccctgtggg

SEQ ID NO: 3612146 - DNA, 25 bp, Homo sapien
ggccccaaagttctcccatgggtca

SEQ ID NO: 3612147 - DNA, 25 bp, Homo sapien
ccatgggtcacaatatgctccctga

SEQ ID NO: 3612148 - DNA, 25 bp, Homo sapien
tcatcctcaatctcaatgatcttga

SEQ ID NO: 3612149 - DNA, 25 bp, Homo sapien
gctccttttgcaatgacagctccgt

SEQ ID NO: 3612150 - DNA, 25 bp, Homo sapien
gctgctccttttgcaatgacagctc

SEQ ID NO: 3612151 - DNA, 25 bp, Homo sapien
cttcatcctcaatctcaatgatctt

SEQ ID NO: 3612152 - DNA, 25 bp, Homo sapien
tcagcaaacattcatcaggacctcg

SEQ ID NO: 3612153 - DNA, 25 bp, Homo sapien
gaaccagagaaccagggagcggctc

SEQ ID NO: 3612154 - DNA, 25 bp, Homo sapien
tcgccaaggatctagcagtaagtta

SEQ ID NO: 3612155 - DNA, 25 bp, Homo sapien
tcaggacctcggatatgccaggcac

SEQ ID NO: 3612156 - DNA, 25 bp, Homo sapien
ttgctgtattctcaggccactaggg

SEQ ID NO: 3612157 - DNA, 25 bp, Homo sapien
tattctcaggccactagggctggat

SEQ ID NO: 3612158 - DNA, 25 bp, Homo sapien
gccactagggctggatatcctagcc

SEQ ID NO: 3612159 - DNA, 25 bp, Homo sapien
gctggatatcctagccatgtctttt

SEQ ID NO: 3612160 - DNA, 25 bp, Homo sapien
ctgcaagtggcagaaggtctgacca

SEQ ID NO: 3612161 - DNA, 25 bp, Homo sapien
tctgaccagagaaggtgaaggccag

SEQ ID NO: 3612162 - DNA, 25 bp, Homo sapien
ggtctgaccagagaaggtgaaggcc

SEQ ID NO: 3612163 - DNA, 25 bp, Homo sapien
cagaaggtctgaccagagaaggtga

SEQ ID NO: 3612164 - DNA, 25 bp, Homo sapien
gctcttggagttcccatggactggg

SEQ ID NO: 3612165 - DNA, 25 bp, Homo sapien
tctgtgctgctagaatggtcctttc

SEQ ID NO: 3612166 - DNA, 25 bp, Homo sapien
gcaggctcttggagttcccatggac

SEQ ID NO: 3612167 - DNA, 25 bp, Homo sapien
tgctgctagaatggtcctttctcac

SEQ ID NO: 3612168 - DNA, 25 bp, Homo sapien
cttcaggaaagtggagttcactgct

SEQ ID NO: 3612169 - DNA, 25 bp, Homo sapien
agtggagttcactgctttggaggcc

SEQ ID NO: 3612170 - DNA, 25 bp, Homo sapien
ggaaagagtaatcaaccagctcctc

SEQ ID NO: 3612171 - DNA, 25 bp, Homo sapien
gaaggaatcctctgctgtccagatc

SEQ ID NO: 3612172 - DNA, 25 bp, Homo sapien
gactccgagaaaatggacttgcgca

SEQ ID NO: 3612173 - DNA, 25 bp, Homo sapien
gcttgttgccgatgcaggagtcgca

SEQ ID NO: 3612174 - DNA, 25 bp, Homo sapien
tcggagccggacttggaccgtgaaa

SEQ ID NO: 3612175 - DNA, 25 bp, Homo sapien
tgtgctcctggaacatgcaaaggta

SEQ ID NO: 3612176 - DNA, 25 bp, Homo sapien
catagagtccatgctgaagtagttg

SEQ ID NO: 3612177 - DNA, 25 bp, Homo sapien
tggatgatgggtcgccgccactcat

SEQ ID NO: 3612178 - DNA, 25 bp, Homo sapien
gagccctgcgtacggcgacctcttg

SEQ ID NO: 3612179 - DNA, 25 bp, Homo sapien
cgtccccggactcgacaaactggat

SEQ ID NO: 3612180 - DNA, 25 bp, Homo sapien
ggtgccattctccaggctgccactg

SEQ ID NO: 3612181 - DNA, 25 bp, Homo sapien
gctcgacccgttgctcctggaggca

SEQ ID NO: 3612182 - DNA, 25 bp, Homo sapien
tggcttctgggctcgacccgttgct

SEQ ID NO: 3612183 - DNA, 25 bp, Homo sapien
cccgccgtgcccgttggtggtcttg

SEQ ID NO: 3612184 - DNA, 25 bp, Homo sapien
gggttcaggataggtgacctttctg

SEQ ID NO: 3612185 - DNA, 25 bp, Homo sapien
ggcaaccacgaggactagagacaca

SEQ ID NO: 3612186 - DNA, 25 bp, Homo sapien
gataggtgacctttctggcaggcgt

SEQ ID NO: 3612187 - DNA, 25 bp, Homo sapien
tggcaggcgtctcggcagggagtgg

SEQ ID NO: 3612188 - DNA, 25 bp, Homo sapien
agctgagcccaggacccgaaccaga

SEQ ID NO: 3612189 - DNA, 25 bp, Homo sapien
gctgagcccaggacccgaaccagag

SEQ ID NO: 3612190 - DNA, 25 bp, Homo sapien
cacagctgagcccaggacccgaacc

SEQ ID NO: 3612191 - DNA, 25 bp, Homo sapien
acagctgagcccaggacccgaacca

SEQ ID NO: 3612192 - DNA, 25 bp, Homo sapien
aaaggcctgtttcatggccgacgcc

SEQ ID NO: 3612193 - DNA, 25 bp, Homo sapien
gccgacgccggcatgggctttacgt

SEQ ID NO: 3612194 - DNA, 25 bp, Homo sapien
cccggctcgctaggctttgatggct

SEQ ID NO: 3612195 - DNA, 25 bp, Homo sapien
tggctgcttccgctccccataaagg

SEQ ID NO: 3612196 - DNA, 25 bp, Homo sapien
ttaggaattctggagccgcccgaat

SEQ ID NO: 3612197 - DNA, 25 bp, Homo sapien
ttcagacagaggcaaaagaacccag

SEQ ID NO: 3612198 - DNA, 25 bp, Homo sapien
aaggtgtgccttccaattcacttgg

SEQ ID NO: 3612199 - DNA, 25 bp, Homo sapien
cgaatgccagctgggatgaaaccct

SEQ ID NO: 3612200 - DNA, 25 bp, Homo sapien
gatggacaagatgacctattgggtc

SEQ ID NO: 3612201 - DNA, 25 bp, Homo sapien
catatatcattagtcctgcctgagg

SEQ ID NO: 3612202 - DNA, 25 bp, Homo sapien
ggagaggtccactgtcctactcatg

SEQ ID NO: 3612203 - DNA, 25 bp, Homo sapien
tacagtattttgacccctggagttc

SEQ ID NO: 3612204 - DNA, 25 bp, Homo sapien
tcagcattcggacatgtaattaaca

SEQ ID NO: 3612205 - DNA, 25 bp, Homo sapien
catgtaattaacagccagagcccac

SEQ ID NO: 3612206 - DNA, 25 bp, Homo sapien
ggtccttgcccacacaatagagagg

SEQ ID NO: 3612207 - DNA, 25 bp, Homo sapien
gctgaaagtcgcctgtgctgaactg

SEQ ID NO: 3612208 - DNA, 25 bp, Homo sapien
agaggaaacgcagaaatattttggt

SEQ ID NO: 3612209 - DNA, 25 bp, Homo sapien
tgctcttggtagtaggaaagagagt

SEQ ID NO: 3612210 - DNA, 25 bp, Homo sapien
ctgctcttggtagtaggaaagagag

SEQ ID NO: 3612211 - DNA, 25 bp, Homo sapien
gaaacgcagaaatattttggtgtct

SEQ ID NO: 3612212 - DNA, 25 bp, Homo sapien
gcctgagggaggagctacgaggccg

SEQ ID NO: 3612213 - DNA, 25 bp, Homo sapien
gaggagctacgaggccggcttgcgg

SEQ ID NO: 3612214 - DNA, 25 bp, Homo sapien
catgatcggctccagagtgctccag

SEQ ID NO: 3612215 - DNA, 25 bp, Homo sapien
agatcctcctcccatgatcggctcc

SEQ ID NO: 3612216 - DNA, 25 bp, Homo sapien
caccagagcggccccagaggcaggc

SEQ ID NO: 3612217 - DNA, 25 bp, Homo sapien
actaccaccagagcggccccagagg

SEQ ID NO: 3612218 - DNA, 25 bp, Homo sapien
tgactaccaccagagcggccccaga

SEQ ID NO: 3612219 - DNA, 25 bp, Homo sapien
cttgactaccaccagagcggcccca

SEQ ID NO: 3612220 - DNA, 25 bp, Homo sapien
tccttggccagcaaaggttgccaca

SEQ ID NO: 3612221 - DNA, 25 bp, Homo sapien
gctgctggccgatcccaaggtcttc

SEQ ID NO: 3612222 - DNA, 25 bp, Homo sapien
gctgctgctggccgatcccaaggtc

SEQ ID NO: 3612223 - DNA, 25 bp, Homo sapien
cctccttggccagcaaaggttgcca

SEQ ID NO: 3612224 - DNA, 25 bp, Homo sapien
tgcaggtctccgcaaacctctcatt

SEQ ID NO: 3612225 - DNA, 25 bp, Homo sapien
agaagggtcagaaccgtgatcttgg

SEQ ID NO: 3612226 - DNA, 25 bp, Homo sapien
gggtcagaaccgtgatcttggtcca

SEQ ID NO: 3612227 - DNA, 25 bp, Homo sapien
tcttggtccaaccaacagtcttgga

SEQ ID NO: 3612228 - DNA, 25 bp, Homo sapien
gaaccgtgatcttggtccaaccaac

SEQ ID NO: 3612229 - DNA, 25 bp, Homo sapien
caggtttctccattggcctaggacg

SEQ ID NO: 3612230 - DNA, 25 bp, Homo sapien
tggaagacaccgaaaggaaaccagc

SEQ ID NO: 3612231 - DNA, 25 bp, Homo sapien
gattttcaggttagcctctgaccca

SEQ ID NO: 3612232 - DNA, 25 bp, Homo sapien
tatgtccagatccttctagggtggg

SEQ ID NO: 3612233 - DNA, 25 bp, Homo sapien
tctggaccttgacgcagcaaagcag

SEQ ID NO: 3612234 - DNA, 25 bp, Homo sapien
gctttgaaaattcccactgcctggg

SEQ ID NO: 3612235 - DNA, 25 bp, Homo sapien
gaaagaatgccgcagctcagtggct

SEQ ID NO: 3612236 - DNA, 25 bp, Homo sapien
gatggccatcctgcattactgcaag

SEQ ID NO: 3612237 - DNA, 25 bp, Homo sapien
gagtgttcacttgcaagctgccaaa

SEQ ID NO: 3612238 - DNA, 25 bp, Homo sapien
tcctgcatctcccctggagtgttca

SEQ ID NO: 3612239 - DNA, 25 bp, Homo sapien
gggtctcatgaaggcacccccattc

SEQ ID NO: 3612240 - DNA, 25 bp, Homo sapien
cctctggttgttctgttgaactcct

SEQ ID NO: 3612241 - DNA, 25 bp, Homo sapien
cagatcacagaccacgagtgccttt

SEQ ID NO: 3612242 - DNA, 25 bp, Homo sapien
cgagtggagacctcccatcactgag

SEQ ID NO: 3612243 - DNA, 25 bp, Homo sapien
gcatgaagtacgaggaaaacttgaa

SEQ ID NO: 3612244 - DNA, 25 bp, Homo sapien
gacctggacgttgcctccagagcag

SEQ ID NO: 3612245 - DNA, 25 bp, Homo sapien
tgacaactcaatccagctgacagga

SEQ ID NO: 3612246 - DNA, 25 bp, Homo sapien
tattcagcattagagacatcagagc

SEQ ID NO: 3612247 - DNA, 25 bp, Homo sapien
ccagggtctacagccaagaaggtcc

SEQ ID NO: 3612248 - DNA, 25 bp, Homo sapien
tgatcaccctgaggcaaggagctga

SEQ ID NO: 3612249 - DNA, 25 bp, Homo sapien
ttggcaagcgtttccccacatggac

SEQ ID NO: 3612250 - DNA, 25 bp, Homo sapien
tgtcttctctgtttgggctccgatc

SEQ ID NO: 3612251 - DNA, 25 bp, Homo sapien
gagatagagacacgattaaccccat

SEQ ID NO: 3612252 - DNA, 25 bp, Homo sapien
attttaaaggatgtgtgcccagttc

SEQ ID NO: 3612253 - DNA, 25 bp, Homo sapien
tctttgtccgtagctggtcctggac

SEQ ID NO: 3612254 - DNA, 25 bp, Homo sapien
agtgcacagaccagctttggtcgtt

SEQ ID NO: 3612255 - DNA, 25 bp, Homo sapien
gtcctggacctccacagtgcacaga

SEQ ID NO: 3612256 - DNA, 25 bp, Homo sapien
acagaccagctttggtcgttgcggg

SEQ ID NO: 3612257 - DNA, 25 bp, Homo sapien
tcctccctcagaaacgattagggcg

SEQ ID NO: 3612258 - DNA, 25 bp, Homo sapien
ggcgatgaacacctgaatgtggaaa

SEQ ID NO: 3612259 - DNA, 25 bp, Homo sapien
cagaaacgattagggcgatgaacac

SEQ ID NO: 3612260 - DNA, 25 bp, Homo sapien
cgatgaacacctgaatgtggaaaag

SEQ ID NO: 3612261 - DNA, 25 bp, Homo sapien
gcaggcctttgtgccaagccaggag

SEQ ID NO: 3612262 - DNA, 25 bp, Homo sapien
tgcaggcatctcccaaaagcatcag

SEQ ID NO: 3612263 - DNA, 25 bp, Homo sapien
gagcttgctggtgggcgctcctggg

SEQ ID NO: 3612264 - DNA, 25 bp, Homo sapien
tcctggggtaacagcagatccctgg

SEQ ID NO: 3612265 - DNA, 25 bp, Homo sapien
taaagcacttagaagagcgcctgcc

SEQ ID NO: 3612266 - DNA, 25 bp, Homo sapien
cgaagggtctgaatctgagggtctc

SEQ ID NO: 3612267 - DNA, 25 bp, Homo sapien
gacttgcctatacattcactcgtgg

SEQ ID NO: 3612268 - DNA, 25 bp, Homo sapien
tgtgaattgctgcacccctaagtgt

SEQ ID NO: 3612269 - DNA, 25 bp, Homo sapien
cttgttcggtctcaggctcagtttc

SEQ ID NO: 3612270 - DNA, 25 bp, Homo sapien
ccttgttcggtctcaggctcagttt

SEQ ID NO: 3612271 - DNA, 25 bp, Homo sapien
tagcctaagctgttgattaaggtct

SEQ ID NO: 3612272 - DNA, 25 bp, Homo sapien
ttttctgcgtcactcaatgcgttgg

SEQ ID NO: 3612273 - DNA, 25 bp, Homo sapien
ggtttgggtctcctgttagagccta

SEQ ID NO: 3612274 - DNA, 25 bp, Homo sapien
tgctctctgcttcgaatcacttcca

SEQ ID NO: 3612275 - DNA, 25 bp, Homo sapien
tgcactctaatcctgcccttcattg

SEQ ID NO: 3612276 - DNA, 25 bp, Homo sapien
agtctcccgggagggcatggctggc

SEQ ID NO: 3612277 - DNA, 25 bp, Homo sapien
cactctaatcctgcccttcattgtg

SEQ ID NO: 3612278 - DNA, 25 bp, Homo sapien
agcgctaggggccagtctcccggga

SEQ ID NO: 3612279 - DNA, 25 bp, Homo sapien
tgcctgcccactctttctcagtctc

SEQ ID NO: 3612280 - DNA, 25 bp, Homo sapien
tcttccatttgcctgcccactcttt

SEQ ID NO: 3612281 - DNA, 25 bp, Homo sapien
tctcagtctcttttgctggtgcctc

SEQ ID NO: 3612282 - DNA, 25 bp, Homo sapien
ttctcagtctcttttgctggtgcct

SEQ ID NO: 3612283 - DNA, 25 bp, Homo sapien
tgcccaaagaggtaccaagcaaggt

SEQ ID NO: 3612284 - DNA, 25 bp, Homo sapien
cacgagggcaagaacgatgtcttac

SEQ ID NO: 3612285 - DNA, 25 bp, Homo sapien
cgacttaaattcaagcacgagggca

SEQ ID NO: 3612286 - DNA, 25 bp, Homo sapien
caatgcctagtaagggtgcaagtac

SEQ ID NO: 3612287 - DNA, 25 bp, Homo sapien
gaaaaggcacctgagacaaagtcta

SEQ ID NO: 3612288 - DNA, 25 bp, Homo sapien
gaacctcctataccaactgtgccag

SEQ ID NO: 3612289 - DNA, 25 bp, Homo sapien
tagccaaggcttgctccagattatg

SEQ ID NO: 3612290 - DNA, 25 bp, Homo sapien
ggtcagtcttcaagccgagcatata

SEQ ID NO: 3612291 - DNA, 25 bp, Homo sapien
tctcgggcggtctctggtgaaagtc

SEQ ID NO: 3612292 - DNA, 25 bp, Homo sapien
ttttcaaagagcctcccggcacgat

SEQ ID NO: 3612293 - DNA, 25 bp, Homo sapien
tatttataccgagaaaccctggctg

SEQ ID NO: 3612294 - DNA, 25 bp, Homo sapien
cttagtacaaactggactcgaaggg

SEQ ID NO: 3612295 - DNA, 25 bp, Homo sapien
tgccaaggtgtcttaacaaagttac

SEQ ID NO: 3612296 - DNA, 25 bp, Homo sapien
gctgttaagagagtagttgttccta

SEQ ID NO: 3612297 - DNA, 25 bp, Homo sapien
cactgctgagacctgtttcgtagga

SEQ ID NO: 3612298 - DNA, 25 bp, Homo sapien
gaaatctggaggtactggtttagta

SEQ ID NO: 3612299 - DNA, 25 bp, Homo sapien
caattttgagcctataggatatctc

SEQ ID NO: 3612300 - DNA, 25 bp, Homo sapien
ttttgagcctataggatatctcata

SEQ ID NO: 3612301 - DNA, 25 bp, Homo sapien
tttcaattttgagcctataggatat

SEQ ID NO: 3612302 - DNA, 25 bp, Homo sapien
tgcatttcaattttgagcctatagg

SEQ ID NO: 3612303 - DNA, 25 bp, Homo sapien
tggttgggtgagtcaggactaacaa

SEQ ID NO: 3612304 - DNA, 25 bp, Homo sapien
gtgagtcaggactaacaagtcctct

SEQ ID NO: 3612305 - DNA, 25 bp, Homo sapien
cattcccctgacatcataactctcc

SEQ ID NO: 3612306 - DNA, 25 bp, Homo sapien
tttcccattcccctgacatcataac

SEQ ID NO: 3612307 - DNA, 25 bp, Homo sapien
tcagtcttctcactggccatcttct

SEQ ID NO: 3612308 - DNA, 25 bp, Homo sapien
cagtcttctcactggccatcttctc

SEQ ID NO: 3612309 - DNA, 25 bp, Homo sapien
cactttcccttattatggacttcat

SEQ ID NO: 3612310 - DNA, 25 bp, Homo sapien
atttcaaaattggctgagagtggtg

SEQ ID NO: 3612311 - DNA, 25 bp, Homo sapien
gtaatttcaaaattggctgagagtg

SEQ ID NO: 3612312 - DNA, 25 bp, Homo sapien
ggtatttggcctgttctgctagaga

SEQ ID NO: 3612313 - DNA, 25 bp, Homo sapien
cattttttggcactgtatttgggaa

SEQ ID NO: 3612314 - DNA, 25 bp, Homo sapien
taaaaatcatgctgtactcaagaag

SEQ ID NO: 3612315 - DNA, 25 bp, Homo sapien
gagcagtaacaacaaccgaatttta

SEQ ID NO: 3612316 - DNA, 25 bp, Homo sapien
gcatttcatctgatgactaaaaatg

SEQ ID NO: 3612317 - DNA, 25 bp, Homo sapien
ccttatatgtttgggatataagtgc

SEQ ID NO: 3612318 - DNA, 25 bp, Homo sapien
ctgtgtgtgtgatggtatcatattg

SEQ ID NO: 3612319 - DNA, 25 bp, Homo sapien
tcttttgtggattgtctgttcaaat

SEQ ID NO: 3612320 - DNA, 25 bp, Homo sapien
catgtaggcatgacccaagtttctg

SEQ ID NO: 3612321 - DNA, 25 bp, Homo sapien
tgagttagaccatagctgctgctta

SEQ ID NO: 3612322 - DNA, 25 bp, Homo sapien
tacagtaggagtacacagagggtgc

SEQ ID NO: 3612323 - DNA, 25 bp, Homo sapien
tatggcaccaagaacaatgggacgg

SEQ ID NO: 3612324 - DNA, 25 bp, Homo sapien
gacaatggatttgggctgacggtca

SEQ ID NO: 3612325 - DNA, 25 bp, Homo sapien
tccttcttgttttacactgtggttc

SEQ ID NO: 3612326 - DNA, 25 bp, Homo sapien
gtggttcttgtgcaggtcttgttca

SEQ ID NO: 3612327 - DNA, 25 bp, Homo sapien
tcagcgttgcgtaatcatccagaaa

SEQ ID NO: 3612328 - DNA, 25 bp, Homo sapien
aatggaaaatagcatgacagttata

SEQ ID NO: 3612329 - DNA, 25 bp, Homo sapien
tagcatgacagttataacagaagta

SEQ ID NO: 3612330 - DNA, 25 bp, Homo sapien
attgcttcacatactgaatggaaaa

SEQ ID NO: 3612331 - DNA, 25 bp, Homo sapien
tagggtcttgtagaatgcaatggtg

SEQ ID NO: 3612332 - DNA, 25 bp, Homo sapien
cacttgccgactctgaagtagagcc

SEQ ID NO: 3612333 - DNA, 25 bp, Homo sapien
tatgtagctctcactgttcagggac

SEQ ID NO: 3612334 - DNA, 25 bp, Homo sapien
aagtagagccgtcagtcattggaca

SEQ ID NO: 3612335 - DNA, 25 bp, Homo sapien
gatgggactgtcttacataactgga

SEQ ID NO: 3612336 - DNA, 25 bp, Homo sapien
tagaatgtgtacttttaggagggcg

SEQ ID NO: 3612337 - DNA, 25 bp, Homo sapien
cagtgtgccacccacagaaatatag

SEQ ID NO: 3612338 - DNA, 25 bp, Homo sapien
tttaacaagtattagacacctgcca

SEQ ID NO: 3612339 - DNA, 25 bp, Homo sapien
cctgccatatgtaaaacagtgtgcc

SEQ ID NO: 3612340 - DNA, 25 bp, Homo sapien
tggtgctttgattgactaacatgct

SEQ ID NO: 3612341 - DNA, 25 bp, Homo sapien
caaatgcgctacaggcgggcttttt

SEQ ID NO: 3612342 - DNA, 25 bp, Homo sapien
tacaaaattggagtgacctattaaa

SEQ ID NO: 3612343 - DNA, 25 bp, Homo sapien
tgcctttatgtacaaacttttggga

SEQ ID NO: 3612344 - DNA, 25 bp, Homo sapien
cagctccagaagcacgtcctctgac

SEQ ID NO: 3612345 - DNA, 25 bp, Homo sapien
gctccagaagcacgtcctctgactt

SEQ ID NO: 3612346 - DNA, 25 bp, Homo sapien
cagctctttccacacggggccgtga

SEQ ID NO: 3612347 - DNA, 25 bp, Homo sapien
tctgacttcactgccgcagctcttt

SEQ ID NO: 3612348 - DNA, 25 bp, Homo sapien
tgtgtttttaggtggatcaacttgg

SEQ ID NO: 3612349 - DNA, 25 bp, Homo sapien
ggtgccctctgaactctgtgggttg

SEQ ID NO: 3612350 - DNA, 25 bp, Homo sapien
ccacaaatggtaagggatgcccacc

SEQ ID NO: 3612351 - DNA, 25 bp, Homo sapien
ttccctgcagtccaaagatgatttt

SEQ ID NO: 3612352 - DNA, 25 bp, Homo sapien
gctatggaagtgacctgctgtgaca

SEQ ID NO: 3612353 - DNA, 25 bp, Homo sapien
gaactgcgtgcataggacctcaaaa

SEQ ID NO: 3612354 - DNA, 25 bp, Homo sapien
taatcaaggcaaatcagcaagcccc

SEQ ID NO: 3612355 - DNA, 25 bp, Homo sapien
caactgccaatgaaggatgaatccc

SEQ ID NO: 3612356 - DNA, 25 bp, Homo sapien
tgataaggctgtatgtttctggaac

SEQ ID NO: 3612357 - DNA, 25 bp, Homo sapien
aaaatggtaactgtcatgtgcacac

SEQ ID NO: 3612358 - DNA, 25 bp, Homo sapien
tccagatgtacctttgtaaaatagc

SEQ ID NO: 3612359 - DNA, 25 bp, Homo sapien
tccaggtgccaactgctaagcagat

SEQ ID NO: 3612360 - DNA, 25 bp, Homo sapien
gcatgaggctggtatctccccaaca

SEQ ID NO: 3612361 - DNA, 25 bp, Homo sapien
gaacctgaacttagatgatctggat

SEQ ID NO: 3612362 - DNA, 25 bp, Homo sapien
taatatccaacctaacagttgtgag

SEQ ID NO: 3612363 - DNA, 25 bp, Homo sapien
cttgggcatccccaaaggtttgcag

SEQ ID NO: 3612364 - DNA, 25 bp, Homo sapien
ggtcttaactgcacgatggccggca

SEQ ID NO: 3612365 - DNA, 25 bp, Homo sapien
cacgatggccggcaagacaccaggg

SEQ ID NO: 3612366 - DNA, 25 bp, Homo sapien
gaatctcagtgggatctactgatgc

SEQ ID NO: 3612367 - DNA, 25 bp, Homo sapien
cgttgacattatgccaacttgccag

SEQ ID NO: 3612368 - DNA, 25 bp, Homo sapien
tgcgttaaacagcatgctgccatga

SEQ ID NO: 3612369 - DNA, 25 bp, Homo sapien
gcagccagctgcgttaaacagcatg

SEQ ID NO: 3612370 - DNA, 25 bp, Homo sapien
gatgtagtatttgcagccagctgcg

SEQ ID NO: 3612371 - DNA, 25 bp, Homo sapien
taacattcgatgtagtatttgcagc

SEQ ID NO: 3612372 - DNA, 25 bp, Homo sapien
ggctgcgtggctcttggcatctgta

SEQ ID NO: 3612373 - DNA, 25 bp, Homo sapien
tcttggtgctgttgtctggtgatgc

SEQ ID NO: 3612374 - DNA, 25 bp, Homo sapien
ctggtgatgccacgcggtgccacct

SEQ ID NO: 3612375 - DNA, 25 bp, Homo sapien
gcatctgtacttgatgctgccatct

SEQ ID NO: 3612376 - DNA, 25 bp, Homo sapien
ctgggcatcttgatcggtggctgct

SEQ ID NO: 3612377 - DNA, 25 bp, Homo sapien
cctgggtcggcttcgtggtctgatt

SEQ ID NO: 3612378 - DNA, 25 bp, Homo sapien
caatgaaaattcttccgagagcctg

SEQ ID NO: 3612379 - DNA, 25 bp, Homo sapien
tcggcttcgtggtctgatttccact

SEQ ID NO: 3612380 - DNA, 25 bp, Homo sapien
tccaaagaagtctgaggccaactgt

SEQ ID NO: 3612381 - DNA, 25 bp, Homo sapien
ttctcagtggatccatgatgcctgc

SEQ ID NO: 3612382 - DNA, 25 bp, Homo sapien
ccttctcagtggatccatgatgcct

SEQ ID NO: 3612383 - DNA, 25 bp, Homo sapien
tgcagtgctgggtccaaagaagtct

SEQ ID NO: 3612384 - DNA, 25 bp, Homo sapien
ccagccccattcatactgggcaggg

SEQ ID NO: 3612385 - DNA, 25 bp, Homo sapien
cccattcatactgggcagggcgtgg

SEQ ID NO: 3612386 - DNA, 25 bp, Homo sapien
gccagccagccccattcatactggg

SEQ ID NO: 3612387 - DNA, 25 bp, Homo sapien
ccccattcatactgggcagggcgtg

SEQ ID NO: 3612388 - DNA, 25 bp, Homo sapien
ctgcatcctccaggggcgggctggg

SEQ ID NO: 3612389 - DNA, 25 bp, Homo sapien
gcatcctccaggggcgggctggggg

SEQ ID NO: 3612390 - DNA, 25 bp, Homo sapien
tgcatcctccaggggcgggctgggg

SEQ ID NO: 3612391 - DNA, 25 bp, Homo sapien
cgtgcatgaatacagtcccaacacg

SEQ ID NO: 3612392 - DNA, 25 bp, Homo sapien
ggccatctcgctgcatgtatctcat

SEQ ID NO: 3612393 - DNA, 25 bp, Homo sapien
tacagtcccaacacgcttcactggt

SEQ ID NO: 3612394 - DNA, 25 bp, Homo sapien
cttttccagggtaggtatacacgtg

SEQ ID NO: 3612395 - DNA, 25 bp, Homo sapien
catgtgagaggttaaggctggataa

SEQ ID NO: 3612396 - DNA, 25 bp, Homo sapien
cattgaagccatatttgtccttttc

SEQ ID NO: 3612397 - DNA, 25 bp, Homo sapien
cactaagggaccataagatgaaact

SEQ ID NO: 3612398 - DNA, 25 bp, Homo sapien
tgtcttgtgggtcatcagagctctg

SEQ ID NO: 3612399 - DNA, 25 bp, Homo sapien
ttctgctttgtgggttggtgcccct

SEQ ID NO: 3612400 - DNA, 25 bp, Homo sapien
ctgctttgtgggttggtgcccctcg

SEQ ID NO: 3612401 - DNA, 25 bp, Homo sapien
tctgctttgtgggttggtgcccctc

SEQ ID NO: 3612402 - DNA, 25 bp, Homo sapien
tgctttgtgggttggtgcccctcgg

SEQ ID NO: 3612403 - DNA, 25 bp, Homo sapien
tgtggcccatgaccaaagaatccgt

SEQ ID NO: 3612404 - DNA, 25 bp, Homo sapien
catgaccaaagaatccgtggtcttt

SEQ ID NO: 3612405 - DNA, 25 bp, Homo sapien
ggtacagccgttctctgtagggctg

SEQ ID NO: 3612406 - DNA, 25 bp, Homo sapien
caaagaatccgtggtctttgtgggt

SEQ ID NO: 3612407 - DNA, 25 bp, Homo sapien
gaagtagattgtgcaagtggagacg

SEQ ID NO: 3612408 - DNA, 25 bp, Homo sapien
caagtggagacgtagggcaaagagg

SEQ ID NO: 3612409 - DNA, 25 bp, Homo sapien
gggatggccccagcaaaggcatggt

SEQ ID NO: 3612410 - DNA, 25 bp, Homo sapien
ggagacgtagggcaaagaggcaagg

SEQ ID NO: 3612411 - DNA, 25 bp, Homo sapien
ccctgccaccaagaatcatggccat

SEQ ID NO: 3612412 - DNA, 25 bp, Homo sapien
cgtcattattgatgtccctgccacc

SEQ ID NO: 3612413 - DNA, 25 bp, Homo sapien
gtcattattgatgtccctgccacca

SEQ ID NO: 3612414 - DNA, 25 bp, Homo sapien
tgtccctgccaccaagaatcatggc

SEQ ID NO: 3612415 - DNA, 25 bp, Homo sapien
ttagactgtcggctacttgaaacca

SEQ ID NO: 3612416 - DNA, 25 bp, Homo sapien
atgttagactgtcggctacttgaaa

SEQ ID NO: 3612417 - DNA, 25 bp, Homo sapien
gactgtcggctacttgaaaccagtt

SEQ ID NO: 3612418 - DNA, 25 bp, Homo sapien
gtcggctacttgaaaccagttcttc

SEQ ID NO: 3612419 - DNA, 25 bp, Homo sapien
tgcttgatggcagcattcagggacc

SEQ ID NO: 3612420 - DNA, 25 bp, Homo sapien
gactgtctttctcttgtggctccat

SEQ ID NO: 3612421 - DNA, 25 bp, Homo sapien
cttgtccttggagcctgcttgatgg

SEQ ID NO: 3612422 - DNA, 25 bp, Homo sapien
agggacccagggctgactgtctttc

SEQ ID NO: 3612423 - DNA, 25 bp, Homo sapien
tttcgcctctcttcctgcacgctca

SEQ ID NO: 3612424 - DNA, 25 bp, Homo sapien
tcatgttctagaagatatttctgca

SEQ ID NO: 3612425 - DNA, 25 bp, Homo sapien
tttctgcatcaaggcgcctgctact

SEQ ID NO: 3612426 - DNA, 25 bp, Homo sapien
tccttcatgctttcgcctctcttcc

SEQ ID NO: 3612427 - DNA, 25 bp, Homo sapien
tccggcgatcggctccgccggctgc

SEQ ID NO: 3612428 - DNA, 25 bp, Homo sapien
tgtgtagccgcccacctcctgtccc

SEQ ID NO: 3612429 - DNA, 25 bp, Homo sapien
cgcctcccttttccggcgatcggct

SEQ ID NO: 3612430 - DNA, 25 bp, Homo sapien
cccgctggggactgtttgcggtgag

SEQ ID NO: 3612431 - DNA, 25 bp, Homo sapien
tctagcttgtgggtccttggaggtc

SEQ ID NO: 3612432 - DNA, 25 bp, Homo sapien
tagcttgtgggtccttggaggtcca

SEQ ID NO: 3612433 - DNA, 25 bp, Homo sapien
gcttgtgggtccttggaggtccagc

SEQ ID NO: 3612434 - DNA, 25 bp, Homo sapien
cttgtgggtccttggaggtccagct

SEQ ID NO: 3612435 - DNA, 25 bp, Homo sapien
tgggagaaagaggtacacaggggat

SEQ ID NO: 3612436 - DNA, 25 bp, Homo sapien
gcacttgggactcagaatggtcact

SEQ ID NO: 3612437 - DNA, 25 bp, Homo sapien
atggtcactgagcagatagacgagg

SEQ ID NO: 3612438 - DNA, 25 bp, Homo sapien
gtgggagaaagaggtacacagggga

SEQ ID NO: 3612439 - DNA, 25 bp, Homo sapien
agaggcccacactgagcttggctgc

SEQ ID NO: 3612440 - DNA, 25 bp, Homo sapien
tctccttgggtccttccacatccca

SEQ ID NO: 3612441 - DNA, 25 bp, Homo sapien
ggcccacactgagcttggctgcagc

SEQ ID NO: 3612442 - DNA, 25 bp, Homo sapien
cttgggtccttccacatcccagagg

SEQ ID NO: 3612443 - DNA, 25 bp, Homo sapien
ttgaattagatgcaactcctgcagg

SEQ ID NO: 3612444 - DNA, 25 bp, Homo sapien
cagcggccaccgtttgctctgggag

SEQ ID NO: 3612445 - DNA, 25 bp, Homo sapien
gacagggctcaggacgttggaaatc

SEQ ID NO: 3612446 - DNA, 25 bp, Homo sapien
gctctgggagcattccttttgcatt

SEQ ID NO: 3612447 - DNA, 25 bp, Homo sapien
ttctcacactggaagcgtaaatgga

SEQ ID NO: 3612448 - DNA, 25 bp, Homo sapien
tccttctcacactggaagcgtaaat

SEQ ID NO: 3612449 - DNA, 25 bp, Homo sapien
gaagcgtaaatggaggcaagtcacc

SEQ ID NO: 3612450 - DNA, 25 bp, Homo sapien
cactggaagcgtaaatggaggcaag

SEQ ID NO: 3612451 - DNA, 25 bp, Homo sapien
tcagccgtgcgctttgccagagtgt

SEQ ID NO: 3612452 - DNA, 25 bp, Homo sapien
tcctaatacagtgcagcattcgaat

SEQ ID NO: 3612453 - DNA, 25 bp, Homo sapien
tgggccatgcgtgctgcctgttcag

SEQ ID NO: 3612454 - DNA, 25 bp, Homo sapien
gccagagtgtttgcattcagggatc

SEQ ID NO: 3612455 - DNA, 25 bp, Homo sapien
acagtcatcgcccagcagtgggaac

SEQ ID NO: 3612456 - DNA, 25 bp, Homo sapien
gtcagataggagagggtcacagtca

SEQ ID NO: 3612457 - DNA, 25 bp, Homo sapien
ggtcacagtcatcgcccagcagtgg

SEQ ID NO: 3612458 - DNA, 25 bp, Homo sapien
aagttaaagtcagataggagagggt

SEQ ID NO: 3612459 - DNA, 25 bp, Homo sapien
gccttttctaataggcttcttgttc

SEQ ID NO: 3612460 - DNA, 25 bp, Homo sapien
tctaataggcttcttgttcttgccc

SEQ ID NO: 3612461 - DNA, 25 bp, Homo sapien
ctggggtctctatgccttttctaat

SEQ ID NO: 3612462 - DNA, 25 bp, Homo sapien
ggggtctctatgccttttctaatag

SEQ ID NO: 3612463 - DNA, 25 bp, Homo sapien
cccaggcagccggagtggagggtgg

SEQ ID NO: 3612464 - DNA, 25 bp, Homo sapien
agggtggagagcacagtgggctggg

SEQ ID NO: 3612465 - DNA, 25 bp, Homo sapien
gagggtggagagcacagtgggctgg

SEQ ID NO: 3612466 - DNA, 25 bp, Homo sapien
tggcccaggcagccggagtggaggg

SEQ ID NO: 3612467 - DNA, 25 bp, Homo sapien
tgcttccacaaagccttccctagta

SEQ ID NO: 3612468 - DNA, 25 bp, Homo sapien
gattgtaacttaggtcctgctgctt

SEQ ID NO: 3612469 - DNA, 25 bp, Homo sapien
ccttgcagggccgattgtaacttag

SEQ ID NO: 3612470 - DNA, 25 bp, Homo sapien
tccacaaagccttccctagtaattc

SEQ ID NO: 3612471 - DNA, 25 bp, Homo sapien
cctcaaaggcagggtcacgtgttca

SEQ ID NO: 3612472 - DNA, 25 bp, Homo sapien
ctcaaaggcagggtcacgtgttcat

SEQ ID NO: 3612473 - DNA, 25 bp, Homo sapien
tcacgtgttcatccactggctcctc

SEQ ID NO: 3612474 - DNA, 25 bp, Homo sapien
ggtcacgtgttcatccactggctcc

SEQ ID NO: 3612475 - DNA, 25 bp, Homo sapien
cagttgagcttcgccttggcagctg

SEQ ID NO: 3612476 - DNA, 25 bp, Homo sapien
tcagttgagcttcgccttggcagct

SEQ ID NO: 3612477 - DNA, 25 bp, Homo sapien
agttgagcttcgccttggcagctgg

SEQ ID NO: 3612478 - DNA, 25 bp, Homo sapien
tgtgaagtcactgctcaggtcaccg

SEQ ID NO: 3612479 - DNA, 25 bp, Homo sapien
ctcaggtcaccggtgaaccttccag

SEQ ID NO: 3612480 - DNA, 25 bp, Homo sapien
tgctccggaggctgcctggaatatc

SEQ ID NO: 3612481 - DNA, 25 bp, Homo sapien
cggaggctgcctggaatatcgctgc

SEQ ID NO: 3612482 - DNA, 25 bp, Homo sapien
cacccggcacatgcctcggggctca

SEQ ID NO: 3612483 - DNA, 25 bp, Homo sapien
cccggcacatgcctcggggctcagt

SEQ ID NO: 3612484 - DNA, 25 bp, Homo sapien
ctccccacccggcacatgcctcggg

SEQ ID NO: 3612485 - DNA, 25 bp, Homo sapien
cccacccggcacatgcctcggggct

SEQ ID NO: 3612486 - DNA, 25 bp, Homo sapien
ttgttgagagcagggatgacccact

SEQ ID NO: 3612487 - DNA, 25 bp, Homo sapien
ctgagtaccgtcacctgggagtcca

SEQ ID NO: 3612488 - DNA, 25 bp, Homo sapien
accgtcacctgggagtccagcatag

SEQ ID NO: 3612489 - DNA, 25 bp, Homo sapien
tcacctgggagtccagcatagccct

SEQ ID NO: 3612490 - DNA, 25 bp, Homo sapien
gagtccagcatagccctcgctggct

SEQ ID NO: 3612491 - DNA, 25 bp, Homo sapien
tgcttcctgcgtggctcgtgatggt

SEQ ID NO: 3612492 - DNA, 25 bp, Homo sapien
tggctcgtgatggtcgcctgcagcc

SEQ ID NO: 3612493 - DNA, 25 bp, Homo sapien
tctcggcgcctttggtgctgcttcc

SEQ ID NO: 3612494 - DNA, 25 bp, Homo sapien
gaggattcatagaagatgccccgcg

SEQ ID NO: 3612495 - DNA, 25 bp, Homo sapien
ctgctgccatctgtcggtgagtgtg

SEQ ID NO: 3612496 - DNA, 25 bp, Homo sapien
aagatgacatttagatctgctgcca

SEQ ID NO: 3612497 - DNA, 25 bp, Homo sapien
agtcagtacttctgtggaagatgac

SEQ ID NO: 3612498 - DNA, 25 bp, Homo sapien
aacctctgagtcagtacttctgtgg

SEQ ID NO: 3612499 - DNA, 25 bp, Homo sapien
tgagcttgcattccatgagcataca

SEQ ID NO: 3612500 - DNA, 25 bp, Homo sapien
atatgagcttgcattccatgagcat

SEQ ID NO: 3612501 - DNA, 25 bp, Homo sapien
gagcttgcattccatgagcatacac

SEQ ID NO: 3612502 - DNA, 25 bp, Homo sapien
gcttgcattccatgagcatacacca

SEQ ID NO: 3612503 - DNA, 25 bp, Homo sapien
ttctctctctagtcccaaggctgcc

SEQ ID NO: 3612504 - DNA, 25 bp, Homo sapien
tctctctagtcccaaggctgccaga

SEQ ID NO: 3612505 - DNA, 25 bp, Homo sapien
cattgaacgaccaggcttgaatgag

SEQ ID NO: 3612506 - DNA, 25 bp, Homo sapien
attgaacgaccaggcttgaatgagc

SEQ ID NO: 3612507 - DNA, 25 bp, Homo sapien
aacattgaacgaccaggcttgaatg

SEQ ID NO: 3612508 - DNA, 25 bp, Homo sapien
tcaacattgaacgaccaggcttgaa

SEQ ID NO: 3612509 - DNA, 25 bp, Homo sapien
aggatacggcagtgtgatggccatt

SEQ ID NO: 3612510 - DNA, 25 bp, Homo sapien
gatacggcagtgtgatggccattta

SEQ ID NO: 3612511 - DNA, 25 bp, Homo sapien
ggatacggcagtgtgatggccattt

SEQ ID NO: 3612512 - DNA, 25 bp, Homo sapien
tctaagggaacgtgaacgggctcca

SEQ ID NO: 3612513 - DNA, 25 bp, Homo sapien
tgctctctaagggaacgtgaacggg

SEQ ID NO: 3612514 - DNA, 25 bp, Homo sapien
agcctggtgctctctaagggaacgt

SEQ ID NO: 3612515 - DNA, 25 bp, Homo sapien
acgtgaacgggctccagaggacaga

SEQ ID NO: 3612516 - DNA, 25 bp, Homo sapien
ggcagtaacctttacctggtctggc

SEQ ID NO: 3612517 - DNA, 25 bp, Homo sapien
gctgctttcgatgggccagagcata

SEQ ID NO: 3612518 - DNA, 25 bp, Homo sapien
cctcccgtgctgttggaggttggtt

SEQ ID NO: 3612519 - DNA, 25 bp, Homo sapien
ggtttttgcttgcaggactccagca

SEQ ID NO: 3612520 - DNA, 25 bp, Homo sapien
ggtcaaaggcgatccctttctccag

SEQ ID NO: 3612521 - DNA, 25 bp, Homo sapien
tttcttcacagattggaatgcgccc

SEQ ID NO: 3612522 - DNA, 25 bp, Homo sapien
tgcgccctgcggtttttctgtgcag

SEQ ID NO: 3612523 - DNA, 25 bp, Homo sapien
tctgtgcaggggtcaaaggcgatcc

SEQ ID NO: 3612524 - DNA, 25 bp, Homo sapien
ttgtcatgttgtaattggcaaatgc

SEQ ID NO: 3612525 - DNA, 25 bp, Homo sapien
cagtcattgtcatgttgtaattggc

SEQ ID NO: 3612526 - DNA, 25 bp, Homo sapien
catgttgtaattggcaaatgcagaa

SEQ ID NO: 3612527 - DNA, 25 bp, Homo sapien
ggctcttcagtcattgtcatgttgt

SEQ ID NO: 3612528 - DNA, 25 bp, Homo sapien
gtcttgaggtagtctggttcaggtt

SEQ ID NO: 3612529 - DNA, 25 bp, Homo sapien
tgaggtagtctggttcaggttaaat

SEQ ID NO: 3612530 - DNA, 25 bp, Homo sapien
gacatattggagctcagttgtatat

SEQ ID NO: 3612531 - DNA, 25 bp, Homo sapien
catattggagctcagttgtatatta

SEQ ID NO: 3612532 - DNA, 25 bp, Homo sapien
gctgctgttctacatgcagggcaag

SEQ ID NO: 3612533 - DNA, 25 bp, Homo sapien
tgctgttctacatgcagggcaagca

SEQ ID NO: 3612534 - DNA, 25 bp, Homo sapien
ctgctgttctacatgcagggcaagc

SEQ ID NO: 3612535 - DNA, 25 bp, Homo sapien
gttcgtccagctgagaattgagggt

SEQ ID NO: 3612536 - DNA, 25 bp, Homo sapien
gtagccaagcacaatgagcacagcc

SEQ ID NO: 3612537 - DNA, 25 bp, Homo sapien
caccaaaaggcctgggttcgtccag

SEQ ID NO: 3612538 - DNA, 25 bp, Homo sapien
gagcaatccgtagagctttccaggc

SEQ ID NO: 3612539 - DNA, 25 bp, Homo sapien
agctcagaacccgtgcctggcaggg

SEQ ID NO: 3612540 - DNA, 25 bp, Homo sapien
gactccctacttcaagcacaattaa

SEQ ID NO: 3612541 - DNA, 25 bp, Homo sapien
tgtggtcagctcagaacccgtgcct

SEQ ID NO: 3612542 - DNA, 25 bp, Homo sapien
agccttgccagtgggaagcacgtgg

SEQ ID NO: 3612543 - DNA, 25 bp, Homo sapien
tgtgagctggaggagctattaatag

SEQ ID NO: 3612544 - DNA, 25 bp, Homo sapien
gatctcaggaatctgtaccaccagc

SEQ ID NO: 3612545 - DNA, 25 bp, Homo sapien
tcagcagcagtcctcggtgctgagt

SEQ ID NO: 3612546 - DNA, 25 bp, Homo sapien
aagcttctcccggtgaaggttcctg

SEQ ID NO: 3612547 - DNA, 25 bp, Homo sapien
acagggcagctgtgcaccccaccaa

SEQ ID NO: 3612548 - DNA, 25 bp, Homo sapien
cagggcagctgtgcaccccaccaag

SEQ ID NO: 3612549 - DNA, 25 bp, Homo sapien
agggcagctgtgcaccccaccaagc

SEQ ID NO: 3612550 - DNA, 25 bp, Homo sapien
gggcagctgtgcaccccaccaagcc

SEQ ID NO: 3612551 - DNA, 25 bp, Homo sapien
gcctaggccggaagatggcctggag

SEQ ID NO: 3612552 - DNA, 25 bp, Homo sapien
cctccatagtcaagtcagaggaggc

SEQ ID NO: 3612553 - DNA, 25 bp, Homo sapien
tagtcaagtcagaggaggctccctc

SEQ ID NO: 3612554 - DNA, 25 bp, Homo sapien
catagtcaagtcagaggaggctccc

SEQ ID NO: 3612555 - DNA, 25 bp, Homo sapien
cagctggatggggactcccgaatga

SEQ ID NO: 3612556 - DNA, 25 bp, Homo sapien
gccttcaaggaagtggtcctgaggg

SEQ ID NO: 3612557 - DNA, 25 bp, Homo sapien
ccttcaaggaagtggtcctgaggga

SEQ ID NO: 3612558 - DNA, 25 bp, Homo sapien
gaagatggtgctcagctggatgggg

SEQ ID NO: 3612559 - DNA, 25 bp, Homo sapien
cgtgtcctttacaggagagcagctg

SEQ ID NO: 3612560 - DNA, 25 bp, Homo sapien
accaggacctcagttgtgggttcat

SEQ ID NO: 3612561 - DNA, 25 bp, Homo sapien
ccgacttagtgggacaggtgcacca

SEQ ID NO: 3612562 - DNA, 25 bp, Homo sapien
gcaggactgcgagaaagatgtgatt

SEQ ID NO: 3612563 - DNA, 25 bp, Homo sapien
gacatgatttcctgtcctctgagaa

SEQ ID NO: 3612564 - DNA, 25 bp, Homo sapien
cctgagaggccaagcagagtgagcc

SEQ ID NO: 3612565 - DNA, 25 bp, Homo sapien
gccaagcagagtgagccggtcagga

SEQ ID NO: 3612566 - DNA, 25 bp, Homo sapien
tgggtcccttcagaggaaagggcat

SEQ ID NO: 3612567 - DNA, 25 bp, Homo sapien
cagagtgagccggtcaggagctgga

SEQ ID NO: 3612568 - DNA, 25 bp, Homo sapien
gatgctctgaggttgttctgaatag

SEQ ID NO: 3612569 - DNA, 25 bp, Homo sapien
cacctagtaggtagccagtatgact

SEQ ID NO: 3612570 - DNA, 25 bp, Homo sapien
tattcagcagacattgggatgctct

SEQ ID NO: 3612571 - DNA, 25 bp, Homo sapien
cctggccgccagtatgactttttta

SEQ ID NO: 3612572 - DNA, 25 bp, Homo sapien
tagacaagacaaatgggcaactcca

SEQ ID NO: 3612573 - DNA, 25 bp, Homo sapien
tgccacagtcgtgcatctgggctgg

SEQ ID NO: 3612574 - DNA, 25 bp, Homo sapien
gccatgagactggatatcccgggca

SEQ ID NO: 3612575 - DNA, 25 bp, Homo sapien
taagtcgtccagaaggctgtcaccg

SEQ ID NO: 3612576 - DNA, 25 bp, Homo sapien
tgtgtcctcacctgctccgtagagc

SEQ ID NO: 3612577 - DNA, 25 bp, Homo sapien
ccccttacccagaagtatctgtcct

SEQ ID NO: 3612578 - DNA, 25 bp, Homo sapien
tgccctcagctgtccagatccccca

SEQ ID NO: 3612579 - DNA, 25 bp, Homo sapien
tacccagaagtatctgtcctgtgtc

SEQ ID NO: 3612580 - DNA, 25 bp, Homo sapien
tgccccgtactcctgctctcctgtt

SEQ ID NO: 3612581 - DNA, 25 bp, Homo sapien
tctcctggttcccctgatgcagaag

SEQ ID NO: 3612582 - DNA, 25 bp, Homo sapien
ggttcccctgatgcagaagtagaat

SEQ ID NO: 3612583 - DNA, 25 bp, Homo sapien
ctgcgttcactgccccgtactcctg

SEQ ID NO: 3612584 - DNA, 25 bp, Homo sapien
tctggttgggcgtcccacatgacac

SEQ ID NO: 3612585 - DNA, 25 bp, Homo sapien
gacaccgtccaaggtgttagaggga

SEQ ID NO: 3612586 - DNA, 25 bp, Homo sapien
ggctgtaattaacacccctccgctg

SEQ ID NO: 3612587 - DNA, 25 bp, Homo sapien
gctttaagccagattggagcatggg

SEQ ID NO: 3612588 - DNA, 25 bp, Homo sapien
tgtggcaggcctcaccattacagct

SEQ ID NO: 3612589 - DNA, 25 bp, Homo sapien
gcctctctgaatagcgatgaccaag

SEQ ID NO: 3612590 - DNA, 25 bp, Homo sapien
gatcctgtgttggtgattggcccca

SEQ ID NO: 3612591 - DNA, 25 bp, Homo sapien
catctccaatagcagtgacggttgc

SEQ ID NO: 3612592 - DNA, 25 bp, Homo sapien
agactgagcatggatccacagtggg

SEQ ID NO: 3612593 - DNA, 25 bp, Homo sapien
agggcagttccgtggtctgagccaa

SEQ ID NO: 3612594 - DNA, 25 bp, Homo sapien
aacttgcaattggtatcaaagggca

SEQ ID NO: 3612595 - DNA, 25 bp, Homo sapien
cacagtgggtcagagaacttgcaat

SEQ ID NO: 3612596 - DNA, 25 bp, Homo sapien
tgttaccagatagtttggagaagtc

SEQ ID NO: 3612597 - DNA, 25 bp, Homo sapien
gaagtcactgaatggatcaccatgg

SEQ ID NO: 3612598 - DNA, 25 bp, Homo sapien
gtttggagaagtcactgaatggatc

SEQ ID NO: 3612599 - DNA, 25 bp, Homo sapien
ctgaatggatcaccatggagaacag

SEQ ID NO: 3612600 - DNA, 25 bp, Homo sapien
caatgggacctgctgctcttgaaaa

SEQ ID NO: 3612601 - DNA, 25 bp, Homo sapien
caaaacccagctcgctcatggtggt

SEQ ID NO: 3612602 - DNA, 25 bp, Homo sapien
tggataaagccccatgaactcaggc

SEQ ID NO: 3612603 - DNA, 25 bp, Homo sapien
taaatgagctcagagaaggcgagtg

SEQ ID NO: 3612604 - DNA, 25 bp, Homo sapien
taggacccattgagaacggccttgg

SEQ ID NO: 3612605 - DNA, 25 bp, Homo sapien
cacagagctaaaggtaaggacgttc

SEQ ID NO: 3612606 - DNA, 25 bp, Homo sapien
tttccgggacgagtttgatctggcc

SEQ ID NO: 3612607 - DNA, 25 bp, Homo sapien
tgccctagaggaccaaagtagcttg

SEQ ID NO: 3612608 - DNA, 25 bp, Homo sapien
aatagccttcgcaccaggagctgtc

SEQ ID NO: 3612609 - DNA, 25 bp, Homo sapien
gcttggagttatttcccaaatagcc

SEQ ID NO: 3612610 - DNA, 25 bp, Homo sapien
gagactgtgcttggagttatttccc

SEQ ID NO: 3612611 - DNA, 25 bp, Homo sapien
tctgaacagctgacggaaggcgtgt

SEQ ID NO: 3612612 - DNA, 25 bp, Homo sapien
tcatgccacagctttgtcagactcc

SEQ ID NO: 3612613 - DNA, 25 bp, Homo sapien
tgccacagctttgtcagactcctcg

SEQ ID NO: 3612614 - DNA, 25 bp, Homo sapien
catgccacagctttgtcagactcct

SEQ ID NO: 3612615 - DNA, 25 bp, Homo sapien
cacagctttgtcagactcctcggca

SEQ ID NO: 3612616 - DNA, 25 bp, Homo sapien
gagcattggcaatagccgtcaaagg

SEQ ID NO: 3612617 - DNA, 25 bp, Homo sapien
gtttgggagcattggcaatagccgt

SEQ ID NO: 3612618 - DNA, 25 bp, Homo sapien
ggcaatagccgtcaaaggttctggg

SEQ ID NO: 3612619 - DNA, 25 bp, Homo sapien
ttggcaatagccgtcaaaggttctg

SEQ ID NO: 3612620 - DNA, 25 bp, Homo sapien
agaggctgggccctgacctcgctgt

SEQ ID NO: 3612621 - DNA, 25 bp, Homo sapien
tcatcccagcggactcgcagggggc

SEQ ID NO: 3612622 - DNA, 25 bp, Homo sapien
tccaggtgtccgtctgccaggagat

SEQ ID NO: 3612623 - DNA, 25 bp, Homo sapien
tggtgaccgagctgcgcagcattat

SEQ ID NO: 3612624 - DNA, 25 bp, Homo sapien
gcacggcgacgctcagcaacgggaa

SEQ ID NO: 3612625 - DNA, 25 bp, Homo sapien
gcgacgctcagcaacgggaagctgt

SEQ ID NO: 3612626 - DNA, 25 bp, Homo sapien
cgacgctcagcaacgggaagctgtg

SEQ ID NO: 3612627 - DNA, 25 bp, Homo sapien
cggcgacgctcagcaacgggaagct

SEQ ID NO: 3612628 - DNA, 25 bp, Homo sapien
cgcgtctgccccgagtgccgccgct

SEQ ID NO: 3612629 - DNA, 25 bp, Homo sapien
atccgcgtctgccccgagtgccgcc

SEQ ID NO: 3612630 - DNA, 25 bp, Homo sapien
gctgcacgcacatccgcgtctgccc

SEQ ID NO: 3612631 - DNA, 25 bp, Homo sapien
gcggctgcacgcacatccgcgtctg

SEQ ID NO: 3612632 - DNA, 25 bp, Homo sapien
tgcgggcacggccgtcgcccgcccg

SEQ ID NO: 3612633 - DNA, 25 bp, Homo sapien
gcgggcacggccgtcgcccgcccgc

SEQ ID NO: 3612634 - DNA, 25 bp, Homo sapien
ctgcgggcacggccgtcgcccgccc

SEQ ID NO: 3612635 - DNA, 25 bp, Homo sapien
catccgatttcaggtgcttaactct

SEQ ID NO: 3612636 - DNA, 25 bp, Homo sapien
caggtgcttaactctctgtatggtg

SEQ ID NO: 3612637 - DNA, 25 bp, Homo sapien
cagtgcatccgatttcaggtgctta

SEQ ID NO: 3612638 - DNA, 25 bp, Homo sapien
taactctctgtatggtgactgaggg

SEQ ID NO: 3612639 - DNA, 25 bp, Homo sapien
ccttggcttccggtggaacgtgccg

SEQ ID NO: 3612640 - DNA, 25 bp, Homo sapien
tcacagaggcggaaggactgggcca

SEQ ID NO: 3612641 - DNA, 25 bp, Homo sapien
tccggtggaacgtgccgttcacaga

SEQ ID NO: 3612642 - DNA, 25 bp, Homo sapien
gggccaccccgttggtatggtgcat

SEQ ID NO: 3612643 - DNA, 25 bp, Homo sapien
taaaatttgagtggttggattgacc

SEQ ID NO: 3612644 - DNA, 25 bp, Homo sapien
cagaaacagtcttactcaggtagcc

SEQ ID NO: 3612645 - DNA, 25 bp, Homo sapien
aagctcagacaacgaaattgttaaa

SEQ ID NO: 3612646 - DNA, 25 bp, Homo sapien
caggtagcctatctcttgttttgaa

SEQ ID NO: 3612647 - DNA, 25 bp, Homo sapien
gaagtatgtcagattggtagccctc

SEQ ID NO: 3612648 - DNA, 25 bp, Homo sapien
tagagctagggaagtatgtcagatt

SEQ ID NO: 3612649 - DNA, 25 bp, Homo sapien
gtcagattggtagccctcagcagct

SEQ ID NO: 3612650 - DNA, 25 bp, Homo sapien
ctacgtagagctagggaagtatgtc

SEQ ID NO: 3612651 - DNA, 25 bp, Homo sapien
aaagacagaaccctgctaggtggcc

SEQ ID NO: 3612652 - DNA, 25 bp, Homo sapien
cagctagctgagtgtccacgggtaa

SEQ ID NO: 3612653 - DNA, 25 bp, Homo sapien
ggccagtgtgcaggtcagagattaa

SEQ ID NO: 3612654 - DNA, 25 bp, Homo sapien
ctaccatgccggaaggaaagctgtt

SEQ ID NO: 3612655 - DNA, 25 bp, Homo sapien
tttgaattgaataccatagcttgcc

SEQ ID NO: 3612656 - DNA, 25 bp, Homo sapien
tgaaaaatccattcactttgaattg

SEQ ID NO: 3612657 - DNA, 25 bp, Homo sapien
aggagagacagttgccttaagggca

SEQ ID NO: 3612658 - DNA, 25 bp, Homo sapien
cctgggaacgctcagtgaaaaatcc

SEQ ID NO: 3612659 - DNA, 25 bp, Homo sapien
caagagttgtgactgctctccaagg

SEQ ID NO: 3612660 - DNA, 25 bp, Homo sapien
ctctgcggcagagaccaaagttccc

SEQ ID NO: 3612661 - DNA, 25 bp, Homo sapien
ttcaggccattgtctaaagccagcc

SEQ ID NO: 3612662 - DNA, 25 bp, Homo sapien
gcaactcggaacatcttaaagcatg

SEQ ID NO: 3612663 - DNA, 25 bp, Homo sapien
aatgaggttcagtgcatcgcatctt

SEQ ID NO: 3612664 - DNA, 25 bp, Homo sapien
aggttcagtgcatcgcatcttacat

SEQ ID NO: 3612665 - DNA, 25 bp, Homo sapien
tgaggttcagtgcatcgcatcttac

SEQ ID NO: 3612666 - DNA, 25 bp, Homo sapien
caatgaggttcagtgcatcgcatct

SEQ ID NO: 3612667 - DNA, 25 bp, Homo sapien
caggtctctggggaaaatggctatc

SEQ ID NO: 3612668 - DNA, 25 bp, Homo sapien
ggtctctggggaaaatggctatctg

SEQ ID NO: 3612669 - DNA, 25 bp, Homo sapien
gtctctggggaaaatggctatctga

SEQ ID NO: 3612670 - DNA, 25 bp, Homo sapien
tcccaggtctctggggaaaatggct

SEQ ID NO: 3612671 - DNA, 25 bp, Homo sapien
gggaacatgaaggcttgaaaacgca

SEQ ID NO: 3612672 - DNA, 25 bp, Homo sapien
ggaacatgaaggcttgaaaacgcac

SEQ ID NO: 3612673 - DNA, 25 bp, Homo sapien
tgggaacatgaaggcttgaaaacgc

SEQ ID NO: 3612674 - DNA, 25 bp, Homo sapien
ttgggaacatgaaggcttgaaaacg

SEQ ID NO: 3612675 - DNA, 25 bp, Homo sapien
ctttcttggacctcctcttcctgca

SEQ ID NO: 3612676 - DNA, 25 bp, Homo sapien
tttcttggacctcctcttcctgcat

SEQ ID NO: 3612677 - DNA, 25 bp, Homo sapien
gccgggaaagctgcttccgggtcaa

SEQ ID NO: 3612678 - DNA, 25 bp, Homo sapien
tcacgtgttgttgttgggccgggaa

SEQ ID NO: 3612679 - DNA, 25 bp, Homo sapien
tgcttccgggtcaatgcaggacact

SEQ ID NO: 3612680 - DNA, 25 bp, Homo sapien
tcacgcagcggacgtgacacgtgcg

SEQ ID NO: 3612681 - DNA, 25 bp, Homo sapien
taggcccttgggacattaggcctgc

SEQ ID NO: 3612682 - DNA, 25 bp, Homo sapien
cttgggacattaggcctgctcttac

SEQ ID NO: 3612683 - DNA, 25 bp, Homo sapien
gcccttgggacattaggcctgctct

SEQ ID NO: 3612684 - DNA, 25 bp, Homo sapien
gtctaggcccttgggacattaggcc

SEQ ID NO: 3612685 - DNA, 25 bp, Homo sapien
tggatgtggtaattgaataagggct

SEQ ID NO: 3612686 - DNA, 25 bp, Homo sapien
gatttgccccaaggttgggagactg

SEQ ID NO: 3612687 - DNA, 25 bp, Homo sapien
tgttggactgacaggcgggtgcctt

SEQ ID NO: 3612688 - DNA, 25 bp, Homo sapien
atctgtgtggagcttctctgttgag

SEQ ID NO: 3612689 - DNA, 25 bp, Homo sapien
gagatttaatagtcttttcttggga

SEQ ID NO: 3612690 - DNA, 25 bp, Homo sapien
attccagaagttgtagttgaggaaa

SEQ ID NO: 3612691 - DNA, 25 bp, Homo sapien
gtaggaagacattctgggaattggt

SEQ ID NO: 3612692 - DNA, 25 bp, Homo sapien
gacattctgggaattggtgaagaga

SEQ ID NO: 3612693 - DNA, 25 bp, Homo sapien
aaatgctttacgaaaacattctatc

SEQ ID NO: 3612694 - DNA, 25 bp, Homo sapien
ttgatcaaatgctttacgaaaacat

SEQ ID NO: 3612695 - DNA, 25 bp, Homo sapien
tcaaatgctttacgaaaacattcta

SEQ ID NO: 3612696 - DNA, 25 bp, Homo sapien
gatcaaatgctttacgaaaacattc

SEQ ID NO: 3612697 - DNA, 25 bp, Homo sapien
ggaattagaatggtaataactggac

SEQ ID NO: 3612698 - DNA, 25 bp, Homo sapien
tggaattagaatggtaataactgga

SEQ ID NO: 3612699 - DNA, 25 bp, Homo sapien
gaattagaatggtaataactggact

SEQ ID NO: 3612700 - DNA, 25 bp, Homo sapien
tgccatacagaatgagaccatccag

SEQ ID NO: 3612701 - DNA, 25 bp, Homo sapien
gcctaattacgctgacttggtcaat

SEQ ID NO: 3612702 - DNA, 25 bp, Homo sapien
caagggtaataactgagatagactc

SEQ ID NO: 3612703 - DNA, 25 bp, Homo sapien
cagttgagcagtagactttgagaca

SEQ ID NO: 3612704 - DNA, 25 bp, Homo sapien
tacatgaaaatgctaggctctaggg

SEQ ID NO: 3612705 - DNA, 25 bp, Homo sapien
caagaacacccagaagctatctgtg

SEQ ID NO: 3612706 - DNA, 25 bp, Homo sapien
gcttccttgaaatatatgtccattg

SEQ ID NO: 3612707 - DNA, 25 bp, Homo sapien
taacgcacatgtgagtgtagcttgc

SEQ ID NO: 3612708 - DNA, 25 bp, Homo sapien
gcagaccctgtaaacctactgtaag

SEQ ID NO: 3612709 - DNA, 25 bp, Homo sapien
tatgtgttcccactttaacagggtc

SEQ ID NO: 3612710 - DNA, 25 bp, Homo sapien
ggctggacaaacagaatccttctct

SEQ ID NO: 3612711 - DNA, 25 bp, Homo sapien
caagacatttaggttcactactgga

SEQ ID NO: 3612712 - DNA, 25 bp, Homo sapien
gttggccaactgtgcttctcacatc

SEQ ID NO: 3612713 - DNA, 25 bp, Homo sapien
tgaccttgcccggtcattggcggag

SEQ ID NO: 3612714 - DNA, 25 bp, Homo sapien
gctttgagtggaaagtgatacactg

SEQ ID NO: 3612715 - DNA, 25 bp, Homo sapien
agggctgccccatgaagagtgtgtc

SEQ ID NO: 3612716 - DNA, 25 bp, Homo sapien
tggtgttcccttgcagccggattct

SEQ ID NO: 3612717 - DNA, 25 bp, Homo sapien
gtgttcccttgcagccggattctca

SEQ ID NO: 3612718 - DNA, 25 bp, Homo sapien
ggtgttcccttgcagccggattctc

SEQ ID NO: 3612719 - DNA, 25 bp, Homo sapien
ctggtgttcccttgcagccggattc

SEQ ID NO: 3612720 - DNA, 25 bp, Homo sapien
ccacaattgtaagggcaggtgcatg

SEQ ID NO: 3612721 - DNA, 25 bp, Homo sapien
tcatcttcgcacttgtacagcacca

SEQ ID NO: 3612722 - DNA, 25 bp, Homo sapien
tacagcaccaaggtgagtactacag

SEQ ID NO: 3612723 - DNA, 25 bp, Homo sapien
taaagagacacttttattggaacca

SEQ ID NO: 3612724 - DNA, 25 bp, Homo sapien
agttagggtcattctccctggccat

SEQ ID NO: 3612725 - DNA, 25 bp, Homo sapien
ggaagttagggtcattctccctggc

SEQ ID NO: 3612726 - DNA, 25 bp, Homo sapien
gaggaagttagggtcattctccctg

SEQ ID NO: 3612727 - DNA, 25 bp, Homo sapien
gaagttagggtcattctccctggcc

SEQ ID NO: 3612728 - DNA, 25 bp, Homo sapien
gagtgcttgaggcactgagacccat

SEQ ID NO: 3612729 - DNA, 25 bp, Homo sapien
tcttgcccgaggtacaagtgcctct

SEQ ID NO: 3612730 - DNA, 25 bp, Homo sapien
tctacataaagggacagaatgcagt

SEQ ID NO: 3612731 - DNA, 25 bp, Homo sapien
catgcttagggacccatctagggac

SEQ ID NO: 3612732 - DNA, 25 bp, Homo sapien
cagcacaacggcaataactctgttc

SEQ ID NO: 3612733 - DNA, 25 bp, Homo sapien
gactctcatataagacaacatctcc

SEQ ID NO: 3612734 - DNA, 25 bp, Homo sapien
ttatgtttgctgaaatacgactctc

SEQ ID NO: 3612735 - DNA, 25 bp, Homo sapien
aactctgttctgactaatggaaggc

SEQ ID NO: 3612736 - DNA, 25 bp, Homo sapien
aaatgctttgccactgtatttaata

SEQ ID NO: 3612737 - DNA, 25 bp, Homo sapien
atgctttgccactgtatttaatatt

SEQ ID NO: 3612738 - DNA, 25 bp, Homo sapien
caaatgctttgccactgtatttaat

SEQ ID NO: 3612739 - DNA, 25 bp, Homo sapien
aatgctttgccactgtatttaatat

SEQ ID NO: 3612740 - DNA, 25 bp, Homo sapien
aatttcctatgggaatagtctccaa

SEQ ID NO: 3612741 - DNA, 25 bp, Homo sapien
aaatttcctatgggaatagtctcca

SEQ ID NO: 3612742 - DNA, 25 bp, Homo sapien
atttcctatgggaatagtctccaaa

SEQ ID NO: 3612743 - DNA, 25 bp, Homo sapien
gaaatttcctatgggaatagtctcc

SEQ ID NO: 3612744 - DNA, 25 bp, Homo sapien
tttgcaggcttatgcacctgatcca

SEQ ID NO: 3612745 - DNA, 25 bp, Homo sapien
ttcccgctgcctgttgctggctatg

SEQ ID NO: 3612746 - DNA, 25 bp, Homo sapien
gaagagcatgctccaactttccgcc

SEQ ID NO: 3612747 - DNA, 25 bp, Homo sapien
atgattcatttttgcaggcttatgc

SEQ ID NO: 3612748 - DNA, 25 bp, Homo sapien
tgtagcttctctttgcgggagaaag

SEQ ID NO: 3612749 - DNA, 25 bp, Homo sapien
gtgccccaacccagagtttttagca

SEQ ID NO: 3612750 - DNA, 25 bp, Homo sapien
ccagagtttttagcattggaaccaa

SEQ ID NO: 3612751 - DNA, 25 bp, Homo sapien
catcgatgtcaaatgcaggagcagc

SEQ ID NO: 3612752 - DNA, 25 bp, Homo sapien
gagtttaggacagatagtcccatgc

SEQ ID NO: 3612753 - DNA, 25 bp, Homo sapien
gggagtttaggacagatagtcccat

SEQ ID NO: 3612754 - DNA, 25 bp, Homo sapien
agtttaggacagatagtcccatgca

SEQ ID NO: 3612755 - DNA, 25 bp, Homo sapien
gtttaggacagatagtcccatgcat

SEQ ID NO: 3612756 - DNA, 25 bp, Homo sapien
ttccttgctttccacgatgccatac

SEQ ID NO: 3612757 - DNA, 25 bp, Homo sapien
tccttgctttccacgatgccatact

SEQ ID NO: 3612758 - DNA, 25 bp, Homo sapien
tgctttccacgatgccatactctcc

SEQ ID NO: 3612759 - DNA, 25 bp, Homo sapien
cttgctttccacgatgccatactct

SEQ ID NO: 3612760 - DNA, 25 bp, Homo sapien
ttcctctcttgagggggcactttcc

SEQ ID NO: 3612761 - DNA, 25 bp, Homo sapien
tcctctcttgagggggcactttcct

SEQ ID NO: 3612762 - DNA, 25 bp, Homo sapien
cctctcttgagggggcactttcctc

SEQ ID NO: 3612763 - DNA, 25 bp, Homo sapien
ctctcttgagggggcactttcctct

SEQ ID NO: 3612764 - DNA, 25 bp, Homo sapien
catgaaccatattaaaaaagtcagg

SEQ ID NO: 3612765 - DNA, 25 bp, Homo sapien
ggatggcaaagctattgccattgac

SEQ ID NO: 3612766 - DNA, 25 bp, Homo sapien
ctttggggcaaggaatccacggtct

SEQ ID NO: 3612767 - DNA, 25 bp, Homo sapien
aaggaatccacggtctattgtcttc

SEQ ID NO: 3612768 - DNA, 25 bp, Homo sapien
actgtggagcctgccatccgtttta

SEQ ID NO: 3612769 - DNA, 25 bp, Homo sapien
gttttaataacccactgcatgcaca

SEQ ID NO: 3612770 - DNA, 25 bp, Homo sapien
ggcagggtagctcacatcactgtgg

SEQ ID NO: 3612771 - DNA, 25 bp, Homo sapien
gccttgtcaatgttgatgacaggca

SEQ ID NO: 3612772 - DNA, 25 bp, Homo sapien
taatagatatggtcacccagagagg

SEQ ID NO: 3612773 - DNA, 25 bp, Homo sapien
taacgtggcccaatatgtaggagat

SEQ ID NO: 3612774 - DNA, 25 bp, Homo sapien
gataaaggccgtttgaacacctgaa

SEQ ID NO: 3612775 - DNA, 25 bp, Homo sapien
taacaaacaccgtaaggattctcag

SEQ ID NO: 3612776 - DNA, 25 bp, Homo sapien
gatcctagtggtaggtcagaagaag

SEQ ID NO: 3612777 - DNA, 25 bp, Homo sapien
taaatggtatcatttggaaatcagc

SEQ ID NO: 3612778 - DNA, 25 bp, Homo sapien
gatgctgtgaacaccaggactttaa

SEQ ID NO: 3612779 - DNA, 25 bp, Homo sapien
tgcccagttattcttaagtaaggac

SEQ ID NO: 3612780 - DNA, 25 bp, Homo sapien
aaattctgatacattagcagctatg

SEQ ID NO: 3612781 - DNA, 25 bp, Homo sapien
gggactaggctatatgcatttgcct

SEQ ID NO: 3612782 - DNA, 25 bp, Homo sapien
tcaacgttggtatgataatgataac

SEQ ID NO: 3612783 - DNA, 25 bp, Homo sapien
ccaagactaagcaccataaccaaga

SEQ ID NO: 3612784 - DNA, 25 bp, Homo sapien
gatgtttgaagttacaaacctgtaa

SEQ ID NO: 3612785 - DNA, 25 bp, Homo sapien
gcccagataatatattaggcactac

SEQ ID NO: 3612786 - DNA, 25 bp, Homo sapien
gatgcactacacttttgatgtttga

SEQ ID NO: 3612787 - DNA, 25 bp, Homo sapien
aatacctaggcccattgctgacgat

SEQ ID NO: 3612788 - DNA, 25 bp, Homo sapien
tgaatatttgtgttatttccagcgt

SEQ ID NO: 3612789 - DNA, 25 bp, Homo sapien
tgtgttatttccagcgtgggattat

SEQ ID NO: 3612790 - DNA, 25 bp, Homo sapien
tttccagcgtgggattattatgaat

SEQ ID NO: 3612791 - DNA, 25 bp, Homo sapien
tatttgtgttatttccagcgtggga

SEQ ID NO: 3612792 - DNA, 25 bp, Homo sapien
cacctgcgcaaaagagctaagggtg

SEQ ID NO: 3612793 - DNA, 25 bp, Homo sapien
gggacggagacacctgcgcaaaaga

SEQ ID NO: 3612794 - DNA, 25 bp, Homo sapien
tgataggcggtcagggatgcctcat

SEQ ID NO: 3612795 - DNA, 25 bp, Homo sapien
ttgtcatctggtggagaagaattcc

SEQ ID NO: 3612796 - DNA, 25 bp, Homo sapien
gtgtctcaggtacattgcaactctg

SEQ ID NO: 3612797 - DNA, 25 bp, Homo sapien
ctagtgtctcaggtacattgcaact

SEQ ID NO: 3612798 - DNA, 25 bp, Homo sapien
tagtgtctcaggtacattgcaactc

SEQ ID NO: 3612799 - DNA, 25 bp, Homo sapien
tgtctcaggtacattgcaactctgc

SEQ ID NO: 3612800 - DNA, 25 bp, Homo sapien
aaagacccgctcgaatgccacctct

SEQ ID NO: 3612801 - DNA, 25 bp, Homo sapien
ccaaagacccgctcgaatgccacct

SEQ ID NO: 3612802 - DNA, 25 bp, Homo sapien
gacccgctcgaatgccacctctctg

SEQ ID NO: 3612803 - DNA, 25 bp, Homo sapien
agacccgctcgaatgccacctctct

SEQ ID NO: 3612804 - DNA, 25 bp, Homo sapien
ttcagtcttgccggcttacatcttc

SEQ ID NO: 3612805 - DNA, 25 bp, Homo sapien
gactttcagtcttgccggcttacat

SEQ ID NO: 3612806 - DNA, 25 bp, Homo sapien
ctttcagtcttgccggcttacatct

SEQ ID NO: 3612807 - DNA, 25 bp, Homo sapien
agactttcagtcttgccggcttaca

SEQ ID NO: 3612808 - DNA, 25 bp, Homo sapien
tgcttcctcctgtagccagtggtct

SEQ ID NO: 3612809 - DNA, 25 bp, Homo sapien
ctgcttcctcctgtagccagtggtc

SEQ ID NO: 3612810 - DNA, 25 bp, Homo sapien
gcaggtaggatttgtctccctgggt

SEQ ID NO: 3612811 - DNA, 25 bp, Homo sapien
gcagcaggtaggatttgtctccctg

SEQ ID NO: 3612812 - DNA, 25 bp, Homo sapien
ccaagagtatcctgggttgttaatc

SEQ ID NO: 3612813 - DNA, 25 bp, Homo sapien
tgctgctgattaagatggactctcc

SEQ ID NO: 3612814 - DNA, 25 bp, Homo sapien
gcagatactttaccagggagttcaa

SEQ ID NO: 3612815 - DNA, 25 bp, Homo sapien
tccactcttaattacccagctctgt

SEQ ID NO: 3612816 - DNA, 25 bp, Homo sapien
tcagtacaccaagtcctctaaagct

SEQ ID NO: 3612817 - DNA, 25 bp, Homo sapien
ggtcttcagtacaccaagtcctcta

SEQ ID NO: 3612818 - DNA, 25 bp, Homo sapien
tcttggtcttcagtacaccaagtcc

SEQ ID NO: 3612819 - DNA, 25 bp, Homo sapien
cgaaccacaaaggccctcttggtct

SEQ ID NO: 3612820 - DNA, 25 bp, Homo sapien
tctagcttcgcaaacattcttgtca

SEQ ID NO: 3612821 - DNA, 25 bp, Homo sapien
gtcatttctttagcttgacttgctg

SEQ ID NO: 3612822 - DNA, 25 bp, Homo sapien
gtcaccatctcatcctctagcttcg

SEQ ID NO: 3612823 - DNA, 25 bp, Homo sapien
tgctcctaaacactgtcaccatctc

SEQ ID NO: 3612824 - DNA, 25 bp, Homo sapien
ctttctgggtgacaacagctaaaga

SEQ ID NO: 3612825 - DNA, 25 bp, Homo sapien
ggtgacaacagctaaagatggatct

SEQ ID NO: 3612826 - DNA, 25 bp, Homo sapien
taaagatggatctaataaagaggca

SEQ ID NO: 3612827 - DNA, 25 bp, Homo sapien
gatctaataaagaggcagctggcat

SEQ ID NO: 3612828 - DNA, 25 bp, Homo sapien
gaacagttatacagtgtagctacag

SEQ ID NO: 3612829 - DNA, 25 bp, Homo sapien
cttcacaagttagggaatagaaatc

SEQ ID NO: 3612830 - DNA, 25 bp, Homo sapien
gctacagatactgactagatactaa

SEQ ID NO: 3612831 - DNA, 25 bp, Homo sapien
ggatatgaggtacacatgagctggt

SEQ ID NO: 3612832 - DNA, 25 bp, Homo sapien
caggcaattcagtacccagagcttg

SEQ ID NO: 3612833 - DNA, 25 bp, Homo sapien
gagtctgagaaccaagttaacatcc

SEQ ID NO: 3612834 - DNA, 25 bp, Homo sapien
gcttgactggagacactaatcagga

SEQ ID NO: 3612835 - DNA, 25 bp, Homo sapien
tagaagttcccagcttgtatcctaa

SEQ ID NO: 3612836 - DNA, 25 bp, Homo sapien
tcttgggattcaaccatcttggcaa

SEQ ID NO: 3612837 - DNA, 25 bp, Homo sapien
atcttgggattcaaccatcttggca

SEQ ID NO: 3612838 - DNA, 25 bp, Homo sapien
catcttgggattcaaccatcttggc

SEQ ID NO: 3612839 - DNA, 25 bp, Homo sapien
ttgggattcaaccatcttggcaagc

SEQ ID NO: 3612840 - DNA, 25 bp, Homo sapien
tcgtatgacggatcactcggtacca

SEQ ID NO: 3612841 - DNA, 25 bp, Homo sapien
cctgtgatacaacgacgagccatct

SEQ ID NO: 3612842 - DNA, 25 bp, Homo sapien
caccgattagacacaattggccgca

SEQ ID NO: 3612843 - DNA, 25 bp, Homo sapien
tcccaaatgattaggccgaagctgt

SEQ ID NO: 3612844 - DNA, 25 bp, Homo sapien
caataaaggtagtccagacccacta

SEQ ID NO: 3612845 - DNA, 25 bp, Homo sapien
cagacccactaccagaactttgtga

SEQ ID NO: 3612846 - DNA, 25 bp, Homo sapien
aactttgtgactggtcaataaggtc

SEQ ID NO: 3612847 - DNA, 25 bp, Homo sapien
gactggtcaataaggtcttttagtg

SEQ ID NO: 3612848 - DNA, 25 bp, Homo sapien
tttcagacctgtggcctttgagggt

SEQ ID NO: 3612849 - DNA, 25 bp, Homo sapien
ttgagggtcctggcctaggtttcca

SEQ ID NO: 3612850 - DNA, 25 bp, Homo sapien
tggcctaggtttccaggggccttca

SEQ ID NO: 3612851 - DNA, 25 bp, Homo sapien
tggtcctccagaaactttcaagagc

SEQ ID NO: 3612852 - DNA, 25 bp, Homo sapien
tcttggtgtacttcctctgcttatc

SEQ ID NO: 3612853 - DNA, 25 bp, Homo sapien
tccacttcttggtgtacttcctctg

SEQ ID NO: 3612854 - DNA, 25 bp, Homo sapien
gcttatctgccataaggcctcttct

SEQ ID NO: 3612855 - DNA, 25 bp, Homo sapien
ccttgtctttggaattgtcaatcct

SEQ ID NO: 3612856 - DNA, 25 bp, Homo sapien
agtgctggggttgtacccagcaact

SEQ ID NO: 3612857 - DNA, 25 bp, Homo sapien
ctggggttgtacccagcaactgggt

SEQ ID NO: 3612858 - DNA, 25 bp, Homo sapien
tgctggggttgtacccagcaactgg

SEQ ID NO: 3612859 - DNA, 25 bp, Homo sapien
tggggttgtacccagcaactgggta

SEQ ID NO: 3612860 - DNA, 25 bp, Homo sapien
ctggcgtcgtggagaacacctttcc

SEQ ID NO: 3612861 - DNA, 25 bp, Homo sapien
gagaatcctgtcagtacaagcctgg

SEQ ID NO: 3612862 - DNA, 25 bp, Homo sapien
agctcgtcctagatctccaatgccg

SEQ ID NO: 3612863 - DNA, 25 bp, Homo sapien
ctgccctggtgacgaggaaacacct

SEQ ID NO: 3612864 - DNA, 25 bp, Homo sapien
ctgttggtttgtgactgtgcagtct

SEQ ID NO: 3612865 - DNA, 25 bp, Homo sapien
gttaactgctttgccgtcgttccca

SEQ ID NO: 3612866 - DNA, 25 bp, Homo sapien
aactgctttgccgtcgttcccagga

SEQ ID NO: 3612867 - DNA, 25 bp, Homo sapien
ttctgttggtttgtgactgtgcagt

SEQ ID NO: 3612868 - DNA, 25 bp, Homo sapien
ctgcttcagcatgaatgcctctgcc

SEQ ID NO: 3612869 - DNA, 25 bp, Homo sapien
gccttctcttgcgaacacattccct

SEQ ID NO: 3612870 - DNA, 25 bp, Homo sapien
gcagagtcagccattgtgttggctg

SEQ ID NO: 3612871 - DNA, 25 bp, Homo sapien
ccctccgccacttaagaatgcacag

SEQ ID NO: 3612872 - DNA, 25 bp, Homo sapien
ctggccctgtctgtgcttcaagcac

SEQ ID NO: 3612873 - DNA, 25 bp, Homo sapien
gggctgctggccctgtctgtgcttc

SEQ ID NO: 3612874 - DNA, 25 bp, Homo sapien
ctgctggccctgtctgtgcttcaag

SEQ ID NO: 3612875 - DNA, 25 bp, Homo sapien
tcaccaggcacgagtgggctgctgg

SEQ ID NO: 3612876 - DNA, 25 bp, Homo sapien
aggaccttcttgcacacttgtgggc

SEQ ID NO: 3612877 - DNA, 25 bp, Homo sapien
actctggccacaattccccaggacc

SEQ ID NO: 3612878 - DNA, 25 bp, Homo sapien
agacactctggccacaattccccag

SEQ ID NO: 3612879 - DNA, 25 bp, Homo sapien
tcatctccagacactctggccacaa

SEQ ID NO: 3612880 - DNA, 25 bp, Homo sapien
cgtaggatgtgcgcgtgtactctga

SEQ ID NO: 3612881 - DNA, 25 bp, Homo sapien
tgctggcgtaggatgtgcgcgtgta

SEQ ID NO: 3612882 - DNA, 25 bp, Homo sapien
cataactgtgcttggtgctggcgta

SEQ ID NO: 3612883 - DNA, 25 bp, Homo sapien
ataactgtgcttggtgctggcgtag

SEQ ID NO: 3612884 - DNA, 25 bp, Homo sapien
tacccaaatgattatagctcaggat

SEQ ID NO: 3612885 - DNA, 25 bp, Homo sapien
ccaaatgattatagctcaggataac

SEQ ID NO: 3612886 - DNA, 25 bp, Homo sapien
ccccttacccaaatgattatagctc

SEQ ID NO: 3612887 - DNA, 25 bp, Homo sapien
gattatagctcaggataacttgggc

SEQ ID NO: 3612888 - DNA, 25 bp, Homo sapien
tcttgtacgcatgacagaaaccaag

SEQ ID NO: 3612889 - DNA, 25 bp, Homo sapien
aatccactgtcttgtacgcatgaca

SEQ ID NO: 3612890 - DNA, 25 bp, Homo sapien
cactgtcttgtacgcatgacagaaa

SEQ ID NO: 3612891 - DNA, 25 bp, Homo sapien
cattcaatccactgtcttgtacgca

SEQ ID NO: 3612892 - DNA, 25 bp, Homo sapien
ttcagctgacacaggtctgaaatcc

SEQ ID NO: 3612893 - DNA, 25 bp, Homo sapien
cagctgacacaggtctgaaatccct

SEQ ID NO: 3612894 - DNA, 25 bp, Homo sapien
tcagctgacacaggtctgaaatccc

SEQ ID NO: 3612895 - DNA, 25 bp, Homo sapien
tctaaaatccagaatgattttcctc

SEQ ID NO: 3612896 - DNA, 25 bp, Homo sapien
aaacattctcttggcaacacagagg

SEQ ID NO: 3612897 - DNA, 25 bp, Homo sapien
ttcaggcgattcagggccagctgca

SEQ ID NO: 3612898 - DNA, 25 bp, Homo sapien
aacacagaggcagtctggaataccc

SEQ ID NO: 3612899 - DNA, 25 bp, Homo sapien
taagcttcagtgttcctcgcaggac

SEQ ID NO: 3612900 - DNA, 25 bp, Homo sapien
tgtctatcccggattcgcgcttcac

SEQ ID NO: 3612901 - DNA, 25 bp, Homo sapien
ttcaaggggtagttgagtgctaaac

SEQ ID NO: 3612902 - DNA, 25 bp, Homo sapien
aattgtgtctatcccggattcgcgc

SEQ ID NO: 3612903 - DNA, 25 bp, Homo sapien
tgggaaattgtgtctatcccggatt

SEQ ID NO: 3612904 - DNA, 25 bp, Homo sapien
ggcttcacccacgctccctgtgatc

SEQ ID NO: 3612905 - DNA, 25 bp, Homo sapien
cttcacccacgctccctgtgatctc

SEQ ID NO: 3612906 - DNA, 25 bp, Homo sapien
tgatctctgagtcgccctccttttc

SEQ ID NO: 3612907 - DNA, 25 bp, Homo sapien
tgtgatctctgagtcgccctccttt

SEQ ID NO: 3612908 - DNA, 25 bp, Homo sapien
tagagagccacgcattctcctgttt

SEQ ID NO: 3612909 - DNA, 25 bp, Homo sapien
aggaggcttctctgaaggcagctca

SEQ ID NO: 3612910 - DNA, 25 bp, Homo sapien
gtcactttttcaggtcgcagtcccg

SEQ ID NO: 3612911 - DNA, 25 bp, Homo sapien
gcaggtttgggacccttaacatcca

SEQ ID NO: 3612912 - DNA, 25 bp, Homo sapien
agtggctgctcttttatcccttcct

SEQ ID NO: 3612913 - DNA, 25 bp, Homo sapien
atcccttcctttaatcttctcctca

SEQ ID NO: 3612914 - DNA, 25 bp, Homo sapien
agcagtggctgctcttttatccctt

SEQ ID NO: 3612915 - DNA, 25 bp, Homo sapien
ccagcagtggctgctcttttatccc

SEQ ID NO: 3612916 - DNA, 25 bp, Homo sapien
ttctcaagctccatggggtatcagt

SEQ ID NO: 3612917 - DNA, 25 bp, Homo sapien
attctcaagctccatggggtatcag

SEQ ID NO: 3612918 - DNA, 25 bp, Homo sapien
tctcaagctccatggggtatcagtg

SEQ ID NO: 3612919 - DNA, 25 bp, Homo sapien
cattctcaagctccatggggtatca

SEQ ID NO: 3612920 - DNA, 25 bp, Homo sapien
tcatgtactcagtactgctgctctg

SEQ ID NO: 3612921 - DNA, 25 bp, Homo sapien
ggtccattggctcccacaggaaagg

SEQ ID NO: 3612922 - DNA, 25 bp, Homo sapien
catgtactcagtactgctgctctgc

SEQ ID NO: 3612923 - DNA, 25 bp, Homo sapien
gagagttctggtgttagggtccatt

SEQ ID NO: 3612924 - DNA, 25 bp, Homo sapien
actccgggccatgggtgccttactc

SEQ ID NO: 3612925 - DNA, 25 bp, Homo sapien
gcatgtcactccgggccatgggtgc

SEQ ID NO: 3612926 - DNA, 25 bp, Homo sapien
atgtcactccgggccatgggtgcct

SEQ ID NO: 3612927 - DNA, 25 bp, Homo sapien
gtcactccgggccatgggtgcctta

SEQ ID NO: 3612928 - DNA, 25 bp, Homo sapien
agtgcggagtgcagaagaaccctct

SEQ ID NO: 3612929 - DNA, 25 bp, Homo sapien
agaagaaccctctgagctgttgttg

SEQ ID NO: 3612930 - DNA, 25 bp, Homo sapien
agctggcacaactgctgaagtgcgg

SEQ ID NO: 3612931 - DNA, 25 bp, Homo sapien
tgttgttgtagcaaacggcttcctc

SEQ ID NO: 3612932 - DNA, 25 bp, Homo sapien
tggaaatttcacaaacccacctgct

SEQ ID NO: 3612933 - DNA, 25 bp, Homo sapien
cccacctgctcaatagacatccttc

SEQ ID NO: 3612934 - DNA, 25 bp, Homo sapien
aacccacctgctcaatagacatcct

SEQ ID NO: 3612935 - DNA, 25 bp, Homo sapien
caaacccacctgctcaatagacatc

SEQ ID NO: 3612936 - DNA, 25 bp, Homo sapien
aattttaaccattctggcgggtgtg

SEQ ID NO: 3612937 - DNA, 25 bp, Homo sapien
tggccatgcataaaacatcctgctg

SEQ ID NO: 3612938 - DNA, 25 bp, Homo sapien
tgtggtgtttatcgaagtcttctgc

SEQ ID NO: 3612939 - DNA, 25 bp, Homo sapien
tgacgaccaacaacgctgagcatct

SEQ ID NO: 3612940 - DNA, 25 bp, Homo sapien
tatttggtgtggaggatttaatgta

SEQ ID NO: 3612941 - DNA, 25 bp, Homo sapien
ctctaatcgcagtttcaataattta

SEQ ID NO: 3612942 - DNA, 25 bp, Homo sapien
cgagcaggtctgttggtatgatcca

SEQ ID NO: 3612943 - DNA, 25 bp, Homo sapien
tgaaaatttgcctccgagcaggtct

SEQ ID NO: 3612944 - DNA, 25 bp, Homo sapien
tgagctgtagcaggagatgggcaaa

SEQ ID NO: 3612945 - DNA, 25 bp, Homo sapien
ttctcctgagctgtagcaggagatg

SEQ ID NO: 3612946 - DNA, 25 bp, Homo sapien
tgggcaaaagtggcatttggaacac

SEQ ID NO: 3612947 - DNA, 25 bp, Homo sapien
caggagatgggcaaaagtggcattt

SEQ ID NO: 3612948 - DNA, 25 bp, Homo sapien
agtgctgaaagggacgagctgggcg

SEQ ID NO: 3612949 - DNA, 25 bp, Homo sapien
gaacccctggctgcacggcctccac

SEQ ID NO: 3612950 - DNA, 25 bp, Homo sapien
gctgcacggcctccacggatccctg

SEQ ID NO: 3612951 - DNA, 25 bp, Homo sapien
gctgaaagggacgagctgggcgctc

SEQ ID NO: 3612952 - DNA, 25 bp, Homo sapien
tgagtgccaccatgtgccaagagta

SEQ ID NO: 3612953 - DNA, 25 bp, Homo sapien
tgagggaccttctaaaacttgcgct

SEQ ID NO: 3612954 - DNA, 25 bp, Homo sapien
taacttgtcccaatcagggcgtgag

SEQ ID NO: 3612955 - DNA, 25 bp, Homo sapien
caatgtttaccatcctaagggcagg

SEQ ID NO: 3612956 - DNA, 25 bp, Homo sapien
ttgcagtcgcctcctaggtgcaggc

SEQ ID NO: 3612957 - DNA, 25 bp, Homo sapien
tgcagtgcgtattaccccagggtgt

SEQ ID NO: 3612958 - DNA, 25 bp, Homo sapien
gcaccctgcagttgcggtacactta

SEQ ID NO: 3612959 - DNA, 25 bp, Homo sapien
gagatgtagtttccggcaggtatag

SEQ ID NO: 3612960 - DNA, 25 bp, Homo sapien
tgttgaatcccagggcagagatagt

SEQ ID NO: 3612961 - DNA, 25 bp, Homo sapien
gagatgacagccatcttcatagtgt

SEQ ID NO: 3612962 - DNA, 25 bp, Homo sapien
gtctgttcctccttagagatgacag

SEQ ID NO: 3612963 - DNA, 25 bp, Homo sapien
tcatagtgtcattgttgaatcccag

SEQ ID NO: 3612964 - DNA, 25 bp, Homo sapien
ttttctctgtagaatggtcatggct

SEQ ID NO: 3612965 - DNA, 25 bp, Homo sapien
gatagtagtgaatgctaagttctag

SEQ ID NO: 3612966 - DNA, 25 bp, Homo sapien
gttctagtccaaggttattctctcc

SEQ ID NO: 3612967 - DNA, 25 bp, Homo sapien
gtagaatggtcatggctccagtgaa

SEQ ID NO: 3612968 - DNA, 25 bp, Homo sapien
catccactgttgtgagctggcggtg

SEQ ID NO: 3612969 - DNA, 25 bp, Homo sapien
gggtgatatggacttgttcgatgaa

SEQ ID NO: 3612970 - DNA, 25 bp, Homo sapien
ttcgatgaagatgccgaggcgagtc

SEQ ID NO: 3612971 - DNA, 25 bp, Homo sapien
agccttgggcctgcggctgtttctc

SEQ ID NO: 3612972 - DNA, 25 bp, Homo sapien
agggaggcctgtgcggatgctgtgg

SEQ ID NO: 3612973 - DNA, 25 bp, Homo sapien
ctgtgggttgttcttgattgctggg

SEQ ID NO: 3612974 - DNA, 25 bp, Homo sapien
gccacatgccatggagagctagcag

SEQ ID NO: 3612975 - DNA, 25 bp, Homo sapien
gttgttcttgattgctggggtctgc

SEQ ID NO: 3612976 - DNA, 25 bp, Homo sapien
ggctgctggtgtcttggccacatgc

SEQ ID NO: 3612977 - DNA, 25 bp, Homo sapien
cctggtggccctcgtacaagtcatt

SEQ ID NO: 3612978 - DNA, 25 bp, Homo sapien
tattcttatgaccaggatgtgcctg

SEQ ID NO: 3612979 - DNA, 25 bp, Homo sapien
gatgtgcctgacatctcgccaagca

SEQ ID NO: 3612980 - DNA, 25 bp, Homo sapien
ctgttcctgcgagtgcctggtggcc

SEQ ID NO: 3612981 - DNA, 25 bp, Homo sapien
tcagacatcgctcagcaagagaggc

SEQ ID NO: 3612982 - DNA, 25 bp, Homo sapien
gcttctctcagacatcgctcagcaa

SEQ ID NO: 3612983 - DNA, 25 bp, Homo sapien
gtgcgggctggagtcccagaagctt

SEQ ID NO: 3612984 - DNA, 25 bp, Homo sapien
tgatttccttccacgtgtgcctcag

SEQ ID NO: 3612985 - DNA, 25 bp, Homo sapien
ccgtctggatgaaaaaccaactagg

SEQ ID NO: 3612986 - DNA, 25 bp, Homo sapien
ttagtgcagaaatcccgtctggatg

SEQ ID NO: 3612987 - DNA, 25 bp, Homo sapien
taggagcacaagatgagtgagtccg

SEQ ID NO: 3612988 - DNA, 25 bp, Homo sapien
agtccggggtgttctctcaaattca

SEQ ID NO: 3612989 - DNA, 25 bp, Homo sapien
tggtattggactgtgagtcagcagc

SEQ ID NO: 3612990 - DNA, 25 bp, Homo sapien
tattggactgtgagtcagcagcatg

SEQ ID NO: 3612991 - DNA, 25 bp, Homo sapien
tggagatggtattggactgtgagtc

SEQ ID NO: 3612992 - DNA, 25 bp, Homo sapien
agatggtattggactgtgagtcagc

SEQ ID NO: 3612993 - DNA, 25 bp, Homo sapien
ccatgtgcacgatggcagcggcatg

SEQ ID NO: 3612994 - DNA, 25 bp, Homo sapien
ccttccagtgcttggcctgtagact

SEQ ID NO: 3612995 - DNA, 25 bp, Homo sapien
ctccatgtgcacgatggcagcggca

SEQ ID NO: 3612996 - DNA, 25 bp, Homo sapien
cctgtagacttggtataagaccttc

SEQ ID NO: 3612997 - DNA, 25 bp, Homo sapien
ctccagggtgacagagtaatttttc

SEQ ID NO: 3612998 - DNA, 25 bp, Homo sapien
aactccagggtgacagagtaatttt

SEQ ID NO: 3612999 - DNA, 25 bp, Homo sapien
tccagggtgacagagtaatttttcc

SEQ ID NO: 3613000 - DNA, 25 bp, Homo sapien
ctaactccagggtgacagagtaatt

SEQ ID NO: 3613001 - DNA, 25 bp, Homo sapien
ctataggcaggcttcatctccccag

SEQ ID NO: 3613002 - DNA, 25 bp, Homo sapien
tcactcttgcggaggttgtggcctc

SEQ ID NO: 3613003 - DNA, 25 bp, Homo sapien
ggcctcgaaaatgccttgttgtccc

SEQ ID NO: 3613004 - DNA, 25 bp, Homo sapien
gattactgtatttacacattgtctc

SEQ ID NO: 3613005 - DNA, 25 bp, Homo sapien
tacctataggcaggcttcatctcct

SEQ ID NO: 3613006 - DNA, 25 bp, Homo sapien
atacctataggcaggcttcatctcc

SEQ ID NO: 3613007 - DNA, 25 bp, Homo sapien
gatacctataggcaggctccatctc

SEQ ID NO: 3613008 - DNA, 25 bp, Homo sapien
tcccctagtacacagatacctatag

SEQ ID NO: 3613009 - DNA, 25 bp, Homo sapien
tagtcctcttacaccatctgtcggt

SEQ ID NO: 3613010 - DNA, 25 bp, Homo sapien
cacgagctggagcaaaacatgatca

SEQ ID NO: 3613011 - DNA, 25 bp, Homo sapien
taaatttgcattccaaactggctcc

SEQ ID NO: 3613012 - DNA, 25 bp, Homo sapien
tgtgctcagggaacgcagcgtcatt

SEQ ID NO: 3613013 - DNA, 25 bp, Homo sapien
caacaagcgtttatgaataatgccc

SEQ ID NO: 3613014 - DNA, 25 bp, Homo sapien
tgtgctaggaaagattcgaggtgcc

SEQ ID NO: 3613015 - DNA, 25 bp, Homo sapien
ccgagaaacggagttgcagtgcagt

SEQ ID NO: 3613016 - DNA, 25 bp, Homo sapien
tcttattcctgatgaacggcaatcc

SEQ ID NO: 3613017 - DNA, 25 bp, Homo sapien
aggatgctgcccttcaagctgggag

SEQ ID NO: 3613018 - DNA, 25 bp, Homo sapien
tagaatcgtcttcgactgaggcctc

SEQ ID NO: 3613019 - DNA, 25 bp, Homo sapien
tccagatcacaagaggtctcatgaa

SEQ ID NO: 3613020 - DNA, 25 bp, Homo sapien
tgtatctcaaagtacagggtgactt

SEQ ID NO: 3613021 - DNA, 25 bp, Homo sapien
ctcagaacaggcctatgctgtacct

SEQ ID NO: 3613022 - DNA, 25 bp, Homo sapien
ccagtgtgactccttccgcgtttac

SEQ ID NO: 3613023 - DNA, 25 bp, Homo sapien
gatactcataagaatactggtttgg

SEQ ID NO: 3613024 - DNA, 25 bp, Homo sapien
tcaccgtagcctagcccagtgtgtc

SEQ ID NO: 3613025 - DNA, 25 bp, Homo sapien
agttacaatgaatcctaccatgcag

SEQ ID NO: 3613026 - DNA, 25 bp, Homo sapien
tctgcctgagtcaaagattaagttg

SEQ ID NO: 3613027 - DNA, 25 bp, Homo sapien
taagcatgcagtatttaccgggcac

SEQ ID NO: 3613028 - DNA, 25 bp, Homo sapien
gatttccacgattgtttaccacacg

SEQ ID NO: 3613029 - DNA, 25 bp, Homo sapien
tctgggcatagtctctccctggcaa

SEQ ID NO: 3613030 - DNA, 25 bp, Homo sapien
cagtgcccgagtcatggtaggacct

SEQ ID NO: 3613031 - DNA, 25 bp, Homo sapien
ttttcaaaataatcccctctgggca

SEQ ID NO: 3613032 - DNA, 25 bp, Homo sapien
tttttaacatctggagcagtgcccg

SEQ ID NO: 3613033 - DNA, 25 bp, Homo sapien
tttattgggactctgtgtaaggcca

SEQ ID NO: 3613034 - DNA, 25 bp, Homo sapien
tgtcattgcaaaaacttaccctggt

SEQ ID NO: 3613035 - DNA, 25 bp, Homo sapien
tcagttcaacagagctgcagcttgg

SEQ ID NO: 3613036 - DNA, 25 bp, Homo sapien
gccaggctttagtggtcattagaca

SEQ ID NO: 3613037 - DNA, 25 bp, Homo sapien
tccccgcttaggtgcgaggcatcac

SEQ ID NO: 3613038 - DNA, 25 bp, Homo sapien
tttcagccaagaagcagtgaggtct

SEQ ID NO: 3613039 - DNA, 25 bp, Homo sapien
gacgtgcaagctttgtaaaacccca

SEQ ID NO: 3613040 - DNA, 25 bp, Homo sapien
gacttgtgctgtatgattctcactg

SEQ ID NO: 3613041 - DNA, 25 bp, Homo sapien
caactggtggtaatgataagccttc

SEQ ID NO: 3613042 - DNA, 25 bp, Homo sapien
tgtatttcatgttaacaactggtgg

SEQ ID NO: 3613043 - DNA, 25 bp, Homo sapien
taagctgtcgacctttagtttgcca

SEQ ID NO: 3613044 - DNA, 25 bp, Homo sapien
tagtttgccatacgggtaggactgt

SEQ ID NO: 3613045 - DNA, 25 bp, Homo sapien
gagtccctgcttgcttgtgaagaag

SEQ ID NO: 3613046 - DNA, 25 bp, Homo sapien
tataaacagaagagctaagttcctg

SEQ ID NO: 3613047 - DNA, 25 bp, Homo sapien
tcttcactgtgaccaatcggagtcc

SEQ ID NO: 3613048 - DNA, 25 bp, Homo sapien
tatgaacttttgaagcacacactcc

SEQ ID NO: 3613049 - DNA, 25 bp, Homo sapien
ttttcagatggagtaccagcaccga

SEQ ID NO: 3613050 - DNA, 25 bp, Homo sapien
tttggcccactagatgaagctgtac

SEQ ID NO: 3613051 - DNA, 25 bp, Homo sapien
ggaatgtaacccttctcagaactgg

SEQ ID NO: 3613052 - DNA, 25 bp, Homo sapien
tatggtgagccccttagagatgagc

SEQ ID NO: 3613053 - DNA, 25 bp, Homo sapien
cctgtaagtcaggattggaggctgt

SEQ ID NO: 3613054 - DNA, 25 bp, Homo sapien
tattatgggcagctgaatggccatg

SEQ ID NO: 3613055 - DNA, 25 bp, Homo sapien
ggccatgggcctgtaagtcaggatt

SEQ ID NO: 3613056 - DNA, 25 bp, Homo sapien
tcttgtgaggagtgctgcgtgtacc

SEQ ID NO: 3613057 - DNA, 25 bp, Homo sapien
ggcactcccacatcggtcactctga

SEQ ID NO: 3613058 - DNA, 25 bp, Homo sapien
ttagtatttgaagccgtcagattgc

SEQ ID NO: 3613059 - DNA, 25 bp, Homo sapien
tcagattgcaacaccctggatccat

SEQ ID NO: 3613060 - DNA, 25 bp, Homo sapien
ggatctaatactttaagtccatgca

SEQ ID NO: 3613061 - DNA, 25 bp, Homo sapien
gctttgagtcatctttcacattaat

SEQ ID NO: 3613062 - DNA, 25 bp, Homo sapien
tgctgcaccgccagctgtgtgtctc

SEQ ID NO: 3613063 - DNA, 25 bp, Homo sapien
gtgctttgagtcatctttcacatta

SEQ ID NO: 3613064 - DNA, 25 bp, Homo sapien
ctttcacattaatggagctcccagg

SEQ ID NO: 3613065 - DNA, 25 bp, Homo sapien
cataatttgagaacgtgagtcctgt

SEQ ID NO: 3613066 - DNA, 25 bp, Homo sapien
gcaggtgactgaccaacggacttgt

SEQ ID NO: 3613067 - DNA, 25 bp, Homo sapien
gattgtgttgattcgcatggctccc

SEQ ID NO: 3613068 - DNA, 25 bp, Homo sapien
taatctttcaacatcagagcggagc

SEQ ID NO: 3613069 - DNA, 25 bp, Homo sapien
tggagaggatccgtttcctttttga

SEQ ID NO: 3613070 - DNA, 25 bp, Homo sapien
agtgggcaaaaatgagcctacggaa

SEQ ID NO: 3613071 - DNA, 25 bp, Homo sapien
aaaatgagcctacggaagagactaa

SEQ ID NO: 3613072 - DNA, 25 bp, Homo sapien
tgggagtttataggtaagtgggcaa

SEQ ID NO: 3613073 - DNA, 25 bp, Homo sapien
gatttatctttaacgccagagggct

SEQ ID NO: 3613074 - DNA, 25 bp, Homo sapien
gagtggaatctaggtccccacccaa

SEQ ID NO: 3613075 - DNA, 25 bp, Homo sapien
ttcggtccggatcagcagcatttgc

SEQ ID NO: 3613076 - DNA, 25 bp, Homo sapien
gcttaatgaggtctgcaagcctcga

SEQ ID NO: 3613077 - DNA, 25 bp, Homo sapien
aatacgggattgcacagtccccagg

SEQ ID NO: 3613078 - DNA, 25 bp, Homo sapien
ttgttgtgaacactccgagacaata

SEQ ID NO: 3613079 - DNA, 25 bp, Homo sapien
cactccgagacaatacgggattgca

SEQ ID NO: 3613080 - DNA, 25 bp, Homo sapien
ccagggcacaatcggggctgtcctc

SEQ ID NO: 3613081 - DNA, 25 bp, Homo sapien
tcccggggcgagtggcaacctgcat

SEQ ID NO: 3613082 - DNA, 25 bp, Homo sapien
cgggcagagacccccacctgttgat

SEQ ID NO: 3613083 - DNA, 25 bp, Homo sapien
ggagagtgatcgcccgggcagagac

SEQ ID NO: 3613084 - DNA, 25 bp, Homo sapien
ccacctgttgatctcccccttcccg

SEQ ID NO: 3613085 - DNA, 25 bp, Homo sapien
cagatggtgctggtgagcaaagcca

SEQ ID NO: 3613086 - DNA, 25 bp, Homo sapien
ggtgagcaaagccattcccgtccct

SEQ ID NO: 3613087 - DNA, 25 bp, Homo sapien
gggacgcacgcgtttccacagcagg

SEQ ID NO: 3613088 - DNA, 25 bp, Homo sapien
gagcctcgctggtctaaagcaaaaa

SEQ ID NO: 3613089 - DNA, 25 bp, Homo sapien
tctggctcaacatggtactgatcaa

SEQ ID NO: 3613090 - DNA, 25 bp, Homo sapien
taagtcctgcatgtcgggagctagc

SEQ ID NO: 3613091 - DNA, 25 bp, Homo sapien
tagtcgactacagggagcctgaccg

SEQ ID NO: 3613092 - DNA, 25 bp, Homo sapien
caaaagctggcaccagtctggcaga

SEQ ID NO: 3613093 - DNA, 25 bp, Homo sapien
gcttgctgggataaccagccagtgg

SEQ ID NO: 3613094 - DNA, 25 bp, Homo sapien
cagtgtctgcttgctgggataacca

SEQ ID NO: 3613095 - DNA, 25 bp, Homo sapien
ttgcttcagtgtctgcttgctggga

SEQ ID NO: 3613096 - DNA, 25 bp, Homo sapien
gctgggataaccagccagtggtcac

SEQ ID NO: 3613097 - DNA, 25 bp, Homo sapien
ggacagtcgcactgctgtgtcaaag

SEQ ID NO: 3613098 - DNA, 25 bp, Homo sapien
ttagcatgctttcggaacagtgtag

SEQ ID NO: 3613099 - DNA, 25 bp, Homo sapien
aggcaggacagtcgcactgctgtgt

SEQ ID NO: 3613100 - DNA, 25 bp, Homo sapien
agtgtaggagctggtatggtataat

SEQ ID NO: 3613101 - DNA, 25 bp, Homo sapien
gggcaaactggcatttagagccttt

SEQ ID NO: 3613102 - DNA, 25 bp, Homo sapien
cagagcagcctgacatccaggtggc

SEQ ID NO: 3613103 - DNA, 25 bp, Homo sapien
gcagctctgagctagttctgtccac

SEQ ID NO: 3613104 - DNA, 25 bp, Homo sapien
ggggcaatgccccacagggcaaact

SEQ ID NO: 3613105 - DNA, 25 bp, Homo sapien
agatggtagaaagctgcactgtgaa

SEQ ID NO: 3613106 - DNA, 25 bp, Homo sapien
ttggatgaagatggtagaaagctgc

SEQ ID NO: 3613107 - DNA, 25 bp, Homo sapien
ctgtgaacagggcttcaactcgata

SEQ ID NO: 3613108 - DNA, 25 bp, Homo sapien
gggcttcaactcgatatccacccat

SEQ ID NO: 3613109 - DNA, 25 bp, Homo sapien
cagaactagaggtttcgctgggcca

SEQ ID NO: 3613110 - DNA, 25 bp, Homo sapien
aatggaatatagcaacggaggcccc

SEQ ID NO: 3613111 - DNA, 25 bp, Homo sapien
ctcagaagcgttgggcagggaacac

SEQ ID NO: 3613112 - DNA, 25 bp, Homo sapien
tatagcctccgtctggaagtcccag

SEQ ID NO: 3613113 - DNA, 25 bp, Homo sapien
ggcagcaagcgggagaagggtgggt

SEQ ID NO: 3613114 - DNA, 25 bp, Homo sapien
tgctggcggcatgagctgggaaagg

SEQ ID NO: 3613115 - DNA, 25 bp, Homo sapien
gtgtgaagtgctggcggcatgagct

SEQ ID NO: 3613116 - DNA, 25 bp, Homo sapien
aggcaccggcacctatgcacactgg

SEQ ID NO: 3613117 - DNA, 25 bp, Homo sapien
ctcagtgctaggcaccggcacctat

SEQ ID NO: 3613118 - DNA, 25 bp, Homo sapien
tggaaccttgagttagaagggatgc

SEQ ID NO: 3613119 - DNA, 25 bp, Homo sapien
ctggaaccttgagttagaagggatg

SEQ ID NO: 3613120 - DNA, 25 bp, Homo sapien
tctggaaccttgagttagaagggat

SEQ ID NO: 3613121 - DNA, 25 bp, Homo sapien
tttataatcatcgagcagggcccca

SEQ ID NO: 3613122 - DNA, 25 bp, Homo sapien
tgtttataatcatcgagcagggccc

SEQ ID NO: 3613123 - DNA, 25 bp, Homo sapien
tatttcagtagattttgatttgccc

SEQ ID NO: 3613124 - DNA, 25 bp, Homo sapien
ttgatttgccccacctttgtccaag

SEQ ID NO: 3613125 - DNA, 25 bp, Homo sapien
taatgagcatggtagccaatagttg

SEQ ID NO: 3613126 - DNA, 25 bp, Homo sapien
ctcttgttgccggatcggagtgtaa

SEQ ID NO: 3613127 - DNA, 25 bp, Homo sapien
ttcttgccaggaatcgagtcccaag

SEQ ID NO: 3613128 - DNA, 25 bp, Homo sapien
ggaacgattgatcctatcactcagg

SEQ ID NO: 3613129 - DNA, 25 bp, Homo sapien
tcaggctgtccagagcactcatggt

SEQ ID NO: 3613130 - DNA, 25 bp, Homo sapien
tgctcccatagggaaatgacagtga

SEQ ID NO: 3613131 - DNA, 25 bp, Homo sapien
tctcaccctccagaaagctttcaaa

SEQ ID NO: 3613132 - DNA, 25 bp, Homo sapien
tccagggctcaggattcaggctgtc

SEQ ID NO: 3613133 - DNA, 25 bp, Homo sapien
aagcccccagtatgtctgtccctgc

SEQ ID NO: 3613134 - DNA, 25 bp, Homo sapien
ttgtggagcccggtttcttattgac

SEQ ID NO: 3613135 - DNA, 25 bp, Homo sapien
gcccggtttcttattgacagaggct

SEQ ID NO: 3613136 - DNA, 25 bp, Homo sapien
tattgacagaggctttataagcccc

SEQ ID NO: 3613137 - DNA, 25 bp, Homo sapien
ctgggtgacctgtgatgtagtacag

SEQ ID NO: 3613138 - DNA, 25 bp, Homo sapien
tgcttctattattgagggctagata

SEQ ID NO: 3613139 - DNA, 25 bp, Homo sapien
cagtaccacggctttgaattccaca

SEQ ID NO: 3613140 - DNA, 25 bp, Homo sapien
gcagcttgtccataacctttccagg

SEQ ID NO: 3613141 - DNA, 25 bp, Homo sapien
gtgtgacaagtggatctgcattcat

SEQ ID NO: 3613142 - DNA, 25 bp, Homo sapien
ggtgtgacaagtggatctgcattca

SEQ ID NO: 3613143 - DNA, 25 bp, Homo sapien
gaacacctgcaagaccaattcataa

SEQ ID NO: 3613144 - DNA, 25 bp, Homo sapien
gaaaagtgttacttcacctcgtctc

SEQ ID NO: 3613145 - DNA, 25 bp, Homo sapien
tgaggctgtggcattcctcgacaaa

SEQ ID NO: 3613146 - DNA, 25 bp, Homo sapien
tgcaatttcagttcgacaccacggg

SEQ ID NO: 3613147 - DNA, 25 bp, Homo sapien
ggatgggattgtatagcttccttca

SEQ ID NO: 3613148 - DNA, 25 bp, Homo sapien
cacactgtgtacaagtgggatgatt

SEQ ID NO: 3613149 - DNA, 25 bp, Homo sapien
ccagcaaattgtgatagttaactgc

SEQ ID NO: 3613150 - DNA, 25 bp, Homo sapien
tgaatgacatgaccctctgacccac

SEQ ID NO: 3613151 - DNA, 25 bp, Homo sapien
catctaagactagacccagagtctc

SEQ ID NO: 3613152 - DNA, 25 bp, Homo sapien
tctaagactagacccagagtctctt

SEQ ID NO: 3613153 - DNA, 25 bp, Homo sapien
taagactagacccagagtctcttct

SEQ ID NO: 3613154 - DNA, 25 bp, Homo sapien
gacccagagtctcttctgtccacat

SEQ ID NO: 3613155 - DNA, 25 bp, Homo sapien
caggaagatcccttcttgacctggc

SEQ ID NO: 3613156 - DNA, 25 bp, Homo sapien
atcccttcttgacctggcttcctcc

SEQ ID NO: 3613157 - DNA, 25 bp, Homo sapien
ccacatgctgctgtgcaaacagagc

SEQ ID NO: 3613158 - DNA, 25 bp, Homo sapien
aacagagcacgtggtcccgccaaac

SEQ ID NO: 3613159 - DNA, 25 bp, Homo sapien
aaaggaacatgtgtgctgcaaacca

SEQ ID NO: 3613160 - DNA, 25 bp, Homo sapien
tgttggttcgatttcctccagtggt

SEQ ID NO: 3613161 - DNA, 25 bp, Homo sapien
gctgtcaaaacgtctccgacaggag

SEQ ID NO: 3613162 - DNA, 25 bp, Homo sapien
ttaaaagatcactctcccgggatgc

SEQ ID NO: 3613163 - DNA, 25 bp, Homo sapien
gactcgctgttaaaagatcactctc

SEQ ID NO: 3613164 - DNA, 25 bp, Homo sapien
ggcccggcactgtatacagctgtca

SEQ ID NO: 3613165 - DNA, 25 bp, Homo sapien
caagtccacaatctaaacttttcaa

SEQ ID NO: 3613166 - DNA, 25 bp, Homo sapien
ctggggatcccttattaccgggcat

SEQ ID NO: 3613167 - DNA, 25 bp, Homo sapien
tccacaatctaaacttttcaacttc

SEQ ID NO: 3613168 - DNA, 25 bp, Homo sapien
caatctaaacttttcaacttcttct

SEQ ID NO: 3613169 - DNA, 25 bp, Homo sapien
tcagggctgtccaggggatcattaa

SEQ ID NO: 3613170 - DNA, 25 bp, Homo sapien
ggctgtccaggggatcattaagcac

SEQ ID NO: 3613171 - DNA, 25 bp, Homo sapien
gggctgtccaggggatcattaagca

SEQ ID NO: 3613172 - DNA, 25 bp, Homo sapien
ctcagtatctccatccgctggataa

SEQ ID NO: 3613173 - DNA, 25 bp, Homo sapien
cagtatctccatccgctggataaac

SEQ ID NO: 3613174 - DNA, 25 bp, Homo sapien
tcagtatctccatccgctggataaa

SEQ ID NO: 3613175 - DNA, 25 bp, Homo sapien
gtatctccatccgctggataaacat

SEQ ID NO: 3613176 - DNA, 25 bp, Homo sapien
gcagcactttggtgacgccagcgca

SEQ ID NO: 3613177 - DNA, 25 bp, Homo sapien
ccagcgcagtctgggaagtctgaca

SEQ ID NO: 3613178 - DNA, 25 bp, Homo sapien
tcctccaatctcctgggagctgatt

SEQ ID NO: 3613179 - DNA, 25 bp, Homo sapien
gaacagggccgtgcagagaaattcc

SEQ ID NO: 3613180 - DNA, 25 bp, Homo sapien
gctctgtctgaacaggattccagta

SEQ ID NO: 3613181 - DNA, 25 bp, Homo sapien
ctctctcattagctcaagcagctca

SEQ ID NO: 3613182 - DNA, 25 bp, Homo sapien
tgtctctctcattagctcaagcagc

SEQ ID NO: 3613183 - DNA, 25 bp, Homo sapien
gccttttcctgatcatgatggaatt

SEQ ID NO: 3613184 - DNA, 25 bp, Homo sapien
caggctgctcgaacaggcagcagta

SEQ ID NO: 3613185 - DNA, 25 bp, Homo sapien
ccaggctgctcgaacaggcagcagt

SEQ ID NO: 3613186 - DNA, 25 bp, Homo sapien
gctcgaacaggcagcagtaccactt

SEQ ID NO: 3613187 - DNA, 25 bp, Homo sapien
gctgctcgaacaggcagcagtacca

SEQ ID NO: 3613188 - DNA, 25 bp, Homo sapien
agccccgtggaacctggacaagttg

SEQ ID NO: 3613189 - DNA, 25 bp, Homo sapien
tgttcaggctttgtcgctgcttccc

SEQ ID NO: 3613190 - DNA, 25 bp, Homo sapien
aagcaagccccgtggaacctggaca

SEQ ID NO: 3613191 - DNA, 25 bp, Homo sapien
gcagtctctgttcaggctttgtcgc

SEQ ID NO: 3613192 - DNA, 25 bp, Homo sapien
tacacttaatacatctgctgggagc

SEQ ID NO: 3613193 - DNA, 25 bp, Homo sapien
gcggcctgctccgtgaaggaaatat

SEQ ID NO: 3613194 - DNA, 25 bp, Homo sapien
tggaacggttccaagattacactta

SEQ ID NO: 3613195 - DNA, 25 bp, Homo sapien
gggttgcacccgtcagaatccctgg

SEQ ID NO: 3613196 - DNA, 25 bp, Homo sapien
cgctccagaccgatgctcaaagcgg

SEQ ID NO: 3613197 - DNA, 25 bp, Homo sapien
tccagaccgatgctcaaagcggctg

SEQ ID NO: 3613198 - DNA, 25 bp, Homo sapien
tccccgctccagaccgatgctcaaa

SEQ ID NO: 3613199 - DNA, 25 bp, Homo sapien
ccagaccgatgctcaaagcggctgg

SEQ ID NO: 3613200 - DNA, 25 bp, Homo sapien
tctgtggtgatctggattgggaccc

SEQ ID NO: 3613201 - DNA, 25 bp, Homo sapien
tattcagagccgtgtgaaccagagc

SEQ ID NO: 3613202 - DNA, 25 bp, Homo sapien
aacctcgctttctcaaactctcggg

SEQ ID NO: 3613203 - DNA, 25 bp, Homo sapien
gctttagtggaagtaaactcaccca

SEQ ID NO: 3613204 - DNA, 25 bp, Homo sapien
aatgtgtcctggataaggacaacaa

SEQ ID NO: 3613205 - DNA, 25 bp, Homo sapien
ggcatgggcccttttggtcaataaa

SEQ ID NO: 3613206 - DNA, 25 bp, Homo sapien
ttggcctgagccttgggtctgcagg

SEQ ID NO: 3613207 - DNA, 25 bp, Homo sapien
gataaggacaacaaacgggcatggg

SEQ ID NO: 3613208 - DNA, 25 bp, Homo sapien
gagggactccatgacgttagggtta

SEQ ID NO: 3613209 - DNA, 25 bp, Homo sapien
ctgagctgcgctgtggaaaaggcac

SEQ ID NO: 3613210 - DNA, 25 bp, Homo sapien
gagtcagcatgaagctttggcagca

SEQ ID NO: 3613211 - DNA, 25 bp, Homo sapien
cagacagactgatgcaagagggcta

SEQ ID NO: 3613212 - DNA, 25 bp, Homo sapien
aatgctctgagctggttgaacagcc

SEQ ID NO: 3613213 - DNA, 25 bp, Homo sapien
gaccaaaatcgattccagaagtctg

SEQ ID NO: 3613214 - DNA, 25 bp, Homo sapien
gatcttccgagaggaggcaatgctc

SEQ ID NO: 3613215 - DNA, 25 bp, Homo sapien
cacaagccatcaaggcctgtgcata

SEQ ID NO: 3613216 - DNA, 25 bp, Homo sapien
gccgccttccattttaagtatgcgt

SEQ ID NO: 3613217 - DNA, 25 bp, Homo sapien
aaagccgccttccattttaagtatg

SEQ ID NO: 3613218 - DNA, 25 bp, Homo sapien
tccattttaagtatgcgtaatccat

SEQ ID NO: 3613219 - DNA, 25 bp, Homo sapien
agtatgcgtaatccatccaaatcct

SEQ ID NO: 3613220 - DNA, 25 bp, Homo sapien
acactgggatcggacaggagccttt

SEQ ID NO: 3613221 - DNA, 25 bp, Homo sapien
ggagcctttccgtgctctgtggagc

SEQ ID NO: 3613222 - DNA, 25 bp, Homo sapien
agcccagacactgggatcggacagg

SEQ ID NO: 3613223 - DNA, 25 bp, Homo sapien
gatcggacaggagcctttccgtgct

SEQ ID NO: 3613224 - DNA, 25 bp, Homo sapien
ccgaaggagatcattcacccagagg

SEQ ID NO: 3613225 - DNA, 25 bp, Homo sapien
gaaggagatcattcacccagaggaa

SEQ ID NO: 3613226 - DNA, 25 bp, Homo sapien
ccccgaaggagatcattcacccaga

SEQ ID NO: 3613227 - DNA, 25 bp, Homo sapien
ctcccccgaaggagatcattcaccc

SEQ ID NO: 3613228 - DNA, 25 bp, Homo sapien
tgagagctctctgcctagcccaagt

SEQ ID NO: 3613229 - DNA, 25 bp, Homo sapien
agagctctctgcctagcccaagtcc

SEQ ID NO: 3613230 - DNA, 25 bp, Homo sapien
ctgagagctctctgcctagcccaag

SEQ ID NO: 3613231 - DNA, 25 bp, Homo sapien
gctctctgcctagcccaagtccagg

SEQ ID NO: 3613232 - DNA, 25 bp, Homo sapien
ctgaagtttgaagccccatgcctgg

SEQ ID NO: 3613233 - DNA, 25 bp, Homo sapien
ggcaaaccagcagaatacaggacat

SEQ ID NO: 3613234 - DNA, 25 bp, Homo sapien
ccgaggagattgctctgagtatggg

SEQ ID NO: 3613235 - DNA, 25 bp, Homo sapien
ttaatcgcggacagtaaaggcaggt

SEQ ID NO: 3613236 - DNA, 25 bp, Homo sapien
tggctccattccactagtcacagaa

SEQ ID NO: 3613237 - DNA, 25 bp, Homo sapien
tcagggcagcgtagcctgtggaact

SEQ ID NO: 3613238 - DNA, 25 bp, Homo sapien
cattgccagcaatccaggcaggagg

SEQ ID NO: 3613239 - DNA, 25 bp, Homo sapien
cttccaaagcaggttatgaactggg

SEQ ID NO: 3613240 - DNA, 25 bp, Homo sapien
tcctcacactgtggtaaggaattat

SEQ ID NO: 3613241 - DNA, 25 bp, Homo sapien
tgtggtaaggaattatgaaccgctg

SEQ ID NO: 3613242 - DNA, 25 bp, Homo sapien
tatgaaccgctgaaggtttttgaaa

SEQ ID NO: 3613243 - DNA, 25 bp, Homo sapien
aagtagggtaaatgataaattggat

SEQ ID NO: 3613244 - DNA, 25 bp, Homo sapien
gaacaacggtcaggcagttccaaga

SEQ ID NO: 3613245 - DNA, 25 bp, Homo sapien
tatgcgttgtccatgggcccaaact

SEQ ID NO: 3613246 - DNA, 25 bp, Homo sapien
gaaaagtaaccacatgacctgcctg

SEQ ID NO: 3613247 - DNA, 25 bp, Homo sapien
ttgcaggatttcagcaccagaggcc

SEQ ID NO: 3613248 - DNA, 25 bp, Homo sapien
tacattattaattaccttgaaattc

SEQ ID NO: 3613249 - DNA, 25 bp, Homo sapien
gcctcatgcccacttggatatctgc

SEQ ID NO: 3613250 - DNA, 25 bp, Homo sapien
tgggaagatggttggcctcatgccc

SEQ ID NO: 3613251 - DNA, 25 bp, Homo sapien
atatctgctgggagaattgtgcaca

SEQ ID NO: 3613252 - DNA, 25 bp, Homo sapien
ccaggtctttgttgcagcatggaca

SEQ ID NO: 3613253 - DNA, 25 bp, Homo sapien
cactggagattagacgcagacagct

SEQ ID NO: 3613254 - DNA, 25 bp, Homo sapien
cattaacgagagctgacactggaga

SEQ ID NO: 3613255 - DNA, 25 bp, Homo sapien
ttttaatattccgtgcagctctgcc

SEQ ID NO: 3613256 - DNA, 25 bp, Homo sapien
cagctagtgccgatattgcaaaggg

SEQ ID NO: 3613257 - DNA, 25 bp, Homo sapien
gcctaactgccttgatcctcataaa

SEQ ID NO: 3613258 - DNA, 25 bp, Homo sapien
aaaggaagtcgcgtagcctaactgc

SEQ ID NO: 3613259 - DNA, 25 bp, Homo sapien
tagcgactacctcggcaagaaagga

SEQ ID NO: 3613260 - DNA, 25 bp, Homo sapien
gtttgcagtgcttccccgttcttca

SEQ ID NO: 3613261 - DNA, 25 bp, Homo sapien
tttcgccgacgcttgtgtttgcagt

SEQ ID NO: 3613262 - DNA, 25 bp, Homo sapien
caggtacatccacagagaacctagt

SEQ ID NO: 3613263 - DNA, 25 bp, Homo sapien
acctagtctgtttcgccgacgcttg

SEQ ID NO: 3613264 - DNA, 25 bp, Homo sapien
tggggctatgttgatcacaagccac

SEQ ID NO: 3613265 - DNA, 25 bp, Homo sapien
tatctctcattagaagcgactcaga

SEQ ID NO: 3613266 - DNA, 25 bp, Homo sapien
ggatttgtggggctatgttgatcac

SEQ ID NO: 3613267 - DNA, 25 bp, Homo sapien
tgcaggatgctgactggatttgtgg

SEQ ID NO: 3613268 - DNA, 25 bp, Homo sapien
tctctgactggctgtgtagcagaac

SEQ ID NO: 3613269 - DNA, 25 bp, Homo sapien
ctctctctctgactggctgtgtagc

SEQ ID NO: 3613270 - DNA, 25 bp, Homo sapien
ctctctgactggctgtgtagcagaa

SEQ ID NO: 3613271 - DNA, 25 bp, Homo sapien
ctctctctgactggctgtgtagcag

SEQ ID NO: 3613272 - DNA, 25 bp, Homo sapien
tcttctagagacagcgtaatgactc

SEQ ID NO: 3613273 - DNA, 25 bp, Homo sapien
tgttcgctgttgactactggctcca

SEQ ID NO: 3613274 - DNA, 25 bp, Homo sapien
aactctcagagttgatgttcgctgt

SEQ ID NO: 3613275 - DNA, 25 bp, Homo sapien
tgtgctgttatgcaggtctctgggc

SEQ ID NO: 3613276 - DNA, 25 bp, Homo sapien
ggaagccagttgctctcttctgatg

SEQ ID NO: 3613277 - DNA, 25 bp, Homo sapien
ttggagctgccggttgacaagtaag

SEQ ID NO: 3613278 - DNA, 25 bp, Homo sapien
aagtaaggttgccaacggaagccag

SEQ ID NO: 3613279 - DNA, 25 bp, Homo sapien
ctgatgctggaacttacaacctgtc

SEQ ID NO: 3613280 - DNA, 25 bp, Homo sapien
taagaatcaaacgtacaaaggatgt

SEQ ID NO: 3613281 - DNA, 25 bp, Homo sapien
ctaagaatcaaacgtacaaaggatg

SEQ ID NO: 3613282 - DNA, 25 bp, Homo sapien
agaatcaaacgtacaaaggatgtga

SEQ ID NO: 3613283 - DNA, 25 bp, Homo sapien
cctaagaatcaaacgtacaaaggat

SEQ ID NO: 3613284 - DNA, 25 bp, Homo sapien
gaaagctcccacacaatctcagtag

SEQ ID NO: 3613285 - DNA, 25 bp, Homo sapien
gcgagtctaggcatccgggtgcaaa

SEQ ID NO: 3613286 - DNA, 25 bp, Homo sapien
caaggtcaacttatgccgcactcag

SEQ ID NO: 3613287 - DNA, 25 bp, Homo sapien
cagtctttgagcagatggcgagtct

SEQ ID NO: 3613288 - DNA, 25 bp, Homo sapien
tttagaatagaactgtgacgtctgg

SEQ ID NO: 3613289 - DNA, 25 bp, Homo sapien
ggacagtgttattcattctacagtg

SEQ ID NO: 3613290 - DNA, 25 bp, Homo sapien
attctttagaatagaactgtgacgt

SEQ ID NO: 3613291 - DNA, 25 bp, Homo sapien
ctgtgacgtctggacagtgttattc

SEQ ID NO: 3613292 - DNA, 25 bp, Homo sapien
accaggttcattagcagtggcaggc

SEQ ID NO: 3613293 - DNA, 25 bp, Homo sapien
gacacatggaaaattgtttcccaaa

SEQ ID NO: 3613294 - DNA, 25 bp, Homo sapien
ataatggaccctaagtgcacctgcc

SEQ ID NO: 3613295 - DNA, 25 bp, Homo sapien
ggactgtcagcacctgccagatgta

SEQ ID NO: 3613296 - DNA, 25 bp, Homo sapien
gatgctgcttgggaaagtcttccca

SEQ ID NO: 3613297 - DNA, 25 bp, Homo sapien
gacctctgagagacaagtcttagtg

SEQ ID NO: 3613298 - DNA, 25 bp, Homo sapien
gtgatcgatgaagcctgaagacagt

SEQ ID NO: 3613299 - DNA, 25 bp, Homo sapien
tagggccttaggagacaagacctct

SEQ ID NO: 3613300 - DNA, 25 bp, Homo sapien
tgtagagtgcagggtcagtgcattt

SEQ ID NO: 3613301 - DNA, 25 bp, Homo sapien
ctgtagagtgcagggtcagtgcatt

SEQ ID NO: 3613302 - DNA, 25 bp, Homo sapien
gtgccttggtcctcaaggaggtggt

SEQ ID NO: 3613303 - DNA, 25 bp, Homo sapien
ctggagagtagacatgaccttggac

SEQ ID NO: 3613304 - DNA, 25 bp, Homo sapien
aattttcatggaaggctcagctgtg

SEQ ID NO: 3613305 - DNA, 25 bp, Homo sapien
gactaggaagttctctttggcagag

SEQ ID NO: 3613306 - DNA, 25 bp, Homo sapien
tatatttggaacttttatgttgacc

SEQ ID NO: 3613307 - DNA, 25 bp, Homo sapien
gattcataacaacctttggtgacgt

SEQ ID NO: 3613308 - DNA, 25 bp, Homo sapien
cagacaacatcatccagggataaat

SEQ ID NO: 3613309 - DNA, 25 bp, Homo sapien
agccagactgctgtgattcataaca

SEQ ID NO: 3613310 - DNA, 25 bp, Homo sapien
cacacactcttcccgctacctttcc

SEQ ID NO: 3613311 - DNA, 25 bp, Homo sapien
gcttatttcgcttaacattaatgat

SEQ ID NO: 3613312 - DNA, 25 bp, Homo sapien
acacacactcttcccgctacctttc

SEQ ID NO: 3613313 - DNA, 25 bp, Homo sapien
tatttcgcttaacattaatgatctt

SEQ ID NO: 3613314 - DNA, 25 bp, Homo sapien
cctagtgggattataccagaaatcc

SEQ ID NO: 3613315 - DNA, 25 bp, Homo sapien
gcgaatacatcatgacctagtggga

SEQ ID NO: 3613316 - DNA, 25 bp, Homo sapien
tgatcagcccaaatccaggaataca

SEQ ID NO: 3613317 - DNA, 25 bp, Homo sapien
atgaggccagtgttaacttgatacc

SEQ ID NO: 3613318 - DNA, 25 bp, Homo sapien
gtgagtttttgtgaggtggaggaag

SEQ ID NO: 3613319 - DNA, 25 bp, Homo sapien
tgagtttttgtgaggtggaggaagg

SEQ ID NO: 3613320 - DNA, 25 bp, Homo sapien
gttctggttgcccatgacatcccgc

SEQ ID NO: 3613321 - DNA, 25 bp, Homo sapien
gcactccatgtgctaataggtcctc

SEQ ID NO: 3613322 - DNA, 25 bp, Homo sapien
gattgttgaaggaccctatgttagc

SEQ ID NO: 3613323 - DNA, 25 bp, Homo sapien
gagaatagactaacacagagggaga

SEQ ID NO: 3613324 - DNA, 25 bp, Homo sapien
tggcctccccgactgtatctctgtg

SEQ ID NO: 3613325 - DNA, 25 bp, Homo sapien
tatccaggacgatatcctctcgaga

SEQ ID NO: 3613326 - DNA, 25 bp, Homo sapien
gcgtaggctccacccttatccagga

SEQ ID NO: 3613327 - DNA, 25 bp, Homo sapien
taatcttgtttttgggcgtaggctc

SEQ ID NO: 3613328 - DNA, 25 bp, Homo sapien
gaaaataactatgggatggattcaa

SEQ ID NO: 3613329 - DNA, 25 bp, Homo sapien
tgccttccgctcagtataatcttac

SEQ ID NO: 3613330 - DNA, 25 bp, Homo sapien
aacaaaaaccatgccttccgctcag

SEQ ID NO: 3613331 - DNA, 25 bp, Homo sapien
taggaaaataactatgggatggatt

SEQ ID NO: 3613332 - DNA, 25 bp, Homo sapien
ggtactgctttaccttacagaaggc

SEQ ID NO: 3613333 - DNA, 25 bp, Homo sapien
gacggtttcacaaggcaatttccaa

SEQ ID NO: 3613334 - DNA, 25 bp, Homo sapien
ccttacagaaggcatccaaaacgtt

SEQ ID NO: 3613335 - DNA, 25 bp, Homo sapien
ttgtgttttctgtattctgacggtt

SEQ ID NO: 3613336 - DNA, 25 bp, Homo sapien
gctcaacttgaatcaatcatacaag

SEQ ID NO: 3613337 - DNA, 25 bp, Homo sapien
gaaataaagtttgaattcagacgga

SEQ ID NO: 3613338 - DNA, 25 bp, Homo sapien
caatcatacaagcattgtatctgat

SEQ ID NO: 3613339 - DNA, 25 bp, Homo sapien
aattatatagattctcccggaatgg

SEQ ID NO: 3613340 - DNA, 25 bp, Homo sapien
ttaacacagtcagtccaaaaatagg

SEQ ID NO: 3613341 - DNA, 25 bp, Homo sapien
tatgttgtaagcagtctcctttgtg

SEQ ID NO: 3613342 - DNA, 25 bp, Homo sapien
tagcaccctgttttaacacagtcag

SEQ ID NO: 3613343 - DNA, 25 bp, Homo sapien
ctcctttgtgtattatagcaccctg

SEQ ID NO: 3613344 - DNA, 25 bp, Homo sapien
tgtgtgctaaagtttgacctctggc

SEQ ID NO: 3613345 - DNA, 25 bp, Homo sapien
caaggtgaagtgttgttaccgtcca

SEQ ID NO: 3613346 - DNA, 25 bp, Homo sapien
gatgctatacttcatgggcactgca

SEQ ID NO: 3613347 - DNA, 25 bp, Homo sapien
tcctcagtgaaaacgttagcctaag

SEQ ID NO: 3613348 - DNA, 25 bp, Homo sapien
tctttcttgatgaatgacaaggcag

SEQ ID NO: 3613349 - DNA, 25 bp, Homo sapien
tttcttgatgaatgacaaggcagga

SEQ ID NO: 3613350 - DNA, 25 bp, Homo sapien
ctttcttgatgaatgacaaggcagg

SEQ ID NO: 3613351 - DNA, 25 bp, Homo sapien
ttctttcttgatgaatgacaaggca

SEQ ID NO: 3613352 - DNA, 25 bp, Homo sapien
aacttccgggaaggtgatgagcaca

SEQ ID NO: 3613353 - DNA, 25 bp, Homo sapien
tcctaaagaaaggtgtccgactcca

SEQ ID NO: 3613354 - DNA, 25 bp, Homo sapien
tccctttatgaccaggagactgaaa

SEQ ID NO: 3613355 - DNA, 25 bp, Homo sapien
aaagattgaccagccaagtcagggc

SEQ ID NO: 3613356 - DNA, 25 bp, Homo sapien
tgaagtctgacaatgctagctagct

SEQ ID NO: 3613357 - DNA, 25 bp, Homo sapien
gagaactatgtgagatgtggccaac

SEQ ID NO: 3613358 - DNA, 25 bp, Homo sapien
catgcttaaaacaggacggccagag

SEQ ID NO: 3613359 - DNA, 25 bp, Homo sapien
ttaatttaggaagggcagaccagtg

SEQ ID NO: 3613360 - DNA, 25 bp, Homo sapien
gcccggtttccatcccttactctgc

SEQ ID NO: 3613361 - DNA, 25 bp, Homo sapien
tatggcctttagatttattgcctct

SEQ ID NO: 3613362 - DNA, 25 bp, Homo sapien
caaagttcgatcttctgtaagtcac

SEQ ID NO: 3613363 - DNA, 25 bp, Homo sapien
tgtaagtcactctaaatttatggcc

SEQ ID NO: 3613364 - DNA, 25 bp, Homo sapien
caaggatttgggattttacatagac

SEQ ID NO: 3613365 - DNA, 25 bp, Homo sapien
tccagatatgtatagagagctgctg

SEQ ID NO: 3613366 - DNA, 25 bp, Homo sapien
caggaggtgactgtgcagtcttttc

SEQ ID NO: 3613367 - DNA, 25 bp, Homo sapien
gaatgtgagccctgtatatggcact

SEQ ID NO: 3613368 - DNA, 25 bp, Homo sapien
tgccaacttgatggcaaactcccct

SEQ ID NO: 3613369 - DNA, 25 bp, Homo sapien
tgaactcatcttttgcttggttttg

SEQ ID NO: 3613370 - DNA, 25 bp, Homo sapien
gttttgccaacttgatggcaaactc

SEQ ID NO: 3613371 - DNA, 25 bp, Homo sapien
ccatttatctaaatcttccacatca

SEQ ID NO: 3613372 - DNA, 25 bp, Homo sapien
atcttatcctctactgactctatct

SEQ ID NO: 3613373 - DNA, 25 bp, Homo sapien
ttatcctctactgactctatctgtt

SEQ ID NO: 3613374 - DNA, 25 bp, Homo sapien
tcttatcctctactgactctatctg

SEQ ID NO: 3613375 - DNA, 25 bp, Homo sapien
cttatcctctactgactctatctgt

SEQ ID NO: 3613376 - DNA, 25 bp, Homo sapien
caagtggaccaatgtggtactatga

SEQ ID NO: 3613377 - DNA, 25 bp, Homo sapien
tatctgatagaatctagctttcttg

SEQ ID NO: 3613378 - DNA, 25 bp, Homo sapien
accctttgaatagcctctgactact

SEQ ID NO: 3613379 - DNA, 25 bp, Homo sapien
tcgattggttagtgtcaagtggacc

SEQ ID NO: 3613380 - DNA, 25 bp, Homo sapien
cttggctcatgaaaatctagatgtc

SEQ ID NO: 3613381 - DNA, 25 bp, Homo sapien
tatgtgtggctaaaaatcattctcc

SEQ ID NO: 3613382 - DNA, 25 bp, Homo sapien
tgtaggtcactctcaagatccaacc

SEQ ID NO: 3613383 - DNA, 25 bp, Homo sapien
cagaggaatacacatgaggaaggga

SEQ ID NO: 3613384 - DNA, 25 bp, Homo sapien
cctgaggaggggtactataggacca

SEQ ID NO: 3613385 - DNA, 25 bp, Homo sapien
cttcatagttggcttgagagtccat

SEQ ID NO: 3613386 - DNA, 25 bp, Homo sapien
catcaatatagcagtctcttcagtc

SEQ ID NO: 3613387 - DNA, 25 bp, Homo sapien
gagtccatcaatatagcagtctctt

SEQ ID NO: 3613388 - DNA, 25 bp, Homo sapien
gaatcagtcagcaatggcattgcct

SEQ ID NO: 3613389 - DNA, 25 bp, Homo sapien
tgaaatgctgcatcactagaaaaat

SEQ ID NO: 3613390 - DNA, 25 bp, Homo sapien
ttccccttgctaaagaatcagtcag

SEQ ID NO: 3613391 - DNA, 25 bp, Homo sapien
tgttgttttacattgttccccttgc

SEQ ID NO: 3613392 - DNA, 25 bp, Homo sapien
gcagggctgaatgaagtcactagaa

SEQ ID NO: 3613393 - DNA, 25 bp, Homo sapien
aaaagcttcaggtttatccaacagg

SEQ ID NO: 3613394 - DNA, 25 bp, Homo sapien
gctgtgggtacataactgcttagga

SEQ ID NO: 3613395 - DNA, 25 bp, Homo sapien
tttgtattcccagcgcatggcacag

SEQ ID NO: 3613396 - DNA, 25 bp, Homo sapien
ttttgatacaccgaggatgctggct

SEQ ID NO: 3613397 - DNA, 25 bp, Homo sapien
gaaatgggcttagaactcagatcaa

SEQ ID NO: 3613398 - DNA, 25 bp, Homo sapien
taataagtcaggcacaccaaaaggg

SEQ ID NO: 3613399 - DNA, 25 bp, Homo sapien
cgactgttggaacaaatgagctcca

SEQ ID NO: 3613400 - DNA, 25 bp, Homo sapien
tcatgtcaagacgttaaaagggaag

SEQ ID NO: 3613401 - DNA, 25 bp, Homo sapien
gaacacagatcgtagagtcctcgta

SEQ ID NO: 3613402 - DNA, 25 bp, Homo sapien
ttagtgcacaaataacctaaggcag

SEQ ID NO: 3613403 - DNA, 25 bp, Homo sapien
tttcagtattcaacatgtgccatgc

SEQ ID NO: 3613404 - DNA, 25 bp, Homo sapien
acagcatcaacattttgcaggtggc

SEQ ID NO: 3613405 - DNA, 25 bp, Homo sapien
tagaaaatgtgaacgaggctacatc

SEQ ID NO: 3613406 - DNA, 25 bp, Homo sapien
tttgaggcagcgatataagaagcta

SEQ ID NO: 3613407 - DNA, 25 bp, Homo sapien
gaaagctgattccacttgagacttc

SEQ ID NO: 3613408 - DNA, 25 bp, Homo sapien
caatacatgtgaaaccgaactgcga

SEQ ID NO: 3613409 - DNA, 25 bp, Homo sapien
gacgcagaacccctcactttggaaa

SEQ ID NO: 3613410 - DNA, 25 bp, Homo sapien
ttaaaaatacggtgagccagtgtgc

SEQ ID NO: 3613411 - DNA, 25 bp, Homo sapien
tgtgccctgtgaactgaattgtaac

SEQ ID NO: 3613412 - DNA, 25 bp, Homo sapien
cctctaattgatgcgtctgggctag

SEQ ID NO: 3613413 - DNA, 25 bp, Homo sapien
tagactggtagtgattgaaccaacc

SEQ ID NO: 3613414 - DNA, 25 bp, Homo sapien
gagaaacctgcccttgactgaagca

SEQ ID NO: 3613415 - DNA, 25 bp, Homo sapien
gaacttcactgatgggctcggtgag

SEQ ID NO: 3613416 - DNA, 25 bp, Homo sapien
gcacattcggactatcaaagactgg

SEQ ID NO: 3613417 - DNA, 25 bp, Homo sapien
tactactgcgtgttgctctcaagga

SEQ ID NO: 3613418 - DNA, 25 bp, Homo sapien
tagaccaggcagatgagttccacaa

SEQ ID NO: 3613419 - DNA, 25 bp, Homo sapien
tatgatagcaacctcggaacatgag

SEQ ID NO: 3613420 - DNA, 25 bp, Homo sapien
tgctttaaagaataaaattccacca

SEQ ID NO: 3613421 - DNA, 25 bp, Homo sapien
ctcagacaaactttcttttcttttg

SEQ ID NO: 3613422 - DNA, 25 bp, Homo sapien
attccaccaaatttccaggatgcaa

SEQ ID NO: 3613423 - DNA, 25 bp, Homo sapien
aaaattccaccaaatttccaggatg

SEQ ID NO: 3613424 - DNA, 25 bp, Homo sapien
agcacgactcgcagctcccaagagc

SEQ ID NO: 3613425 - DNA, 25 bp, Homo sapien
gcacgactcgcagctcccaagagcc

SEQ ID NO: 3613426 - DNA, 25 bp, Homo sapien
tggatttaaacggtaaacatcacaa

SEQ ID NO: 3613427 - DNA, 25 bp, Homo sapien
gtggatttaaacggtaaacatcaca

SEQ ID NO: 3613428 - DNA, 25 bp, Homo sapien
aagacgaatagcgttctgaactcac

SEQ ID NO: 3613429 - DNA, 25 bp, Homo sapien
tacgactagcacaaatgactgaaga

SEQ ID NO: 3613430 - DNA, 25 bp, Homo sapien
ccaagaagtaggattcggaggctat

SEQ ID NO: 3613431 - DNA, 25 bp, Homo sapien
gaaaataggaggcatctctttcccc

SEQ ID NO: 3613432 - DNA, 25 bp, Homo sapien
attcgaagcggagcggggcccgcac

SEQ ID NO: 3613433 - DNA, 25 bp, Homo sapien
ccattcgaagcggagcggggcccgc

SEQ ID NO: 3613434 - DNA, 25 bp, Homo sapien
gaagcggagcggggcccgcacagcc

SEQ ID NO: 3613435 - DNA, 25 bp, Homo sapien
tcgaagcggagcggggcccgcacag

SEQ ID NO: 3613436 - DNA, 25 bp, Homo sapien
tgtttcaatagaggacggagaacgg

SEQ ID NO: 3613437 - DNA, 25 bp, Homo sapien
tgagagctctcagtgcgctaggctg

SEQ ID NO: 3613438 - DNA, 25 bp, Homo sapien
gcgatacaccaaatctcgagactgt

SEQ ID NO: 3613439 - DNA, 25 bp, Homo sapien
tgctttgacgagagaaaaaagggca

SEQ ID NO: 3613440 - DNA, 25 bp, Homo sapien
caagagcgagcaccaggctgtcatt

SEQ ID NO: 3613441 - DNA, 25 bp, Homo sapien
tctttagcgtgcactttgccagtcc

SEQ ID NO: 3613442 - DNA, 25 bp, Homo sapien
cagtcctgcaaacggaggcttcgtc

SEQ ID NO: 3613443 - DNA, 25 bp, Homo sapien
catttggtagacacgaagtgggaag

SEQ ID NO: 3613444 - DNA, 25 bp, Homo sapien
cagcccctggttctgtacctgatag

SEQ ID NO: 3613445 - DNA, 25 bp, Homo sapien
gaatccgaagcataattcccctcca

SEQ ID NO: 3613446 - DNA, 25 bp, Homo sapien
tacctgatagattgtcgctttcctc

SEQ ID NO: 3613447 - DNA, 25 bp, Homo sapien
gcctttggccaatatttcagaggaa

SEQ ID NO: 3613448 - DNA, 25 bp, Homo sapien
atgaaaggaaaaggaggggaggcag

SEQ ID NO: 3613449 - DNA, 25 bp, Homo sapien
ctgtgccgccaccaaaaatgaaagg

SEQ ID NO: 3613450 - DNA, 25 bp, Homo sapien
ggaaaaggaggggaggcagatggga

SEQ ID NO: 3613451 - DNA, 25 bp, Homo sapien
aggggaggcagatgggaagatgacc

SEQ ID NO: 3613452 - DNA, 25 bp, Homo sapien
tggagaggcctcaacgcacttagta

SEQ ID NO: 3613453 - DNA, 25 bp, Homo sapien
ggagaggcctcaacgcacttagtaa

SEQ ID NO: 3613454 - DNA, 25 bp, Homo sapien
ctggagaggcctcaacgcacttagt

SEQ ID NO: 3613455 - DNA, 25 bp, Homo sapien
gagaggcctcaacgcacttagtaaa

SEQ ID NO: 3613456 - DNA, 25 bp, Homo sapien
gagaagcacatttaatctttactgg

SEQ ID NO: 3613457 - DNA, 25 bp, Homo sapien
tctcagaaaagctagtctgtcatca

SEQ ID NO: 3613458 - DNA, 25 bp, Homo sapien
acaatcctccgttgagctcagaggc

SEQ ID NO: 3613459 - DNA, 25 bp, Homo sapien
taataatggccctttcgacatagca

SEQ ID NO: 3613460 - DNA, 25 bp, Homo sapien
caggcatcaggcacaaatcagcgac

SEQ ID NO: 3613461 - DNA, 25 bp, Homo sapien
tgccaaccatggtgcagattcctcg

SEQ ID NO: 3613462 - DNA, 25 bp, Homo sapien
gttgaattttcctagaccacactgc

SEQ ID NO: 3613463 - DNA, 25 bp, Homo sapien
tctggttacaggaggcaacgggtct

SEQ ID NO: 3613464 - DNA, 25 bp, Homo sapien
tgccgggctcctacatacaaagctt

SEQ ID NO: 3613465 - DNA, 25 bp, Homo sapien
tagtgtgtctcatccctgacttgca

SEQ ID NO: 3613466 - DNA, 25 bp, Homo sapien
gcagtgctggatgcactaaggcatc

SEQ ID NO: 3613467 - DNA, 25 bp, Homo sapien
tcttctaatatcctctcgcgcttgc

SEQ ID NO: 3613468 - DNA, 25 bp, Homo sapien
tagaatcatgcagacaaccggcagc

SEQ ID NO: 3613469 - DNA, 25 bp, Homo sapien
taacccaggttatgagcagcgatga

SEQ ID NO: 3613470 - DNA, 25 bp, Homo sapien
tagaggacgagatttcccgagactc

SEQ ID NO: 3613471 - DNA, 25 bp, Homo sapien
gaagatatctatgcaagtcctggga

SEQ ID NO: 3613472 - DNA, 25 bp, Homo sapien
cagttgacggcttccagggaatgga

SEQ ID NO: 3613473 - DNA, 25 bp, Homo sapien
gggtgaagaaaaagacgcaaagatg

SEQ ID NO: 3613474 - DNA, 25 bp, Homo sapien
cgcaaagatgttgtattcagtccag

SEQ ID NO: 3613475 - DNA, 25 bp, Homo sapien
atgagccagccaacaggtaccactg

SEQ ID NO: 3613476 - DNA, 25 bp, Homo sapien
tctgagctcagaactacaaaggctg

SEQ ID NO: 3613477 - DNA, 25 bp, Homo sapien
gcaccttttaagagtttgggagcag

SEQ ID NO: 3613478 - DNA, 25 bp, Homo sapien
tcctggcatggtttcaaaggcccaa

SEQ ID NO: 3613479 - DNA, 25 bp, Homo sapien
catgctgtgttgtaaggagccagac

SEQ ID NO: 3613480 - DNA, 25 bp, Homo sapien
aggtcagcactgagcaaaccaacta

SEQ ID NO: 3613481 - DNA, 25 bp, Homo sapien
gcactgagcaaaccaactacagttt

SEQ ID NO: 3613482 - DNA, 25 bp, Homo sapien
tgctgctttccccttcgtgaaaatc

SEQ ID NO: 3613483 - DNA, 25 bp, Homo sapien
catcgcatgttccaatccaggtcag

SEQ ID NO: 3613484 - DNA, 25 bp, Homo sapien
gaaaaagtaactgcatgaatgaccc

SEQ ID NO: 3613485 - DNA, 25 bp, Homo sapien
agatgctttcgctggccttgggtca

SEQ ID NO: 3613486 - DNA, 25 bp, Homo sapien
tagaggctctttagaagatttcctg

SEQ ID NO: 3613487 - DNA, 25 bp, Homo sapien
gatttcctgcggtcaagatgctttc

SEQ ID NO: 3613488 - DNA, 25 bp, Homo sapien
cgaacctaagcgtattctcttatga

SEQ ID NO: 3613489 - DNA, 25 bp, Homo sapien
ccacaatgctggactcagaactaca

SEQ ID NO: 3613490 - DNA, 25 bp, Homo sapien
gccatctttgagaaccgctaagaca

SEQ ID NO: 3613491 - DNA, 25 bp, Homo sapien
tctcttatgatttggccagccatct

SEQ ID NO: 3613492 - DNA, 25 bp, Homo sapien
tgggcgaaatctgtcctaatatctt

SEQ ID NO: 3613493 - DNA, 25 bp, Homo sapien
tattgaaatcaagtttccttctgtg

SEQ ID NO: 3613494 - DNA, 25 bp, Homo sapien
gtttctctgcacaatttgaaccaaa

SEQ ID NO: 3613495 - DNA, 25 bp, Homo sapien
tgttgtgcagcctgaataatgggcg

SEQ ID NO: 3613496 - DNA, 25 bp, Homo sapien
taggaaggtctctgaagcacatgtc

SEQ ID NO: 3613497 - DNA, 25 bp, Homo sapien
catggcagaggagccaagattgtac

SEQ ID NO: 3613498 - DNA, 25 bp, Homo sapien
tgtccaggaacattccgcttcatgg

SEQ ID NO: 3613499 - DNA, 25 bp, Homo sapien
gcctcagcagaggaattgcataaca

SEQ ID NO: 3613500 - DNA, 25 bp, Homo sapien
tttgttggaacccaagagcgcctcc

SEQ ID NO: 3613501 - DNA, 25 bp, Homo sapien
ggctcgctctatccatcctgtgtag

SEQ ID NO: 3613502 - DNA, 25 bp, Homo sapien
aaatggaactgccagaggctcgctc

SEQ ID NO: 3613503 - DNA, 25 bp, Homo sapien
cctccagtggcaggcgtgcttttgc

SEQ ID NO: 3613504 - DNA, 25 bp, Homo sapien
gactatgctttgcataagcacggtg

SEQ ID NO: 3613505 - DNA, 25 bp, Homo sapien
tcccagctcctgctattcatggaat

SEQ ID NO: 3613506 - DNA, 25 bp, Homo sapien
tataaggcagatctcatatggacta

SEQ ID NO: 3613507 - DNA, 25 bp, Homo sapien
tcaagtggctactcaccaaaatcct

SEQ ID NO: 3613508 - DNA, 25 bp, Homo sapien
tggaggtcagtggcgcaacctcagc

SEQ ID NO: 3613509 - DNA, 25 bp, Homo sapien
cttgttacccaggctggaggtcagt

SEQ ID NO: 3613510 - DNA, 25 bp, Homo sapien
tttgttttttatacaagagtcttgc

SEQ ID NO: 3613511 - DNA, 25 bp, Homo sapien
ttgttttttatacaagagtcttgct

SEQ ID NO: 3613512 - DNA, 25 bp, Homo sapien
ttccctttctcggtcatgaaataaa

SEQ ID NO: 3613513 - DNA, 25 bp, Homo sapien
cttatgaattcagccaaaaatgtct

SEQ ID NO: 3613514 - DNA, 25 bp, Homo sapien
gaatttccctttctcggtcatgaaa

SEQ ID NO: 3613515 - DNA, 25 bp, Homo sapien
cctttctcggtcatgaaataaatgg

SEQ ID NO: 3613516 - DNA, 25 bp, Homo sapien
ctaaccctgccctaaacaggatcca

SEQ ID NO: 3613517 - DNA, 25 bp, Homo sapien
ttaccattaagtcaagcataaaaac

SEQ ID NO: 3613518 - DNA, 25 bp, Homo sapien
cagttagtttaactcttattaccat

SEQ ID NO: 3613519 - DNA, 25 bp, Homo sapien
gcgcctggcccagttagtttaactc

SEQ ID NO: 3613520 - DNA, 25 bp, Homo sapien
agtttccttgttgccatccactgtg

SEQ ID NO: 3613521 - DNA, 25 bp, Homo sapien
ttccttgttgccatccactgtgcca

SEQ ID NO: 3613522 - DNA, 25 bp, Homo sapien
ttgttgccatccactgtgccatcat

SEQ ID NO: 3613523 - DNA, 25 bp, Homo sapien
cagtttccttgttgccatccactgt

SEQ ID NO: 3613524 - DNA, 25 bp, Homo sapien
ttagtgacaacgttctatagctctt

SEQ ID NO: 3613525 - DNA, 25 bp, Homo sapien
ttttccagatttaatgtgcgggaag

SEQ ID NO: 3613526 - DNA, 25 bp, Homo sapien
catttttagtgacaacgttctatag

SEQ ID NO: 3613527 - DNA, 25 bp, Homo sapien
ggaagtcatcttagatctgcccctc

SEQ ID NO: 3613528 - DNA, 25 bp, Homo sapien
gagggaaacaaaagctatgccagat

SEQ ID NO: 3613529 - DNA, 25 bp, Homo sapien
gacaagatcaaagctcaaagagaac

SEQ ID NO: 3613530 - DNA, 25 bp, Homo sapien
caaaatggccaatgcacacttaggc

SEQ ID NO: 3613531 - DNA, 25 bp, Homo sapien
tatctgagtagatttcctccctgca

SEQ ID NO: 3613532 - DNA, 25 bp, Homo sapien
tgaattgacaatggtccaccctcct

SEQ ID NO: 3613533 - DNA, 25 bp, Homo sapien
caaaaggcaagttgtacctcactgg

SEQ ID NO: 3613534 - DNA, 25 bp, Homo sapien
gaatctgctctttgaactagccagg

SEQ ID NO: 3613535 - DNA, 25 bp, Homo sapien
gaaacagttcagcttatcagggaga

SEQ ID NO: 3613536 - DNA, 25 bp, Homo sapien
aagggccacagaagctctcatgtgc

SEQ ID NO: 3613537 - DNA, 25 bp, Homo sapien
tgtaaaagggttgagaagggccaca

SEQ ID NO: 3613538 - DNA, 25 bp, Homo sapien
ccacagaagctctcatgtgctccat

SEQ ID NO: 3613539 - DNA, 25 bp, Homo sapien
taaaagggttgagaagggccacaga

SEQ ID NO: 3613540 - DNA, 25 bp, Homo sapien
cctgaggaaatagaacacatactca

SEQ ID NO: 3613541 - DNA, 25 bp, Homo sapien
atagaacacatactcaccaaagatg

SEQ ID NO: 3613542 - DNA, 25 bp, Homo sapien
tagaagatactatggccatttgtct

SEQ ID NO: 3613543 - DNA, 25 bp, Homo sapien
aagatgaagacaagggatacattat

SEQ ID NO: 3613544 - DNA, 25 bp, Homo sapien
taaagacggcacagcagcctttgag

SEQ ID NO: 3613545 - DNA, 25 bp, Homo sapien
gagtcttgctcctagttctgctgca

SEQ ID NO: 3613546 - DNA, 25 bp, Homo sapien
taaacagtataagtaggtcctcatc

SEQ ID NO: 3613547 - DNA, 25 bp, Homo sapien
aagtaacatcgaaccttcagccgtg

SEQ ID NO: 3613548 - DNA, 25 bp, Homo sapien
gatgtaattctaaactatacaacct

SEQ ID NO: 3613549 - DNA, 25 bp, Homo sapien
agctaggaggctgtacagttatctc

SEQ ID NO: 3613550 - DNA, 25 bp, Homo sapien
aaagctaggaggctgtacagttatc

SEQ ID NO: 3613551 - DNA, 25 bp, Homo sapien
cagttatctcccttgatgtaattct

SEQ ID NO: 3613552 - DNA, 25 bp, Homo sapien
agctggaattacaggagtgtgtcac

SEQ ID NO: 3613553 - DNA, 25 bp, Homo sapien
ctggaattacaggagtgtgtcacca

SEQ ID NO: 3613554 - DNA, 25 bp, Homo sapien
catggtagtacacttaacagcaggt

SEQ ID NO: 3613555 - DNA, 25 bp, Homo sapien
gaatactgggagctcatggtcccca

SEQ ID NO: 3613556 - DNA, 25 bp, Homo sapien
taaaagaagtaatctggcagtcacc

SEQ ID NO: 3613557 - DNA, 25 bp, Homo sapien
gaaacaatgtcgtcttggtctagca

SEQ ID NO: 3613558 - DNA, 25 bp, Homo sapien
ctaataccacaagttcggatctacg

SEQ ID NO: 3613559 - DNA, 25 bp, Homo sapien
caagcttgtgcggactaataccaca

SEQ ID NO: 3613560 - DNA, 25 bp, Homo sapien
tacctatagatacaagcttgtgcgg

SEQ ID NO: 3613561 - DNA, 25 bp, Homo sapien
cggatctacgggtttgtggcaacag

SEQ ID NO: 3613562 - DNA, 25 bp, Homo sapien
cttccatcttgttaggctaatatct

SEQ ID NO: 3613563 - DNA, 25 bp, Homo sapien
tgcttccatcttgttaggctaatat

SEQ ID NO: 3613564 - DNA, 25 bp, Homo sapien
tccatcttgttaggctaatatcttc

SEQ ID NO: 3613565 - DNA, 25 bp, Homo sapien
catcttgttaggctaatatcttcaa

SEQ ID NO: 3613566 - DNA, 25 bp, Homo sapien
gtcgttcactctgacagtgggtgtc

SEQ ID NO: 3613567 - DNA, 25 bp, Homo sapien
gggagacactagtgtttggtctcct

SEQ ID NO: 3613568 - DNA, 25 bp, Homo sapien
gacactagtgtttggtctcctacag

SEQ ID NO: 3613569 - DNA, 25 bp, Homo sapien
ctttgtcgttcactctgacagtggg

SEQ ID NO: 3613570 - DNA, 25 bp, Homo sapien
tgtattctgatcacgctgctctgcg

SEQ ID NO: 3613571 - DNA, 25 bp, Homo sapien
tctgcattaatcttggccctaaccg

SEQ ID NO: 3613572 - DNA, 25 bp, Homo sapien
tctggcaaagcacacgggttgtaga

SEQ ID NO: 3613573 - DNA, 25 bp, Homo sapien
gccctaaccgtgcattctggcaaag

SEQ ID NO: 3613574 - DNA, 25 bp, Homo sapien
caatctaagttactagagcaaggta

SEQ ID NO: 3613575 - DNA, 25 bp, Homo sapien
tttatcttgcattaaccaggtctgg

SEQ ID NO: 3613576 - DNA, 25 bp, Homo sapien
tcacataatctttagggcacaatct

SEQ ID NO: 3613577 - DNA, 25 bp, Homo sapien
tattggcaggtctttatctgtccca

SEQ ID NO: 3613578 - DNA, 25 bp, Homo sapien
gggccaccagatgtttttcagtgac

SEQ ID NO: 3613579 - DNA, 25 bp, Homo sapien
tttggtaaatgaacaggaagggtca

SEQ ID NO: 3613580 - DNA, 25 bp, Homo sapien
taaatgaacaggaagggtcagggcc

SEQ ID NO: 3613581 - DNA, 25 bp, Homo sapien
gtcagggccaccagatgtttttcag

SEQ ID NO: 3613582 - DNA, 25 bp, Homo sapien
tctcacaagtttcagcttgctctca

SEQ ID NO: 3613583 - DNA, 25 bp, Homo sapien
ggtttgttgcagtttatgtctcttc

SEQ ID NO: 3613584 - DNA, 25 bp, Homo sapien
gcagtttatgtctcttctcacaagt

SEQ ID NO: 3613585 - DNA, 25 bp, Homo sapien
tgttgcagtttatgtctcttctcac

SEQ ID NO: 3613586 - DNA, 25 bp, Homo sapien
tctgcctgagaggtaaagtagttca

SEQ ID NO: 3613587 - DNA, 25 bp, Homo sapien
aacaataactccaacagccttcagc

SEQ ID NO: 3613588 - DNA, 25 bp, Homo sapien
tcctctgtccagagaaatataaaca

SEQ ID NO: 3613589 - DNA, 25 bp, Homo sapien
ctttgcttctgcctgagaggtaaag

SEQ ID NO: 3613590 - DNA, 25 bp, Homo sapien
aagccaagtttatgagttcttctca

SEQ ID NO: 3613591 - DNA, 25 bp, Homo sapien
gccaagtttatgagttcttctcaat

SEQ ID NO: 3613592 - DNA, 25 bp, Homo sapien
gaagccaagtttatgagttcttctc

SEQ ID NO: 3613593 - DNA, 25 bp, Homo sapien
aggaagccaagtttatgagttcttc

SEQ ID NO: 3613594 - DNA, 25 bp, Homo sapien
catcaaccacagcaagagtcatttg

SEQ ID NO: 3613595 - DNA, 25 bp, Homo sapien
catacatgttcagaggcaaatccga

SEQ ID NO: 3613596 - DNA, 25 bp, Homo sapien
tccgatgactaattgcagagtaagc

SEQ ID NO: 3613597 - DNA, 25 bp, Homo sapien
gaaactataccatggtcttctggaa

SEQ ID NO: 3613598 - DNA, 25 bp, Homo sapien
gcagctaactaagaacagcgcccta

SEQ ID NO: 3613599 - DNA, 25 bp, Homo sapien
attagtcacttaccatgggccatgc

SEQ ID NO: 3613600 - DNA, 25 bp, Homo sapien
catgcttactacagtacctggcaca

SEQ ID NO: 3613601 - DNA, 25 bp, Homo sapien
ggcacataaaagctggacgaattgt

SEQ ID NO: 3613602 - DNA, 25 bp, Homo sapien
gagcagcagtcccacggaatgttta

SEQ ID NO: 3613603 - DNA, 25 bp, Homo sapien
caggcttggcaatcttaaggaaaat

SEQ ID NO: 3613604 - DNA, 25 bp, Homo sapien
tgtcctacaaagtcatgaaggagct

SEQ ID NO: 3613605 - DNA, 25 bp, Homo sapien
tctgacccatagatgtctgcctgtg

SEQ ID NO: 3613606 - DNA, 25 bp, Homo sapien
cctgagacaagacttcagttctttc

SEQ ID NO: 3613607 - DNA, 25 bp, Homo sapien
ttcctgagacaagacttcagttctt

SEQ ID NO: 3613608 - DNA, 25 bp, Homo sapien
ttcttcctgagacaagacttcagtt

SEQ ID NO: 3613609 - DNA, 25 bp, Homo sapien
tgagacaagacttcagttctttctc

SEQ ID NO: 3613610 - DNA, 25 bp, Homo sapien
aactctgtacaagtcttactgcatg

SEQ ID NO: 3613611 - DNA, 25 bp, Homo sapien
tagattcagaagaaatgctgggaga

SEQ ID NO: 3613612 - DNA, 25 bp, Homo sapien
tgtacctgcctccaatgaactttaa

SEQ ID NO: 3613613 - DNA, 25 bp, Homo sapien
attctagttgacagagaaaacacac

SEQ ID NO: 3613614 - DNA, 25 bp, Homo sapien
tgatcagctcagtgttggtatcagt

SEQ ID NO: 3613615 - DNA, 25 bp, Homo sapien
tgatgcttttcagggccacgttcac

SEQ ID NO: 3613616 - DNA, 25 bp, Homo sapien
gcactggcgtcactctcctctataa

SEQ ID NO: 3613617 - DNA, 25 bp, Homo sapien
tatcagtgggaacgagggagacaaa

SEQ ID NO: 3613618 - DNA, 25 bp, Homo sapien
cttcactgcatccaaccttagggtt

SEQ ID NO: 3613619 - DNA, 25 bp, Homo sapien
tccaaccttagggttctatagcagc

SEQ ID NO: 3613620 - DNA, 25 bp, Homo sapien
tgcatccaaccttagggttctatag

SEQ ID NO: 3613621 - DNA, 25 bp, Homo sapien
cactgcatccaaccttagggttcta

SEQ ID NO: 3613622 - DNA, 25 bp, Homo sapien
tacagcacttggatagtcaggaact

SEQ ID NO: 3613623 - DNA, 25 bp, Homo sapien
gatccagtgtgcagaacccaatttt

SEQ ID NO: 3613624 - DNA, 25 bp, Homo sapien
gatgcacgaaggaaggatggtaaca

SEQ ID NO: 3613625 - DNA, 25 bp, Homo sapien
tcagtcttcgcaggcagaatcaacc

SEQ ID NO: 3613626 - DNA, 25 bp, Homo sapien
tatcagctgtgtttctcgcctgcag

SEQ ID NO: 3613627 - DNA, 25 bp, Homo sapien
cctggttgcccctcagatgtcttgg

SEQ ID NO: 3613628 - DNA, 25 bp, Homo sapien
taatgctaggcaaataacaacacac

SEQ ID NO: 3613629 - DNA, 25 bp, Homo sapien
tctgtctgtctgatgtcgccagcct

SEQ ID NO: 3613630 - DNA, 25 bp, Homo sapien
cagcctctgtgtgagttgcaggact

SEQ ID NO: 3613631 - DNA, 25 bp, Homo sapien
catagcaaggcagtgcccagttggg

SEQ ID NO: 3613632 - DNA, 25 bp, Homo sapien
tggcttacgcgctgcatgggaagtc

SEQ ID NO: 3613633 - DNA, 25 bp, Homo sapien
tcagggaaatacttccgggagacgc

SEQ ID NO: 3613634 - DNA, 25 bp, Homo sapien
tatgacgtggcaaaacaagctctag

SEQ ID NO: 3613635 - DNA, 25 bp, Homo sapien
gaaataatacgtcacaaaccacatg

SEQ ID NO: 3613636 - DNA, 25 bp, Homo sapien
tctcacaactggtatgatggcagaa

SEQ ID NO: 3613637 - DNA, 25 bp, Homo sapien
taggcttcaacagatctagactcga

SEQ ID NO: 3613638 - DNA, 25 bp, Homo sapien
tcagtggcagagcacggttgtcatt

SEQ ID NO: 3613639 - DNA, 25 bp, Homo sapien
agagagcatcccactaggcctattg

SEQ ID NO: 3613640 - DNA, 25 bp, Homo sapien
cacggttgtcattctggaaagtttc

SEQ ID NO: 3613641 - DNA, 25 bp, Homo sapien
ctaggcctattggttgtttcctcca

SEQ ID NO: 3613642 - DNA, 25 bp, Homo sapien
tagtctagacatacggtgcaggagg

SEQ ID NO: 3613643 - DNA, 25 bp, Homo sapien
tcaatgccctgtactgaggatgatc

SEQ ID NO: 3613644 - DNA, 25 bp, Homo sapien
actccttaatggtgtggctcaatgc

SEQ ID NO: 3613645 - DNA, 25 bp, Homo sapien
gctccacttactagtgcattggaaa

SEQ ID NO: 3613646 - DNA, 25 bp, Homo sapien
tccgttctctgatggtggtccaggg

SEQ ID NO: 3613647 - DNA, 25 bp, Homo sapien
cgcagattccgttctctgatggtgg

SEQ ID NO: 3613648 - DNA, 25 bp, Homo sapien
tgttttcccgcagattccgttctct

SEQ ID NO: 3613649 - DNA, 25 bp, Homo sapien
acggctgcactctttgttttcccgc

SEQ ID NO: 3613650 - DNA, 25 bp, Homo sapien
ggagcaaatgcataagtccctgaca

SEQ ID NO: 3613651 - DNA, 25 bp, Homo sapien
taacaagattgtgtgaagcacctac

SEQ ID NO: 3613652 - DNA, 25 bp, Homo sapien
gagatcttcaacctaaaacagagaa

SEQ ID NO: 3613653 - DNA, 25 bp, Homo sapien
tttatgagtttgtagaaaagcccag

SEQ ID NO: 3613654 - DNA, 25 bp, Homo sapien
tagatgggcaattctccggtaaaga

SEQ ID NO: 3613655 - DNA, 25 bp, Homo sapien
caaggcaaaggcgaccatgttgtcc

SEQ ID NO: 3613656 - DNA, 25 bp, Homo sapien
ggagcgcagaaaccaaccttcagtg

SEQ ID NO: 3613657 - DNA, 25 bp, Homo sapien
gccaaggtaggtcgtcagagatcta

SEQ ID NO: 3613658 - DNA, 25 bp, Homo sapien
gaccacacagcacctctaggaagct

SEQ ID NO: 3613659 - DNA, 25 bp, Homo sapien
agggcacccctgtaggccgttccag

SEQ ID NO: 3613660 - DNA, 25 bp, Homo sapien
gcaatcatgaagaactcagggcacc

SEQ ID NO: 3613661 - DNA, 25 bp, Homo sapien
tccgccttataggaagaggtcacag

SEQ ID NO: 3613662 - DNA, 25 bp, Homo sapien
tcatcactcgtcagttgatggacgt

SEQ ID NO: 3613663 - DNA, 25 bp, Homo sapien
tcgcacccagccatgcttgggttct

SEQ ID NO: 3613664 - DNA, 25 bp, Homo sapien
caaaaaattgggtagattcctgaga

SEQ ID NO: 3613665 - DNA, 25 bp, Homo sapien
catctatgttacaccatgtgtcagt

SEQ ID NO: 3613666 - DNA, 25 bp, Homo sapien
gccgttaataacatgtgtgttggag

SEQ ID NO: 3613667 - DNA, 25 bp, Homo sapien
tgtggccagatccatgaaagggatt

SEQ ID NO: 3613668 - DNA, 25 bp, Homo sapien
aaagcctgtgccgtttacctgcaga

SEQ ID NO: 3613669 - DNA, 25 bp, Homo sapien
tcagtccgcatgttgggtcaggaag

SEQ ID NO: 3613670 - DNA, 25 bp, Homo sapien
gaatgaaaaactggcctagtaactg

SEQ ID NO: 3613671 - DNA, 25 bp, Homo sapien
cagatgaaagtctcctgagtaggca

SEQ ID NO: 3613672 - DNA, 25 bp, Homo sapien
tcatccatggaacgagatggaaccg

SEQ ID NO: 3613673 - DNA, 25 bp, Homo sapien
gatggaaccgaagtcccacagatga

SEQ ID NO: 3613674 - DNA, 25 bp, Homo sapien
gggcactatattgccttaatgtgca

SEQ ID NO: 3613675 - DNA, 25 bp, Homo sapien
tcttaatgatggtcccttatgaact

SEQ ID NO: 3613676 - DNA, 25 bp, Homo sapien
catagtgggcagtattgaatcaaca

SEQ ID NO: 3613677 - DNA, 25 bp, Homo sapien
tccattcataccatgagctgaaatt

SEQ ID NO: 3613678 - DNA, 25 bp, Homo sapien
ccctgtttgcaccaaatatgcccct

SEQ ID NO: 3613679 - DNA, 25 bp, Homo sapien
ttgcaccaaatatgccccttttgtc

SEQ ID NO: 3613680 - DNA, 25 bp, Homo sapien
tgtttgcaccaaatatgcccctttt

SEQ ID NO: 3613681 - DNA, 25 bp, Homo sapien
gtttgcaccaaatatgccccttttg

SEQ ID NO: 3613682 - DNA, 25 bp, Homo sapien
catccatttagtacagtccgcagaa

SEQ ID NO: 3613683 - DNA, 25 bp, Homo sapien
tcatacaaagctctgccatagggtc

SEQ ID NO: 3613684 - DNA, 25 bp, Homo sapien
tgtcagtgttacgaagagaaatcct

SEQ ID NO: 3613685 - DNA, 25 bp, Homo sapien
ccagctggccaagtgaatcaggata

SEQ ID NO: 3613686 - DNA, 25 bp, Homo sapien
gtgaaaactatgcagcctccacagg

SEQ ID NO: 3613687 - DNA, 25 bp, Homo sapien
tatagcctaaggcacaaccatgttg

SEQ ID NO: 3613688 - DNA, 25 bp, Homo sapien
tgtgccctaccttccagtgacttgg

SEQ ID NO: 3613689 - DNA, 25 bp, Homo sapien
gacttggactgttaaagtgaacacc

SEQ ID NO: 3613690 - DNA, 25 bp, Homo sapien
ggcatccatggtctataatatctga

SEQ ID NO: 3613691 - DNA, 25 bp, Homo sapien
gaacacttgcggttagacctgcaca

SEQ ID NO: 3613692 - DNA, 25 bp, Homo sapien
ggctgaggaaagacaaggcactatt

SEQ ID NO: 3613693 - DNA, 25 bp, Homo sapien
aacacagggcgtccattaacaaact

SEQ ID NO: 3613694 - DNA, 25 bp, Homo sapien
catggaaacaccagactcaggattt

SEQ ID NO: 3613695 - DNA, 25 bp, Homo sapien
agtgttgaggtcaatgtcagaaaaa

SEQ ID NO: 3613696 - DNA, 25 bp, Homo sapien
gagccttttcgatgaacttcacact

SEQ ID NO: 3613697 - DNA, 25 bp, Homo sapien
tgcatagttcagataataacagctc

SEQ ID NO: 3613698 - DNA, 25 bp, Homo sapien
tgttttagcaacgattcccctttgc

SEQ ID NO: 3613699 - DNA, 25 bp, Homo sapien
ttttagcaacgattcccctttgcag

SEQ ID NO: 3613700 - DNA, 25 bp, Homo sapien
ttagcaacgattcccctttgcagtg

SEQ ID NO: 3613701 - DNA, 25 bp, Homo sapien
ctgttttagcaacgattcccctttg

SEQ ID NO: 3613702 - DNA, 25 bp, Homo sapien
ctgatctctggactagaagtttcca

SEQ ID NO: 3613703 - DNA, 25 bp, Homo sapien
tcagaagtcacaacattggtcagat

SEQ ID NO: 3613704 - DNA, 25 bp, Homo sapien
ccccaatgttggtgacagcggttgc

SEQ ID NO: 3613705 - DNA, 25 bp, Homo sapien
caagcccacgaaggtgaattttcag

SEQ ID NO: 3613706 - DNA, 25 bp, Homo sapien
tattcaaggtatacgcaatggaggg

SEQ ID NO: 3613707 - DNA, 25 bp, Homo sapien
gcattggcaatattcaaggtatacg

SEQ ID NO: 3613708 - DNA, 25 bp, Homo sapien
gagctgaacagtaaaacagcattgg

SEQ ID NO: 3613709 - DNA, 25 bp, Homo sapien
gctgaacagtaaaacagcattggca

SEQ ID NO: 3613710 - DNA, 25 bp, Homo sapien
cttcagcccagtggttgtctccagc

SEQ ID NO: 3613711 - DNA, 25 bp, Homo sapien
actccactcatcactcagcttcagc

SEQ ID NO: 3613712 - DNA, 25 bp, Homo sapien
agcccagtggttgtctccagctctg

SEQ ID NO: 3613713 - DNA, 25 bp, Homo sapien
cagcttcagcccagtggttgtctcc

SEQ ID NO: 3613714 - DNA, 25 bp, Homo sapien
ttcccaagtggtcgagactgctcag

SEQ ID NO: 3613715 - DNA, 25 bp, Homo sapien
caggtgccaggtacaggattacaca

SEQ ID NO: 3613716 - DNA, 25 bp, Homo sapien
ttttagggcctgagtgtctgaccac

SEQ ID NO: 3613717 - DNA, 25 bp, Homo sapien
aaataataactcaaggcaactggcc

SEQ ID NO: 3613718 - DNA, 25 bp, Homo sapien
tgaacgattggatgtgtaacaccgg

SEQ ID NO: 3613719 - DNA, 25 bp, Homo sapien
tacttcctcgaggagatactctaga

SEQ ID NO: 3613720 - DNA, 25 bp, Homo sapien
tagatcttagttcctcttagcagtg

SEQ ID NO: 3613721 - DNA, 25 bp, Homo sapien
tggatgtgtaacaccgggatcttca

SEQ ID NO: 3613722 - DNA, 25 bp, Homo sapien
ggttggtgcaggaccagaatctgcc

SEQ ID NO: 3613723 - DNA, 25 bp, Homo sapien
tggtgcaggaccagaatctgcccac

SEQ ID NO: 3613724 - DNA, 25 bp, Homo sapien
tctgcccaccctaggagccagcatc

SEQ ID NO: 3613725 - DNA, 25 bp, Homo sapien
cccaccctaggagccagcatctatg

SEQ ID NO: 3613726 - DNA, 25 bp, Homo sapien
taatgcctactcatgagacaagtgc

SEQ ID NO: 3613727 - DNA, 25 bp, Homo sapien
gagggttgggtcattgctcaatgta

SEQ ID NO: 3613728 - DNA, 25 bp, Homo sapien
tgctgggtgatgaaaacttataaca

SEQ ID NO: 3613729 - DNA, 25 bp, Homo sapien
tgccattccaacaaagctgagggtt

SEQ ID NO: 3613730 - DNA, 25 bp, Homo sapien
ctccaaatctgttctcccaagggtt

SEQ ID NO: 3613731 - DNA, 25 bp, Homo sapien
gactgcttcaaccatagagactcag

SEQ ID NO: 3613732 - DNA, 25 bp, Homo sapien
aatgtcttgggatggaccttggcca

SEQ ID NO: 3613733 - DNA, 25 bp, Homo sapien
tagggctcagaagatataagttaca

SEQ ID NO: 3613734 - DNA, 25 bp, Homo sapien
gttgtgagcaccgtcttacactgca

SEQ ID NO: 3613735 - DNA, 25 bp, Homo sapien
ggatggagtcttcccgcagagaaga

SEQ ID NO: 3613736 - DNA, 25 bp, Homo sapien
gcaatagctgagaacttcaacgcct

SEQ ID NO: 3613737 - DNA, 25 bp, Homo sapien
tgtttgaatcaagacacacgtctgc

SEQ ID NO: 3613738 - DNA, 25 bp, Homo sapien
aatatttgcccctgtgttcagtacc

SEQ ID NO: 3613739 - DNA, 25 bp, Homo sapien
gatgtaatacatgagccttggccaa

SEQ ID NO: 3613740 - DNA, 25 bp, Homo sapien
gagtgccaagaacacccttattgaa

SEQ ID NO: 3613741 - DNA, 25 bp, Homo sapien
acattcagccaacatgagtgccaag

SEQ ID NO: 3613742 - DNA, 25 bp, Homo sapien
tatatactagctgtctggtcttggg

SEQ ID NO: 3613743 - DNA, 25 bp, Homo sapien
tcttaccggtagaatgggcagaata

SEQ ID NO: 3613744 - DNA, 25 bp, Homo sapien
gcctgacacattgcaagagcttaat

SEQ ID NO: 3613745 - DNA, 25 bp, Homo sapien
aagttctcctgcgtgactctcagca

SEQ ID NO: 3613746 - DNA, 25 bp, Homo sapien
tgtcttgcctgaaaggacaatgatt

SEQ ID NO: 3613747 - DNA, 25 bp, Homo sapien
tgcctgccataacgatcatgtcttg

SEQ ID NO: 3613748 - DNA, 25 bp, Homo sapien
gtactgtcctctatccatttcaacg

SEQ ID NO: 3613749 - DNA, 25 bp, Homo sapien
gaggtcacgcaatgagttagtaaca

SEQ ID NO: 3613750 - DNA, 25 bp, Homo sapien
tactggagacacatactgagacact

SEQ ID NO: 3613751 - DNA, 25 bp, Homo sapien
tgaaattcaccacagcagaaaccgt

SEQ ID NO: 3613752 - DNA, 25 bp, Homo sapien
gaaaatagcgtatgcagtcctctac

SEQ ID NO: 3613753 - DNA, 25 bp, Homo sapien
cattgcagcagaaaccccgtaaaac

SEQ ID NO: 3613754 - DNA, 25 bp, Homo sapien
aatgctcatatggacactgaaggac

SEQ ID NO: 3613755 - DNA, 25 bp, Homo sapien
actgaaggacattgtattactgaac

SEQ ID NO: 3613756 - DNA, 25 bp, Homo sapien
tgaaatgctcatatggacactgaag

SEQ ID NO: 3613757 - DNA, 25 bp, Homo sapien
tgtattactgaactgatcggaaaag

SEQ ID NO: 3613758 - DNA, 25 bp, Homo sapien
gatccataaactttcaggttgtgac

SEQ ID NO: 3613759 - DNA, 25 bp, Homo sapien
agacaaggcctcaccgatccataaa

SEQ ID NO: 3613760 - DNA, 25 bp, Homo sapien
catgcttatgcggagacaaggcctc

SEQ ID NO: 3613761 - DNA, 25 bp, Homo sapien
ccagaaaacatgcttatgcggagac

SEQ ID NO: 3613762 - DNA, 25 bp, Homo sapien
ccctgaagctaaggggagacacaga

SEQ ID NO: 3613763 - DNA, 25 bp, Homo sapien
tctcccctgaagctaaggggagaca

SEQ ID NO: 3613764 - DNA, 25 bp, Homo sapien
cctgccatcggggtgcagtttcttt

SEQ ID NO: 3613765 - DNA, 25 bp, Homo sapien
ccatcggggtgcagtttcttttgtc

SEQ ID NO: 3613766 - DNA, 25 bp, Homo sapien
taaacgtgtgtggatgtgtctttgt

SEQ ID NO: 3613767 - DNA, 25 bp, Homo sapien
ataaacgtgtgtggatgtgtctttg

SEQ ID NO: 3613768 - DNA, 25 bp, Homo sapien
cctgccacctgatcattagccagtt

SEQ ID NO: 3613769 - DNA, 25 bp, Homo sapien
tgttggcatgaccacagaaacctgc

SEQ ID NO: 3613770 - DNA, 25 bp, Homo sapien
gagtttccctatcacctgcaggtta

SEQ ID NO: 3613771 - DNA, 25 bp, Homo sapien
agaaacctgccacctgatcattagc

SEQ ID NO: 3613772 - DNA, 25 bp, Homo sapien
tagctagaattctgcaagctccctg

SEQ ID NO: 3613773 - DNA, 25 bp, Homo sapien
gaagcgatgcccttcttatctttag

SEQ ID NO: 3613774 - DNA, 25 bp, Homo sapien
tgattggcctcccatttgaagcgat

SEQ ID NO: 3613775 - DNA, 25 bp, Homo sapien
gccttcctaatgctgcattgattgg

SEQ ID NO: 3613776 - DNA, 25 bp, Homo sapien
ttcagactggtcacatagcctgcgg

SEQ ID NO: 3613777 - DNA, 25 bp, Homo sapien
tgccacaatcctgaggctggcaccc

SEQ ID NO: 3613778 - DNA, 25 bp, Homo sapien
cctgcggacattggcaggtggcata

SEQ ID NO: 3613779 - DNA, 25 bp, Homo sapien
ccctcgaccagccagctgagactta

SEQ ID NO: 3613780 - DNA, 25 bp, Homo sapien
tcttgcagtggccttagagctaaag

SEQ ID NO: 3613781 - DNA, 25 bp, Homo sapien
tattgctagcaagaattagcagctc

SEQ ID NO: 3613782 - DNA, 25 bp, Homo sapien
gcttgttgtttgatttcaatgacaa

SEQ ID NO: 3613783 - DNA, 25 bp, Homo sapien
ctttgccaaacaggtcggtattgct

SEQ ID NO: 3613784 - DNA, 25 bp, Homo sapien
tcgcaagcttctgggcacgaagttc

SEQ ID NO: 3613785 - DNA, 25 bp, Homo sapien
catttcgcaagcttctgggcacgaa

SEQ ID NO: 3613786 - DNA, 25 bp, Homo sapien
gcacgaagttctctaatctcaggtc

SEQ ID NO: 3613787 - DNA, 25 bp, Homo sapien
cgaagttctctaatctcaggtcccc

SEQ ID NO: 3613788 - DNA, 25 bp, Homo sapien
ccattgcgaaagtgcgcgttctgga

SEQ ID NO: 3613789 - DNA, 25 bp, Homo sapien
gcgttctggaaacgtgctgcatctg

SEQ ID NO: 3613790 - DNA, 25 bp, Homo sapien
ccagagaggcgggacatatcagact

SEQ ID NO: 3613791 - DNA, 25 bp, Homo sapien
ctttggcgaacgtgctctgctgggc

SEQ ID NO: 3613792 - DNA, 25 bp, Homo sapien
cctacactgtttactgggtagggat

SEQ ID NO: 3613793 - DNA, 25 bp, Homo sapien
ctacactgtttactgggtagggatg

SEQ ID NO: 3613794 - DNA, 25 bp, Homo sapien
gacaaagcactagtgaaacgagaaa

SEQ ID NO: 3613795 - DNA, 25 bp, Homo sapien
gcactagtgaaacgagaaaggttcc

SEQ ID NO: 3613796 - DNA, 25 bp, Homo sapien
agcactagtgaaacgagaaaggttc

SEQ ID NO: 3613797 - DNA, 25 bp, Homo sapien
caaagcactagtgaaacgagaaagg

SEQ ID NO: 3613798 - DNA, 25 bp, Homo sapien
ccggtgtcggtgctttcaaggccag

SEQ ID NO: 3613799 - DNA, 25 bp, Homo sapien
aatctgggagaccaagcatgcttaa

SEQ ID NO: 3613800 - DNA, 25 bp, Homo sapien
cagtgtacaaagtgccagccaacat

SEQ ID NO: 3613801 - DNA, 25 bp, Homo sapien
gtttccatgaacaatgccctctaga

SEQ ID NO: 3613802 - DNA, 25 bp, Homo sapien
agagccctggacttgcaactgctta

SEQ ID NO: 3613803 - DNA, 25 bp, Homo sapien
tgcaactgcttacttttccgagctc

SEQ ID NO: 3613804 - DNA, 25 bp, Homo sapien
acttttccgagctctaatttcttca

SEQ ID NO: 3613805 - DNA, 25 bp, Homo sapien
gagccctggacttgcaactgcttac

SEQ ID NO: 3613806 - DNA, 25 bp, Homo sapien
acactcttttgtcctcgataccttc

SEQ ID NO: 3613807 - DNA, 25 bp, Homo sapien
tccacaactcactattccgttcttg

SEQ ID NO: 3613808 - DNA, 25 bp, Homo sapien
gatgcttttttaactattcccctgc

SEQ ID NO: 3613809 - DNA, 25 bp, Homo sapien
cactattccgttcttgatcttaaag

SEQ ID NO: 3613810 - DNA, 25 bp, Homo sapien
taccacaagatctcccttcagctta

SEQ ID NO: 3613811 - DNA, 25 bp, Homo sapien
cacaagatctcccttcagcttaatc

SEQ ID NO: 3613812 - DNA, 25 bp, Homo sapien
tttaccacaagatctcccttcagct

SEQ ID NO: 3613813 - DNA, 25 bp, Homo sapien
agatctcccttcagcttaatctctc

SEQ ID NO: 3613814 - DNA, 25 bp, Homo sapien
caattttagtatacgtgctgctgaa

SEQ ID NO: 3613815 - DNA, 25 bp, Homo sapien
catgctaatcttctctgtagtgttc

SEQ ID NO: 3613816 - DNA, 25 bp, Homo sapien
ttgtgtgtcatccttgcacaggggc

SEQ ID NO: 3613817 - DNA, 25 bp, Homo sapien
aaaaaacaaggaatgcttcacaaat

SEQ ID NO: 3613818 - DNA, 25 bp, Homo sapien
taaaatcttgggagccctgcaattc

SEQ ID NO: 3613819 - DNA, 25 bp, Homo sapien
attcggtttgcaagctgcaggtgcc

SEQ ID NO: 3613820 - DNA, 25 bp, Homo sapien
ggcagctctgcaggtaacttctggc

SEQ ID NO: 3613821 - DNA, 25 bp, Homo sapien
caggtaacttctggcgccgtctgct

SEQ ID NO: 3613822 - DNA, 25 bp, Homo sapien
ctgatcttccacagcgttgacttgt

SEQ ID NO: 3613823 - DNA, 25 bp, Homo sapien
ccacagcgttgacttgtgccaacat

SEQ ID NO: 3613824 - DNA, 25 bp, Homo sapien
gacttgtgccaacattacaatatct

SEQ ID NO: 3613825 - DNA, 25 bp, Homo sapien
gcgttgacttgtgccaacattacaa

SEQ ID NO: 3613826 - DNA, 25 bp, Homo sapien
cttctcctctagacttttagtgtct

SEQ ID NO: 3613827 - DNA, 25 bp, Homo sapien
ttctcctctagacttttagtgtctt

SEQ ID NO: 3613828 - DNA, 25 bp, Homo sapien
agggcaagctcagcaaacccgaaag

SEQ ID NO: 3613829 - DNA, 25 bp, Homo sapien
aaacacctgcaagacccggcagtgg

SEQ ID NO: 3613830 - DNA, 25 bp, Homo sapien
tctcttttgattagggcccaggaga

SEQ ID NO: 3613831 - DNA, 25 bp, Homo sapien
cattaatttcttgtcccagggcaag

SEQ ID NO: 3613832 - DNA, 25 bp, Homo sapien
caagccggttagatgcatactggtc

SEQ ID NO: 3613833 - DNA, 25 bp, Homo sapien
tcttatgagaggcaacaagccggtt

SEQ ID NO: 3613834 - DNA, 25 bp, Homo sapien
tactggtcaacctcatctggagtgt

SEQ ID NO: 3613835 - DNA, 25 bp, Homo sapien
gatcaatcctctcaactgatgaaag

SEQ ID NO: 3613836 - DNA, 25 bp, Homo sapien
agatcattatccttccgcatggcct

SEQ ID NO: 3613837 - DNA, 25 bp, Homo sapien
tggatgtggtactgttgccacttgc

SEQ ID NO: 3613838 - DNA, 25 bp, Homo sapien
ggccttctcaatgtacttcagatca

SEQ ID NO: 3613839 - DNA, 25 bp, Homo sapien
cttcagatcattatccttccgcatg

SEQ ID NO: 3613840 - DNA, 25 bp, Homo sapien
gcaagaccttggcattagtccctgc

SEQ ID NO: 3613841 - DNA, 25 bp, Homo sapien
cccacactgcagtaatatggatcct

SEQ ID NO: 3613842 - DNA, 25 bp, Homo sapien
cagcttgttagggtccttatggaag

SEQ ID NO: 3613843 - DNA, 25 bp, Homo sapien
ggtcccgggaagccattgaaggcca

SEQ ID NO: 3613844 - DNA, 25 bp, Homo sapien
aggccccgtaatgggcctccacgat

SEQ ID NO: 3613845 - DNA, 25 bp, Homo sapien
ctgtaaaagtactagagccatcgaa

SEQ ID NO: 3613846 - DNA, 25 bp, Homo sapien
gagccatcgaaattcccctcaggca

SEQ ID NO: 3613847 - DNA, 25 bp, Homo sapien
gaaattcccctcaggcaactgttcc

SEQ ID NO: 3613848 - DNA, 25 bp, Homo sapien
tactagagccatcgaaattcccctc

SEQ ID NO: 3613849 - DNA, 25 bp, Homo sapien
gatatacatggcctggactttgtca

SEQ ID NO: 3613850 - DNA, 25 bp, Homo sapien
aggatccgggtcttgcagcacagtc

SEQ ID NO: 3613851 - DNA, 25 bp, Homo sapien
tctccagtaccatcgatccagatat

SEQ ID NO: 3613852 - DNA, 25 bp, Homo sapien
ggctcactgtccaggatccgggtct

SEQ ID NO: 3613853 - DNA, 25 bp, Homo sapien
catgcacacctgcttgatgcttgat

SEQ ID NO: 3613854 - DNA, 25 bp, Homo sapien
aaagtagtccgtgagaacgaggtga

SEQ ID NO: 3613855 - DNA, 25 bp, Homo sapien
gtgttctgggcgtcgagcaggcggg

SEQ ID NO: 3613856 - DNA, 25 bp, Homo sapien
aggctgctgtactgctcacacactc

SEQ ID NO: 3613857 - DNA, 25 bp, Homo sapien
gaggcgtcagagcacacactgggag

SEQ ID NO: 3613858 - DNA, 25 bp, Homo sapien
ctggccgacctctccgtttaatggg

SEQ ID NO: 3613859 - DNA, 25 bp, Homo sapien
cttgcacgtggtggagcatgccgcc

SEQ ID NO: 3613860 - DNA, 25 bp, Homo sapien
tggtcacgcagtacatcttgcacgt

SEQ ID NO: 3613861 - DNA, 25 bp, Homo sapien
gccacagccgggactcccgtgatgg

SEQ ID NO: 3613862 - DNA, 25 bp, Homo sapien
aacgccatgcaggaccagagcgcca

SEQ ID NO: 3613863 - DNA, 25 bp, Homo sapien
agaacgccatgcaggaccagagcgc

SEQ ID NO: 3613864 - DNA, 25 bp, Homo sapien
tacccagaacgccatgcaggaccag

SEQ ID NO: 3613865 - DNA, 25 bp, Homo sapien
gggcatgatggacagggatcacaag

SEQ ID NO: 3613866 - DNA, 25 bp, Homo sapien
gggggcatgatggacagggatcaca

SEQ ID NO: 3613867 - DNA, 25 bp, Homo sapien
gagaagcatgtccggtcactccggg

SEQ ID NO: 3613868 - DNA, 25 bp, Homo sapien
gtcactccgggcctggccacatgat

SEQ ID NO: 3613869 - DNA, 25 bp, Homo sapien
tcggaggcccgagcagggggagcag

SEQ ID NO: 3613870 - DNA, 25 bp, Homo sapien
aggcgggttcggaggcccgagcagg

SEQ ID NO: 3613871 - DNA, 25 bp, Homo sapien
acggtggtatgcaaggcgggttcgg

SEQ ID NO: 3613872 - DNA, 25 bp, Homo sapien
ggtggtatgcaaggcgggttcggag

SEQ ID NO: 3613873 - DNA, 25 bp, Homo sapien
gagctatatgtttttgcatagacac

SEQ ID NO: 3613874 - DNA, 25 bp, Homo sapien
ggtgcagcagttgtgttgagctata

SEQ ID NO: 3613875 - DNA, 25 bp, Homo sapien
tacgattttcctctcggtgcagcag

SEQ ID NO: 3613876 - DNA, 25 bp, Homo sapien
tccaaaatagttgttgcactgtgat

SEQ ID NO: 3613877 - DNA, 25 bp, Homo sapien
ttccctggcgatggctggccgctga

SEQ ID NO: 3613878 - DNA, 25 bp, Homo sapien
tcaagcatggatcggcgctggacgt

SEQ ID NO: 3613879 - DNA, 25 bp, Homo sapien
aggaagcgtcagagtcccgacactg

SEQ ID NO: 3613880 - DNA, 25 bp, Homo sapien
ctgcgagagaggagctgtacagcaa

SEQ ID NO: 3613881 - DNA, 25 bp, Homo sapien
taggtggctgcatcgaaatgaggca

SEQ ID NO: 3613882 - DNA, 25 bp, Homo sapien
tagtctcagtcacccatccatgagg

SEQ ID NO: 3613883 - DNA, 25 bp, Homo sapien
caaagctaacctgtccgtaggccat

SEQ ID NO: 3613884 - DNA, 25 bp, Homo sapien
catgcgtggccgagtcagctttcta

SEQ ID NO: 3613885 - DNA, 25 bp, Homo sapien
cagtttgcagcggaccatcttggaa

SEQ ID NO: 3613886 - DNA, 25 bp, Homo sapien
tcaaagctgcaaggagcacctctga

SEQ ID NO: 3613887 - DNA, 25 bp, Homo sapien
ggaaggagatagacgcatacacagt

SEQ ID NO: 3613888 - DNA, 25 bp, Homo sapien
taaacaggatgtaatcctggcccca

SEQ ID NO: 3613889 - DNA, 25 bp, Homo sapien
tccacaaaatagtcagtcatgggga

SEQ ID NO: 3613890 - DNA, 25 bp, Homo sapien
gatggtccagcaggcactgccacca

SEQ ID NO: 3613891 - DNA, 25 bp, Homo sapien
acaaaatagtcagtcatggggaggg

SEQ ID NO: 3613892 - DNA, 25 bp, Homo sapien
ggagctgattgacccttgtgctcca

SEQ ID NO: 3613893 - DNA, 25 bp, Homo sapien
tctacatacatagccccaactctgg

SEQ ID NO: 3613894 - DNA, 25 bp, Homo sapien
ccacccaaaatttctacatacatag

SEQ ID NO: 3613895 - DNA, 25 bp, Homo sapien
aatccacccaaaatttctacataca

SEQ ID NO: 3613896 - DNA, 25 bp, Homo sapien
caaaatttctacatacatagcccca

SEQ ID NO: 3613897 - DNA, 25 bp, Homo sapien
ctagccagattcctcagtcaaacag

SEQ ID NO: 3613898 - DNA, 25 bp, Homo sapien
aggaacagtgctcacagaggaaatg

SEQ ID NO: 3613899 - DNA, 25 bp, Homo sapien
aaatcacgtgtgtagtaggtcctcg

SEQ ID NO: 3613900 - DNA, 25 bp, Homo sapien
gaacagtccactctgaaatcacgtg

SEQ ID NO: 3613901 - DNA, 25 bp, Homo sapien
tgagaatataagtcccagacaagcc

SEQ ID NO: 3613902 - DNA, 25 bp, Homo sapien
caaagaaagccgagtcctgggaagt

SEQ ID NO: 3613903 - DNA, 25 bp, Homo sapien
gacaagtcatctgttgccatcacac

SEQ ID NO: 3613904 - DNA, 25 bp, Homo sapien
gctggtagaagcctgttaggttact

SEQ ID NO: 3613905 - DNA, 25 bp, Homo sapien
ggtaataggcacaggttcatatgca

SEQ ID NO: 3613906 - DNA, 25 bp, Homo sapien
catcacacaactgcatggtcagcgt

SEQ ID NO: 3613907 - DNA, 25 bp, Homo sapien
tcaggtagcctctgtgacatctcag

SEQ ID NO: 3613908 - DNA, 25 bp, Homo sapien
gcatcccttgccaatatcttctggc

SEQ ID NO: 3613909 - DNA, 25 bp, Homo sapien
tgtgacatctcagcggcctcaaaga

SEQ ID NO: 3613910 - DNA, 25 bp, Homo sapien
ctgaagttcaggtagcctctgtgac

SEQ ID NO: 3613911 - DNA, 25 bp, Homo sapien
tgttgccttatttcacatcggttgt

SEQ ID NO: 3613912 - DNA, 25 bp, Homo sapien
tgtgcgctgctagtggaagaggatt

SEQ ID NO: 3613913 - DNA, 25 bp, Homo sapien
ttgtgaatgcctcggttgtgggaat

SEQ ID NO: 3613914 - DNA, 25 bp, Homo sapien
aagaggattctccttagggtacagc

SEQ ID NO: 3613915 - DNA, 25 bp, Homo sapien
cacccagttgtgttgtgtgcttaca

SEQ ID NO: 3613916 - DNA, 25 bp, Homo sapien
caggtggtatcaggtggcccatgca

SEQ ID NO: 3613917 - DNA, 25 bp, Homo sapien
gaggcccagtcataaggtcgactag

SEQ ID NO: 3613918 - DNA, 25 bp, Homo sapien
tgaggctaagcgatgcatccattca

SEQ ID NO: 3613919 - DNA, 25 bp, Homo sapien
gtttggaccttcagttacacagtgc

SEQ ID NO: 3613920 - DNA, 25 bp, Homo sapien
cattgtgatcctcttagtgccttgg

SEQ ID NO: 3613921 - DNA, 25 bp, Homo sapien
tttcatttagagctacgggtggtag

SEQ ID NO: 3613922 - DNA, 25 bp, Homo sapien
cactccctggaggtctaatgatgct

SEQ ID NO: 3613923 - DNA, 25 bp, Homo sapien
tccatggtgacgcagaggtctgttg

SEQ ID NO: 3613924 - DNA, 25 bp, Homo sapien
cattggcatacggtcctgtagcatc

SEQ ID NO: 3613925 - DNA, 25 bp, Homo sapien
tgtagcatcacttgttagcccactg

SEQ ID NO: 3613926 - DNA, 25 bp, Homo sapien
cagggtcctcgcttgcattggcata

SEQ ID NO: 3613927 - DNA, 25 bp, Homo sapien
ttatttacgggctgagtccttggct

SEQ ID NO: 3613928 - DNA, 25 bp, Homo sapien
gagtccttggcttgaaacctgccag

SEQ ID NO: 3613929 - DNA, 25 bp, Homo sapien
ggcttgaaacctgccagttgaacag

SEQ ID NO: 3613930 - DNA, 25 bp, Homo sapien
atttacgggctgagtccttggcttg

SEQ ID NO: 3613931 - DNA, 25 bp, Homo sapien
tcatatggagcatctgaatcacagt

SEQ ID NO: 3613932 - DNA, 25 bp, Homo sapien
ggtgtcatatggagcatctgaatca

SEQ ID NO: 3613933 - DNA, 25 bp, Homo sapien
tggtgtcatatggagcatctgaatc

SEQ ID NO: 3613934 - DNA, 25 bp, Homo sapien
tgtcatatggagcatctgaatcaca

SEQ ID NO: 3613935 - DNA, 25 bp, Homo sapien
ttctcagcattgaaaacaccttctg

SEQ ID NO: 3613936 - DNA, 25 bp, Homo sapien
tctcagcattgaaaacaccttctgc

SEQ ID NO: 3613937 - DNA, 25 bp, Homo sapien
ctggaagaagttcacatttctcagc

SEQ ID NO: 3613938 - DNA, 25 bp, Homo sapien
cagcattgaaaacaccttctgctct

SEQ ID NO: 3613939 - DNA, 25 bp, Homo sapien
ctctgttgaagatggccttacaaaa

SEQ ID NO: 3613940 - DNA, 25 bp, Homo sapien
gccgtgagtaggagagtagtttcca

SEQ ID NO: 3613941 - DNA, 25 bp, Homo sapien
tcagccgtgagtaggagagtagttt

SEQ ID NO: 3613942 - DNA, 25 bp, Homo sapien
tacaaaaggctacgcgggtcagccg

SEQ ID NO: 3613943 - DNA, 25 bp, Homo sapien
ctcatgtagttaatagggaggctgg

SEQ ID NO: 3613944 - DNA, 25 bp, Homo sapien
aatggctgccaatggatttgctgac

SEQ ID NO: 3613945 - DNA, 25 bp, Homo sapien
catgtagttaatagggaggctgggg

SEQ ID NO: 3613946 - DNA, 25 bp, Homo sapien
gaaagaaaatggctgccaatggatt

SEQ ID NO: 3613947 - DNA, 25 bp, Homo sapien
tgctctgactaaatcaatccgcagc

SEQ ID NO: 3613948 - DNA, 25 bp, Homo sapien
gttcaactttatcacaggacttcgt

SEQ ID NO: 3613949 - DNA, 25 bp, Homo sapien
ggacttcgttccacccttgctctga

SEQ ID NO: 3613950 - DNA, 25 bp, Homo sapien
gatgcccttcttttgtgaggcgttg

SEQ ID NO: 3613951 - DNA, 25 bp, Homo sapien
tttggagactcagtgtccaaaggaa

SEQ ID NO: 3613952 - DNA, 25 bp, Homo sapien
ttggagactcagtgtccaaaggaaa

SEQ ID NO: 3613953 - DNA, 25 bp, Homo sapien
aggaaaggaattaagagcaggttct

SEQ ID NO: 3613954 - DNA, 25 bp, Homo sapien
caaaggaaaggaattaagagcaggt

SEQ ID NO: 3613955 - DNA, 25 bp, Homo sapien
gaagttacatcaactgtgataatag

SEQ ID NO: 3613956 - DNA, 25 bp, Homo sapien
tacatcaactgtgataatagatctg

SEQ ID NO: 3613957 - DNA, 25 bp, Homo sapien
caactgtgataatagatctgtagat

SEQ ID NO: 3613958 - DNA, 25 bp, Homo sapien
tgataatagatctgtagatgcaaaa

SEQ ID NO: 3613959 - DNA, 25 bp, Homo sapien
cagttgtagcgctgctgtcagtgtc

SEQ ID NO: 3613960 - DNA, 25 bp, Homo sapien
ttcaaaacagttgtagcgctgctgt

SEQ ID NO: 3613961 - DNA, 25 bp, Homo sapien
cagtgtctgttaagaatgaggtggt

SEQ ID NO: 3613962 - DNA, 25 bp, Homo sapien
gcattgctgccatcaaaagttgcct

SEQ ID NO: 3613963 - DNA, 25 bp, Homo sapien
cagaaaaactgcacggtagtagcag

SEQ ID NO: 3613964 - DNA, 25 bp, Homo sapien
tttcctgatcgtgatgcagtgtccc

SEQ ID NO: 3613965 - DNA, 25 bp, Homo sapien
ccagtattggattagaggcagcagg

SEQ ID NO: 3613966 - DNA, 25 bp, Homo sapien
gacgaggaggtggaatttcctgatc

SEQ ID NO: 3613967 - DNA, 25 bp, Homo sapien
caggtgccttctggctgaccccaag

SEQ ID NO: 3613968 - DNA, 25 bp, Homo sapien
ggtgccttctggctgaccccaagtt

SEQ ID NO: 3613969 - DNA, 25 bp, Homo sapien
tgccttctggctgaccccaagtttc

SEQ ID NO: 3613970 - DNA, 25 bp, Homo sapien
tgaccccaagtttctcgttgttctc

SEQ ID NO: 3613971 - DNA, 25 bp, Homo sapien
catttttcttgtccctttctttcat

SEQ ID NO: 3613972 - DNA, 25 bp, Homo sapien
ttcattactctctccttgtcttttc

SEQ ID NO: 3613973 - DNA, 25 bp, Homo sapien
ctctctccttgtcttttccccttcg

SEQ ID NO: 3613974 - DNA, 25 bp, Homo sapien
ttcttgtccctttctttcattactc

SEQ ID NO: 3613975 - DNA, 25 bp, Homo sapien
caaaaggccaaattcatctgttctt

SEQ ID NO: 3613976 - DNA, 25 bp, Homo sapien
cagcaaaaggccaaattcatctgtt

SEQ ID NO: 3613977 - DNA, 25 bp, Homo sapien
aaaggccaaattcatctgttcttcc

SEQ ID NO: 3613978 - DNA, 25 bp, Homo sapien
gcaaaaggccaaattcatctgttct

SEQ ID NO: 3613979 - DNA, 25 bp, Homo sapien
cccatcgttctgtaggtgcagtagc

SEQ ID NO: 3613980 - DNA, 25 bp, Homo sapien
tagcgacattatactccctctccat

SEQ ID NO: 3613981 - DNA, 25 bp, Homo sapien
tggagaagagcccttccggtgtctg

SEQ ID NO: 3613982 - DNA, 25 bp, Homo sapien
tccggtgtctggtctccccatcgtt

SEQ ID NO: 3613983 - DNA, 25 bp, Homo sapien
agatgggtaatataccgacatcgta

SEQ ID NO: 3613984 - DNA, 25 bp, Homo sapien
ggtaatataccgacatcgtaacaag

SEQ ID NO: 3613985 - DNA, 25 bp, Homo sapien
gggtaatataccgacatcgtaacaa

SEQ ID NO: 3613986 - DNA, 25 bp, Homo sapien
atgggtaatataccgacatcgtaac

SEQ ID NO: 3613987 - DNA, 25 bp, Homo sapien
ttggcaatgcggaactcagttctgg

SEQ ID NO: 3613988 - DNA, 25 bp, Homo sapien
aaggctgttttctctcagacgtgga

SEQ ID NO: 3613989 - DNA, 25 bp, Homo sapien
cctggaagtcttttcttgaggcagt

SEQ ID NO: 3613990 - DNA, 25 bp, Homo sapien
ttttgttttgctgggacgcttcctg

SEQ ID NO: 3613991 - DNA, 25 bp, Homo sapien
tggacagtggctctctgactaggac

SEQ ID NO: 3613992 - DNA, 25 bp, Homo sapien
actaggactgcggagtgagtactcc

SEQ ID NO: 3613993 - DNA, 25 bp, Homo sapien
gctgagatgccacgcggttcttgtt

SEQ ID NO: 3613994 - DNA, 25 bp, Homo sapien
tcagtgacctaaatcctgggaggac

SEQ ID NO: 3613995 - DNA, 25 bp, Homo sapien
ggaatactagcaattaaagtgcctg

SEQ ID NO: 3613996 - DNA, 25 bp, Homo sapien
ggcatccttagcatgtagaagctgg

SEQ ID NO: 3613997 - DNA, 25 bp, Homo sapien
tacccggagagaatgagtagaatgt

SEQ ID NO: 3613998 - DNA, 25 bp, Homo sapien
tcctaatgggaaatgccgttgagag

SEQ ID NO: 3613999 - DNA, 25 bp, Homo sapien
caagcctgaaatcctcgcgggtctc

SEQ ID NO: 3614000 - DNA, 25 bp, Homo sapien
ggaactgcgtgagtgatcgaatact

SEQ ID NO: 3614001 - DNA, 25 bp, Homo sapien
tgatcgaatactccaagcctgaaat

SEQ ID NO: 3614002 - DNA, 25 bp, Homo sapien
tgcgtgagtgatcgaatactccaag

SEQ ID NO: 3614003 - DNA, 25 bp, Homo sapien
gacatttgcgttatgaggccccgtg

SEQ ID NO: 3614004 - DNA, 25 bp, Homo sapien
acagacctgtaagcagcaaggcatc

SEQ ID NO: 3614005 - DNA, 25 bp, Homo sapien
agccaggccccagaaacgtgaactt

SEQ ID NO: 3614006 - DNA, 25 bp, Homo sapien
cccgtgatgctttgcttgggagagc

SEQ ID NO: 3614007 - DNA, 25 bp, Homo sapien
aaaaggagaccatggtctgctacag

SEQ ID NO: 3614008 - DNA, 25 bp, Homo sapien
tctgctacagaagtgctagcctggc

SEQ ID NO: 3614009 - DNA, 25 bp, Homo sapien
tatgggtcccggctgttaaatatgt

SEQ ID NO: 3614010 - DNA, 25 bp, Homo sapien
ctagcctggcggaaaaagccagtct

SEQ ID NO: 3614011 - DNA, 25 bp, Homo sapien
agtttttgctgtggccgttctgagg

SEQ ID NO: 3614012 - DNA, 25 bp, Homo sapien
ttgccatcagtttttgctgtggccg

SEQ ID NO: 3614013 - DNA, 25 bp, Homo sapien
tcagcgtccttgttgccatcagttt

SEQ ID NO: 3614014 - DNA, 25 bp, Homo sapien
tctcctttcagcgtccttgttgcca

SEQ ID NO: 3614015 - DNA, 25 bp, Homo sapien
atggccaagacagtccacgacagct

SEQ ID NO: 3614016 - DNA, 25 bp, Homo sapien
ggctacgcctacatggagaatgttt

SEQ ID NO: 3614017 - DNA, 25 bp, Homo sapien
aagacagtccacgacagctttatgt

SEQ ID NO: 3614018 - DNA, 25 bp, Homo sapien
ctcaactttggctacgcctacatgg

SEQ ID NO: 3614019 - DNA, 25 bp, Homo sapien
acacatagcagtatgtgcatcatca

SEQ ID NO: 3614020 - DNA, 25 bp, Homo sapien
tacacatagcagtatgtgcatcatc

SEQ ID NO: 3614021 - DNA, 25 bp, Homo sapien
ctacacatagcagtatgtgcatcat

SEQ ID NO: 3614022 - DNA, 25 bp, Homo sapien
gatgccaatgcccagagagattttc

SEQ ID NO: 3614023 - DNA, 25 bp, Homo sapien
ttttatagatgagatgccaatgccc

SEQ ID NO: 3614024 - DNA, 25 bp, Homo sapien
gctcctggccaaggtaatcattctt

SEQ ID NO: 3614025 - DNA, 25 bp, Homo sapien
aagtgatatgccggctttggcttcc

SEQ ID NO: 3614026 - DNA, 25 bp, Homo sapien
gccttttggcttatagccttctgtg

SEQ ID NO: 3614027 - DNA, 25 bp, Homo sapien
gcccatgcagaaggctccggtaacc

SEQ ID NO: 3614028 - DNA, 25 bp, Homo sapien
tctatcttatggaaagcgaggatca

SEQ ID NO: 3614029 - DNA, 25 bp, Homo sapien
ggtaacccacatagcagttggcctt

SEQ ID NO: 3614030 - DNA, 25 bp, Homo sapien
gctggtctgacaccgaggagctttg

SEQ ID NO: 3614031 - DNA, 25 bp, Homo sapien
ggttgtaccaaagcggctctcagcc

SEQ ID NO: 3614032 - DNA, 25 bp, Homo sapien
ctctctgctcctgggttgtaccaaa

SEQ ID NO: 3614033 - DNA, 25 bp, Homo sapien
tggccacatggagtgctggtctgac

SEQ ID NO: 3614034 - DNA, 25 bp, Homo sapien
cccattaccacggaaggcactgaac

SEQ ID NO: 3614035 - DNA, 25 bp, Homo sapien
ctctccccattaccacggaaggcac

SEQ ID NO: 3614036 - DNA, 25 bp, Homo sapien
cattaccacggaaggcactgaacac

SEQ ID NO: 3614037 - DNA, 25 bp, Homo sapien
tccccattaccacggaaggcactga

SEQ ID NO: 3614038 - DNA, 25 bp, Homo sapien
cctctttcacattactgatggttct

SEQ ID NO: 3614039 - DNA, 25 bp, Homo sapien
cagtgtctggttcctaaatgtcagg

SEQ ID NO: 3614040 - DNA, 25 bp, Homo sapien
ctagcttctatcaaaggctgtggtg

SEQ ID NO: 3614041 - DNA, 25 bp, Homo sapien
tctggttcctaaatgtcagggaagg

SEQ ID NO: 3614042 - DNA, 25 bp, Homo sapien
cctggatttcggtctccctggataa

SEQ ID NO: 3614043 - DNA, 25 bp, Homo sapien
gtatttcctttggtagaatctgacc

SEQ ID NO: 3614044 - DNA, 25 bp, Homo sapien
gagtttttgccatgacggtatttcc

SEQ ID NO: 3614045 - DNA, 25 bp, Homo sapien
ggtttgactgcgcaggagtttttgc

SEQ ID NO: 3614046 - DNA, 25 bp, Homo sapien
gagtaaaggcttcagggatagcgct

SEQ ID NO: 3614047 - DNA, 25 bp, Homo sapien
tgatgttactactctgccaactggg

SEQ ID NO: 3614048 - DNA, 25 bp, Homo sapien
gatagcgctagtgacttgatccgag

SEQ ID NO: 3614049 - DNA, 25 bp, Homo sapien
tgatccgaggatctgcgaggaagaa

SEQ ID NO: 3614050 - DNA, 25 bp, Homo sapien
tcctgatcaaatctaaactcccctg

SEQ ID NO: 3614051 - DNA, 25 bp, Homo sapien
tgcctggctcccaacaatctgcgtc

SEQ ID NO: 3614052 - DNA, 25 bp, Homo sapien
agaagacaacagtgggaaatgttgc

SEQ ID NO: 3614053 - DNA, 25 bp, Homo sapien
gaagacaacagtgggaaatgttgct

SEQ ID NO: 3614054 - DNA, 25 bp, Homo sapien
agcagaggccattaaccccacctaa

SEQ ID NO: 3614055 - DNA, 25 bp, Homo sapien
tccctttctctgattagctttataa

SEQ ID NO: 3614056 - DNA, 25 bp, Homo sapien
agcaggcttgctatcccattgattg

SEQ ID NO: 3614057 - DNA, 25 bp, Homo sapien
cactggacaacagctgaaagcagag

SEQ ID NO: 3614058 - DNA, 25 bp, Homo sapien
gaattgcgtggatcttattggccac

SEQ ID NO: 3614059 - DNA, 25 bp, Homo sapien
cgtggatcttattggccactggtag

SEQ ID NO: 3614060 - DNA, 25 bp, Homo sapien
ttgatgaaaggtgggactgaattgc

SEQ ID NO: 3614061 - DNA, 25 bp, Homo sapien
gtgggactgaattgcgtggatctta

SEQ ID NO: 3614062 - DNA, 25 bp, Homo sapien
gtattaatcacccagcgtggctggt

SEQ ID NO: 3614063 - DNA, 25 bp, Homo sapien
ctgaggtatgcagtctcctgtatta

SEQ ID NO: 3614064 - DNA, 25 bp, Homo sapien
agcgtggctggtgcactgcagaaaa

SEQ ID NO: 3614065 - DNA, 25 bp, Homo sapien
tgcagtctcctgtattaatcaccca

SEQ ID NO: 3614066 - DNA, 25 bp, Homo sapien
caaagcacttttggatactcaggag

SEQ ID NO: 3614067 - DNA, 25 bp, Homo sapien
ttttctctagagcagctggcccttc

SEQ ID NO: 3614068 - DNA, 25 bp, Homo sapien
taaccatgttgtagcctaacgtgct

SEQ ID NO: 3614069 - DNA, 25 bp, Homo sapien
gctggctgaagatacccgcttaagg

SEQ ID NO: 3614070 - DNA, 25 bp, Homo sapien
ctttccctgctgaccgtgtccgatt

SEQ ID NO: 3614071 - DNA, 25 bp, Homo sapien
gtgctttccctgctgaccgtgtccg

SEQ ID NO: 3614072 - DNA, 25 bp, Homo sapien
cacgtgctttccctgctgaccgtgt

SEQ ID NO: 3614073 - DNA, 25 bp, Homo sapien
aaacacacgtgctttccctgctgac

SEQ ID NO: 3614074 - DNA, 25 bp, Homo sapien
ttattacggccgtttgcagcctccg

SEQ ID NO: 3614075 - DNA, 25 bp, Homo sapien
acgcgggatcctaggtcgggtcctg

SEQ ID NO: 3614076 - DNA, 25 bp, Homo sapien
gatttgtagcagttcctcgcgtatt

SEQ ID NO: 3614077 - DNA, 25 bp, Homo sapien
ggctctgccccgatgtcgttattac

SEQ ID NO: 3614078 - DNA, 25 bp, Homo sapien
gcagcttccggcctgtttcaaacca

SEQ ID NO: 3614079 - DNA, 25 bp, Homo sapien
acgccccttgtgacaggccttgttc

SEQ ID NO: 3614080 - DNA, 25 bp, Homo sapien
aaccgaacgcctcccctgggcagct

SEQ ID NO: 3614081 - DNA, 25 bp, Homo sapien
ctggacctccaaacgccccttgtga

SEQ ID NO: 3614082 - DNA, 25 bp, Homo sapien
tacttggcccattcaaagctagtag

SEQ ID NO: 3614083 - DNA, 25 bp, Homo sapien
ctgacttgcctatctcacaggattg

SEQ ID NO: 3614084 - DNA, 25 bp, Homo sapien
ggctcactttttctcgtctgtcaaa

SEQ ID NO: 3614085 - DNA, 25 bp, Homo sapien
cctctcagggcttgtatgatcatat

SEQ ID NO: 3614086 - DNA, 25 bp, Homo sapien
tgtgggacgggggaggagtctcgct

SEQ ID NO: 3614087 - DNA, 25 bp, Homo sapien
agaatagtgactggctccttataaa

SEQ ID NO: 3614088 - DNA, 25 bp, Homo sapien
ccttataaattatatcgtgttagtt

SEQ ID NO: 3614089 - DNA, 25 bp, Homo sapien
gtttagaatagtgactggctcctta

SEQ ID NO: 3614090 - DNA, 25 bp, Homo sapien
ctttacttgcccagggatctcactg

SEQ ID NO: 3614091 - DNA, 25 bp, Homo sapien
ctcactggggtgattcagccactgt

SEQ ID NO: 3614092 - DNA, 25 bp, Homo sapien
cattttctcgatttgattggtatta

SEQ ID NO: 3614093 - DNA, 25 bp, Homo sapien
taatgtagaagtatgctttacttgc

SEQ ID NO: 3614094 - DNA, 25 bp, Homo sapien
gatctatgaaagagttcaacttcct

SEQ ID NO: 3614095 - DNA, 25 bp, Homo sapien
tcccaggctccagacgacagtttct

SEQ ID NO: 3614096 - DNA, 25 bp, Homo sapien
ttctcctccaagatagagttgattt

SEQ ID NO: 3614097 - DNA, 25 bp, Homo sapien
agtcagggaatcagcatcctcatgg

SEQ ID NO: 3614098 - DNA, 25 bp, Homo sapien
agaactaagggcctaggacagatgc

SEQ ID NO: 3614099 - DNA, 25 bp, Homo sapien
accgcgagcattccatgtgtagaaa

SEQ ID NO: 3614100 - DNA, 25 bp, Homo sapien
taatagtttgaccttaacgcaccag

SEQ ID NO: 3614101 - DNA, 25 bp, Homo sapien
tgggtcccctgagtatgtattgagc

SEQ ID NO: 3614102 - DNA, 25 bp, Homo sapien
ggctcacccagataatggagcagca

SEQ ID NO: 3614103 - DNA, 25 bp, Homo sapien
gacggttagagcttctccagattca

SEQ ID NO: 3614104 - DNA, 25 bp, Homo sapien
ttggtgcagctgaccgacgtgcagc

SEQ ID NO: 3614105 - DNA, 25 bp, Homo sapien
tctgacagccagacggttagagctt

SEQ ID NO: 3614106 - DNA, 25 bp, Homo sapien
cactctgtcccttcatatcgaggtg

SEQ ID NO: 3614107 - DNA, 25 bp, Homo sapien
tcatccatcctgtaaagggatcagc

SEQ ID NO: 3614108 - DNA, 25 bp, Homo sapien
tcagcagcacttggagatcaccctt

SEQ ID NO: 3614109 - DNA, 25 bp, Homo sapien
ggtgtaatactagaccctggctctg

SEQ ID NO: 3614110 - DNA, 25 bp, Homo sapien
cagtataatcaaggtttggacaaaa

SEQ ID NO: 3614111 - DNA, 25 bp, Homo sapien
tacccagtataatcaaggtttggac

SEQ ID NO: 3614112 - DNA, 25 bp, Homo sapien
aaaaagagcaatcttgtggctccat

SEQ ID NO: 3614113 - DNA, 25 bp, Homo sapien
aatcaaggtttggacaaaaagagca

SEQ ID NO: 3614114 - DNA, 25 bp, Homo sapien
aaaactgtgccatagttggcgtggc

SEQ ID NO: 3614115 - DNA, 25 bp, Homo sapien
atcctttatcactatcactcactca

SEQ ID NO: 3614116 - DNA, 25 bp, Homo sapien
tgtttgccatcaattacagggaatt

SEQ ID NO: 3614117 - DNA, 25 bp, Homo sapien
agaactttgctattcgattgtttgc

SEQ ID NO: 3614118 - DNA, 25 bp, Homo sapien
cactcagtcctactaattcttttcc

SEQ ID NO: 3614119 - DNA, 25 bp, Homo sapien
gaacccgagggtcaggattccactc

SEQ ID NO: 3614120 - DNA, 25 bp, Homo sapien
attccactcagtcctactaattctt

SEQ ID NO: 3614121 - DNA, 25 bp, Homo sapien
acccgagggtcaggattccactcag

SEQ ID NO: 3614122 - DNA, 25 bp, Homo sapien
ggagaacgcggtggcaaaccattcc

SEQ ID NO: 3614123 - DNA, 25 bp, Homo sapien
cgtacgcgtaggagaacgcggtggc

SEQ ID NO: 3614124 - DNA, 25 bp, Homo sapien
aaccattcctggaaacgcgtgatca

SEQ ID NO: 3614125 - DNA, 25 bp, Homo sapien
tggaaacgcgtgatcattcccagtt

SEQ ID NO: 3614126 - DNA, 25 bp, Homo sapien
tccccaaacaggtgcacgcccggaa

SEQ ID NO: 3614127 - DNA, 25 bp, Homo sapien
ggtgcacgcccggaacgcctttagc

SEQ ID NO: 3614128 - DNA, 25 bp, Homo sapien
tgaatatttccacacacaacccgag

SEQ ID NO: 3614129 - DNA, 25 bp, Homo sapien
ccttaaccctttggccttcatcttg

SEQ ID NO: 3614130 - DNA, 25 bp, Homo sapien
tgcgggacaggagcgcaacaagttc

SEQ ID NO: 3614131 - DNA, 25 bp, Homo sapien
caagttcgggaagcagaaattgctc

SEQ ID NO: 3614132 - DNA, 25 bp, Homo sapien
tcagtagcccgtggaacgtggaagc

SEQ ID NO: 3614133 - DNA, 25 bp, Homo sapien
gcagtacgcgggaggcagggcgtaa

SEQ ID NO: 3614134 - DNA, 25 bp, Homo sapien
ccaagaacgggcaaggacttggcgt

SEQ ID NO: 3614135 - DNA, 25 bp, Homo sapien
ctttgcagccaaacggactgcccaa

SEQ ID NO: 3614136 - DNA, 25 bp, Homo sapien
gaaagaacagagctaggggcaagtt

SEQ ID NO: 3614137 - DNA, 25 bp, Homo sapien
aacggactgcccaagaacgggcaag

SEQ ID NO: 3614138 - DNA, 25 bp, Homo sapien
cggatttccaaggcccgccacgaga

SEQ ID NO: 3614139 - DNA, 25 bp, Homo sapien
tccaaggcccgccacgagactggag

SEQ ID NO: 3614140 - DNA, 25 bp, Homo sapien
gtccaggagggaaccgcgctcggcc

SEQ ID NO: 3614141 - DNA, 25 bp, Homo sapien
ggcccgccacgagactggagtctga

SEQ ID NO: 3614142 - DNA, 25 bp, Homo sapien
ctgagcccagctccccctcgtctcc

SEQ ID NO: 3614143 - DNA, 25 bp, Homo sapien
cctgagcccagctccccctcgtctc

SEQ ID NO: 3614144 - DNA, 25 bp, Homo sapien
gctccccctcgtctccaatgtccac

SEQ ID NO: 3614145 - DNA, 25 bp, Homo sapien
cccagctccccctcgtctccaatgt

SEQ ID NO: 3614146 - DNA, 25 bp, Homo sapien
cgtcttggcttttccgcagttgctt

SEQ ID NO: 3614147 - DNA, 25 bp, Homo sapien
ctggctcggtcagcacgaagggacc

SEQ ID NO: 3614148 - DNA, 25 bp, Homo sapien
ctggtgctttgggttcgtcttggct

SEQ ID NO: 3614149 - DNA, 25 bp, Homo sapien
tgctttttatgcttcatccgccggt

SEQ ID NO: 3614150 - DNA, 25 bp, Homo sapien
ataaaatcatgtcattcctccaaat

SEQ ID NO: 3614151 - DNA, 25 bp, Homo sapien
aaatcatgtcattcctccaaatctg

SEQ ID NO: 3614152 - DNA, 25 bp, Homo sapien
taaaatcatgtcattcctccaaatc

SEQ ID NO: 3614153 - DNA, 25 bp, Homo sapien
atcatgtcattcctccaaatctgag

SEQ ID NO: 3614154 - DNA, 25 bp, Homo sapien
cgggcctggcagagctaatgatttc

SEQ ID NO: 3614155 - DNA, 25 bp, Homo sapien
gacatctaaccacctgatccgcaag

SEQ ID NO: 3614156 - DNA, 25 bp, Homo sapien
gatttcatagcaagaggcgttccgg

SEQ ID NO: 3614157 - DNA, 25 bp, Homo sapien
gaaactccgcgttctcatcggagag

SEQ ID NO: 3614158 - DNA, 25 bp, Homo sapien
tggagcggaggtgcatgtgaacact

SEQ ID NO: 3614159 - DNA, 25 bp, Homo sapien
tgtgttggggttggagcggaggtgc

SEQ ID NO: 3614160 - DNA, 25 bp, Homo sapien
ggttggagcggaggtgcatgtgaac

SEQ ID NO: 3614161 - DNA, 25 bp, Homo sapien
cggaggtgcatgtgaacactggccg

SEQ ID NO: 3614162 - DNA, 25 bp, Homo sapien
gctgcgagtcagagaaaaccgtgcg

SEQ ID NO: 3614163 - DNA, 25 bp, Homo sapien
tccactcgttctggcgtggacaggt

SEQ ID NO: 3614164 - DNA, 25 bp, Homo sapien
gacaggtagcgctggatctcgaacc

SEQ ID NO: 3614165 - DNA, 25 bp, Homo sapien
ttctccaagcccgagagctgcgagt

SEQ ID NO: 3614166 - DNA, 25 bp, Homo sapien
ctgcgggtgcgggaacagcgctggg

SEQ ID NO: 3614167 - DNA, 25 bp, Homo sapien
ggtgcgggaacagcgctgggactgg

SEQ ID NO: 3614168 - DNA, 25 bp, Homo sapien
cgggtgcgggaacagcgctgggact

SEQ ID NO: 3614169 - DNA, 25 bp, Homo sapien
gggaacagcgctgggactggcatcc

SEQ ID NO: 3614170 - DNA, 25 bp, Homo sapien
cccggagccgaaacagaggagcatt

SEQ ID NO: 3614171 - DNA, 25 bp, Homo sapien
caaaactgccttatccggagaagcc

SEQ ID NO: 3614172 - DNA, 25 bp, Homo sapien
gaggagcatttctcgcctctcacgt

SEQ ID NO: 3614173 - DNA, 25 bp, Homo sapien
tccaagcccagcgaagcagaagggt

SEQ ID NO: 3614174 - DNA, 25 bp, Homo sapien
ataacaacaaccagtgcgggtactt

SEQ ID NO: 3614175 - DNA, 25 bp, Homo sapien
accagtgcgggtacttagggctttg

SEQ ID NO: 3614176 - DNA, 25 bp, Homo sapien
cggccaatcccagagaaaataaaca

SEQ ID NO: 3614177 - DNA, 25 bp, Homo sapien
tgccacaagcaacatcggccaatcc

SEQ ID NO: 3614178 - DNA, 25 bp, Homo sapien
gaggaccaccggagcagctgagaat

SEQ ID NO: 3614179 - DNA, 25 bp, Homo sapien
tgagaatagattgtcaccggcgggt

SEQ ID NO: 3614180 - DNA, 25 bp, Homo sapien
gaagccagtgcagagatgcggacct

SEQ ID NO: 3614181 - DNA, 25 bp, Homo sapien
tgcggacctggatttacaaacactt

SEQ ID NO: 3614182 - DNA, 25 bp, Homo sapien
gaggaatcacgaattatccccgtgg

SEQ ID NO: 3614183 - DNA, 25 bp, Homo sapien
atccccgtgggttggcatgcctcta

SEQ ID NO: 3614184 - DNA, 25 bp, Homo sapien
ggagctctgcatggcctcagcaata

SEQ ID NO: 3614185 - DNA, 25 bp, Homo sapien
gctatgaagagtgcggaggaatcac

SEQ ID NO: 3614186 - DNA, 25 bp, Homo sapien
gaggtggtgaggaaataaggatgat

SEQ ID NO: 3614187 - DNA, 25 bp, Homo sapien
aaggatgatggtggtctcccttatg

SEQ ID NO: 3614188 - DNA, 25 bp, Homo sapien
tatgcagagggtgatgggcgtgagg

SEQ ID NO: 3614189 - DNA, 25 bp, Homo sapien
ggtctcccttatgcagagggtgatg

SEQ ID NO: 3614190 - DNA, 25 bp, Homo sapien
gccagagagctggcgaaatggtctg

SEQ ID NO: 3614191 - DNA, 25 bp, Homo sapien
ggccagagagctggcgaaatggtct

SEQ ID NO: 3614192 - DNA, 25 bp, Homo sapien
cagagagctggcgaaatggtctggg

SEQ ID NO: 3614193 - DNA, 25 bp, Homo sapien
agagagctggcgaaatggtctgggg

SEQ ID NO: 3614194 - DNA, 25 bp, Homo sapien
tcgatgaagaaggatgtgggcctct

SEQ ID NO: 3614195 - DNA, 25 bp, Homo sapien
tctcagcggcttgggcttgtgcagc

SEQ ID NO: 3614196 - DNA, 25 bp, Homo sapien
aggatgtcctcgatgaagaaggatg

SEQ ID NO: 3614197 - DNA, 25 bp, Homo sapien
ggcctctgagaagacgccgggtgta

SEQ ID NO: 3614198 - DNA, 25 bp, Homo sapien
gggccgggacgaagtggaggacgca

SEQ ID NO: 3614199 - DNA, 25 bp, Homo sapien
gaggctcgaatctccgctgctctct

SEQ ID NO: 3614200 - DNA, 25 bp, Homo sapien
ccgggacgaagtggaggacgcaggc

SEQ ID NO: 3614201 - DNA, 25 bp, Homo sapien
aagccggcaaccaccctccgaggct

SEQ ID NO: 3614202 - DNA, 25 bp, Homo sapien
caagctcctgggtaggttgggtctc

SEQ ID NO: 3614203 - DNA, 25 bp, Homo sapien
gctcctgggtaggttgggtctctgt

SEQ ID NO: 3614204 - DNA, 25 bp, Homo sapien
gacaagctcctgggtaggttgggtc

SEQ ID NO: 3614205 - DNA, 25 bp, Homo sapien
aagctcctgggtaggttgggtctct

SEQ ID NO: 3614206 - DNA, 25 bp, Homo sapien
aaagtctctgttgtccggcaaactc

SEQ ID NO: 3614207 - DNA, 25 bp, Homo sapien
caatttctgccccgtcactgcaggg

SEQ ID NO: 3614208 - DNA, 25 bp, Homo sapien
acctcaatttctgccccgtcactgc

SEQ ID NO: 3614209 - DNA, 25 bp, Homo sapien
agtctctgttgtccggcaaactcct

SEQ ID NO: 3614210 - DNA, 25 bp, Homo sapien
tggccgtggagagcaagacaataga

SEQ ID NO: 3614211 - DNA, 25 bp, Homo sapien
taagccctggcccatcgtcctcagt

SEQ ID NO: 3614212 - DNA, 25 bp, Homo sapien
agtcctttcctagcgctaagccctg

SEQ ID NO: 3614213 - DNA, 25 bp, Homo sapien
agacaatagactttccaaaagtcct

SEQ ID NO: 3614214 - DNA, 25 bp, Homo sapien
cacacttcacagacgtccacgtaca

SEQ ID NO: 3614215 - DNA, 25 bp, Homo sapien
gaggggccaggggtgtcggtccaca

SEQ ID NO: 3614216 - DNA, 25 bp, Homo sapien
ggggtgtcggtccacacttcacaga

SEQ ID NO: 3614217 - DNA, 25 bp, Homo sapien
acttcacagacgtccacgtacaccc

SEQ ID NO: 3614218 - DNA, 25 bp, Homo sapien
cttgggggcgggatttcggcttcat

SEQ ID NO: 3614219 - DNA, 25 bp, Homo sapien
gagcgcagatttgcacccagccttg

SEQ ID NO: 3614220 - DNA, 25 bp, Homo sapien
acagagcgcagatttgcacccagcc

SEQ ID NO: 3614221 - DNA, 25 bp, Homo sapien
cagccttgggggcgggatttcggct

SEQ ID NO: 3614222 - DNA, 25 bp, Homo sapien
aaagctaaggcaatctccccaggcc

SEQ ID NO: 3614223 - DNA, 25 bp, Homo sapien
ctcagagtgtttgcgggatcgggaa

SEQ ID NO: 3614224 - DNA, 25 bp, Homo sapien
gggcaatgtagaccgcctcctccgt

SEQ ID NO: 3614225 - DNA, 25 bp, Homo sapien
ccttgtttcgtgagccctggactca

SEQ ID NO: 3614226 - DNA, 25 bp, Homo sapien
gcccctctgaaattcaatcttggta

SEQ ID NO: 3614227 - DNA, 25 bp, Homo sapien
tagggaggcccctctgaaattcaat

SEQ ID NO: 3614228 - DNA, 25 bp, Homo sapien
tggtattgaatctggtatcttcctg

SEQ ID NO: 3614229 - DNA, 25 bp, Homo sapien
gtatcttcctgtggcaggcaacgca

SEQ ID NO: 3614230 - DNA, 25 bp, Homo sapien
ctgcctgctcgagccctaaccccca

SEQ ID NO: 3614231 - DNA, 25 bp, Homo sapien
ccttcctgcctgctcgagccctaac

SEQ ID NO: 3614232 - DNA, 25 bp, Homo sapien
tcctgcctgctcgagccctaacccc

SEQ ID NO: 3614233 - DNA, 25 bp, Homo sapien
caaaggcggcggcatcaccttcctg

SEQ ID NO: 3614234 - DNA, 25 bp, Homo sapien
tgaagcctctttggagcgagctcag

SEQ ID NO: 3614235 - DNA, 25 bp, Homo sapien
tcttgcaggcatgaaaggactcggg

SEQ ID NO: 3614236 - DNA, 25 bp, Homo sapien
tctgccccgttaaagaagcgctgga

SEQ ID NO: 3614237 - DNA, 25 bp, Homo sapien
gctcagaatcttaaccccatggtgg

SEQ ID NO: 3614238 - DNA, 25 bp, Homo sapien
cacataggtatcgaagacgcttgct

SEQ ID NO: 3614239 - DNA, 25 bp, Homo sapien
cataggtatcgaagacgcttgcttc

SEQ ID NO: 3614240 - DNA, 25 bp, Homo sapien
gcacataggtatcgaagacgcttgc

SEQ ID NO: 3614241 - DNA, 25 bp, Homo sapien
aagcacataggtatcgaagacgctt

SEQ ID NO: 3614242 - DNA, 25 bp, Homo sapien
cttctcatcacatgcaactctaatg

SEQ ID NO: 3614243 - DNA, 25 bp, Homo sapien
atgcaactctaatgttggctcccca

SEQ ID NO: 3614244 - DNA, 25 bp, Homo sapien
caggtttgatcactttcttctcatc

SEQ ID NO: 3614245 - DNA, 25 bp, Homo sapien
ctccaggtttgatcactttcttctc

SEQ ID NO: 3614246 - DNA, 25 bp, Homo sapien
catggagtttcctcttataaactca

SEQ ID NO: 3614247 - DNA, 25 bp, Homo sapien
ggtcatggagtttcctcttataaac

SEQ ID NO: 3614248 - DNA, 25 bp, Homo sapien
tggagtttcctcttataaactcaaa

SEQ ID NO: 3614249 - DNA, 25 bp, Homo sapien
ctaggtcatggagtttcctcttata

SEQ ID NO: 3614250 - DNA, 25 bp, Homo sapien
tggagaatcaaataaggggagaagc

SEQ ID NO: 3614251 - DNA, 25 bp, Homo sapien
caccgtgtagatttgtgcatgcaca

SEQ ID NO: 3614252 - DNA, 25 bp, Homo sapien
catgcacagccagagcatccaaaca

SEQ ID NO: 3614253 - DNA, 25 bp, Homo sapien
aaagcaaattttgccaccgtgtaga

SEQ ID NO: 3614254 - DNA, 25 bp, Homo sapien
ttgctacgaatttaggtccttcaaa

SEQ ID NO: 3614255 - DNA, 25 bp, Homo sapien
aatgctacatctacacttggttggc

SEQ ID NO: 3614256 - DNA, 25 bp, Homo sapien
gctacgaatttaggtccttcaaatg

SEQ ID NO: 3614257 - DNA, 25 bp, Homo sapien
acaatgctacatctacacttggttg

SEQ ID NO: 3614258 - DNA, 25 bp, Homo sapien
ggccctgaggaagcaccaccagagg

SEQ ID NO: 3614259 - DNA, 25 bp, Homo sapien
gaagcaccaccagagggaggagctc

SEQ ID NO: 3614260 - DNA, 25 bp, Homo sapien
tgaggaagcaccaccagagggagga

SEQ ID NO: 3614261 - DNA, 25 bp, Homo sapien
caacctcttcaatggtgggccctga

SEQ ID NO: 3614262 - DNA, 25 bp, Homo sapien
gatgatggggttgcaaactttctcc

SEQ ID NO: 3614263 - DNA, 25 bp, Homo sapien
ctctggtacagcttggtgatgatgg

SEQ ID NO: 3614264 - DNA, 25 bp, Homo sapien
tgcactctggtacagcttggtgatg

SEQ ID NO: 3614265 - DNA, 25 bp, Homo sapien
ggtgatgatggggttgcaaactttc

SEQ ID NO: 3614266 - DNA, 25 bp, Homo sapien
tgaattctggtggaaaccgcgaatg

SEQ ID NO: 3614267 - DNA, 25 bp, Homo sapien
ttacaagagggccactaccaacatt

SEQ ID NO: 3614268 - DNA, 25 bp, Homo sapien
taacatcttgggtcactcagacatc

SEQ ID NO: 3614269 - DNA, 25 bp, Homo sapien
aaagtctggcgcaaactcttacaag

SEQ ID NO: 3614270 - DNA, 25 bp, Homo sapien
tggatgacaccttgtccctctgctt

SEQ ID NO: 3614271 - DNA, 25 bp, Homo sapien
tcatgttgaaggcataggactcaag

SEQ ID NO: 3614272 - DNA, 25 bp, Homo sapien
ctgattcttatcaagccagttgata

SEQ ID NO: 3614273 - DNA, 25 bp, Homo sapien
tgaattcttggatgacaccttgtcc

SEQ ID NO: 3614274 - DNA, 25 bp, Homo sapien
tctcttagctagacgcccttaggca

SEQ ID NO: 3614275 - DNA, 25 bp, Homo sapien
aactctagtttctcttagctagacg

SEQ ID NO: 3614276 - DNA, 25 bp, Homo sapien
ggcaccagtaactcaattgaaatac

SEQ ID NO: 3614277 - DNA, 25 bp, Homo sapien
cctgtgtatgtgtaactctagtttc

SEQ ID NO: 3614278 - DNA, 25 bp, Homo sapien
cattatccctgtcaagaccagatga

SEQ ID NO: 3614279 - DNA, 25 bp, Homo sapien
tccctgtcaagaccagatgacagtg

SEQ ID NO: 3614280 - DNA, 25 bp, Homo sapien
tatccctgtcaagaccagatgacag

SEQ ID NO: 3614281 - DNA, 25 bp, Homo sapien
cctgtcaagaccagatgacagtgcc

SEQ ID NO: 3614282 - DNA, 25 bp, Homo sapien
attgagtataccattggcatcaatg

SEQ ID NO: 3614283 - DNA, 25 bp, Homo sapien
gcagagacattgagtataccattgg

SEQ ID NO: 3614284 - DNA, 25 bp, Homo sapien
ttctcttttcccgtactcttgtcca

SEQ ID NO: 3614285 - DNA, 25 bp, Homo sapien
cacagcagagacattgagtatacca

SEQ ID NO: 3614286 - DNA, 25 bp, Homo sapien
tatcctttgtcatggcacgctcgcc

SEQ ID NO: 3614287 - DNA, 25 bp, Homo sapien
atcctttgtcatggcacgctcgcct

SEQ ID NO: 3614288 - DNA, 25 bp, Homo sapien
tcctttgtcatggcacgctcgcctt

SEQ ID NO: 3614289 - DNA, 25 bp, Homo sapien
cctttgtcatggcacgctcgccttc

SEQ ID NO: 3614290 - DNA, 25 bp, Homo sapien
aggtctgtgacagtgctagggtcct

SEQ ID NO: 3614291 - DNA, 25 bp, Homo sapien
aacaaattactacaatggactccag

SEQ ID NO: 3614292 - DNA, 25 bp, Homo sapien
gtctgtgacagtgctagggtcctgc

SEQ ID NO: 3614293 - DNA, 25 bp, Homo sapien
tctgtgacagtgctagggtcctgct

SEQ ID NO: 3614294 - DNA, 25 bp, Homo sapien
ggttttggaatccatcatcatagcg

SEQ ID NO: 3614295 - DNA, 25 bp, Homo sapien
ctggtggaaactacgaatggttttg

SEQ ID NO: 3614296 - DNA, 25 bp, Homo sapien
gacttccctttatctgttatcagta

SEQ ID NO: 3614297 - DNA, 25 bp, Homo sapien
tgttatcagtaagccaaacaagaga

SEQ ID NO: 3614298 - DNA, 25 bp, Homo sapien
tctgttatcagtaagccaaacaaga

SEQ ID NO: 3614299 - DNA, 25 bp, Homo sapien
tatcagtaagccaaacaagagaagt

SEQ ID NO: 3614300 - DNA, 25 bp, Homo sapien
ggttgtcagaataggtagtgaaggt

SEQ ID NO: 3614301 - DNA, 25 bp, Homo sapien
gaataagcacaccaggctggttgtc

SEQ ID NO: 3614302 - DNA, 25 bp, Homo sapien
gctggttgtcagaataggtagtgaa

SEQ ID NO: 3614303 - DNA, 25 bp, Homo sapien
ctgaataagcacaccaggctggttg

SEQ ID NO: 3614304 - DNA, 25 bp, Homo sapien
tattacgcttgatgaggacagtcat

SEQ ID NO: 3614305 - DNA, 25 bp, Homo sapien
ggtggtattacgcttgatgaggaca

SEQ ID NO: 3614306 - DNA, 25 bp, Homo sapien
ggtattacgcttgatgaggacagtc

SEQ ID NO: 3614307 - DNA, 25 bp, Homo sapien
gacagtcatgactccaccagcagtt

SEQ ID NO: 3614308 - DNA, 25 bp, Homo sapien
aagaaaacccagtacatagctcctg

SEQ ID NO: 3614309 - DNA, 25 bp, Homo sapien
gaaaacccagtacatagctcctgtt

SEQ ID NO: 3614310 - DNA, 25 bp, Homo sapien
agaaaacccagtacatagctcctgt

SEQ ID NO: 3614311 - DNA, 25 bp, Homo sapien
aaacccagtacatagctcctgtttt

SEQ ID NO: 3614312 - DNA, 25 bp, Homo sapien
agcttttggtggaaactacgaatgt

SEQ ID NO: 3614313 - DNA, 25 bp, Homo sapien
gtttaacaatcactcatcacagcga

SEQ ID NO: 3614314 - DNA, 25 bp, Homo sapien
aaggaaggtgttgccatcattagcc

SEQ ID NO: 3614315 - DNA, 25 bp, Homo sapien
ttgccatcattagccaagcttttgg

SEQ ID NO: 3614316 - DNA, 25 bp, Homo sapien
ctgcctgcctttagggttaattgag

SEQ ID NO: 3614317 - DNA, 25 bp, Homo sapien
gcctttagggttaattgagatacca

SEQ ID NO: 3614318 - DNA, 25 bp, Homo sapien
cctgcctttagggttaattgagata

SEQ ID NO: 3614319 - DNA, 25 bp, Homo sapien
tgcctttagggttaattgagatacc

SEQ ID NO: 3614320 - DNA, 25 bp, Homo sapien
aatcttggggatacgagtagaacca

SEQ ID NO: 3614321 - DNA, 25 bp, Homo sapien
gggatacgagtagaaccaccaacca

SEQ ID NO: 3614322 - DNA, 25 bp, Homo sapien
ctgaatcttggggatacgagtagaa

SEQ ID NO: 3614323 - DNA, 25 bp, Homo sapien
atacgagtagaaccaccaaccagga

SEQ ID NO: 3614324 - DNA, 25 bp, Homo sapien
gagaatcgatctcaatactggcctg

SEQ ID NO: 3614325 - DNA, 25 bp, Homo sapien
tcagttcttcaaatcgggcacgggt

SEQ ID NO: 3614326 - DNA, 25 bp, Homo sapien
tctctactgggtccagggtgccacg

SEQ ID NO: 3614327 - DNA, 25 bp, Homo sapien
cacgggtaatggaggtatagaagtc

SEQ ID NO: 3614328 - DNA, 25 bp, Homo sapien
agagggtacgcttagcacgttcaca

SEQ ID NO: 3614329 - DNA, 25 bp, Homo sapien
gaagagagggtacgcttagcacgtt

SEQ ID NO: 3614330 - DNA, 25 bp, Homo sapien
ggtgtctccagctgtagacttgacc

SEQ ID NO: 3614331 - DNA, 25 bp, Homo sapien
ctggaagagagggtacgcttagcac

SEQ ID NO: 3614332 - DNA, 25 bp, Homo sapien
atctcatttaaatttacgatggatc

SEQ ID NO: 3614333 - DNA, 25 bp, Homo sapien
taatccgaacttgcatcacaaatgg

SEQ ID NO: 3614334 - DNA, 25 bp, Homo sapien
aataatccgaacttgcatcacaaat

SEQ ID NO: 3614335 - DNA, 25 bp, Homo sapien
tacgatggatcaaattaatcttaaa

SEQ ID NO: 3614336 - DNA, 25 bp, Homo sapien
ctaagccgtaagcaatagcagcagc

SEQ ID NO: 3614337 - DNA, 25 bp, Homo sapien
gcagcagcagttggctcattaataa

SEQ ID NO: 3614338 - DNA, 25 bp, Homo sapien
ctttttgtctaagccgtaagcaata

SEQ ID NO: 3614339 - DNA, 25 bp, Homo sapien
ttgtctaagccgtaagcaatagcag

SEQ ID NO: 3614340 - DNA, 25 bp, Homo sapien
ctttggtagcctgacgctgagagtc

SEQ ID NO: 3614341 - DNA, 25 bp, Homo sapien
ccagcatctttggtagcctgacgct

SEQ ID NO: 3614342 - DNA, 25 bp, Homo sapien
catctttggtagcctgacgctgaga

SEQ ID NO: 3614343 - DNA, 25 bp, Homo sapien
cagcatctttggtagcctgacgctg

SEQ ID NO: 3614344 - DNA, 25 bp, Homo sapien
ttgacagacccatctacctagagag

SEQ ID NO: 3614345 - DNA, 25 bp, Homo sapien
cactgttgggcacgtggtcttaacc

SEQ ID NO: 3614346 - DNA, 25 bp, Homo sapien
taattgtcaagattcactggtttct

SEQ ID NO: 3614347 - DNA, 25 bp, Homo sapien
gggcttttaactactccggaatgca

SEQ ID NO: 3614348 - DNA, 25 bp, Homo sapien
gtcagaaccatagaagacacctcct

SEQ ID NO: 3614349 - DNA, 25 bp, Homo sapien
gaaccatagaagacacctcctctgg

SEQ ID NO: 3614350 - DNA, 25 bp, Homo sapien
catagaagacacctcctctggatag

SEQ ID NO: 3614351 - DNA, 25 bp, Homo sapien
tgtcagaaccatagaagacacctcc

SEQ ID NO: 3614352 - DNA, 25 bp, Homo sapien
tcaaatctgcgtccaatcagacgtt

SEQ ID NO: 3614353 - DNA, 25 bp, Homo sapien
aaagggccaatgtttcatatcagac

SEQ ID NO: 3614354 - DNA, 25 bp, Homo sapien
aatctgcgtccaatcagacgtttgg

SEQ ID NO: 3614355 - DNA, 25 bp, Homo sapien
catcaaatctgcgtccaatcagacg

SEQ ID NO: 3614356 - DNA, 25 bp, Homo sapien
ctcaagtccatgattactcaaatac

SEQ ID NO: 3614357 - DNA, 25 bp, Homo sapien
aaactcaagtccatgattactcaaa

SEQ ID NO: 3614358 - DNA, 25 bp, Homo sapien
aaaactcaagtccatgattactcaa

SEQ ID NO: 3614359 - DNA, 25 bp, Homo sapien
aactcaagtccatgattactcaaat

SEQ ID NO: 3614360 - DNA, 25 bp, Homo sapien
tcctacgttatccagatttcagcct

SEQ ID NO: 3614361 - DNA, 25 bp, Homo sapien
taacagttcataggtaggtgaattc

SEQ ID NO: 3614362 - DNA, 25 bp, Homo sapien
ccatataggtagcaaaggttcaaac

SEQ ID NO: 3614363 - DNA, 25 bp, Homo sapien
cataggtaggtgaattcaactacca

SEQ ID NO: 3614364 - DNA, 25 bp, Homo sapien
acttttgtgcttcctagccctgtta

SEQ ID NO: 3614365 - DNA, 25 bp, Homo sapien
aacttttgtgcttcctagccctgtt

SEQ ID NO: 3614366 - DNA, 25 bp, Homo sapien
ttttgtgcttcctagccctgttata

SEQ ID NO: 3614367 - DNA, 25 bp, Homo sapien
ttgtgcttcctagccctgttatatt

SEQ ID NO: 3614368 - DNA, 25 bp, Homo sapien
cggcatcaccgatcaaccgttcagt

SEQ ID NO: 3614369 - DNA, 25 bp, Homo sapien
caccgatcaaccgttcagtgtccgt

SEQ ID NO: 3614370 - DNA, 25 bp, Homo sapien
cgatcaaccgttcagtgtccgtaaa

SEQ ID NO: 3614371 - DNA, 25 bp, Homo sapien
tgcggcatcaccgatcaaccgttca

SEQ ID NO: 3614372 - DNA, 25 bp, Homo sapien
aaaacacccacacaagagtaggtgg

SEQ ID NO: 3614373 - DNA, 25 bp, Homo sapien
ctggaaaacacccacacaagagtag

SEQ ID NO: 3614374 - DNA, 25 bp, Homo sapien
acacccacacaagagtaggtggtgc

SEQ ID NO: 3614375 - DNA, 25 bp, Homo sapien
acccacacaagagtaggtggtgcca

SEQ ID NO: 3614376 - DNA, 25 bp, Homo sapien
gctgcagtccaggttgccgtgccaa

SEQ ID NO: 3614377 - DNA, 25 bp, Homo sapien
ctcctgtctaagcacgcgcgaggtc

SEQ ID NO: 3614378 - DNA, 25 bp, Homo sapien
agcacgcgcgaggtccagaactagt

SEQ ID NO: 3614379 - DNA, 25 bp, Homo sapien
tccagaactagtgctgcagtccagg

SEQ ID NO: 3614380 - DNA, 25 bp, Homo sapien
actccggaatgtacccccatactgg

SEQ ID NO: 3614381 - DNA, 25 bp, Homo sapien
cggaatgtacccccatactggaagc

SEQ ID NO: 3614382 - DNA, 25 bp, Homo sapien
cccatactggaagcacgccaagaac

SEQ ID NO: 3614383 - DNA, 25 bp, Homo sapien
catactggaagcacgccaagaacag

SEQ ID NO: 3614384 - DNA, 25 bp, Homo sapien
ggctgcaaccaaataccgctgccat

SEQ ID NO: 3614385 - DNA, 25 bp, Homo sapien
tacatttccgtcctgccggctgcaa

SEQ ID NO: 3614386 - DNA, 25 bp, Homo sapien
tttaagccggtagaaggagccgcac

SEQ ID NO: 3614387 - DNA, 25 bp, Homo sapien
cactcgcctcgacgagattctcaga

SEQ ID NO: 3614388 - DNA, 25 bp, Homo sapien
cctgcctcttataccctatcttaga

SEQ ID NO: 3614389 - DNA, 25 bp, Homo sapien
gagttcaatgagaccggtttccgcc

SEQ ID NO: 3614390 - DNA, 25 bp, Homo sapien
aggcctggctccaataacgaaggaa

SEQ ID NO: 3614391 - DNA, 25 bp, Homo sapien
tggctccaataacgaaggaagccac

SEQ ID NO: 3614392 - DNA, 25 bp, Homo sapien
cctgctgcctgccattacggcttcc

SEQ ID NO: 3614393 - DNA, 25 bp, Homo sapien
cattacggcttccccggccaataga

SEQ ID NO: 3614394 - DNA, 25 bp, Homo sapien
tagacgcccggctgcccttacaaga

SEQ ID NO: 3614395 - DNA, 25 bp, Homo sapien
tgcccttacaagacccaatcacaag

SEQ ID NO: 3614396 - DNA, 25 bp, Homo sapien
tggaactaaccaatgatagcggcgc

SEQ ID NO: 3614397 - DNA, 25 bp, Homo sapien
gcttcagggtgccactagggctgct

SEQ ID NO: 3614398 - DNA, 25 bp, Homo sapien
aagtgccccgggtttcgcgaatctg

SEQ ID NO: 3614399 - DNA, 25 bp, Homo sapien
tcatagcgtggctttggacaagggc

SEQ ID NO: 3614400 - DNA, 25 bp, Homo sapien
gagcctaggacttctgactggataa

SEQ ID NO: 3614401 - DNA, 25 bp, Homo sapien
aacgcacagggtttcaaatgacaca

SEQ ID NO: 3614402 - DNA, 25 bp, Homo sapien
taagcggtagcaactattatgatcg

SEQ ID NO: 3614403 - DNA, 25 bp, Homo sapien
tggttactctcaaaacgcgttctgg

SEQ ID NO: 3614404 - DNA, 25 bp, Homo sapien
tatgccctgattgcccaaatactgg

SEQ ID NO: 3614405 - DNA, 25 bp, Homo sapien
tttgatttctaactgcagccatgta

SEQ ID NO: 3614406 - DNA, 25 bp, Homo sapien
tactggagtgtatgtactgcattgc

SEQ ID NO: 3614407 - DNA, 25 bp, Homo sapien
aaaacaatcctcctgtgacccggtg

SEQ ID NO: 3614408 - DNA, 25 bp, Homo sapien
tattcagtgctttatgcagggcacc

SEQ ID NO: 3614409 - DNA, 25 bp, Homo sapien
tttattcagtgctttatgcagggca

SEQ ID NO: 3614410 - DNA, 25 bp, Homo sapien
tcagtgctttatgcagggcaccatg

SEQ ID NO: 3614411 - DNA, 25 bp, Homo sapien
ttgccattgatgttttattcagtgc

SEQ ID NO: 3614412 - DNA, 25 bp, Homo sapien
gcaagagccactgtggctggcccta

SEQ ID NO: 3614413 - DNA, 25 bp, Homo sapien
aagagccactgtggctggccctaat

SEQ ID NO: 3614414 - DNA, 25 bp, Homo sapien
caagagccactgtggctggccctaa

SEQ ID NO: 3614415 - DNA, 25 bp, Homo sapien
tggcagcaagctgataaacaaattt

SEQ ID NO: 3614416 - DNA, 25 bp, Homo sapien
tcttgccttgtgagagaaaaaagta

SEQ ID NO: 3614417 - DNA, 25 bp, Homo sapien
aagtaattggtaaattcgtgactga

SEQ ID NO: 3614418 - DNA, 25 bp, Homo sapien
agatcgtattcagtctgagttcttc

SEQ ID NO: 3614419 - DNA, 25 bp, Homo sapien
taaacagcttaacaccagaaggaag

SEQ ID NO: 3614420 - DNA, 25 bp, Homo sapien
tatacactgtaacaacaaaggtacc

SEQ ID NO: 3614421 - DNA, 25 bp, Homo sapien
ttttgcaacagcagttccgaaattg

SEQ ID NO: 3614422 - DNA, 25 bp, Homo sapien
gaaacacagtcccaattacaaggca

SEQ ID NO: 3614423 - DNA, 25 bp, Homo sapien
cctgtcaaagagaagtgcagtatca

SEQ ID NO: 3614424 - DNA, 25 bp, Homo sapien
tgcatcgtcttcctacaaacagttt

SEQ ID NO: 3614425 - DNA, 25 bp, Homo sapien
taacttaagcccagaacctgtcaaa

SEQ ID NO: 3614426 - DNA, 25 bp, Homo sapien
tggtttggaaccagtagggcctcta

SEQ ID NO: 3614427 - DNA, 25 bp, Homo sapien
tttttgctttcaaaagcataggcag

SEQ ID NO: 3614428 - DNA, 25 bp, Homo sapien
ctctttttcatgcaaaggagactga

SEQ ID NO: 3614429 - DNA, 25 bp, Homo sapien
catgtttaaaaatctaaggctcttt

SEQ ID NO: 3614430 - DNA, 25 bp, Homo sapien
aacatgtttaaaaatctaaggctct

SEQ ID NO: 3614431 - DNA, 25 bp, Homo sapien
tcttagaattacatagcagaagtga

SEQ ID NO: 3614432 - DNA, 25 bp, Homo sapien
gaagtgatatgttgcctggatacca

SEQ ID NO: 3614433 - DNA, 25 bp, Homo sapien
gctagtgatgatacagctgcagctt

SEQ ID NO: 3614434 - DNA, 25 bp, Homo sapien
tatttgtttggctcaggtactctag

SEQ ID NO: 3614435 - DNA, 25 bp, Homo sapien
caagttattgtattgcaggctgctg

SEQ ID NO: 3614436 - DNA, 25 bp, Homo sapien
tcagttgacatttgtgctagggtcc

SEQ ID NO: 3614437 - DNA, 25 bp, Homo sapien
taaaatgttagcaggcactagctca

SEQ ID NO: 3614438 - DNA, 25 bp, Homo sapien
cactatgtgacgacacgattgtgag

SEQ ID NO: 3614439 - DNA, 25 bp, Homo sapien
tttaggagggaacggttatggcata

SEQ ID NO: 3614440 - DNA, 25 bp, Homo sapien
cattagaagcattggcaatccctga

SEQ ID NO: 3614441 - DNA, 25 bp, Homo sapien
tatacttgcagtgccattagaagca

SEQ ID NO: 3614442 - DNA, 25 bp, Homo sapien
ggcaatccctgatctttttgatagt

SEQ ID NO: 3614443 - DNA, 25 bp, Homo sapien
tgacgagaagagtccaaagaccctg

SEQ ID NO: 3614444 - DNA, 25 bp, Homo sapien
tcttagaagtggttagctcagtaca

SEQ ID NO: 3614445 - DNA, 25 bp, Homo sapien
ggtgacttgagctccaatgacgaga

SEQ ID NO: 3614446 - DNA, 25 bp, Homo sapien
gaatctgttccgtgcaatgctcact

SEQ ID NO: 3614447 - DNA, 25 bp, Homo sapien
ctgggtgtggtttctgctttggtca

SEQ ID NO: 3614448 - DNA, 25 bp, Homo sapien
ggtttctgctttggtcagattagca

SEQ ID NO: 3614449 - DNA, 25 bp, Homo sapien
gtcagattagcatggtggactttct

SEQ ID NO: 3614450 - DNA, 25 bp, Homo sapien
gatcatgctgggtgtggtttctgct

SEQ ID NO: 3614451 - DNA, 25 bp, Homo sapien
gccccactaggctgtatgcctgggt

SEQ ID NO: 3614452 - DNA, 25 bp, Homo sapien
agttgacagtgtccgctggctgcgt

SEQ ID NO: 3614453 - DNA, 25 bp, Homo sapien
aaccagagcgtgagctccgagagcc

SEQ ID NO: 3614454 - DNA, 25 bp, Homo sapien
cacaagacgggcttttggagcttca

SEQ ID NO: 3614455 - DNA, 25 bp, Homo sapien
tagtgctggccctaaaacagaagcc

SEQ ID NO: 3614456 - DNA, 25 bp, Homo sapien
tgttggctggtcactatagtgctgg

SEQ ID NO: 3614457 - DNA, 25 bp, Homo sapien
gattcatggttaagagaaaactggg

SEQ ID NO: 3614458 - DNA, 25 bp, Homo sapien
cagaagccccgtaaaagtagggatg

SEQ ID NO: 3614459 - DNA, 25 bp, Homo sapien
ttccttcggattagcagccacacca

SEQ ID NO: 3614460 - DNA, 25 bp, Homo sapien
agccacaccaagaggaaaatcagca

SEQ ID NO: 3614461 - DNA, 25 bp, Homo sapien
cagccacaccaagaggaaaatcagc

SEQ ID NO: 3614462 - DNA, 25 bp, Homo sapien
ttgtctttccttcggattagcagcc

SEQ ID NO: 3614463 - DNA, 25 bp, Homo sapien
cagaagcaaaagcacaagtaaaacc

SEQ ID NO: 3614464 - DNA, 25 bp, Homo sapien
tcagaagcaaaagcacaagtaaaac

SEQ ID NO: 3614465 - DNA, 25 bp, Homo sapien
gaagcaaaagcacaagtaaaaccaa

SEQ ID NO: 3614466 - DNA, 25 bp, Homo sapien
ctcagaagcaaaagcacaagtaaaa

SEQ ID NO: 3614467 - DNA, 25 bp, Homo sapien
tagtttagcaatacaccctttttca

SEQ ID NO: 3614468 - DNA, 25 bp, Homo sapien
ggaatttgacattggatcctagaat

SEQ ID NO: 3614469 - DNA, 25 bp, Homo sapien
taacctataatgttagactctgtgg

SEQ ID NO: 3614470 - DNA, 25 bp, Homo sapien
cctgagccaggcagttataggcact

SEQ ID NO: 3614471 - DNA, 25 bp, Homo sapien
tatccaccagttaaacagatgaccc

SEQ ID NO: 3614472 - DNA, 25 bp, Homo sapien
gatgaccccaggaattagtctgcga

SEQ ID NO: 3614473 - DNA, 25 bp, Homo sapien
tagtctgcgacttcgtagctcgatg

SEQ ID NO: 3614474 - DNA, 25 bp, Homo sapien
gggcaacttgtagacctctgtctag

SEQ ID NO: 3614475 - DNA, 25 bp, Homo sapien
agtgattctcctgccttggcctccc

SEQ ID NO: 3614476 - DNA, 25 bp, Homo sapien
ttcaagtgattctcctgccttggcc

SEQ ID NO: 3614477 - DNA, 25 bp, Homo sapien
ctcactacaacttccacctcccggg

SEQ ID NO: 3614478 - DNA, 25 bp, Homo sapien
gagtgagtggcacaatctaggctca

SEQ ID NO: 3614479 - DNA, 25 bp, Homo sapien
taggacatggtaagattctgcagca

SEQ ID NO: 3614480 - DNA, 25 bp, Homo sapien
cagcagaactcgtccagggtggttg

SEQ ID NO: 3614481 - DNA, 25 bp, Homo sapien
tggtacagtccagagtaggacatgg

SEQ ID NO: 3614482 - DNA, 25 bp, Homo sapien
cagcttcgttgcctgctgtgcactg

SEQ ID NO: 3614483 - DNA, 25 bp, Homo sapien
tctttctctcggattcgctgccagt

SEQ ID NO: 3614484 - DNA, 25 bp, Homo sapien
gtaatacacaatgggctctgtgcca

SEQ ID NO: 3614485 - DNA, 25 bp, Homo sapien
ctcacacttgggcttggatggtctc

SEQ ID NO: 3614486 - DNA, 25 bp, Homo sapien
gaggatgactcacactgcaaagtca

SEQ ID NO: 3614487 - DNA, 25 bp, Homo sapien
tattgtagacatgacgactggagta

SEQ ID NO: 3614488 - DNA, 25 bp, Homo sapien
cacgtagcgccctgaattcttaacc

SEQ ID NO: 3614489 - DNA, 25 bp, Homo sapien
ggaaattggaagcaaaggccactcg

SEQ ID NO: 3614490 - DNA, 25 bp, Homo sapien
cagaggttcaatctgcaaggaggca

SEQ ID NO: 3614491 - DNA, 25 bp, Homo sapien
gagaagcctatgcacgtctcctact

SEQ ID NO: 3614492 - DNA, 25 bp, Homo sapien
caccgtgcccatccggagtgattat

SEQ ID NO: 3614493 - DNA, 25 bp, Homo sapien
tcagatttcgacaacccaagacagg

SEQ ID NO: 3614494 - DNA, 25 bp, Homo sapien
tgtgtagcaaagctcacctggctga

SEQ ID NO: 3614495 - DNA, 25 bp, Homo sapien
gttaggacttatatagaacagatgg

SEQ ID NO: 3614496 - DNA, 25 bp, Homo sapien
ttatatagaacagatggagcagctc

SEQ ID NO: 3614497 - DNA, 25 bp, Homo sapien
ctggaacaatttgttaggacttata

SEQ ID NO: 3614498 - DNA, 25 bp, Homo sapien
ggaacaatttgttaggacttatata

SEQ ID NO: 3614499 - DNA, 25 bp, Homo sapien
agactggaagactgaagaaaggcaa

SEQ ID NO: 3614500 - DNA, 25 bp, Homo sapien
agggactccagccaggtgtctactt

SEQ ID NO: 3614501 - DNA, 25 bp, Homo sapien
ggactccagccaggtgtctacttac

SEQ ID NO: 3614502 - DNA, 25 bp, Homo sapien
aaggcaaatgcaggaggacaagaag

SEQ ID NO: 3614503 - DNA, 25 bp, Homo sapien
atatccagagtgtctttttctggaa

SEQ ID NO: 3614504 - DNA, 25 bp, Homo sapien
tccccaaggttccaacatagtagga

SEQ ID NO: 3614505 - DNA, 25 bp, Homo sapien
cggtgagcagccattcaatatccag

SEQ ID NO: 3614506 - DNA, 25 bp, Homo sapien
gtgagcagccattcaatatccagag

SEQ ID NO: 3614507 - DNA, 25 bp, Homo sapien
tggaagaggaaaatctttaatgagt

SEQ ID NO: 3614508 - DNA, 25 bp, Homo sapien
caatgtgtggggagcaaatatgaca

SEQ ID NO: 3614509 - DNA, 25 bp, Homo sapien
ttatgggatgttcccgtgggcaagt

SEQ ID NO: 3614510 - DNA, 25 bp, Homo sapien
acaacaaagaattatgggatgttcc

SEQ ID NO: 3614511 - DNA, 25 bp, Homo sapien
cactggtttgcactgtactaagcta

SEQ ID NO: 3614512 - DNA, 25 bp, Homo sapien
tgctcaaatgaaaccagtgccctac

SEQ ID NO: 3614513 - DNA, 25 bp, Homo sapien
ctcatagtactcagcccagggtctc

SEQ ID NO: 3614514 - DNA, 25 bp, Homo sapien
tttccaccggacacaaaaatgctca

SEQ ID NO: 3614515 - DNA, 25 bp, Homo sapien
tcagattcgtctgatgtccccaaaa

SEQ ID NO: 3614516 - DNA, 25 bp, Homo sapien
tcagttcgttagactccaggaggcc

SEQ ID NO: 3614517 - DNA, 25 bp, Homo sapien
gatcagggcgcatacacttctagtc

SEQ ID NO: 3614518 - DNA, 25 bp, Homo sapien
ggtggtgtgctttgacagtcagcca

SEQ ID NO: 3614519 - DNA, 25 bp, Homo sapien
ttacagggttgcaccacccaccgag

SEQ ID NO: 3614520 - DNA, 25 bp, Homo sapien
tgatctcgggttcatgagtaactgg

SEQ ID NO: 3614521 - DNA, 25 bp, Homo sapien
gattacagggttgcaccacccaccg

SEQ ID NO: 3614522 - DNA, 25 bp, Homo sapien
gtgctgtgatctcgggttcatgagt

SEQ ID NO: 3614523 - DNA, 25 bp, Homo sapien
tatggaacactgtatgcagttcaag

SEQ ID NO: 3614524 - DNA, 25 bp, Homo sapien
cttgagtagtggctgtaagaccaat

SEQ ID NO: 3614525 - DNA, 25 bp, Homo sapien
cagcatgatgcaatagaaagaggat

SEQ ID NO: 3614526 - DNA, 25 bp, Homo sapien
taagaccaattaattccctgattgc

SEQ ID NO: 3614527 - DNA, 25 bp, Homo sapien
gaatgtgatgcgaaatataaaatac

SEQ ID NO: 3614528 - DNA, 25 bp, Homo sapien
tgctcagtatattcaaggccctgtc

SEQ ID NO: 3614529 - DNA, 25 bp, Homo sapien
tacaagtgtaaaatactgtcggtgt

SEQ ID NO: 3614530 - DNA, 25 bp, Homo sapien
actgtcggtgtattttgtcaccatc

SEQ ID NO: 3614531 - DNA, 25 bp, Homo sapien
tgacagactactttggatttaagct

SEQ ID NO: 3614532 - DNA, 25 bp, Homo sapien
caaggattctaatggacaaagaatg

SEQ ID NO: 3614533 - DNA, 25 bp, Homo sapien
taagcttataagcactttgctgcca

SEQ ID NO: 3614534 - DNA, 25 bp, Homo sapien
tgtgctaaatttccaaccacgtgca

SEQ ID NO: 3614535 - DNA, 25 bp, Homo sapien
gtcaccatctgcagcgctgggcata

SEQ ID NO: 3614536 - DNA, 25 bp, Homo sapien
gcagcagagactagaagggccaaat

SEQ ID NO: 3614537 - DNA, 25 bp, Homo sapien
agaaatgcgtacatatccctgaggg

SEQ ID NO: 3614538 - DNA, 25 bp, Homo sapien
catgcaggactatctggcagcagag

SEQ ID NO: 3614539 - DNA, 25 bp, Homo sapien
tgggcagctgccctattaaggactc

SEQ ID NO: 3614540 - DNA, 25 bp, Homo sapien
gggaactgtcaaatacggaaagcta

SEQ ID NO: 3614541 - DNA, 25 bp, Homo sapien
ttcggaaggcccacatggagatggc

SEQ ID NO: 3614542 - DNA, 25 bp, Homo sapien
gaaggatatgattcctaacttcctg

SEQ ID NO: 3614543 - DNA, 25 bp, Homo sapien
ttaagatgcaagtccgagcaaaaag

SEQ ID NO: 3614544 - DNA, 25 bp, Homo sapien
taagatgcaagtccgagcaaaaagc

SEQ ID NO: 3614545 - DNA, 25 bp, Homo sapien
cgggtatcacaatgtgctgcttgat

SEQ ID NO: 3614546 - DNA, 25 bp, Homo sapien
ctactgcgtatttttccaccataga

SEQ ID NO: 3614547 - DNA, 25 bp, Homo sapien
ctgcgtatttttccaccatagatcc

SEQ ID NO: 3614548 - DNA, 25 bp, Homo sapien
actgcgtatttttccaccatagatc

SEQ ID NO: 3614549 - DNA, 25 bp, Homo sapien
tactgcgtatttttccaccatagat

SEQ ID NO: 3614550 - DNA, 25 bp, Homo sapien
atagtactagggttactagtaggag

SEQ ID NO: 3614551 - DNA, 25 bp, Homo sapien
aaggtaattttgtcgcggtctgaag

SEQ ID NO: 3614552 - DNA, 25 bp, Homo sapien
ggatggatcgtaaagttgcataggc

SEQ ID NO: 3614553 - DNA, 25 bp, Homo sapien
cctctgaaaggttattagatcttgt

SEQ ID NO: 3614554 - DNA, 25 bp, Homo sapien
aagttatcattagttggtggaggga

SEQ ID NO: 3614555 - DNA, 25 bp, Homo sapien
gtcctggtgtttctattgttcttcc

SEQ ID NO: 3614556 - DNA, 25 bp, Homo sapien
tcttcctccagatgacaatgtgggg

SEQ ID NO: 3614557 - DNA, 25 bp, Homo sapien
cagaagataagttatcattagttgg

SEQ ID NO: 3614558 - DNA, 25 bp, Homo sapien
cccacacacaacctttgcccaaagc

SEQ ID NO: 3614559 - DNA, 25 bp, Homo sapien
ggagatccgattgtccaggcactgc

SEQ ID NO: 3614560 - DNA, 25 bp, Homo sapien
gcattaggagatccgattgtccagg

SEQ ID NO: 3614561 - DNA, 25 bp, Homo sapien
gtccaggcactgctttccgatatac

SEQ ID NO: 3614562 - DNA, 25 bp, Homo sapien
cttgattctacatgttggggatggg

SEQ ID NO: 3614563 - DNA, 25 bp, Homo sapien
cactagggacttgtcgttgaaatgc

SEQ ID NO: 3614564 - DNA, 25 bp, Homo sapien
ttgaaatatgagcctaagatcaggg

SEQ ID NO: 3614565 - DNA, 25 bp, Homo sapien
tagggacttgtcgttgaaatgcaag

SEQ ID NO: 3614566 - DNA, 25 bp, Homo sapien
gacttgtcgttgaaatgcaagttgt

SEQ ID NO: 3614567 - DNA, 25 bp, Homo sapien
gaccttagcatcctacagttaagcc

SEQ ID NO: 3614568 - DNA, 25 bp, Homo sapien
ggctttgaccttagcatcctacagt

SEQ ID NO: 3614569 - DNA, 25 bp, Homo sapien
tatagtaagcggctttgaccttagc

SEQ ID NO: 3614570 - DNA, 25 bp, Homo sapien
agtgggaaacctatagtaagcggct

SEQ ID NO: 3614571 - DNA, 25 bp, Homo sapien
tcagtggtccgcagttgtggcagca

SEQ ID NO: 3614572 - DNA, 25 bp, Homo sapien
tgaattctgcacaagggcatttgga

SEQ ID NO: 3614573 - DNA, 25 bp, Homo sapien
caagaatgtacctgcctatggcaaa

SEQ ID NO: 3614574 - DNA, 25 bp, Homo sapien
tgcctaacatttacagtgggaagct

SEQ ID NO: 3614575 - DNA, 25 bp, Homo sapien
gagcatagaggttgtgtgcgtaata

SEQ ID NO: 3614576 - DNA, 25 bp, Homo sapien
tttgtgtccacattgccccctgtat

SEQ ID NO: 3614577 - DNA, 25 bp, Homo sapien
tatcatatatgtcccaaacatactc

SEQ ID NO: 3614578 - DNA, 25 bp, Homo sapien
tggtgaaggatcttgagcatagagg

SEQ ID NO: 3614579 - DNA, 25 bp, Homo sapien
tcaatccacccgaaaagtactctgt

SEQ ID NO: 3614580 - DNA, 25 bp, Homo sapien
ccgggacgctggtctttggatgtta

SEQ ID NO: 3614581 - DNA, 25 bp, Homo sapien
cacggcgtgtaagtaacggagcaga

SEQ ID NO: 3614582 - DNA, 25 bp, Homo sapien
ttttggaaccaacacagtactgccc

SEQ ID NO: 3614583 - DNA, 25 bp, Homo sapien
gaaggaaggggagattagggctaca

SEQ ID NO: 3614584 - DNA, 25 bp, Homo sapien
aaggaaggggagattagggctacag

SEQ ID NO: 3614585 - DNA, 25 bp, Homo sapien
gttcccagtctgaacctagtgtcag

SEQ ID NO: 3614586 - DNA, 25 bp, Homo sapien
cacatgggaagagatgagcttatcc

SEQ ID NO: 3614587 - DNA, 25 bp, Homo sapien
gtgtcagcctcaataaagtaagtgc

SEQ ID NO: 3614588 - DNA, 25 bp, Homo sapien
ctgtatagcactttaaacaccgtga

SEQ ID NO: 3614589 - DNA, 25 bp, Homo sapien
cagtttttaccagcctgatggaagg

SEQ ID NO: 3614590 - DNA, 25 bp, Homo sapien
tgtgcatgggacaggctacgcgtct

SEQ ID NO: 3614591 - DNA, 25 bp, Homo sapien
aaaaatagacacctcttcagaccag

SEQ ID NO: 3614592 - DNA, 25 bp, Homo sapien
tgttccaaacacgtagctaaccttg

SEQ ID NO: 3614593 - DNA, 25 bp, Homo sapien
caatgcaatgccctcaagcgattgc

SEQ ID NO: 3614594 - DNA, 25 bp, Homo sapien
tttcgcctcatggtagatattcttg

SEQ ID NO: 3614595 - DNA, 25 bp, Homo sapien
catggtagatattcttgctccactg

SEQ ID NO: 3614596 - DNA, 25 bp, Homo sapien
caagcgattgctttcgcctcatggt

SEQ ID NO: 3614597 - DNA, 25 bp, Homo sapien
ctggagcacagattccatcacttct

SEQ ID NO: 3614598 - DNA, 25 bp, Homo sapien
tggagcacagattccatcacttctg

SEQ ID NO: 3614599 - DNA, 25 bp, Homo sapien
tagtgatgaacagggtgaacctggc

SEQ ID NO: 3614600 - DNA, 25 bp, Homo sapien
ggccttaaactccatgcaccacgga

SEQ ID NO: 3614601 - DNA, 25 bp, Homo sapien
tgaacctggcgaggcggaagcaaaa

SEQ ID NO: 3614602 - DNA, 25 bp, Homo sapien
tcatgctgcctcagtgatacccagg

SEQ ID NO: 3614603 - DNA, 25 bp, Homo sapien
gaaccccaaactgtaccataacatg

SEQ ID NO: 3614604 - DNA, 25 bp, Homo sapien
tgacaatacgacactgttccctgct

SEQ ID NO: 3614605 - DNA, 25 bp, Homo sapien
cagagaaccccaaactgtaccataa

SEQ ID NO: 3614606 - DNA, 25 bp, Homo sapien
ggcttggtattcctgacaatacgac

SEQ ID NO: 3614607 - DNA, 25 bp, Homo sapien
aggactccgggaacagggtgtgaga

SEQ ID NO: 3614608 - DNA, 25 bp, Homo sapien
gcaggactccgggaacagggtgtga

SEQ ID NO: 3614609 - DNA, 25 bp, Homo sapien
ctgcaggactccgggaacagggtgt

SEQ ID NO: 3614610 - DNA, 25 bp, Homo sapien
gagaggtggcctcgtttccggcctc

SEQ ID NO: 3614611 - DNA, 25 bp, Homo sapien
gccccaaatgctggtgctgatggcc

SEQ ID NO: 3614612 - DNA, 25 bp, Homo sapien
tatagggtgaggaaccacagtggcc

SEQ ID NO: 3614613 - DNA, 25 bp, Homo sapien
ctggtggtcgctgacttcaagcaga

SEQ ID NO: 3614614 - DNA, 25 bp, Homo sapien
tggtcgctgacttcaagcagaccct

SEQ ID NO: 3614615 - DNA, 25 bp, Homo sapien
aagaggaccctgcacatcaaacggt

SEQ ID NO: 3614616 - DNA, 25 bp, Homo sapien
gagacaatctcgatggccgactggg

SEQ ID NO: 3614617 - DNA, 25 bp, Homo sapien
caagggcccagatgtgcgagacaat

SEQ ID NO: 3614618 - DNA, 25 bp, Homo sapien
gtctttcccggacgcagggctgcgt

SEQ ID NO: 3614619 - DNA, 25 bp, Homo sapien
ctagcaagaggagaaggaggaggga

SEQ ID NO: 3614620 - DNA, 25 bp, Homo sapien
tagcaagaggagaaggaggagggac

SEQ ID NO: 3614621 - DNA, 25 bp, Homo sapien
gcaagaggagaaggaggagggacat

SEQ ID NO: 3614622 - DNA, 25 bp, Homo sapien
agcaagaggagaaggaggagggaca

SEQ ID NO: 3614623 - DNA, 25 bp, Homo sapien
cggacctcgggcgagctgggcgcgg

SEQ ID NO: 3614624 - DNA, 25 bp, Homo sapien
tccgacggacctcgggcgagctggg

SEQ ID NO: 3614625 - DNA, 25 bp, Homo sapien
acctcgggcgagctgggcgcggcgc

SEQ ID NO: 3614626 - DNA, 25 bp, Homo sapien
cgcctccgacggacctcgggcgagc

SEQ ID NO: 3614627 - DNA, 25 bp, Homo sapien
gaaaaggcgctaccgcttcgtggaa

SEQ ID NO: 3614628 - DNA, 25 bp, Homo sapien
gctaccgcttcgtggaacacttttc

SEQ ID NO: 3614629 - DNA, 25 bp, Homo sapien
aacgcgaggcgaaaaggcgctaccg

SEQ ID NO: 3614630 - DNA, 25 bp, Homo sapien
gtcagggaggaaaacgcgaggcgaa

SEQ ID NO: 3614631 - DNA, 25 bp, Homo sapien
aattcagctggaaccacatggttgc

SEQ ID NO: 3614632 - DNA, 25 bp, Homo sapien
attcagctggaaccacatggttgcc

SEQ ID NO: 3614633 - DNA, 25 bp, Homo sapien
aaattcagctggaaccacatggttg

SEQ ID NO: 3614634 - DNA, 25 bp, Homo sapien
ttcagctggaaccacatggttgcct

SEQ ID NO: 3614635 - DNA, 25 bp, Homo sapien
tgatgacgcaatcgctcaccttcgg

SEQ ID NO: 3614636 - DNA, 25 bp, Homo sapien
gaggcatgatgacgcaatcgctcac

SEQ ID NO: 3614637 - DNA, 25 bp, Homo sapien
cttcggcctcgccagagcccaggtt

SEQ ID NO: 3614638 - DNA, 25 bp, Homo sapien
tgcccagaggcatgatgacgcaatc

SEQ ID NO: 3614639 - DNA, 25 bp, Homo sapien
gaattctagagctatcaacgggagt

SEQ ID NO: 3614640 - DNA, 25 bp, Homo sapien
catatgcagattcaagacacttccc

SEQ ID NO: 3614641 - DNA, 25 bp, Homo sapien
ctgaaggacagggactgtttaggac

SEQ ID NO: 3614642 - DNA, 25 bp, Homo sapien
gagtgtatgacgcactggagaagaa

SEQ ID NO: 3614643 - DNA, 25 bp, Homo sapien
ttttgaggtccagacccatccttac

SEQ ID NO: 3614644 - DNA, 25 bp, Homo sapien
cttttgaggtccagacccatcctta

SEQ ID NO: 3614645 - DNA, 25 bp, Homo sapien
atgatgatacaagctcatgaggaca

SEQ ID NO: 3614646 - DNA, 25 bp, Homo sapien
ttgacttcactgagcctttctttct

SEQ ID NO: 3614647 - DNA, 25 bp, Homo sapien
agatgatgatacaagctcatgagga

SEQ ID NO: 3614648 - DNA, 25 bp, Homo sapien
cccttgacttcactgagcctttctt

SEQ ID NO: 3614649 - DNA, 25 bp, Homo sapien
ggcacacacacagatgcgtgacata

SEQ ID NO: 3614650 - DNA, 25 bp, Homo sapien
cacaggcacacacacagatgcgtga

SEQ ID NO: 3614651 - DNA, 25 bp, Homo sapien
caggcacacacacagatgcgtgaca

SEQ ID NO: 3614652 - DNA, 25 bp, Homo sapien
gcacacacacagatgcgtgacatac

SEQ ID NO: 3614653 - DNA, 25 bp, Homo sapien
acctttccggatgacactgtcccag

SEQ ID NO: 3614654 - DNA, 25 bp, Homo sapien
agcctcttgcattgatgtgcacctt

SEQ ID NO: 3614655 - DNA, 25 bp, Homo sapien
tgcacctttccggatgacactgtcc

SEQ ID NO: 3614656 - DNA, 25 bp, Homo sapien
attgatgtgcacctttccggatgac

SEQ ID NO: 3614657 - DNA, 25 bp, Homo sapien
cttggaactgcaaactctttgggcc

SEQ ID NO: 3614658 - DNA, 25 bp, Homo sapien
gccaaggagagacttcttctccagg

SEQ ID NO: 3614659 - DNA, 25 bp, Homo sapien
ggaaccatgagcagaaccacttgga

SEQ ID NO: 3614660 - DNA, 25 bp, Homo sapien
ggtttggttcgcaaattcctggctg

SEQ ID NO: 3614661 - DNA, 25 bp, Homo sapien
gagatggggttactcgttggggctc

SEQ ID NO: 3614662 - DNA, 25 bp, Homo sapien
atctgtttgcaccactccgcacaca

SEQ ID NO: 3614663 - DNA, 25 bp, Homo sapien
tgtttgcaccactccgcacacacac

SEQ ID NO: 3614664 - DNA, 25 bp, Homo sapien
ccatctgtttgcaccactccgcaca

SEQ ID NO: 3614665 - DNA, 25 bp, Homo sapien
tctgtttgcaccactccgcacacac

SEQ ID NO: 3614666 - DNA, 25 bp, Homo sapien
acctctgataaaggctcctgtgtgg

SEQ ID NO: 3614667 - DNA, 25 bp, Homo sapien
gcacctctgataaaggctcctgtgt

SEQ ID NO: 3614668 - DNA, 25 bp, Homo sapien
ctctgcctgctgtaacaccccacat

SEQ ID NO: 3614669 - DNA, 25 bp, Homo sapien
ggactctgcctgctgtaacacccca

SEQ ID NO: 3614670 - DNA, 25 bp, Homo sapien
gataagtattcagcacctattctgt

SEQ ID NO: 3614671 - DNA, 25 bp, Homo sapien
taaagatagtgcaagcctccaaacc

SEQ ID NO: 3614672 - DNA, 25 bp, Homo sapien
gcagcaagaacagtattagacacat

SEQ ID NO: 3614673 - DNA, 25 bp, Homo sapien
gactctttccctgtatcgtctccaa

SEQ ID NO: 3614674 - DNA, 25 bp, Homo sapien
cttcataccatttatgactttatat

SEQ ID NO: 3614675 - DNA, 25 bp, Homo sapien
ggggcggcggcggcctggctggctg

SEQ ID NO: 3614676 - DNA, 25 bp, Homo sapien
gggcggcggcggcctggctggctgc

SEQ ID NO: 3614677 - DNA, 25 bp, Homo sapien
cccaagcgccggctctcccaggcag

SEQ ID NO: 3614678 - DNA, 25 bp, Homo sapien
ctgcccaagcgccggctctcccagg

SEQ ID NO: 3614679 - DNA, 25 bp, Homo sapien
cagccgccggaagcggcggcatcca

SEQ ID NO: 3614680 - DNA, 25 bp, Homo sapien
agccgccggaagcggcggcatccat

SEQ ID NO: 3614681 - DNA, 25 bp, Homo sapien
caattagggagtgacgagatgacaa

SEQ ID NO: 3614682 - DNA, 25 bp, Homo sapien
gattcgttcacgaaaggtgagagca

SEQ ID NO: 3614683 - DNA, 25 bp, Homo sapien
tgaagtcgtttactgagcagcagaa

SEQ ID NO: 3614684 - DNA, 25 bp, Homo sapien
tgttgcccgtcccttcagaaatgtc

SEQ ID NO: 3614685 - DNA, 25 bp, Homo sapien
tcatggcatgtcgtgcaatgtgtgg

SEQ ID NO: 3614686 - DNA, 25 bp, Homo sapien
cacctaagctgtccagaggagtgaa

SEQ ID NO: 3614687 - DNA, 25 bp, Homo sapien
agtgaaggccgagcccacagaggaa

SEQ ID NO: 3614688 - DNA, 25 bp, Homo sapien
gaaaaagatcacctaagctgtccag

SEQ ID NO: 3614689 - DNA, 25 bp, Homo sapien
tgctgtttgacttgcgtctctcggc

SEQ ID NO: 3614690 - DNA, 25 bp, Homo sapien
ttgacttgcgtctctcggcctgttt

SEQ ID NO: 3614691 - DNA, 25 bp, Homo sapien
aaagaccattggcattggagtcaga

SEQ ID NO: 3614692 - DNA, 25 bp, Homo sapien
tttattgctttaggttatagaggaa

SEQ ID NO: 3614693 - DNA, 25 bp, Homo sapien
gtgagcagagatcatcccactgcgc

SEQ ID NO: 3614694 - DNA, 25 bp, Homo sapien
ctgcagtgagcagagatcatcccac

SEQ ID NO: 3614695 - DNA, 25 bp, Homo sapien
agtgagcagagatcatcccactgcg

SEQ ID NO: 3614696 - DNA, 25 bp, Homo sapien
gcagtgagcagagatcatcccactg

SEQ ID NO: 3614697 - DNA, 25 bp, Homo sapien
cactgttgatatgcagtagacttgc

SEQ ID NO: 3614698 - DNA, 25 bp, Homo sapien
gccaggctcagtgctacactgttga

SEQ ID NO: 3614699 - DNA, 25 bp, Homo sapien
gttaaggtaacttgctagtagccag

SEQ ID NO: 3614700 - DNA, 25 bp, Homo sapien
aggcagaatccatgaccggtctaaa

SEQ ID NO: 3614701 - DNA, 25 bp, Homo sapien
tgacagtgtcgttcagggacgagct

SEQ ID NO: 3614702 - DNA, 25 bp, Homo sapien
caggacttcccaagagcgagtgaca

SEQ ID NO: 3614703 - DNA, 25 bp, Homo sapien
caatctgaatgaggacaggacttcc

SEQ ID NO: 3614704 - DNA, 25 bp, Homo sapien
tagatttccggcgaggcttcttttg

SEQ ID NO: 3614705 - DNA, 25 bp, Homo sapien
ctgtccccagcactgcgctgcagca

SEQ ID NO: 3614706 - DNA, 25 bp, Homo sapien
tgtccccagcactgcgctgcagcag

SEQ ID NO: 3614707 - DNA, 25 bp, Homo sapien
gtccccagcactgcgctgcagcagc

SEQ ID NO: 3614708 - DNA, 25 bp, Homo sapien
tgccattcccataccagccaaaaca

SEQ ID NO: 3614709 - DNA, 25 bp, Homo sapien
caaagacattaaattcttgagtgcc

SEQ ID NO: 3614710 - DNA, 25 bp, Homo sapien
tgagtgcctattaccaaatgtgtaa

SEQ ID NO: 3614711 - DNA, 25 bp, Homo sapien
ccaaatgtgtaatatctccacactg

SEQ ID NO: 3614712 - DNA, 25 bp, Homo sapien
tctctgttgccgatgaagatatggg

SEQ ID NO: 3614713 - DNA, 25 bp, Homo sapien
ttgaggatctccatagcgatgaatg

SEQ ID NO: 3614714 - DNA, 25 bp, Homo sapien
ttgtcacagtcctctctgttgccga

SEQ ID NO: 3614715 - DNA, 25 bp, Homo sapien
gcgatgaatggcagcccacgcttgt

SEQ ID NO: 3614716 - DNA, 25 bp, Homo sapien
tcttcacgtgatccaacctgatttc

SEQ ID NO: 3614717 - DNA, 25 bp, Homo sapien
tcacgtgatccaacctgatttcttt

SEQ ID NO: 3614718 - DNA, 25 bp, Homo sapien
cacgtgatccaacctgatttctttc

SEQ ID NO: 3614719 - DNA, 25 bp, Homo sapien
cttcacgtgatccaacctgatttct

SEQ ID NO: 3614720 - DNA, 25 bp, Homo sapien
tctttcaggctaggagaaattagac

SEQ ID NO: 3614721 - DNA, 25 bp, Homo sapien
tttctttcaggctaggagaaattag

SEQ ID NO: 3614722 - DNA, 25 bp, Homo sapien
catttctttcaggctaggagaaatt

SEQ ID NO: 3614723 - DNA, 25 bp, Homo sapien
ttctttcaggctaggagaaattaga

SEQ ID NO: 3614724 - DNA, 25 bp, Homo sapien
ctacatcatatgtgccctcatccct

SEQ ID NO: 3614725 - DNA, 25 bp, Homo sapien
gaaaacgcccctgattggattaaca

SEQ ID NO: 3614726 - DNA, 25 bp, Homo sapien
ttaacagacgtggttcataggacgg

SEQ ID NO: 3614727 - DNA, 25 bp, Homo sapien
tggtgcccataatcggggaaaacgc

SEQ ID NO: 3614728 - DNA, 25 bp, Homo sapien
cataggacggaatcccatttccctc

SEQ ID NO: 3614729 - DNA, 25 bp, Homo sapien
ttttcgaagcacaaataagctggtg

SEQ ID NO: 3614730 - DNA, 25 bp, Homo sapien
ttgaaagctggcttttcgaagcaca

SEQ ID NO: 3614731 - DNA, 25 bp, Homo sapien
taagctggtgatacaggccagatgg

SEQ ID NO: 3614732 - DNA, 25 bp, Homo sapien
cacaaataagctggtgatacaggcc

SEQ ID NO: 3614733 - DNA, 25 bp, Homo sapien
agttttcagaatggtcgccaacaaa

SEQ ID NO: 3614734 - DNA, 25 bp, Homo sapien
caagttttcagaatggtcgccaaca

SEQ ID NO: 3614735 - DNA, 25 bp, Homo sapien
aagttttcagaatggtcgccaacaa

SEQ ID NO: 3614736 - DNA, 25 bp, Homo sapien
tctggtttccagatgggctaatgtc

SEQ ID NO: 3614737 - DNA, 25 bp, Homo sapien
cttcccgtggaacacggtaatctgg

SEQ ID NO: 3614738 - DNA, 25 bp, Homo sapien
tctggcgttggtttccgcactaaac

SEQ ID NO: 3614739 - DNA, 25 bp, Homo sapien
tcctagctgcaaggcagcggcgctt

SEQ ID NO: 3614740 - DNA, 25 bp, Homo sapien
tgcaaagccaggctcgcggggagac

SEQ ID NO: 3614741 - DNA, 25 bp, Homo sapien
cagcagctggtgtgccgtggacgcc

SEQ ID NO: 3614742 - DNA, 25 bp, Homo sapien
ctggtgtgccgtggacgccgctgac

SEQ ID NO: 3614743 - DNA, 25 bp, Homo sapien
gtggtgagcagtagccagcagctgg

SEQ ID NO: 3614744 - DNA, 25 bp, Homo sapien
gcagtagccagcagctggtgtgccg

SEQ ID NO: 3614745 - DNA, 25 bp, Homo sapien
cgcgcgcccgaaccgggtgtccaca

SEQ ID NO: 3614746 - DNA, 25 bp, Homo sapien
gcgcgcccgaaccgggtgtccacat

SEQ ID NO: 3614747 - DNA, 25 bp, Homo sapien
gccgcgcgcccgaaccgggtgtcca

SEQ ID NO: 3614748 - DNA, 25 bp, Homo sapien
cctctcccagcagatccaggtaaga

SEQ ID NO: 3614749 - DNA, 25 bp, Homo sapien
ctcccagcagatccaggtaagaact

SEQ ID NO: 3614750 - DNA, 25 bp, Homo sapien
ctctcccagcagatccaggtaagaa

SEQ ID NO: 3614751 - DNA, 25 bp, Homo sapien
tctcccagcagatccaggtaagaac

SEQ ID NO: 3614752 - DNA, 25 bp, Homo sapien
tgaatttctggaggtggcggagctg

SEQ ID NO: 3614753 - DNA, 25 bp, Homo sapien
atgaatttctggaggtggcggagct

SEQ ID NO: 3614754 - DNA, 25 bp, Homo sapien
gacagggttggttgagcatggagat

SEQ ID NO: 3614755 - DNA, 25 bp, Homo sapien
aaaagtttgaactggaagcactggc

SEQ ID NO: 3614756 - DNA, 25 bp, Homo sapien
tggcttcccttgttctgggcagtgc

SEQ ID NO: 3614757 - DNA, 25 bp, Homo sapien
gagacgtgcacagaacaggtagaga

SEQ ID NO: 3614758 - DNA, 25 bp, Homo sapien
gaagtccgagatttggcaaaaagac

SEQ ID NO: 3614759 - DNA, 25 bp, Homo sapien
tctgcttgcatggtagaagtccgag

SEQ ID NO: 3614760 - DNA, 25 bp, Homo sapien
tcttacgcctattctgcttgcatgg

SEQ ID NO: 3614761 - DNA, 25 bp, Homo sapien
ccatcagtcttacgcctattctgct

SEQ ID NO: 3614762 - DNA, 25 bp, Homo sapien
ctttcagcttgatcaagatttttac

SEQ ID NO: 3614763 - DNA, 25 bp, Homo sapien
tctcctttctccgtcttgcaactgt

SEQ ID NO: 3614764 - DNA, 25 bp, Homo sapien
ttcatggatctttcagcttgatcaa

SEQ ID NO: 3614765 - DNA, 25 bp, Homo sapien
ttctccgtcttgcaactgtggactg

SEQ ID NO: 3614766 - DNA, 25 bp, Homo sapien
catctgcataatgaatggacgttgc

SEQ ID NO: 3614767 - DNA, 25 bp, Homo sapien
ggcaggaggagtggcaacagtgtta

SEQ ID NO: 3614768 - DNA, 25 bp, Homo sapien
taatgaatggacgttgccaataaca

SEQ ID NO: 3614769 - DNA, 25 bp, Homo sapien
ttgccaataacaggcaggaggagtg

SEQ ID NO: 3614770 - DNA, 25 bp, Homo sapien
cccagatacaaggctccatctttca

SEQ ID NO: 3614771 - DNA, 25 bp, Homo sapien
tcccagatacaaggctccatctttc

SEQ ID NO: 3614772 - DNA, 25 bp, Homo sapien
gctggcagaatcacaaggcgctgag

SEQ ID NO: 3614773 - DNA, 25 bp, Homo sapien
aatcacaaggcgctgagcatgctgg

SEQ ID NO: 3614774 - DNA, 25 bp, Homo sapien
ctctttgggtagatgttttgggaag

SEQ ID NO: 3614775 - DNA, 25 bp, Homo sapien
tcctctttgggtagatgttttggga

SEQ ID NO: 3614776 - DNA, 25 bp, Homo sapien
cctagtattatgaggtaggccattt

SEQ ID NO: 3614777 - DNA, 25 bp, Homo sapien
gttcaaatgctattaactgcttcca

SEQ ID NO: 3614778 - DNA, 25 bp, Homo sapien
gtctgttcttaaatcactcatcaaa

SEQ ID NO: 3614779 - DNA, 25 bp, Homo sapien
tgccccagtcaaactgagcctagta

SEQ ID NO: 3614780 - DNA, 25 bp, Homo sapien
gagttggcagggcatgtggagttgt

SEQ ID NO: 3614781 - DNA, 25 bp, Homo sapien
ttggcagggcatgtggagttgtaca

SEQ ID NO: 3614782 - DNA, 25 bp, Homo sapien
gcatgtggagttgtacagtgtcagt

SEQ ID NO: 3614783 - DNA, 25 bp, Homo sapien
cagggcatgtggagttgtacagtgt

SEQ ID NO: 3614784 - DNA, 25 bp, Homo sapien
ttcctcctttggatctcttggcctg

SEQ ID NO: 3614785 - DNA, 25 bp, Homo sapien
cgccgtttcaacacggccagcagct

SEQ ID NO: 3614786 - DNA, 25 bp, Homo sapien
cctttggatctcttggcctgagatc

SEQ ID NO: 3614787 - DNA, 25 bp, Homo sapien
gtttcaacacggccagcagctctgc

SEQ ID NO: 3614788 - DNA, 25 bp, Homo sapien
ctgagcaacgtctggcactctgtac

SEQ ID NO: 3614789 - DNA, 25 bp, Homo sapien
ctctgggcattgctgagcaacgtct

SEQ ID NO: 3614790 - DNA, 25 bp, Homo sapien
aacgtctggcactctgtacgcatca

SEQ ID NO: 3614791 - DNA, 25 bp, Homo sapien
gcaacgtctggcactctgtacgcat

SEQ ID NO: 3614792 - DNA, 25 bp, Homo sapien
tagtggcagactggtatgccacttt

SEQ ID NO: 3614793 - DNA, 25 bp, Homo sapien
cattgcttatttcctttgcaggatt

SEQ ID NO: 3614794 - DNA, 25 bp, Homo sapien
ggcagactggtatgccacttttctt

SEQ ID NO: 3614795 - DNA, 25 bp, Homo sapien
cctttcaactggttgatagtggcag

SEQ ID NO: 3614796 - DNA, 25 bp, Homo sapien
tcccctgacactgctgagaacttgc

SEQ ID NO: 3614797 - DNA, 25 bp, Homo sapien
gaacttgcatatcttagctgggaca

SEQ ID NO: 3614798 - DNA, 25 bp, Homo sapien
cgtttatgttggtaactgtgccgca

SEQ ID NO: 3614799 - DNA, 25 bp, Homo sapien
tgtgtacatacagacgttggcgttt

SEQ ID NO: 3614800 - DNA, 25 bp, Homo sapien
ctgtagacagatgagacatgcttga

SEQ ID NO: 3614801 - DNA, 25 bp, Homo sapien
agcatgggttcctgcaaacaagggc

SEQ ID NO: 3614802 - DNA, 25 bp, Homo sapien
catgcttgaaactctgcgacttctg

SEQ ID NO: 3614803 - DNA, 25 bp, Homo sapien
tgcagccagcatgggttcctgcaaa

SEQ ID NO: 3614804 - DNA, 25 bp, Homo sapien
aaaggtgtagtgagtgctcgcctca

SEQ ID NO: 3614805 - DNA, 25 bp, Homo sapien
ctttctccaaaggtgtagtgagtgc

SEQ ID NO: 3614806 - DNA, 25 bp, Homo sapien
tgttctttctccaaaggtgtagtga

SEQ ID NO: 3614807 - DNA, 25 bp, Homo sapien
tccaaaggtgtagtgagtgctcgcc

SEQ ID NO: 3614808 - DNA, 25 bp, Homo sapien
tgatgagcgattaaaccaaggaggc

SEQ ID NO: 3614809 - DNA, 25 bp, Homo sapien
caaggaggcttatctggtgacagtc

SEQ ID NO: 3614810 - DNA, 25 bp, Homo sapien
tactccccaaggttgagagcactgc

SEQ ID NO: 3614811 - DNA, 25 bp, Homo sapien
cccctgtgagggctgttggaaacaa

SEQ ID NO: 3614812 - DNA, 25 bp, Homo sapien
caagtgagtaaggacagcgttcagg

SEQ ID NO: 3614813 - DNA, 25 bp, Homo sapien
tattatcttacttgccagagccatg

SEQ ID NO: 3614814 - DNA, 25 bp, Homo sapien
ggtcaccatacacataacaagcaca

SEQ ID NO: 3614815 - DNA, 25 bp, Homo sapien
catcaattgtaaaggccgctgggaa

SEQ ID NO: 3614816 - DNA, 25 bp, Homo sapien
cccgatcctgaagtttggagttaca

SEQ ID NO: 3614817 - DNA, 25 bp, Homo sapien
tgcaaaacactcgtccttggaggaa

SEQ ID NO: 3614818 - DNA, 25 bp, Homo sapien
gagttacagtgcaatctcctcagca

SEQ ID NO: 3614819 - DNA, 25 bp, Homo sapien
gaacttggcttagctcccgatcctg

SEQ ID NO: 3614820 - DNA, 25 bp, Homo sapien
tgcagagcttggtagatccatagcc

SEQ ID NO: 3614821 - DNA, 25 bp, Homo sapien
gaagctgggcattggctcccagatg

SEQ ID NO: 3614822 - DNA, 25 bp, Homo sapien
cctcagcttcgggacacttgtgaaa

SEQ ID NO: 3614823 - DNA, 25 bp, Homo sapien
cagggatgtatttacttgcagtgaa

SEQ ID NO: 3614824 - DNA, 25 bp, Homo sapien
gagcccaggaattcaaggttgcggt

SEQ ID NO: 3614825 - DNA, 25 bp, Homo sapien
ctcaggaggctcagctgggaggaca

SEQ ID NO: 3614826 - DNA, 25 bp, Homo sapien
ggaggctcagctgggaggacagctt

SEQ ID NO: 3614827 - DNA, 25 bp, Homo sapien
caggaattcaaggttgcggtgagcc

SEQ ID NO: 3614828 - DNA, 25 bp, Homo sapien
tcagaacagaaaatcgaatgtgggt

SEQ ID NO: 3614829 - DNA, 25 bp, Homo sapien
tgtgaggagggacatagcttcttat

SEQ ID NO: 3614830 - DNA, 25 bp, Homo sapien
gacttgtttcgggtctctcagggac

SEQ ID NO: 3614831 - DNA, 25 bp, Homo sapien
ggtgggaatctatgagctcttctcc

SEQ ID NO: 3614832 - DNA, 25 bp, Homo sapien
tcctctagggaatggttcttgactg

SEQ ID NO: 3614833 - DNA, 25 bp, Homo sapien
tagttagcctttcctctagggaatg

SEQ ID NO: 3614834 - DNA, 25 bp, Homo sapien
agttagcctttcctctagggaatgg

SEQ ID NO: 3614835 - DNA, 25 bp, Homo sapien
aatggttcttgactgaggtcttcat

SEQ ID NO: 3614836 - DNA, 25 bp, Homo sapien
ggttgccatggtaatgcaatacttt

SEQ ID NO: 3614837 - DNA, 25 bp, Homo sapien
gttgccatggtaatgcaatactttt

SEQ ID NO: 3614838 - DNA, 25 bp, Homo sapien
gagtctcttggcactaacagaagcc

SEQ ID NO: 3614839 - DNA, 25 bp, Homo sapien
tgtttgtgggagtctcttggcacta

SEQ ID NO: 3614840 - DNA, 25 bp, Homo sapien
agtctcttggcactaacagaagcca

SEQ ID NO: 3614841 - DNA, 25 bp, Homo sapien
gtctcttggcactaacagaagccaa

SEQ ID NO: 3614842 - DNA, 25 bp, Homo sapien
aattctggccatggccttttgcttc

SEQ ID NO: 3614843 - DNA, 25 bp, Homo sapien
gccagatgtagaaccaccaggcttc

SEQ ID NO: 3614844 - DNA, 25 bp, Homo sapien
attctggccatggccttttgcttct

SEQ ID NO: 3614845 - DNA, 25 bp, Homo sapien
tttgccagatgtagaaccaccaggc

SEQ ID NO: 3614846 - DNA, 25 bp, Homo sapien
ttttaagaggtttggcttgtgttga

SEQ ID NO: 3614847 - DNA, 25 bp, Homo sapien
ctgtgtctttcccacctcgtgacct

SEQ ID NO: 3614848 - DNA, 25 bp, Homo sapien
ctttccttgggcgcctctttcctgg

SEQ ID NO: 3614849 - DNA, 25 bp, Homo sapien
cacctcgtgaccttttggaattcac

SEQ ID NO: 3614850 - DNA, 25 bp, Homo sapien
tctggtatggtcatttgtttatttc

SEQ ID NO: 3614851 - DNA, 25 bp, Homo sapien
ccaagatagctctactttcaagtgc

SEQ ID NO: 3614852 - DNA, 25 bp, Homo sapien
gcgcccggccaagatagctctactt

SEQ ID NO: 3614853 - DNA, 25 bp, Homo sapien
cggccaagatagctctactttcaag

SEQ ID NO: 3614854 - DNA, 25 bp, Homo sapien
gccatgtatccctgtgaagtcttat

SEQ ID NO: 3614855 - DNA, 25 bp, Homo sapien
tagacgtgccatgtatccctgtgaa

SEQ ID NO: 3614856 - DNA, 25 bp, Homo sapien
tgctcatagacgtgccatgtatccc

SEQ ID NO: 3614857 - DNA, 25 bp, Homo sapien
gcacagtttgctcatagacgtgcca

SEQ ID NO: 3614858 - DNA, 25 bp, Homo sapien
cttctcatggaggcgctgtcaggct

SEQ ID NO: 3614859 - DNA, 25 bp, Homo sapien
ggaggcgctgtcaggcttgagatgc

SEQ ID NO: 3614860 - DNA, 25 bp, Homo sapien
ctcatggaggcgctgtcaggcttga

SEQ ID NO: 3614861 - DNA, 25 bp, Homo sapien
gaggcgctgtcaggcttgagatgca

SEQ ID NO: 3614862 - DNA, 25 bp, Homo sapien
tactcagtagaggttgccatattcc

SEQ ID NO: 3614863 - DNA, 25 bp, Homo sapien
gatactaacaggagagattgcctca

SEQ ID NO: 3614864 - DNA, 25 bp, Homo sapien
tctttctagcagtaaagccgtgcct

SEQ ID NO: 3614865 - DNA, 25 bp, Homo sapien
gactcctgtagggttgcctggaaga

SEQ ID NO: 3614866 - DNA, 25 bp, Homo sapien
cctgcactagcacgctggtcttaaa

SEQ ID NO: 3614867 - DNA, 25 bp, Homo sapien
cccttgtggagcgtgctttggctca

SEQ ID NO: 3614868 - DNA, 25 bp, Homo sapien
taatgtgaccttccaggataagctc

SEQ ID NO: 3614869 - DNA, 25 bp, Homo sapien
gaatcatgagaatttgcccagcccg

SEQ ID NO: 3614870 - DNA, 25 bp, Homo sapien
caatacacagtttgaacatgaccca

SEQ ID NO: 3614871 - DNA, 25 bp, Homo sapien
tcctggttccggttcctgaggctcc

SEQ ID NO: 3614872 - DNA, 25 bp, Homo sapien
gtcttgatgatgcttcgtgtacaca

SEQ ID NO: 3614873 - DNA, 25 bp, Homo sapien
tctggtttggaagtctacagtgcca

SEQ ID NO: 3614874 - DNA, 25 bp, Homo sapien
aagctgaagttaacggttgatatcc

SEQ ID NO: 3614875 - DNA, 25 bp, Homo sapien
tgaagttaacggttgatatcctatg

SEQ ID NO: 3614876 - DNA, 25 bp, Homo sapien
aaagaagctgaagttaacggttgat

SEQ ID NO: 3614877 - DNA, 25 bp, Homo sapien
gttaacggttgatatcctatgtctt

SEQ ID NO: 3614878 - DNA, 25 bp, Homo sapien
catagcccttccgaagaaagtcttt

SEQ ID NO: 3614879 - DNA, 25 bp, Homo sapien
gatgtgggcagtggcgggcatctgg

SEQ ID NO: 3614880 - DNA, 25 bp, Homo sapien
tctccaggtgtttaggacgttgatc

SEQ ID NO: 3614881 - DNA, 25 bp, Homo sapien
ccaagctgtgaatggcggcatttcc

SEQ ID NO: 3614882 - DNA, 25 bp, Homo sapien
ggtgaggcctccctgcagtcatctt

SEQ ID NO: 3614883 - DNA, 25 bp, Homo sapien
tcaagaacaaggccatgggggtgat

SEQ ID NO: 3614884 - DNA, 25 bp, Homo sapien
tgtcggaacggaggtgtgaacctgg

SEQ ID NO: 3614885 - DNA, 25 bp, Homo sapien
gtgaacctggggagccggatcttct

SEQ ID NO: 3614886 - DNA, 25 bp, Homo sapien
gggtgatgacgtgtcggaacggagg

SEQ ID NO: 3614887 - DNA, 25 bp, Homo sapien
gaggaatggtatccacctgggcatg

SEQ ID NO: 3614888 - DNA, 25 bp, Homo sapien
taaggttgaccccttagatggccca

SEQ ID NO: 3614889 - DNA, 25 bp, Homo sapien
aggttgaccccttagatggcccagg

SEQ ID NO: 3614890 - DNA, 25 bp, Homo sapien
atggcccaggaacggcaggtgctag

SEQ ID NO: 3614891 - DNA, 25 bp, Homo sapien
catggggagagagccaagttgcaaa

SEQ ID NO: 3614892 - DNA, 25 bp, Homo sapien
agccaagttgcaaaccctctgggag

SEQ ID NO: 3614893 - DNA, 25 bp, Homo sapien
agagccaagttgcaaaccctctggg

SEQ ID NO: 3614894 - DNA, 25 bp, Homo sapien
gggagagagccaagttgcaaaccct

SEQ ID NO: 3614895 - DNA, 25 bp, Homo sapien
tgaggacaaaggaggagaggaaact

SEQ ID NO: 3614896 - DNA, 25 bp, Homo sapien
ctgaggacaaaggaggagaggaaac

SEQ ID NO: 3614897 - DNA, 25 bp, Homo sapien
ggacaaaggaggagaggaaactcac

SEQ ID NO: 3614898 - DNA, 25 bp, Homo sapien
aggacaaaggaggagaggaaactca

SEQ ID NO: 3614899 - DNA, 25 bp, Homo sapien
aggcagaggggatctcggtaacgca

SEQ ID NO: 3614900 - DNA, 25 bp, Homo sapien
atctcggtaacgcaggaccccaggc

SEQ ID NO: 3614901 - DNA, 25 bp, Homo sapien
gatctcggtaacgcaggaccccagg

SEQ ID NO: 3614902 - DNA, 25 bp, Homo sapien
gaggggatctcggtaacgcaggacc

SEQ ID NO: 3614903 - DNA, 25 bp, Homo sapien
ttatattgaaccacacggaggggag

SEQ ID NO: 3614904 - DNA, 25 bp, Homo sapien
gagagcttatgtgcaggagcccaca

SEQ ID NO: 3614905 - DNA, 25 bp, Homo sapien
tttatattgaaccacacggagggga

SEQ ID NO: 3614906 - DNA, 25 bp, Homo sapien
ggggagagcttatgtgcaggagccc

SEQ ID NO: 3614907 - DNA, 25 bp, Homo sapien
gcagcactgctgtaaagcaggcttg

SEQ ID NO: 3614908 - DNA, 25 bp, Homo sapien
ttgcagcactgctgtaaagcaggct

SEQ ID NO: 3614909 - DNA, 25 bp, Homo sapien
tgctgtaaagcaggcttgtcactac

SEQ ID NO: 3614910 - DNA, 25 bp, Homo sapien
gcactgctgtaaagcaggcttgtca

SEQ ID NO: 3614911 - DNA, 25 bp, Homo sapien
gaagctggcctttctgcgagccaag

SEQ ID NO: 3614912 - DNA, 25 bp, Homo sapien
gacactcggtgatccattgcaagag

SEQ ID NO: 3614913 - DNA, 25 bp, Homo sapien
catgtttggagatattgtaggtccc

SEQ ID NO: 3614914 - DNA, 25 bp, Homo sapien
tgcccaagagggacactcggtgatc

SEQ ID NO: 3614915 - DNA, 25 bp, Homo sapien
tgtgcctcccaacgaggtgccttgg

SEQ ID NO: 3614916 - DNA, 25 bp, Homo sapien
tctcctttatgataagttgctccag

SEQ ID NO: 3614917 - DNA, 25 bp, Homo sapien
tgtgtgcctcccaacgaggtgcctt

SEQ ID NO: 3614918 - DNA, 25 bp, Homo sapien
gttgctccagtccataaagaacttg

SEQ ID NO: 3614919 - DNA, 25 bp, Homo sapien
ggacgggcttccagacctacccgca

SEQ ID NO: 3614920 - DNA, 25 bp, Homo sapien
cagagtggcagttgtgtggacgggc

SEQ ID NO: 3614921 - DNA, 25 bp, Homo sapien
aggcagcccactcgaactccatgtg

SEQ ID NO: 3614922 - DNA, 25 bp, Homo sapien
ggcccagaaggtgttcagcttgttc

SEQ ID NO: 3614923 - DNA, 25 bp, Homo sapien
aagaaacatgattatcaaggcactg

SEQ ID NO: 3614924 - DNA, 25 bp, Homo sapien
ttcttgaatctcatggatctttttt

SEQ ID NO: 3614925 - DNA, 25 bp, Homo sapien
ttttcttgaatctcatggatctttt

SEQ ID NO: 3614926 - DNA, 25 bp, Homo sapien
aatctcatggatctttttttctaac

SEQ ID NO: 3614927 - DNA, 25 bp, Homo sapien
cataggctgctagggatctgtgagc

SEQ ID NO: 3614928 - DNA, 25 bp, Homo sapien
tgtttgcacctcatcctgtttttct

SEQ ID NO: 3614929 - DNA, 25 bp, Homo sapien
tgtgagcatagtctgtttgcacctc

SEQ ID NO: 3614930 - DNA, 25 bp, Homo sapien
gggatccataagcataggctgctag

SEQ ID NO: 3614931 - DNA, 25 bp, Homo sapien
cttgccgtgccaggctccggctttg

SEQ ID NO: 3614932 - DNA, 25 bp, Homo sapien
gccaggctccggctttgtggctccg

SEQ ID NO: 3614933 - DNA, 25 bp, Homo sapien
tgagtggcttcaccgggcgaatttc

SEQ ID NO: 3614934 - DNA, 25 bp, Homo sapien
ttgctcattacctgccagctggcct

SEQ ID NO: 3614935 - DNA, 25 bp, Homo sapien
gagggcgctcctgagatagctttca

SEQ ID NO: 3614936 - DNA, 25 bp, Homo sapien
aaactctgtgggcacgctagagggc

SEQ ID NO: 3614937 - DNA, 25 bp, Homo sapien
cctgcagcagacgttggccttggga

SEQ ID NO: 3614938 - DNA, 25 bp, Homo sapien
tggtgcgggctggacagtcttaaaa

SEQ ID NO: 3614939 - DNA, 25 bp, Homo sapien
tgcaaagcctctagtgaactagctc

SEQ ID NO: 3614940 - DNA, 25 bp, Homo sapien
gcagtggcgaccatgaaagcaggca

SEQ ID NO: 3614941 - DNA, 25 bp, Homo sapien
tgtgtttggatcccaaactgctgca

SEQ ID NO: 3614942 - DNA, 25 bp, Homo sapien
ctcttgaggttgtaggtggtttgtt

SEQ ID NO: 3614943 - DNA, 25 bp, Homo sapien
aatctgtcctttgcctccaagccca

SEQ ID NO: 3614944 - DNA, 25 bp, Homo sapien
agccccaggctggatttgcagaatc

SEQ ID NO: 3614945 - DNA, 25 bp, Homo sapien
cagccacagctcgggcaggcggctc

SEQ ID NO: 3614946 - DNA, 25 bp, Homo sapien
cctcatcagaaactggcagcggcag

SEQ ID NO: 3614947 - DNA, 25 bp, Homo sapien
tagaggagggatagggcaccttcct

SEQ ID NO: 3614948 - DNA, 25 bp, Homo sapien
caagaggtctccttcattgatgcca

SEQ ID NO: 3614949 - DNA, 25 bp, Homo sapien
gatgctaaggacacggtcagtggat

SEQ ID NO: 3614950 - DNA, 25 bp, Homo sapien
gttctccaacttcgagtacgtgagg

SEQ ID NO: 3614951 - DNA, 25 bp, Homo sapien
caataaggagattgcacgggcaggt

SEQ ID NO: 3614952 - DNA, 25 bp, Homo sapien
aaactttgccataccagtgatccgg

SEQ ID NO: 3614953 - DNA, 25 bp, Homo sapien
catctggtggagaaactgcagattt

SEQ ID NO: 3614954 - DNA, 25 bp, Homo sapien
agtgatccggtacccctgcagggtg

SEQ ID NO: 3614955 - DNA, 25 bp, Homo sapien
ctgccttgatactgttagatcctgt

SEQ ID NO: 3614956 - DNA, 25 bp, Homo sapien
tctctgccttgatactgttagatcc

SEQ ID NO: 3614957 - DNA, 25 bp, Homo sapien
tacaaggatgggaaaatgttgtcat

SEQ ID NO: 3614958 - DNA, 25 bp, Homo sapien
tatctctgccttgatactgttagat

SEQ ID NO: 3614959 - DNA, 25 bp, Homo sapien
gatgaaatgcggctccctttggcag

SEQ ID NO: 3614960 - DNA, 25 bp, Homo sapien
ccaggggccaaaccttgtagttgtg

SEQ ID NO: 3614961 - DNA, 25 bp, Homo sapien
gcagtatcccaactggtactcccta

SEQ ID NO: 3614962 - DNA, 25 bp, Homo sapien
gtctcattaagtacaggtccatttt

SEQ ID NO: 3614963 - DNA, 25 bp, Homo sapien
gatagggtactaatgctgatactct

SEQ ID NO: 3614964 - DNA, 25 bp, Homo sapien
gatagaagcaagatgaccaaatcta

SEQ ID NO: 3614965 - DNA, 25 bp, Homo sapien
gatactctggtactggtactcaggg

SEQ ID NO: 3614966 - DNA, 25 bp, Homo sapien
caaatctattgactaccttggtagc

SEQ ID NO: 3614967 - DNA, 25 bp, Homo sapien
ctgggcttggtaatgccgtctccaa

SEQ ID NO: 3614968 - DNA, 25 bp, Homo sapien
gcttggtaatgccgtctccaaagag

SEQ ID NO: 3614969 - DNA, 25 bp, Homo sapien
gggcttggtaatgccgtctccaaag

SEQ ID NO: 3614970 - DNA, 25 bp, Homo sapien
ttggtaatgccgtctccaaagagcc

SEQ ID NO: 3614971 - DNA, 25 bp, Homo sapien
aagtcagtgtgctggaagaatttga

SEQ ID NO: 3614972 - DNA, 25 bp, Homo sapien
aaagtcagtgtgctggaagaatttg

SEQ ID NO: 3614973 - DNA, 25 bp, Homo sapien
agtcagtgtgctggaagaatttgat

SEQ ID NO: 3614974 - DNA, 25 bp, Homo sapien
gtcagtgtgctggaagaatttgatt

SEQ ID NO: 3614975 - DNA, 25 bp, Homo sapien
tcagttgcctactgtacccattctt

SEQ ID NO: 3614976 - DNA, 25 bp, Homo sapien
tcaatctgttggcaagtggggtgct

SEQ ID NO: 3614977 - DNA, 25 bp, Homo sapien
aatgtcagttgcctactgtacccat

SEQ ID NO: 3614978 - DNA, 25 bp, Homo sapien
ttcatgaccattaatggtcaacaat

SEQ ID NO: 3614979 - DNA, 25 bp, Homo sapien
cacagttctgctttggtaaactgta

SEQ ID NO: 3614980 - DNA, 25 bp, Homo sapien
acagttctgctttggtaaactgtac

SEQ ID NO: 3614981 - DNA, 25 bp, Homo sapien
gttgtgttattgtcgtcatcattac

SEQ ID NO: 3614982 - DNA, 25 bp, Homo sapien
tgtgttattgtcgtcatcattacta

SEQ ID NO: 3614983 - DNA, 25 bp, Homo sapien
ttgttgtgttattgtcgtcatcatt

SEQ ID NO: 3614984 - DNA, 25 bp, Homo sapien
tgttattgtcgtcatcattactact

SEQ ID NO: 3614985 - DNA, 25 bp, Homo sapien
agaccttatctcaaaaaatatgtaa

SEQ ID NO: 3614986 - DNA, 25 bp, Homo sapien
aagaccttatctcaaaaaatatgta

SEQ ID NO: 3614987 - DNA, 25 bp, Homo sapien
gaccttatctcaaaaaatatgtaaa

SEQ ID NO: 3614988 - DNA, 25 bp, Homo sapien
caagaccttatctcaaaaaatatgt

SEQ ID NO: 3614989 - DNA, 25 bp, Homo sapien
tgaccattgagcttttgaaggtgat

SEQ ID NO: 3614990 - DNA, 25 bp, Homo sapien
ttttgggaactgaccattgagcttt

SEQ ID NO: 3614991 - DNA, 25 bp, Homo sapien
tgggaactgaccattgagcttttga

SEQ ID NO: 3614992 - DNA, 25 bp, Homo sapien
aggcttcttctcgatctgaaatgta

SEQ ID NO: 3614993 - DNA, 25 bp, Homo sapien
ctgaacggcatgcagggtgttctct

SEQ ID NO: 3614994 - DNA, 25 bp, Homo sapien
tgacaccctgaacggcatgcagggt

SEQ ID NO: 3614995 - DNA, 25 bp, Homo sapien
cagttgacaccctgaacggcatgca

SEQ ID NO: 3614996 - DNA, 25 bp, Homo sapien
accctgaacggcatgcagggtgttc

SEQ ID NO: 3614997 - DNA, 25 bp, Homo sapien
atgagggcctcctttgctcatggca

SEQ ID NO: 3614998 - DNA, 25 bp, Homo sapien
tgtggtctgggaattaggccttttg

SEQ ID NO: 3614999 - DNA, 25 bp, Homo sapien
tgatttactagaaccaggggtgtgg

SEQ ID NO: 3615000 - DNA, 25 bp, Homo sapien
taggccttttgaggagagattgaac

SEQ ID NO: 3615001 - DNA, 25 bp, Homo sapien
gcattgcccacagcggcggttgtca

SEQ ID NO: 3615002 - DNA, 25 bp, Homo sapien
gtcactgagcattgcccacagcggc

SEQ ID NO: 3615003 - DNA, 25 bp, Homo sapien
cacagcggcggttgtcatccaggtg

SEQ ID NO: 3615004 - DNA, 25 bp, Homo sapien
ctgagcattgcccacagcggcggtt

SEQ ID NO: 3615005 - DNA, 25 bp, Homo sapien
cttaaagggacagcgagctcttttc

SEQ ID NO: 3615006 - DNA, 25 bp, Homo sapien
tgtagagaggacgtccttaaaggga

SEQ ID NO: 3615007 - DNA, 25 bp, Homo sapien
gggacagcgagctcttttctttcct

SEQ ID NO: 3615008 - DNA, 25 bp, Homo sapien
ctgactgccagttcagatgccaggg

SEQ ID NO: 3615009 - DNA, 25 bp, Homo sapien
gcaggctccggcatctggggtgggt

SEQ ID NO: 3615010 - DNA, 25 bp, Homo sapien
atctggggtgggtgcacagctgcat

SEQ ID NO: 3615011 - DNA, 25 bp, Homo sapien
caggcaggctccggcatctggggtg

SEQ ID NO: 3615012 - DNA, 25 bp, Homo sapien
ctcaggcaggctccggcatctgggg

SEQ ID NO: 3615013 - DNA, 25 bp, Homo sapien
tccaggctgaattaaagaggagctg

SEQ ID NO: 3615014 - DNA, 25 bp, Homo sapien
tgagcgctcctgattgccctctgga

SEQ ID NO: 3615015 - DNA, 25 bp, Homo sapien
gctggattcgatgcttgaaaatgaa

SEQ ID NO: 3615016 - DNA, 25 bp, Homo sapien
tgaattccgtgctttactttcctcc

SEQ ID NO: 3615017 - DNA, 25 bp, Homo sapien
gacctctttggctaacaatctagct

SEQ ID NO: 3615018 - DNA, 25 bp, Homo sapien
ctcttccataaagtagggtcagtgg

SEQ ID NO: 3615019 - DNA, 25 bp, Homo sapien
ttccaaacttcctgacagactgtct

SEQ ID NO: 3615020 - DNA, 25 bp, Homo sapien
gactgtctatataccctctgtttcc

SEQ ID NO: 3615021 - DNA, 25 bp, Homo sapien
gtgcggctgctgttctatcaacggg

SEQ ID NO: 3615022 - DNA, 25 bp, Homo sapien
agaactatctgcttcccggatactg

SEQ ID NO: 3615023 - DNA, 25 bp, Homo sapien
tcccggatactgtgcggctgctgtt

SEQ ID NO: 3615024 - DNA, 25 bp, Homo sapien
agacagcccagaactatctgcttcc

SEQ ID NO: 3615025 - DNA, 25 bp, Homo sapien
taatactgcatttcggtgaatggac

SEQ ID NO: 3615026 - DNA, 25 bp, Homo sapien
cagacgactctgctttgccacgaat

SEQ ID NO: 3615027 - DNA, 25 bp, Homo sapien
gggctgtctgagtactaatactgca

SEQ ID NO: 3615028 - DNA, 25 bp, Homo sapien
gccacgaatgtaagtgctttccctg

SEQ ID NO: 3615029 - DNA, 25 bp, Homo sapien
atcctggaagtctgggagcagctac

SEQ ID NO: 3615030 - DNA, 25 bp, Homo sapien
gtcttgtattttgtcggattgaggg

SEQ ID NO: 3615031 - DNA, 25 bp, Homo sapien
tccttgatacaggtcgacctagtgg

SEQ ID NO: 3615032 - DNA, 25 bp, Homo sapien
cacctgggaaataattggtggcagc

SEQ ID NO: 3615033 - DNA, 25 bp, Homo sapien
catgaataattgagcgccggcaagc

SEQ ID NO: 3615034 - DNA, 25 bp, Homo sapien
gcagctgaccttgaatggtggtcat

SEQ ID NO: 3615035 - DNA, 25 bp, Homo sapien
aacagagggagggattataactgat

SEQ ID NO: 3615036 - DNA, 25 bp, Homo sapien
aactgatgaactgacctgcagtcca

SEQ ID NO: 3615037 - DNA, 25 bp, Homo sapien
ggaagtagaattgtttcactcaaag

SEQ ID NO: 3615038 - DNA, 25 bp, Homo sapien
tcactcaaagaaaggaggataggaa

SEQ ID NO: 3615039 - DNA, 25 bp, Homo sapien
tgcctcttgaggaacattgacctga

SEQ ID NO: 3615040 - DNA, 25 bp, Homo sapien
cctgagtcaggaaggccacctaact

SEQ ID NO: 3615041 - DNA, 25 bp, Homo sapien
tcagagaggagtagtttgtccccag

SEQ ID NO: 3615042 - DNA, 25 bp, Homo sapien
tgacctgacagtaccatagcaacct

SEQ ID NO: 3615043 - DNA, 25 bp, Homo sapien
tagtgtttgtcatgcctgttcctgg

SEQ ID NO: 3615044 - DNA, 25 bp, Homo sapien
tgtcatttcgggcatggagtcctgg

SEQ ID NO: 3615045 - DNA, 25 bp, Homo sapien
ggttctattgcagggccttgtctcc

SEQ ID NO: 3615046 - DNA, 25 bp, Homo sapien
gaattccaaactctggactgaacag

SEQ ID NO: 3615047 - DNA, 25 bp, Homo sapien
tgtcaagatgttgcccttgcagcgg

SEQ ID NO: 3615048 - DNA, 25 bp, Homo sapien
gatctgcagatggcatttgtaggaa

SEQ ID NO: 3615049 - DNA, 25 bp, Homo sapien
tctgtcaagatgttgcccttgcagc

SEQ ID NO: 3615050 - DNA, 25 bp, Homo sapien
aagatgttgcccttgcagcgggtag

SEQ ID NO: 3615051 - DNA, 25 bp, Homo sapien
gagtcctcgtagactctgaatttgg

SEQ ID NO: 3615052 - DNA, 25 bp, Homo sapien
tagtgatagtacagaaagaataacc

SEQ ID NO: 3615053 - DNA, 25 bp, Homo sapien
gaataaccatcttcatggagtcctc

SEQ ID NO: 3615054 - DNA, 25 bp, Homo sapien
tgggcacagaatgtagactctagca

SEQ ID NO: 3615055 - DNA, 25 bp, Homo sapien
ctgcaaatggaggcatttgcaggca

SEQ ID NO: 3615056 - DNA, 25 bp, Homo sapien
gcaaatggaggcatttgcaggcagc

SEQ ID NO: 3615057 - DNA, 25 bp, Homo sapien
aaatggaggcatttgcaggcagcat

SEQ ID NO: 3615058 - DNA, 25 bp, Homo sapien
caaatggaggcatttgcaggcagca

SEQ ID NO: 3615059 - DNA, 25 bp, Homo sapien
ggtagcaagagttgagacagtagtt

SEQ ID NO: 3615060 - DNA, 25 bp, Homo sapien
gggagaagtttccaagaacagcaca

SEQ ID NO: 3615061 - DNA, 25 bp, Homo sapien
aaggattaattgcaggctgggtagc

SEQ ID NO: 3615062 - DNA, 25 bp, Homo sapien
tgagacagtagttgagaccggcaga

SEQ ID NO: 3615063 - DNA, 25 bp, Homo sapien
accaggacggagacaccatggtgga

SEQ ID NO: 3615064 - DNA, 25 bp, Homo sapien
ggctcagatcactcctcggacaagt

SEQ ID NO: 3615065 - DNA, 25 bp, Homo sapien
gagaagggctcagatcactcctcgg

SEQ ID NO: 3615066 - DNA, 25 bp, Homo sapien
caaccccgcagaaccaggacggaga

SEQ ID NO: 3615067 - DNA, 25 bp, Homo sapien
agattctgtacaccctaagcctggc

SEQ ID NO: 3615068 - DNA, 25 bp, Homo sapien
caggcgtcagggaccaggtagaatt

SEQ ID NO: 3615069 - DNA, 25 bp, Homo sapien
gagttttctgacattggttacccac

SEQ ID NO: 3615070 - DNA, 25 bp, Homo sapien
gatgttctgtaagctccgaggtagg

SEQ ID NO: 3615071 - DNA, 25 bp, Homo sapien
tgctggtcctagttccattgtatgt

SEQ ID NO: 3615072 - DNA, 25 bp, Homo sapien
gacccatcaaagtctctcattctga

SEQ ID NO: 3615073 - DNA, 25 bp, Homo sapien
ggtagacagacccatcaaagtctct

SEQ ID NO: 3615074 - DNA, 25 bp, Homo sapien
gtgactgctggtcctagttccattg

SEQ ID NO: 3615075 - DNA, 25 bp, Homo sapien
tctttatggaactataaaggcaaac

SEQ ID NO: 3615076 - DNA, 25 bp, Homo sapien
ctaggctggttctcaagcaaccctc

SEQ ID NO: 3615077 - DNA, 25 bp, Homo sapien
atggaactataaaggcaaaccttgg

SEQ ID NO: 3615078 - DNA, 25 bp, Homo sapien
catgaaactaagtagcaaaaggtct

SEQ ID NO: 3615079 - DNA, 25 bp, Homo sapien
ccatcattctgaagccttctgcaat

SEQ ID NO: 3615080 - DNA, 25 bp, Homo sapien
ctcagtgtcaggctgccatcattct

SEQ ID NO: 3615081 - DNA, 25 bp, Homo sapien
aagccttctgcaatttcagtttggc

SEQ ID NO: 3615082 - DNA, 25 bp, Homo sapien
cttctgcaatttcagtttggcccac

SEQ ID NO: 3615083 - DNA, 25 bp, Homo sapien
agcagtgtttgggatgcccaaacac

SEQ ID NO: 3615084 - DNA, 25 bp, Homo sapien
gtcacattagcaaagtgagcagtgt

SEQ ID NO: 3615085 - DNA, 25 bp, Homo sapien
gtttgggatgcccaaacacctcatg

SEQ ID NO: 3615086 - DNA, 25 bp, Homo sapien
tgggatgcccaaacacctcatgcca

SEQ ID NO: 3615087 - DNA, 25 bp, Homo sapien
tccttgcttgctcgcgttgtacatt

SEQ ID NO: 3615088 - DNA, 25 bp, Homo sapien
actgatttgctctttttcgtcttcc

SEQ ID NO: 3615089 - DNA, 25 bp, Homo sapien
ctgtccttgcttgctcgcgttgtac

SEQ ID NO: 3615090 - DNA, 25 bp, Homo sapien
ttgcttgctcgcgttgtacattttc

SEQ ID NO: 3615091 - DNA, 25 bp, Homo sapien
gctgaatagtctctgggctcgctct

SEQ ID NO: 3615092 - DNA, 25 bp, Homo sapien
caaagaggtatcaagtgactctagg

SEQ ID NO: 3615093 - DNA, 25 bp, Homo sapien
ggactttcctttggtgctgaatagt

SEQ ID NO: 3615094 - DNA, 25 bp, Homo sapien
tatcaagtgactctagggactttcc

SEQ ID NO: 3615095 - DNA, 25 bp, Homo sapien
tgggctccagcctgcgtcagagcac

SEQ ID NO: 3615096 - DNA, 25 bp, Homo sapien
ttgagtctgttacagaaatcagaaa

SEQ ID NO: 3615097 - DNA, 25 bp, Homo sapien
tccagcctgcgtcagagcactgctt

SEQ ID NO: 3615098 - DNA, 25 bp, Homo sapien
cttgagtctgttacagaaatcagaa

SEQ ID NO: 3615099 - DNA, 25 bp, Homo sapien
tatacctatcttgcgtggcccgagt

SEQ ID NO: 3615100 - DNA, 25 bp, Homo sapien
gatcagaattgatctggtcccagag

SEQ ID NO: 3615101 - DNA, 25 bp, Homo sapien
gacctccatatacctatcttgcgtg

SEQ ID NO: 3615102 - DNA, 25 bp, Homo sapien
tacaaatcccttgggttcccactga

SEQ ID NO: 3615103 - DNA, 25 bp, Homo sapien
ctttggccatgacatccatgagcca

SEQ ID NO: 3615104 - DNA, 25 bp, Homo sapien
tggccatgacatccatgagccattc

SEQ ID NO: 3615105 - DNA, 25 bp, Homo sapien
ttttagtgagcatctctttggccat

SEQ ID NO: 3615106 - DNA, 25 bp, Homo sapien
tgctgctgctccagtattgtctcca

SEQ ID NO: 3615107 - DNA, 25 bp, Homo sapien
catgagctagagtggatattcctcc

SEQ ID NO: 3615108 - DNA, 25 bp, Homo sapien
tccagggcatgagctagagtggata

SEQ ID NO: 3615109 - DNA, 25 bp, Homo sapien
ggcatgagctagagtggatattcct

SEQ ID NO: 3615110 - DNA, 25 bp, Homo sapien
cagggcatgagctagagtggatatt

SEQ ID NO: 3615111 - DNA, 25 bp, Homo sapien
tgaagagtgcctatgcccacagccc

SEQ ID NO: 3615112 - DNA, 25 bp, Homo sapien
aatgcagtttcatgtaatccctgtg

SEQ ID NO: 3615113 - DNA, 25 bp, Homo sapien
caaagaaggaggcatggtgcagact

SEQ ID NO: 3615114 - DNA, 25 bp, Homo sapien
agaagccaaaactattcccagaaag

SEQ ID NO: 3615115 - DNA, 25 bp, Homo sapien
atgcattttgggtctgagaggagca

SEQ ID NO: 3615116 - DNA, 25 bp, Homo sapien
cattttgggtctgagaggagcattt

SEQ ID NO: 3615117 - DNA, 25 bp, Homo sapien
aagatgcattttgggtctgagagga

SEQ ID NO: 3615118 - DNA, 25 bp, Homo sapien
tttgggtctgagaggagcattttcc

SEQ ID NO: 3615119 - DNA, 25 bp, Homo sapien
tgctgacgatctccccaacatctga

SEQ ID NO: 3615120 - DNA, 25 bp, Homo sapien
gggtcttgtgactggagatcctcaa

SEQ ID NO: 3615121 - DNA, 25 bp, Homo sapien
gatgctgacgatctccccaacatct

SEQ ID NO: 3615122 - DNA, 25 bp, Homo sapien
tgactggagatcctcaacaggccct

SEQ ID NO: 3615123 - DNA, 25 bp, Homo sapien
tacaataagacattgcagaagcaaa

SEQ ID NO: 3615124 - DNA, 25 bp, Homo sapien
ggcctctgctccaggcaaggcagct

SEQ ID NO: 3615125 - DNA, 25 bp, Homo sapien
gaagcaaaagggtggcctctgctcc

SEQ ID NO: 3615126 - DNA, 25 bp, Homo sapien
tgtcgttcttcagccctccttgctt

SEQ ID NO: 3615127 - DNA, 25 bp, Homo sapien
gccatctatgggaaagaacacgggt

SEQ ID NO: 3615128 - DNA, 25 bp, Homo sapien
tataactgtactttgcctggcgctg

SEQ ID NO: 3615129 - DNA, 25 bp, Homo sapien
cttgggtgccacgtgctgagattgc

SEQ ID NO: 3615130 - DNA, 25 bp, Homo sapien
cgagtgcagtcgagttgtctggcca

SEQ ID NO: 3615131 - DNA, 25 bp, Homo sapien
gaactaatcatgagctgtccaccag

SEQ ID NO: 3615132 - DNA, 25 bp, Homo sapien
tgaaccagttccagccagttaaggg

SEQ ID NO: 3615133 - DNA, 25 bp, Homo sapien
tagatacacgagctattgggccacc

SEQ ID NO: 3615134 - DNA, 25 bp, Homo sapien
acaaagttatccaccgggcgcagtg

SEQ ID NO: 3615135 - DNA, 25 bp, Homo sapien
caaagtcacttgtacaacctgccat

SEQ ID NO: 3615136 - DNA, 25 bp, Homo sapien
ggagttggagaatcctgtgcctctg

SEQ ID NO: 3615137 - DNA, 25 bp, Homo sapien
caaagcagttcaccttccgaagcgc

SEQ ID NO: 3615138 - DNA, 25 bp, Homo sapien
agttcagattgcctcgacactcagg

SEQ ID NO: 3615139 - DNA, 25 bp, Homo sapien
cactggtaccgcagagttctccttg

SEQ ID NO: 3615140 - DNA, 25 bp, Homo sapien
tccactggtaccgcagagttctcct

SEQ ID NO: 3615141 - DNA, 25 bp, Homo sapien
tcctccactggtaccgcagagttct

SEQ ID NO: 3615142 - DNA, 25 bp, Homo sapien
ctattcctccactggtaccgcagag

SEQ ID NO: 3615143 - DNA, 25 bp, Homo sapien
aaactctgtattctgatagctctgt

SEQ ID NO: 3615144 - DNA, 25 bp, Homo sapien
ctgtattctgatagctctgtaagaa

SEQ ID NO: 3615145 - DNA, 25 bp, Homo sapien
ctctgtattctgatagctctgtaag

SEQ ID NO: 3615146 - DNA, 25 bp, Homo sapien
atcacaaactctgtattctgatagc

SEQ ID NO: 3615147 - DNA, 25 bp, Homo sapien
agccacaaggtgaggaagaccagaa

SEQ ID NO: 3615148 - DNA, 25 bp, Homo sapien
gtgaggaagaccagaaggatgtaca

SEQ ID NO: 3615149 - DNA, 25 bp, Homo sapien
tgtagcaatatatcatctcgatgag

SEQ ID NO: 3615150 - DNA, 25 bp, Homo sapien
gggctgcctcttcggcttttgagac

SEQ ID NO: 3615151 - DNA, 25 bp, Homo sapien
caggtttctgccttagggccaggag

SEQ ID NO: 3615152 - DNA, 25 bp, Homo sapien
cagccaaagccagaataaacccaac

SEQ ID NO: 3615153 - DNA, 25 bp, Homo sapien
cctcaggtttctgccttagggccag

SEQ ID NO: 3615154 - DNA, 25 bp, Homo sapien
agagaaccagggagaccttgtggga

SEQ ID NO: 3615155 - DNA, 25 bp, Homo sapien
acttcccaccagctatgcacgaggg

SEQ ID NO: 3615156 - DNA, 25 bp, Homo sapien
cttgccacacttcccaccagctatg

SEQ ID NO: 3615157 - DNA, 25 bp, Homo sapien
gacgaactagctcagccttgccaca

SEQ ID NO: 3615158 - DNA, 25 bp, Homo sapien
ctggcagacgaactagctcagcctt

SEQ ID NO: 3615159 - DNA, 25 bp, Homo sapien
tgctggagatagactgagaaaggct

SEQ ID NO: 3615160 - DNA, 25 bp, Homo sapien
tcaggatgcaggactccggttgcaa

SEQ ID NO: 3615161 - DNA, 25 bp, Homo sapien
ttcccactcacgaacacggaactag

SEQ ID NO: 3615162 - DNA, 25 bp, Homo sapien
gagttaggctgctgaaaggccttcc

SEQ ID NO: 3615163 - DNA, 25 bp, Homo sapien
cctggtggccattccgatactcgta

SEQ ID NO: 3615164 - DNA, 25 bp, Homo sapien
tcaaactcccgggacacattgcagg

SEQ ID NO: 3615165 - DNA, 25 bp, Homo sapien
atcagccgcgtcgtcttcacaaagg

SEQ ID NO: 3615166 - DNA, 25 bp, Homo sapien
tagaggccagagtcgttcagagtga

SEQ ID NO: 3615167 - DNA, 25 bp, Homo sapien
gagaggcacacgtcacatcttttgc

SEQ ID NO: 3615168 - DNA, 25 bp, Homo sapien
cagagaggcacacgtcacatctttt

SEQ ID NO: 3615169 - DNA, 25 bp, Homo sapien
cctctgacataacagccaaactcat

SEQ ID NO: 3615170 - DNA, 25 bp, Homo sapien
agaggcacacgtcacatcttttgct

SEQ ID NO: 3615171 - DNA, 25 bp, Homo sapien
ctggtaacagccctataatttggct

SEQ ID NO: 3615172 - DNA, 25 bp, Homo sapien
cagaggtgataataagtgtgaagtc

SEQ ID NO: 3615173 - DNA, 25 bp, Homo sapien
gtgaagtcaagaatcaaacccaggt

SEQ ID NO: 3615174 - DNA, 25 bp, Homo sapien
gaaggagtaaataatggtcatctcc

SEQ ID NO: 3615175 - DNA, 25 bp, Homo sapien
taatcaagggtgcttgcagctggcc

SEQ ID NO: 3615176 - DNA, 25 bp, Homo sapien
taggagactcggcacagcaagtatc

SEQ ID NO: 3615177 - DNA, 25 bp, Homo sapien
caaaatgtgtggtagggcgcctatc

SEQ ID NO: 3615178 - DNA, 25 bp, Homo sapien
gtatccacgagagaactgtttgaca

SEQ ID NO: 3615179 - DNA, 25 bp, Homo sapien
ggatctgtcagtgtttggaagagaa

SEQ ID NO: 3615180 - DNA, 25 bp, Homo sapien
agaaggagccagtgtttgctagctt

SEQ ID NO: 3615181 - DNA, 25 bp, Homo sapien
cagttatctgctgaggatctgtcag

SEQ ID NO: 3615182 - DNA, 25 bp, Homo sapien
gcttcactaaggctgtcagttatct

SEQ ID NO: 3615183 - DNA, 25 bp, Homo sapien
aggccagagtcagcagtctaacata

SEQ ID NO: 3615184 - DNA, 25 bp, Homo sapien
ggccagagtcagcagtctaacatac

SEQ ID NO: 3615185 - DNA, 25 bp, Homo sapien
cattccaccaccgtggtggcctcca

SEQ ID NO: 3615186 - DNA, 25 bp, Homo sapien
tctcttcatgcaggagatgcagcgc

SEQ ID NO: 3615187 - DNA, 25 bp, Homo sapien
tcgggcctgtagaaccattccacca

SEQ ID NO: 3615188 - DNA, 25 bp, Homo sapien
atctttaccgccctcgggcctgtag

SEQ ID NO: 3615189 - DNA, 25 bp, Homo sapien
ggttgccctgcacggcctccgtctc

SEQ ID NO: 3615190 - DNA, 25 bp, Homo sapien
tccgagggcacttccacacacacag

SEQ ID NO: 3615191 - DNA, 25 bp, Homo sapien
acggcctccgtctccgagggcactt

SEQ ID NO: 3615192 - DNA, 25 bp, Homo sapien
cgtctccgagggcacttccacacac

SEQ ID NO: 3615193 - DNA, 25 bp, Homo sapien
aaagccacgtgcacatgtctacacc

SEQ ID NO: 3615194 - DNA, 25 bp, Homo sapien
aagccacgtgcacatgtctacacct

SEQ ID NO: 3615195 - DNA, 25 bp, Homo sapien
agccacgtgcacatgtctacacctt

SEQ ID NO: 3615196 - DNA, 25 bp, Homo sapien
aaaagccacgtgcacatgtctacac

SEQ ID NO: 3615197 - DNA, 25 bp, Homo sapien
cctggatgatctagacattgactga

SEQ ID NO: 3615198 - DNA, 25 bp, Homo sapien
tgtacacattggaggagacctggat

SEQ ID NO: 3615199 - DNA, 25 bp, Homo sapien
gaatgtacaggctcagaacgtgtac

SEQ ID NO: 3615200 - DNA, 25 bp, Homo sapien
tgcgctccctgaatgtacaggctca

SEQ ID NO: 3615201 - DNA, 25 bp, Homo sapien
tcagtttggtgagacaacactcagt

SEQ ID NO: 3615202 - DNA, 25 bp, Homo sapien
tcagtttgcaaagaaactgagaatg

SEQ ID NO: 3615203 - DNA, 25 bp, Homo sapien
ctgagaatgggcaaagatgggcata

SEQ ID NO: 3615204 - DNA, 25 bp, Homo sapien
gcaaagatgggcatactgtgtacac

SEQ ID NO: 3615205 - DNA, 25 bp, Homo sapien
cccagtagataagcacgagagaagc

SEQ ID NO: 3615206 - DNA, 25 bp, Homo sapien
cttctggggctggcggcttccaagg

SEQ ID NO: 3615207 - DNA, 25 bp, Homo sapien
tccccagttcgagggagccgatcag

SEQ ID NO: 3615208 - DNA, 25 bp, Homo sapien
cagagagattccctcggtcaaggac

SEQ ID NO: 3615209 - DNA, 25 bp, Homo sapien
tttgcgcccagggtaagctcagctc

SEQ ID NO: 3615210 - DNA, 25 bp, Homo sapien
ctttctgaccgaaggaagggccgag

SEQ ID NO: 3615211 - DNA, 25 bp, Homo sapien
gcccgtctgggctacagaatgcgtt

SEQ ID NO: 3615212 - DNA, 25 bp, Homo sapien
tacagaatgcgttccacgtcggtcc

SEQ ID NO: 3615213 - DNA, 25 bp, Homo sapien
gatcggttgcgttccgactggaatc

SEQ ID NO: 3615214 - DNA, 25 bp, Homo sapien
cctgggtggcaggtgatcagcaacc

SEQ ID NO: 3615215 - DNA, 25 bp, Homo sapien
gatacattatagcattccaaggaac

SEQ ID NO: 3615216 - DNA, 25 bp, Homo sapien
tccaggtcagtaagtcagcaattcc

SEQ ID NO: 3615217 - DNA, 25 bp, Homo sapien
gagggagaaatttcaggttcacatc

SEQ ID NO: 3615218 - DNA, 25 bp, Homo sapien
cagcaattccttactgaactcacgt

SEQ ID NO: 3615219 - DNA, 25 bp, Homo sapien
tcacaacaactctaagaggtatgcg

SEQ ID NO: 3615220 - DNA, 25 bp, Homo sapien
gcctctaaattgtggagcattacat

SEQ ID NO: 3615221 - DNA, 25 bp, Homo sapien
gaggtatgcgttattgttatgccca

SEQ ID NO: 3615222 - DNA, 25 bp, Homo sapien
tatttactagcctctaaattgtgga

SEQ ID NO: 3615223 - DNA, 25 bp, Homo sapien
gccaagaaatgttatagtccagagg

SEQ ID NO: 3615224 - DNA, 25 bp, Homo sapien
taaacacagggtgaggtaacatgac

SEQ ID NO: 3615225 - DNA, 25 bp, Homo sapien
tgtctgattccagcggcagcatgct

SEQ ID NO: 3615226 - DNA, 25 bp, Homo sapien
catggctaacaagtggagaatctga

SEQ ID NO: 3615227 - DNA, 25 bp, Homo sapien
ccttgcaagtgaacggtgaggctca

SEQ ID NO: 3615228 - DNA, 25 bp, Homo sapien
tatttcagaattgactgtcacagcc

SEQ ID NO: 3615229 - DNA, 25 bp, Homo sapien
caaatgtagggtgtgatgatgacga

SEQ ID NO: 3615230 - DNA, 25 bp, Homo sapien
cctctgagctgacttggtccagtag

SEQ ID NO: 3615231 - DNA, 25 bp, Homo sapien
tcttttcaccagcaacctatgagtg

SEQ ID NO: 3615232 - DNA, 25 bp, Homo sapien
tcataggaaatgaccaaaccgcttt

SEQ ID NO: 3615233 - DNA, 25 bp, Homo sapien
caggtgtggcatgtatcaacaggcc

SEQ ID NO: 3615234 - DNA, 25 bp, Homo sapien
tgctacaagcaatcgtatacaggtt

SEQ ID NO: 3615235 - DNA, 25 bp, Homo sapien
ctatatttctcatgcatggagggag

SEQ ID NO: 3615236 - DNA, 25 bp, Homo sapien
aaaagggcatagaggagctggctgc

SEQ ID NO: 3615237 - DNA, 25 bp, Homo sapien
tggtccatatacttggcaaagaata

SEQ ID NO: 3615238 - DNA, 25 bp, Homo sapien
tgaatttagccttggtccatatact

SEQ ID NO: 3615239 - DNA, 25 bp, Homo sapien
agatgggggcggctgcagttgctgc

SEQ ID NO: 3615240 - DNA, 25 bp, Homo sapien
gagatgggggcggctgcagttgctg

SEQ ID NO: 3615241 - DNA, 25 bp, Homo sapien
tgagatgggggcggctgcagttgct

SEQ ID NO: 3615242 - DNA, 25 bp, Homo sapien
ctaggtcgcttttcctgccacgtgg

SEQ ID NO: 3615243 - DNA, 25 bp, Homo sapien
aagtcaagggacctcttgaagttca

SEQ ID NO: 3615244 - DNA, 25 bp, Homo sapien
agtcaagggacctcttgaagttcat

SEQ ID NO: 3615245 - DNA, 25 bp, Homo sapien
tcccaccccagtcgaccaagatcat

SEQ ID NO: 3615246 - DNA, 25 bp, Homo sapien
tctcccaccccagtcgaccaagatc

SEQ ID NO: 3615247 - DNA, 25 bp, Homo sapien
ctcccaccccagtcgaccaagatca

SEQ ID NO: 3615248 - DNA, 25 bp, Homo sapien
cagggtttactcctcattgtttgga

SEQ ID NO: 3615249 - DNA, 25 bp, Homo sapien
ggaggcaaggatcttctccctttat

SEQ ID NO: 3615250 - DNA, 25 bp, Homo sapien
ggagggcctttcagaatatcatgct

SEQ ID NO: 3615251 - DNA, 25 bp, Homo sapien
gaggttaaccaatatcttacagctt

SEQ ID NO: 3615252 - DNA, 25 bp, Homo sapien
tgaacccaagcaccaagcaattgct

SEQ ID NO: 3615253 - DNA, 25 bp, Homo sapien
tgtagacctgttgccaagattccgc

SEQ ID NO: 3615254 - DNA, 25 bp, Homo sapien
cacagctcttttgccgtggaactgc

SEQ ID NO: 3615255 - DNA, 25 bp, Homo sapien
tcttctcgttagtagttccttggac

SEQ ID NO: 3615256 - DNA, 25 bp, Homo sapien
tgaaacctcggtgtacacacgtgca

SEQ ID NO: 3615257 - DNA, 25 bp, Homo sapien
ctgaaacctcggtgtacacacgtgc

SEQ ID NO: 3615258 - DNA, 25 bp, Homo sapien
taatctgatttatgaaattctccat

SEQ ID NO: 3615259 - DNA, 25 bp, Homo sapien
tgatgttaatctgatttatgaaatt

SEQ ID NO: 3615260 - DNA, 25 bp, Homo sapien
gttaatctgatttatgaaattctcc

SEQ ID NO: 3615261 - DNA, 25 bp, Homo sapien
cttgatgttaatctgatttatgaaa

SEQ ID NO: 3615262 - DNA, 25 bp, Homo sapien
tccaggcttggatcttatctcagag

SEQ ID NO: 3615263 - DNA, 25 bp, Homo sapien
ccaggacaagctgtgcttaggctta

SEQ ID NO: 3615264 - DNA, 25 bp, Homo sapien
tggcagacatttcacccaggacaag

SEQ ID NO: 3615265 - DNA, 25 bp, Homo sapien
gagaaactatcttttgtggcagaca

SEQ ID NO: 3615266 - DNA, 25 bp, Homo sapien
gtaagatgggaagtcccagaaacca

SEQ ID NO: 3615267 - DNA, 25 bp, Homo sapien
gaagtatcaggacactgaagccctg

SEQ ID NO: 3615268 - DNA, 25 bp, Homo sapien
tatttgagtatgaaccaccctcaga

SEQ ID NO: 3615269 - DNA, 25 bp, Homo sapien
tgagtatgaaccaccctcagaagta

SEQ ID NO: 3615270 - DNA, 25 bp, Homo sapien
ttactcatacgacccctgtgaaggg

SEQ ID NO: 3615271 - DNA, 25 bp, Homo sapien
tggatgaaacatcccctcaaggcgt

SEQ ID NO: 3615272 - DNA, 25 bp, Homo sapien
ttgacaaggtccacatgaagcagcc

SEQ ID NO: 3615273 - DNA, 25 bp, Homo sapien
ttttggacgatataggaaccacgac

SEQ ID NO: 3615274 - DNA, 25 bp, Homo sapien
tctgatgcctaattaagtgatatcc

SEQ ID NO: 3615275 - DNA, 25 bp, Homo sapien
ctctgatgcctaattaagtgatatc

SEQ ID NO: 3615276 - DNA, 25 bp, Homo sapien
ctaggaggtcttttctgagtgggtc

SEQ ID NO: 3615277 - DNA, 25 bp, Homo sapien
gaggtcttttctgagtgggtcctct

SEQ ID NO: 3615278 - DNA, 25 bp, Homo sapien
cagtgtgtgttctctgatgcctgac

SEQ ID NO: 3615279 - DNA, 25 bp, Homo sapien
cccagtgtgtgttctctgatgcctg

SEQ ID NO: 3615280 - DNA, 25 bp, Homo sapien
ccagtgtgtgttctctgatgcctga

SEQ ID NO: 3615281 - DNA, 25 bp, Homo sapien
tccccagtgtgtgttctctgatgcc

SEQ ID NO: 3615282 - DNA, 25 bp, Homo sapien
aggtggtccctgcgactgaagctct

SEQ ID NO: 3615283 - DNA, 25 bp, Homo sapien
gtggtccctgcgactgaagctcttc

SEQ ID NO: 3615284 - DNA, 25 bp, Homo sapien
cattcgttgcatcggcagggcctca

SEQ ID NO: 3615285 - DNA, 25 bp, Homo sapien
cacattcgttgcatcggcagggcct

SEQ ID NO: 3615286 - DNA, 25 bp, Homo sapien
gtagagttcctcagcagcgtgcgtc

SEQ ID NO: 3615287 - DNA, 25 bp, Homo sapien
gatgtctgacaaggtctgaagtcca

SEQ ID NO: 3615288 - DNA, 25 bp, Homo sapien
cagtcatgatgcctccctaacaggg

SEQ ID NO: 3615289 - DNA, 25 bp, Homo sapien
caggtaccgcctgtgttcactgaag

SEQ ID NO: 3615290 - DNA, 25 bp, Homo sapien
ttctggttctcccaaaacaggcctg

SEQ ID NO: 3615291 - DNA, 25 bp, Homo sapien
aaacaggcctgtgtatatcctccaa

SEQ ID NO: 3615292 - DNA, 25 bp, Homo sapien
tggttctcccaaaacaggcctgtgt

SEQ ID NO: 3615293 - DNA, 25 bp, Homo sapien
aacaggcctgtgtatatcctccaaa

SEQ ID NO: 3615294 - DNA, 25 bp, Homo sapien
ctgtgtaggtaaaactcaggatttc

SEQ ID NO: 3615295 - DNA, 25 bp, Homo sapien
aaactcaggatttctggctcttgag

SEQ ID NO: 3615296 - DNA, 25 bp, Homo sapien
tggctcttgagtctcctgaggctct

SEQ ID NO: 3615297 - DNA, 25 bp, Homo sapien
tgaggctcttggatatctgggaccc

SEQ ID NO: 3615298 - DNA, 25 bp, Homo sapien
cagagagacaacaattccacagtct

SEQ ID NO: 3615299 - DNA, 25 bp, Homo sapien
cctgggaaaagcatacggccacatc

SEQ ID NO: 3615300 - DNA, 25 bp, Homo sapien
tgttgggtccagatcactccactgg

SEQ ID NO: 3615301 - DNA, 25 bp, Homo sapien
gccacatccttgaacgttaccagtc

SEQ ID NO: 3615302 - DNA, 25 bp, Homo sapien
tcaaaacgtgatgctacgggtagcc

SEQ ID NO: 3615303 - DNA, 25 bp, Homo sapien
ctgaaaccacataaggatttcatca

SEQ ID NO: 3615304 - DNA, 25 bp, Homo sapien
gatttcatcaaaacgtgatgctacg

SEQ ID NO: 3615305 - DNA, 25 bp, Homo sapien
gctacgggtagcctcgtattttgtc

SEQ ID NO: 3615306 - DNA, 25 bp, Homo sapien
tggtacagaggtaactagggcacac

SEQ ID NO: 3615307 - DNA, 25 bp, Homo sapien
tctctgtggtacagaggtaactagg

SEQ ID NO: 3615308 - DNA, 25 bp, Homo sapien
tagtatggcttatgcccagtggttc

SEQ ID NO: 3615309 - DNA, 25 bp, Homo sapien
tgtttagtatggcttatgcccagtg

SEQ ID NO: 3615310 - DNA, 25 bp, Homo sapien
ctgtgacagagcagtaagaagagca

SEQ ID NO: 3615311 - DNA, 25 bp, Homo sapien
acagagcagtaagaagagcaaccat

SEQ ID NO: 3615312 - DNA, 25 bp, Homo sapien
tgtgacagagcagtaagaagagcaa

SEQ ID NO: 3615313 - DNA, 25 bp, Homo sapien
tgacagagcagtaagaagagcaacc

SEQ ID NO: 3615314 - DNA, 25 bp, Homo sapien
ctctgcaggaaggtctgggtcctcg

SEQ ID NO: 3615315 - DNA, 25 bp, Homo sapien
ctctctgcaggaaggtctgggtcct

SEQ ID NO: 3615316 - DNA, 25 bp, Homo sapien
aggaaggtctgggtcctcgggcact

SEQ ID NO: 3615317 - DNA, 25 bp, Homo sapien
aaggtctgggtcctcgggcactggg

SEQ ID NO: 3615318 - DNA, 25 bp, Homo sapien
ttggtataggagaaatgtccgagaa

SEQ ID NO: 3615319 - DNA, 25 bp, Homo sapien
agaaatgtccgagaaatgtccccct

SEQ ID NO: 3615320 - DNA, 25 bp, Homo sapien
ggtataggagaaatgtccgagaaat

SEQ ID NO: 3615321 - DNA, 25 bp, Homo sapien
gaaatgtccgagaaatgtccccctc

SEQ ID NO: 3615322 - DNA, 25 bp, Homo sapien
tcctcttcctggtgtggacgctgct

SEQ ID NO: 3615323 - DNA, 25 bp, Homo sapien
actgctcgggggtcgagctttgcac

SEQ ID NO: 3615324 - DNA, 25 bp, Homo sapien
gtcgagctttgcacaggatcctgca

SEQ ID NO: 3615325 - DNA, 25 bp, Homo sapien
ggctccactcctaaatgcaccgtct

SEQ ID NO: 3615326 - DNA, 25 bp, Homo sapien
gaggaagttcttggttgtcacggga

SEQ ID NO: 3615327 - DNA, 25 bp, Homo sapien
ttcttggttgtcacgggagcttatt

SEQ ID NO: 3615328 - DNA, 25 bp, Homo sapien
gaagttcttggttgtcacgggagct

SEQ ID NO: 3615329 - DNA, 25 bp, Homo sapien
agttcttggttgtcacgggagctta

SEQ ID NO: 3615330 - DNA, 25 bp, Homo sapien
tgaaggttatcctccccaggacaag

SEQ ID NO: 3615331 - DNA, 25 bp, Homo sapien
agtcacaaaattctcctctccagga

SEQ ID NO: 3615332 - DNA, 25 bp, Homo sapien
gggatctatgagaaccttcgaggaa

SEQ ID NO: 3615333 - DNA, 25 bp, Homo sapien
aactccagtttcaatggagcaggca

SEQ ID NO: 3615334 - DNA, 25 bp, Homo sapien
aaagttctcggagtctgatgagagc

SEQ ID NO: 3615335 - DNA, 25 bp, Homo sapien
ccgggtcatccctctgtaagacaga

SEQ ID NO: 3615336 - DNA, 25 bp, Homo sapien
ctctggccgacaggtgaaatcatct

SEQ ID NO: 3615337 - DNA, 25 bp, Homo sapien
tctgtagttctccaggtaggacggt

SEQ ID NO: 3615338 - DNA, 25 bp, Homo sapien
ctggacacagcgaggattttcttcc

SEQ ID NO: 3615339 - DNA, 25 bp, Homo sapien
gtggtctcacaccatctagagctca

SEQ ID NO: 3615340 - DNA, 25 bp, Homo sapien
tagagctcacactgtcattagcccc

SEQ ID NO: 3615341 - DNA, 25 bp, Homo sapien
ggacacagcgaggattttcttccaa

SEQ ID NO: 3615342 - DNA, 25 bp, Homo sapien
caagggtcctttagcatttgaggag

SEQ ID NO: 3615343 - DNA, 25 bp, Homo sapien
tcacgtctagatgacttcctcctgg

SEQ ID NO: 3615344 - DNA, 25 bp, Homo sapien
gaccggaggtgttgctatagataat

SEQ ID NO: 3615345 - DNA, 25 bp, Homo sapien
gcctgtgtggatactccctgtttca

SEQ ID NO: 3615346 - DNA, 25 bp, Homo sapien
aggagtaccaggtttccactgaaga

SEQ ID NO: 3615347 - DNA, 25 bp, Homo sapien
ggctgagtccctcacattgtggtaa

SEQ ID NO: 3615348 - DNA, 25 bp, Homo sapien
cacattgtggtaaaccttgttgtac

SEQ ID NO: 3615349 - DNA, 25 bp, Homo sapien
aatttgcaatggctgagtccctcac

SEQ ID NO: 3615350 - DNA, 25 bp, Homo sapien
tctgtacaatttgcaatggctgagt

SEQ ID NO: 3615351 - DNA, 25 bp, Homo sapien
tacacagagtacaaaaagggtatag

SEQ ID NO: 3615352 - DNA, 25 bp, Homo sapien
tatatacacagagtacaaaaagggt

SEQ ID NO: 3615353 - DNA, 25 bp, Homo sapien
tagtatatacacagagtacaaaaag

SEQ ID NO: 3615354 - DNA, 25 bp, Homo sapien
aatatagtatatacacagagtacaa

SEQ ID NO: 3615355 - DNA, 25 bp, Homo sapien
ttgtggcttctgagtgtagctgccc

SEQ ID NO: 3615356 - DNA, 25 bp, Homo sapien
tggatcaagccccacggggcagctt

SEQ ID NO: 3615357 - DNA, 25 bp, Homo sapien
tctgaagtagcttcctggatcaagc

SEQ ID NO: 3615358 - DNA, 25 bp, Homo sapien
gatgaggggctccactagcattcct

SEQ ID NO: 3615359 - DNA, 25 bp, Homo sapien
ctccgacagctccggcggctcctcc

SEQ ID NO: 3615360 - DNA, 25 bp, Homo sapien
tccgacagctccggcggctcctccc

SEQ ID NO: 3615361 - DNA, 25 bp, Homo sapien
ggctccgacagctccggcggctcct

SEQ ID NO: 3615362 - DNA, 25 bp, Homo sapien
gctccgacagctccggcggctcctc

SEQ ID NO: 3615363 - DNA, 25 bp, Homo sapien
cgccttctcgccgagtaggagcctt

SEQ ID NO: 3615364 - DNA, 25 bp, Homo sapien
ctcgccgagtaggagcctttctagg

SEQ ID NO: 3615365 - DNA, 25 bp, Homo sapien
cccgaccgaaacagcgccgccggat

SEQ ID NO: 3615366 - DNA, 25 bp, Homo sapien
ctttgcgcccggaaccggaagcgat

SEQ ID NO: 3615367 - DNA, 25 bp, Homo sapien
tatgcaggcggctttcaaactgggc

SEQ ID NO: 3615368 - DNA, 25 bp, Homo sapien
cacaaggatggttgctatgacgccc

SEQ ID NO: 3615369 - DNA, 25 bp, Homo sapien
gacaactgtcaggtgcgaggcacag

SEQ ID NO: 3615370 - DNA, 25 bp, Homo sapien
gatgagcagcatcgtctgacaaaag

SEQ ID NO: 3615371 - DNA, 25 bp, Homo sapien
caaaagacatgatagtgaggatcaa

SEQ ID NO: 3615372 - DNA, 25 bp, Homo sapien
cagattactgttcttgccactacaa

SEQ ID NO: 3615373 - DNA, 25 bp, Homo sapien
tgaggatcaagaactcggtggtgcc

SEQ ID NO: 3615374 - DNA, 25 bp, Homo sapien
ctacaaaggttcctagcagtttggg

SEQ ID NO: 3615375 - DNA, 25 bp, Homo sapien
gacaagttacaaaggaagaagtaca

SEQ ID NO: 3615376 - DNA, 25 bp, Homo sapien
acaagttacaaaggaagaagtacat

SEQ ID NO: 3615377 - DNA, 25 bp, Homo sapien
gaagaagtacattggaatttgtagc

SEQ ID NO: 3615378 - DNA, 25 bp, Homo sapien
aaggaagaagtacattggaatttgt

SEQ ID NO: 3615379 - DNA, 25 bp, Homo sapien
gaggtgtttgtaggccttggataac

SEQ ID NO: 3615380 - DNA, 25 bp, Homo sapien
cacacagtggcaataataagcccat

SEQ ID NO: 3615381 - DNA, 25 bp, Homo sapien
gataacaggaaagcctagcaggatg

SEQ ID NO: 3615382 - DNA, 25 bp, Homo sapien
taagcccattgcctgcaagggttaa

SEQ ID NO: 3615383 - DNA, 25 bp, Homo sapien
taaggaggattctgactatgtaagg

SEQ ID NO: 3615384 - DNA, 25 bp, Homo sapien
tccttcgggacctgactctatttca

SEQ ID NO: 3615385 - DNA, 25 bp, Homo sapien
gctccttagaatcttagagcacagt

SEQ ID NO: 3615386 - DNA, 25 bp, Homo sapien
aagacaagcaagaaagctccttaga

SEQ ID NO: 3615387 - DNA, 25 bp, Homo sapien
tgccttagcctagctggtcccagct

SEQ ID NO: 3615388 - DNA, 25 bp, Homo sapien
taacagctgcgggtagctctgcctt

SEQ ID NO: 3615389 - DNA, 25 bp, Homo sapien
tgggaatagccctctaacagctgcg

SEQ ID NO: 3615390 - DNA, 25 bp, Homo sapien
aatatagaaattacaagaaggaaag

SEQ ID NO: 3615391 - DNA, 25 bp, Homo sapien
atattgtgaccagctgtctacagca

SEQ ID NO: 3615392 - DNA, 25 bp, Homo sapien
ttcctttgtatcaaggtcatgattc

SEQ ID NO: 3615393 - DNA, 25 bp, Homo sapien
tcctttgtatcaaggtcatgattct

SEQ ID NO: 3615394 - DNA, 25 bp, Homo sapien
tttcctttgtatcaaggtcatgatt

SEQ ID NO: 3615395 - DNA, 25 bp, Homo sapien
cctttgtatcaaggtcatgattctg

SEQ ID NO: 3615396 - DNA, 25 bp, Homo sapien
caccttgtcataatccagtgaggag

SEQ ID NO: 3615397 - DNA, 25 bp, Homo sapien
tatgtacacgtaggacccagtagtg

SEQ ID NO: 3615398 - DNA, 25 bp, Homo sapien
agaaaaagctttctgacggccctgg

SEQ ID NO: 3615399 - DNA, 25 bp, Homo sapien
cacaaagatgttgctcccgtgggca

SEQ ID NO: 3615400 - DNA, 25 bp, Homo sapien
tgagtatttatacaggccacctgaa

SEQ ID NO: 3615401 - DNA, 25 bp, Homo sapien
cactacaatggttggaaacaacaca

SEQ ID NO: 3615402 - DNA, 25 bp, Homo sapien
caatgaggtgagtatttatacaggc

SEQ ID NO: 3615403 - DNA, 25 bp, Homo sapien
tttcctacagtaaggtagccttgtc

SEQ ID NO: 3615404 - DNA, 25 bp, Homo sapien
aatatgtttggatcatgcaaccagc

SEQ ID NO: 3615405 - DNA, 25 bp, Homo sapien
agatatggttttctcttctcctagg

SEQ ID NO: 3615406 - DNA, 25 bp, Homo sapien
cagtgggtcgcagatagccatgtag

SEQ ID NO: 3615407 - DNA, 25 bp, Homo sapien
gacagtggtgtataagatatccaga

SEQ ID NO: 3615408 - DNA, 25 bp, Homo sapien
aaggcaattagggtgatttcagtca

SEQ ID NO: 3615409 - DNA, 25 bp, Homo sapien
gaagagagatattcgaatctccagg

SEQ ID NO: 3615410 - DNA, 25 bp, Homo sapien
gtttgcaggcgatgatcaatccata

SEQ ID NO: 3615411 - DNA, 25 bp, Homo sapien
tgtgtaagttaccacaagaaccacg

SEQ ID NO: 3615412 - DNA, 25 bp, Homo sapien
caactactatatggtgggcagggtt

SEQ ID NO: 3615413 - DNA, 25 bp, Homo sapien
aactactatatggtgggcagggttt

SEQ ID NO: 3615414 - DNA, 25 bp, Homo sapien
acaactactatatggtgggcagggt

SEQ ID NO: 3615415 - DNA, 25 bp, Homo sapien
gacaactactatatggtgggcaggg

SEQ ID NO: 3615416 - DNA, 25 bp, Homo sapien
ttgtataaagtaaagaagggatcca

SEQ ID NO: 3615417 - DNA, 25 bp, Homo sapien
cttgtagtaaccaaactacactaca

SEQ ID NO: 3615418 - DNA, 25 bp, Homo sapien
taaccaaactacactacactagcct

SEQ ID NO: 3615419 - DNA, 25 bp, Homo sapien
tagtaaccaaactacactacactag

SEQ ID NO: 3615420 - DNA, 25 bp, Homo sapien
taaactgtgactacagtactttgcc

SEQ ID NO: 3615421 - DNA, 25 bp, Homo sapien
tttctggtgtctaaatctgtctttc

SEQ ID NO: 3615422 - DNA, 25 bp, Homo sapien
tttgcctctgatgcggcactgagcc

SEQ ID NO: 3615423 - DNA, 25 bp, Homo sapien
gcggcactgagcctattcatacctt

SEQ ID NO: 3615424 - DNA, 25 bp, Homo sapien
ggacataattttgctgactgcttct

SEQ ID NO: 3615425 - DNA, 25 bp, Homo sapien
atgaggacataattttgctgactgc

SEQ ID NO: 3615426 - DNA, 25 bp, Homo sapien
gaggacataattttgctgactgctt

SEQ ID NO: 3615427 - DNA, 25 bp, Homo sapien
cataattttgctgactgcttctttc

SEQ ID NO: 3615428 - DNA, 25 bp, Homo sapien
caatctggacaccacaatggttggg

SEQ ID NO: 3615429 - DNA, 25 bp, Homo sapien
tatataagcgatggaaatgacggtg

SEQ ID NO: 3615430 - DNA, 25 bp, Homo sapien
gctgggcctcacatacctgaagatg

SEQ ID NO: 3615431 - DNA, 25 bp, Homo sapien
gaagcgcacgtggaaaaggccttcc

SEQ ID NO: 3615432 - DNA, 25 bp, Homo sapien
aataagtttgggtgatgcacccagc

SEQ ID NO: 3615433 - DNA, 25 bp, Homo sapien
ggaaataagtttgggtgatgcaccc

SEQ ID NO: 3615434 - DNA, 25 bp, Homo sapien
caaaggaaataagtttgggtgatgc

SEQ ID NO: 3615435 - DNA, 25 bp, Homo sapien
taagtttgggtgatgcacccagcaa

SEQ ID NO: 3615436 - DNA, 25 bp, Homo sapien
tctgattttggatgtccactgcagg

SEQ ID NO: 3615437 - DNA, 25 bp, Homo sapien
tgtggtctgattttggatgtccact

SEQ ID NO: 3615438 - DNA, 25 bp, Homo sapien
ttttggatgtccactgcaggcaatg

SEQ ID NO: 3615439 - DNA, 25 bp, Homo sapien
gattttggatgtccactgcaggcaa

SEQ ID NO: 3615440 - DNA, 25 bp, Homo sapien
ccagtaaaagttgcaatcagttcac

SEQ ID NO: 3615441 - DNA, 25 bp, Homo sapien
ttcaaaaccagtaaaagttgcaatc

SEQ ID NO: 3615442 - DNA, 25 bp, Homo sapien
agtggagataattcaaaaccagtaa

SEQ ID NO: 3615443 - DNA, 25 bp, Homo sapien
gtggagataattcaaaaccagtaaa

SEQ ID NO: 3615444 - DNA, 25 bp, Homo sapien
cctctttgcacttgaacataacttc

SEQ ID NO: 3615445 - DNA, 25 bp, Homo sapien
caatccagaccaccgctgtacaaac

SEQ ID NO: 3615446 - DNA, 25 bp, Homo sapien
tataggcctataggccttttgttgt

SEQ ID NO: 3615447 - DNA, 25 bp, Homo sapien
ctgtacaaactggttgggatacggg

SEQ ID NO: 3615448 - DNA, 25 bp, Homo sapien
taaccttgcttaacagccttctgca

SEQ ID NO: 3615449 - DNA, 25 bp, Homo sapien
tctctgattctctaggatacttagc

SEQ ID NO: 3615450 - DNA, 25 bp, Homo sapien
ggatacttagcaacagtatcaacat

SEQ ID NO: 3615451 - DNA, 25 bp, Homo sapien
ccctctttgacgcaaaccaagctct

SEQ ID NO: 3615452 - DNA, 25 bp, Homo sapien
cgtgaacgaggtgccatacagaggc

SEQ ID NO: 3615453 - DNA, 25 bp, Homo sapien
gcagcatagcttagatgtcctgaag

SEQ ID NO: 3615454 - DNA, 25 bp, Homo sapien
ttctgtaccgccgttcacgtgaacg

SEQ ID NO: 3615455 - DNA, 25 bp, Homo sapien
gatgtcctgaagttgcttagtgtca

SEQ ID NO: 3615456 - DNA, 25 bp, Homo sapien
atagtcaggcgcaacacagccagga

SEQ ID NO: 3615457 - DNA, 25 bp, Homo sapien
acagggggtcacaggttgccatgca

SEQ ID NO: 3615458 - DNA, 25 bp, Homo sapien
tgtcactgccaaggggataaacgcc

SEQ ID NO: 3615459 - DNA, 25 bp, Homo sapien
ctggcaacctggacaccacaatagt

SEQ ID NO: 3615460 - DNA, 25 bp, Homo sapien
ccaaatagagacaacatggttggag

SEQ ID NO: 3615461 - DNA, 25 bp, Homo sapien
tagagacaacatggttggagacaca

SEQ ID NO: 3615462 - DNA, 25 bp, Homo sapien
gaagaaactattcgttcagcaggcc

SEQ ID NO: 3615463 - DNA, 25 bp, Homo sapien
atattaacaacaaatgttgcagaag

SEQ ID NO: 3615464 - DNA, 25 bp, Homo sapien
cagatttatggatgttcaggcaggt

SEQ ID NO: 3615465 - DNA, 25 bp, Homo sapien
ggaattcacagtgtgtgcacggaca

SEQ ID NO: 3615466 - DNA, 25 bp, Homo sapien
cagagcccaggttacgtgacgtgtt

SEQ ID NO: 3615467 - DNA, 25 bp, Homo sapien
gctacgaggcattgcagtgcattct

SEQ ID NO: 3615468 - DNA, 25 bp, Homo sapien
gaccttgcttcagcttattgtgata

SEQ ID NO: 3615469 - DNA, 25 bp, Homo sapien
aattagagaagtgcatggattgacc

SEQ ID NO: 3615470 - DNA, 25 bp, Homo sapien
tatagtatgagtgcccagagcagag

SEQ ID NO: 3615471 - DNA, 25 bp, Homo sapien
gatccaggtgatcctataattagag

SEQ ID NO: 3615472 - DNA, 25 bp, Homo sapien
tcatacccaggattaagttaaggag

SEQ ID NO: 3615473 - DNA, 25 bp, Homo sapien
tcagataggtgaatttcatacccag

SEQ ID NO: 3615474 - DNA, 25 bp, Homo sapien
gaaaggccaaggctcgacgtcatca

SEQ ID NO: 3615475 - DNA, 25 bp, Homo sapien
cataatcctgaccactttcaggtca

SEQ ID NO: 3615476 - DNA, 25 bp, Homo sapien
tcaccattaagactacggcccagga

SEQ ID NO: 3615477 - DNA, 25 bp, Homo sapien
caattcaacccatttatctaaggtg

SEQ ID NO: 3615478 - DNA, 25 bp, Homo sapien
tacggcccaggaggagaaaagtatg

SEQ ID NO: 3615479 - DNA, 25 bp, Homo sapien
catcatccaaggactgtggttcatc

SEQ ID NO: 3615480 - DNA, 25 bp, Homo sapien
gaaacatgcaccattgtgagtgaaa

SEQ ID NO: 3615481 - DNA, 25 bp, Homo sapien
caagaagggtgatatctgaactttc

SEQ ID NO: 3615482 - DNA, 25 bp, Homo sapien
tgaggcattggtaacagcagaagct

SEQ ID NO: 3615483 - DNA, 25 bp, Homo sapien
gaaccaccaccactattttgtagat

SEQ ID NO: 3615484 - DNA, 25 bp, Homo sapien
ggactgccaactgccatggaatcat

SEQ ID NO: 3615485 - DNA, 25 bp, Homo sapien
ctgctgtcaggactgccaactgcca

SEQ ID NO: 3615486 - DNA, 25 bp, Homo sapien
ttccgttatctatcagggccagcct

SEQ ID NO: 3615487 - DNA, 25 bp, Homo sapien
gaatcatctattggtttgacccttg

SEQ ID NO: 3615488 - DNA, 25 bp, Homo sapien
cctgctttgcgtagctgaaacagct

SEQ ID NO: 3615489 - DNA, 25 bp, Homo sapien
ttctttggcttggagttgagaggcc

SEQ ID NO: 3615490 - DNA, 25 bp, Homo sapien
tatgaggccttggtagtctgattca

SEQ ID NO: 3615491 - DNA, 25 bp, Homo sapien
gaaacgtgtttccaaggcagtacta

SEQ ID NO: 3615492 - DNA, 25 bp, Homo sapien
gatgggctttacataatcaggtaat

SEQ ID NO: 3615493 - DNA, 25 bp, Homo sapien
gaaggctttccttgagaagatgtct

SEQ ID NO: 3615494 - DNA, 25 bp, Homo sapien
tgagaaggctttccttgagaagatg

SEQ ID NO: 3615495 - DNA, 25 bp, Homo sapien
ttcaaagatgggctttacataatca

SEQ ID NO: 3615496 - DNA, 25 bp, Homo sapien
gaaacaaacactgatagaatttgac

SEQ ID NO: 3615497 - DNA, 25 bp, Homo sapien
ctgagtgttcactttttggttttcg

SEQ ID NO: 3615498 - DNA, 25 bp, Homo sapien
tatagaaacaaacactgatagaatt

SEQ ID NO: 3615499 - DNA, 25 bp, Homo sapien
caaacactgatagaatttgactttt

SEQ ID NO: 3615500 - DNA, 25 bp, Homo sapien
ggactgagcctctgacatacgaatg

SEQ ID NO: 3615501 - DNA, 25 bp, Homo sapien
tacgaatgtagagaaagatggaact

SEQ ID NO: 3615502 - DNA, 25 bp, Homo sapien
gatggaactgccatagatgatgacc

SEQ ID NO: 3615503 - DNA, 25 bp, Homo sapien
gacggaggcacctttgttgagcagt

SEQ ID NO: 3615504 - DNA, 25 bp, Homo sapien
caccaacgtagagagcatgaaagcc

SEQ ID NO: 3615505 - DNA, 25 bp, Homo sapien
gaaaacgctttccttcgctcagcag

SEQ ID NO: 3615506 - DNA, 25 bp, Homo sapien
gtaacgatccagagacatgacggcc

SEQ ID NO: 3615507 - DNA, 25 bp, Homo sapien
caagggccaactgtcacgaaagaag

SEQ ID NO: 3615508 - DNA, 25 bp, Homo sapien
gcttgcctgtggctgttacaatgta

SEQ ID NO: 3615509 - DNA, 25 bp, Homo sapien
tgagcacaataattagcagcttgcc

SEQ ID NO: 3615510 - DNA, 25 bp, Homo sapien
aatgtaggtcaccattaaccccagg

SEQ ID NO: 3615511 - DNA, 25 bp, Homo sapien
tatgtgcaggcgttggtctatccag

SEQ ID NO: 3615512 - DNA, 25 bp, Homo sapien
ggttgacagatagccagatagcggt

SEQ ID NO: 3615513 - DNA, 25 bp, Homo sapien
aaataacgatgaggatgaggcagcc

SEQ ID NO: 3615514 - DNA, 25 bp, Homo sapien
tagactctcggaagctgctgcacaa

SEQ ID NO: 3615515 - DNA, 25 bp, Homo sapien
tagatacagacaggtggcacgtagt

SEQ ID NO: 3615516 - DNA, 25 bp, Homo sapien
cggcacagccctcaaaggagatcac

SEQ ID NO: 3615517 - DNA, 25 bp, Homo sapien
tgtacggcacagccctcaaaggaga

SEQ ID NO: 3615518 - DNA, 25 bp, Homo sapien
ctgtacggcacagccctcaaaggag

SEQ ID NO: 3615519 - DNA, 25 bp, Homo sapien
tacggcacagccctcaaaggagatc

SEQ ID NO: 3615520 - DNA, 25 bp, Homo sapien
cagtgatgctgtagatgaggaggaa

SEQ ID NO: 3615521 - DNA, 25 bp, Homo sapien
gaccttgggcactgtcactgtagac

SEQ ID NO: 3615522 - DNA, 25 bp, Homo sapien
aggaagaagaggctagaatgtttag

SEQ ID NO: 3615523 - DNA, 25 bp, Homo sapien
tgtagacaaacaggcatccaggaag

SEQ ID NO: 3615524 - DNA, 25 bp, Homo sapien
ttctcacacacagagcggctagtca

SEQ ID NO: 3615525 - DNA, 25 bp, Homo sapien
tctcacacacagagcggctagtcat

SEQ ID NO: 3615526 - DNA, 25 bp, Homo sapien
aatagctgtatccctttcctgagat

SEQ ID NO: 3615527 - DNA, 25 bp, Homo sapien
tcatttctttgttgcacagtgtgta

SEQ ID NO: 3615528 - DNA, 25 bp, Homo sapien
tgttgcacagtgtgtagatgatgga

SEQ ID NO: 3615529 - DNA, 25 bp, Homo sapien
tggccccctagcctctgtaatgctg

SEQ ID NO: 3615530 - DNA, 25 bp, Homo sapien
ctgcacttccttgtggccccctagc

SEQ ID NO: 3615531 - DNA, 25 bp, Homo sapien
ccaggtgcctaaagccagggagtta

SEQ ID NO: 3615532 - DNA, 25 bp, Homo sapien
aaagtgaatggatagtccctcccag

SEQ ID NO: 3615533 - DNA, 25 bp, Homo sapien
gctagacgcagcatggcaggaatgt

SEQ ID NO: 3615534 - DNA, 25 bp, Homo sapien
acggaattcgcaggatggcagctac

SEQ ID NO: 3615535 - DNA, 25 bp, Homo sapien
tgaggatgatgagcccatttccaga

SEQ ID NO: 3615536 - DNA, 25 bp, Homo sapien
agcacaagaaatggtcatgtccaag

SEQ ID NO: 3615537 - DNA, 25 bp, Homo sapien
gagccggatgtccactaagacagtg

SEQ ID NO: 3615538 - DNA, 25 bp, Homo sapien
gaaacagtgaggagatagatgacaa

SEQ ID NO: 3615539 - DNA, 25 bp, Homo sapien
taagaagagtggcgctcccagctgt

SEQ ID NO: 3615540 - DNA, 25 bp, Homo sapien
ctaagaagagtggcgctcccagctg

SEQ ID NO: 3615541 - DNA, 25 bp, Homo sapien
gaaggagatgctcaacaccctctaa

SEQ ID NO: 3615542 - DNA, 25 bp, Homo sapien
ggagatgctcaacaccctctaacat

SEQ ID NO: 3615543 - DNA, 25 bp, Homo sapien
aaggagatgctcaacaccctctaac

SEQ ID NO: 3615544 - DNA, 25 bp, Homo sapien
aggagatgctcaacaccctctaaca

SEQ ID NO: 3615545 - DNA, 25 bp, Homo sapien
gagttgttcagtgctcgatgacacc

SEQ ID NO: 3615546 - DNA, 25 bp, Homo sapien
tggtctgaagtgaacctatggtttc

SEQ ID NO: 3615547 - DNA, 25 bp, Homo sapien
cctatggtttctagcgagttgttca

SEQ ID NO: 3615548 - DNA, 25 bp, Homo sapien
gcaaatttggagcagcttcacaaag

SEQ ID NO: 3615549 - DNA, 25 bp, Homo sapien
ttgtaaagcataatgccattaggag

SEQ ID NO: 3615550 - DNA, 25 bp, Homo sapien
gcataatgccattaggaggatctaa

SEQ ID NO: 3615551 - DNA, 25 bp, Homo sapien
tgccattaggaggatctaatgtgcc

SEQ ID NO: 3615552 - DNA, 25 bp, Homo sapien
taggaggatctaatgtgccttccat

SEQ ID NO: 3615553 - DNA, 25 bp, Homo sapien
ttgcagtgggctttgttaacggcaa

SEQ ID NO: 3615554 - DNA, 25 bp, Homo sapien
agtggtggccctgtagcataggatc

SEQ ID NO: 3615555 - DNA, 25 bp, Homo sapien
gaagttcgcttagttgctagtggtg

SEQ ID NO: 3615556 - DNA, 25 bp, Homo sapien
cagtaccactcgaggaagttcgctt

SEQ ID NO: 3615557 - DNA, 25 bp, Homo sapien
caactcatgacagcattcatcctca

SEQ ID NO: 3615558 - DNA, 25 bp, Homo sapien
gatgctctttatatcccagtgggga

SEQ ID NO: 3615559 - DNA, 25 bp, Homo sapien
aatgtccaactcatgacagcattca

SEQ ID NO: 3615560 - DNA, 25 bp, Homo sapien
ttaactgctacatgctggatgctct

SEQ ID NO: 3615561 - DNA, 25 bp, Homo sapien
aatgccgaggaccttgttgtccctg

SEQ ID NO: 3615562 - DNA, 25 bp, Homo sapien
tggtgcccaaaatgccgaggacctt

SEQ ID NO: 3615563 - DNA, 25 bp, Homo sapien
cacagttgtatgacccaactctatt

SEQ ID NO: 3615564 - DNA, 25 bp, Homo sapien
ctgtgtccttccacagttgtatgac

SEQ ID NO: 3615565 - DNA, 25 bp, Homo sapien
tctacacggtcatgtcctatgatcg

SEQ ID NO: 3615566 - DNA, 25 bp, Homo sapien
gggagcaccgagtgtttgctctaca

SEQ ID NO: 3615567 - DNA, 25 bp, Homo sapien
agtgtttgctctacacggtcatgtc

SEQ ID NO: 3615568 - DNA, 25 bp, Homo sapien
ctggggagcaccgagtgtttgctct

SEQ ID NO: 3615569 - DNA, 25 bp, Homo sapien
ctactgtggacccaaccagatccag

SEQ ID NO: 3615570 - DNA, 25 bp, Homo sapien
gatccagcactacttctgtgacgca

SEQ ID NO: 3615571 - DNA, 25 bp, Homo sapien
tgacgcaccgcccatcctgaaactg

SEQ ID NO: 3615572 - DNA, 25 bp, Homo sapien
tgactttccatttgccctactgtgg

SEQ ID NO: 3615573 - DNA, 25 bp, Homo sapien
tcatcctgctggtgatcagggtgga

SEQ ID NO: 3615574 - DNA, 25 bp, Homo sapien
gggagcaccgagtgtttcctctaca

SEQ ID NO: 3615575 - DNA, 25 bp, Homo sapien
tcctggtggtttacgtgctcactgt

SEQ ID NO: 3615576 - DNA, 25 bp, Homo sapien
gatgaccttggtgtccccaagcggc

SEQ ID NO: 3615577 - DNA, 25 bp, Homo sapien
tcatcctgctggtgatcagggtgga

SEQ ID NO: 3615578 - DNA, 25 bp, Homo sapien
ttcctggtggtttacgtgctcactg

SEQ ID NO: 3615579 - DNA, 25 bp, Homo sapien
ctcatcctgctggtgatcagggtgg

SEQ ID NO: 3615580 - DNA, 25 bp, Homo sapien
ctggtggtttacgtgctcactgtgc

SEQ ID NO: 3615581 - DNA, 25 bp, Homo sapien
ctgtggatggagttgtggccgtttt

SEQ ID NO: 3615582 - DNA, 25 bp, Homo sapien
gacgccccttctcaaccctgttgtg

SEQ ID NO: 3615583 - DNA, 25 bp, Homo sapien
tgtggatggagttgtggccgttttc

SEQ ID NO: 3615584 - DNA, 25 bp, Homo sapien
cactgtgctgacgccccttctcaac

SEQ ID NO: 3615585 - DNA, 25 bp, Homo sapien
cctgagcaaatactgacccattttt

SEQ ID NO: 3615586 - DNA, 25 bp, Homo sapien
ccctgagcaaatactgacccatttt

SEQ ID NO: 3615587 - DNA, 25 bp, Homo sapien
cacaacagggttgaaaagaggagtc

SEQ ID NO: 3615588 - DNA, 25 bp, Homo sapien
agtcagcgtggtgtagaaaacggcc

SEQ ID NO: 3615589 - DNA, 25 bp, Homo sapien
cggccacaaccccatgcaaggcgtc

SEQ ID NO: 3615590 - DNA, 25 bp, Homo sapien
ccatgcaaggcgtccctggagcctg

SEQ ID NO: 3615591 - DNA, 25 bp, Homo sapien
tcccctctgaggtgcggatccgcag

SEQ ID NO: 3615592 - DNA, 25 bp, Homo sapien
gtgcggatccgcaggatggaacaga

SEQ ID NO: 3615593 - DNA, 25 bp, Homo sapien
tgcggatccgcaggatggaacagac

SEQ ID NO: 3615594 - DNA, 25 bp, Homo sapien
tgtagaggaaacactcggtgctccc

SEQ ID NO: 3615595 - DNA, 25 bp, Homo sapien
ggacagcactatcaggacaaagcag

SEQ ID NO: 3615596 - DNA, 25 bp, Homo sapien
aagatgaccatctcgttggctgagg

SEQ ID NO: 3615597 - DNA, 25 bp, Homo sapien
tacctgagcgggtaactgatggcca

SEQ ID NO: 3615598 - DNA, 25 bp, Homo sapien
gaaggcccgtgaggatgaacgctgt

SEQ ID NO: 3615599 - DNA, 25 bp, Homo sapien
tgtcaatgaaggacaggttggtgag

SEQ ID NO: 3615600 - DNA, 25 bp, Homo sapien
ggcaccgtgacagtggagaaccaca

SEQ ID NO: 3615601 - DNA, 25 bp, Homo sapien
tgagcacgtaaaccaccaggaagat

SEQ ID NO: 3615602 - DNA, 25 bp, Homo sapien
tcatgtatatactcaagccttggtt

SEQ ID NO: 3615603 - DNA, 25 bp, Homo sapien
tatgactcttaacttagtcatgtat

SEQ ID NO: 3615604 - DNA, 25 bp, Homo sapien
ttagtcatgtatatactcaagcctt

SEQ ID NO: 3615605 - DNA, 25 bp, Homo sapien
acgcccggctctgagtacattttta

SEQ ID NO: 3615606 - DNA, 25 bp, Homo sapien
ccatcaatgcatgtattctaatgaa

SEQ ID NO: 3615607 - DNA, 25 bp, Homo sapien
tatgccaacccatcaatgcatgtat

SEQ ID NO: 3615608 - DNA, 25 bp, Homo sapien
taggcacataccacccacctatgcc

SEQ ID NO: 3615609 - DNA, 25 bp, Homo sapien
aaaagaatatgccaacccatcaatg

SEQ ID NO: 3615610 - DNA, 25 bp, Homo sapien
gcttggctgacgctactggccttga

SEQ ID NO: 3615611 - DNA, 25 bp, Homo sapien
aagcttggagattgcagggccccaa

SEQ ID NO: 3615612 - DNA, 25 bp, Homo sapien
tgaccggaaacatctgtgaccagtg

SEQ ID NO: 3615613 - DNA, 25 bp, Homo sapien
tcccatgtctcccaagggcgagtaa

SEQ ID NO: 3615614 - DNA, 25 bp, Homo sapien
tggccacaaagagttgcagactgca

SEQ ID NO: 3615615 - DNA, 25 bp, Homo sapien
ggagttcaaggagatggtcacacac

SEQ ID NO: 3615616 - DNA, 25 bp, Homo sapien
ggttgagaaagctccatgcacactg

SEQ ID NO: 3615617 - DNA, 25 bp, Homo sapien
tgaatcacagaatcgcagagagctc

SEQ ID NO: 3615618 - DNA, 25 bp, Homo sapien
tagcaacctgggaatagaatgatgt

SEQ ID NO: 3615619 - DNA, 25 bp, Homo sapien
tagaatgatgtgataacgtacgctg

SEQ ID NO: 3615620 - DNA, 25 bp, Homo sapien
cgctgagggagcctaatcagtcacc

SEQ ID NO: 3615621 - DNA, 25 bp, Homo sapien
gcaacttggattataggaagcacca

SEQ ID NO: 3615622 - DNA, 25 bp, Homo sapien
caggtcaaagatggagaggtttccc

SEQ ID NO: 3615623 - DNA, 25 bp, Homo sapien
gaattatggaaccaagcaaggcact

SEQ ID NO: 3615624 - DNA, 25 bp, Homo sapien
catacgagatagcatggctgttccc

SEQ ID NO: 3615625 - DNA, 25 bp, Homo sapien
tagatagataacgatgactggccca

SEQ ID NO: 3615626 - DNA, 25 bp, Homo sapien
tgctggtgatttcgattttcattct

SEQ ID NO: 3615627 - DNA, 25 bp, Homo sapien
tgggaatattgagatcttgctgatc

SEQ ID NO: 3615628 - DNA, 25 bp, Homo sapien
ttctccatttgctggtgatttcgat

SEQ ID NO: 3615629 - DNA, 25 bp, Homo sapien
ccagagaactttatgactgggaata

SEQ ID NO: 3615630 - DNA, 25 bp, Homo sapien
taaggaatagattaacgagttcagc

SEQ ID NO: 3615631 - DNA, 25 bp, Homo sapien
gaatagattaacgagttcagcatgg

SEQ ID NO: 3615632 - DNA, 25 bp, Homo sapien
cttaaggaatagattaacgagttca

SEQ ID NO: 3615633 - DNA, 25 bp, Homo sapien
tgttccttaaggaatagattaacga

SEQ ID NO: 3615634 - DNA, 25 bp, Homo sapien
tgccctctgatgagcggattctcaa

SEQ ID NO: 3615635 - DNA, 25 bp, Homo sapien
ggcaatcccaatgctagtgtagcag

SEQ ID NO: 3615636 - DNA, 25 bp, Homo sapien
cacagaggattgcaacaaggtgagc

SEQ ID NO: 3615637 - DNA, 25 bp, Homo sapien
acatttatggaacccaccctctggg

SEQ ID NO: 3615638 - DNA, 25 bp, Homo sapien
gaggtcagaatggtggcgtgaagac

SEQ ID NO: 3615639 - DNA, 25 bp, Homo sapien
aggtaaaggaggtcagaatggtggc

SEQ ID NO: 3615640 - DNA, 25 bp, Homo sapien
gaatggtggcgtgaagacaacccac

SEQ ID NO: 3615641 - DNA, 25 bp, Homo sapien
taaaggaggtcagaatggtggcgtg

SEQ ID NO: 3615642 - DNA, 25 bp, Homo sapien
caagccgacacagactccaggcttc

SEQ ID NO: 3615643 - DNA, 25 bp, Homo sapien
gccgacacagactccaggcttcatg

SEQ ID NO: 3615644 - DNA, 25 bp, Homo sapien
gactccaggcttcatgatgagcata

SEQ ID NO: 3615645 - DNA, 25 bp, Homo sapien
acagactccaggcttcatgatgagc

SEQ ID NO: 3615646 - DNA, 25 bp, Homo sapien
ctcagtgtgtgatgtatggcaacaa

SEQ ID NO: 3615647 - DNA, 25 bp, Homo sapien
agcagaacccagcaactgatagaag

SEQ ID NO: 3615648 - DNA, 25 bp, Homo sapien
gacatcacagaatagaggcagcctt

SEQ ID NO: 3615649 - DNA, 25 bp, Homo sapien
gctgtgaagcacatcccttaaaaga

SEQ ID NO: 3615650 - DNA, 25 bp, Homo sapien
gacagcacagagtacagcctccagt

SEQ ID NO: 3615651 - DNA, 25 bp, Homo sapien
gagatacaatagcatcttgggacat

SEQ ID NO: 3615652 - DNA, 25 bp, Homo sapien
tctgtctgaggtattccccgtagaa

SEQ ID NO: 3615653 - DNA, 25 bp, Homo sapien
tatgtcaaaagtagacaggcgtccc

SEQ ID NO: 3615654 - DNA, 25 bp, Homo sapien
cttccctggctagagcttctctcat

SEQ ID NO: 3615655 - DNA, 25 bp, Homo sapien
caggatcccataagcgacccatgac

SEQ ID NO: 3615656 - DNA, 25 bp, Homo sapien
tcccataagcgacccatgacaggaa

SEQ ID NO: 3615657 - DNA, 25 bp, Homo sapien
gatcccataagcgacccatgacagg

SEQ ID NO: 3615658 - DNA, 25 bp, Homo sapien
ttccggaaattatgactgcagctgt

SEQ ID NO: 3615659 - DNA, 25 bp, Homo sapien
ctgtgactcagagcgctccgggctg

SEQ ID NO: 3615660 - DNA, 25 bp, Homo sapien
gggctccttgaattgcacgccccat

SEQ ID NO: 3615661 - DNA, 25 bp, Homo sapien
gcctggatccaacccctgctctgga

SEQ ID NO: 3615662 - DNA, 25 bp, Homo sapien
ttcataggcagtaatgttcctccca

SEQ ID NO: 3615663 - DNA, 25 bp, Homo sapien
ttatatacttatcagggccatactg

SEQ ID NO: 3615664 - DNA, 25 bp, Homo sapien
tagagggaagttgaaagccaacatc

SEQ ID NO: 3615665 - DNA, 25 bp, Homo sapien
tgaactacagactaaagattgcagc

SEQ ID NO: 3615666 - DNA, 25 bp, Homo sapien
tcctctataggtaaagtgttctccc

SEQ ID NO: 3615667 - DNA, 25 bp, Homo sapien
cctgtaagttttgaatgttctgctc

SEQ ID NO: 3615668 - DNA, 25 bp, Homo sapien
caatctcttttagcatgaatagttt

SEQ ID NO: 3615669 - DNA, 25 bp, Homo sapien
gcgtccagtcgtcttgtcttttaac

SEQ ID NO: 3615670 - DNA, 25 bp, Homo sapien
tatagactttagaatccatgccttt

SEQ ID NO: 3615671 - DNA, 25 bp, Homo sapien
gtaaagacgcttaagcttacaagca

SEQ ID NO: 3615672 - DNA, 25 bp, Homo sapien
gtttatgtactgtgaaatccattca

SEQ ID NO: 3615673 - DNA, 25 bp, Homo sapien
tatactttgtcagcgatcaagctct

SEQ ID NO: 3615674 - DNA, 25 bp, Homo sapien
tcagagttggggatgattggccttt

SEQ ID NO: 3615675 - DNA, 25 bp, Homo sapien
agagttggggatgattggcctttgc

SEQ ID NO: 3615676 - DNA, 25 bp, Homo sapien
agttggggatgattggcctttgcag

SEQ ID NO: 3615677 - DNA, 25 bp, Homo sapien
ttggggatgattggcctttgcagga

SEQ ID NO: 3615678 - DNA, 25 bp, Homo sapien
ttaatatccttttccgcagcctcac

SEQ ID NO: 3615679 - DNA, 25 bp, Homo sapien
ttccgcagcctcaccatccttagct

SEQ ID NO: 3615680 - DNA, 25 bp, Homo sapien
tatcaatgaaatagtagtttgtgct

SEQ ID NO: 3615681 - DNA, 25 bp, Homo sapien
tctcccgctccagtatttctatcaa

SEQ ID NO: 3615682 - DNA, 25 bp, Homo sapien
atcttcatcgttgccagcatcctct

SEQ ID NO: 3615683 - DNA, 25 bp, Homo sapien
tccactgagggcaggtccaaaacct

SEQ ID NO: 3615684 - DNA, 25 bp, Homo sapien
ctctgcattcgctccactgagggca

SEQ ID NO: 3615685 - DNA, 25 bp, Homo sapien
gctcccacatctcggctgtttctgt

SEQ ID NO: 3615686 - DNA, 25 bp, Homo sapien
tgcagccatcatccgtcagctccat

SEQ ID NO: 3615687 - DNA, 25 bp, Homo sapien
cctctccatagcagggtttcccaat

SEQ ID NO: 3615688 - DNA, 25 bp, Homo sapien
ggcaggtcatcccgtcaagtgccca

SEQ ID NO: 3615689 - DNA, 25 bp, Homo sapien
gtttcccaatgagtgtcaagctctc

SEQ ID NO: 3615690 - DNA, 25 bp, Homo sapien
gtcaagtgcccagctcttagcagag

SEQ ID NO: 3615691 - DNA, 25 bp, Homo sapien
ccagttcagcaactgagattacagg

SEQ ID NO: 3615692 - DNA, 25 bp, Homo sapien
cagccagttcagcaactgagattac

SEQ ID NO: 3615693 - DNA, 25 bp, Homo sapien
ctcttgcctcagccagttcagcaac

SEQ ID NO: 3615694 - DNA, 25 bp, Homo sapien
tcttgcctcagccagttcagcaact

SEQ ID NO: 3615695 - DNA, 25 bp, Homo sapien
catgatcacattgattgggctcagt

SEQ ID NO: 3615696 - DNA, 25 bp, Homo sapien
gggaacctgggcatgatcacattga

SEQ ID NO: 3615697 - DNA, 25 bp, Homo sapien
gaatctatatggtcacagtactggg

SEQ ID NO: 3615698 - DNA, 25 bp, Homo sapien
gtctgttcttcattgatctctgcca

SEQ ID NO: 3615699 - DNA, 25 bp, Homo sapien
gcgtgttacactactgttgtgccaa

SEQ ID NO: 3615700 - DNA, 25 bp, Homo sapien
ggaaagtatccagtcctctgcgtgt

SEQ ID NO: 3615701 - DNA, 25 bp, Homo sapien
gttgtgccaatgcttaacaccctga

SEQ ID NO: 3615702 - DNA, 25 bp, Homo sapien
ggatgtggtcttttagggtctgcaa

SEQ ID NO: 3615703 - DNA, 25 bp, Homo sapien
tgaggaataaagatgtcaatgtttc

SEQ ID NO: 3615704 - DNA, 25 bp, Homo sapien
ctgaggaataaagatgtcaatgttt

SEQ ID NO: 3615705 - DNA, 25 bp, Homo sapien
gaggaataaagatgtcaatgtttcc

SEQ ID NO: 3615706 - DNA, 25 bp, Homo sapien
tgaatgccacagtcttatctgtgag

SEQ ID NO: 3615707 - DNA, 25 bp, Homo sapien
ccagtgaactggctctgaatgccac

SEQ ID NO: 3615708 - DNA, 25 bp, Homo sapien
agaacccgagggctacagaccaata

SEQ ID NO: 3615709 - DNA, 25 bp, Homo sapien
caatacctctgaaccattatgaacc

SEQ ID NO: 3615710 - DNA, 25 bp, Homo sapien
tgtcattacccctaagatgctggtg

SEQ ID NO: 3615711 - DNA, 25 bp, Homo sapien
tcctaccctgaatgcatgactcagc

SEQ ID NO: 3615712 - DNA, 25 bp, Homo sapien
attgacttctgccattccactgtca

SEQ ID NO: 3615713 - DNA, 25 bp, Homo sapien
gctattgcagagtgtcacatgttgg

SEQ ID NO: 3615714 - DNA, 25 bp, Homo sapien
agcattcatgtagttgcagccatct

SEQ ID NO: 3615715 - DNA, 25 bp, Homo sapien
gtagttgcagccatcttcaatcagc

SEQ ID NO: 3615716 - DNA, 25 bp, Homo sapien
tctttattattgccagcatcctcca

SEQ ID NO: 3615717 - DNA, 25 bp, Homo sapien
tgtagctcccacatgttggcggttg

SEQ ID NO: 3615718 - DNA, 25 bp, Homo sapien
tacctatgacttccaacagcagcat

SEQ ID NO: 3615719 - DNA, 25 bp, Homo sapien
tagtgccattctccaagtcaaagac

SEQ ID NO: 3615720 - DNA, 25 bp, Homo sapien
tggcttggtacctatgacttccaac

SEQ ID NO: 3615721 - DNA, 25 bp, Homo sapien
caaagacagcaagttgcaaataaaa

SEQ ID NO: 3615722 - DNA, 25 bp, Homo sapien
cttctctcttaggagagtccttcct

SEQ ID NO: 3615723 - DNA, 25 bp, Homo sapien
ttctaaatctagctcttgtacacgt

SEQ ID NO: 3615724 - DNA, 25 bp, Homo sapien
gctcttgtacacgtactccatatcc

SEQ ID NO: 3615725 - DNA, 25 bp, Homo sapien
aatctagctcttgtacacgtactcc

SEQ ID NO: 3615726 - DNA, 25 bp, Homo sapien
cacctattaattagaatgaccgaca

SEQ ID NO: 3615727 - DNA, 25 bp, Homo sapien
gcagatcaggcattgactaaagtct

SEQ ID NO: 3615728 - DNA, 25 bp, Homo sapien
catgttaagataccacagtacacct

SEQ ID NO: 3615729 - DNA, 25 bp, Homo sapien
tcaccgttgttataatgatggcaaa

SEQ ID NO: 3615730 - DNA, 25 bp, Homo sapien
taacacaatcttatgcaatttgcca

SEQ ID NO: 3615731 - DNA, 25 bp, Homo sapien
caaacattctccatctgctaggctg

SEQ ID NO: 3615732 - DNA, 25 bp, Homo sapien
aaaccacctctcagttgaatcttta

SEQ ID NO: 3615733 - DNA, 25 bp, Homo sapien
tgcaatttgccatttacttctctgc

SEQ ID NO: 3615734 - DNA, 25 bp, Homo sapien
attcaaccccaagggtccagaagag

SEQ ID NO: 3615735 - DNA, 25 bp, Homo sapien
gtccagaagagggagccacaagaag

SEQ ID NO: 3615736 - DNA, 25 bp, Homo sapien
cacaagaaggtcatgggccccagag

SEQ ID NO: 3615737 - DNA, 25 bp, Homo sapien
agagggagccacaagaaggtcatgg

SEQ ID NO: 3615738 - DNA, 25 bp, Homo sapien
cctactaagaccttccttaatgctt

SEQ ID NO: 3615739 - DNA, 25 bp, Homo sapien
ttcctactaagaccttccttaatgc

SEQ ID NO: 3615740 - DNA, 25 bp, Homo sapien
tactaagaccttccttaatgctttc

SEQ ID NO: 3615741 - DNA, 25 bp, Homo sapien
tcctactaagaccttccttaatgct

SEQ ID NO: 3615742 - DNA, 25 bp, Homo sapien
gatgagagctgcatgttccaaaagc

SEQ ID NO: 3615743 - DNA, 25 bp, Homo sapien
tcctggtccagggagttacttgaag

SEQ ID NO: 3615744 - DNA, 25 bp, Homo sapien
tggcagtcaggaggtaaccctcagc

SEQ ID NO: 3615745 - DNA, 25 bp, Homo sapien
gaaatacatgaaggtaatggaccca

SEQ ID NO: 3615746 - DNA, 25 bp, Homo sapien
ctcagagtaaaggattgtattcttc

SEQ ID NO: 3615747 - DNA, 25 bp, Homo sapien
cagagtaaaggattgtattcttctt

SEQ ID NO: 3615748 - DNA, 25 bp, Homo sapien
gcactcagagtaaaggattgtattc

SEQ ID NO: 3615749 - DNA, 25 bp, Homo sapien
gagtaaaggattgtattcttctttc

SEQ ID NO: 3615750 - DNA, 25 bp, Homo sapien
agtagagggctgactgcaatcagga

SEQ ID NO: 3615751 - DNA, 25 bp, Homo sapien
ctgagctgccatagaataattttcc

SEQ ID NO: 3615752 - DNA, 25 bp, Homo sapien
gtgttaaaccatctaagacaaactg

SEQ ID NO: 3615753 - DNA, 25 bp, Homo sapien
tctaagacaaactgagctgccatag

SEQ ID NO: 3615754 - DNA, 25 bp, Homo sapien
gctgtgttaaaccatctaagacaaa

SEQ ID NO: 3615755 - DNA, 25 bp, Homo sapien
gactgccttcccctagtcatcttct

SEQ ID NO: 3615756 - DNA, 25 bp, Homo sapien
actgccttcccctagtcatcttctt

SEQ ID NO: 3615757 - DNA, 25 bp, Homo sapien
tgtgatgtagaacacagaagacacc

SEQ ID NO: 3615758 - DNA, 25 bp, Homo sapien
taaggaccgccagtgtagttgctaa

SEQ ID NO: 3615759 - DNA, 25 bp, Homo sapien
taatgactgaccgtatgagacctac

SEQ ID NO: 3615760 - DNA, 25 bp, Homo sapien
tagttgctaaggtattaactcctcc

SEQ ID NO: 3615761 - DNA, 25 bp, Homo sapien
gcgggtagtatggactgtggcccac

SEQ ID NO: 3615762 - DNA, 25 bp, Homo sapien
gggtagtatggactgtggcccacag

SEQ ID NO: 3615763 - DNA, 25 bp, Homo sapien
cgggtagtatggactgtggcccaca

SEQ ID NO: 3615764 - DNA, 25 bp, Homo sapien
acaatattgtaaagcagtgggcgac

SEQ ID NO: 3615765 - DNA, 25 bp, Homo sapien
cattatggaacagaccctgtgggac

SEQ ID NO: 3615766 - DNA, 25 bp, Homo sapien
tctgggcgttgtgtcaagcctgcca

SEQ ID NO: 3615767 - DNA, 25 bp, Homo sapien
cataacggtcatattccatggctgt

SEQ ID NO: 3615768 - DNA, 25 bp, Homo sapien
ctgaagaatggtttgaagtagccat

SEQ ID NO: 3615769 - DNA, 25 bp, Homo sapien
tatcatgggaactacatcaatgtga

SEQ ID NO: 3615770 - DNA, 25 bp, Homo sapien
cccagttgaggataatttaagacac

SEQ ID NO: 3615771 - DNA, 25 bp, Homo sapien
tctccaggcaagtttaacatcattg

SEQ ID NO: 3615772 - DNA, 25 bp, Homo sapien
gacacaatgatgcacctaatccaaa

SEQ ID NO: 3615773 - DNA, 25 bp, Homo sapien
tactgggcacagtgaaaatgatgcc

SEQ ID NO: 3615774 - DNA, 25 bp, Homo sapien
agagataaagatggtgatactgggc

SEQ ID NO: 3615775 - DNA, 25 bp, Homo sapien
tgatgcctgctgcaatgaaaaccat

SEQ ID NO: 3615776 - DNA, 25 bp, Homo sapien
cagtgaagctgataggataatggag

SEQ ID NO: 3615777 - DNA, 25 bp, Homo sapien
ttgcctcacaggaggtcagtttcag

SEQ ID NO: 3615778 - DNA, 25 bp, Homo sapien
gaggtcagtttcagcatgcacctgg

SEQ ID NO: 3615779 - DNA, 25 bp, Homo sapien
tttcagcatgcacctggtatgggcc

SEQ ID NO: 3615780 - DNA, 25 bp, Homo sapien
tgcctcacaggaggtcagtttcagc

SEQ ID NO: 3615781 - DNA, 25 bp, Homo sapien
ggccactagtgatcagagaccattg

SEQ ID NO: 3615782 - DNA, 25 bp, Homo sapien
gagaccattgacgtcaaaacatagc

SEQ ID NO: 3615783 - DNA, 25 bp, Homo sapien
tcagagttaccaagcccaaattccc

SEQ ID NO: 3615784 - DNA, 25 bp, Homo sapien
aaaaaagctgacatgcaacccgcat

SEQ ID NO: 3615785 - DNA, 25 bp, Homo sapien
taaggggttcatcaagggagctgta

SEQ ID NO: 3615786 - DNA, 25 bp, Homo sapien
ttaaggggttcatcaagggagctgt

SEQ ID NO: 3615787 - DNA, 25 bp, Homo sapien
aagggagctgtattggtgtaaaaga

SEQ ID NO: 3615788 - DNA, 25 bp, Homo sapien
gagctgtattggtgtaaaagacaga

SEQ ID NO: 3615789 - DNA, 25 bp, Homo sapien
gcaattaggttggaactgcaggtgt

SEQ ID NO: 3615790 - DNA, 25 bp, Homo sapien
taggttggaactgcaggtgttcaag

SEQ ID NO: 3615791 - DNA, 25 bp, Homo sapien
ttggaactgcaggtgttcaaggctt

SEQ ID NO: 3615792 - DNA, 25 bp, Homo sapien
aactgcaggtgttcaaggctttgga

SEQ ID NO: 3615793 - DNA, 25 bp, Homo sapien
ggatgatgtaggagctgcaaccaca

SEQ ID NO: 3615794 - DNA, 25 bp, Homo sapien
gggaggatgtcacacaaatagggat

SEQ ID NO: 3615795 - DNA, 25 bp, Homo sapien
gccatggcactagaaaaggctagca

SEQ ID NO: 3615796 - DNA, 25 bp, Homo sapien
gcaagtataaaccaagcataaggtg

SEQ ID NO: 3615797 - DNA, 25 bp, Homo sapien
gtgagcacatagcattcagaaatac

SEQ ID NO: 3615798 - DNA, 25 bp, Homo sapien
attgaggtgagcacatagcattcag

SEQ ID NO: 3615799 - DNA, 25 bp, Homo sapien
cataggccattgaggtgagcacata

SEQ ID NO: 3615800 - DNA, 25 bp, Homo sapien
ggccattgaggtgagcacatagcat

SEQ ID NO: 3615801 - DNA, 25 bp, Homo sapien
gacatgcaccccatgtgggagataa

SEQ ID NO: 3615802 - DNA, 25 bp, Homo sapien
ccccatgtgggagataatatccttc

SEQ ID NO: 3615803 - DNA, 25 bp, Homo sapien
caccccatgtgggagataatatcct

SEQ ID NO: 3615804 - DNA, 25 bp, Homo sapien
tgtgggagataatatccttctgtgt

SEQ ID NO: 3615805 - DNA, 25 bp, Homo sapien
ctatgaaggacaagttaaagaggaa

SEQ ID NO: 3615806 - DNA, 25 bp, Homo sapien
tatgaaggacaagttaaagaggaaa

SEQ ID NO: 3615807 - DNA, 25 bp, Homo sapien
gagttggagatctggctgatctgtt

SEQ ID NO: 3615808 - DNA, 25 bp, Homo sapien
tgaattgagcacaacgagagttacc

SEQ ID NO: 3615809 - DNA, 25 bp, Homo sapien
gagagttaccaagccaaatttccca

SEQ ID NO: 3615810 - DNA, 25 bp, Homo sapien
caacgcagtgaccatacactagaaa

SEQ ID NO: 3615811 - DNA, 25 bp, Homo sapien
acattctcctactcagagattttcc

SEQ ID NO: 3615812 - DNA, 25 bp, Homo sapien
cattctcctactcagagattttccc

SEQ ID NO: 3615813 - DNA, 25 bp, Homo sapien
gatcctggagaggatgtcaccataa

SEQ ID NO: 3615814 - DNA, 25 bp, Homo sapien
tcattggaactgatgtggaggatcc

SEQ ID NO: 3615815 - DNA, 25 bp, Homo sapien
taagctgtagattaaggagctcatc

SEQ ID NO: 3615816 - DNA, 25 bp, Homo sapien
cacaatggtattgatgcctgccaca

SEQ ID NO: 3615817 - DNA, 25 bp, Homo sapien
ggagtgtgaagacgtgaatttcgca

SEQ ID NO: 3615818 - DNA, 25 bp, Homo sapien
tggctagtctgttaaccccaccaga

SEQ ID NO: 3615819 - DNA, 25 bp, Homo sapien
gagggagttaaagatctggctagtc

SEQ ID NO: 3615820 - DNA, 25 bp, Homo sapien
gaaaagctagatcatgcaaaccatg

SEQ ID NO: 3615821 - DNA, 25 bp, Homo sapien
gaagtagtgatcgatggtgttcgca

SEQ ID NO: 3615822 - DNA, 25 bp, Homo sapien
tgccctccttggaactgatatggag

SEQ ID NO: 3615823 - DNA, 25 bp, Homo sapien
caatgatgttgatgccaaccacagt

SEQ ID NO: 3615824 - DNA, 25 bp, Homo sapien
taggaaccaaacataaggctggagc

SEQ ID NO: 3615825 - DNA, 25 bp, Homo sapien
gaattcagtcacgaaagagccattt

SEQ ID NO: 3615826 - DNA, 25 bp, Homo sapien
tgatgtgttaatcccgccagaatga

SEQ ID NO: 3615827 - DNA, 25 bp, Homo sapien
gttcagcccaattagagttaccaag

SEQ ID NO: 3615828 - DNA, 25 bp, Homo sapien
gaaaagttgggtcatgcaccccttg

SEQ ID NO: 3615829 - DNA, 25 bp, Homo sapien
tcagacagcatccaactctctggcg

SEQ ID NO: 3615830 - DNA, 25 bp, Homo sapien
agacagcatccaactctctggcgta

SEQ ID NO: 3615831 - DNA, 25 bp, Homo sapien
cagacagcatccaactctctggcgt

SEQ ID NO: 3615832 - DNA, 25 bp, Homo sapien
gacagcatccaactctctggcgtac

SEQ ID NO: 3615833 - DNA, 25 bp, Homo sapien
ggtttcctttagagcaagtttgaca

SEQ ID NO: 3615834 - DNA, 25 bp, Homo sapien
ttcctttagagcaagtttgacatcc

SEQ ID NO: 3615835 - DNA, 25 bp, Homo sapien
ctttagagcaagtttgacatccttg

SEQ ID NO: 3615836 - DNA, 25 bp, Homo sapien
cctttagagcaagtttgacatcctt

SEQ ID NO: 3615837 - DNA, 25 bp, Homo sapien
taacttaacatgagtgatcagccca

SEQ ID NO: 3615838 - DNA, 25 bp, Homo sapien
caacagttattatgtgggagccaca

SEQ ID NO: 3615839 - DNA, 25 bp, Homo sapien
cagcccaaattcatagaataggcca

SEQ ID NO: 3615840 - DNA, 25 bp, Homo sapien
taccgatggctttgaaccaaccctc

SEQ ID NO: 3615841 - DNA, 25 bp, Homo sapien
aatggttgatgacgttggagtcaca

SEQ ID NO: 3615842 - DNA, 25 bp, Homo sapien
gaggcttgatactataacaactgtg

SEQ ID NO: 3615843 - DNA, 25 bp, Homo sapien
cagctcattggcctaggtgctgctg

SEQ ID NO: 3615844 - DNA, 25 bp, Homo sapien
aataacagacatcaccagctcattg

SEQ ID NO: 3615845 - DNA, 25 bp, Homo sapien
catcagtagagaacagatctgaggg

SEQ ID NO: 3615846 - DNA, 25 bp, Homo sapien
gaccatgtacagaaggggtttgcag

SEQ ID NO: 3615847 - DNA, 25 bp, Homo sapien
gggacgtggtgaccatgtacagaag

SEQ ID NO: 3615848 - DNA, 25 bp, Homo sapien
cccagcaaaccccatcacatatgaa

SEQ ID NO: 3615849 - DNA, 25 bp, Homo sapien
cagcacatagcactcagagtggaca

SEQ ID NO: 3615850 - DNA, 25 bp, Homo sapien
agcacatagcactcagagtggacaa

SEQ ID NO: 3615851 - DNA, 25 bp, Homo sapien
tcagcacatagcactcagagtggac

SEQ ID NO: 3615852 - DNA, 25 bp, Homo sapien
gcacatagcactcagagtggacaaa

SEQ ID NO: 3615853 - DNA, 25 bp, Homo sapien
tagattaattaaactcaagttgccc

SEQ ID NO: 3615854 - DNA, 25 bp, Homo sapien
cctctctgaaataaagctcatcagc

SEQ ID NO: 3615855 - DNA, 25 bp, Homo sapien
tagatctcaggctggtctgttaatc

SEQ ID NO: 3615856 - DNA, 25 bp, Homo sapien
ccaccatggtggtcatatagttcac

SEQ ID NO: 3615857 - DNA, 25 bp, Homo sapien
gacctccatcttcgacatgctagaa

SEQ ID NO: 3615858 - DNA, 25 bp, Homo sapien
tatccttggaggactaactgctgca

SEQ ID NO: 3615859 - DNA, 25 bp, Homo sapien
gatgaaggaggtaattgccaacagc

SEQ ID NO: 3615860 - DNA, 25 bp, Homo sapien
tgcaggaaaacaaccaccttatagg

SEQ ID NO: 3615861 - DNA, 25 bp, Homo sapien
caaataaaaatctatttcatgtcgc

SEQ ID NO: 3615862 - DNA, 25 bp, Homo sapien
ctaaagtcagatgaatcaaataaaa

SEQ ID NO: 3615863 - DNA, 25 bp, Homo sapien
atcaaataaaaatctatttcatgtc

SEQ ID NO: 3615864 - DNA, 25 bp, Homo sapien
aataaaaatctatttcatgtcgcat

SEQ ID NO: 3615865 - DNA, 25 bp, Homo sapien
actcagtgttccactcagttcataa

SEQ ID NO: 3615866 - DNA, 25 bp, Homo sapien
gttccactcagttcataatttggca

SEQ ID NO: 3615867 - DNA, 25 bp, Homo sapien
tgtttacaacttgtgtcacagatcc

SEQ ID NO: 3615868 - DNA, 25 bp, Homo sapien
cattggctcctttgggactcagtgt

SEQ ID NO: 3615869 - DNA, 25 bp, Homo sapien
aaactggagggagcaagagtcagcg

SEQ ID NO: 3615870 - DNA, 25 bp, Homo sapien
gagcaagagtcagcgatgaaggcct

SEQ ID NO: 3615871 - DNA, 25 bp, Homo sapien
gcaagagtcagcgatgaaggcctca

SEQ ID NO: 3615872 - DNA, 25 bp, Homo sapien
gagtcagcgatgaaggcctcagacc

SEQ ID NO: 3615873 - DNA, 25 bp, Homo sapien
gaatttagaccgaaaagagtgatca

SEQ ID NO: 3615874 - DNA, 25 bp, Homo sapien
aggtgagaatttagaccgaaaagag

SEQ ID NO: 3615875 - DNA, 25 bp, Homo sapien
aggatggtacaactgggtaccgtga

SEQ ID NO: 3615876 - DNA, 25 bp, Homo sapien
gagtcatgcacccaacattggagat

SEQ ID NO: 3615877 - DNA, 25 bp, Homo sapien
catggtgacaatgtagatcactaga

SEQ ID NO: 3615878 - DNA, 25 bp, Homo sapien
ggtggtgaaggtatctacgttgacc

SEQ ID NO: 3615879 - DNA, 25 bp, Homo sapien
gaaggtatctacgttgaccacatgt

SEQ ID NO: 3615880 - DNA, 25 bp, Homo sapien
cgttgaccacatgtagtcaaagaat

SEQ ID NO: 3615881 - DNA, 25 bp, Homo sapien
gaactggtggtgaaggtatctacgt

SEQ ID NO: 3615882 - DNA, 25 bp, Homo sapien
attttaatcagagctttcctcagtg

SEQ ID NO: 3615883 - DNA, 25 bp, Homo sapien
aattttaatcagagctttcctcagt

SEQ ID NO: 3615884 - DNA, 25 bp, Homo sapien
tggtacaactgggtaccatgatatt

SEQ ID NO: 3615885 - DNA, 25 bp, Homo sapien
ggatggtacaactgggtaccatgat

SEQ ID NO: 3615886 - DNA, 25 bp, Homo sapien
gaatttagaccgaaaagaatgatca

SEQ ID NO: 3615887 - DNA, 25 bp, Homo sapien
gagtcatgcacccaacataggagat

SEQ ID NO: 3615888 - DNA, 25 bp, Homo sapien
catggtgacaatgtagaccactaga

SEQ ID NO: 3615889 - DNA, 25 bp, Homo sapien
ggaactctggatgatctgttaatcc

SEQ ID NO: 3615890 - DNA, 25 bp, Homo sapien
aattcagtcactaaggagttgtttc

SEQ ID NO: 3615891 - DNA, 25 bp, Homo sapien
gatgatctgttaatccagcaagaat

SEQ ID NO: 3615892 - DNA, 25 bp, Homo sapien
cactaaggagttgtttctagccagc

SEQ ID NO: 3615893 - DNA, 25 bp, Homo sapien
gctgaccattgatatgtgtttcacc

SEQ ID NO: 3615894 - DNA, 25 bp, Homo sapien
ctcagtgctgaccattgatatgtgt

SEQ ID NO: 3615895 - DNA, 25 bp, Homo sapien
gaccattgatatgtgtttcacctcc

SEQ ID NO: 3615896 - DNA, 25 bp, Homo sapien
tccactcagagaactcagtgctgac

SEQ ID NO: 3615897 - DNA, 25 bp, Homo sapien
cctcacatggcgatgtcttccacga

SEQ ID NO: 3615898 - DNA, 25 bp, Homo sapien
aattactagaatcacaagaagtggc

SEQ ID NO: 3615899 - DNA, 25 bp, Homo sapien
agattcccttgaactcttcacccag

SEQ ID NO: 3615900 - DNA, 25 bp, Homo sapien
tggcaaaagtcatacgtagattccc

SEQ ID NO: 3615901 - DNA, 25 bp, Homo sapien
gatgccaccaaaaggctccatcagc

SEQ ID NO: 3615902 - DNA, 25 bp, Homo sapien
tatgcattgttagagtaaccacact

SEQ ID NO: 3615903 - DNA, 25 bp, Homo sapien
tatctgatctgggatacttggacag

SEQ ID NO: 3615904 - DNA, 25 bp, Homo sapien
cacactgcaaccagcttagatgcca

SEQ ID NO: 3615905 - DNA, 25 bp, Homo sapien
ctaggatttctggcctggtctccca

SEQ ID NO: 3615906 - DNA, 25 bp, Homo sapien
ggatttctggcctggtctcccacca

SEQ ID NO: 3615907 - DNA, 25 bp, Homo sapien
ctcccaccaccacagaaggcagcac

SEQ ID NO: 3615908 - DNA, 25 bp, Homo sapien
tctcccaccaccacagaaggcagca

SEQ ID NO: 3615909 - DNA, 25 bp, Homo sapien
agcagctccataggcctcttgtcca

SEQ ID NO: 3615910 - DNA, 25 bp, Homo sapien
taaggctgagcactgtgcttcttgg

SEQ ID NO: 3615911 - DNA, 25 bp, Homo sapien
tgacagctgtagctggtgtccaggt

SEQ ID NO: 3615912 - DNA, 25 bp, Homo sapien
caggtggtgaagtgcctctttggtc

SEQ ID NO: 3615913 - DNA, 25 bp, Homo sapien
atctaggcaaagcataccatcagat

SEQ ID NO: 3615914 - DNA, 25 bp, Homo sapien
accatcagatactctccactcttgc

SEQ ID NO: 3615915 - DNA, 25 bp, Homo sapien
tctaggcaaagcataccatcagata

SEQ ID NO: 3615916 - DNA, 25 bp, Homo sapien
taggcaaagcataccatcagatact

SEQ ID NO: 3615917 - DNA, 25 bp, Homo sapien
caatgaaggatagcgtgaagaggaa

SEQ ID NO: 3615918 - DNA, 25 bp, Homo sapien
ttatgttcaaattctccccacaggg

SEQ ID NO: 3615919 - DNA, 25 bp, Homo sapien
ttcagtcaccgaagagttattttcc

SEQ ID NO: 3615920 - DNA, 25 bp, Homo sapien
gcagcgggagtttgttaatctcaca

SEQ ID NO: 3615921 - DNA, 25 bp, Homo sapien
tcgggaaatccaatctccaatgcag

SEQ ID NO: 3615922 - DNA, 25 bp, Homo sapien
tttcccctggagtctatgcacagtg

SEQ ID NO: 3615923 - DNA, 25 bp, Homo sapien
agaagagtgaatgctccctttgtca

SEQ ID NO: 3615924 - DNA, 25 bp, Homo sapien
ctttggatccttctgtactcagcat

SEQ ID NO: 3615925 - DNA, 25 bp, Homo sapien
tctaatacattgctttcgtaagcct

SEQ ID NO: 3615926 - DNA, 25 bp, Homo sapien
caggcttcatgtcccagagaagcta

SEQ ID NO: 3615927 - DNA, 25 bp, Homo sapien
acattgctttcgtaagcctctcttc

SEQ ID NO: 3615928 - DNA, 25 bp, Homo sapien
caaaatcttgctctggtctttcctc

SEQ ID NO: 3615929 - DNA, 25 bp, Homo sapien
gaaggcggcttgaaagtctgttaca

SEQ ID NO: 3615930 - DNA, 25 bp, Homo sapien
ggtgcatccagaagagtgatcctcc

SEQ ID NO: 3615931 - DNA, 25 bp, Homo sapien
gaagtaggcagatccccagattctc

SEQ ID NO: 3615932 - DNA, 25 bp, Homo sapien
ggcggcttgaaagtctgttacagaa

SEQ ID NO: 3615933 - DNA, 25 bp, Homo sapien
ggtaacaatgccgtcttttggaatc

SEQ ID NO: 3615934 - DNA, 25 bp, Homo sapien
aatatgtgctatcctttgatatgac

SEQ ID NO: 3615935 - DNA, 25 bp, Homo sapien
gaacctgcccgaggttgttttgcag

SEQ ID NO: 3615936 - DNA, 25 bp, Homo sapien
tgaacgtggaggtctagtacattac

SEQ ID NO: 3615937 - DNA, 25 bp, Homo sapien
cacattggtgtaaaagactgaggca

SEQ ID NO: 3615938 - DNA, 25 bp, Homo sapien
caaatctgccatggttcatagagcc

SEQ ID NO: 3615939 - DNA, 25 bp, Homo sapien
caacagcaattatgtgggagcccca

SEQ ID NO: 3615940 - DNA, 25 bp, Homo sapien
taagtaggtgaatgtccctgaccca

SEQ ID NO: 3615941 - DNA, 25 bp, Homo sapien
cacacaggaataacagagatctata

SEQ ID NO: 3615942 - DNA, 25 bp, Homo sapien
gataccaacacatagcactcagaat

SEQ ID NO: 3615943 - DNA, 25 bp, Homo sapien
tgagtcatacatcccacataagaga

SEQ ID NO: 3615944 - DNA, 25 bp, Homo sapien
ggtgtgaaggctaggatttatccca

SEQ ID NO: 3615945 - DNA, 25 bp, Homo sapien
tgataatcccacaaggataaactca

SEQ ID NO: 3615946 - DNA, 25 bp, Homo sapien
ctgataatcccacaaggataaactc

SEQ ID NO: 3615947 - DNA, 25 bp, Homo sapien
gataatcccacaaggataaactcag

SEQ ID NO: 3615948 - DNA, 25 bp, Homo sapien
tctgataatcccacaaggataaact

SEQ ID NO: 3615949 - DNA, 25 bp, Homo sapien
tgtttctcagagtcattctctcttg

SEQ ID NO: 3615950 - DNA, 25 bp, Homo sapien
ctgtttctcagagtcattctctctt

SEQ ID NO: 3615951 - DNA, 25 bp, Homo sapien
tcagagtcattctctcttggcgagc

SEQ ID NO: 3615952 - DNA, 25 bp, Homo sapien
gagtcattctctcttggcgagctgt

SEQ ID NO: 3615953 - DNA, 25 bp, Homo sapien
aagcattgctatttagtacacataa

SEQ ID NO: 3615954 - DNA, 25 bp, Homo sapien
tggatcacttggcccaattctccca

SEQ ID NO: 3615955 - DNA, 25 bp, Homo sapien
gtctccttccagttccatatttgaa

SEQ ID NO: 3615956 - DNA, 25 bp, Homo sapien
tacacataattccttacccattgca

SEQ ID NO: 3615957 - DNA, 25 bp, Homo sapien
gttattggcacagaaggtcacaccc

SEQ ID NO: 3615958 - DNA, 25 bp, Homo sapien
catgaatgctcctgacccaaagaac

SEQ ID NO: 3615959 - DNA, 25 bp, Homo sapien
ccatcatgcacgctgtgtgggccat

SEQ ID NO: 3615960 - DNA, 25 bp, Homo sapien
aattaatgggttgagcatgggcacc

SEQ ID NO: 3615961 - DNA, 25 bp, Homo sapien
ggatgaaggactcagagacaacaaa

SEQ ID NO: 3615962 - DNA, 25 bp, Homo sapien
agtgataacactggaatagcagaaa

SEQ ID NO: 3615963 - DNA, 25 bp, Homo sapien
caagtgagagttgagccttatcagg

SEQ ID NO: 3615964 - DNA, 25 bp, Homo sapien
gaagagctgagtcatacaccctgcg

SEQ ID NO: 3615965 - DNA, 25 bp, Homo sapien
gggatctggactcccggttggtcag

SEQ ID NO: 3615966 - DNA, 25 bp, Homo sapien
actcccggttggtcagttaagcctg

SEQ ID NO: 3615967 - DNA, 25 bp, Homo sapien
ccggttggtcagttaagcctgcgag

SEQ ID NO: 3615968 - DNA, 25 bp, Homo sapien
tctggactcccggttggtcagttaa

SEQ ID NO: 3615969 - DNA, 25 bp, Homo sapien
ctgtgtcacgaaggaggaattctca

SEQ ID NO: 3615970 - DNA, 25 bp, Homo sapien
tcacgaaggaggaattctcagcagc

SEQ ID NO: 3615971 - DNA, 25 bp, Homo sapien
cacgaaggaggaattctcagcagcc

SEQ ID NO: 3615972 - DNA, 25 bp, Homo sapien
tgtcacgaaggaggaattctcagca

SEQ ID NO: 3615973 - DNA, 25 bp, Homo sapien
ttgttcagacagattggctgcggag

SEQ ID NO: 3615974 - DNA, 25 bp, Homo sapien
taggtccagctcttatcttcacttg

SEQ ID NO: 3615975 - DNA, 25 bp, Homo sapien
gactcgggaaaagttcggactgctc

SEQ ID NO: 3615976 - DNA, 25 bp, Homo sapien
tttcagtgatgtgcctttaggtcca

SEQ ID NO: 3615977 - DNA, 25 bp, Homo sapien
gtgacatctgatggaggctgtgccc

SEQ ID NO: 3615978 - DNA, 25 bp, Homo sapien
ccagcttgcagaaaggcgacagcat

SEQ ID NO: 3615979 - DNA, 25 bp, Homo sapien
acatctgatggaggctgtgccctga

SEQ ID NO: 3615980 - DNA, 25 bp, Homo sapien
cctccagcttgcagaaaggcgacag

SEQ ID NO: 3615981 - DNA, 25 bp, Homo sapien
attctgagtttggatatctggggaa

SEQ ID NO: 3615982 - DNA, 25 bp, Homo sapien
atcagtgacagccaatgacaggaga

SEQ ID NO: 3615983 - DNA, 25 bp, Homo sapien
gagactgagcagttttattctgagt

SEQ ID NO: 3615984 - DNA, 25 bp, Homo sapien
acagccaatgacaggagactgagca

SEQ ID NO: 3615985 - DNA, 25 bp, Homo sapien
ccatatcacatcctgggtagtgcag

SEQ ID NO: 3615986 - DNA, 25 bp, Homo sapien
actcctttcttgcatgacagctgta

SEQ ID NO: 3615987 - DNA, 25 bp, Homo sapien
tatggttacccaatatgttagtgct

SEQ ID NO: 3615988 - DNA, 25 bp, Homo sapien
ttataacagagtatgcccaatccct

SEQ ID NO: 3615989 - DNA, 25 bp, Homo sapien
tttctgcaaaaggttctcctcaggg

SEQ ID NO: 3615990 - DNA, 25 bp, Homo sapien
aattttctgcaaaaggttctcctca

SEQ ID NO: 3615991 - DNA, 25 bp, Homo sapien
attttctgcaaaaggttctcctcag

SEQ ID NO: 3615992 - DNA, 25 bp, Homo sapien
gccctctgtggaactaatgtggaga

SEQ ID NO: 3615993 - DNA, 25 bp, Homo sapien
catgggcaccacagcagtacaaaaa

SEQ ID NO: 3615994 - DNA, 25 bp, Homo sapien
cctgacccaaagaaaagcgatacca

SEQ ID NO: 3615995 - DNA, 25 bp, Homo sapien
gagaaaaatggtgacaatcggcacc

SEQ ID NO: 3615996 - DNA, 25 bp, Homo sapien
tagtgattgacaaggttgtctccac

SEQ ID NO: 3615997 - DNA, 25 bp, Homo sapien
aggacataaacattatgtttcccat

SEQ ID NO: 3615998 - DNA, 25 bp, Homo sapien
aaggacataaacattatgtttccca

SEQ ID NO: 3615999 - DNA, 25 bp, Homo sapien
agccccaaaatccccatcccataga

SEQ ID NO: 3616000 - DNA, 25 bp, Homo sapien
gagccacagccccaaaatccccatc

SEQ ID NO: 3616001 - DNA, 25 bp, Homo sapien
ccatcccatagacacccagtaaaag

SEQ ID NO: 3616002 - DNA, 25 bp, Homo sapien
gacacccagtaaaaggagcaaacac

SEQ ID NO: 3616003 - DNA, 25 bp, Homo sapien
ataggaaatgatgttctctgagaca

SEQ ID NO: 3616004 - DNA, 25 bp, Homo sapien
cgctgatagaatataggattcagaa

SEQ ID NO: 3616005 - DNA, 25 bp, Homo sapien
gtagtggaataactaaaatctatga

SEQ ID NO: 3616006 - DNA, 25 bp, Homo sapien
aaaaagctgagtcatacaccctgca

SEQ ID NO: 3616007 - DNA, 25 bp, Homo sapien
ctgtcacggaggaggagttcttggc

SEQ ID NO: 3616008 - DNA, 25 bp, Homo sapien
gggatctggagtcccggctggtcgg

SEQ ID NO: 3616009 - DNA, 25 bp, Homo sapien
gtcacggaggaggagttcttggcag

SEQ ID NO: 3616010 - DNA, 25 bp, Homo sapien
cccggctggtcggttaagcctgaga

SEQ ID NO: 3616011 - DNA, 25 bp, Homo sapien
tcagcagaactaacgcggagaatgc

SEQ ID NO: 3616012 - DNA, 25 bp, Homo sapien
tgccaacggtcacaacaataaagat

SEQ ID NO: 3616013 - DNA, 25 bp, Homo sapien
tggaaaaggttctcttcagggcaag

SEQ ID NO: 3616014 - DNA, 25 bp, Homo sapien
tgaccaggacatttatgtaagagcc

SEQ ID NO: 3616015 - DNA, 25 bp, Homo sapien
gatggtcgtagagaaactaaaatct

SEQ ID NO: 3616016 - DNA, 25 bp, Homo sapien
tgggaatgatggtcgtagagaaact

SEQ ID NO: 3616017 - DNA, 25 bp, Homo sapien
ttgggaatgatggtcgtagagaaac

SEQ ID NO: 3616018 - DNA, 25 bp, Homo sapien
gaatgatggtcgtagagaaactaaa

SEQ ID NO: 3616019 - DNA, 25 bp, Homo sapien
gggacctggagtcccggctggtgga

SEQ ID NO: 3616020 - DNA, 25 bp, Homo sapien
cctggagtcccggctggtggattaa

SEQ ID NO: 3616021 - DNA, 25 bp, Homo sapien
tgtcacggaggaggagttctcggca

SEQ ID NO: 3616022 - DNA, 25 bp, Homo sapien
ctgtcacggaggaggagttctcggc

SEQ ID NO: 3616023 - DNA, 25 bp, Homo sapien
tagtttcccaaccacaataagaaga

SEQ ID NO: 3616024 - DNA, 25 bp, Homo sapien
ttgcaacatccgctccaagcagact

SEQ ID NO: 3616025 - DNA, 25 bp, Homo sapien
tcgggcctgcgtcaaagccacattc

SEQ ID NO: 3616026 - DNA, 25 bp, Homo sapien
agctcctgtgggttcgccttggcca

SEQ ID NO: 3616027 - DNA, 25 bp, Homo sapien
aagcagactgcctacacagacagct

SEQ ID NO: 3616028 - DNA, 25 bp, Homo sapien
tctgtagaactgttgtgtagaatgc

SEQ ID NO: 3616029 - DNA, 25 bp, Homo sapien
aagaccaccagctcattcatgtaag

SEQ ID NO: 3616030 - DNA, 25 bp, Homo sapien
tgggcattccaacgtcaacagccac

SEQ ID NO: 3616031 - DNA, 25 bp, Homo sapien
gctatagattaatgggtttaacacg

SEQ ID NO: 3616032 - DNA, 25 bp, Homo sapien
ttgggagtgatggtagtggagaaac

SEQ ID NO: 3616033 - DNA, 25 bp, Homo sapien
gttcagcccaatcagggttatcaag

SEQ ID NO: 3616034 - DNA, 25 bp, Homo sapien
aaggactcagagacgacaaagaagc

SEQ ID NO: 3616035 - DNA, 25 bp, Homo sapien
cagaaatctattaaagagaggttaa

SEQ ID NO: 3616036 - DNA, 25 bp, Homo sapien
cagaacctaggatgcttggtgcaat

SEQ ID NO: 3616037 - DNA, 25 bp, Homo sapien
ataagaatgaatgaatctggccagg

SEQ ID NO: 3616038 - DNA, 25 bp, Homo sapien
acctaggatgcttggtgcaatcatc

SEQ ID NO: 3616039 - DNA, 25 bp, Homo sapien
ccagaacagaacctaggatgcttgg

SEQ ID NO: 3616040 - DNA, 25 bp, Homo sapien
cggagaacccggactgatacaagag

SEQ ID NO: 3616041 - DNA, 25 bp, Homo sapien
tggcctgccctgtgaatttgagatt

SEQ ID NO: 3616042 - DNA, 25 bp, Homo sapien
aagattagcctaaacactgatgaag

SEQ ID NO: 3616043 - DNA, 25 bp, Homo sapien
gaagggcatagcttagagctgcagc

SEQ ID NO: 3616044 - DNA, 25 bp, Homo sapien
gcgggtgtctctggccctgcggtca

SEQ ID NO: 3616045 - DNA, 25 bp, Homo sapien
cggttgcgggtgtctctggccctgc

SEQ ID NO: 3616046 - DNA, 25 bp, Homo sapien
ttgcgggtgtctctggccctgcggt

SEQ ID NO: 3616047 - DNA, 25 bp, Homo sapien
ggtgtctctggccctgcggtcagcc

SEQ ID NO: 3616048 - DNA, 25 bp, Homo sapien
ccaagttatgttgggccatggcgat

SEQ ID NO: 3616049 - DNA, 25 bp, Homo sapien
taatggtgttactgctctggagact

SEQ ID NO: 3616050 - DNA, 25 bp, Homo sapien
cacagagaaacttacagcctgaggc

SEQ ID NO: 3616051 - DNA, 25 bp, Homo sapien
cccagtgggattgatgcgtatcgca

SEQ ID NO: 3616052 - DNA, 25 bp, Homo sapien
gaaagccccatatgcccattcagta

SEQ ID NO: 3616053 - DNA, 25 bp, Homo sapien
taggtggcctttggagcacactgct

SEQ ID NO: 3616054 - DNA, 25 bp, Homo sapien
tttggctcctaagcactaatctggg

SEQ ID NO: 3616055 - DNA, 25 bp, Homo sapien
taatctgggcaggttagaaagctac

SEQ ID NO: 3616056 - DNA, 25 bp, Homo sapien
tttgacaacatccagtgtcaatgag

SEQ ID NO: 3616057 - DNA, 25 bp, Homo sapien
taactggacgagtgtggtatgatgt

SEQ ID NO: 3616058 - DNA, 25 bp, Homo sapien
aaaaaggactaccttggtgagaatg

SEQ ID NO: 3616059 - DNA, 25 bp, Homo sapien
cctcttccatgttaagaaccctaag

SEQ ID NO: 3616060 - DNA, 25 bp, Homo sapien
cactatgtactctaggttcctggag

SEQ ID NO: 3616061 - DNA, 25 bp, Homo sapien
tcattgcctgaaccgtatttttcac

SEQ ID NO: 3616062 - DNA, 25 bp, Homo sapien
cacatcatgttttaaattactcagc

SEQ ID NO: 3616063 - DNA, 25 bp, Homo sapien
gtgcatggcgtcattaacataatca

SEQ ID NO: 3616064 - DNA, 25 bp, Homo sapien
gccagatgcatgagaggtcaaagca

SEQ ID NO: 3616065 - DNA, 25 bp, Homo sapien
gagccaacgttccttgtaaagtgtg

SEQ ID NO: 3616066 - DNA, 25 bp, Homo sapien
caaagttattcctgctgtttggagc

SEQ ID NO: 3616067 - DNA, 25 bp, Homo sapien
ggacgggtagattgactttttctca

SEQ ID NO: 3616068 - DNA, 25 bp, Homo sapien
cttcaaggacagtttgcaagtggat

SEQ ID NO: 3616069 - DNA, 25 bp, Homo sapien
gggaggaaagctacccatagatagt

SEQ ID NO: 3616070 - DNA, 25 bp, Homo sapien
tacccatagatagtattcttactcc

SEQ ID NO: 3616071 - DNA, 25 bp, Homo sapien
tcaaggacagtttgcaagtggatat

SEQ ID NO: 3616072 - DNA, 25 bp, Homo sapien
taaagacgtctacggccatatcacc

SEQ ID NO: 3616073 - DNA, 25 bp, Homo sapien
caagttacctataagcctgggctca

SEQ ID NO: 3616074 - DNA, 25 bp, Homo sapien
ccatgtgctagctgaaagccattca

SEQ ID NO: 3616075 - DNA, 25 bp, Homo sapien
tgaacactagctggcctatgtggcc

SEQ ID NO: 3616076 - DNA, 25 bp, Homo sapien
tgtccaggaccctggtctgtaatga

SEQ ID NO: 3616077 - DNA, 25 bp, Homo sapien
tttagcaacattgctctgatgtcca

SEQ ID NO: 3616078 - DNA, 25 bp, Homo sapien
tctgtaatgaaagcaatgaagggag

SEQ ID NO: 3616079 - DNA, 25 bp, Homo sapien
ggtataggggacactgcttatattc

SEQ ID NO: 3616080 - DNA, 25 bp, Homo sapien
tggaagccacttgcatcgatggtca

SEQ ID NO: 3616081 - DNA, 25 bp, Homo sapien
cagtgccatgacaagaatcgatcgc

SEQ ID NO: 3616082 - DNA, 25 bp, Homo sapien
aatcgatcgccagggtcagggactg

SEQ ID NO: 3616083 - DNA, 25 bp, Homo sapien
acgtggtccaagcatagcggagagc

SEQ ID NO: 3616084 - DNA, 25 bp, Homo sapien
ttctcaccataagccagagcacggg

SEQ ID NO: 3616085 - DNA, 25 bp, Homo sapien
taatatgtgagattgagcagcccct

SEQ ID NO: 3616086 - DNA, 25 bp, Homo sapien
gccacagtctgtttatctcgagggt

SEQ ID NO: 3616087 - DNA, 25 bp, Homo sapien
caaatgcagccgataagccacagtc

SEQ ID NO: 3616088 - DNA, 25 bp, Homo sapien
gggaaatccatcgtctgagctcttc

SEQ ID NO: 3616089 - DNA, 25 bp, Homo sapien
gctacagccatgaaagtattgggca

SEQ ID NO: 3616090 - DNA, 25 bp, Homo sapien
gccaaaaggcgagtctctatcacag

SEQ ID NO: 3616091 - DNA, 25 bp, Homo sapien
gctgtttgatgccaacggatctggg

SEQ ID NO: 3616092 - DNA, 25 bp, Homo sapien
ttattgacatgaaaaatcgtttact

SEQ ID NO: 3616093 - DNA, 25 bp, Homo sapien
gacatgaaaaatcgtttactactta

SEQ ID NO: 3616094 - DNA, 25 bp, Homo sapien
catgaaaaatcgtttactacttatc

SEQ ID NO: 3616095 - DNA, 25 bp, Homo sapien
ttgacatgaaaaatcgtttactact

SEQ ID NO: 3616096 - DNA, 25 bp, Homo sapien
ggaaagagatccaaatagcacatcc

SEQ ID NO: 3616097 - DNA, 25 bp, Homo sapien
ttaattgtcctatcagtgaactgag

SEQ ID NO: 3616098 - DNA, 25 bp, Homo sapien
tatttcctcaatgaaactgtaatgc

SEQ ID NO: 3616099 - DNA, 25 bp, Homo sapien
agagaagcctttacccacatcgtac

SEQ ID NO: 3616100 - DNA, 25 bp, Homo sapien
aagaaacgctccgtctgcccctggg

SEQ ID NO: 3616101 - DNA, 25 bp, Homo sapien
tcttcgatgagtgcagggaatgtgc

SEQ ID NO: 3616102 - DNA, 25 bp, Homo sapien
gcaattgtacagatccgtgttataa

SEQ ID NO: 3616103 - DNA, 25 bp, Homo sapien
ggtggaaggtttcacgccagtcttc

SEQ ID NO: 3616104 - DNA, 25 bp, Homo sapien
tcagagtcatattgcacagtggatg

SEQ ID NO: 3616105 - DNA, 25 bp, Homo sapien
ccctttcagagtcatattgcacagt

SEQ ID NO: 3616106 - DNA, 25 bp, Homo sapien
ctttcagagtcatattgcacagtgg

SEQ ID NO: 3616107 - DNA, 25 bp, Homo sapien
cagagtcatattgcacagtggatgg

SEQ ID NO: 3616108 - DNA, 25 bp, Homo sapien
agtgcttactgggaccagttacaga

SEQ ID NO: 3616109 - DNA, 25 bp, Homo sapien
gcttactgggaccagttacagaatc

SEQ ID NO: 3616110 - DNA, 25 bp, Homo sapien
tactgggaccagttacagaatcgta

SEQ ID NO: 3616111 - DNA, 25 bp, Homo sapien
ggaccagttacagaatcgtatggaa

SEQ ID NO: 3616112 - DNA, 25 bp, Homo sapien
cacagaggacgatgaccctctctct

SEQ ID NO: 3616113 - DNA, 25 bp, Homo sapien
ccctggtaggctctttctcagactg

SEQ ID NO: 3616114 - DNA, 25 bp, Homo sapien
taattccctggtaggctctttctca

SEQ ID NO: 3616115 - DNA, 25 bp, Homo sapien
ggacgatgaccctctctcttgcata

SEQ ID NO: 3616116 - DNA, 25 bp, Homo sapien
tgaccaggcttcaatgggtgtcccg

SEQ ID NO: 3616117 - DNA, 25 bp, Homo sapien
ttcagtgaccgtccagatgaccagg

SEQ ID NO: 3616118 - DNA, 25 bp, Homo sapien
taaaggtgacgtccaaagagccagc

SEQ ID NO: 3616119 - DNA, 25 bp, Homo sapien
cccgatgggatactgcagagtgtca

SEQ ID NO: 3616120 - DNA, 25 bp, Homo sapien
tggctaggcaataggcttccccatg

SEQ ID NO: 3616121 - DNA, 25 bp, Homo sapien
ttaaaactctggctaggcaataggc

SEQ ID NO: 3616122 - DNA, 25 bp, Homo sapien
aaaactctggctaggcaataggctt

SEQ ID NO: 3616123 - DNA, 25 bp, Homo sapien
ctaggcaataggcttccccatgctt

SEQ ID NO: 3616124 - DNA, 25 bp, Homo sapien
tctgcagactctcggataatcaatg

SEQ ID NO: 3616125 - DNA, 25 bp, Homo sapien
tgcagactctcggataatcaatgct

SEQ ID NO: 3616126 - DNA, 25 bp, Homo sapien
gactctcggataatcaatgctctcc

SEQ ID NO: 3616127 - DNA, 25 bp, Homo sapien
aggatctgcagactctcggataatc

SEQ ID NO: 3616128 - DNA, 25 bp, Homo sapien
tcaaataggtgagaggtgggagggc

SEQ ID NO: 3616129 - DNA, 25 bp, Homo sapien
aataggtgagaggtgggagggccat

SEQ ID NO: 3616130 - DNA, 25 bp, Homo sapien
caaataggtgagaggtgggagggcc

SEQ ID NO: 3616131 - DNA, 25 bp, Homo sapien
ctcaaataggtgagaggtgggaggg

SEQ ID NO: 3616132 - DNA, 25 bp, Homo sapien
tcagagttcccttacactagactgt

SEQ ID NO: 3616133 - DNA, 25 bp, Homo sapien
tctgagcaccaaggaaagcatgcac

SEQ ID NO: 3616134 - DNA, 25 bp, Homo sapien
gattgagtcctgagttttggatacc

SEQ ID NO: 3616135 - DNA, 25 bp, Homo sapien
aacagtgtcgagcacatagtagaca

SEQ ID NO: 3616136 - DNA, 25 bp, Homo sapien
gagcccatgccgaagggccttgata

SEQ ID NO: 3616137 - DNA, 25 bp, Homo sapien
tgaaggaagactcatttccccacag

SEQ ID NO: 3616138 - DNA, 25 bp, Homo sapien
catcggcgagagatgctggcggagc

SEQ ID NO: 3616139 - DNA, 25 bp, Homo sapien
gatttgttggtagtcttgggaagaa

SEQ ID NO: 3616140 - DNA, 25 bp, Homo sapien
cctgctctgcttgaatgggagagac

SEQ ID NO: 3616141 - DNA, 25 bp, Homo sapien
agtcaaccgcaacaaggtcctccag

SEQ ID NO: 3616142 - DNA, 25 bp, Homo sapien
tatgccgcagtgttagacaactccc

SEQ ID NO: 3616143 - DNA, 25 bp, Homo sapien
gaggatgcggacagactgatatgcc

SEQ ID NO: 3616144 - DNA, 25 bp, Homo sapien
gactgctgttgagaaagcgactata

SEQ ID NO: 3616145 - DNA, 25 bp, Homo sapien
caaggttccatagactgttaagaga

SEQ ID NO: 3616146 - DNA, 25 bp, Homo sapien
tctgtgcaaacagggaactgcaatt

SEQ ID NO: 3616147 - DNA, 25 bp, Homo sapien
ttaattcaaaaagcccagcatgggt

SEQ ID NO: 3616148 - DNA, 25 bp, Homo sapien
tcactaaatagaaacagccctgctt

SEQ ID NO: 3616149 - DNA, 25 bp, Homo sapien
gcatttagaacatatcttggctcat

SEQ ID NO: 3616150 - DNA, 25 bp, Homo sapien
ctgtgtattattgctgagactctgc

SEQ ID NO: 3616151 - DNA, 25 bp, Homo sapien
tcttggctcatggtactcactaaat

SEQ ID NO: 3616152 - DNA, 25 bp, Homo sapien
ggcttcataggatccagtaccacca

SEQ ID NO: 3616153 - DNA, 25 bp, Homo sapien
gacgtcatgaactctcagggtgaag

SEQ ID NO: 3616154 - DNA, 25 bp, Homo sapien
gccatcacttcgaaaggtcctccag

SEQ ID NO: 3616155 - DNA, 25 bp, Homo sapien
gacatctccaaacaggacgtcatga

SEQ ID NO: 3616156 - DNA, 25 bp, Homo sapien
tttcctgaccttggcgcagggtcac

SEQ ID NO: 3616157 - DNA, 25 bp, Homo sapien
actgtggctccaggtgtaccgaagc

SEQ ID NO: 3616158 - DNA, 25 bp, Homo sapien
caggtgtaccgaagccccatatcac

SEQ ID NO: 3616159 - DNA, 25 bp, Homo sapien
tcactttcttcatgatggtttcctg

SEQ ID NO: 3616160 - DNA, 25 bp, Homo sapien
tcattattgatgtatgaagcaaagc

SEQ ID NO: 3616161 - DNA, 25 bp, Homo sapien
tgatgtatgaagcaaagcgaaaacc

SEQ ID NO: 3616162 - DNA, 25 bp, Homo sapien
tgtatgaagcaaagcgaaaaccaat

SEQ ID NO: 3616163 - DNA, 25 bp, Homo sapien
tattgatgtatgaagcaaagcgaaa

SEQ ID NO: 3616164 - DNA, 25 bp, Homo sapien
gcagttactccaggaccccgaaggc

SEQ ID NO: 3616165 - DNA, 25 bp, Homo sapien
cccactcagacaagccgcactttct

SEQ ID NO: 3616166 - DNA, 25 bp, Homo sapien
agacaagccgcactttctccctgct

SEQ ID NO: 3616167 - DNA, 25 bp, Homo sapien
ctgcagttactccaggaccccgaag

SEQ ID NO: 3616168 - DNA, 25 bp, Homo sapien
agcccgagtacaagccccggcgcga

SEQ ID NO: 3616169 - DNA, 25 bp, Homo sapien
ccacaggattaatggcagcaccagc

SEQ ID NO: 3616170 - DNA, 25 bp, Homo sapien
tctgtcggcccacaggattaatggc

SEQ ID NO: 3616171 - DNA, 25 bp, Homo sapien
ctgcacttctgtcggcccacaggat

SEQ ID NO: 3616172 - DNA, 25 bp, Homo sapien
accgccgcctaggactgggaaagtg

SEQ ID NO: 3616173 - DNA, 25 bp, Homo sapien
tccacccttttgcagtcctcgcagc

SEQ ID NO: 3616174 - DNA, 25 bp, Homo sapien
gcttgcaaggatctgaccgccgcct

SEQ ID NO: 3616175 - DNA, 25 bp, Homo sapien
tcaggactgggctgtactcgcccct

SEQ ID NO: 3616176 - DNA, 25 bp, Homo sapien
cacggcctccgcctctattccgcat

SEQ ID NO: 3616177 - DNA, 25 bp, Homo sapien
gagattctgagagagcaaccggaca

SEQ ID NO: 3616178 - DNA, 25 bp, Homo sapien
cttcttgaagggctgacacgcgaga

SEQ ID NO: 3616179 - DNA, 25 bp, Homo sapien
tttgcagcagcctattttgagagcc

SEQ ID NO: 3616180 - DNA, 25 bp, Homo sapien
gacaatataccagcttttgcagcag

SEQ ID NO: 3616181 - DNA, 25 bp, Homo sapien
ttgatatgttctcttaaattcgttt

SEQ ID NO: 3616182 - DNA, 25 bp, Homo sapien
tcttaaattcgtttcatattatcga

SEQ ID NO: 3616183 - DNA, 25 bp, Homo sapien
cattgtatttctcacggacatacag

SEQ ID NO: 3616184 - DNA, 25 bp, Homo sapien
tatttctcacggacatacagcgtgg

SEQ ID NO: 3616185 - DNA, 25 bp, Homo sapien
cacggacatacagcgtggaaggtaa

SEQ ID NO: 3616186 - DNA, 25 bp, Homo sapien
tctcacggacatacagcgtggaagg

SEQ ID NO: 3616187 - DNA, 25 bp, Homo sapien
cccagggattcaagacggtagtgag

SEQ ID NO: 3616188 - DNA, 25 bp, Homo sapien
ccagggattcaagacggtagtgagc

SEQ ID NO: 3616189 - DNA, 25 bp, Homo sapien
gcccagggattcaagacggtagtga

SEQ ID NO: 3616190 - DNA, 25 bp, Homo sapien
agggattcaagacggtagtgagcta

SEQ ID NO: 3616191 - DNA, 25 bp, Homo sapien
gcactaattgcatgtaaggaatcag

SEQ ID NO: 3616192 - DNA, 25 bp, Homo sapien
taagcaatagcaggtactccacaaa

SEQ ID NO: 3616193 - DNA, 25 bp, Homo sapien
ggaagtatgacaccccagaatgaac

SEQ ID NO: 3616194 - DNA, 25 bp, Homo sapien
tggaatcagcattattggcatcaac

SEQ ID NO: 3616195 - DNA, 25 bp, Homo sapien
ttggaatagtaaagctgaggggtca

SEQ ID NO: 3616196 - DNA, 25 bp, Homo sapien
gctgtgttcaaggaaagcttctttg

SEQ ID NO: 3616197 - DNA, 25 bp, Homo sapien
ttcaaggaaagcttctttggaatag

SEQ ID NO: 3616198 - DNA, 25 bp, Homo sapien
ttatcttgcacagctgtgttcaagg

SEQ ID NO: 3616199 - DNA, 25 bp, Homo sapien
aatcaaaagtgagcgtctgccagtc

SEQ ID NO: 3616200 - DNA, 25 bp, Homo sapien
aaagttagcagccttcggagcggga

SEQ ID NO: 3616201 - DNA, 25 bp, Homo sapien
tattcctgagcgaaagggaacaggc

SEQ ID NO: 3616202 - DNA, 25 bp, Homo sapien
gattcagagagcaacgtgcaggccc

SEQ ID NO: 3616203 - DNA, 25 bp, Homo sapien
atgagttgttgctccctaaccacac

SEQ ID NO: 3616204 - DNA, 25 bp, Homo sapien
tgcgcttgaggcgacgggaacagag

SEQ ID NO: 3616205 - DNA, 25 bp, Homo sapien
cacacacttgtcagcggcggtatta

SEQ ID NO: 3616206 - DNA, 25 bp, Homo sapien
ttgttgtggtttagcgcctggcagc

SEQ ID NO: 3616207 - DNA, 25 bp, Homo sapien
tcactttccccgatccatccacaca

SEQ ID NO: 3616208 - DNA, 25 bp, Homo sapien
cgtggcgcaccggtcactttccccg

SEQ ID NO: 3616209 - DNA, 25 bp, Homo sapien
gcaccggtcactttccccgatccat

SEQ ID NO: 3616210 - DNA, 25 bp, Homo sapien
gtcactttccccgatccatccacac

SEQ ID NO: 3616211 - DNA, 25 bp, Homo sapien
gatactcagtagtaggcagccacag

SEQ ID NO: 3616212 - DNA, 25 bp, Homo sapien
tctccaccagtttcacggataatgc

SEQ ID NO: 3616213 - DNA, 25 bp, Homo sapien
cggataatgctatcaggcagcctga

SEQ ID NO: 3616214 - DNA, 25 bp, Homo sapien
ctttgcagaggatgacctgatttcc

SEQ ID NO: 3616215 - DNA, 25 bp, Homo sapien
ccttttccatgatgagatccccaaa

SEQ ID NO: 3616216 - DNA, 25 bp, Homo sapien
atagcgaccgctggagctgcttggc

SEQ ID NO: 3616217 - DNA, 25 bp, Homo sapien
gaatggctgtgcatagcgaccgctg

SEQ ID NO: 3616218 - DNA, 25 bp, Homo sapien
tccccaaagaatggctgtgcatagc

SEQ ID NO: 3616219 - DNA, 25 bp, Homo sapien
gatgcctccgtaaggactgctgcca

SEQ ID NO: 3616220 - DNA, 25 bp, Homo sapien
taaggccatgaaggcttaaagtcgc

SEQ ID NO: 3616221 - DNA, 25 bp, Homo sapien
ggccaagtatataactcttctttga

SEQ ID NO: 3616222 - DNA, 25 bp, Homo sapien
taaagtcgcttcctcttgtgatgcc

SEQ ID NO: 3616223 - DNA, 25 bp, Homo sapien
gcttccttgaccatccaaattctca

SEQ ID NO: 3616224 - DNA, 25 bp, Homo sapien
cagggaggcttccttgaccatccaa

SEQ ID NO: 3616225 - DNA, 25 bp, Homo sapien
cttgcttcaaaccatcatccaggga

SEQ ID NO: 3616226 - DNA, 25 bp, Homo sapien
gcttcaaaccatcatccagggaggc

SEQ ID NO: 3616227 - DNA, 25 bp, Homo sapien
tcccagaacatttactgtctgctta

SEQ ID NO: 3616228 - DNA, 25 bp, Homo sapien
ccagaacatttactgtctgcttaat

SEQ ID NO: 3616229 - DNA, 25 bp, Homo sapien
tcctttcgtatctatcattcattat

SEQ ID NO: 3616230 - DNA, 25 bp, Homo sapien
ctgcttaattcctttcgtatctatc

SEQ ID NO: 3616231 - DNA, 25 bp, Homo sapien
gcagcaccctgaacatagcagaagt

SEQ ID NO: 3616232 - DNA, 25 bp, Homo sapien
aaatatattataccgagccttccgt

SEQ ID NO: 3616233 - DNA, 25 bp, Homo sapien
gataatgctggtaacaatcatgatg

SEQ ID NO: 3616234 - DNA, 25 bp, Homo sapien
gccttccgtattgcctctctagcag

SEQ ID NO: 3616235 - DNA, 25 bp, Homo sapien
gaaatagattgtcacgtgccttggc

SEQ ID NO: 3616236 - DNA, 25 bp, Homo sapien
cagaaggtgcccactccgagaaggg

SEQ ID NO: 3616237 - DNA, 25 bp, Homo sapien
ccaggatgtgaagttcagaaggtgc

SEQ ID NO: 3616238 - DNA, 25 bp, Homo sapien
ttatgggtccctccacgggcttgag

SEQ ID NO: 3616239 - DNA, 25 bp, Homo sapien
ctggctccatcccacggcacccacc

SEQ ID NO: 3616240 - DNA, 25 bp, Homo sapien
cgagtccaagcccatctggacagta

SEQ ID NO: 3616241 - DNA, 25 bp, Homo sapien
aaatgttgaccggtggcacccaggc

SEQ ID NO: 3616242 - DNA, 25 bp, Homo sapien
tttgaaaagtcaagaacaactacga

SEQ ID NO: 3616243 - DNA, 25 bp, Homo sapien
agactgtagatgagaagctttaaaa

SEQ ID NO: 3616244 - DNA, 25 bp, Homo sapien
tccccagcgctagtgggtgccttgg

SEQ ID NO: 3616245 - DNA, 25 bp, Homo sapien
agaagagggacctttccccagcgct

SEQ ID NO: 3616246 - DNA, 25 bp, Homo sapien
tgagcatgtctttggatgtcagtgg

SEQ ID NO: 3616247 - DNA, 25 bp, Homo sapien
ccacagtggttaaggggcccacgct

SEQ ID NO: 3616248 - DNA, 25 bp, Homo sapien
gttgccgtatctgttctcctatggg

SEQ ID NO: 3616249 - DNA, 25 bp, Homo sapien
ccagttctgcgtaggcgccttgagt

SEQ ID NO: 3616250 - DNA, 25 bp, Homo sapien
ggatggaactgacagttgccgtatc

SEQ ID NO: 3616251 - DNA, 25 bp, Homo sapien
gaaatggttgctttgcggatggaac

SEQ ID NO: 3616252 - DNA, 25 bp, Homo sapien
ttcttcttctcaggagcaagggcga

SEQ ID NO: 3616253 - DNA, 25 bp, Homo sapien
cgaggatggccagcttttgtcttat

SEQ ID NO: 3616254 - DNA, 25 bp, Homo sapien
ggcgaggatggccagcttttgtctt

SEQ ID NO: 3616255 - DNA, 25 bp, Homo sapien
tcttctcaggagcaagggcgaggat

SEQ ID NO: 3616256 - DNA, 25 bp, Homo sapien
catgcccatcgccaggttgtaccaa

SEQ ID NO: 3616257 - DNA, 25 bp, Homo sapien
caacaggtttctccgtctgtagcag

SEQ ID NO: 3616258 - DNA, 25 bp, Homo sapien
gagcttttgtgtggacgcatgccca

SEQ ID NO: 3616259 - DNA, 25 bp, Homo sapien
tagggagcctttctttgcggactga

SEQ ID NO: 3616260 - DNA, 25 bp, Homo sapien
taggaggcttggatacaagcgtgta

SEQ ID NO: 3616261 - DNA, 25 bp, Homo sapien
cgggaggatggagtgtgtaggaggc

SEQ ID NO: 3616262 - DNA, 25 bp, Homo sapien
tggatacaagcgtgtaggcggaggg

SEQ ID NO: 3616263 - DNA, 25 bp, Homo sapien
agcaagccaggggattgcgcccggg

SEQ ID NO: 3616264 - DNA, 25 bp, Homo sapien
gcagagctgctgtttcggcgcgggt

SEQ ID NO: 3616265 - DNA, 25 bp, Homo sapien
gctggcggccgactgccccagagcc

SEQ ID NO: 3616266 - DNA, 25 bp, Homo sapien
agcagagctgctgtttcggcgcggg

SEQ ID NO: 3616267 - DNA, 25 bp, Homo sapien
gagctgctgtttcggcgcgggtcgg

SEQ ID NO: 3616268 - DNA, 25 bp, Homo sapien
gctgcaccgtaagttagagggcccg

SEQ ID NO: 3616269 - DNA, 25 bp, Homo sapien
tccgctgcgagaggcgcctgagaaa

SEQ ID NO: 3616270 - DNA, 25 bp, Homo sapien
gactgctgcaccgtaagttagaggg

SEQ ID NO: 3616271 - DNA, 25 bp, Homo sapien
catggactgctgcaccgtaagttag

SEQ ID NO: 3616272 - DNA, 25 bp, Homo sapien
gagagggatggaagtggatgcggaa

SEQ ID NO: 3616273 - DNA, 25 bp, Homo sapien
agggatggaagtggatgcggaagac

SEQ ID NO: 3616274 - DNA, 25 bp, Homo sapien
gagggcgagagagggatggaagtgg

SEQ ID NO: 3616275 - DNA, 25 bp, Homo sapien
agagagggatggaagtggatgcgga

SEQ ID NO: 3616276 - DNA, 25 bp, Homo sapien
actgcgccgccgtcggtgggcggac

SEQ ID NO: 3616277 - DNA, 25 bp, Homo sapien
cccgttccccatcccactgcgccgc

SEQ ID NO: 3616278 - DNA, 25 bp, Homo sapien
gttccccatcccactgcgccgccgt

SEQ ID NO: 3616279 - DNA, 25 bp, Homo sapien
catcccactgcgccgccgtcggtgg

SEQ ID NO: 3616280 - DNA, 25 bp, Homo sapien
cctgtgcagcgcaggctggtccata

SEQ ID NO: 3616281 - DNA, 25 bp, Homo sapien
aacgatcgcctaagcgccctgtgca

SEQ ID NO: 3616282 - DNA, 25 bp, Homo sapien
tccatattggttagctcggtagtga

SEQ ID NO: 3616283 - DNA, 25 bp, Homo sapien
agctcggtagtgatgctggctgcaa

SEQ ID NO: 3616284 - DNA, 25 bp, Homo sapien
catgccctgtcctaggtctgcaggg

SEQ ID NO: 3616285 - DNA, 25 bp, Homo sapien
tacacaattatctccatggcccagg

SEQ ID NO: 3616286 - DNA, 25 bp, Homo sapien
gcacctcctccagtgcaccctgtgc

SEQ ID NO: 3616287 - DNA, 25 bp, Homo sapien
tgtgcacaggagccttcccaagtca

SEQ ID NO: 3616288 - DNA, 25 bp, Homo sapien
ctcttgggggctagaggcaggtcct

SEQ ID NO: 3616289 - DNA, 25 bp, Homo sapien
gggctagaggcaggtccttcttcat

SEQ ID NO: 3616290 - DNA, 25 bp, Homo sapien
ggggctagaggcaggtccttcttca

SEQ ID NO: 3616291 - DNA, 25 bp, Homo sapien
ttgggggctagaggcaggtccttct

SEQ ID NO: 3616292 - DNA, 25 bp, Homo sapien
tctggagctctcctcactgaccgca

SEQ ID NO: 3616293 - DNA, 25 bp, Homo sapien
ctggagctctcctcactgaccgcat

SEQ ID NO: 3616294 - DNA, 25 bp, Homo sapien
ttgattctggagctctcctcactga

SEQ ID NO: 3616295 - DNA, 25 bp, Homo sapien
cttttgattctggagctctcctcac

SEQ ID NO: 3616296 - DNA, 25 bp, Homo sapien
tcgggggtggctttgcctgctattc

SEQ ID NO: 3616297 - DNA, 25 bp, Homo sapien
cgggtctagcgtggttggaggcaga

SEQ ID NO: 3616298 - DNA, 25 bp, Homo sapien
cgggcggtgacagcaggtcgggtct

SEQ ID NO: 3616299 - DNA, 25 bp, Homo sapien
gggggtggctttgcctgctattcca

SEQ ID NO: 3616300 - DNA, 25 bp, Homo sapien
gttccctgaggatatcccaagaaag

SEQ ID NO: 3616301 - DNA, 25 bp, Homo sapien
cccaagaaagacttgagctctaaga

SEQ ID NO: 3616302 - DNA, 25 bp, Homo sapien
tgagaagaagcctcactgttccctg

SEQ ID NO: 3616303 - DNA, 25 bp, Homo sapien
tgagcaccctagacctgtgtttggc

SEQ ID NO: 3616304 - DNA, 25 bp, Homo sapien
ctgtgtttaaatcgattatgggcat

SEQ ID NO: 3616305 - DNA, 25 bp, Homo sapien
agaatctggctaggacagtgatcac

SEQ ID NO: 3616306 - DNA, 25 bp, Homo sapien
tggcgaggggaaccatttataagcc

SEQ ID NO: 3616307 - DNA, 25 bp, Homo sapien
gaaacatggcgaggggaaccattta

SEQ ID NO: 3616308 - DNA, 25 bp, Homo sapien
ggcagaatctggctaggacagtgat

SEQ ID NO: 3616309 - DNA, 25 bp, Homo sapien
tcattagttttattaggggtaatga

SEQ ID NO: 3616310 - DNA, 25 bp, Homo sapien
cattagttttattaggggtaatgat

SEQ ID NO: 3616311 - DNA, 25 bp, Homo sapien
cctatctcctgtgtttgagttcatc

SEQ ID NO: 3616312 - DNA, 25 bp, Homo sapien
taatgcctgtaaaacaccgttattg

SEQ ID NO: 3616313 - DNA, 25 bp, Homo sapien
ctcataagcacaccctggaaagggc

SEQ ID NO: 3616314 - DNA, 25 bp, Homo sapien
tgcacctggaacaaggtaagtgctt

SEQ ID NO: 3616315 - DNA, 25 bp, Homo sapien
ttgggcagtggaaaatgaagagtca

SEQ ID NO: 3616316 - DNA, 25 bp, Homo sapien
tgggcagtggaaaatgaagagtcaa

SEQ ID NO: 3616317 - DNA, 25 bp, Homo sapien
cttgggcagtggaaaatgaagagtc

SEQ ID NO: 3616318 - DNA, 25 bp, Homo sapien
cccgcacccaatcctgcctgcactt

SEQ ID NO: 3616319 - DNA, 25 bp, Homo sapien
ctggtgatgggcctggctctcccgc

SEQ ID NO: 3616320 - DNA, 25 bp, Homo sapien
cctgaattgagacatgactgtccac

SEQ ID NO: 3616321 - DNA, 25 bp, Homo sapien
tggtgatgggcctggctctcccgca

SEQ ID NO: 3616322 - DNA, 25 bp, Homo sapien
ggccgccgccaaaatccaggcgagt

SEQ ID NO: 3616323 - DNA, 25 bp, Homo sapien
cattctagacatcccgctggacgat

SEQ ID NO: 3616324 - DNA, 25 bp, Homo sapien
caagccggacgacgacattctagac

SEQ ID NO: 3616325 - DNA, 25 bp, Homo sapien
agtgagtgtccctgccatagccctg

SEQ ID NO: 3616326 - DNA, 25 bp, Homo sapien
agaataagggcgggttggaggtgca

SEQ ID NO: 3616327 - DNA, 25 bp, Homo sapien
gatagaaatccgagatgggaggtgg

SEQ ID NO: 3616328 - DNA, 25 bp, Homo sapien
aaggttgcgcggattccaggagctc

SEQ ID NO: 3616329 - DNA, 25 bp, Homo sapien
gaagaagataaagagcggagagcgc

SEQ ID NO: 3616330 - DNA, 25 bp, Homo sapien
ccctggaccgaagaagaactgagca

SEQ ID NO: 3616331 - DNA, 25 bp, Homo sapien
tgccccgccctggaccgaagaagaa

SEQ ID NO: 3616332 - DNA, 25 bp, Homo sapien
ggaccgaagaagaactgagcatttt

SEQ ID NO: 3616333 - DNA, 25 bp, Homo sapien
ccgccctggaccgaagaagaactga

SEQ ID NO: 3616334 - DNA, 25 bp, Homo sapien
gtgggagaaaaggatcgaatcccca

SEQ ID NO: 3616335 - DNA, 25 bp, Homo sapien
tgggagaaaaggatcgaatccccag

SEQ ID NO: 3616336 - DNA, 25 bp, Homo sapien
tcatttcagcgctttgactcggggt

SEQ ID NO: 3616337 - DNA, 25 bp, Homo sapien
gctcatttcagcgctttgactcggg

SEQ ID NO: 3616338 - DNA, 25 bp, Homo sapien
atttcagcgctttgactcggggtgg

SEQ ID NO: 3616339 - DNA, 25 bp, Homo sapien
ggctcatttcagcgctttgactcgg

SEQ ID NO: 3616340 - DNA, 25 bp, Homo sapien
tggtttcggacgacccttgctctga

SEQ ID NO: 3616341 - DNA, 25 bp, Homo sapien
gagtcgctgagtccgtgccctttta

SEQ ID NO: 3616342 - DNA, 25 bp, Homo sapien
tctgaccggaagagaagtccctatc

SEQ ID NO: 3616343 - DNA, 25 bp, Homo sapien
cgagttctttcgttctgtgcgcagc

SEQ ID NO: 3616344 - DNA, 25 bp, Homo sapien
tcaccgccctcagggatcgggagaa

SEQ ID NO: 3616345 - DNA, 25 bp, Homo sapien
ggtacccacagactttaattattga

SEQ ID NO: 3616346 - DNA, 25 bp, Homo sapien
tacccacagactttaattattgata

SEQ ID NO: 3616347 - DNA, 25 bp, Homo sapien
ccctcaccgccctcagggatcggga

SEQ ID NO: 3616348 - DNA, 25 bp, Homo sapien
gtgctggcagacgagggtctttcca

SEQ ID NO: 3616349 - DNA, 25 bp, Homo sapien
tcatacaagtgtgctcagagatccc

SEQ ID NO: 3616350 - DNA, 25 bp, Homo sapien
tcacacgaccatagggagcttggac

SEQ ID NO: 3616351 - DNA, 25 bp, Homo sapien
ccaggaaccccttgctagaatcagc

SEQ ID NO: 3616352 - DNA, 25 bp, Homo sapien
gttctgagtgaacagtagaagcctc

SEQ ID NO: 3616353 - DNA, 25 bp, Homo sapien
gatgggtataggcaagttctgagtg

SEQ ID NO: 3616354 - DNA, 25 bp, Homo sapien
gcaagttctgagtgaacagtagaag

SEQ ID NO: 3616355 - DNA, 25 bp, Homo sapien
ctgatgggtataggcaagttctgag

SEQ ID NO: 3616356 - DNA, 25 bp, Homo sapien
tctgtccaggtaatctgaggactcc

SEQ ID NO: 3616357 - DNA, 25 bp, Homo sapien
caacgcacaactacaggaaggctag

SEQ ID NO: 3616358 - DNA, 25 bp, Homo sapien
gatccctatcctagaccctgactgg

SEQ ID NO: 3616359 - DNA, 25 bp, Homo sapien
tagttcccggtgatttctgtccagg

SEQ ID NO: 3616360 - DNA, 25 bp, Homo sapien
cacagaagaattgaactcagctgac

SEQ ID NO: 3616361 - DNA, 25 bp, Homo sapien
tccacagaagaattgaactcagctg

SEQ ID NO: 3616362 - DNA, 25 bp, Homo sapien
cctccacagaagaattgaactcagc

SEQ ID NO: 3616363 - DNA, 25 bp, Homo sapien
ctccacagaagaattgaactcagct

SEQ ID NO: 3616364 - DNA, 25 bp, Homo sapien
agtttgagggttgcaggcacccgct

SEQ ID NO: 3616365 - DNA, 25 bp, Homo sapien
taaacacactgaatgatgtcggagt

SEQ ID NO: 3616366 - DNA, 25 bp, Homo sapien
ggcagggcagtcctgcaaacagctt

SEQ ID NO: 3616367 - DNA, 25 bp, Homo sapien
tacacaggttacactgctgccacca

SEQ ID NO: 3616368 - DNA, 25 bp, Homo sapien
cgaaggtcactacccccatatgtct

SEQ ID NO: 3616369 - DNA, 25 bp, Homo sapien
caactgacagcaacagcacgcccag

SEQ ID NO: 3616370 - DNA, 25 bp, Homo sapien
actacccccatatgtctccttgggc

SEQ ID NO: 3616371 - DNA, 25 bp, Homo sapien
ccaggcagaacgcagcaactgacag

SEQ ID NO: 3616372 - DNA, 25 bp, Homo sapien
cggtaggtgcccgaggaggtcaggg

SEQ ID NO: 3616373 - DNA, 25 bp, Homo sapien
agcggtaggtgcccgaggaggtcag

SEQ ID NO: 3616374 - DNA, 25 bp, Homo sapien
agaatgagctggccagacacctcat

SEQ ID NO: 3616375 - DNA, 25 bp, Homo sapien
gagaatgagctggccagacacctca

SEQ ID NO: 3616376 - DNA, 25 bp, Homo sapien
gttccacgactcattcaactcagtg

SEQ ID NO: 3616377 - DNA, 25 bp, Homo sapien
gaagtgttccacgactcattcaact

SEQ ID NO: 3616378 - DNA, 25 bp, Homo sapien
gactcattcaactcagtgagcagct

SEQ ID NO: 3616379 - DNA, 25 bp, Homo sapien
agaggaagtgttccacgactcattc

SEQ ID NO: 3616380 - DNA, 25 bp, Homo sapien
ggtcattcatttctggattgataaa

SEQ ID NO: 3616381 - DNA, 25 bp, Homo sapien
cattcatttctggattgataaagga

SEQ ID NO: 3616382 - DNA, 25 bp, Homo sapien
catttctggattgataaaggagttt

SEQ ID NO: 3616383 - DNA, 25 bp, Homo sapien
ctggattgataaaggagtttgctgg

SEQ ID NO: 3616384 - DNA, 25 bp, Homo sapien
ccagttgtacactggcttaggagcc

SEQ ID NO: 3616385 - DNA, 25 bp, Homo sapien
cactctgactgcataagggattact

SEQ ID NO: 3616386 - DNA, 25 bp, Homo sapien
tgtaggaaaagttccaagacgcacc

SEQ ID NO: 3616387 - DNA, 25 bp, Homo sapien
catctcagtgcagtagagcctccca

SEQ ID NO: 3616388 - DNA, 25 bp, Homo sapien
tacagatggccattggtgaagtaca

SEQ ID NO: 3616389 - DNA, 25 bp, Homo sapien
tctgaagcaggctgacccgctttga

SEQ ID NO: 3616390 - DNA, 25 bp, Homo sapien
cagcacagtaaggttgattagcccc

SEQ ID NO: 3616391 - DNA, 25 bp, Homo sapien
ctttgacttagaaccagttggatac

SEQ ID NO: 3616392 - DNA, 25 bp, Homo sapien
catcaaagtgggtataagaggcctc

SEQ ID NO: 3616393 - DNA, 25 bp, Homo sapien
gaagatacacggtcaggcagactgc

SEQ ID NO: 3616394 - DNA, 25 bp, Homo sapien
cttaagctggaactccaaaggtctc

SEQ ID NO: 3616395 - DNA, 25 bp, Homo sapien
ggtatcagtcacaacaccttagtgt

SEQ ID NO: 3616396 - DNA, 25 bp, Homo sapien
agctgtctcccaccgacgtgctgta

SEQ ID NO: 3616397 - DNA, 25 bp, Homo sapien
agggcgaagctgtctcccaccgacg

SEQ ID NO: 3616398 - DNA, 25 bp, Homo sapien
actccagggcgaagctgtctcccac

SEQ ID NO: 3616399 - DNA, 25 bp, Homo sapien
ggctgcacaaagctccactccaggg

SEQ ID NO: 3616400 - DNA, 25 bp, Homo sapien
tcttccccaggggcgtgctcagcgg

SEQ ID NO: 3616401 - DNA, 25 bp, Homo sapien
tctgtgggtaccttcacctccacgg

SEQ ID NO: 3616402 - DNA, 25 bp, Homo sapien
cgtgctcagcggctctgtgggtacc

SEQ ID NO: 3616403 - DNA, 25 bp, Homo sapien
tgcaggtcagctcggctgtcttccc

SEQ ID NO: 3616404 - DNA, 25 bp, Homo sapien
ccccgggcatctatattggaagctg

SEQ ID NO: 3616405 - DNA, 25 bp, Homo sapien
tgatctggagggtcgggcccacccc

SEQ ID NO: 3616406 - DNA, 25 bp, Homo sapien
aggaaaacactagccctgcggtggg

SEQ ID NO: 3616407 - DNA, 25 bp, Homo sapien
ggaacccaaattccagtgatctgga

SEQ ID NO: 3616408 - DNA, 25 bp, Homo sapien
aagcctagcagggccccgcagagaa

SEQ ID NO: 3616409 - DNA, 25 bp, Homo sapien
cagagaaagggccccgggagctcgg

SEQ ID NO: 3616410 - DNA, 25 bp, Homo sapien
tgccaggtgggcggtcaaggtcggt

SEQ ID NO: 3616411 - DNA, 25 bp, Homo sapien
cgcgtccggccgtcctgtcctgctc

SEQ ID NO: 3616412 - DNA, 25 bp, Homo sapien
cgtccggccgtcctgtcctgctcct

SEQ ID NO: 3616413 - DNA, 25 bp, Homo sapien
gcgtccggccgtcctgtcctgctcc

SEQ ID NO: 3616414 - DNA, 25 bp, Homo sapien
gggtgtcgggcagggaagggagcac

SEQ ID NO: 3616415 - DNA, 25 bp, Homo sapien
ggcagggaagggagcacccaagggc

SEQ ID NO: 3616416 - DNA, 25 bp, Homo sapien
aagggagcacccaagggcagccgcc

SEQ ID NO: 3616417 - DNA, 25 bp, Homo sapien
ctgggtgtcgggcagggaagggagc

SEQ ID NO: 3616418 - DNA, 25 bp, Homo sapien
ctgggcaggagcgagactggtatct

SEQ ID NO: 3616419 - DNA, 25 bp, Homo sapien
gcctcactgtgagtgtgagccccag

SEQ ID NO: 3616420 - DNA, 25 bp, Homo sapien
tgtccacagcgcttttcatttcacc

SEQ ID NO: 3616421 - DNA, 25 bp, Homo sapien
ctgtagaaatgagcatctctccatt

SEQ ID NO: 3616422 - DNA, 25 bp, Homo sapien
tcatttcaccacttactgaggtagg

SEQ ID NO: 3616423 - DNA, 25 bp, Homo sapien
gactcagtgactggaagtctctgcc

SEQ ID NO: 3616424 - DNA, 25 bp, Homo sapien
gacaggttatatcaatacagggagc

SEQ ID NO: 3616425 - DNA, 25 bp, Homo sapien
tcttggtgagtagctaatttcagca

SEQ ID NO: 3616426 - DNA, 25 bp, Homo sapien
gatggttttcccacagtaaagagag

SEQ ID NO: 3616427 - DNA, 25 bp, Homo sapien
aaatcctttagccaatgagtggtgg

SEQ ID NO: 3616428 - DNA, 25 bp, Homo sapien
cccatctgtcgtgggcagtcttggt

SEQ ID NO: 3616429 - DNA, 25 bp, Homo sapien
tattggttgagggtgggccccatct

SEQ ID NO: 3616430 - DNA, 25 bp, Homo sapien
gctcgtgcggaggtgacagaggaaa

SEQ ID NO: 3616431 - DNA, 25 bp, Homo sapien
acccatgcggctcaagccagaggaa

SEQ ID NO: 3616432 - DNA, 25 bp, Homo sapien
ccggcggtggtacaagaggaccagc

SEQ ID NO: 3616433 - DNA, 25 bp, Homo sapien
gccttgccccggcggtggtacaaga

SEQ ID NO: 3616434 - DNA, 25 bp, Homo sapien
agtccaaccagggtacccacaacag

SEQ ID NO: 3616435 - DNA, 25 bp, Homo sapien
cggtggtacaagaggaccagcccag

SEQ ID NO: 3616436 - DNA, 25 bp, Homo sapien
tgctcacttccagcgtcacattaca

SEQ ID NO: 3616437 - DNA, 25 bp, Homo sapien
ccacctcattgtgggccttgcagac

SEQ ID NO: 3616438 - DNA, 25 bp, Homo sapien
gggccttgcagacatagactccagc

SEQ ID NO: 3616439 - DNA, 25 bp, Homo sapien
cgtcacattacattgggcagtgccc

SEQ ID NO: 3616440 - DNA, 25 bp, Homo sapien
gtgtccactgtttccagtagtgtcc

SEQ ID NO: 3616441 - DNA, 25 bp, Homo sapien
agtgtccactgtttccagtagtgtc

SEQ ID NO: 3616442 - DNA, 25 bp, Homo sapien
gtccactgtttccagtagtgtcctc

SEQ ID NO: 3616443 - DNA, 25 bp, Homo sapien
tgtccactgtttccagtagtgtcct

SEQ ID NO: 3616444 - DNA, 25 bp, Homo sapien
atgctggtgcaaagaaagtctggaa

SEQ ID NO: 3616445 - DNA, 25 bp, Homo sapien
aatgctggtgcaaagaaagtctgga

SEQ ID NO: 3616446 - DNA, 25 bp, Homo sapien
aagtctggaaggatggaagctgccg

SEQ ID NO: 3616447 - DNA, 25 bp, Homo sapien
aacttttgtcatttaggagagagac

SEQ ID NO: 3616448 - DNA, 25 bp, Homo sapien
gaggggtccggaaatctgcttctca

SEQ ID NO: 3616449 - DNA, 25 bp, Homo sapien
ggaggggtccggaaatctgcttctc

SEQ ID NO: 3616450 - DNA, 25 bp, Homo sapien
ccagtacattgagttctaaggtttt

SEQ ID NO: 3616451 - DNA, 25 bp, Homo sapien
acattgagttctaaggttttgatgc

SEQ ID NO: 3616452 - DNA, 25 bp, Homo sapien
ttctaaggttttgatgctgtggccc

SEQ ID NO: 3616453 - DNA, 25 bp, Homo sapien
gagttctaaggttttgatgctgtgg

SEQ ID NO: 3616454 - DNA, 25 bp, Homo sapien
tcttgcacattcacggagcagctgt

SEQ ID NO: 3616455 - DNA, 25 bp, Homo sapien
tagaccaaggatactccaggtttgc

SEQ ID NO: 3616456 - DNA, 25 bp, Homo sapien
tttgcttgttgtgaccccattgatg

SEQ ID NO: 3616457 - DNA, 25 bp, Homo sapien
gacaggttccgggagggcatggagt

SEQ ID NO: 3616458 - DNA, 25 bp, Homo sapien
gtgtggggcataacacatccccgtc

SEQ ID NO: 3616459 - DNA, 25 bp, Homo sapien
tgtggggcataacacatccccgtca

SEQ ID NO: 3616460 - DNA, 25 bp, Homo sapien
gtggggcataacacatccccgtcat

SEQ ID NO: 3616461 - DNA, 25 bp, Homo sapien
tgtgtctactgtgcctacaggctca

SEQ ID NO: 3616462 - DNA, 25 bp, Homo sapien
catgcacccattcttctaacctgaa

SEQ ID NO: 3616463 - DNA, 25 bp, Homo sapien
ccccagctcgcattctccaaatgcc

SEQ ID NO: 3616464 - DNA, 25 bp, Homo sapien
caaatgcccctcacatgcacccatt

SEQ ID NO: 3616465 - DNA, 25 bp, Homo sapien
tagaaaggtgacataatagtgggag

SEQ ID NO: 3616466 - DNA, 25 bp, Homo sapien
tcgttcctgcgcattgtctcatctc

SEQ ID NO: 3616467 - DNA, 25 bp, Homo sapien
tggatccaggtttgtaagacctgaa

SEQ ID NO: 3616468 - DNA, 25 bp, Homo sapien
gtctcatctcccaattgcggtgttt

SEQ ID NO: 3616469 - DNA, 25 bp, Homo sapien
gggaagtctccaatatcagaacaaa

SEQ ID NO: 3616470 - DNA, 25 bp, Homo sapien
tataagtcgtgtgtgttacttcccc

SEQ ID NO: 3616471 - DNA, 25 bp, Homo sapien
caaaaactgaactggtgaagacttc

SEQ ID NO: 3616472 - DNA, 25 bp, Homo sapien
taagcgtttcccagtcctcaacttc

SEQ ID NO: 3616473 - DNA, 25 bp, Homo sapien
ctctgggcgcaacttgccgctggct

SEQ ID NO: 3616474 - DNA, 25 bp, Homo sapien
cttgccgctggctgacaggcgttct

SEQ ID NO: 3616475 - DNA, 25 bp, Homo sapien
cccctctgggcgcaacttgccgctg

SEQ ID NO: 3616476 - DNA, 25 bp, Homo sapien
tggctgacaggcgttcttccctcac

SEQ ID NO: 3616477 - DNA, 25 bp, Homo sapien
catggctgggatgaagacacctccc

SEQ ID NO: 3616478 - DNA, 25 bp, Homo sapien
cctgcaaccggttggcgggcaagtg

SEQ ID NO: 3616479 - DNA, 25 bp, Homo sapien
tgcaaggtgtaccacgctggaagca

SEQ ID NO: 3616480 - DNA, 25 bp, Homo sapien
tgaagaaccacatcacaaagggcac

SEQ ID NO: 3616481 - DNA, 25 bp, Homo sapien
gcatttattcgtatccagaggcgca

SEQ ID NO: 3616482 - DNA, 25 bp, Homo sapien
tatgagaagaaagggtggaccgact

SEQ ID NO: 3616483 - DNA, 25 bp, Homo sapien
tcaccagagagcgaggaaagtcgct

SEQ ID NO: 3616484 - DNA, 25 bp, Homo sapien
cagaggcgcagatttctgagcatca

SEQ ID NO: 3616485 - DNA, 25 bp, Homo sapien
ctcactcccgagttctcaaagggcg

SEQ ID NO: 3616486 - DNA, 25 bp, Homo sapien
ctcccgagttctcaaagggcggagg

SEQ ID NO: 3616487 - DNA, 25 bp, Homo sapien
tgggaggccgtctggttacctatta

SEQ ID NO: 3616488 - DNA, 25 bp, Homo sapien
tggttacctattaaccctgcggctc

SEQ ID NO: 3616489 - DNA, 25 bp, Homo sapien
cagagcagcccagcgcccaagcctg

SEQ ID NO: 3616490 - DNA, 25 bp, Homo sapien
agcagagcagcccagcgcccaagcc

SEQ ID NO: 3616491 - DNA, 25 bp, Homo sapien
gagcagcccagcgcccaagcctgac

SEQ ID NO: 3616492 - DNA, 25 bp, Homo sapien
tggagagagcagagcagcccagcgc

SEQ ID NO: 3616493 - DNA, 25 bp, Homo sapien
gcaaggaattaagggcagcgcgaac

SEQ ID NO: 3616494 - DNA, 25 bp, Homo sapien
cagcgcgaacgacggtctctagaca

SEQ ID NO: 3616495 - DNA, 25 bp, Homo sapien
tagacaagtatgaagcctcccctga

SEQ ID NO: 3616496 - DNA, 25 bp, Homo sapien
gagaactctcgggtggcaaggaatt

SEQ ID NO: 3616497 - DNA, 25 bp, Homo sapien
gagcagccaactggtaagccctttg

SEQ ID NO: 3616498 - DNA, 25 bp, Homo sapien
caacagagcagccaactggtaagcc

SEQ ID NO: 3616499 - DNA, 25 bp, Homo sapien
cagagcagccaactggtaagccctt

SEQ ID NO: 3616500 - DNA, 25 bp, Homo sapien
gcagccaactggtaagccctttggg

SEQ ID NO: 3616501 - DNA, 25 bp, Homo sapien
gaagacgccacctccgcgtggcgag

SEQ ID NO: 3616502 - DNA, 25 bp, Homo sapien
aggcctgaggatgatcgccgctcca

SEQ ID NO: 3616503 - DNA, 25 bp, Homo sapien
cttgggcttgcacacggccaggcct

SEQ ID NO: 3616504 - DNA, 25 bp, Homo sapien
ggccctctgcctcggagcggaagac

SEQ ID NO: 3616505 - DNA, 25 bp, Homo sapien
cactagaccggaggctctacgggag

SEQ ID NO: 3616506 - DNA, 25 bp, Homo sapien
gccgatccggccaggatgcaagcct

SEQ ID NO: 3616507 - DNA, 25 bp, Homo sapien
gtgataaggcagaagacaatgaagg

SEQ ID NO: 3616508 - DNA, 25 bp, Homo sapien
ggcaggaaatttgtacccagtgata

SEQ ID NO: 3616509 - DNA, 25 bp, Homo sapien
cgccgggaaactgcctggggcccag

SEQ ID NO: 3616510 - DNA, 25 bp, Homo sapien
ctggggcccagaaggggcgcgccct

SEQ ID NO: 3616511 - DNA, 25 bp, Homo sapien
tgcctggggcccagaaggggcgcgc

SEQ ID NO: 3616512 - DNA, 25 bp, Homo sapien
cagaaggggcgcgcccttccttcac

SEQ ID NO: 3616513 - DNA, 25 bp, Homo sapien
aagagatagtaacggacacactggg

SEQ ID NO: 3616514 - DNA, 25 bp, Homo sapien
caggtcccacatttataattccact

SEQ ID NO: 3616515 - DNA, 25 bp, Homo sapien
taaaagagatagtaacggacacact

SEQ ID NO: 3616516 - DNA, 25 bp, Homo sapien
agcgacctccccaggtcccacattt

SEQ ID NO: 3616517 - DNA, 25 bp, Homo sapien
taggaacagaagagggcctgaggct

SEQ ID NO: 3616518 - DNA, 25 bp, Homo sapien
acagaagagggcctgaggcttttct

SEQ ID NO: 3616519 - DNA, 25 bp, Homo sapien
gaacagaagagggcctgaggctttt

SEQ ID NO: 3616520 - DNA, 25 bp, Homo sapien
tgggtgtctgctggctcggaagtca

SEQ ID NO: 3616521 - DNA, 25 bp, Homo sapien
aggagcctactgagccggagagcct

SEQ ID NO: 3616522 - DNA, 25 bp, Homo sapien
ggtctgatcgaaggacactgggaca

SEQ ID NO: 3616523 - DNA, 25 bp, Homo sapien
aaggagagcgaaatgggcccgctcc

SEQ ID NO: 3616524 - DNA, 25 bp, Homo sapien
tcaccagtgccatttaaccctcgag

SEQ ID NO: 3616525 - DNA, 25 bp, Homo sapien
gaccgattggaacttttgagtccag

SEQ ID NO: 3616526 - DNA, 25 bp, Homo sapien
gggacactcaggcagtcaacttgaa

SEQ ID NO: 3616527 - DNA, 25 bp, Homo sapien
tgtccccatcattgtagaatttcac

SEQ ID NO: 3616528 - DNA, 25 bp, Homo sapien
tataatattgcatgccccgacacct

SEQ ID NO: 3616529 - DNA, 25 bp, Homo sapien
gaaatgagttaaagtcaatatagct

SEQ ID NO: 3616530 - DNA, 25 bp, Homo sapien
actcccattcgagatccttgaaggg

SEQ ID NO: 3616531 - DNA, 25 bp, Homo sapien
aatatagctaaacccacccttcact

SEQ ID NO: 3616532 - DNA, 25 bp, Homo sapien
cttcactcccattcgagatccttga

SEQ ID NO: 3616533 - DNA, 25 bp, Homo sapien
tgtccccgacaaagcgagaagtcag

SEQ ID NO: 3616534 - DNA, 25 bp, Homo sapien
actgggggctgtccccgacaaagcg

SEQ ID NO: 3616535 - DNA, 25 bp, Homo sapien
ccccgacaaagcgagaagtcagcgc

SEQ ID NO: 3616536 - DNA, 25 bp, Homo sapien
gggctgtccccgacaaagcgagaag

SEQ ID NO: 3616537 - DNA, 25 bp, Homo sapien
aaccgcagcaagttggtcaccaggg

SEQ ID NO: 3616538 - DNA, 25 bp, Homo sapien
ccaggaacaaaaaccgcagcaagtt

SEQ ID NO: 3616539 - DNA, 25 bp, Homo sapien
caaaaaccgcagcaagttggtcacc

SEQ ID NO: 3616540 - DNA, 25 bp, Homo sapien
agccccaggaacaaaaaccgcagca

SEQ ID NO: 3616541 - DNA, 25 bp, Homo sapien
gaaactgaggcaacgtgcgtgctgc

SEQ ID NO: 3616542 - DNA, 25 bp, Homo sapien
gcttagcccctgaaatgagcggcgt

SEQ ID NO: 3616543 - DNA, 25 bp, Homo sapien
ttggcacaaggtagtcccgggagct

SEQ ID NO: 3616544 - DNA, 25 bp, Homo sapien
gacatgtaaacgctcctgggctctg

SEQ ID NO: 3616545 - DNA, 25 bp, Homo sapien
tcacactcttgtgtagggagctaca

SEQ ID NO: 3616546 - DNA, 25 bp, Homo sapien
ttaacagagtgtagtccctgggccc

SEQ ID NO: 3616547 - DNA, 25 bp, Homo sapien
tagaatctagtacttggcagctcag

SEQ ID NO: 3616548 - DNA, 25 bp, Homo sapien
tctttctagtgtgacctgcctggct

SEQ ID NO: 3616549 - DNA, 25 bp, Homo sapien
cagtgacctttggtactctgacagt

SEQ ID NO: 3616550 - DNA, 25 bp, Homo sapien
ctctgacagtaaataatgacattgg

SEQ ID NO: 3616551 - DNA, 25 bp, Homo sapien
ttacaaaatgagatgttcagtgacc

SEQ ID NO: 3616552 - DNA, 25 bp, Homo sapien
gacattggtcagtgaggtatagaga

SEQ ID NO: 3616553 - DNA, 25 bp, Homo sapien
tagctaagggtgatattgaaaaagt

SEQ ID NO: 3616554 - DNA, 25 bp, Homo sapien
ggcaacacaactgtaaagttggtac

SEQ ID NO: 3616555 - DNA, 25 bp, Homo sapien
aattatatacaatagtagctaaggg

SEQ ID NO: 3616556 - DNA, 25 bp, Homo sapien
gcaaaacacttggctggtgaaaaaa

SEQ ID NO: 3616557 - DNA, 25 bp, Homo sapien
cgctatatatcttgcttgctcaaaa

SEQ ID NO: 3616558 - DNA, 25 bp, Homo sapien
atatagagacatagagatgtgtaaa

SEQ ID NO: 3616559 - DNA, 25 bp, Homo sapien
gctgacccaccatgcaagttcgcta

SEQ ID NO: 3616560 - DNA, 25 bp, Homo sapien
tattacttatatagagacatagaga

SEQ ID NO: 3616561 - DNA, 25 bp, Homo sapien
tctggcccaagtctactatgattcc

SEQ ID NO: 3616562 - DNA, 25 bp, Homo sapien
aagaaagggtttccatgaagagtct

SEQ ID NO: 3616563 - DNA, 25 bp, Homo sapien
cgtactggcccaattgaagaaaggg

SEQ ID NO: 3616564 - DNA, 25 bp, Homo sapien
catgaagagtctgacggcggcatct

SEQ ID NO: 3616565 - DNA, 25 bp, Homo sapien
cccaaatccttatgaaggatgacat

SEQ ID NO: 3616566 - DNA, 25 bp, Homo sapien
ctaagagcccaaatccttatgaagg

SEQ ID NO: 3616567 - DNA, 25 bp, Homo sapien
gagcccaaatccttatgaaggatga

SEQ ID NO: 3616568 - DNA, 25 bp, Homo sapien
taagagcccaaatccttatgaagga

SEQ ID NO: 3616569 - DNA, 25 bp, Homo sapien
gagcctgcggaaagaaaatccctct

SEQ ID NO: 3616570 - DNA, 25 bp, Homo sapien
ataagcactgctgtagagtcctgac

SEQ ID NO: 3616571 - DNA, 25 bp, Homo sapien
ctgaaggttttggtattcgcttgga

SEQ ID NO: 3616572 - DNA, 25 bp, Homo sapien
aatacagttctgagacaaaaacccg

SEQ ID NO: 3616573 - DNA, 25 bp, Homo sapien
tagcaatagataattcgggtgggtt

SEQ ID NO: 3616574 - DNA, 25 bp, Homo sapien
ctcagcaatcccgaggtagcaatag

SEQ ID NO: 3616575 - DNA, 25 bp, Homo sapien
agcaatagataattcgggtgggttc

SEQ ID NO: 3616576 - DNA, 25 bp, Homo sapien
tcagcaatcccgaggtagcaataga

SEQ ID NO: 3616577 - DNA, 25 bp, Homo sapien
tctgcactcgggtcataatgatccg

SEQ ID NO: 3616578 - DNA, 25 bp, Homo sapien
tactcccgaagtcgcttgccaaggg

SEQ ID NO: 3616579 - DNA, 25 bp, Homo sapien
gatatcctctttccaacgggtgtta

SEQ ID NO: 3616580 - DNA, 25 bp, Homo sapien
gctgatctcagcataatggtaacgg

SEQ ID NO: 3616581 - DNA, 25 bp, Homo sapien
ctaacagcttcttgaaaacgggctc

SEQ ID NO: 3616582 - DNA, 25 bp, Homo sapien
aacgggctctggaaggagcttgatc

SEQ ID NO: 3616583 - DNA, 25 bp, Homo sapien
gatccttgagacttttcctgctacg

SEQ ID NO: 3616584 - DNA, 25 bp, Homo sapien
ggggtgtgcgtgctaacagcttctt

SEQ ID NO: 3616585 - DNA, 25 bp, Homo sapien
tgcaattaccggcatgagccactgc

SEQ ID NO: 3616586 - DNA, 25 bp, Homo sapien
caaagtgctgcaattaccggcatga

SEQ ID NO: 3616587 - DNA, 25 bp, Homo sapien
tgcacccagcctaatttttgtattt

SEQ ID NO: 3616588 - DNA, 25 bp, Homo sapien
tcgtgatctgcctgcactggcatcc

SEQ ID NO: 3616589 - DNA, 25 bp, Homo sapien
ctcaccctctttccagacatggaat

SEQ ID NO: 3616590 - DNA, 25 bp, Homo sapien
gacaatgggaattctttgattccaa

SEQ ID NO: 3616591 - DNA, 25 bp, Homo sapien
atggaatcagatgacaatgggaatt

SEQ ID NO: 3616592 - DNA, 25 bp, Homo sapien
cctctttccagacatggaatcagat

SEQ ID NO: 3616593 - DNA, 25 bp, Homo sapien
gcttcttcagaagactcttgtttta

SEQ ID NO: 3616594 - DNA, 25 bp, Homo sapien
tatttttaatgttctctttgtgaca

SEQ ID NO: 3616595 - DNA, 25 bp, Homo sapien
tttaatgttctctttgtgacaggta

SEQ ID NO: 3616596 - DNA, 25 bp, Homo sapien
tgtgcttcttcagaagactcttgtt

SEQ ID NO: 3616597 - DNA, 25 bp, Homo sapien
caacttgccaaatgaacaacaccaa

SEQ ID NO: 3616598 - DNA, 25 bp, Homo sapien
taaggctaaaccaaggatgcccaca

SEQ ID NO: 3616599 - DNA, 25 bp, Homo sapien
tgtcactgagtgtacttgtatagct

SEQ ID NO: 3616600 - DNA, 25 bp, Homo sapien
caccagttggcagtttaaggctaaa

SEQ ID NO: 3616601 - DNA, 25 bp, Homo sapien
gtgaatagtcctccatagtgctgcc

SEQ ID NO: 3616602 - DNA, 25 bp, Homo sapien
tcctgatctgttggatagccatgga

SEQ ID NO: 3616603 - DNA, 25 bp, Homo sapien
ccaattcctgatctgttggatagcc

SEQ ID NO: 3616604 - DNA, 25 bp, Homo sapien
tgtgaatagtcctccatagtgctgc

SEQ ID NO: 3616605 - DNA, 25 bp, Homo sapien
caccatgttctttcacccgactgta

SEQ ID NO: 3616606 - DNA, 25 bp, Homo sapien
aagccactactgttaataagtacag

SEQ ID NO: 3616607 - DNA, 25 bp, Homo sapien
accatgttctttcacccgactgtaa

SEQ ID NO: 3616608 - DNA, 25 bp, Homo sapien
acaccatgttctttcacccgactgt

SEQ ID NO: 3616609 - DNA, 25 bp, Homo sapien
taagacacaaagtcttttgttattc

SEQ ID NO: 3616610 - DNA, 25 bp, Homo sapien
agacacaaagtcttttgttattcct

SEQ ID NO: 3616611 - DNA, 25 bp, Homo sapien
ctaagacacaaagtcttttgttatt

SEQ ID NO: 3616612 - DNA, 25 bp, Homo sapien
gatgccttagagaactgaggtttcc

SEQ ID NO: 3616613 - DNA, 25 bp, Homo sapien
actcagtctttgtggaagccgctaa

SEQ ID NO: 3616614 - DNA, 25 bp, Homo sapien
tgttcaaaagtagttcacctcagac

SEQ ID NO: 3616615 - DNA, 25 bp, Homo sapien
taccagccagccaataggatgcaca

SEQ ID NO: 3616616 - DNA, 25 bp, Homo sapien
tccaaggaccgtaaatggagagtcc

SEQ ID NO: 3616617 - DNA, 25 bp, Homo sapien
cttccaatggaaggagacaaatgcc

SEQ ID NO: 3616618 - DNA, 25 bp, Homo sapien
cctccttgcagggattggaatttga

SEQ ID NO: 3616619 - DNA, 25 bp, Homo sapien
cagagctcatttgactttctacaca

SEQ ID NO: 3616620 - DNA, 25 bp, Homo sapien
gaagtgacacaagcataagcaaagc

SEQ ID NO: 3616621 - DNA, 25 bp, Homo sapien
caatctctggcgatagacatggtag

SEQ ID NO: 3616622 - DNA, 25 bp, Homo sapien
cacacaagggcccagttggctctgt

SEQ ID NO: 3616623 - DNA, 25 bp, Homo sapien
gaaaggtgccacacatatcaggaag

SEQ ID NO: 3616624 - DNA, 25 bp, Homo sapien
ttcagttctgggcatcgaaccagct

SEQ ID NO: 3616625 - DNA, 25 bp, Homo sapien
ctctctattcagcaccggtgaggcc

SEQ ID NO: 3616626 - DNA, 25 bp, Homo sapien
tgggttgtataagcagaggaatcac

SEQ ID NO: 3616627 - DNA, 25 bp, Homo sapien
tgacattacctaagctacttttggg

SEQ ID NO: 3616628 - DNA, 25 bp, Homo sapien
aacctgtcccatacgatttcaaggg

SEQ ID NO: 3616629 - DNA, 25 bp, Homo sapien
cctttttgagtcatggatccactcc

SEQ ID NO: 3616630 - DNA, 25 bp, Homo sapien
ctaaagaacccatacaagaacgtcg

SEQ ID NO: 3616631 - DNA, 25 bp, Homo sapien
gtaaaagcatacaagggccgggtgc

SEQ ID NO: 3616632 - DNA, 25 bp, Homo sapien
tgaatcctatcagcttgcacttcat

SEQ ID NO: 3616633 - DNA, 25 bp, Homo sapien
gactgaatcctatcagcttgcactt

SEQ ID NO: 3616634 - DNA, 25 bp, Homo sapien
caggactgaatcctatcagcttgca

SEQ ID NO: 3616635 - DNA, 25 bp, Homo sapien
ccaggactgaatcctatcagcttgc

SEQ ID NO: 3616636 - DNA, 25 bp, Homo sapien
tattcataggggcaagcattatgca

SEQ ID NO: 3616637 - DNA, 25 bp, Homo sapien
caccacgccaagctggcattctctg

SEQ ID NO: 3616638 - DNA, 25 bp, Homo sapien
cataggggcaagcattatgcacaac

SEQ ID NO: 3616639 - DNA, 25 bp, Homo sapien
gtgactattcataggggcaagcatt

SEQ ID NO: 3616640 - DNA, 25 bp, Homo sapien
gaaacactgcttggtgtcaccacct

SEQ ID NO: 3616641 - DNA, 25 bp, Homo sapien
gaagagcatgggttccagagaaaca

SEQ ID NO: 3616642 - DNA, 25 bp, Homo sapien
cgtcgttgccaaaaacatgacttca

SEQ ID NO: 3616643 - DNA, 25 bp, Homo sapien
aaaaggtgatataagcaagtggtta

SEQ ID NO: 3616644 - DNA, 25 bp, Homo sapien
tctgaagatagtagagagacagtac

SEQ ID NO: 3616645 - DNA, 25 bp, Homo sapien
caaagtagtcttacataggctgaga

SEQ ID NO: 3616646 - DNA, 25 bp, Homo sapien
gcgtaacaacacatcctactaagtg

SEQ ID NO: 3616647 - DNA, 25 bp, Homo sapien
tactaagtgaaaaggtaacactcac

SEQ ID NO: 3616648 - DNA, 25 bp, Homo sapien
cacagtggaggaaccccacatcaga

SEQ ID NO: 3616649 - DNA, 25 bp, Homo sapien
aatttgtaacatatgcataagaggc

SEQ ID NO: 3616650 - DNA, 25 bp, Homo sapien
gaggcacagatccactaagcattca

SEQ ID NO: 3616651 - DNA, 25 bp, Homo sapien
gggaactctgcattgattaggaact

SEQ ID NO: 3616652 - DNA, 25 bp, Homo sapien
gcagtcacgctagccacatttcagg

SEQ ID NO: 3616653 - DNA, 25 bp, Homo sapien
gagtcactctcctaaatggctgagg

SEQ ID NO: 3616654 - DNA, 25 bp, Homo sapien
taaggcatcatttacggctcccaca

SEQ ID NO: 3616655 - DNA, 25 bp, Homo sapien
tctgcaaacgccaaagagaagtcct

SEQ ID NO: 3616656 - DNA, 25 bp, Homo sapien
gatgagactggtcactcctttgaag

SEQ ID NO: 3616657 - DNA, 25 bp, Homo sapien
taaatttgtctgatgagcgaccagc

SEQ ID NO: 3616658 - DNA, 25 bp, Homo sapien
actactacagtatggccagcgatga

SEQ ID NO: 3616659 - DNA, 25 bp, Homo sapien
tgaggcacagctagaagtacacatc

SEQ ID NO: 3616660 - DNA, 25 bp, Homo sapien
tgactggagatatgaaaaggcctac

SEQ ID NO: 3616661 - DNA, 25 bp, Homo sapien
tctgactccaaaattgggctggaat

SEQ ID NO: 3616662 - DNA, 25 bp, Homo sapien
ggcagtgtcaaacacatccgtttta

SEQ ID NO: 3616663 - DNA, 25 bp, Homo sapien
caatctatgtagtaaggcagtgtca

SEQ ID NO: 3616664 - DNA, 25 bp, Homo sapien
tatattcagtgaggttttgacaaca

SEQ ID NO: 3616665 - DNA, 25 bp, Homo sapien
cacactttttctgcgtgattgggaa

SEQ ID NO: 3616666 - DNA, 25 bp, Homo sapien
tgaggttttgacaacacactttttc

SEQ ID NO: 3616667 - DNA, 25 bp, Homo sapien
tttatggagagatttatattcagtg

SEQ ID NO: 3616668 - DNA, 25 bp, Homo sapien
aaactgaagcagggaaaaactggct

SEQ ID NO: 3616669 - DNA, 25 bp, Homo sapien
gagttctacttgtcaccacatccgg

SEQ ID NO: 3616670 - DNA, 25 bp, Homo sapien
gatgcacactgagagttctacttgt

SEQ ID NO: 3616671 - DNA, 25 bp, Homo sapien
aggtacacaaggacggccagatgca

SEQ ID NO: 3616672 - DNA, 25 bp, Homo sapien
ctggcggccatctgggaaaaagccc

SEQ ID NO: 3616673 - DNA, 25 bp, Homo sapien
ggctggcggccatctgggaaaaagc

SEQ ID NO: 3616674 - DNA, 25 bp, Homo sapien
gctggcggccatctgggaaaaagcc

SEQ ID NO: 3616675 - DNA, 25 bp, Homo sapien
cctctggttcgctgccccaggccgg

SEQ ID NO: 3616676 - DNA, 25 bp, Homo sapien
tctctgcctctggttcgctgcccca

SEQ ID NO: 3616677 - DNA, 25 bp, Homo sapien
cgaggcccgcttccccgccttctct

SEQ ID NO: 3616678 - DNA, 25 bp, Homo sapien
tctgcctctggttcgctgccccagg

SEQ ID NO: 3616679 - DNA, 25 bp, Homo sapien
gctcgttgccccacactgcgatgag

SEQ ID NO: 3616680 - DNA, 25 bp, Homo sapien
ggacacgcgctcgtacatggctggc

SEQ ID NO: 3616681 - DNA, 25 bp, Homo sapien
ttcgtctcggctggcgtccacgaca

SEQ ID NO: 3616682 - DNA, 25 bp, Homo sapien
tgcgatgagcgcgttcgtctcggct

SEQ ID NO: 3616683 - DNA, 25 bp, Homo sapien
gcggcggctgccgcagccccgccac

SEQ ID NO: 3616684 - DNA, 25 bp, Homo sapien
cggcggcggctgccgcagccccgcc

SEQ ID NO: 3616685 - DNA, 25 bp, Homo sapien
ggcggcggctgccgcagccccgcca

SEQ ID NO: 3616686 - DNA, 25 bp, Homo sapien
aagggtcggacagcgatggatttcc

SEQ ID NO: 3616687 - DNA, 25 bp, Homo sapien
atttccgtcgctcaggccaccagga

SEQ ID NO: 3616688 - DNA, 25 bp, Homo sapien
gagaagccggggaaagcacctccat

SEQ ID NO: 3616689 - DNA, 25 bp, Homo sapien
tcggaatttttagcggcgagttggc

SEQ ID NO: 3616690 - DNA, 25 bp, Homo sapien
gcgcccgcgcatccggccaccgcgg

SEQ ID NO: 3616691 - DNA, 25 bp, Homo sapien
ggaagtgacgcgcccgcgcatccgg

SEQ ID NO: 3616692 - DNA, 25 bp, Homo sapien
gcgcatccggccaccgcggtctccg

SEQ ID NO: 3616693 - DNA, 25 bp, Homo sapien
gacgcgcccgcgcatccggccaccg

SEQ ID NO: 3616694 - DNA, 25 bp, Homo sapien
ccgaagccccgagctgaagagaagg

SEQ ID NO: 3616695 - DNA, 25 bp, Homo sapien
taaggaggaatagaccgtttctctc

SEQ ID NO: 3616696 - DNA, 25 bp, Homo sapien
gagtgaggaacagattggagccttc

SEQ ID NO: 3616697 - DNA, 25 bp, Homo sapien
ggcatgagggcgctggagtgaggaa

SEQ ID NO: 3616698 - DNA, 25 bp, Homo sapien
taagaggaggaccttgtagagagcc

SEQ ID NO: 3616699 - DNA, 25 bp, Homo sapien
caagtgtcgttaacagcgggcagct

SEQ ID NO: 3616700 - DNA, 25 bp, Homo sapien
tctgtagaggttctccagacagtgc

SEQ ID NO: 3616701 - DNA, 25 bp, Homo sapien
catatgcacatggctctgtagaggt

SEQ ID NO: 3616702 - DNA, 25 bp, Homo sapien
caatttactgccatccccgagtctt

SEQ ID NO: 3616703 - DNA, 25 bp, Homo sapien
agcagcatgtgggttagggtctcct

SEQ ID NO: 3616704 - DNA, 25 bp, Homo sapien
agagcttgcagtcctgttcattgaa

SEQ ID NO: 3616705 - DNA, 25 bp, Homo sapien
ttgaaaagtgatctggtgagctcca

SEQ ID NO: 3616706 - DNA, 25 bp, Homo sapien
tatttactacctagcagttgaaaga

SEQ ID NO: 3616707 - DNA, 25 bp, Homo sapien
tactaactgatgaggatttggagca

SEQ ID NO: 3616708 - DNA, 25 bp, Homo sapien
tcaaaccctgctgatagataaatgc

SEQ ID NO: 3616709 - DNA, 25 bp, Homo sapien
tgttcattcagagatacacatgcat

SEQ ID NO: 3616710 - DNA, 25 bp, Homo sapien
gacatctcaacctcggatgtcattt

SEQ ID NO: 3616711 - DNA, 25 bp, Homo sapien
tcggatgtcatttttcggtgcctcc

SEQ ID NO: 3616712 - DNA, 25 bp, Homo sapien
ttccccgacatctcaacctcggatg

SEQ ID NO: 3616713 - DNA, 25 bp, Homo sapien
gatgtcatttttcggtgcctcctca

SEQ ID NO: 3616714 - DNA, 25 bp, Homo sapien
ctccctgcacgtgggcacacaatgg

SEQ ID NO: 3616715 - DNA, 25 bp, Homo sapien
cacaggctccgtgtgtccaaagtcc

SEQ ID NO: 3616716 - DNA, 25 bp, Homo sapien
tccttctccctgcacgtgggcacac

SEQ ID NO: 3616717 - DNA, 25 bp, Homo sapien
tcggcctggaatccatctaactcag

SEQ ID NO: 3616718 - DNA, 25 bp, Homo sapien
tccacggcctctttaccaactgcag

SEQ ID NO: 3616719 - DNA, 25 bp, Homo sapien
gtcaggccgcatctgctccaaattt

SEQ ID NO: 3616720 - DNA, 25 bp, Homo sapien
tccaaatttatggctcctcctcggg

SEQ ID NO: 3616721 - DNA, 25 bp, Homo sapien
gagggagggaacacgaagcgcggcc

SEQ ID NO: 3616722 - DNA, 25 bp, Homo sapien
gaggtaatatcctgcgaggccagcc

SEQ ID NO: 3616723 - DNA, 25 bp, Homo sapien
aaacgaccgcatggcagtaggctcg

SEQ ID NO: 3616724 - DNA, 25 bp, Homo sapien
agtaggctcgctgggcagatgccca

SEQ ID NO: 3616725 - DNA, 25 bp, Homo sapien
cagggaagggacttgatgcaaacga

SEQ ID NO: 3616726 - DNA, 25 bp, Homo sapien
ggtagagtgtgttgcaaagtgtctc

SEQ ID NO: 3616727 - DNA, 25 bp, Homo sapien
cagatttccagtcttggtagagtgt

SEQ ID NO: 3616728 - DNA, 25 bp, Homo sapien
ttatctgtattgggatgtgaacatt

SEQ ID NO: 3616729 - DNA, 25 bp, Homo sapien
aacatttctgcccagttgtctccag

SEQ ID NO: 3616730 - DNA, 25 bp, Homo sapien
cctgggctcaccgtaggagaactgg

SEQ ID NO: 3616731 - DNA, 25 bp, Homo sapien
taggaaccaagatgacccttgttgg

SEQ ID NO: 3616732 - DNA, 25 bp, Homo sapien
gcagggtcctgtatatcaacgcaca

SEQ ID NO: 3616733 - DNA, 25 bp, Homo sapien
aaaagagtctgatcagagcccaggg

SEQ ID NO: 3616734 - DNA, 25 bp, Homo sapien
tgactccgtcacagagggtatgtac

SEQ ID NO: 3616735 - DNA, 25 bp, Homo sapien
gtatgtacaaatgggcagctcttgg

SEQ ID NO: 3616736 - DNA, 25 bp, Homo sapien
tttttcaaaccatctgactccgtca

SEQ ID NO: 3616737 - DNA, 25 bp, Homo sapien
cagagggtatgtacaaatgggcagc

SEQ ID NO: 3616738 - DNA, 25 bp, Homo sapien
gacttttttgtggtgaatgccgtgg

SEQ ID NO: 3616739 - DNA, 25 bp, Homo sapien
ttttttgtggtgaatgccgtggtcc

SEQ ID NO: 3616740 - DNA, 25 bp, Homo sapien
ttttgtggtgaatgccgtggtcctc

SEQ ID NO: 3616741 - DNA, 25 bp, Homo sapien
tttgtggtgaatgccgtggtcctcg

SEQ ID NO: 3616742 - DNA, 25 bp, Homo sapien
tcgtctgcccctttgacctgtgagt

SEQ ID NO: 3616743 - DNA, 25 bp, Homo sapien
gcaaacagggttgggatgttttcaa

SEQ ID NO: 3616744 - DNA, 25 bp, Homo sapien
gttttgttccttctcgcttgctcca

SEQ ID NO: 3616745 - DNA, 25 bp, Homo sapien
cactggtgacctgaggttttgttcc

SEQ ID NO: 3616746 - DNA, 25 bp, Homo sapien
ctgattaatgtggttcaggaagccc

SEQ ID NO: 3616747 - DNA, 25 bp, Homo sapien
ttcccgccaagggaggaagacgcag

SEQ ID NO: 3616748 - DNA, 25 bp, Homo sapien
tgtggccctgtcatgctctgtagca

SEQ ID NO: 3616749 - DNA, 25 bp, Homo sapien
ttcctaagccaaccgtgacaggtgg

SEQ ID NO: 3616750 - DNA, 25 bp, Homo sapien
acttgggcagaatgaacctattact

SEQ ID NO: 3616751 - DNA, 25 bp, Homo sapien
tttaatataagttgccaggaccagc

SEQ ID NO: 3616752 - DNA, 25 bp, Homo sapien
ctaaggcttatcttgaggaggtgga

SEQ ID NO: 3616753 - DNA, 25 bp, Homo sapien
cagaaatgtgtgacactccctgagt

SEQ ID NO: 3616754 - DNA, 25 bp, Homo sapien
cttgaaccctttgtttggcatgagg

SEQ ID NO: 3616755 - DNA, 25 bp, Homo sapien
gatggtgcttttgacctacggtctc

SEQ ID NO: 3616756 - DNA, 25 bp, Homo sapien
tgacaacagtacgaggatggtgctt

SEQ ID NO: 3616757 - DNA, 25 bp, Homo sapien
gcctcagtggcattcataattattt

SEQ ID NO: 3616758 - DNA, 25 bp, Homo sapien
ggcccaggtaaggctgagagggggc

SEQ ID NO: 3616759 - DNA, 25 bp, Homo sapien
aggggcccaggtaaggctgagaggg

SEQ ID NO: 3616760 - DNA, 25 bp, Homo sapien
tgagagggggctccgagaagctcct

SEQ ID NO: 3616761 - DNA, 25 bp, Homo sapien
agagggggctccgagaagctccttc

SEQ ID NO: 3616762 - DNA, 25 bp, Homo sapien
gggctgctcctcaggccaaaacaac

SEQ ID NO: 3616763 - DNA, 25 bp, Homo sapien
gcagggctgctcctcaggccaaaac

SEQ ID NO: 3616764 - DNA, 25 bp, Homo sapien
gcaggcagggctgctcctcaggcca

SEQ ID NO: 3616765 - DNA, 25 bp, Homo sapien
ctgtgatccaaatggtgggggaaga

SEQ ID NO: 3616766 - DNA, 25 bp, Homo sapien
catttgttttcacaatcgtggaggg

SEQ ID NO: 3616767 - DNA, 25 bp, Homo sapien
tggctaggagtcaggtggagatgat

SEQ ID NO: 3616768 - DNA, 25 bp, Homo sapien
gaggcttgggaaggtggaccccagc

SEQ ID NO: 3616769 - DNA, 25 bp, Homo sapien
caatcgtggagggagaactctctgg

SEQ ID NO: 3616770 - DNA, 25 bp, Homo sapien
tctggtcaagatgaacacattagcc

SEQ ID NO: 3616771 - DNA, 25 bp, Homo sapien
ggtcaagatgaacacattagccagg

SEQ ID NO: 3616772 - DNA, 25 bp, Homo sapien
gacagtggagttatctcccttgctc

SEQ ID NO: 3616773 - DNA, 25 bp, Homo sapien
ctgaaggacagtggagttatctccc

SEQ ID NO: 3616774 - DNA, 25 bp, Homo sapien
atgtcttccaaccagtctggcctcc

SEQ ID NO: 3616775 - DNA, 25 bp, Homo sapien
catacgacagtggagctgacttctc

SEQ ID NO: 3616776 - DNA, 25 bp, Homo sapien
tgacttctctgggaagagatctgag

SEQ ID NO: 3616777 - DNA, 25 bp, Homo sapien
agccttgggcatacgacagtggagc

SEQ ID NO: 3616778 - DNA, 25 bp, Homo sapien
cagaaagcttaggaccagctcaggg

SEQ ID NO: 3616779 - DNA, 25 bp, Homo sapien
ggacctacagttggctgcctttaga

SEQ ID NO: 3616780 - DNA, 25 bp, Homo sapien
tctgtgggaggttgaccttcagccc

SEQ ID NO: 3616781 - DNA, 25 bp, Homo sapien
gaggatggagcaacctttcctggag

SEQ ID NO: 3616782 - DNA, 25 bp, Homo sapien
cagtttcctcattaggataagagag

SEQ ID NO: 3616783 - DNA, 25 bp, Homo sapien
aatgtatgcaaagcacttatcatag

SEQ ID NO: 3616784 - DNA, 25 bp, Homo sapien
aaagaattggacaatttgtccttgt

SEQ ID NO: 3616785 - DNA, 25 bp, Homo sapien
catagtgcctgagatacaataatca

SEQ ID NO: 3616786 - DNA, 25 bp, Homo sapien
ctatgaagacgcagtctgcctccct

SEQ ID NO: 3616787 - DNA, 25 bp, Homo sapien
cagaggctgagccccaaccattggc

SEQ ID NO: 3616788 - DNA, 25 bp, Homo sapien
cagggcccgggcaaagtgagcatca

SEQ ID NO: 3616789 - DNA, 25 bp, Homo sapien
agaccgaaaccaaagctatccacag

SEQ ID NO: 3616790 - DNA, 25 bp, Homo sapien
agtcctgcccatgtccgtgaactct

SEQ ID NO: 3616791 - DNA, 25 bp, Homo sapien
gacgctgatgtacccataggtggtg

SEQ ID NO: 3616792 - DNA, 25 bp, Homo sapien
ctgcccatgtccgtgaactctgagg

SEQ ID NO: 3616793 - DNA, 25 bp, Homo sapien
aggctgttgggacgctgatgtaccc

SEQ ID NO: 3616794 - DNA, 25 bp, Homo sapien
tctgtagttctttggttatctctca

SEQ ID NO: 3616795 - DNA, 25 bp, Homo sapien
tggaatgagggttgtagtaacagaa

SEQ ID NO: 3616796 - DNA, 25 bp, Homo sapien
ggagggcggaatgggtggagaggcg

SEQ ID NO: 3616797 - DNA, 25 bp, Homo sapien
tttggttatctctcaagctactcac

SEQ ID NO: 3616798 - DNA, 25 bp, Homo sapien
gggagtctcctcaccctcactgagt

SEQ ID NO: 3616799 - DNA, 25 bp, Homo sapien
tgagttccaagcacagggctacctc

SEQ ID NO: 3616800 - DNA, 25 bp, Homo sapien
agggctacctcctcaggggtcagca

SEQ ID NO: 3616801 - DNA, 25 bp, Homo sapien
ccctcactgagttccaagcacaggg

SEQ ID NO: 3616802 - DNA, 25 bp, Homo sapien
gctggacaggcgactggaagctggg

SEQ ID NO: 3616803 - DNA, 25 bp, Homo sapien
cctgggggctagggggactgcaggg

SEQ ID NO: 3616804 - DNA, 25 bp, Homo sapien
gcaggggctaaggatggggatgggg

SEQ ID NO: 3616805 - DNA, 25 bp, Homo sapien
gggagcctgtggtgccaccggaggc

SEQ ID NO: 3616806 - DNA, 25 bp, Homo sapien
gaggagggagcctgtggtgccaccg

SEQ ID NO: 3616807 - DNA, 25 bp, Homo sapien
ggagggagcctgtggtgccaccgga

SEQ ID NO: 3616808 - DNA, 25 bp, Homo sapien
gagggagcctgtggtgccaccggag

SEQ ID NO: 3616809 - DNA, 25 bp, Homo sapien
gttactacagctcttcaagtccttt

SEQ ID NO: 3616810 - DNA, 25 bp, Homo sapien
agagagtgatggcaccgtagttact

SEQ ID NO: 3616811 - DNA, 25 bp, Homo sapien
tgatggcaccgtagttactacagct

SEQ ID NO: 3616812 - DNA, 25 bp, Homo sapien
tccccagcctgtccaatcccggcac

SEQ ID NO: 3616813 - DNA, 25 bp, Homo sapien
cgagtaaccagctcatttgaggagc

SEQ ID NO: 3616814 - DNA, 25 bp, Homo sapien
ttgaggagctgaggagtttcggtcc

SEQ ID NO: 3616815 - DNA, 25 bp, Homo sapien
gctggagggagatgacgagtaacca

SEQ ID NO: 3616816 - DNA, 25 bp, Homo sapien
gctgaggagtttcggtcccagggcc

SEQ ID NO: 3616817 - DNA, 25 bp, Homo sapien
gggctggtaagcccctgcatcccta

SEQ ID NO: 3616818 - DNA, 25 bp, Homo sapien
tgcatccctacaccctatctcaccc

SEQ ID NO: 3616819 - DNA, 25 bp, Homo sapien
cccttagctacctgtccactactcc

SEQ ID NO: 3616820 - DNA, 25 bp, Homo sapien
aaaggaggatgagcccgtgggaggg

SEQ ID NO: 3616821 - DNA, 25 bp, Homo sapien
aggcccggagctccaaggagtggct

SEQ ID NO: 3616822 - DNA, 25 bp, Homo sapien
gcccggagctccaaggagtggctgc

SEQ ID NO: 3616823 - DNA, 25 bp, Homo sapien
caggcccggagctccaaggagtggc

SEQ ID NO: 3616824 - DNA, 25 bp, Homo sapien
ggcccggagctccaaggagtggctg

SEQ ID NO: 3616825 - DNA, 25 bp, Homo sapien
tgttccccatgtttggcatgcagtg

SEQ ID NO: 3616826 - DNA, 25 bp, Homo sapien
gagaaagaggtcttgtgtccacctg

SEQ ID NO: 3616827 - DNA, 25 bp, Homo sapien
aacactttcgttagacaggccctga

SEQ ID NO: 3616828 - DNA, 25 bp, Homo sapien
tacatagtacaccaggagatgagct

SEQ ID NO: 3616829 - DNA, 25 bp, Homo sapien
gcagctcagcgatgagggagccata

SEQ ID NO: 3616830 - DNA, 25 bp, Homo sapien
agagagtcccctgcggctgcagagg

SEQ ID NO: 3616831 - DNA, 25 bp, Homo sapien
tgagggagccataaaaagtgctggt

SEQ ID NO: 3616832 - DNA, 25 bp, Homo sapien
tgcggctgcagaggctgtctgagct

SEQ ID NO: 3616833 - DNA, 25 bp, Homo sapien
gaacgccaagtgtctgccaaccact

SEQ ID NO: 3616834 - DNA, 25 bp, Homo sapien
agccagaggtggaacgccaagtgtc

SEQ ID NO: 3616835 - DNA, 25 bp, Homo sapien
ctgctcaggtcccgagagccagagg

SEQ ID NO: 3616836 - DNA, 25 bp, Homo sapien
cgacagtctagtgggtcccgggcat

SEQ ID NO: 3616837 - DNA, 25 bp, Homo sapien
cacttgggtaagtacatcctctcta

SEQ ID NO: 3616838 - DNA, 25 bp, Homo sapien
gaagtgagaacctttttggccaaga

SEQ ID NO: 3616839 - DNA, 25 bp, Homo sapien
aaatgatggcaatagggccttccac

SEQ ID NO: 3616840 - DNA, 25 bp, Homo sapien
gggaaatccgagtcacccagagctg

SEQ ID NO: 3616841 - DNA, 25 bp, Homo sapien
gactatgatgtaggcacaatggctc

SEQ ID NO: 3616842 - DNA, 25 bp, Homo sapien
catgggtgcacgcataagatgagac

SEQ ID NO: 3616843 - DNA, 25 bp, Homo sapien
cactacttggtagaccatgggtgca

SEQ ID NO: 3616844 - DNA, 25 bp, Homo sapien
gggcccatgggcagatcctgttttt

SEQ ID NO: 3616845 - DNA, 25 bp, Homo sapien
ggcatcctcactggtatatctgtac

SEQ ID NO: 3616846 - DNA, 25 bp, Homo sapien
gcatcctcactggtatatctgtaca

SEQ ID NO: 3616847 - DNA, 25 bp, Homo sapien
tggcatcctcactggtatatctgta

SEQ ID NO: 3616848 - DNA, 25 bp, Homo sapien
gacctcaggccgcttcaaggtagcc

SEQ ID NO: 3616849 - DNA, 25 bp, Homo sapien
gttcttgggtggctcgctccatggc

SEQ ID NO: 3616850 - DNA, 25 bp, Homo sapien
aacaccgcaggtggcaatgacctca

SEQ ID NO: 3616851 - DNA, 25 bp, Homo sapien
cagggaccatgctcactgggttctt

SEQ ID NO: 3616852 - DNA, 25 bp, Homo sapien
tatgggatgcagagctcagagggag

SEQ ID NO: 3616853 - DNA, 25 bp, Homo sapien
gaagggtagggtgggtctgtgggca

SEQ ID NO: 3616854 - DNA, 25 bp, Homo sapien
gaaggcgggatgcaggctgaagggt

SEQ ID NO: 3616855 - DNA, 25 bp, Homo sapien
agggagagggagtcgaggcattgag

SEQ ID NO: 3616856 - DNA, 25 bp, Homo sapien
gccacttgcacgcagtaggagcctg

SEQ ID NO: 3616857 - DNA, 25 bp, Homo sapien
tgggtggcgatttccagctgggtct

SEQ ID NO: 3616858 - DNA, 25 bp, Homo sapien
taggagcctggcatatgggtggcga

SEQ ID NO: 3616859 - DNA, 25 bp, Homo sapien
gacaggtctactgggctccccagct

SEQ ID NO: 3616860 - DNA, 25 bp, Homo sapien
ggcagtgatgtgttgcccaggctcc

SEQ ID NO: 3616861 - DNA, 25 bp, Homo sapien
gtgatgtgttgcccaggctccagac

SEQ ID NO: 3616862 - DNA, 25 bp, Homo sapien
cagtgatgtgttgcccaggctccag

SEQ ID NO: 3616863 - DNA, 25 bp, Homo sapien
ctggtggcagtgatgtgttgcccag

SEQ ID NO: 3616864 - DNA, 25 bp, Homo sapien
ccaggcaccatcccagaagccaagc

SEQ ID NO: 3616865 - DNA, 25 bp, Homo sapien
ggcaccatcccagaagccaagccct

SEQ ID NO: 3616866 - DNA, 25 bp, Homo sapien
ctgaggcacaagcagaggtgaacag

SEQ ID NO: 3616867 - DNA, 25 bp, Homo sapien
agaggtgaacagcttccccaggcac

SEQ ID NO: 3616868 - DNA, 25 bp, Homo sapien
cagagcaagggtatgcagaactcca

SEQ ID NO: 3616869 - DNA, 25 bp, Homo sapien
cagtaggaagggctatgacagctag

SEQ ID NO: 3616870 - DNA, 25 bp, Homo sapien
agcaagggtatgcagaactccagag

SEQ ID NO: 3616871 - DNA, 25 bp, Homo sapien
cccagagcaagggtatgcagaactc

SEQ ID NO: 3616872 - DNA, 25 bp, Homo sapien
tgggacccagctcacaaagacagtg

SEQ ID NO: 3616873 - DNA, 25 bp, Homo sapien
gacagtgccattgccaggctttaga

SEQ ID NO: 3616874 - DNA, 25 bp, Homo sapien
ctggtagccacggatgatgccattg

SEQ ID NO: 3616875 - DNA, 25 bp, Homo sapien
aggctttagagtcacttcctgaggt

SEQ ID NO: 3616876 - DNA, 25 bp, Homo sapien
gcccggccagaggatggtctcactt

SEQ ID NO: 3616877 - DNA, 25 bp, Homo sapien
gaacaaggccgtgtaagattgggca

SEQ ID NO: 3616878 - DNA, 25 bp, Homo sapien
tgaactcgtagtcttggccccagtg

SEQ ID NO: 3616879 - DNA, 25 bp, Homo sapien
agcacgttgctgtcagggcctcgag

SEQ ID NO: 3616880 - DNA, 25 bp, Homo sapien
atccgggttcagcagtgtcacattt

SEQ ID NO: 3616881 - DNA, 25 bp, Homo sapien
ccggtctaggcttggggccctctgc

SEQ ID NO: 3616882 - DNA, 25 bp, Homo sapien
aagctccacaggctccgtgtagtcc

SEQ ID NO: 3616883 - DNA, 25 bp, Homo sapien
gggttcagcagtgtcacattttcca

SEQ ID NO: 3616884 - DNA, 25 bp, Homo sapien
gggctgcgcggctctccctatgtcc

SEQ ID NO: 3616885 - DNA, 25 bp, Homo sapien
cctggatggaaacccgggctgcgcg

SEQ ID NO: 3616886 - DNA, 25 bp, Homo sapien
taggtcccttcgtcactcttctctg

SEQ ID NO: 3616887 - DNA, 25 bp, Homo sapien
ggctctccctatgtcctgcgctgtt

SEQ ID NO: 3616888 - DNA, 25 bp, Homo sapien
gggtttcccatctttccaccatgag

SEQ ID NO: 3616889 - DNA, 25 bp, Homo sapien
tccaccatgagactgtgggctctgg

SEQ ID NO: 3616890 - DNA, 25 bp, Homo sapien
ccagggcggcccacattccagagta

SEQ ID NO: 3616891 - DNA, 25 bp, Homo sapien
gcccacattccagagtaaactgctc

SEQ ID NO: 3616892 - DNA, 25 bp, Homo sapien
ccaccatgtcccgaggctggatctg

SEQ ID NO: 3616893 - DNA, 25 bp, Homo sapien
cagccaccatgtcccgaggctggat

SEQ ID NO: 3616894 - DNA, 25 bp, Homo sapien
caccatgtcccgaggctggatctgg

SEQ ID NO: 3616895 - DNA, 25 bp, Homo sapien
accatgtcccgaggctggatctgga

SEQ ID NO: 3616896 - DNA, 25 bp, Homo sapien
acaggtatcccactgacctctcaga

SEQ ID NO: 3616897 - DNA, 25 bp, Homo sapien
tccacccaggtttgccccaccctga

SEQ ID NO: 3616898 - DNA, 25 bp, Homo sapien
ggtatcccactgacctctcagatgt

SEQ ID NO: 3616899 - DNA, 25 bp, Homo sapien
gacctctcagatgttcccttgaaca

SEQ ID NO: 3616900 - DNA, 25 bp, Homo sapien
gtgccaagccggttgctggcctcac

SEQ ID NO: 3616901 - DNA, 25 bp, Homo sapien
tgcccattcagcaaccagcggatgg

SEQ ID NO: 3616902 - DNA, 25 bp, Homo sapien
ggcctggccatcgtgggcatgtccc

SEQ ID NO: 3616903 - DNA, 25 bp, Homo sapien
gtagcagcagaagggtcccatcagg

SEQ ID NO: 3616904 - DNA, 25 bp, Homo sapien
cctcatcctcatctctggtcccccc

SEQ ID NO: 3616905 - DNA, 25 bp, Homo sapien
atcctcatcctcatctctggtcccc

SEQ ID NO: 3616906 - DNA, 25 bp, Homo sapien
tcctcatcctcatctctggtccccc

SEQ ID NO: 3616907 - DNA, 25 bp, Homo sapien
cagtcagcaggccccttctgccctg

SEQ ID NO: 3616908 - DNA, 25 bp, Homo sapien
gccttggatggaggagcatgggcca

SEQ ID NO: 3616909 - DNA, 25 bp, Homo sapien
ctgagcaggccttggatggaggagc

SEQ ID NO: 3616910 - DNA, 25 bp, Homo sapien
ttctgccctgagcaggccttggatg

SEQ ID NO: 3616911 - DNA, 25 bp, Homo sapien
agcagcagaggcagggaacccctgc

SEQ ID NO: 3616912 - DNA, 25 bp, Homo sapien
ccaggaggctgtctcctccagagcc

SEQ ID NO: 3616913 - DNA, 25 bp, Homo sapien
gcagcagaggcagggaacccctgcc

SEQ ID NO: 3616914 - DNA, 25 bp, Homo sapien
ctgccccccaggaggctgtctcctc

SEQ ID NO: 3616915 - DNA, 25 bp, Homo sapien
tgtccttgtcccgagcactttgtcc

SEQ ID NO: 3616916 - DNA, 25 bp, Homo sapien
ccgagcactttgtcctgctgctctg

SEQ ID NO: 3616917 - DNA, 25 bp, Homo sapien
cctatgtccttgtcccgagcacttt

SEQ ID NO: 3616918 - DNA, 25 bp, Homo sapien
gctactctcagccctatgtccttgt

SEQ ID NO: 3616919 - DNA, 25 bp, Homo sapien
caggttttggagagctaggtgctaa

SEQ ID NO: 3616920 - DNA, 25 bp, Homo sapien
tcccaggttttggagagctaggtgc

SEQ ID NO: 3616921 - DNA, 25 bp, Homo sapien
ccaggttttggagagctaggtgcta

SEQ ID NO: 3616922 - DNA, 25 bp, Homo sapien
gttttggagagctaggtgctaacac

SEQ ID NO: 3616923 - DNA, 25 bp, Homo sapien
cccttcgttgcttgtaagagggaga

SEQ ID NO: 3616924 - DNA, 25 bp, Homo sapien
gaagatgcaatctgagactcctgct

SEQ ID NO: 3616925 - DNA, 25 bp, Homo sapien
ttccttcatccctagttctggtgtt

SEQ ID NO: 3616926 - DNA, 25 bp, Homo sapien
tctaactcccccttcgttgcttgta

SEQ ID NO: 3616927 - DNA, 25 bp, Homo sapien
cccttgtttatgtggaataaagttg

SEQ ID NO: 3616928 - DNA, 25 bp, Homo sapien
acctgtgcatctcaaggctgaccag

SEQ ID NO: 3616929 - DNA, 25 bp, Homo sapien
gcaccagggtatggcatgttctcat

SEQ ID NO: 3616930 - DNA, 25 bp, Homo sapien
gatttggcttaagcctggcaagctg

SEQ ID NO: 3616931 - DNA, 25 bp, Homo sapien
cccctcagggattcagcaccagggt

SEQ ID NO: 3616932 - DNA, 25 bp, Homo sapien
tcattatggatgaggcacctgggaa

SEQ ID NO: 3616933 - DNA, 25 bp, Homo sapien
cgaaggcacacctgctcaaatgagc

SEQ ID NO: 3616934 - DNA, 25 bp, Homo sapien
aaacttttcccctacatgcattatc

SEQ ID NO: 3616935 - DNA, 25 bp, Homo sapien
cctcttccaccttcttgagaaactt

SEQ ID NO: 3616936 - DNA, 25 bp, Homo sapien
gggggcaaactagaaatgtcagtgc

SEQ ID NO: 3616937 - DNA, 25 bp, Homo sapien
agggggcaaactagaaatgtcagtg

SEQ ID NO: 3616938 - DNA, 25 bp, Homo sapien
gctggagtttaggagactagggatg

SEQ ID NO: 3616939 - DNA, 25 bp, Homo sapien
ggtaactggggccttggaattgctc

SEQ ID NO: 3616940 - DNA, 25 bp, Homo sapien
ccatgggttgatggcgaatcagagc

SEQ ID NO: 3616941 - DNA, 25 bp, Homo sapien
ggtgtggaggtgatgggtaactggg

SEQ ID NO: 3616942 - DNA, 25 bp, Homo sapien
caaatgctgggaagcaataagcctc

SEQ ID NO: 3616943 - DNA, 25 bp, Homo sapien
tatgaactgttcaataggcggtggc

SEQ ID NO: 3616944 - DNA, 25 bp, Homo sapien
gttagtgtgattagggagtctgccc

SEQ ID NO: 3616945 - DNA, 25 bp, Homo sapien
gattactgccactcctatgaactgt

SEQ ID NO: 3616946 - DNA, 25 bp, Homo sapien
taggaagagcacaggatagtcacgg

SEQ ID NO: 3616947 - DNA, 25 bp, Homo sapien
ggacacagccagtaaaccggaagca

SEQ ID NO: 3616948 - DNA, 25 bp, Homo sapien
ggaagcaaatgcgacccggtttcac

SEQ ID NO: 3616949 - DNA, 25 bp, Homo sapien
cctaagagggcacaacctataccaa

SEQ ID NO: 3616950 - DNA, 25 bp, Homo sapien
agagcggatgggcagccccggcgag

SEQ ID NO: 3616951 - DNA, 25 bp, Homo sapien
tgctcgcggattatgtgcacgcccg

SEQ ID NO: 3616952 - DNA, 25 bp, Homo sapien
ggccggcctcgtcttgctcgcggat

SEQ ID NO: 3616953 - DNA, 25 bp, Homo sapien
ctgggcggcgacgagtgtgtccggc

SEQ ID NO: 3616954 - DNA, 25 bp, Homo sapien
gcgggagacacggagtagccgggcg

SEQ ID NO: 3616955 - DNA, 25 bp, Homo sapien
agacacggagtagccgggcgggccg

SEQ ID NO: 3616956 - DNA, 25 bp, Homo sapien
gggccgggctccgtcgcgcttcgag

SEQ ID NO: 3616957 - DNA, 25 bp, Homo sapien
ctccgtcgcgcttcgaggctccggg

SEQ ID NO: 3616958 - DNA, 25 bp, Homo sapien
ctgctcaccacttcgagggagggtg

SEQ ID NO: 3616959 - DNA, 25 bp, Homo sapien
tgctcaccacttcgagggagggtgt

SEQ ID NO: 3616960 - DNA, 25 bp, Homo sapien
atatagagtgccatggggttcttcc

SEQ ID NO: 3616961 - DNA, 25 bp, Homo sapien
tcaggatatagagtgccatggggtt

SEQ ID NO: 3616962 - DNA, 25 bp, Homo sapien
tctgcagtcttcgtgcagttggtgg

SEQ ID NO: 3616963 - DNA, 25 bp, Homo sapien
cagtcttcgtgcagttggtggggga

SEQ ID NO: 3616964 - DNA, 25 bp, Homo sapien
agtcttcgtgcagttggtgggggaa

SEQ ID NO: 3616965 - DNA, 25 bp, Homo sapien
ctcctctgcagtcttcgtgcagttg

SEQ ID NO: 3616966 - DNA, 25 bp, Homo sapien
cactgatctgattgttgatgggatg

SEQ ID NO: 3616967 - DNA, 25 bp, Homo sapien
gcagcccactgatctgattgttgat

SEQ ID NO: 3616968 - DNA, 25 bp, Homo sapien
agcccactgatctgattgttgatgg

SEQ ID NO: 3616969 - DNA, 25 bp, Homo sapien
ccagcagcccactgatctgattgtt

SEQ ID NO: 3616970 - DNA, 25 bp, Homo sapien
ttctggtttcaggcggtcatcattc

SEQ ID NO: 3616971 - DNA, 25 bp, Homo sapien
caggcggtcatcattctgatccatg

SEQ ID NO: 3616972 - DNA, 25 bp, Homo sapien
tggtttcaggcggtcatcattctga

SEQ ID NO: 3616973 - DNA, 25 bp, Homo sapien
ttcaggcggtcatcattctgatcca

SEQ ID NO: 3616974 - DNA, 25 bp, Homo sapien
ctatgagccgaattattgaatgtga

SEQ ID NO: 3616975 - DNA, 25 bp, Homo sapien
tgaatgtgagtagaagatccagtgg

SEQ ID NO: 3616976 - DNA, 25 bp, Homo sapien
acagggagggatctgatggccataa

SEQ ID NO: 3616977 - DNA, 25 bp, Homo sapien
gagggatctgatggccataaaagag

SEQ ID NO: 3616978 - DNA, 25 bp, Homo sapien
atgcctcctgtagacaagatgatgt

SEQ ID NO: 3616979 - DNA, 25 bp, Homo sapien
cctgtagacaagatgatgtaaaggg

SEQ ID NO: 3616980 - DNA, 25 bp, Homo sapien
cctcctgtagacaagatgatgtaaa

SEQ ID NO: 3616981 - DNA, 25 bp, Homo sapien
gcctcctgtagacaagatgatgtaa

SEQ ID NO: 3616982 - DNA, 25 bp, Homo sapien
gctttgagtactaaaggaaagcctg

SEQ ID NO: 3616983 - DNA, 25 bp, Homo sapien
tttgagtactaaaggaaagcctgcg

SEQ ID NO: 3616984 - DNA, 25 bp, Homo sapien
cctcttggggctttgagtactaaag

SEQ ID NO: 3616985 - DNA, 25 bp, Homo sapien
tgagtactaaaggaaagcctgcggg

SEQ ID NO: 3616986 - DNA, 25 bp, Homo sapien
caccatgcagctgtacaggtcgtca

SEQ ID NO: 3616987 - DNA, 25 bp, Homo sapien
tatacggtgatcttgacaggcaggc

SEQ ID NO: 3616988 - DNA, 25 bp, Homo sapien
gagcagttcaaggtgaaggcctcgc

SEQ ID NO: 3616989 - DNA, 25 bp, Homo sapien
catcctccatgagcacgcgggtgat

SEQ ID NO: 3616990 - DNA, 25 bp, Homo sapien
ctctttccctgccagagcgctttac

SEQ ID NO: 3616991 - DNA, 25 bp, Homo sapien
cagtcttgcctctttccctgccaga

SEQ ID NO: 3616992 - DNA, 25 bp, Homo sapien
ttgcctctttccctgccagagcgct

SEQ ID NO: 3616993 - DNA, 25 bp, Homo sapien
gccagtcttgcctctttccctgcca

SEQ ID NO: 3616994 - DNA, 25 bp, Homo sapien
tctccccagtgaaggtgtcgtcggt

SEQ ID NO: 3616995 - DNA, 25 bp, Homo sapien
tacggtctcgatagtcaggccgcag

SEQ ID NO: 3616996 - DNA, 25 bp, Homo sapien
cattttcaaagagtcggatacggtc

SEQ ID NO: 3616997 - DNA, 25 bp, Homo sapien
ccgatgacctctgtgccaatggact

SEQ ID NO: 3616998 - DNA, 25 bp, Homo sapien
gcgatgccgggaatgtcaaacttta

SEQ ID NO: 3616999 - DNA, 25 bp, Homo sapien
aacatgggcatgtccgtgggccaaa

SEQ ID NO: 3617000 - DNA, 25 bp, Homo sapien
atcggtggccactcctcaagtagga

SEQ ID NO: 3617001 - DNA, 25 bp, Homo sapien
caacaatgcggtactgggatagatc

SEQ ID NO: 3617002 - DNA, 25 bp, Homo sapien
ggtgtggtagccagaactgcatcta

SEQ ID NO: 3617003 - DNA, 25 bp, Homo sapien
tggccgtcatagatacccttccttg

SEQ ID NO: 3617004 - DNA, 25 bp, Homo sapien
gaagcgccagttattcagggatgtg

SEQ ID NO: 3617005 - DNA, 25 bp, Homo sapien
taatccaagggcagaacacctcagt

SEQ ID NO: 3617006 - DNA, 25 bp, Homo sapien
atgaccggaaagagtttagggccat

SEQ ID NO: 3617007 - DNA, 25 bp, Homo sapien
ttgatgaccggaaagagtttagggc

SEQ ID NO: 3617008 - DNA, 25 bp, Homo sapien
tgatgaccggaaagagtttagggcc

SEQ ID NO: 3617009 - DNA, 25 bp, Homo sapien
catttgatgaccggaaagagtttag

SEQ ID NO: 3617010 - DNA, 25 bp, Homo sapien
aggtagacaaaaggagcaaggcgca

SEQ ID NO: 3617011 - DNA, 25 bp, Homo sapien
ctgtctggatcagaagaaggtagac

SEQ ID NO: 3617012 - DNA, 25 bp, Homo sapien
gaagaaggtagacaaaaggagcaag

SEQ ID NO: 3617013 - DNA, 25 bp, Homo sapien
caaaaggagcaaggcgcagggccct

SEQ ID NO: 3617014 - DNA, 25 bp, Homo sapien
cactcggagtttctctgcccgaaca

SEQ ID NO: 3617015 - DNA, 25 bp, Homo sapien
tctccaactcaggttccaacatggg

SEQ ID NO: 3617016 - DNA, 25 bp, Homo sapien
tatctgcttaggagataatctccaa

SEQ ID NO: 3617017 - DNA, 25 bp, Homo sapien
tccccagtttggaagcaggtatctg

SEQ ID NO: 3617018 - DNA, 25 bp, Homo sapien
tcagaaagtgtggttattgcggcca

SEQ ID NO: 3617019 - DNA, 25 bp, Homo sapien
cggccatttcctcatgagcctgcaa

SEQ ID NO: 3617020 - DNA, 25 bp, Homo sapien
ggttattgcggccatttcctcatga

SEQ ID NO: 3617021 - DNA, 25 bp, Homo sapien
tattgcggccatttcctcatgagcc

SEQ ID NO: 3617022 - DNA, 25 bp, Homo sapien
gaggctgctccaacaatggtgtcga

SEQ ID NO: 3617023 - DNA, 25 bp, Homo sapien
atgaggctgctccaacaatggtgtc

SEQ ID NO: 3617024 - DNA, 25 bp, Homo sapien
gctgctccaacaatggtgtcgacat

SEQ ID NO: 3617025 - DNA, 25 bp, Homo sapien
ttcctctggatctccccatggggcc

SEQ ID NO: 3617026 - DNA, 25 bp, Homo sapien
gaactgcttgactgatggcagtcat

SEQ ID NO: 3617027 - DNA, 25 bp, Homo sapien
tgacagattcatttccgagggcact

SEQ ID NO: 3617028 - DNA, 25 bp, Homo sapien
ggcagtcatcccttgctcagccaag

SEQ ID NO: 3617029 - DNA, 25 bp, Homo sapien
tcttcggagcagcatagcccagttc

SEQ ID NO: 3617030 - DNA, 25 bp, Homo sapien
catccaccagcagaaactcagaagt

SEQ ID NO: 3617031 - DNA, 25 bp, Homo sapien
ctgttattaattgagccatatccat

SEQ ID NO: 3617032 - DNA, 25 bp, Homo sapien
catctcctccactaaattgtgaatc

SEQ ID NO: 3617033 - DNA, 25 bp, Homo sapien
tattaattgagccatatccatctcc

SEQ ID NO: 3617034 - DNA, 25 bp, Homo sapien
tctcctccactaaattgtgaatcat

SEQ ID NO: 3617035 - DNA, 25 bp, Homo sapien
caaccgtgtcaggggaaggattcgc

SEQ ID NO: 3617036 - DNA, 25 bp, Homo sapien
ggattcgctgccctctgccgtcgtt

SEQ ID NO: 3617037 - DNA, 25 bp, Homo sapien
gggaaggattcgctgccctctgccg

SEQ ID NO: 3617038 - DNA, 25 bp, Homo sapien
tgtcaggggaaggattcgctgccct

SEQ ID NO: 3617039 - DNA, 25 bp, Homo sapien
gtaaggagaaaaagacttctgcatc

SEQ ID NO: 3617040 - DNA, 25 bp, Homo sapien
aggagaaaaagacttctgcatccat

SEQ ID NO: 3617041 - DNA, 25 bp, Homo sapien
aagagtaaggagaaaaagacttctg

SEQ ID NO: 3617042 - DNA, 25 bp, Homo sapien
caagagtaaggagaaaaagacttct

SEQ ID NO: 3617043 - DNA, 25 bp, Homo sapien
cagacatgtccagggatcccccaga

SEQ ID NO: 3617044 - DNA, 25 bp, Homo sapien
tccctcatgctcatgaaacaatcag

SEQ ID NO: 3617045 - DNA, 25 bp, Homo sapien
ctggagcagggcctcaacactttgg

SEQ ID NO: 3617046 - DNA, 25 bp, Homo sapien
ttatatccaactccgatgaggagtg

SEQ ID NO: 3617047 - DNA, 25 bp, Homo sapien
gaaagagttccaacattggtgggag

SEQ ID NO: 3617048 - DNA, 25 bp, Homo sapien
cctgaacagggatacgtggctggaa

SEQ ID NO: 3617049 - DNA, 25 bp, Homo sapien
agcaagaaagagttccaacattggt

SEQ ID NO: 3617050 - DNA, 25 bp, Homo sapien
ttggtgggagtgttcccactgccac

SEQ ID NO: 3617051 - DNA, 25 bp, Homo sapien
cctgggattaacagaggcttttaca

SEQ ID NO: 3617052 - DNA, 25 bp, Homo sapien
ttctctgaccttgcgcgtagggcct

SEQ ID NO: 3617053 - DNA, 25 bp, Homo sapien
ttctagggctggtacgagccaagcc

SEQ ID NO: 3617054 - DNA, 25 bp, Homo sapien
tgtcgttggcgtgttaccgtcttca

SEQ ID NO: 3617055 - DNA, 25 bp, Homo sapien
ttccctttgcagccttctgtatttc

SEQ ID NO: 3617056 - DNA, 25 bp, Homo sapien
ccctttgcagccttctgtatttcac

SEQ ID NO: 3617057 - DNA, 25 bp, Homo sapien
tccctttgcagccttctgtatttca

SEQ ID NO: 3617058 - DNA, 25 bp, Homo sapien
ccttgggttcatgtacaaggatctc

SEQ ID NO: 3617059 - DNA, 25 bp, Homo sapien
cttgggttcatgtacaaggatctca

SEQ ID NO: 3617060 - DNA, 25 bp, Homo sapien
ttgggttcatgtacaaggatctcac

SEQ ID NO: 3617061 - DNA, 25 bp, Homo sapien
gagcaggagtgactgccacattgtc

SEQ ID NO: 3617062 - DNA, 25 bp, Homo sapien
gcaggagtgactgccacattgtcat

SEQ ID NO: 3617063 - DNA, 25 bp, Homo sapien
gagagcaggagtgactgccacattg

SEQ ID NO: 3617064 - DNA, 25 bp, Homo sapien
aaggagagcaggagtgactgccaca

SEQ ID NO: 3617065 - DNA, 25 bp, Homo sapien
tatgaggccccaattggaacagcag

SEQ ID NO: 3617066 - DNA, 25 bp, Homo sapien
gctccccatgggcaagacaatggaa

SEQ ID NO: 3617067 - DNA, 25 bp, Homo sapien
tccctactcagcaggagcttatgaa

SEQ ID NO: 3617068 - DNA, 25 bp, Homo sapien
agggctgcctaaggacacagagatt

SEQ ID NO: 3617069 - DNA, 25 bp, Homo sapien
tcttccttagagatgctccaatagc

SEQ ID NO: 3617070 - DNA, 25 bp, Homo sapien
tcacatttggtctcaattaagctca

SEQ ID NO: 3617071 - DNA, 25 bp, Homo sapien
gccactagatggtgacccaatccca

SEQ ID NO: 3617072 - DNA, 25 bp, Homo sapien
gctgtgttgcttatatgagccacta

SEQ ID NO: 3617073 - DNA, 25 bp, Homo sapien
tatagtctactagcagctcagctgt

SEQ ID NO: 3617074 - DNA, 25 bp, Homo sapien
ggctaatgggtgaagctatctctga

SEQ ID NO: 3617075 - DNA, 25 bp, Homo sapien
gcttacaagagaggcggcagtgttc

SEQ ID NO: 3617076 - DNA, 25 bp, Homo sapien
cattccagctggatggtgcttacaa

SEQ ID NO: 3617077 - DNA, 25 bp, Homo sapien
tctaaggccactgatcacagaatgg

SEQ ID NO: 3617078 - DNA, 25 bp, Homo sapien
gactagtgctttacaccctacgggc

SEQ ID NO: 3617079 - DNA, 25 bp, Homo sapien
caagaaggccatgagcatacagggt

SEQ ID NO: 3617080 - DNA, 25 bp, Homo sapien
cagacattgactatagggttatccc

SEQ ID NO: 3617081 - DNA, 25 bp, Homo sapien
agtgtggccttaacctacctgaagc

SEQ ID NO: 3617082 - DNA, 25 bp, Homo sapien
tgccctaggccagattaggaaacta

SEQ ID NO: 3617083 - DNA, 25 bp, Homo sapien
gggataactatacctggccctcacc

SEQ ID NO: 3617084 - DNA, 25 bp, Homo sapien
tcagaagaaggtaacaattggcagc

SEQ ID NO: 3617085 - DNA, 25 bp, Homo sapien
gaacttgattaaaaagccgtggcca

SEQ ID NO: 3617086 - DNA, 25 bp, Homo sapien
accagggcccctccatttaatgcaa

SEQ ID NO: 3617087 - DNA, 25 bp, Homo sapien
ggtaattaaataaggcacacacagc

SEQ ID NO: 3617088 - DNA, 25 bp, Homo sapien
aagagttcgaagtgaaagtcagccc

SEQ ID NO: 3617089 - DNA, 25 bp, Homo sapien
gaagtgacactcattgccttcacag

SEQ ID NO: 3617090 - DNA, 25 bp, Homo sapien
tcttagtgatggacagatactcctc

SEQ ID NO: 3617091 - DNA, 25 bp, Homo sapien
ggtcaatgaccaacatctgagtaag

SEQ ID NO: 3617092 - DNA, 25 bp, Homo sapien
tggtaagaatctagccccacaggga

SEQ ID NO: 3617093 - DNA, 25 bp, Homo sapien
cggccaatgaaaaagtcatccacaa

SEQ ID NO: 3617094 - DNA, 25 bp, Homo sapien
cagtggtttggcatagatcggctcc

SEQ ID NO: 3617095 - DNA, 25 bp, Homo sapien
ccagcaggacatagcggccaatgaa

SEQ ID NO: 3617096 - DNA, 25 bp, Homo sapien
aagatggcactaaggaaagccagca

SEQ ID NO: 3617097 - DNA, 25 bp, Homo sapien
taacttgccccaaagcagacagtgg

SEQ ID NO: 3617098 - DNA, 25 bp, Homo sapien
tcaatccattgccatttcaggaggg

SEQ ID NO: 3617099 - DNA, 25 bp, Homo sapien
tataattggtgttggctctacccac

SEQ ID NO: 3617100 - DNA, 25 bp, Homo sapien
ttaaagctatcagcggaagagtccc

SEQ ID NO: 3617101 - DNA, 25 bp, Homo sapien
tcaccagctcgcgggaaaagcaaca

SEQ ID NO: 3617102 - DNA, 25 bp, Homo sapien
ggaattcaccagctcgcgggaaaag

SEQ ID NO: 3617103 - DNA, 25 bp, Homo sapien
ttcaccagctcgcgggaaaagcaac

SEQ ID NO: 3617104 - DNA, 25 bp, Homo sapien
aattcaccagctcgcgggaaaagca

SEQ ID NO: 3617105 - DNA, 25 bp, Homo sapien
gatcacagcaccgaagaataaaaaa

SEQ ID NO: 3617106 - DNA, 25 bp, Homo sapien
ctgatgtgatgatcacagcaccgaa

SEQ ID NO: 3617107 - DNA, 25 bp, Homo sapien
tgatgatcacagcaccgaagaataa

SEQ ID NO: 3617108 - DNA, 25 bp, Homo sapien
atgtgatgatcacagcaccgaagaa

SEQ ID NO: 3617109 - DNA, 25 bp, Homo sapien
cagttaggtctggacagtctcttcc

SEQ ID NO: 3617110 - DNA, 25 bp, Homo sapien
cttctttgatcagttaggtctggac

SEQ ID NO: 3617111 - DNA, 25 bp, Homo sapien
cttaacaatgtccagaggcctgctg

SEQ ID NO: 3617112 - DNA, 25 bp, Homo sapien
gccaatattctatgtttcagtccct

SEQ ID NO: 3617113 - DNA, 25 bp, Homo sapien
cttcttcctagacaggtaccagctg

SEQ ID NO: 3617114 - DNA, 25 bp, Homo sapien
ttcatcccaaagtccttcttcctag

SEQ ID NO: 3617115 - DNA, 25 bp, Homo sapien
ttcttcctagacaggtaccagctgg

SEQ ID NO: 3617116 - DNA, 25 bp, Homo sapien
tatttttacttctgcccaaagtcat

SEQ ID NO: 3617117 - DNA, 25 bp, Homo sapien
ttatttttacttctgcccaaagtca

SEQ ID NO: 3617118 - DNA, 25 bp, Homo sapien
gcccaaagtcataatcaagaaaaac

SEQ ID NO: 3617119 - DNA, 25 bp, Homo sapien
tttttacttctgcccaaagtcataa

SEQ ID NO: 3617120 - DNA, 25 bp, Homo sapien
tttcagagtcggtttatggcctaac

SEQ ID NO: 3617121 - DNA, 25 bp, Homo sapien
agagtgcaactctagtgttttcaga

SEQ ID NO: 3617122 - DNA, 25 bp, Homo sapien
ctagtgttttcagagtcggtttatg

SEQ ID NO: 3617123 - DNA, 25 bp, Homo sapien
actgtcttgccagagtgcaactcta

SEQ ID NO: 3617124 - DNA, 25 bp, Homo sapien
ctagagcctcgggtactggaccaag

SEQ ID NO: 3617125 - DNA, 25 bp, Homo sapien
tccagggctagagcctcgggtactg

SEQ ID NO: 3617126 - DNA, 25 bp, Homo sapien
aactcatcaaatgttgctttcgttt

SEQ ID NO: 3617127 - DNA, 25 bp, Homo sapien
cctgatatagaaagcaggcccaact

SEQ ID NO: 3617128 - DNA, 25 bp, Homo sapien
tagtgagcatcagcgattttgcctc

SEQ ID NO: 3617129 - DNA, 25 bp, Homo sapien
taattgctttacctaggactcccag

SEQ ID NO: 3617130 - DNA, 25 bp, Homo sapien
gactcccagttggacagaatgcctt

SEQ ID NO: 3617131 - DNA, 25 bp, Homo sapien
gtttcttgccacagttagaactcaa

SEQ ID NO: 3617132 - DNA, 25 bp, Homo sapien
cgcaccgactccgagcacagtgcca

SEQ ID NO: 3617133 - DNA, 25 bp, Homo sapien
gagcagggctaagatgaacacgccc

SEQ ID NO: 3617134 - DNA, 25 bp, Homo sapien
ccagagcagggctaagatgaacacg

SEQ ID NO: 3617135 - DNA, 25 bp, Homo sapien
gggctaagatgaacacgcccgcacc

SEQ ID NO: 3617136 - DNA, 25 bp, Homo sapien
ctgcgcgccgcacgatcgagtgtcc

SEQ ID NO: 3617137 - DNA, 25 bp, Homo sapien
cgcgccgcacgatcgagtgtcctct

SEQ ID NO: 3617138 - DNA, 25 bp, Homo sapien
tgcgcgccgcacgatcgagtgtcct

SEQ ID NO: 3617139 - DNA, 25 bp, Homo sapien
gccctgcgcgccgcacgatcgagtg

SEQ ID NO: 3617140 - DNA, 25 bp, Homo sapien
ctcccgtgaaagcattcagacaaat

SEQ ID NO: 3617141 - DNA, 25 bp, Homo sapien
cccgtgaaagcattcagacaaatac

SEQ ID NO: 3617142 - DNA, 25 bp, Homo sapien
aagcattcagacaaatacagaaagc

SEQ ID NO: 3617143 - DNA, 25 bp, Homo sapien
tgaaagcattcagacaaatacagaa

SEQ ID NO: 3617144 - DNA, 25 bp, Homo sapien
tgagagggtgttttccgctctgcgc

SEQ ID NO: 3617145 - DNA, 25 bp, Homo sapien
tcaaatttggtacctgagttctact

SEQ ID NO: 3617146 - DNA, 25 bp, Homo sapien
cagtcccagagtcccttaatggaaa

SEQ ID NO: 3617147 - DNA, 25 bp, Homo sapien
taggaggattactcagtacaggtca

SEQ ID NO: 3617148 - DNA, 25 bp, Homo sapien
tcaggttaaatccatggtgtgagct

SEQ ID NO: 3617149 - DNA, 25 bp, Homo sapien
gtagaagacaccagggcatgggaac

SEQ ID NO: 3617150 - DNA, 25 bp, Homo sapien
ctaagaactggtagaagacaccagg

SEQ ID NO: 3617151 - DNA, 25 bp, Homo sapien
aagctctcaggttaaatccatggtg

SEQ ID NO: 3617152 - DNA, 25 bp, Homo sapien
aaagttcccactctgttgtcgagtt

SEQ ID NO: 3617153 - DNA, 25 bp, Homo sapien
caatggatcacaagacagaaagttc

SEQ ID NO: 3617154 - DNA, 25 bp, Homo sapien
tgtcgagttcttattcaagaggatg

SEQ ID NO: 3617155 - DNA, 25 bp, Homo sapien
ttcaagaggatgaaaactcccagtc

SEQ ID NO: 3617156 - DNA, 25 bp, Homo sapien
taacctctggtcaatatgctggatg

SEQ ID NO: 3617157 - DNA, 25 bp, Homo sapien
tctcttcagggcagataaggtctca

SEQ ID NO: 3617158 - DNA, 25 bp, Homo sapien
gaatagtaaactccacgaaggcaga

SEQ ID NO: 3617159 - DNA, 25 bp, Homo sapien
gaatcccggagcgaagcttctgaga

SEQ ID NO: 3617160 - DNA, 25 bp, Homo sapien
caggatgcatatgaattgggtgacc

SEQ ID NO: 3617161 - DNA, 25 bp, Homo sapien
aaaagactatttgcctctgcagagg

SEQ ID NO: 3617162 - DNA, 25 bp, Homo sapien
gatggcttggccaacccgatttcaa

SEQ ID NO: 3617163 - DNA, 25 bp, Homo sapien
tggctggcgccattagaaatgttgc

SEQ ID NO: 3617164 - DNA, 25 bp, Homo sapien
aaatggactgatccctgcacaggta

SEQ ID NO: 3617165 - DNA, 25 bp, Homo sapien
ataggaataaatggactgatccctg

SEQ ID NO: 3617166 - DNA, 25 bp, Homo sapien
atggactgatccctgcacaggtaac

SEQ ID NO: 3617167 - DNA, 25 bp, Homo sapien
gaataaatggactgatccctgcaca

SEQ ID NO: 3617168 - DNA, 25 bp, Homo sapien
gctggagggagatatctcacccatc

SEQ ID NO: 3617169 - DNA, 25 bp, Homo sapien
tcctcagagggtaatgtggcctaag

SEQ ID NO: 3617170 - DNA, 25 bp, Homo sapien
aagacaaatgtggattcctcagagg

SEQ ID NO: 3617171 - DNA, 25 bp, Homo sapien
cccgattttcacactgactcaagcc

SEQ ID NO: 3617172 - DNA, 25 bp, Homo sapien
cacctcagcccgaccctccactttt

SEQ ID NO: 3617173 - DNA, 25 bp, Homo sapien
aaccacctcagcccgaccctccact

SEQ ID NO: 3617174 - DNA, 25 bp, Homo sapien
cctcagcccgaccctccacttttct

SEQ ID NO: 3617175 - DNA, 25 bp, Homo sapien
tcagcccgaccctccacttttctcc

SEQ ID NO: 3617176 - DNA, 25 bp, Homo sapien
ggatccactctcccccaggctctac

SEQ ID NO: 3617177 - DNA, 25 bp, Homo sapien
ccactctcccccaggctctactcac

SEQ ID NO: 3617178 - DNA, 25 bp, Homo sapien
tccactctcccccaggctctactca

SEQ ID NO: 3617179 - DNA, 25 bp, Homo sapien
ctggatccactctcccccaggctct

SEQ ID NO: 3617180 - DNA, 25 bp, Homo sapien
gggcgaatcacaagtgggctttcat

SEQ ID NO: 3617181 - DNA, 25 bp, Homo sapien
ggctctggtttacttagggcgaatc

SEQ ID NO: 3617182 - DNA, 25 bp, Homo sapien
agattccggcgcgttccagcccacg

SEQ ID NO: 3617183 - DNA, 25 bp, Homo sapien
gatttaagattcactaatcagcgtt

SEQ ID NO: 3617184 - DNA, 25 bp, Homo sapien
aagggctgtttcagacgaggagctt

SEQ ID NO: 3617185 - DNA, 25 bp, Homo sapien
tcaaccttttggctcaacatctgag

SEQ ID NO: 3617186 - DNA, 25 bp, Homo sapien
gggactcagagatggataagacaag

SEQ ID NO: 3617187 - DNA, 25 bp, Homo sapien
cgaggagcttggtttgccttaacat

SEQ ID NO: 3617188 - DNA, 25 bp, Homo sapien
tcacttgtctttaaatcagcagcag

SEQ ID NO: 3617189 - DNA, 25 bp, Homo sapien
aatcagcagcagaatattcttttac

SEQ ID NO: 3617190 - DNA, 25 bp, Homo sapien
gcatcagtgcttgtttctcccaatt

SEQ ID NO: 3617191 - DNA, 25 bp, Homo sapien
aaaatatttagcgattcacttgtct

SEQ ID NO: 3617192 - DNA, 25 bp, Homo sapien
cagaagaatatggaacccatgacac

SEQ ID NO: 3617193 - DNA, 25 bp, Homo sapien
tgtgtgagttcaccgagactctcag

SEQ ID NO: 3617194 - DNA, 25 bp, Homo sapien
gaaagtgaacatgtctccatcacag

SEQ ID NO: 3617195 - DNA, 25 bp, Homo sapien
tgagtcagggcccaagaaagtgaac

SEQ ID NO: 3617196 - DNA, 25 bp, Homo sapien
aagaccaggatctctgtctgctgaa

SEQ ID NO: 3617197 - DNA, 25 bp, Homo sapien
cagtcctgctcctatggcgctgcag

SEQ ID NO: 3617198 - DNA, 25 bp, Homo sapien
tatggcgctgcagccaatagcaaga

SEQ ID NO: 3617199 - DNA, 25 bp, Homo sapien
aagtgtcggaaagtgccagtcctgc

SEQ ID NO: 3617200 - DNA, 25 bp, Homo sapien
ctgaaacatctgattgaattgtgcc

SEQ ID NO: 3617201 - DNA, 25 bp, Homo sapien
aaacatctgattgaattgtgcctgc

SEQ ID NO: 3617202 - DNA, 25 bp, Homo sapien
ccctgaaacatctgattgaattgtg

SEQ ID NO: 3617203 - DNA, 25 bp, Homo sapien
gaaacatctgattgaattgtgcctg

SEQ ID NO: 3617204 - DNA, 25 bp, Homo sapien
gggagtcgctctgatcttgccggat

SEQ ID NO: 3617205 - DNA, 25 bp, Homo sapien
ggttcactcctaaaggcactggcag

SEQ ID NO: 3617206 - DNA, 25 bp, Homo sapien
tagcctccaagactcgcgtggatgt

SEQ ID NO: 3617207 - DNA, 25 bp, Homo sapien
agatgaagttttggccaagctcccc

SEQ ID NO: 3617208 - DNA, 25 bp, Homo sapien
ctttacccagacagctgtcccttgg

SEQ ID NO: 3617209 - DNA, 25 bp, Homo sapien
gctgtcccttggcccgcctgctcac

SEQ ID NO: 3617210 - DNA, 25 bp, Homo sapien
tttacccagacagctgtcccttggc

SEQ ID NO: 3617211 - DNA, 25 bp, Homo sapien
acagctgtcccttggcccgcctgct

SEQ ID NO: 3617212 - DNA, 25 bp, Homo sapien
tcagagggtcccgtgaagaccaagg

SEQ ID NO: 3617213 - DNA, 25 bp, Homo sapien
gagacccagcatgggtcccagtgca

SEQ ID NO: 3617214 - DNA, 25 bp, Homo sapien
gtttccattcccttgaacacacagg

SEQ ID NO: 3617215 - DNA, 25 bp, Homo sapien
caaggcatcggctggtttaccctca

SEQ ID NO: 3617216 - DNA, 25 bp, Homo sapien
tttcctcctaatagacaaactgctg

SEQ ID NO: 3617217 - DNA, 25 bp, Homo sapien
cacagcttctttgatccctgccttt

SEQ ID NO: 3617218 - DNA, 25 bp, Homo sapien
ctaatagacaaactgctgccaaagc

SEQ ID NO: 3617219 - DNA, 25 bp, Homo sapien
agcttctttgatccctgcctttcct

SEQ ID NO: 3617220 - DNA, 25 bp, Homo sapien
tagaggaaattccaccagccatcag

SEQ ID NO: 3617221 - DNA, 25 bp, Homo sapien
accagccatcagatcatgtctgcaa

SEQ ID NO: 3617222 - DNA, 25 bp, Homo sapien
tccccaaatagaggaaattccacca

SEQ ID NO: 3617223 - DNA, 25 bp, Homo sapien
tcatgtctgcaaagttcttggaaac

SEQ ID NO: 3617224 - DNA, 25 bp, Homo sapien
gaaacgcggataaagacgcatcgtt

SEQ ID NO: 3617225 - DNA, 25 bp, Homo sapien
tatttcgatcagagctttgaccaca

SEQ ID NO: 3617226 - DNA, 25 bp, Homo sapien
gggtatctgcagaaacgcggataaa

SEQ ID NO: 3617227 - DNA, 25 bp, Homo sapien
gacgcatcgtttatttcgatcagag

SEQ ID NO: 3617228 - DNA, 25 bp, Homo sapien
gaggctgagctggtaattcacaggc

SEQ ID NO: 3617229 - DNA, 25 bp, Homo sapien
tggacccttgcaccttttgtatgag

SEQ ID NO: 3617230 - DNA, 25 bp, Homo sapien
aaaacaatggtggaactctctcgtc

SEQ ID NO: 3617231 - DNA, 25 bp, Homo sapien
tctgggatgatagccacaatgccgg

SEQ ID NO: 3617232 - DNA, 25 bp, Homo sapien
acaggaggcgcttccagtttgcccc

SEQ ID NO: 3617233 - DNA, 25 bp, Homo sapien
aggaggcgcttccagtttgccccag

SEQ ID NO: 3617234 - DNA, 25 bp, Homo sapien
caaacaggaggcgcttccagtttgc

SEQ ID NO: 3617235 - DNA, 25 bp, Homo sapien
aacaggaggcgcttccagtttgccc

SEQ ID NO: 3617236 - DNA, 25 bp, Homo sapien
cacaggagtccaagcaataagtaag

SEQ ID NO: 3617237 - DNA, 25 bp, Homo sapien
gccatgcgtgtgtttgcagctgcac

SEQ ID NO: 3617238 - DNA, 25 bp, Homo sapien
caataagtaagacctttctgagagt

SEQ ID NO: 3617239 - DNA, 25 bp, Homo sapien
tccgtatgtgatgagtgcatgccat

SEQ ID NO: 3617240 - DNA, 25 bp, Homo sapien
cttgagtgggtgacccaagggaagc

SEQ ID NO: 3617241 - DNA, 25 bp, Homo sapien
tgagtgggtgacccaagggaagcca

SEQ ID NO: 3617242 - DNA, 25 bp, Homo sapien
ttgagtgggtgacccaagggaagcc

SEQ ID NO: 3617243 - DNA, 25 bp, Homo sapien
aaggctgcgatgcattgtctgccac

SEQ ID NO: 3617244 - DNA, 25 bp, Homo sapien
ggaaggctgcgatgcattgtctgcc

SEQ ID NO: 3617245 - DNA, 25 bp, Homo sapien
gctgcgatgcattgtctgccactct

SEQ ID NO: 3617246 - DNA, 25 bp, Homo sapien
tgcgatgcattgtctgccactctgg

SEQ ID NO: 3617247 - DNA, 25 bp, Homo sapien
gaggatgatggcagcgggagtgaca

SEQ ID NO: 3617248 - DNA, 25 bp, Homo sapien
aatgctgatagggttcctccctggg

SEQ ID NO: 3617249 - DNA, 25 bp, Homo sapien
agtgacagttctgatggcgaggagg

SEQ ID NO: 3617250 - DNA, 25 bp, Homo sapien
tggtgatgcgagtgatgagaatgga

SEQ ID NO: 3617251 - DNA, 25 bp, Homo sapien
taggctgtgttgtcacgccggtgtc

SEQ ID NO: 3617252 - DNA, 25 bp, Homo sapien
tgtcagtctgatgaagattggcatc

SEQ ID NO: 3617253 - DNA, 25 bp, Homo sapien
aagattggcatcaggtaagctgtca

SEQ ID NO: 3617254 - DNA, 25 bp, Homo sapien
cagtgctgggaagtataggctgtgt

SEQ ID NO: 3617255 - DNA, 25 bp, Homo sapien
agaagctggggaagcgccgggagag

SEQ ID NO: 3617256 - DNA, 25 bp, Homo sapien
tcattgcgacagggcaaggaggaga

SEQ ID NO: 3617257 - DNA, 25 bp, Homo sapien
ttgcgacagggcaaggaggagagag

SEQ ID NO: 3617258 - DNA, 25 bp, Homo sapien
cgggcacggaggctgcgagagcccc

SEQ ID NO: 3617259 - DNA, 25 bp, Homo sapien
aactgaaagcgatcgagagcggaga

SEQ ID NO: 3617260 - DNA, 25 bp, Homo sapien
gatcccgaatctgccgctcaaagtt

SEQ ID NO: 3617261 - DNA, 25 bp, Homo sapien
cgagaatgtgtagggtcaccggctt

SEQ ID NO: 3617262 - DNA, 25 bp, Homo sapien
caggaagaaacgagcgaaatgggcc

SEQ ID NO: 3617263 - DNA, 25 bp, Homo sapien
tcataatctcccactcgggctgcat

SEQ ID NO: 3617264 - DNA, 25 bp, Homo sapien
ggtctcataatctcccactcgggct

SEQ ID NO: 3617265 - DNA, 25 bp, Homo sapien
cgtttctggtctcataatctcccac

SEQ ID NO: 3617266 - DNA, 25 bp, Homo sapien
tctggtctcataatctcccactcgg

SEQ ID NO: 3617267 - DNA, 25 bp, Homo sapien
cagggaggtaggttattctctgggc

SEQ ID NO: 3617268 - DNA, 25 bp, Homo sapien
gggaggtaggttattctctgggcat

SEQ ID NO: 3617269 - DNA, 25 bp, Homo sapien
accagggaggtaggttattctctgg

SEQ ID NO: 3617270 - DNA, 25 bp, Homo sapien
cgaccagggaggtaggttattctct

SEQ ID NO: 3617271 - DNA, 25 bp, Homo sapien
aagagtgtgtgtggggggtgggagc

SEQ ID NO: 3617272 - DNA, 25 bp, Homo sapien
agaaagagtgtgtgtggggggtggg

SEQ ID NO: 3617273 - DNA, 25 bp, Homo sapien
agagaaagagtgtgtgtggggggtg

SEQ ID NO: 3617274 - DNA, 25 bp, Homo sapien
agtgtgtgtggggggtgggagcggg

SEQ ID NO: 3617275 - DNA, 25 bp, Homo sapien
ttggaattcgtgagagctctctccc

SEQ ID NO: 3617276 - DNA, 25 bp, Homo sapien
acagcccttacaggacacggaagac

SEQ ID NO: 3617277 - DNA, 25 bp, Homo sapien
tccaaggctgttgttttgtaggctt

SEQ ID NO: 3617278 - DNA, 25 bp, Homo sapien
cgtgagagctctctcccgctgagag

SEQ ID NO: 3617279 - DNA, 25 bp, Homo sapien
gagatccgtgacttattgaagactg

SEQ ID NO: 3617280 - DNA, 25 bp, Homo sapien
taaaacacttcacgtgagatccgtg

SEQ ID NO: 3617281 - DNA, 25 bp, Homo sapien
ccgtgacttattgaagactgaatta

SEQ ID NO: 3617282 - DNA, 25 bp, Homo sapien
cacgtgagatccgtgacttattgaa

SEQ ID NO: 3617283 - DNA, 25 bp, Homo sapien
ggaggagctccacgggctgggttct

SEQ ID NO: 3617284 - DNA, 25 bp, Homo sapien
acgggctgggttctatccaggcagc

SEQ ID NO: 3617285 - DNA, 25 bp, Homo sapien
gattgttgcgatggggatctgctaa

SEQ ID NO: 3617286 - DNA, 25 bp, Homo sapien
gcgatggggatctgctaatttaatt

SEQ ID NO: 3617287 - DNA, 25 bp, Homo sapien
caaccagcgttgcacaaatagccag

SEQ ID NO: 3617288 - DNA, 25 bp, Homo sapien
actggcgtcttcaaccagcgttgca

SEQ ID NO: 3617289 - DNA, 25 bp, Homo sapien
acaaatagccagtcaatgctgtggc

SEQ ID NO: 3617290 - DNA, 25 bp, Homo sapien
ttccaggtcactggcgtcttcaacc

SEQ ID NO: 3617291 - DNA, 25 bp, Homo sapien
ttcatagtagggcagcggtcccctg

SEQ ID NO: 3617292 - DNA, 25 bp, Homo sapien
tccaaggaacctgacttagtctccg

SEQ ID NO: 3617293 - DNA, 25 bp, Homo sapien
aagccaaggagctcgaaaggattcc

SEQ ID NO: 3617294 - DNA, 25 bp, Homo sapien
cactggcatagcaccccttgagaag

SEQ ID NO: 3617295 - DNA, 25 bp, Homo sapien
agaggagcttgcgagagaacccctg

SEQ ID NO: 3617296 - DNA, 25 bp, Homo sapien
gagcttgcgagagaacccctggagt

SEQ ID NO: 3617297 - DNA, 25 bp, Homo sapien
cttgcgagagaacccctggagtctg

SEQ ID NO: 3617298 - DNA, 25 bp, Homo sapien
ctcagaggagcttgcgagagaaccc

SEQ ID NO: 3617299 - DNA, 25 bp, Homo sapien
gggtttgctctgtggtctccagctt

SEQ ID NO: 3617300 - DNA, 25 bp, Homo sapien
tccttgggccaccttgcgggatgtt

SEQ ID NO: 3617301 - DNA, 25 bp, Homo sapien
ctctcccacgaggtaaaatgaatgt

SEQ ID NO: 3617302 - DNA, 25 bp, Homo sapien
tgtcaaggtcaatccacaggaaatg

SEQ ID NO: 3617303 - DNA, 25 bp, Homo sapien
ctgaacaacgtcgtttaccagctgc

SEQ ID NO: 3617304 - DNA, 25 bp, Homo sapien
ctctgtctcccatagaaatagttcc

SEQ ID NO: 3617305 - DNA, 25 bp, Homo sapien
aacgtcgtttaccagctgcccagtg

SEQ ID NO: 3617306 - DNA, 25 bp, Homo sapien
cctctgtctcccatagaaatagttc

SEQ ID NO: 3617307 - DNA, 25 bp, Homo sapien
cacgagtgtgccatggtaaaaaggt

SEQ ID NO: 3617308 - DNA, 25 bp, Homo sapien
tctgagagacaagtagagttgattc

SEQ ID NO: 3617309 - DNA, 25 bp, Homo sapien
gagttgattctatcagaaggttcca

SEQ ID NO: 3617310 - DNA, 25 bp, Homo sapien
gtgagccactgcaaactatagcatc

SEQ ID NO: 3617311 - DNA, 25 bp, Homo sapien
cccgtgctgttaactcggtggtaat

SEQ ID NO: 3617312 - DNA, 25 bp, Homo sapien
gcagccacaggtacttggataattc

SEQ ID NO: 3617313 - DNA, 25 bp, Homo sapien
tctcagggagattagctttatcaag

SEQ ID NO: 3617314 - DNA, 25 bp, Homo sapien
gccaatggttagtttctgctcaaat

SEQ ID NO: 3617315 - DNA, 25 bp, Homo sapien
tctggccgtcaccacagatgcaaat

SEQ ID NO: 3617316 - DNA, 25 bp, Homo sapien
catttgctctcgagggtccactttc

SEQ ID NO: 3617317 - DNA, 25 bp, Homo sapien
gatgcaaatccgtgcctgcatcctt

SEQ ID NO: 3617318 - DNA, 25 bp, Homo sapien
tgggctctcactctggccgtcacca

SEQ ID NO: 3617319 - DNA, 25 bp, Homo sapien
cagagcttgtgtattcccgtggcac

SEQ ID NO: 3617320 - DNA, 25 bp, Homo sapien
gggacaccgtcttctgttgagccca

SEQ ID NO: 3617321 - DNA, 25 bp, Homo sapien
tatagcttaggatagggcctgaaac

SEQ ID NO: 3617322 - DNA, 25 bp, Homo sapien
tctagggctccctgaggcgtatagc

SEQ ID NO: 3617323 - DNA, 25 bp, Homo sapien
gcttcatgctgtgtgttgctaacca

SEQ ID NO: 3617324 - DNA, 25 bp, Homo sapien
gggtcatctcggtatctgctccact

SEQ ID NO: 3617325 - DNA, 25 bp, Homo sapien
tcctggtgatctcagggtgggtcat

SEQ ID NO: 3617326 - DNA, 25 bp, Homo sapien
tcctggctacggctgccggtgcaga

SEQ ID NO: 3617327 - DNA, 25 bp, Homo sapien
gactcctggaatggcgtcctggtga

SEQ ID NO: 3617328 - DNA, 25 bp, Homo sapien
gaagcttgaaaagggctgatggtcc

SEQ ID NO: 3617329 - DNA, 25 bp, Homo sapien
ggtccctcgtctgtgtttcccagca

SEQ ID NO: 3617330 - DNA, 25 bp, Homo sapien
ctttggtggatagaagcttgaaaag

SEQ ID NO: 3617331 - DNA, 25 bp, Homo sapien
gctgatggtccctcgtctgtgtttc

SEQ ID NO: 3617332 - DNA, 25 bp, Homo sapien
ctgagggtaagaaggacggtgcatg

SEQ ID NO: 3617333 - DNA, 25 bp, Homo sapien
ccttcgatatcttcattcccctcca

SEQ ID NO: 3617334 - DNA, 25 bp, Homo sapien
gtgcatggggacaatttctcctttt

SEQ ID NO: 3617335 - DNA, 25 bp, Homo sapien
aaggacggtgcatggggacaatttc

SEQ ID NO: 3617336 - DNA, 25 bp, Homo sapien
atacagcccccttcatgaagccaga

SEQ ID NO: 3617337 - DNA, 25 bp, Homo sapien
ttcatgaagccagacagaattaagc

SEQ ID NO: 3617338 - DNA, 25 bp, Homo sapien
ccagacagaattaagccttttgttt

SEQ ID NO: 3617339 - DNA, 25 bp, Homo sapien
tctggctgtgacatacagccccctt

SEQ ID NO: 3617340 - DNA, 25 bp, Homo sapien
ttcggagtaggcaagggtttctcaa

SEQ ID NO: 3617341 - DNA, 25 bp, Homo sapien
tcggagtaggcaagggtttctcaat

SEQ ID NO: 3617342 - DNA, 25 bp, Homo sapien
cggagtaggcaagggtttctcaatc

SEQ ID NO: 3617343 - DNA, 25 bp, Homo sapien
ggagtaggcaagggtttctcaatct

SEQ ID NO: 3617344 - DNA, 25 bp, Homo sapien
gggaggctctcggattgtccaaata

SEQ ID NO: 3617345 - DNA, 25 bp, Homo sapien
tcttccggagcagttgggaggctct

SEQ ID NO: 3617346 - DNA, 25 bp, Homo sapien
ttttggcagcgttgctaggtcctgg

SEQ ID NO: 3617347 - DNA, 25 bp, Homo sapien
gagcgtccgcgaaggaaataaaatc

SEQ ID NO: 3617348 - DNA, 25 bp, Homo sapien
cctgacaggccacggtgtgaccctg

SEQ ID NO: 3617349 - DNA, 25 bp, Homo sapien
ggtaagttgctcttgcctccaccca

SEQ ID NO: 3617350 - DNA, 25 bp, Homo sapien
cttcccatagacagtgtcagatggg

SEQ ID NO: 3617351 - DNA, 25 bp, Homo sapien
tctgagctgtggtttcgagtctgtc

SEQ ID NO: 3617352 - DNA, 25 bp, Homo sapien
aggggggtgagtcccggcaggtgct

SEQ ID NO: 3617353 - DNA, 25 bp, Homo sapien
ctggtaggggggtgagtcccggcag

SEQ ID NO: 3617354 - DNA, 25 bp, Homo sapien
gggggtgagtcccggcaggtgctga

SEQ ID NO: 3617355 - DNA, 25 bp, Homo sapien
taggggggtgagtcccggcaggtgc

SEQ ID NO: 3617356 - DNA, 25 bp, Homo sapien
ccaaagcagtatttctgactacaaa

SEQ ID NO: 3617357 - DNA, 25 bp, Homo sapien
catccatacaccaaagcagtatttc

SEQ ID NO: 3617358 - DNA, 25 bp, Homo sapien
cgaagtttcaaaggccagcatctgt

SEQ ID NO: 3617359 - DNA, 25 bp, Homo sapien
cttgcctaggatccggccttgttct

SEQ ID NO: 3617360 - DNA, 25 bp, Homo sapien
taagtcagtatgtgagatacggcca

SEQ ID NO: 3617361 - DNA, 25 bp, Homo sapien
taaccgcagccacgccgtttagtgt

SEQ ID NO: 3617362 - DNA, 25 bp, Homo sapien
gatacggccacactcttggttttag

SEQ ID NO: 3617363 - DNA, 25 bp, Homo sapien
aaaatggacccgagagctaaccgca

SEQ ID NO: 3617364 - DNA, 25 bp, Homo sapien
cccctcggaggagccatgcgcaggt

SEQ ID NO: 3617365 - DNA, 25 bp, Homo sapien
ctgccatcagagtaatctgtcctct

SEQ ID NO: 3617366 - DNA, 25 bp, Homo sapien
tcagggtgacttgggttggagattg

SEQ ID NO: 3617367 - DNA, 25 bp, Homo sapien
cagatggccgtgcagtcagggtgac

SEQ ID NO: 3617368 - DNA, 25 bp, Homo sapien
accccacactggctgtcccggagtc

SEQ ID NO: 3617369 - DNA, 25 bp, Homo sapien
tggctctcaatgacaccccacactg

SEQ ID NO: 3617370 - DNA, 25 bp, Homo sapien
ctgatggctctcaatgacaccccac

SEQ ID NO: 3617371 - DNA, 25 bp, Homo sapien
cccacactggctgtcccggagtcac

SEQ ID NO: 3617372 - DNA, 25 bp, Homo sapien
tgaacccgatactgctcagcaggca

SEQ ID NO: 3617373 - DNA, 25 bp, Homo sapien
ttgaacccgatactgctcagcaggc

SEQ ID NO: 3617374 - DNA, 25 bp, Homo sapien
ccttgaacccgatactgctcagcag

SEQ ID NO: 3617375 - DNA, 25 bp, Homo sapien
cttgaacccgatactgctcagcagg

SEQ ID NO: 3617376 - DNA, 25 bp, Homo sapien
tcatattcatacctatactgacagg

SEQ ID NO: 3617377 - DNA, 25 bp, Homo sapien
tacctatactgacaggtccaggccc

SEQ ID NO: 3617378 - DNA, 25 bp, Homo sapien
caggcccaagagtcgaggcttggcc

SEQ ID NO: 3617379 - DNA, 25 bp, Homo sapien
caggtcctttgcaactgggtgccca

SEQ ID NO: 3617380 - DNA, 25 bp, Homo sapien
gtgccgcgactcttgcagacttcat

SEQ ID NO: 3617381 - DNA, 25 bp, Homo sapien
catgaaaactcccttgagtgccgcg

SEQ ID NO: 3617382 - DNA, 25 bp, Homo sapien
ttgtctgtccagtccgccaagatcc

SEQ ID NO: 3617383 - DNA, 25 bp, Homo sapien
ttcttgtctgtccagtccgccaaga

SEQ ID NO: 3617384 - DNA, 25 bp, Homo sapien
cccaattggactcttcgccttcact

SEQ ID NO: 3617385 - DNA, 25 bp, Homo sapien
aattggactcttcgccttcacttgc

SEQ ID NO: 3617386 - DNA, 25 bp, Homo sapien
ctgcccaattggactcttcgccttc

SEQ ID NO: 3617387 - DNA, 25 bp, Homo sapien
tgcccaattggactcttcgccttca

SEQ ID NO: 3617388 - DNA, 25 bp, Homo sapien
ggcacttgacaaccatgaggctttt

SEQ ID NO: 3617389 - DNA, 25 bp, Homo sapien
gctcagggcacttgacaaccatgag

SEQ ID NO: 3617390 - DNA, 25 bp, Homo sapien
tcagctcagggcacttgacaaccat

SEQ ID NO: 3617391 - DNA, 25 bp, Homo sapien
cttggtcagctcagggcacttgaca

SEQ ID NO: 3617392 - DNA, 25 bp, Homo sapien
tcattggcaggtgaagtctggagca

SEQ ID NO: 3617393 - DNA, 25 bp, Homo sapien
catcttacacagtctataaagatgt

SEQ ID NO: 3617394 - DNA, 25 bp, Homo sapien
tcttacacagtctataaagatgttt

SEQ ID NO: 3617395 - DNA, 25 bp, Homo sapien
agcatcttacacagtctataaagat

SEQ ID NO: 3617396 - DNA, 25 bp, Homo sapien
aaggggctgtgaactgtaagtaact

SEQ ID NO: 3617397 - DNA, 25 bp, Homo sapien
gctgtgaactgtaagtaactttgat

SEQ ID NO: 3617398 - DNA, 25 bp, Homo sapien
ctgtaagtaactttgattggcgttt

SEQ ID NO: 3617399 - DNA, 25 bp, Homo sapien
gctgctcactagaaaaggggctgtg

SEQ ID NO: 3617400 - DNA, 25 bp, Homo sapien
gacctccatccccatggacttctaa

SEQ ID NO: 3617401 - DNA, 25 bp, Homo sapien
ggacctccatccccatggacttcta

SEQ ID NO: 3617402 - DNA, 25 bp, Homo sapien
acctccatccccatggacttctaag

SEQ ID NO: 3617403 - DNA, 25 bp, Homo sapien
ctggacctccatccccatggacttc

SEQ ID NO: 3617404 - DNA, 25 bp, Homo sapien
tgcacaggccctgaagggtggcctc

SEQ ID NO: 3617405 - DNA, 25 bp, Homo sapien
gcctgagtggtgcacaggccctgaa

SEQ ID NO: 3617406 - DNA, 25 bp, Homo sapien
ctggttctggactgctgcccagctg

SEQ ID NO: 3617407 - DNA, 25 bp, Homo sapien
agggtggcctctggttactggttct

SEQ ID NO: 3617408 - DNA, 25 bp, Homo sapien
tgcacaagattggagcttctgaagc

SEQ ID NO: 3617409 - DNA, 25 bp, Homo sapien
agggttggagcttggtaactgcaca

SEQ ID NO: 3617410 - DNA, 25 bp, Homo sapien
ttggtaactgcacaagattggagct

SEQ ID NO: 3617411 - DNA, 25 bp, Homo sapien
tggagcttggtaactgcacaagatt

SEQ ID NO: 3617412 - DNA, 25 bp, Homo sapien
aggagtgcctctgtgacaacatctg

SEQ ID NO: 3617413 - DNA, 25 bp, Homo sapien
ccagtttcctgatgaggagtgcctc

SEQ ID NO: 3617414 - DNA, 25 bp, Homo sapien
tgacaacatctgtgctgggctcatc

SEQ ID NO: 3617415 - DNA, 25 bp, Homo sapien
tgagctcacagtgcccactgaacat

SEQ ID NO: 3617416 - DNA, 25 bp, Homo sapien
ccagaccccactggaaagacctggg

SEQ ID NO: 3617417 - DNA, 25 bp, Homo sapien
aaagacctgggcctagcgctagtct

SEQ ID NO: 3617418 - DNA, 25 bp, Homo sapien
ctagcgctagtctggagggatcacc

SEQ ID NO: 3617419 - DNA, 25 bp, Homo sapien
ttagagacaggcagacttctcaaca

SEQ ID NO: 3617420 - DNA, 25 bp, Homo sapien
cagcataacgctgattgcccaacag

SEQ ID NO: 3617421 - DNA, 25 bp, Homo sapien
ataacgctgattgcccaacaggctc

SEQ ID NO: 3617422 - DNA, 25 bp, Homo sapien
ggctgggaacagcataacgctgatt

SEQ ID NO: 3617423 - DNA, 25 bp, Homo sapien
ggaacagcataacgctgattgccca

SEQ ID NO: 3617424 - DNA, 25 bp, Homo sapien
ctgcatctgtcgagttcttaaaagc

SEQ ID NO: 3617425 - DNA, 25 bp, Homo sapien
catctgtcgagttcttaaaagcacc

SEQ ID NO: 3617426 - DNA, 25 bp, Homo sapien
tcagggggtcatagacagctgcatc

SEQ ID NO: 3617427 - DNA, 25 bp, Homo sapien
agctgcatctgtcgagttcttaaaa

SEQ ID NO: 3617428 - DNA, 25 bp, Homo sapien
gttcctggaggttctacccagccca

SEQ ID NO: 3617429 - DNA, 25 bp, Homo sapien
aatctcagatggtgcactgatggcc

SEQ ID NO: 3617430 - DNA, 25 bp, Homo sapien
ctccctgaatctcagatggtgcact

SEQ ID NO: 3617431 - DNA, 25 bp, Homo sapien
tccctcctcacccagtgggatctgc

SEQ ID NO: 3617432 - DNA, 25 bp, Homo sapien
caaggggctcttggaaacagcagat

SEQ ID NO: 3617433 - DNA, 25 bp, Homo sapien
gagattgtgctgttgatagaacatc

SEQ ID NO: 3617434 - DNA, 25 bp, Homo sapien
ctgagattgtgctgttgatagaaca

SEQ ID NO: 3617435 - DNA, 25 bp, Homo sapien
gattgtgctgttgatagaacatctt

SEQ ID NO: 3617436 - DNA, 25 bp, Homo sapien
attgtgctgttgatagaacatcttc

SEQ ID NO: 3617437 - DNA, 25 bp, Homo sapien
taagtcatgctttcgtacacaggca

SEQ ID NO: 3617438 - DNA, 25 bp, Homo sapien
taaacacgtcattagtgaagctggt

SEQ ID NO: 3617439 - DNA, 25 bp, Homo sapien
gggctggcatttgattggacgatta

SEQ ID NO: 3617440 - DNA, 25 bp, Homo sapien
ctcactgtgtccaaggaaagagagt

SEQ ID NO: 3617441 - DNA, 25 bp, Homo sapien
gacagaagccgtgaaaacagcaaac

SEQ ID NO: 3617442 - DNA, 25 bp, Homo sapien
gtgtcggacacatactaggatctca

SEQ ID NO: 3617443 - DNA, 25 bp, Homo sapien
cagcctcagctccaacagtgacaga

SEQ ID NO: 3617444 - DNA, 25 bp, Homo sapien
tagaggtctgaaaaacagggccaga

SEQ ID NO: 3617445 - DNA, 25 bp, Homo sapien
ggtgttggcacattccgaactgttc

SEQ ID NO: 3617446 - DNA, 25 bp, Homo sapien
tcttgctcaaaagggagaacatggc

SEQ ID NO: 3617447 - DNA, 25 bp, Homo sapien
tgtaagtgcaaaagcaatctgctgg

SEQ ID NO: 3617448 - DNA, 25 bp, Homo sapien
aatgccgctctttccgatctgcaaa

SEQ ID NO: 3617449 - DNA, 25 bp, Homo sapien
tgtttgcttagcgtcccgtcgcaga

SEQ ID NO: 3617450 - DNA, 25 bp, Homo sapien
gggtgtttgcttagcgtcccgtcgc

SEQ ID NO: 3617451 - DNA, 25 bp, Homo sapien
ccgtcgcagattagcccacttgagt

SEQ ID NO: 3617452 - DNA, 25 bp, Homo sapien
ttagcgtcccgtcgcagattagccc

SEQ ID NO: 3617453 - DNA, 25 bp, Homo sapien
cccactcccgcggtaacagctgcag

SEQ ID NO: 3617454 - DNA, 25 bp, Homo sapien
actcccgcggtaacagctgcagtcc

SEQ ID NO: 3617455 - DNA, 25 bp, Homo sapien
tgggggagcgtgctaaacctctccg

SEQ ID NO: 3617456 - DNA, 25 bp, Homo sapien
tcccgcggtaacagctgcagtccag

SEQ ID NO: 3617457 - DNA, 25 bp, Homo sapien
tgcttgggttttctccatcccagac

SEQ ID NO: 3617458 - DNA, 25 bp, Homo sapien
cctgctggctgctcagttgtgcttg

SEQ ID NO: 3617459 - DNA, 25 bp, Homo sapien
ctggctgctcagttgtgcttgggtt

SEQ ID NO: 3617460 - DNA, 25 bp, Homo sapien
tgctggctgctcagttgtgcttggg

SEQ ID NO: 3617461 - DNA, 25 bp, Homo sapien
cagtgcggggctgtcacccgggttt

SEQ ID NO: 3617462 - DNA, 25 bp, Homo sapien
gtttctgaggggtctaagcccctca

SEQ ID NO: 3617463 - DNA, 25 bp, Homo sapien
gggttgcgggtcatctgtggctttt

SEQ ID NO: 3617464 - DNA, 25 bp, Homo sapien
ccccaatggtccccagagggttgcg

SEQ ID NO: 3617465 - DNA, 25 bp, Homo sapien
cactctgcgtgtgcagccacaggat

SEQ ID NO: 3617466 - DNA, 25 bp, Homo sapien
acgcagaccctcgataggccctgcc

SEQ ID NO: 3617467 - DNA, 25 bp, Homo sapien
gcagcaaaaccaatccacatgcaag

SEQ ID NO: 3617468 - DNA, 25 bp, Homo sapien
ctcctcgttcctggccacgcagacc

SEQ ID NO: 3617469 - DNA, 25 bp, Homo sapien
aggtcaggacgggactcacggcttc

SEQ ID NO: 3617470 - DNA, 25 bp, Homo sapien
caggacgggactcacggcttcttcc

SEQ ID NO: 3617471 - DNA, 25 bp, Homo sapien
ctggaggtcaggacgggactcacgg

SEQ ID NO: 3617472 - DNA, 25 bp, Homo sapien
gtcaggacgggactcacggcttctt

SEQ ID NO: 3617473 - DNA, 25 bp, Homo sapien
gggttaaaagcatctctcaacccaa

SEQ ID NO: 3617474 - DNA, 25 bp, Homo sapien
ccccaacgcagacaggtcacttgga

SEQ ID NO: 3617475 - DNA, 25 bp, Homo sapien
caggtcacttggaaaccagggagtg

SEQ ID NO: 3617476 - DNA, 25 bp, Homo sapien
gctctcatctcggaaaacgtcggcc

SEQ ID NO: 3617477 - DNA, 25 bp, Homo sapien
ggctcggacaagcactttaaaccca

SEQ ID NO: 3617478 - DNA, 25 bp, Homo sapien
tttaaacccacaagttggctgcatc

SEQ ID NO: 3617479 - DNA, 25 bp, Homo sapien
tgagaattccgtgaccctttctggg

SEQ ID NO: 3617480 - DNA, 25 bp, Homo sapien
gtgagatctgggctcggacaagcac

SEQ ID NO: 3617481 - DNA, 25 bp, Homo sapien
agtgaccacaaagtgtctcatggga

SEQ ID NO: 3617482 - DNA, 25 bp, Homo sapien
gaccacaaagtgtctcatgggagga

SEQ ID NO: 3617483 - DNA, 25 bp, Homo sapien
gtgaccacaaagtgtctcatgggag

SEQ ID NO: 3617484 - DNA, 25 bp, Homo sapien
tgaccacaaagtgtctcatgggagg

SEQ ID NO: 3617485 - DNA, 25 bp, Homo sapien
acactgatttcagttctgtctagac

SEQ ID NO: 3617486 - DNA, 25 bp, Homo sapien
actgatttcagttctgtctagacct

SEQ ID NO: 3617487 - DNA, 25 bp, Homo sapien
cactgatttcagttctgtctagacc

SEQ ID NO: 3617488 - DNA, 25 bp, Homo sapien
tcatgaaaatagcagagttgaggga

SEQ ID NO: 3617489 - DNA, 25 bp, Homo sapien
ttgctttcctaatgccctgtgcctg

SEQ ID NO: 3617490 - DNA, 25 bp, Homo sapien
cagtggcagggccatagacctctca

SEQ ID NO: 3617491 - DNA, 25 bp, Homo sapien
gacagatgcatcatcgagtcccttg

SEQ ID NO: 3617492 - DNA, 25 bp, Homo sapien
catttggagccattgatgagccaga

SEQ ID NO: 3617493 - DNA, 25 bp, Homo sapien
gatcgtgtcgcgtaaagagggcaca

SEQ ID NO: 3617494 - DNA, 25 bp, Homo sapien
agcattgagcactgactgtcgggtc

SEQ ID NO: 3617495 - DNA, 25 bp, Homo sapien
gagagaattgacttctccgcctgcc

SEQ ID NO: 3617496 - DNA, 25 bp, Homo sapien
ttcctccaagaggaacagccgcctt

SEQ ID NO: 3617497 - DNA, 25 bp, Homo sapien
ctcaactttgggctggatggagaga

SEQ ID NO: 3617498 - DNA, 25 bp, Homo sapien
tggttttgtgagttctatggtattt

SEQ ID NO: 3617499 - DNA, 25 bp, Homo sapien
ctttgggctggatggagagactttt

SEQ ID NO: 3617500 - DNA, 25 bp, Homo sapien
aaaggttctcaactttgggctggat

SEQ ID NO: 3617501 - DNA, 25 bp, Homo sapien
cttcttggatattgtgagtgaggcc

SEQ ID NO: 3617502 - DNA, 25 bp, Homo sapien
ggatacatatttgactactgttgag

SEQ ID NO: 3617503 - DNA, 25 bp, Homo sapien
tatcttccgagacacatggacacgg

SEQ ID NO: 3617504 - DNA, 25 bp, Homo sapien
tgagctgtgctaaccacctttggaa

SEQ ID NO: 3617505 - DNA, 25 bp, Homo sapien
catgtcggctgcagctaggaggact

SEQ ID NO: 3617506 - DNA, 25 bp, Homo sapien
taggaggacttgacctgaggctggg

SEQ ID NO: 3617507 - DNA, 25 bp, Homo sapien
aacatgtcggctgcagctaggagga

SEQ ID NO: 3617508 - DNA, 25 bp, Homo sapien
ggaacatgtcggctgcagctaggag

SEQ ID NO: 3617509 - DNA, 25 bp, Homo sapien
tttatcccagtgctagacaaggtgg

SEQ ID NO: 3617510 - DNA, 25 bp, Homo sapien
gaacttgcatgataggcaggcctgg

SEQ ID NO: 3617511 - DNA, 25 bp, Homo sapien
ccgtgtgtagagaaggcccagctaa

SEQ ID NO: 3617512 - DNA, 25 bp, Homo sapien
tgtataaggagtatgtctgcccgct

SEQ ID NO: 3617513 - DNA, 25 bp, Homo sapien
ccaaacaattgcccctggagttgca

SEQ ID NO: 3617514 - DNA, 25 bp, Homo sapien
ccgggccagagcaggggtatcgtcc

SEQ ID NO: 3617515 - DNA, 25 bp, Homo sapien
gccagagcaggggtatcgtccagcc

SEQ ID NO: 3617516 - DNA, 25 bp, Homo sapien
cagagcaggggtatcgtccagccag

SEQ ID NO: 3617517 - DNA, 25 bp, Homo sapien
agcaggggtatcgtccagccaggac

SEQ ID NO: 3617518 - DNA, 25 bp, Homo sapien
catgtcattccaatggcagaggcag

SEQ ID NO: 3617519 - DNA, 25 bp, Homo sapien
cctgagctgccccatttttcccaga

SEQ ID NO: 3617520 - DNA, 25 bp, Homo sapien
ggcagagcacaaagggggtctcttc

SEQ ID NO: 3617521 - DNA, 25 bp, Homo sapien
tcattccaatggcagaggcagagca

SEQ ID NO: 3617522 - DNA, 25 bp, Homo sapien
cctttgctgtttatcgggaacgttg

SEQ ID NO: 3617523 - DNA, 25 bp, Homo sapien
tttgctgtttatcgggaacgttgta

SEQ ID NO: 3617524 - DNA, 25 bp, Homo sapien
gctgtttatcgggaacgttgtagtc

SEQ ID NO: 3617525 - DNA, 25 bp, Homo sapien
tgctgtttatcgggaacgttgtagt

SEQ ID NO: 3617526 - DNA, 25 bp, Homo sapien
acaccccaggtcttgcatctggcag

SEQ ID NO: 3617527 - DNA, 25 bp, Homo sapien
accccaggtcttgcatctggcagcc

SEQ ID NO: 3617528 - DNA, 25 bp, Homo sapien
gtctggcttgacagacaccccaggt

SEQ ID NO: 3617529 - DNA, 25 bp, Homo sapien
ttgtctggcttgacagacaccccag

SEQ ID NO: 3617530 - DNA, 25 bp, Homo sapien
gaagactaagctctcgtacctggtg

SEQ ID NO: 3617531 - DNA, 25 bp, Homo sapien
tgttcctggaaggatgaagactaag

SEQ ID NO: 3617532 - DNA, 25 bp, Homo sapien
gaaggatgaagactaagctctcgta

SEQ ID NO: 3617533 - DNA, 25 bp, Homo sapien
ctaagctctcgtacctggtgtatgg

SEQ ID NO: 3617534 - DNA, 25 bp, Homo sapien
caggcatcccactgagtgacaactt

SEQ ID NO: 3617535 - DNA, 25 bp, Homo sapien
actttgtggaccaccttgtgtatgc

SEQ ID NO: 3617536 - DNA, 25 bp, Homo sapien
aaaattcaggcatcccactgagtga

SEQ ID NO: 3617537 - DNA, 25 bp, Homo sapien
tatgcgtcaccagggatagaggccc

SEQ ID NO: 3617538 - DNA, 25 bp, Homo sapien
actgagctccaaagcaacagccctg

SEQ ID NO: 3617539 - DNA, 25 bp, Homo sapien
ctggctcacccctcggcctggccac

SEQ ID NO: 3617540 - DNA, 25 bp, Homo sapien
gctggctcacccctcggcctggcca

SEQ ID NO: 3617541 - DNA, 25 bp, Homo sapien
gactgagctccaaagcaacagccct

SEQ ID NO: 3617542 - DNA, 25 bp, Homo sapien
gctggtagatgcctgaagtcgtttt

SEQ ID NO: 3617543 - DNA, 25 bp, Homo sapien
agatgcctgaagtcgttttcctggg

SEQ ID NO: 3617544 - DNA, 25 bp, Homo sapien
tgtgctggtagatgcctgaagtcgt

SEQ ID NO: 3617545 - DNA, 25 bp, Homo sapien
tggtagatgcctgaagtcgttttcc

SEQ ID NO: 3617546 - DNA, 25 bp, Homo sapien
ggatatggctggatcccctcgcatc

SEQ ID NO: 3617547 - DNA, 25 bp, Homo sapien
gggatatggctggatcccctcgcat

SEQ ID NO: 3617548 - DNA, 25 bp, Homo sapien
cagaagcgaccgtggggcttcccaa

SEQ ID NO: 3617549 - DNA, 25 bp, Homo sapien
tgagcctcggttctgagccagaagc

SEQ ID NO: 3617550 - DNA, 25 bp, Homo sapien
gagtcaccggcctgtcaaccagcat

SEQ ID NO: 3617551 - DNA, 25 bp, Homo sapien
tgatagaaggtgagccttaggcctg

SEQ ID NO: 3617552 - DNA, 25 bp, Homo sapien
tgcccctcacgacagggctgtgctt

SEQ ID NO: 3617553 - DNA, 25 bp, Homo sapien
aatggttggcacatggttagccctg

SEQ ID NO: 3617554 - DNA, 25 bp, Homo sapien
gccttcggggccgtgtgagcggttg

SEQ ID NO: 3617555 - DNA, 25 bp, Homo sapien
cgtgtgagcggttggagaggggacc

SEQ ID NO: 3617556 - DNA, 25 bp, Homo sapien
tcggggccgtgtgagcggttggaga

SEQ ID NO: 3617557 - DNA, 25 bp, Homo sapien
ctgtctggccttcggggccgtgtga

SEQ ID NO: 3617558 - DNA, 25 bp, Homo sapien
attttggagtggcttctttggagag

SEQ ID NO: 3617559 - DNA, 25 bp, Homo sapien
cctgattttggagtggcttctttgg

SEQ ID NO: 3617560 - DNA, 25 bp, Homo sapien
tgattttggagtggcttctttggag

SEQ ID NO: 3617561 - DNA, 25 bp, Homo sapien
ttttggagtggcttctttggagagt

SEQ ID NO: 3617562 - DNA, 25 bp, Homo sapien
gtggccgagcctaaggctgcagact

SEQ ID NO: 3617563 - DNA, 25 bp, Homo sapien
cgagcctaaggctgcagacttctct

SEQ ID NO: 3617564 - DNA, 25 bp, Homo sapien
ggccgagcctaaggctgcagacttc

SEQ ID NO: 3617565 - DNA, 25 bp, Homo sapien
agcaaaggtggccgagcctaaggct

SEQ ID NO: 3617566 - DNA, 25 bp, Homo sapien
tttccgtggtgcagacagagtaaag

SEQ ID NO: 3617567 - DNA, 25 bp, Homo sapien
cagctggcagcatcaaatcgatatt

SEQ ID NO: 3617568 - DNA, 25 bp, Homo sapien
gagtaaagagagaataaagtgttga

SEQ ID NO: 3617569 - DNA, 25 bp, Homo sapien
ggcattatcaaggatttcagctccc

SEQ ID NO: 3617570 - DNA, 25 bp, Homo sapien
agggaccctctgatacccgcaggga

SEQ ID NO: 3617571 - DNA, 25 bp, Homo sapien
cctccataggaaaggctgttggtgg

SEQ ID NO: 3617572 - DNA, 25 bp, Homo sapien
gctgcttggaaatggatccacttgg

SEQ ID NO: 3617573 - DNA, 25 bp, Homo sapien
atggatccgggaaacacctcagggc

SEQ ID NO: 3617574 - DNA, 25 bp, Homo sapien
ggagctgttcattcagaacaattag

SEQ ID NO: 3617575 - DNA, 25 bp, Homo sapien
gctggatggaacatatggcagaggg

SEQ ID NO: 3617576 - DNA, 25 bp, Homo sapien
gaacaattagcatgcagtttggagc

SEQ ID NO: 3617577 - DNA, 25 bp, Homo sapien
ctataaacggcctgcctgcttttcc

SEQ ID NO: 3617578 - DNA, 25 bp, Homo sapien
ccctccttaagagcagtttgtacat

SEQ ID NO: 3617579 - DNA, 25 bp, Homo sapien
cagtttgtacatcgtagtcttcttg

SEQ ID NO: 3617580 - DNA, 25 bp, Homo sapien
ccttaagagcagtttgtacatcgta

SEQ ID NO: 3617581 - DNA, 25 bp, Homo sapien
taagagcagtttgtacatcgtagtc

SEQ ID NO: 3617582 - DNA, 25 bp, Homo sapien
gatggcgacctccacaatgtgttca

SEQ ID NO: 3617583 - DNA, 25 bp, Homo sapien
ccaagagcagctccccggaatgcag

SEQ ID NO: 3617584 - DNA, 25 bp, Homo sapien
tgcattcctccagacatgtcaggag

SEQ ID NO: 3617585 - DNA, 25 bp, Homo sapien
cagatttattacaccagcaaaggag

SEQ ID NO: 3617586 - DNA, 25 bp, Homo sapien
aagcccatttcagttggggctgaag

SEQ ID NO: 3617587 - DNA, 25 bp, Homo sapien
caagcccatttcagttggggctgaa

SEQ ID NO: 3617588 - DNA, 25 bp, Homo sapien
ccaagcccatttcagttggggctga

SEQ ID NO: 3617589 - DNA, 25 bp, Homo sapien
ggaggccacagatccaagcccattt

SEQ ID NO: 3617590 - DNA, 25 bp, Homo sapien
ccgtctgagttcacgctgagcacca

SEQ ID NO: 3617591 - DNA, 25 bp, Homo sapien
ttcaaagccgtctgagttcacgctg

SEQ ID NO: 3617592 - DNA, 25 bp, Homo sapien
gttcacgctgagcaccaggttctgt

SEQ ID NO: 3617593 - DNA, 25 bp, Homo sapien
tctgagttcacgctgagcaccaggt

SEQ ID NO: 3617594 - DNA, 25 bp, Homo sapien
cagctcgtcgtgaatcaccaaagag

SEQ ID NO: 3617595 - DNA, 25 bp, Homo sapien
gggatttcagtgatctcagagcacc

SEQ ID NO: 3617596 - DNA, 25 bp, Homo sapien
ttggtgtcatggtcagctcgtcgtg

SEQ ID NO: 3617597 - DNA, 25 bp, Homo sapien
gagcacctgcagtgcggtgccctca

SEQ ID NO: 3617598 - DNA, 25 bp, Homo sapien
gcgacatcacttgctcgcaacgtca

SEQ ID NO: 3617599 - DNA, 25 bp, Homo sapien
catcacttgctcgcaacgtcaccat

SEQ ID NO: 3617600 - DNA, 25 bp, Homo sapien
gacatcacttgctcgcaacgtcacc

SEQ ID NO: 3617601 - DNA, 25 bp, Homo sapien
tgcgacatcacttgctcgcaacgtc

SEQ ID NO: 3617602 - DNA, 25 bp, Homo sapien
ggccagtttggatctgctctgggtc

SEQ ID NO: 3617603 - DNA, 25 bp, Homo sapien
gatctgagggcgtagtgacccgctc

SEQ ID NO: 3617604 - DNA, 25 bp, Homo sapien
cagatctgagggcgtagtgacccgc

SEQ ID NO: 3617605 - DNA, 25 bp, Homo sapien
ctgagggcgtagtgacccgctccat

SEQ ID NO: 3617606 - DNA, 25 bp, Homo sapien
atctgagggcgtagtgacccgctcc

SEQ ID NO: 3617607 - DNA, 25 bp, Homo sapien
ttatgtggccttctatgcactgggc

SEQ ID NO: 3617608 - DNA, 25 bp, Homo sapien
gcctgtcttgacctgagaacctcca

SEQ ID NO: 3617609 - DNA, 25 bp, Homo sapien
ccaatatggacttatccgcatctgt

SEQ ID NO: 3617610 - DNA, 25 bp, Homo sapien
gcactgggcccctaaagacagcttt

SEQ ID NO: 3617611 - DNA, 25 bp, Homo sapien
gggtttaatcctgatgagcccagtg

SEQ ID NO: 3617612 - DNA, 25 bp, Homo sapien
ccagaactccccatggatgatgaca

SEQ ID NO: 3617613 - DNA, 25 bp, Homo sapien
cgctgctctcgtgggggtttaatcc

SEQ ID NO: 3617614 - DNA, 25 bp, Homo sapien
tcactgtggcagatacttggctgca

SEQ ID NO: 3617615 - DNA, 25 bp, Homo sapien
tccctgagtgggagctatgccccag

SEQ ID NO: 3617616 - DNA, 25 bp, Homo sapien
ccatctccataagcggtgtggtcat

SEQ ID NO: 3617617 - DNA, 25 bp, Homo sapien
gtaaatcttccctgagtgggagcta

SEQ ID NO: 3617618 - DNA, 25 bp, Homo sapien
ggtgcaggtcatcggattggcacca

SEQ ID NO: 3617619 - DNA, 25 bp, Homo sapien
caatgtggctggctaagtgtgaaga

SEQ ID NO: 3617620 - DNA, 25 bp, Homo sapien
cagacgatcacaatgtggctggcta

SEQ ID NO: 3617621 - DNA, 25 bp, Homo sapien
tgaagagaactgtgcataggatgct

SEQ ID NO: 3617622 - DNA, 25 bp, Homo sapien
aagtggctggaacggtcctcgtgca

SEQ ID NO: 3617623 - DNA, 25 bp, Homo sapien
agagtcatcaagcaggctggcttgg

SEQ ID NO: 3617624 - DNA, 25 bp, Homo sapien
tctggagagagccattggagctggg

SEQ ID NO: 3617625 - DNA, 25 bp, Homo sapien
ttctggagagagccattggagctgg

SEQ ID NO: 3617626 - DNA, 25 bp, Homo sapien
gaaatatagaatcgggcattgaggg

SEQ ID NO: 3617627 - DNA, 25 bp, Homo sapien
gaacactgaggaatggttcaggtag

SEQ ID NO: 3617628 - DNA, 25 bp, Homo sapien
caggtagaaatatctgatcagacag

SEQ ID NO: 3617629 - DNA, 25 bp, Homo sapien
ttgtggacgggtttggagaatggca

SEQ ID NO: 3617630 - DNA, 25 bp, Homo sapien
gctttttcgacaatgagcagatgtg

SEQ ID NO: 3617631 - DNA, 25 bp, Homo sapien
cagtcggggccagctgctttttcga

SEQ ID NO: 3617632 - DNA, 25 bp, Homo sapien
ttctctgagcaggaagtcgttgtac

SEQ ID NO: 3617633 - DNA, 25 bp, Homo sapien
tctctgagcaggaagtcgttgtact

SEQ ID NO: 3617634 - DNA, 25 bp, Homo sapien
ctgtaagcccatcacaggtgtgagg

SEQ ID NO: 3617635 - DNA, 25 bp, Homo sapien
cccatcacaggtgtgaggcactcac

SEQ ID NO: 3617636 - DNA, 25 bp, Homo sapien
gcccatcacaggtgtgaggcactca

SEQ ID NO: 3617637 - DNA, 25 bp, Homo sapien
taagcccatcacaggtgtgaggcac

SEQ ID NO: 3617638 - DNA, 25 bp, Homo sapien
cctgtcccggtagctctgcctggaa

SEQ ID NO: 3617639 - DNA, 25 bp, Homo sapien
ttgaagagcatgaatgaagtcacct

SEQ ID NO: 3617640 - DNA, 25 bp, Homo sapien
gaagtcacctgtcccggtagctctg

SEQ ID NO: 3617641 - DNA, 25 bp, Homo sapien
gcatggatgagaccttgaagagcat

SEQ ID NO: 3617642 - DNA, 25 bp, Homo sapien
gcatatctcccaggtttgctgctgg

SEQ ID NO: 3617643 - DNA, 25 bp, Homo sapien
tttgctgctggggtggccgcagaac

SEQ ID NO: 3617644 - DNA, 25 bp, Homo sapien
aggtttgctgctggggtggccgcag

SEQ ID NO: 3617645 - DNA, 25 bp, Homo sapien
caggtttgctgctggggtggccgca

SEQ ID NO: 3617646 - DNA, 25 bp, Homo sapien
ggaacaagctaggagtaactggacc

SEQ ID NO: 3617647 - DNA, 25 bp, Homo sapien
gagaagcctggtgccaggaacaagc

SEQ ID NO: 3617648 - DNA, 25 bp, Homo sapien
cacagacgaggtcacatggaggaga

SEQ ID NO: 3617649 - DNA, 25 bp, Homo sapien
cacgatgacgcctgtgagctggtcc

SEQ ID NO: 3617650 - DNA, 25 bp, Homo sapien
cgatgctgctctgaaagtgccgccc

SEQ ID NO: 3617651 - DNA, 25 bp, Homo sapien
gcggttctcccgatgctgctctgaa

SEQ ID NO: 3617652 - DNA, 25 bp, Homo sapien
ctggccagcggttctcccgatgctg

SEQ ID NO: 3617653 - DNA, 25 bp, Homo sapien
ctctggcgtagggcaggccctcctg

SEQ ID NO: 3617654 - DNA, 25 bp, Homo sapien
caatagggcgtgttcaacagtgacc

SEQ ID NO: 3617655 - DNA, 25 bp, Homo sapien
tcagtgaccacattgagagagagtt

SEQ ID NO: 3617656 - DNA, 25 bp, Homo sapien
gaaatggctgcaagggaaattacag

SEQ ID NO: 3617657 - DNA, 25 bp, Homo sapien
gctttggctctagcagacaggaaga

SEQ ID NO: 3617658 - DNA, 25 bp, Homo sapien
tcagtctccattttggcagcagaaa

SEQ ID NO: 3617659 - DNA, 25 bp, Homo sapien
tcatcgccaaattcctcacaaagct

SEQ ID NO: 3617660 - DNA, 25 bp, Homo sapien
tttggcagcagaaatcatcgccaaa

SEQ ID NO: 3617661 - DNA, 25 bp, Homo sapien
agaaatcatcgccaaattcctcaca

SEQ ID NO: 3617662 - DNA, 25 bp, Homo sapien
gtggacagctcctttggaccctcca

SEQ ID NO: 3617663 - DNA, 25 bp, Homo sapien
tgtggacagctcctttggaccctcc

SEQ ID NO: 3617664 - DNA, 25 bp, Homo sapien
tggacagctcctttggaccctccat

SEQ ID NO: 3617665 - DNA, 25 bp, Homo sapien
ggcagtagggaagcaggtgttctgg

SEQ ID NO: 3617666 - DNA, 25 bp, Homo sapien
tgagtattccaaggaggacccggag

SEQ ID NO: 3617667 - DNA, 25 bp, Homo sapien
tggccaaagcgtctgcttgtcttgg

SEQ ID NO: 3617668 - DNA, 25 bp, Homo sapien
gtcttggttgtcatctttgcctccc

SEQ ID NO: 3617669 - DNA, 25 bp, Homo sapien
tacagtctgaggacgggtccaggcc

SEQ ID NO: 3617670 - DNA, 25 bp, Homo sapien
ccatagtcacaagcccgagtctggg

SEQ ID NO: 3617671 - DNA, 25 bp, Homo sapien
caggagcacccttatcaggctggaa

SEQ ID NO: 3617672 - DNA, 25 bp, Homo sapien
tgaccgtactgaaccaagactgagg

SEQ ID NO: 3617673 - DNA, 25 bp, Homo sapien
acacgtacaacaggccggagctgat

SEQ ID NO: 3617674 - DNA, 25 bp, Homo sapien
agtcccccggtgctgctaccaggca

SEQ ID NO: 3617675 - DNA, 25 bp, Homo sapien
ctccccacacgtacaacaggccgga

SEQ ID NO: 3617676 - DNA, 25 bp, Homo sapien
gaaggaggggtatccaaatggcctc

SEQ ID NO: 3617677 - DNA, 25 bp, Homo sapien
ccaggtaccggatgtgagcggaacc

SEQ ID NO: 3617678 - DNA, 25 bp, Homo sapien
tcagaggtttctgagtgccaggccc

SEQ ID NO: 3617679 - DNA, 25 bp, Homo sapien
gactggaagctagattagtggccac

SEQ ID NO: 3617680 - DNA, 25 bp, Homo sapien
gccaagcccctttgctgtgactggg

SEQ ID NO: 3617681 - DNA, 25 bp, Homo sapien
tgcacaccccgcaaccctttccttc

SEQ ID NO: 3617682 - DNA, 25 bp, Homo sapien
ccctcagatcagacacagccgcccc

SEQ ID NO: 3617683 - DNA, 25 bp, Homo sapien
aaagccaagattctttctgcacacc

SEQ ID NO: 3617684 - DNA, 25 bp, Homo sapien
ccccaagatcttctgcgctccccac

SEQ ID NO: 3617685 - DNA, 25 bp, Homo sapien
gatgctgtggggcttctttctagcg

SEQ ID NO: 3617686 - DNA, 25 bp, Homo sapien
gctgtggggcttctttctagcgtac

SEQ ID NO: 3617687 - DNA, 25 bp, Homo sapien
tgctgtggggcttctttctagcgta

SEQ ID NO: 3617688 - DNA, 25 bp, Homo sapien
cagatgctgtggggcttctttctag

SEQ ID NO: 3617689 - DNA, 25 bp, Homo sapien
tgcccttgaaggtccaaaagccctg

SEQ ID NO: 3617690 - DNA, 25 bp, Homo sapien
agcatatggaacacctttgctctgc

SEQ ID NO: 3617691 - DNA, 25 bp, Homo sapien
tctgcccttgaaggtccaaaagccc

SEQ ID NO: 3617692 - DNA, 25 bp, Homo sapien
atatggaacacctttgctctgccct

SEQ ID NO: 3617693 - DNA, 25 bp, Homo sapien
gttcagatgaggcaggagtccagtc

SEQ ID NO: 3617694 - DNA, 25 bp, Homo sapien
gtccgttcagatgaggcaggagtcc

SEQ ID NO: 3617695 - DNA, 25 bp, Homo sapien
tgaggcaggagtccagtcttctgcg

SEQ ID NO: 3617696 - DNA, 25 bp, Homo sapien
aggagtccagtcttctgcggcctgg

SEQ ID NO: 3617697 - DNA, 25 bp, Homo sapien
aggtctggagcgccctggactctgt

SEQ ID NO: 3617698 - DNA, 25 bp, Homo sapien
taaactggacatatccccatactcc

SEQ ID NO: 3617699 - DNA, 25 bp, Homo sapien
ctctgcctgcttgagccacccatgt

SEQ ID NO: 3617700 - DNA, 25 bp, Homo sapien
gagccacccatgtctttaaactgga

SEQ ID NO: 3617701 - DNA, 25 bp, Homo sapien
taatgtgccgggaggagtgtgtgcg

SEQ ID NO: 3617702 - DNA, 25 bp, Homo sapien
acttgccgggaatggacctgtccac

SEQ ID NO: 3617703 - DNA, 25 bp, Homo sapien
tgttgagatttcacatagatgcgtt

SEQ ID NO: 3617704 - DNA, 25 bp, Homo sapien
ggctgagtagactgcgacctgccct

SEQ ID NO: 3617705 - DNA, 25 bp, Homo sapien
ctcggaggaggcgatggtttctctt

SEQ ID NO: 3617706 - DNA, 25 bp, Homo sapien
ctagcatttgctgtgagggctcgga

SEQ ID NO: 3617707 - DNA, 25 bp, Homo sapien
gctgctgaaggacagtagtgaccat

SEQ ID NO: 3617708 - DNA, 25 bp, Homo sapien
aagtcatgggcacacgagagcaaag

SEQ ID NO: 3617709 - DNA, 25 bp, Homo sapien
tctcccctgtccccattggaagaag

SEQ ID NO: 3617710 - DNA, 25 bp, Homo sapien
ccaaaaaatcttgttctcccatgcc

SEQ ID NO: 3617711 - DNA, 25 bp, Homo sapien
tgaagatgtccaccaaaaaatcttg

SEQ ID NO: 3617712 - DNA, 25 bp, Homo sapien
aaaatcttgttctcccatgccttcc

SEQ ID NO: 3617713 - DNA, 25 bp, Homo sapien
tcttcgcctctctgaagctctgtat

SEQ ID NO: 3617714 - DNA, 25 bp, Homo sapien
tgcatcttcgcctctctgaagctct

SEQ ID NO: 3617715 - DNA, 25 bp, Homo sapien
tttctgtctgcatatccactctctg

SEQ ID NO: 3617716 - DNA, 25 bp, Homo sapien
tgtctgcatatccactctctggctc

SEQ ID NO: 3617717 - DNA, 25 bp, Homo sapien
cagaagtaattaaacccaacgatgg

SEQ ID NO: 3617718 - DNA, 25 bp, Homo sapien
tgggtgatgtaaaaaacacgaaggc

SEQ ID NO: 3617719 - DNA, 25 bp, Homo sapien
cctgtctctaatcgcctctcccggg

SEQ ID NO: 3617720 - DNA, 25 bp, Homo sapien
acaccttggccccaaactgggcatt

SEQ ID NO: 3617721 - DNA, 25 bp, Homo sapien
tgcttctagcccatggaggatgtgg

SEQ ID NO: 3617722 - DNA, 25 bp, Homo sapien
catcatcatcgacactcggcactgg

SEQ ID NO: 3617723 - DNA, 25 bp, Homo sapien
gatgtggacccacagtggaagatat

SEQ ID NO: 3617724 - DNA, 25 bp, Homo sapien
tggacaccaagtgtccacatctctg

SEQ ID NO: 3617725 - DNA, 25 bp, Homo sapien
catgaccatggatcacaggaaaagc

SEQ ID NO: 3617726 - DNA, 25 bp, Homo sapien
gaaaagctgtgggtgatctcagatg

SEQ ID NO: 3617727 - DNA, 25 bp, Homo sapien
tgagctctgagagagcaacagggct

SEQ ID NO: 3617728 - DNA, 25 bp, Homo sapien
tgatctcagatgctgtctgagctct

SEQ ID NO: 3617729 - DNA, 25 bp, Homo sapien
tgggatgggatgggaggagccagac

SEQ ID NO: 3617730 - DNA, 25 bp, Homo sapien
gggatgggatgggaggagccagacg

SEQ ID NO: 3617731 - DNA, 25 bp, Homo sapien
ctgggatgggatgggaggagccaga

SEQ ID NO: 3617732 - DNA, 25 bp, Homo sapien
acccccagatatgcccccacataca

SEQ ID NO: 3617733 - DNA, 25 bp, Homo sapien
aaagtctgccctatgctccatagac

SEQ ID NO: 3617734 - DNA, 25 bp, Homo sapien
taacttggagggaaggatgggcagc

SEQ ID NO: 3617735 - DNA, 25 bp, Homo sapien
cttagttaacttggagggaaggatg

SEQ ID NO: 3617736 - DNA, 25 bp, Homo sapien
ggaggtttagaagacagaccctggc

SEQ ID NO: 3617737 - DNA, 25 bp, Homo sapien
tggaagtgaaggaggtttagaagac

SEQ ID NO: 3617738 - DNA, 25 bp, Homo sapien
tgaaggaggtttagaagacagaccc

SEQ ID NO: 3617739 - DNA, 25 bp, Homo sapien
tttagaagacagaccctggctgtgg

SEQ ID NO: 3617740 - DNA, 25 bp, Homo sapien
gaacaagaatcatgtagccagcaca

SEQ ID NO: 3617741 - DNA, 25 bp, Homo sapien
cgtagcccaacggactgtaactctt

SEQ ID NO: 3617742 - DNA, 25 bp, Homo sapien
caccggagccatcattagaacaaga

SEQ ID NO: 3617743 - DNA, 25 bp, Homo sapien
gacagatatactgcgcagccgagca

SEQ ID NO: 3617744 - DNA, 25 bp, Homo sapien
tcccagggcagttcaagccctttcc

SEQ ID NO: 3617745 - DNA, 25 bp, Homo sapien
ttcccagggcagttcaagccctttc

SEQ ID NO: 3617746 - DNA, 25 bp, Homo sapien
ccttcatgtctttgtcccattctgg

SEQ ID NO: 3617747 - DNA, 25 bp, Homo sapien
tccttcatgtctttgtcccattctg

SEQ ID NO: 3617748 - DNA, 25 bp, Homo sapien
ctattaaaaatgaagcacggtggct

SEQ ID NO: 3617749 - DNA, 25 bp, Homo sapien
gggctgacgtgagaccgctgtgcat

SEQ ID NO: 3617750 - DNA, 25 bp, Homo sapien
cacggtggctcacagggacagacag

SEQ ID NO: 3617751 - DNA, 25 bp, Homo sapien
gctcttcctgggctgacgtgagacc

SEQ ID NO: 3617752 - DNA, 25 bp, Homo sapien
aatgagtggcagtcgcagttccagg

SEQ ID NO: 3617753 - DNA, 25 bp, Homo sapien
tggtgctcgggaggcaccagttctc

SEQ ID NO: 3617754 - DNA, 25 bp, Homo sapien
tcatcgtttcttagtaaggccttcc

SEQ ID NO: 3617755 - DNA, 25 bp, Homo sapien
ctttggaacaagtcatctttctgct

SEQ ID NO: 3617756 - DNA, 25 bp, Homo sapien
gcccacgctgcttctggacttctga

SEQ ID NO: 3617757 - DNA, 25 bp, Homo sapien
gacgagattgcctttcctccagtgc

SEQ ID NO: 3617758 - DNA, 25 bp, Homo sapien
gctgaaaactcaggcgttgagggtc

SEQ ID NO: 3617759 - DNA, 25 bp, Homo sapien
cagagcagtctcatcgctgaaaact

SEQ ID NO: 3617760 - DNA, 25 bp, Homo sapien
gtctctaaatccttgcagttcacgc

SEQ ID NO: 3617761 - DNA, 25 bp, Homo sapien
tggacctgttaactggttcaagccc

SEQ ID NO: 3617762 - DNA, 25 bp, Homo sapien
tgtcgccgaaatggccattggacct

SEQ ID NO: 3617763 - DNA, 25 bp, Homo sapien
cttacgattccagcatttgagcatg

SEQ ID NO: 3617764 - DNA, 25 bp, Homo sapien
agaaaagcggcaaaggttccgtgct

SEQ ID NO: 3617765 - DNA, 25 bp, Homo sapien
cctgggctaacgcaaagaaaagcgg

SEQ ID NO: 3617766 - DNA, 25 bp, Homo sapien
ctaacgcaaagaaaagcggcaaagg

SEQ ID NO: 3617767 - DNA, 25 bp, Homo sapien
caaaggttccgtgctggtcggcagt

SEQ ID NO: 3617768 - DNA, 25 bp, Homo sapien
agaacaaacgaggagtcttgcccaa

SEQ ID NO: 3617769 - DNA, 25 bp, Homo sapien
agtccaagaacaaacgaggagtctt

SEQ ID NO: 3617770 - DNA, 25 bp, Homo sapien
caagaacaaacgaggagtcttgccc

SEQ ID NO: 3617771 - DNA, 25 bp, Homo sapien
caccaatataatgcgttcttggctc

SEQ ID NO: 3617772 - DNA, 25 bp, Homo sapien
gctccagatcttggagtcttcctga

SEQ ID NO: 3617773 - DNA, 25 bp, Homo sapien
ctccagatcttggagtcttcctgac

SEQ ID NO: 3617774 - DNA, 25 bp, Homo sapien
tctgctccagatcttggagtcttcc

SEQ ID NO: 3617775 - DNA, 25 bp, Homo sapien
tgctccagatcttggagtcttcctg

SEQ ID NO: 3617776 - DNA, 25 bp, Homo sapien
gctgccagccaagcacatgagcagc

SEQ ID NO: 3617777 - DNA, 25 bp, Homo sapien
tgctgccagccaagcacatgagcag

SEQ ID NO: 3617778 - DNA, 25 bp, Homo sapien
ctgccacgtgattctgctcctttcc

SEQ ID NO: 3617779 - DNA, 25 bp, Homo sapien
acatccggggccaaggacaccgctg

SEQ ID NO: 3617780 - DNA, 25 bp, Homo sapien
gctggaaagcgctggtgtagagggc

SEQ ID NO: 3617781 - DNA, 25 bp, Homo sapien
ccttcttggggtatgctggctggaa

SEQ ID NO: 3617782 - DNA, 25 bp, Homo sapien
aaggacaccgctgtctgcacactta

SEQ ID NO: 3617783 - DNA, 25 bp, Homo sapien
ggaaacctaatggaagctcgctgat

SEQ ID NO: 3617784 - DNA, 25 bp, Homo sapien
tctattgacactgacaggctgcggc

SEQ ID NO: 3617785 - DNA, 25 bp, Homo sapien
tagagtggaaccaccccagagtggt

SEQ ID NO: 3617786 - DNA, 25 bp, Homo sapien
tagtggactctggtgcagcgctgct

SEQ ID NO: 3617787 - DNA, 25 bp, Homo sapien
taaaagtagcgctgacccaatcatg

SEQ ID NO: 3617788 - DNA, 25 bp, Homo sapien
gatggtttgccgtgatccaataacg

SEQ ID NO: 3617789 - DNA, 25 bp, Homo sapien
gactattttgactctgtcctcagga

SEQ ID NO: 3617790 - DNA, 25 bp, Homo sapien
aatcatgtggtctgaggcgtgtacg

SEQ ID NO: 3617791 - DNA, 25 bp, Homo sapien
gactcaccaaatccctgaggataga

SEQ ID NO: 3617792 - DNA, 25 bp, Homo sapien
gagttgtttacaagccctgcactga

SEQ ID NO: 3617793 - DNA, 25 bp, Homo sapien
caggagtgagatctggactcaccaa

SEQ ID NO: 3617794 - DNA, 25 bp, Homo sapien
tgttcgcagagtaggcctttgcccg

SEQ ID NO: 3617795 - DNA, 25 bp, Homo sapien
tgtgtgcggccggttgtaaggcaga

SEQ ID NO: 3617796 - DNA, 25 bp, Homo sapien
gtgtgcggccggttgtaaggcagag

SEQ ID NO: 3617797 - DNA, 25 bp, Homo sapien
ttgtgtgcggccggttgtaaggcag

SEQ ID NO: 3617798 - DNA, 25 bp, Homo sapien
cttgtgtgcggccggttgtaaggca

SEQ ID NO: 3617799 - DNA, 25 bp, Homo sapien
gactggtatagagacaccgggctcc

SEQ ID NO: 3617800 - DNA, 25 bp, Homo sapien
gacaggcatagaatgggtccccagg

SEQ ID NO: 3617801 - DNA, 25 bp, Homo sapien
tcaacggagagcataggacaagccg

SEQ ID NO: 3617802 - DNA, 25 bp, Homo sapien
aatcattggctgacccaggctggcc

SEQ ID NO: 3617803 - DNA, 25 bp, Homo sapien
ttccctggaaacgaagctgccactc

SEQ ID NO: 3617804 - DNA, 25 bp, Homo sapien
tactaattacggaggctgactgggt

SEQ ID NO: 3617805 - DNA, 25 bp, Homo sapien
tataatgaaccctaagacacctgga

SEQ ID NO: 3617806 - DNA, 25 bp, Homo sapien
taaacctctcagtgaccgggctgtg

SEQ ID NO: 3617807 - DNA, 25 bp, Homo sapien
ttagtccagcaagtatgaaaagggt

SEQ ID NO: 3617808 - DNA, 25 bp, Homo sapien
aagtatcacattggtctcctgaagt

SEQ ID NO: 3617809 - DNA, 25 bp, Homo sapien
aaaacagtttttcccgcatgaccat

SEQ ID NO: 3617810 - DNA, 25 bp, Homo sapien
cacaaacttagggtcacaaaatgct

SEQ ID NO: 3617811 - DNA, 25 bp, Homo sapien
cgcgcgcttgctcgtgtttaatcca

SEQ ID NO: 3617812 - DNA, 25 bp, Homo sapien
ttactagcactagaagccaacggca

SEQ ID NO: 3617813 - DNA, 25 bp, Homo sapien
tggaatgactcttgctcagtgacct

SEQ ID NO: 3617814 - DNA, 25 bp, Homo sapien
taatgagcggtgaaagcggctgcct

SEQ ID NO: 3617815 - DNA, 25 bp, Homo sapien
tagccctagctgagagcagtcacac

SEQ ID NO: 3617816 - DNA, 25 bp, Homo sapien
tagctgagagcagtcacaccagctc

SEQ ID NO: 3617817 - DNA, 25 bp, Homo sapien
tccgagccctggatagccctagctg

SEQ ID NO: 3617818 - DNA, 25 bp, Homo sapien
ccctggatagccctagctgagagca

SEQ ID NO: 3617819 - DNA, 25 bp, Homo sapien
caaagtaggcaccttctcattatcc

SEQ ID NO: 3617820 - DNA, 25 bp, Homo sapien
taggcaccttctcattatcctcctt

SEQ ID NO: 3617821 - DNA, 25 bp, Homo sapien
aaagtaggcaccttctcattatcct

SEQ ID NO: 3617822 - DNA, 25 bp, Homo sapien
agtaggcaccttctcattatcctcc

SEQ ID NO: 3617823 - DNA, 25 bp, Homo sapien
tccttgggtatccagtagccccgca

SEQ ID NO: 3617824 - DNA, 25 bp, Homo sapien
tgaacagaagctcaacttcccctct

SEQ ID NO: 3617825 - DNA, 25 bp, Homo sapien
ccccagcaggtatccatcctcctca

SEQ ID NO: 3617826 - DNA, 25 bp, Homo sapien
tcctcagctgaacagaagctcaact

SEQ ID NO: 3617827 - DNA, 25 bp, Homo sapien
ttggagggtattttggcccatgtaa

SEQ ID NO: 3617828 - DNA, 25 bp, Homo sapien
tgtgacgcagtaatttggagggtat

SEQ ID NO: 3617829 - DNA, 25 bp, Homo sapien
tacactgtgcgggaggatgtgacgc

SEQ ID NO: 3617830 - DNA, 25 bp, Homo sapien
ccatgtaaacctgctttgaggagtc

SEQ ID NO: 3617831 - DNA, 25 bp, Homo sapien
agaggctttcttctcgtaaggaatg

SEQ ID NO: 3617832 - DNA, 25 bp, Homo sapien
gctttcttctcgtaaggaatgactg

SEQ ID NO: 3617833 - DNA, 25 bp, Homo sapien
ttcttctcgtaaggaatgactgtgt

SEQ ID NO: 3617834 - DNA, 25 bp, Homo sapien
cgtaaggaatgactgtgttcagata

SEQ ID NO: 3617835 - DNA, 25 bp, Homo sapien
atgcagggggcttgagacagaagac

SEQ ID NO: 3617836 - DNA, 25 bp, Homo sapien
ctaagacacacactgcaaatctgac

SEQ ID NO: 3617837 - DNA, 25 bp, Homo sapien
tcctctgggttgagatttagccttt

SEQ ID NO: 3617838 - DNA, 25 bp, Homo sapien
ctttctctaagacacacactgcaaa

SEQ ID NO: 3617839 - DNA, 25 bp, Homo sapien
tctagattcttcctacactacaaac

SEQ ID NO: 3617840 - DNA, 25 bp, Homo sapien
atttctctccatcccaacttctaga

SEQ ID NO: 3617841 - DNA, 25 bp, Homo sapien
ctgtttcagaacttcttacccctct

SEQ ID NO: 3617842 - DNA, 25 bp, Homo sapien
tggtcactggtacgtcactgtttca

SEQ ID NO: 3617843 - DNA, 25 bp, Homo sapien
gagccaaaggtctggcggatgccac

SEQ ID NO: 3617844 - DNA, 25 bp, Homo sapien
ggtctggcggatgccactctgcaga

SEQ ID NO: 3617845 - DNA, 25 bp, Homo sapien
agccaaaggtctggcggatgccact

SEQ ID NO: 3617846 - DNA, 25 bp, Homo sapien
aaaggtctggcggatgccactctgc

SEQ ID NO: 3617847 - DNA, 25 bp, Homo sapien
tgcttcttgctacactgtcaccaca

SEQ ID NO: 3617848 - DNA, 25 bp, Homo sapien
agggacctctcagctaccaggctgt

SEQ ID NO: 3617849 - DNA, 25 bp, Homo sapien
aggctgtcccagataacgccccagg

SEQ ID NO: 3617850 - DNA, 25 bp, Homo sapien
gagagagactcaagaagggcaaatg

SEQ ID NO: 3617851 - DNA, 25 bp, Homo sapien
tctgaacctcaataagcaccgtgat

SEQ ID NO: 3617852 - DNA, 25 bp, Homo sapien
tttcatcagttctcgctgctccttc

SEQ ID NO: 3617853 - DNA, 25 bp, Homo sapien
ttctctatccggctgctctgcaggc

SEQ ID NO: 3617854 - DNA, 25 bp, Homo sapien
tccgagaagtcacggatggcaccct

SEQ ID NO: 3617855 - DNA, 25 bp, Homo sapien
ctgcaggggaagaccgtctcccgca

SEQ ID NO: 3617856 - DNA, 25 bp, Homo sapien
tgcatccacaccagagcccgctggg

SEQ ID NO: 3617857 - DNA, 25 bp, Homo sapien
tcccgcataacacctgcatccacac

SEQ ID NO: 3617858 - DNA, 25 bp, Homo sapien
gggaagaccgtctcccgcataacac

SEQ ID NO: 3617859 - DNA, 25 bp, Homo sapien
cacaatttacgagcacgccaggaag

SEQ ID NO: 3617860 - DNA, 25 bp, Homo sapien
gaccttcacaatttacgagcacgcc

SEQ ID NO: 3617861 - DNA, 25 bp, Homo sapien
aatttacgagcacgccaggaaggcg

SEQ ID NO: 3617862 - DNA, 25 bp, Homo sapien
cttcacaatttacgagcacgccagg

SEQ ID NO: 3617863 - DNA, 25 bp, Homo sapien
ggaagattggtgactatgcatgaaa

SEQ ID NO: 3617864 - DNA, 25 bp, Homo sapien
tcctgtgtcgcagtgcatgtattca

SEQ ID NO: 3617865 - DNA, 25 bp, Homo sapien
cctagcgggttagcatacggcagtc

SEQ ID NO: 3617866 - DNA, 25 bp, Homo sapien
aacaaaaaagccgaccatctgagcc

SEQ ID NO: 3617867 - DNA, 25 bp, Homo sapien
aagtccagttcagcaccgagcagac

SEQ ID NO: 3617868 - DNA, 25 bp, Homo sapien
cctgacaagggcagtcgggaatgca

SEQ ID NO: 3617869 - DNA, 25 bp, Homo sapien
gctgaacgcgtctatctttgggacc

SEQ ID NO: 3617870 - DNA, 25 bp, Homo sapien
tgctgacttggttgggctttcccct

SEQ ID NO: 3617871 - DNA, 25 bp, Homo sapien
taacatttaaattttgctcgactac

SEQ ID NO: 3617872 - DNA, 25 bp, Homo sapien
ttaacatttaaattttgctcgacta

SEQ ID NO: 3617873 - DNA, 25 bp, Homo sapien
taagaaaggtattgctgaccaccta

SEQ ID NO: 3617874 - DNA, 25 bp, Homo sapien
tgatgccgagtaagaaaggtattgc

SEQ ID NO: 3617875 - DNA, 25 bp, Homo sapien
gtattgctgaccacctagatctgca

SEQ ID NO: 3617876 - DNA, 25 bp, Homo sapien
tgctgaccacctagatctgcaaggc

SEQ ID NO: 3617877 - DNA, 25 bp, Homo sapien
gtcagggttctattagccatgtaca

SEQ ID NO: 3617878 - DNA, 25 bp, Homo sapien
agggttctattagccatgtacaaag

SEQ ID NO: 3617879 - DNA, 25 bp, Homo sapien
gcagtcagggttctattagccatgt

SEQ ID NO: 3617880 - DNA, 25 bp, Homo sapien
cagggttctattagccatgtacaaa

SEQ ID NO: 3617881 - DNA, 25 bp, Homo sapien
cctgcaggaggaccgagtctgcctg

SEQ ID NO: 3617882 - DNA, 25 bp, Homo sapien
accgagtctgcctgggaggaagttt

SEQ ID NO: 3617883 - DNA, 25 bp, Homo sapien
aggaggaccgagtctgcctgggagg

SEQ ID NO: 3617884 - DNA, 25 bp, Homo sapien
gaggaccgagtctgcctgggaggaa

SEQ ID NO: 3617885 - DNA, 25 bp, Homo sapien
tgaagaaggtacacgagagagtgct

SEQ ID NO: 3617886 - DNA, 25 bp, Homo sapien
ctgaagaaggtacacgagagagtgc

SEQ ID NO: 3617887 - DNA, 25 bp, Homo sapien
tgctgaaagcaggtctttagatgag

SEQ ID NO: 3617888 - DNA, 25 bp, Homo sapien
atgagttttgtcccaaccttcacct

SEQ ID NO: 3617889 - DNA, 25 bp, Homo sapien
agcaggtctttagatgagttttgtc

SEQ ID NO: 3617890 - DNA, 25 bp, Homo sapien
gatgagttttgtcccaaccttcacc

SEQ ID NO: 3617891 - DNA, 25 bp, Homo sapien
caaaaggtcccgataacctggagag

SEQ ID NO: 3617892 - DNA, 25 bp, Homo sapien
tctgagtcatgagcacaggcaccac

SEQ ID NO: 3617893 - DNA, 25 bp, Homo sapien
ccgataacctggagagatacttata

SEQ ID NO: 3617894 - DNA, 25 bp, Homo sapien
aaatggatgtggcaagtgtgttctc

SEQ ID NO: 3617895 - DNA, 25 bp, Homo sapien
cagaggctcctcgttgataccggaa

SEQ ID NO: 3617896 - DNA, 25 bp, Homo sapien
ggctcctcgttgataccggaatcat

SEQ ID NO: 3617897 - DNA, 25 bp, Homo sapien
tcctcgttgataccggaatcatttt

SEQ ID NO: 3617898 - DNA, 25 bp, Homo sapien
tcgttgataccggaatcattttcac

SEQ ID NO: 3617899 - DNA, 25 bp, Homo sapien
aatggatgatactgactgggaggcc

SEQ ID NO: 3617900 - DNA, 25 bp, Homo sapien
agtctcgagaatggatgatactgac

SEQ ID NO: 3617901 - DNA, 25 bp, Homo sapien
agaagtgggattgcctctagtctcg

SEQ ID NO: 3617902 - DNA, 25 bp, Homo sapien
ggattgcctctagtctcgagaatgg

SEQ ID NO: 3617903 - DNA, 25 bp, Homo sapien
atccagcatgcagcactgaatccaa

SEQ ID NO: 3617904 - DNA, 25 bp, Homo sapien
tgcgatagcctcgtggtttccaccg

SEQ ID NO: 3617905 - DNA, 25 bp, Homo sapien
cacaactacactcatatggaagaac

SEQ ID NO: 3617906 - DNA, 25 bp, Homo sapien
accgctccccactatgcagaacaaa

SEQ ID NO: 3617907 - DNA, 25 bp, Homo sapien
cctggagctacgctttgttcacaac

SEQ ID NO: 3617908 - DNA, 25 bp, Homo sapien
gacagtatcttgtgcacagggtgga

SEQ ID NO: 3617909 - DNA, 25 bp, Homo sapien
cccttgcctctttacgggcactgtt

SEQ ID NO: 3617910 - DNA, 25 bp, Homo sapien
tttgctctgttccaacagcatccat

SEQ ID NO: 3617911 - DNA, 25 bp, Homo sapien
tacgggcactgtttacagactcctt

SEQ ID NO: 3617912 - DNA, 25 bp, Homo sapien
gccataaagcctcacttttaaatat

SEQ ID NO: 3617913 - DNA, 25 bp, Homo sapien
actccatcccctggctacctttttg

SEQ ID NO: 3617914 - DNA, 25 bp, Homo sapien
ctccatcccctggctacctttttgt

SEQ ID NO: 3617915 - DNA, 25 bp, Homo sapien
cataaagcctcacttttaaatatga

SEQ ID NO: 3617916 - DNA, 25 bp, Homo sapien
ctgatttaatttcagtaactagatt

SEQ ID NO: 3617917 - DNA, 25 bp, Homo sapien
tgcggtttgggtaagtactaagcat

SEQ ID NO: 3617918 - DNA, 25 bp, Homo sapien
tttattccattattgcctccatctt

SEQ ID NO: 3617919 - DNA, 25 bp, Homo sapien
tccatcttctttgcggtttgggtaa

SEQ ID NO: 3617920 - DNA, 25 bp, Homo sapien
tcaagccctgctaaaccaggggccc

SEQ ID NO: 3617921 - DNA, 25 bp, Homo sapien
attgtctgtcagagcatcccaaacc

SEQ ID NO: 3617922 - DNA, 25 bp, Homo sapien
gagtgaagggatgtaattgtctgtc

SEQ ID NO: 3617923 - DNA, 25 bp, Homo sapien
gatgtaattgtctgtcagagcatcc

SEQ ID NO: 3617924 - DNA, 25 bp, Homo sapien
tctgagagtgaagggatgtaattgt

SEQ ID NO: 3617925 - DNA, 25 bp, Homo sapien
aacccacgggttgcaagatcctgcc

SEQ ID NO: 3617926 - DNA, 25 bp, Homo sapien
ccctctaacaatgtagaatctaaat

SEQ ID NO: 3617927 - DNA, 25 bp, Homo sapien
ggttgcaagatcctgccctctaaca

SEQ ID NO: 3617928 - DNA, 25 bp, Homo sapien
ttctatcgaacccacgggttgcaag

SEQ ID NO: 3617929 - DNA, 25 bp, Homo sapien
gggtgcatggccactttctatgtag

SEQ ID NO: 3617930 - DNA, 25 bp, Homo sapien
ccagggaagggcacaaggaaggcac

SEQ ID NO: 3617931 - DNA, 25 bp, Homo sapien
gcaggggtgcatggccactttctat

SEQ ID NO: 3617932 - DNA, 25 bp, Homo sapien
tctatgtagatctccagcccaggga

SEQ ID NO: 3617933 - DNA, 25 bp, Homo sapien
gatagggatccccagtgacgtagga

SEQ ID NO: 3617934 - DNA, 25 bp, Homo sapien
gacaggcagtttattgtgtgcactt

SEQ ID NO: 3617935 - DNA, 25 bp, Homo sapien
cctctgtcttcagggtactcgtaag

SEQ ID NO: 3617936 - DNA, 25 bp, Homo sapien
gccattgcatggttagcccctctgt

SEQ ID NO: 3617937 - DNA, 25 bp, Homo sapien
tgacccctaagaggctgtgacctcc

SEQ ID NO: 3617938 - DNA, 25 bp, Homo sapien
tgtagtgacccctaagaggctgtga

SEQ ID NO: 3617939 - DNA, 25 bp, Homo sapien
tttgtagtgacccctaagaggctgt

SEQ ID NO: 3617940 - DNA, 25 bp, Homo sapien
tagtgacccctaagaggctgtgacc

SEQ ID NO: 3617941 - DNA, 25 bp, Homo sapien
tacagtagtcatcaaataagcaacc

SEQ ID NO: 3617942 - DNA, 25 bp, Homo sapien
gacgtgcctcttaccccattatttg

SEQ ID NO: 3617943 - DNA, 25 bp, Homo sapien
tttgcacattgcactgtattagaca

SEQ ID NO: 3617944 - DNA, 25 bp, Homo sapien
tgaatcagacagatatttggcccct

SEQ ID NO: 3617945 - DNA, 25 bp, Homo sapien
tttgtccagggtagcccgctgtgct

SEQ ID NO: 3617946 - DNA, 25 bp, Homo sapien
cattagggtttggtactagcagcgg

SEQ ID NO: 3617947 - DNA, 25 bp, Homo sapien
cgagcaagtgatacaaggaatctgc

SEQ ID NO: 3617948 - DNA, 25 bp, Homo sapien
gaccctagaaagtagcgagcaagtg

SEQ ID NO: 3617949 - DNA, 25 bp, Homo sapien
cctcaggggactgtaaagggacata

SEQ ID NO: 3617950 - DNA, 25 bp, Homo sapien
gaaagcttaagatagacagaccctg

SEQ ID NO: 3617951 - DNA, 25 bp, Homo sapien
cctttatttctaatatctcgctgga

SEQ ID NO: 3617952 - DNA, 25 bp, Homo sapien
ccttcattcctctaaggtttcaatt

SEQ ID NO: 3617953 - DNA, 25 bp, Homo sapien
gctggcaacacgaaaatgaaagtaa

SEQ ID NO: 3617954 - DNA, 25 bp, Homo sapien
ggcactgctccgctggcaacacgaa

SEQ ID NO: 3617955 - DNA, 25 bp, Homo sapien
tccgctggcaacacgaaaatgaaag

SEQ ID NO: 3617956 - DNA, 25 bp, Homo sapien
ctgctccgctggcaacacgaaaatg

SEQ ID NO: 3617957 - DNA, 25 bp, Homo sapien
tcaaggagacaaggactacagggct

SEQ ID NO: 3617958 - DNA, 25 bp, Homo sapien
tacagggctctcgactgaagcagga

SEQ ID NO: 3617959 - DNA, 25 bp, Homo sapien
aaaccagcactatgtcaaggagaca

SEQ ID NO: 3617960 - DNA, 25 bp, Homo sapien
tatagacagaaaccagcactatgtc

SEQ ID NO: 3617961 - DNA, 25 bp, Homo sapien
tcctcctcctcttggatctgtaact

SEQ ID NO: 3617962 - DNA, 25 bp, Homo sapien
tcctcgtcctgaagggtctcctcct

SEQ ID NO: 3617963 - DNA, 25 bp, Homo sapien
ctcctcctcttggatctgtaactgg

SEQ ID NO: 3617964 - DNA, 25 bp, Homo sapien
ctcgtcctgaagggtctcctcctcc

SEQ ID NO: 3617965 - DNA, 25 bp, Homo sapien
gtagttccgaaagcagacattgagc

SEQ ID NO: 3617966 - DNA, 25 bp, Homo sapien
gaaaaattctcaagctcggagaggg

SEQ ID NO: 3617967 - DNA, 25 bp, Homo sapien
catttacgaggtcctccatggactt

SEQ ID NO: 3617968 - DNA, 25 bp, Homo sapien
gagctaggttctcggtcttggcgtt

SEQ ID NO: 3617969 - DNA, 25 bp, Homo sapien
ctcagcaggagaacaacagcgactt

SEQ ID NO: 3617970 - DNA, 25 bp, Homo sapien
gagaacaacagcgactttcaggatg

SEQ ID NO: 3617971 - DNA, 25 bp, Homo sapien
gcaggagaacaacagcgactttcag

SEQ ID NO: 3617972 - DNA, 25 bp, Homo sapien
cagcaggagaacaacagcgactttc

SEQ ID NO: 3617973 - DNA, 25 bp, Homo sapien
aactaatgaggcagtttttattctt

SEQ ID NO: 3617974 - DNA, 25 bp, Homo sapien
ttcagtacatagacccctgcaggct

SEQ ID NO: 3617975 - DNA, 25 bp, Homo sapien
aaatgtggcctgtggctaccgcaag

SEQ ID NO: 3617976 - DNA, 25 bp, Homo sapien
aaacacaagtaattgccagtcaggg

SEQ ID NO: 3617977 - DNA, 25 bp, Homo sapien
cttttctctgggaatgacaggggag

SEQ ID NO: 3617978 - DNA, 25 bp, Homo sapien
gtgttgcaggtatttacactgcctt

SEQ ID NO: 3617979 - DNA, 25 bp, Homo sapien
ggggtttctgatttgaaatgacaca

SEQ ID NO: 3617980 - DNA, 25 bp, Homo sapien
gcaggtatttacactgcctttaaat

SEQ ID NO: 3617981 - DNA, 25 bp, Homo sapien
gcccggacacgggagagggatgaga

SEQ ID NO: 3617982 - DNA, 25 bp, Homo sapien
gtgcaggccgcatacacactccact

SEQ ID NO: 3617983 - DNA, 25 bp, Homo sapien
ctgcccttccggccaaacaagcccg

SEQ ID NO: 3617984 - DNA, 25 bp, Homo sapien
ctgaggaagccggactcatcccgtg

SEQ ID NO: 3617985 - DNA, 25 bp, Homo sapien
gccgtcaaacactgctccccgcatt

SEQ ID NO: 3617986 - DNA, 25 bp, Homo sapien
ctcctcgacgccgtcaaacactgct

SEQ ID NO: 3617987 - DNA, 25 bp, Homo sapien
gggcccacccgacggcagcgcgccc

SEQ ID NO: 3617988 - DNA, 25 bp, Homo sapien
tccccgcattccagagcccggggcc

SEQ ID NO: 3617989 - DNA, 25 bp, Homo sapien
tgtgcgggtcctggcggagggaggc

SEQ ID NO: 3617990 - DNA, 25 bp, Homo sapien
gccagcgagcgctccccgcgcagct

SEQ ID NO: 3617991 - DNA, 25 bp, Homo sapien
gggctcagccggacacccccatcca

SEQ ID NO: 3617992 - DNA, 25 bp, Homo sapien
gccagccagcgagcgctccccgcgc

SEQ ID NO: 3617993 - DNA, 25 bp, Homo sapien
gcaaagcctgacactagtttctgga

SEQ ID NO: 3617994 - DNA, 25 bp, Homo sapien
ctgctggcggatgccggcagacaca

SEQ ID NO: 3617995 - DNA, 25 bp, Homo sapien
taaaatgcaggcgatggctgctggc

SEQ ID NO: 3617996 - DNA, 25 bp, Homo sapien
ggcagacacactcaaagaccctttt

SEQ ID NO: 3617997 - DNA, 25 bp, Homo sapien
ctattttctgctatccccaggatgc

SEQ ID NO: 3617998 - DNA, 25 bp, Homo sapien
tctattttctgctatccccaggatg

SEQ ID NO: 3617999 - DNA, 25 bp, Homo sapien
ccaggatgccctggtaatcagagtt

SEQ ID NO: 3618000 - DNA, 25 bp, Homo sapien
cccaggatgccctggtaatcagagt

SEQ ID NO: 3618001 - DNA, 25 bp, Homo sapien
gttctttgggtataatgcttggaca

SEQ ID NO: 3618002 - DNA, 25 bp, Homo sapien
ggcatctatgatcaaagtcagctga

SEQ ID NO: 3618003 - DNA, 25 bp, Homo sapien
aaaagccgttggatagagaatgaac

SEQ ID NO: 3618004 - DNA, 25 bp, Homo sapien
aagtcagctgattttgtagattggc

SEQ ID NO: 3618005 - DNA, 25 bp, Homo sapien
tttaaagagacagacgggtcggctg

SEQ ID NO: 3618006 - DNA, 25 bp, Homo sapien
agagacagacgggtcggctgggcgc

SEQ ID NO: 3618007 - DNA, 25 bp, Homo sapien
agacagacgggtcggctgggcgcag

SEQ ID NO: 3618008 - DNA, 25 bp, Homo sapien
taaagagacagacgggtcggctggg

SEQ ID NO: 3618009 - DNA, 25 bp, Homo sapien
tgaatggtgctaggtttccgaggct

SEQ ID NO: 3618010 - DNA, 25 bp, Homo sapien
tggaaatgctactgctaagcagact

SEQ ID NO: 3618011 - DNA, 25 bp, Homo sapien
cctgcactcggccttttagaaactt

SEQ ID NO: 3618012 - DNA, 25 bp, Homo sapien
ctcatagtcaggcttttggcaaaca

SEQ ID NO: 3618013 - DNA, 25 bp, Homo sapien
tggatttttaacatcaccgtgagtc

SEQ ID NO: 3618014 - DNA, 25 bp, Homo sapien
tgaaggctactgcaggtcactgagt

SEQ ID NO: 3618015 - DNA, 25 bp, Homo sapien
actgagttgcctgccatccaaaggg

SEQ ID NO: 3618016 - DNA, 25 bp, Homo sapien
caagacagtctacctgcagtcggcc

SEQ ID NO: 3618017 - DNA, 25 bp, Homo sapien
cgcgaccggccttaatattcttagg

SEQ ID NO: 3618018 - DNA, 25 bp, Homo sapien
gaacacaatctttctaattttaatg

SEQ ID NO: 3618019 - DNA, 25 bp, Homo sapien
acaaaagaaacttgaacacaatctt

SEQ ID NO: 3618020 - DNA, 25 bp, Homo sapien
caccgcgaccggccttaatattctt

SEQ ID NO: 3618021 - DNA, 25 bp, Homo sapien
caaaagctatgctaggctgccagaa

SEQ ID NO: 3618022 - DNA, 25 bp, Homo sapien
acataaatgtcacgtccagctctga

SEQ ID NO: 3618023 - DNA, 25 bp, Homo sapien
tgcagcacctagtacaattccttgg

SEQ ID NO: 3618024 - DNA, 25 bp, Homo sapien
aattccttggaaacagcgtggctca

SEQ ID NO: 3618025 - DNA, 25 bp, Homo sapien
gagaatgtaatggagatgatcctgc

SEQ ID NO: 3618026 - DNA, 25 bp, Homo sapien
taatggagatgatcctgcctatccc

SEQ ID NO: 3618027 - DNA, 25 bp, Homo sapien
cccggccagtgctggagaatgtaat

SEQ ID NO: 3618028 - DNA, 25 bp, Homo sapien
tgatcctgcctatccctgagttcca

SEQ ID NO: 3618029 - DNA, 25 bp, Homo sapien
taagctaagcagatggtcttcctgc

SEQ ID NO: 3618030 - DNA, 25 bp, Homo sapien
taaactgctcgctttctccgggaaa

SEQ ID NO: 3618031 - DNA, 25 bp, Homo sapien
gactgcgtggccagttctttcgaag

SEQ ID NO: 3618032 - DNA, 25 bp, Homo sapien
tgcggtccgccgtccttaaatctct

SEQ ID NO: 3618033 - DNA, 25 bp, Homo sapien
gttttccagcttttatacacacgta

SEQ ID NO: 3618034 - DNA, 25 bp, Homo sapien
catgtgtgtttagtatctgaatttg

SEQ ID NO: 3618035 - DNA, 25 bp, Homo sapien
tttcaggggacatgagttttccagc

SEQ ID NO: 3618036 - DNA, 25 bp, Homo sapien
tcatctggtggaaaccaagtttcag

SEQ ID NO: 3618037 - DNA, 25 bp, Homo sapien
tgtaagagttaatactgagacatcc

SEQ ID NO: 3618038 - DNA, 25 bp, Homo sapien
cgaggatattggcattgataaggtc

SEQ ID NO: 3618039 - DNA, 25 bp, Homo sapien
gaattcctcatgatacccttttata

SEQ ID NO: 3618040 - DNA, 25 bp, Homo sapien
gagggttactctagctattacaata

SEQ ID NO: 3618041 - DNA, 25 bp, Homo sapien
tgtggaatctgcctatagctctctg

SEQ ID NO: 3618042 - DNA, 25 bp, Homo sapien
gaagtacctgcacgtttacaccctg

SEQ ID NO: 3618043 - DNA, 25 bp, Homo sapien
ctttcattgtggtggaaacagctca

SEQ ID NO: 3618044 - DNA, 25 bp, Homo sapien
tgtggaaggaagctcatgttgaccc

SEQ ID NO: 3618045 - DNA, 25 bp, Homo sapien
gagcatcctaatgctcaggcagagg

SEQ ID NO: 3618046 - DNA, 25 bp, Homo sapien
tgagtcaaaacaagcaagggcccag

SEQ ID NO: 3618047 - DNA, 25 bp, Homo sapien
gaaagataggatgtttgagcatcct

SEQ ID NO: 3618048 - DNA, 25 bp, Homo sapien
tagagtgatggaggctttttactgc

SEQ ID NO: 3618049 - DNA, 25 bp, Homo sapien
tgaaccatgaattggagttttccac

SEQ ID NO: 3618050 - DNA, 25 bp, Homo sapien
ttgcatcctcgttccatgggagaag

SEQ ID NO: 3618051 - DNA, 25 bp, Homo sapien
catataatttgcatcctcgttccat

SEQ ID NO: 3618052 - DNA, 25 bp, Homo sapien
tgcagaaagattgatttcgacagca

SEQ ID NO: 3618053 - DNA, 25 bp, Homo sapien
agtgatggtggatgaatgtctgcat

SEQ ID NO: 3618054 - DNA, 25 bp, Homo sapien
gaatgtctgcatgtagaaataggaa

SEQ ID NO: 3618055 - DNA, 25 bp, Homo sapien
tcattaatgttttccgagtgatggt

SEQ ID NO: 3618056 - DNA, 25 bp, Homo sapien
cacagtttatatttgagtcatcttt

SEQ ID NO: 3618057 - DNA, 25 bp, Homo sapien
tataagcacatgtgtagcaatttaa

SEQ ID NO: 3618058 - DNA, 25 bp, Homo sapien
caggttccctctccacgaagacatt

SEQ ID NO: 3618059 - DNA, 25 bp, Homo sapien
catgtgtagcaatttaatattgtgc

SEQ ID NO: 3618060 - DNA, 25 bp, Homo sapien
taacatgcactgctgggaattctga

SEQ ID NO: 3618061 - DNA, 25 bp, Homo sapien
ctgtagatgtgcttgaaattggtgc

SEQ ID NO: 3618062 - DNA, 25 bp, Homo sapien
gcctgttcccctgaagcgtgctcac

SEQ ID NO: 3618063 - DNA, 25 bp, Homo sapien
aattggtgcacctgaagcctgttcc

SEQ ID NO: 3618064 - DNA, 25 bp, Homo sapien
tgcttgaaattggtgcacctgaagc

SEQ ID NO: 3618065 - DNA, 25 bp, Homo sapien
ctgaaggctgttcacccgaggcctg

SEQ ID NO: 3618066 - DNA, 25 bp, Homo sapien
accggagccatgttcacctgaaggc

SEQ ID NO: 3618067 - DNA, 25 bp, Homo sapien
cagaaggctgttcaccggagccatg

SEQ ID NO: 3618068 - DNA, 25 bp, Homo sapien
gttcaccggagccatgttcacctga

SEQ ID NO: 3618069 - DNA, 25 bp, Homo sapien
gctgttcaccggagccatgttcacc

SEQ ID NO: 3618070 - DNA, 25 bp, Homo sapien
aggctgttctccggagaggtgttca

SEQ ID NO: 3618071 - DNA, 25 bp, Homo sapien
ggctgttctccggagaggtgttcac

SEQ ID NO: 3618072 - DNA, 25 bp, Homo sapien
aaggctgttctccggagaggtgttc

SEQ ID NO: 3618073 - DNA, 25 bp, Homo sapien
aaaggctgttctccggagaggtgtt

SEQ ID NO: 3618074 - DNA, 25 bp, Homo sapien
aaggctgttctcctgaaggctgctc

SEQ ID NO: 3618075 - DNA, 25 bp, Homo sapien
ggctgttctcctgaaggctgctcac

SEQ ID NO: 3618076 - DNA, 25 bp, Homo sapien
ctgaaggctgttctcctgaaggctg

SEQ ID NO: 3618077 - DNA, 25 bp, Homo sapien
tgaaggctgttctcctgaaggctgc

SEQ ID NO: 3618078 - DNA, 25 bp, Homo sapien
cagcatgttcagtcgcagcgggctc

SEQ ID NO: 3618079 - DNA, 25 bp, Homo sapien
gcatgttcagtcgcagcgggctcac

SEQ ID NO: 3618080 - DNA, 25 bp, Homo sapien
agcatgttcagtcgcagcgggctca

SEQ ID NO: 3618081 - DNA, 25 bp, Homo sapien
gcttgcttgaaccatgctcactgga

SEQ ID NO: 3618082 - DNA, 25 bp, Homo sapien
cacttaaagtgttcaggcctgaaga

SEQ ID NO: 3618083 - DNA, 25 bp, Homo sapien
tccagaagtgtgctcggccacagtg

SEQ ID NO: 3618084 - DNA, 25 bp, Homo sapien
gaagaagtctcatataaagcctcag

SEQ ID NO: 3618085 - DNA, 25 bp, Homo sapien
agctcattaggctgacttgatgttc

SEQ ID NO: 3618086 - DNA, 25 bp, Homo sapien
tgatgatctatggagccagaaagct

SEQ ID NO: 3618087 - DNA, 25 bp, Homo sapien
tgaactgaagtttgatgatctatgg

SEQ ID NO: 3618088 - DNA, 25 bp, Homo sapien
ccagaaagctcattaggctgacttg

SEQ ID NO: 3618089 - DNA, 25 bp, Homo sapien
cctgagtacttaataagataaattg

SEQ ID NO: 3618090 - DNA, 25 bp, Homo sapien
ttgtcctgagtacttaataagataa

SEQ ID NO: 3618091 - DNA, 25 bp, Homo sapien
ctgagtacttaataagataaattgt

SEQ ID NO: 3618092 - DNA, 25 bp, Homo sapien
tgtcctgagtacttaataagataaa

SEQ ID NO: 3618093 - DNA, 25 bp, Homo sapien
gactcgtgtcaccatgtgactggca

SEQ ID NO: 3618094 - DNA, 25 bp, Homo sapien
gaagtctctggcctatagctctgtc

SEQ ID NO: 3618095 - DNA, 25 bp, Homo sapien
gggaacacagcacaccatgaatggg

SEQ ID NO: 3618096 - DNA, 25 bp, Homo sapien
tgactggcacatactatcacctggt

SEQ ID NO: 3618097 - DNA, 25 bp, Homo sapien
agataaagactcattagcaagagaa

SEQ ID NO: 3618098 - DNA, 25 bp, Homo sapien
cagataaagactcattagcaagaga

SEQ ID NO: 3618099 - DNA, 25 bp, Homo sapien
actcattagcaagagaaacctgttc

SEQ ID NO: 3618100 - DNA, 25 bp, Homo sapien
tcattagcaagagaaacctgttcat

SEQ ID NO: 3618101 - DNA, 25 bp, Homo sapien
tgtagcctgttcaggcaagttggcc

SEQ ID NO: 3618102 - DNA, 25 bp, Homo sapien
tcttcacaatgggttgggctctgag

SEQ ID NO: 3618103 - DNA, 25 bp, Homo sapien
cagagctatgaagcaaactgcgagc

SEQ ID NO: 3618104 - DNA, 25 bp, Homo sapien
tctagaacctcagaagtaacccatg

SEQ ID NO: 3618105 - DNA, 25 bp, Homo sapien
tcaggagggcaccactgtgtgagcc

SEQ ID NO: 3618106 - DNA, 25 bp, Homo sapien
caggagggcaccactgtgtgagcca

SEQ ID NO: 3618107 - DNA, 25 bp, Homo sapien
ttcaggagggcaccactgtgtgagc

SEQ ID NO: 3618108 - DNA, 25 bp, Homo sapien
cgggcattggcaagacatggtgtct

SEQ ID NO: 3618109 - DNA, 25 bp, Homo sapien
tcactatcataaagctggtacctgg

SEQ ID NO: 3618110 - DNA, 25 bp, Homo sapien
tccacgcatgctagacgggcattgg

SEQ ID NO: 3618111 - DNA, 25 bp, Homo sapien
tggtacctggatgtagaatgctgct

SEQ ID NO: 3618112 - DNA, 25 bp, Homo sapien
cattccattagcctctcgcagttta

SEQ ID NO: 3618113 - DNA, 25 bp, Homo sapien
taaccacctgaaattcggagaaatc

SEQ ID NO: 3618114 - DNA, 25 bp, Homo sapien
tagcctctcgcagtttatatagcag

SEQ ID NO: 3618115 - DNA, 25 bp, Homo sapien
aaatctggacaagcttcagagagga

SEQ ID NO: 3618116 - DNA, 25 bp, Homo sapien
tggtgaagcctacacgggcaccaga

SEQ ID NO: 3618117 - DNA, 25 bp, Homo sapien
catgaactatcccttcctggaggct

SEQ ID NO: 3618118 - DNA, 25 bp, Homo sapien
ggtccattctgcatgaactatccct

SEQ ID NO: 3618119 - DNA, 25 bp, Homo sapien
agcctacacgggcaccagaaggcct

SEQ ID NO: 3618120 - DNA, 25 bp, Homo sapien
gaaagagcaaccgttttgtctcgcg

SEQ ID NO: 3618121 - DNA, 25 bp, Homo sapien
aacagaaagagcaaccgttttgtct

SEQ ID NO: 3618122 - DNA, 25 bp, Homo sapien
aagagcaaccgttttgtctcgcgcg

SEQ ID NO: 3618123 - DNA, 25 bp, Homo sapien
gagcaaccgttttgtctcgcgcgca

SEQ ID NO: 3618124 - DNA, 25 bp, Homo sapien
aggagcgagtgccatcttcccagac

SEQ ID NO: 3618125 - DNA, 25 bp, Homo sapien
ggagcgagtgccatcttcccagacc

SEQ ID NO: 3618126 - DNA, 25 bp, Homo sapien
gagcgagtgccatcttcccagacca

SEQ ID NO: 3618127 - DNA, 25 bp, Homo sapien
agcgagtgccatcttcccagaccat

SEQ ID NO: 3618128 - DNA, 25 bp, Homo sapien
tgacgttctgaaaggtttcactgcc

SEQ ID NO: 3618129 - DNA, 25 bp, Homo sapien
agtggtgattacatccaagaacaca

SEQ ID NO: 3618130 - DNA, 25 bp, Homo sapien
ggacgaggccgaattccatggaaga

SEQ ID NO: 3618131 - DNA, 25 bp, Homo sapien
caggcatgagcgctgcactgcagct

SEQ ID NO: 3618132 - DNA, 25 bp, Homo sapien
tcatcgcccaggaggaagagcagag

SEQ ID NO: 3618133 - DNA, 25 bp, Homo sapien
tcgcccaggaggaagagcagagcca

SEQ ID NO: 3618134 - DNA, 25 bp, Homo sapien
atcgcccaggaggaagagcagagcc

SEQ ID NO: 3618135 - DNA, 25 bp, Homo sapien
cccaggaggaagagcagagccacac

SEQ ID NO: 3618136 - DNA, 25 bp, Homo sapien
gaagcaggctgccactgaaaggcca

SEQ ID NO: 3618137 - DNA, 25 bp, Homo sapien
gactcccactgcaggagtgttacag

SEQ ID NO: 3618138 - DNA, 25 bp, Homo sapien
aggagtgttacagccccgttgcact

SEQ ID NO: 3618139 - DNA, 25 bp, Homo sapien
gagtgttacagccccgttgcacttt

SEQ ID NO: 3618140 - DNA, 25 bp, Homo sapien
caggagtgttacagccccgttgcac

SEQ ID NO: 3618141 - DNA, 25 bp, Homo sapien
gagatggacaagttcccgctcatgc

SEQ ID NO: 3618142 - DNA, 25 bp, Homo sapien
ggcgaagatagctggcgagcaggct

SEQ ID NO: 3618143 - DNA, 25 bp, Homo sapien
cttccaaggtgtgagtgagggtttg

SEQ ID NO: 3618144 - DNA, 25 bp, Homo sapien
gaacaggggcgaagatagctggcga

SEQ ID NO: 3618145 - DNA, 25 bp, Homo sapien
tggagtgccctccaagtatccctcc

SEQ ID NO: 3618146 - DNA, 25 bp, Homo sapien
cttcacctctttctgtgccagtatc

SEQ ID NO: 3618147 - DNA, 25 bp, Homo sapien
gtgccagtatctctggtgtgctccc

SEQ ID NO: 3618148 - DNA, 25 bp, Homo sapien
cacttctctccaggctactggctcc

SEQ ID NO: 3618149 - DNA, 25 bp, Homo sapien
ctccaaaagattgttgagtggtggt

SEQ ID NO: 3618150 - DNA, 25 bp, Homo sapien
ctagcgaccacccaaatacaaaggc

SEQ ID NO: 3618151 - DNA, 25 bp, Homo sapien
ggagccagcattcagcggcatcact

SEQ ID NO: 3618152 - DNA, 25 bp, Homo sapien
tccaaaagattgttgagtggtggtc

SEQ ID NO: 3618153 - DNA, 25 bp, Homo sapien
ggtgaacacagcttgactctgcggt

SEQ ID NO: 3618154 - DNA, 25 bp, Homo sapien
cttggatttccctgtttgtactgga

SEQ ID NO: 3618155 - DNA, 25 bp, Homo sapien
tctggtgaacacagcttgactctgc

SEQ ID NO: 3618156 - DNA, 25 bp, Homo sapien
ttgtactggagtctctggtgaacac

SEQ ID NO: 3618157 - DNA, 25 bp, Homo sapien
tcatggtaagtgtattctgtgatca

SEQ ID NO: 3618158 - DNA, 25 bp, Homo sapien
tggtaagtgtattctgtgatcaggg

SEQ ID NO: 3618159 - DNA, 25 bp, Homo sapien
gggcttctggtggagtattgtggaa

SEQ ID NO: 3618160 - DNA, 25 bp, Homo sapien
tctggtggagtattgtggaagtttt

SEQ ID NO: 3618161 - DNA, 25 bp, Homo sapien
tgcttgagagcaggaacttgatgtt

SEQ ID NO: 3618162 - DNA, 25 bp, Homo sapien
ctgctgcttgagagcaggaacttga

SEQ ID NO: 3618163 - DNA, 25 bp, Homo sapien
agagcaggaacttgatgttgctcac

SEQ ID NO: 3618164 - DNA, 25 bp, Homo sapien
ttgagagcaggaacttgatgttgct

SEQ ID NO: 3618165 - DNA, 25 bp, Homo sapien
caccctacaccggtactctttactg

SEQ ID NO: 3618166 - DNA, 25 bp, Homo sapien
ccctacaccggtactctttactgct

SEQ ID NO: 3618167 - DNA, 25 bp, Homo sapien
cctacaccggtactctttactgctg

SEQ ID NO: 3618168 - DNA, 25 bp, Homo sapien
ctacaccggtactctttactgctga

SEQ ID NO: 3618169 - DNA, 25 bp, Homo sapien
tctgggcaccagaaattagtgacat

SEQ ID NO: 3618170 - DNA, 25 bp, Homo sapien
gcttgaccaactgcctttgaactca

SEQ ID NO: 3618171 - DNA, 25 bp, Homo sapien
ttctcagaagtccaagtctgaggct

SEQ ID NO: 3618172 - DNA, 25 bp, Homo sapien
ctgaggcttgaccaactgcctttga

SEQ ID NO: 3618173 - DNA, 25 bp, Homo sapien
agatattcctctaagggtgaaaggg

SEQ ID NO: 3618174 - DNA, 25 bp, Homo sapien
tgacagtgtgcatagctgtgtaacc

SEQ ID NO: 3618175 - DNA, 25 bp, Homo sapien
ccttgtaatatcctcaaactagaaa

SEQ ID NO: 3618176 - DNA, 25 bp, Homo sapien
tataatgcttttaccctagaggaaa

SEQ ID NO: 3618177 - DNA, 25 bp, Homo sapien
ttatcaggtggagattttgataacc

SEQ ID NO: 3618178 - DNA, 25 bp, Homo sapien
aatccattatcaggtggagattttg

SEQ ID NO: 3618179 - DNA, 25 bp, Homo sapien
ccattatcaggtggagattttgata

SEQ ID NO: 3618180 - DNA, 25 bp, Homo sapien
aaatccattatcaggtggagatttt

SEQ ID NO: 3618181 - DNA, 25 bp, Homo sapien
ccttgggagtgacgagcatagggat

SEQ ID NO: 3618182 - DNA, 25 bp, Homo sapien
caaacagcagttctcgagcagtttc

SEQ ID NO: 3618183 - DNA, 25 bp, Homo sapien
ccccaaacagcagttctcgagcagt

SEQ ID NO: 3618184 - DNA, 25 bp, Homo sapien
acagcagttctcgagcagtttccat

SEQ ID NO: 3618185 - DNA, 25 bp, Homo sapien
ttcagcagatctctcacttgccctt

SEQ ID NO: 3618186 - DNA, 25 bp, Homo sapien
cttcagcagatctctcacttgccct

SEQ ID NO: 3618187 - DNA, 25 bp, Homo sapien
tgtgctgaggaagcgctcatgagac

SEQ ID NO: 3618188 - DNA, 25 bp, Homo sapien
tttaggttaagatagagggttgtga

SEQ ID NO: 3618189 - DNA, 25 bp, Homo sapien
ttgtttcctgggtctgcaaagaacg

SEQ ID NO: 3618190 - DNA, 25 bp, Homo sapien
tcatgagacttcagagggagtaggt

SEQ ID NO: 3618191 - DNA, 25 bp, Homo sapien
gacaaatgtgtagactagcaatgga

SEQ ID NO: 3618192 - DNA, 25 bp, Homo sapien
ggaaaggagacagctaggctcgacc

SEQ ID NO: 3618193 - DNA, 25 bp, Homo sapien
taggctcgaccatgcttgcttgtgt

SEQ ID NO: 3618194 - DNA, 25 bp, Homo sapien
cacatggcctttcgcactacagcag

SEQ ID NO: 3618195 - DNA, 25 bp, Homo sapien
gtcattcaaattgatccagtttggg

SEQ ID NO: 3618196 - DNA, 25 bp, Homo sapien
cagatttacaggctcatcttctctt

SEQ ID NO: 3618197 - DNA, 25 bp, Homo sapien
tattgttatttgacagagcaaggaa

SEQ ID NO: 3618198 - DNA, 25 bp, Homo sapien
tatgcattcatcttgtattcatggt

SEQ ID NO: 3618199 - DNA, 25 bp, Homo sapien
tggaatcctctgacttcctaaatga

SEQ ID NO: 3618200 - DNA, 25 bp, Homo sapien
ccccattcatttgcttaggagttca

SEQ ID NO: 3618201 - DNA, 25 bp, Homo sapien
cagtgtacctgtagagcagtatcag

SEQ ID NO: 3618202 - DNA, 25 bp, Homo sapien
taagcttacaggctccactcattta

SEQ ID NO: 3618203 - DNA, 25 bp, Homo sapien
cagattttttggccaatttttctgg

SEQ ID NO: 3618204 - DNA, 25 bp, Homo sapien
tatcacgtaaggagagcaaaacccc

SEQ ID NO: 3618205 - DNA, 25 bp, Homo sapien
tcccatgagaagaacctgactagcc

SEQ ID NO: 3618206 - DNA, 25 bp, Homo sapien
ccgtcatctagggtgcagtcagcct

SEQ ID NO: 3618207 - DNA, 25 bp, Homo sapien
tagttcaaccatgtgcccaaggctg

SEQ ID NO: 3618208 - DNA, 25 bp, Homo sapien
aggttgcagtagttactatgatcac

SEQ ID NO: 3618209 - DNA, 25 bp, Homo sapien
gcagtagttactatgatcacaacag

SEQ ID NO: 3618210 - DNA, 25 bp, Homo sapien
ttactatgatcacaacagatgagct

SEQ ID NO: 3618211 - DNA, 25 bp, Homo sapien
tcagggaggttgcagtagttactat

SEQ ID NO: 3618212 - DNA, 25 bp, Homo sapien
tcatacacgacagttttgaataatg

SEQ ID NO: 3618213 - DNA, 25 bp, Homo sapien
tcacagctggtcatacacgacagtt

SEQ ID NO: 3618214 - DNA, 25 bp, Homo sapien
cttcgtgaaccccaggaagttgatg

SEQ ID NO: 3618215 - DNA, 25 bp, Homo sapien
ttcgtgaaccccaggaagttgatgt

SEQ ID NO: 3618216 - DNA, 25 bp, Homo sapien
gctgagggcaaaagaacactactgt

SEQ ID NO: 3618217 - DNA, 25 bp, Homo sapien
caaaagaacactactgtttctcagg

SEQ ID NO: 3618218 - DNA, 25 bp, Homo sapien
aaagaacactactgtttctcaggga

SEQ ID NO: 3618219 - DNA, 25 bp, Homo sapien
gagggcaaaagaacactactgtttc

SEQ ID NO: 3618220 - DNA, 25 bp, Homo sapien
gcacaggactgtttatgcttcaggg

SEQ ID NO: 3618221 - DNA, 25 bp, Homo sapien
caggactgtttatgcttcagggagc

SEQ ID NO: 3618222 - DNA, 25 bp, Homo sapien
aggactgtttatgcttcagggagca

SEQ ID NO: 3618223 - DNA, 25 bp, Homo sapien
cacaggactgtttatgcttcaggga

SEQ ID NO: 3618224 - DNA, 25 bp, Homo sapien
catagcataacccaagatgatattt

SEQ ID NO: 3618225 - DNA, 25 bp, Homo sapien
caccatagcataacccaagatgata

SEQ ID NO: 3618226 - DNA, 25 bp, Homo sapien
gacaccatagcataacccaagatga

SEQ ID NO: 3618227 - DNA, 25 bp, Homo sapien
tagcataacccaagatgatattttt

SEQ ID NO: 3618228 - DNA, 25 bp, Homo sapien
gcagagcagaaagactgtgcccagg

SEQ ID NO: 3618229 - DNA, 25 bp, Homo sapien
agaaagactgtgcccaggagaaaga

SEQ ID NO: 3618230 - DNA, 25 bp, Homo sapien
gagcagaaagactgtgcccaggaga

SEQ ID NO: 3618231 - DNA, 25 bp, Homo sapien
gcagaaagactgtgcccaggagaaa

SEQ ID NO: 3618232 - DNA, 25 bp, Homo sapien
tgtcaggtgcagcttcctgtggaag

SEQ ID NO: 3618233 - DNA, 25 bp, Homo sapien
cctggagcttctgtcaggtgcagct

SEQ ID NO: 3618234 - DNA, 25 bp, Homo sapien
cttctgtcaggtgcagcttcctgtg

SEQ ID NO: 3618235 - DNA, 25 bp, Homo sapien
tctgtcaggtgcagcttcctgtgga

SEQ ID NO: 3618236 - DNA, 25 bp, Homo sapien
aaacatatatacacaggggcagagt

SEQ ID NO: 3618237 - DNA, 25 bp, Homo sapien
aagtgaatattgcttatgttaattc

SEQ ID NO: 3618238 - DNA, 25 bp, Homo sapien
gaaagagccaccagacttcatagaa

SEQ ID NO: 3618239 - DNA, 25 bp, Homo sapien
agttcagatatttgaaagagccacc

SEQ ID NO: 3618240 - DNA, 25 bp, Homo sapien
gaggcattgcaaaggtttctcaagt

SEQ ID NO: 3618241 - DNA, 25 bp, Homo sapien
ctggttctgctatcagggtaattac

SEQ ID NO: 3618242 - DNA, 25 bp, Homo sapien
tgttgaaaacttttgcatcgatatt

SEQ ID NO: 3618243 - DNA, 25 bp, Homo sapien
gctgatatgatgtaccacactggtt

SEQ ID NO: 3618244 - DNA, 25 bp, Homo sapien
ctacagcttttattatgtcgaggta

SEQ ID NO: 3618245 - DNA, 25 bp, Homo sapien
ttctctgtatgaaaggtcgcataac

SEQ ID NO: 3618246 - DNA, 25 bp, Homo sapien
tctctgtatgaaaggtcgcataact

SEQ ID NO: 3618247 - DNA, 25 bp, Homo sapien
tctgtccttgtggagtttggaatgc

SEQ ID NO: 3618248 - DNA, 25 bp, Homo sapien
tttggaatgcaccacccttccagca

SEQ ID NO: 3618249 - DNA, 25 bp, Homo sapien
tccttgtggagtttggaatgcacca

SEQ ID NO: 3618250 - DNA, 25 bp, Homo sapien
agcttctgtccttgtggagtttgga

SEQ ID NO: 3618251 - DNA, 25 bp, Homo sapien
taatggcggtttcattgcatagaca

SEQ ID NO: 3618252 - DNA, 25 bp, Homo sapien
taatcacatggttgattcccttggc

SEQ ID NO: 3618253 - DNA, 25 bp, Homo sapien
taatataaagtcaggcatggttaca

SEQ ID NO: 3618254 - DNA, 25 bp, Homo sapien
ttaataaatgattggccactggtga

SEQ ID NO: 3618255 - DNA, 25 bp, Homo sapien
cattaagtggaagtcatcttcataa

SEQ ID NO: 3618256 - DNA, 25 bp, Homo sapien
cctcattgtctttacattgactagg

SEQ ID NO: 3618257 - DNA, 25 bp, Homo sapien
catcctcattgtctttacattgact

SEQ ID NO: 3618258 - DNA, 25 bp, Homo sapien
tcattaagtggaagtcatcttcata

SEQ ID NO: 3618259 - DNA, 25 bp, Homo sapien
gtgagttgacatttcattcaagaac

SEQ ID NO: 3618260 - DNA, 25 bp, Homo sapien
ttaaatgcaacaaaagtgcaattga

SEQ ID NO: 3618261 - DNA, 25 bp, Homo sapien
tttattgaggtgagttgacatttca

SEQ ID NO: 3618262 - DNA, 25 bp, Homo sapien
gcaacaaaagtgcaattgaaaattt

SEQ ID NO: 3618263 - DNA, 25 bp, Homo sapien
aaactccattgtttcagcctaaaag

SEQ ID NO: 3618264 - DNA, 25 bp, Homo sapien
cattgtttcagcctaaaagcttctt

SEQ ID NO: 3618265 - DNA, 25 bp, Homo sapien
tccattgtttcagcctaaaagcttc

SEQ ID NO: 3618266 - DNA, 25 bp, Homo sapien
actccattgtttcagcctaaaagct

SEQ ID NO: 3618267 - DNA, 25 bp, Homo sapien
tttctatattcatcctgatacgcta

SEQ ID NO: 3618268 - DNA, 25 bp, Homo sapien
ttttttctatattcatcctgatacg

SEQ ID NO: 3618269 - DNA, 25 bp, Homo sapien
ctatattcatcctgatacgctatca

SEQ ID NO: 3618270 - DNA, 25 bp, Homo sapien
tctatattcatcctgatacgctatc

SEQ ID NO: 3618271 - DNA, 25 bp, Homo sapien
catcacactaggtgggtcttgattc

SEQ ID NO: 3618272 - DNA, 25 bp, Homo sapien
tacctggtcgcagttgtatctgagg

SEQ ID NO: 3618273 - DNA, 25 bp, Homo sapien
ccactgtaacaaggcagcgggcatg

SEQ ID NO: 3618274 - DNA, 25 bp, Homo sapien
gggcatgcctcctcacgggagagat

SEQ ID NO: 3618275 - DNA, 25 bp, Homo sapien
taataacaataagacaaacaccaca

SEQ ID NO: 3618276 - DNA, 25 bp, Homo sapien
gaaaggacaaactatagactgagag

SEQ ID NO: 3618277 - DNA, 25 bp, Homo sapien
aaccttctgctctaaaaaacatact

SEQ ID NO: 3618278 - DNA, 25 bp, Homo sapien
tactgttaagtataagaaaggacaa

SEQ ID NO: 3618279 - DNA, 25 bp, Homo sapien
acaggtgaatcccggcagctgtgcc

SEQ ID NO: 3618280 - DNA, 25 bp, Homo sapien
ctccttgtcgccatgtgtgtgggtg

SEQ ID NO: 3618281 - DNA, 25 bp, Homo sapien
tcccttctccttgtcgccatgtgtg

SEQ ID NO: 3618282 - DNA, 25 bp, Homo sapien
ccttctccttgtcgccatgtgtgtg

SEQ ID NO: 3618283 - DNA, 25 bp, Homo sapien
gccatgcgggaagtctcagatgtta

SEQ ID NO: 3618284 - DNA, 25 bp, Homo sapien
tgagtacaggcgcagaacttaactt

SEQ ID NO: 3618285 - DNA, 25 bp, Homo sapien
ggatggccagcctctttgtggacta

SEQ ID NO: 3618286 - DNA, 25 bp, Homo sapien
ctaaatgctaatagggcggccgcca

SEQ ID NO: 3618287 - DNA, 25 bp, Homo sapien
gctgggtgtccgcaacaggatctac

SEQ ID NO: 3618288 - DNA, 25 bp, Homo sapien
ttttctctcacggaggacctagccg

SEQ ID NO: 3618289 - DNA, 25 bp, Homo sapien
tacaccctggtgttatctgaaggct

SEQ ID NO: 3618290 - DNA, 25 bp, Homo sapien
gatctacagctgtcctatcgcaaaa

SEQ ID NO: 3618291 - DNA, 25 bp, Homo sapien
caaagaaaaagtcatgctggcataa

SEQ ID NO: 3618292 - DNA, 25 bp, Homo sapien
tgagctctgccttccgtcgcatgaa

SEQ ID NO: 3618293 - DNA, 25 bp, Homo sapien
gagtctcacaagagcgtgaacccta

SEQ ID NO: 3618294 - DNA, 25 bp, Homo sapien
tatatgcactaaaacaaaggtcccc

SEQ ID NO: 3618295 - DNA, 25 bp, Homo sapien
gcggagcgtgtcttgtcgccttcta

SEQ ID NO: 3618296 - DNA, 25 bp, Homo sapien
gcgactgcgagctttgccgttgaaa

SEQ ID NO: 3618297 - DNA, 25 bp, Homo sapien
tctttgccccggtggcctttctgag

SEQ ID NO: 3618298 - DNA, 25 bp, Homo sapien
aggccgctagcgacctgggtccaag

SEQ ID NO: 3618299 - DNA, 25 bp, Homo sapien
tgcagcatggaaccgtccaaggtgt

SEQ ID NO: 3618300 - DNA, 25 bp, Homo sapien
ctgcagcatggaaccgtccaaggtg

SEQ ID NO: 3618301 - DNA, 25 bp, Homo sapien
cagcatggaaccgtccaaggtgttt

SEQ ID NO: 3618302 - DNA, 25 bp, Homo sapien
catggaaccgtccaaggtgtttgtc

SEQ ID NO: 3618303 - DNA, 25 bp, Homo sapien
cagcaccgggtactgaaaaaatctt

SEQ ID NO: 3618304 - DNA, 25 bp, Homo sapien
ttgccagcaccgggtactgaaaaaa

SEQ ID NO: 3618305 - DNA, 25 bp, Homo sapien
tattcgtttggtacggcatctgtct

SEQ ID NO: 3618306 - DNA, 25 bp, Homo sapien
cgtttggtacggcatctgtcttttc

SEQ ID NO: 3618307 - DNA, 25 bp, Homo sapien
tagttattattcgtttggtacggca

SEQ ID NO: 3618308 - DNA, 25 bp, Homo sapien
tattattcgtttggtacggcatctg

SEQ ID NO: 3618309 - DNA, 25 bp, Homo sapien
gaagtctatttctgtggtccacccc

SEQ ID NO: 3618310 - DNA, 25 bp, Homo sapien
tcttatctgctttggagagaaaaac

SEQ ID NO: 3618311 - DNA, 25 bp, Homo sapien
tatctgctttggagagaaaaacaca

SEQ ID NO: 3618312 - DNA, 25 bp, Homo sapien
tatcttatctgctttggagagaaaa

SEQ ID NO: 3618313 - DNA, 25 bp, Homo sapien
ttatctgctttggagagaaaaacac

SEQ ID NO: 3618314 - DNA, 25 bp, Homo sapien
taggtggttcctagatcctggcaaa

SEQ ID NO: 3618315 - DNA, 25 bp, Homo sapien
cttttggaccgggataagagaatat

SEQ ID NO: 3618316 - DNA, 25 bp, Homo sapien
gcacaggtttccaggtgtatgtaaa

SEQ ID NO: 3618317 - DNA, 25 bp, Homo sapien
atgaatttgaatacaaggcacaggt

SEQ ID NO: 3618318 - DNA, 25 bp, Homo sapien
ttaaatgatgcttttaatttctgtg

SEQ ID NO: 3618319 - DNA, 25 bp, Homo sapien
atgcttttaatttctgtgtcaacac

SEQ ID NO: 3618320 - DNA, 25 bp, Homo sapien
ttttaatttctgtgtcaacacagac

SEQ ID NO: 3618321 - DNA, 25 bp, Homo sapien
gcttttaatttctgtgtcaacacag

SEQ ID NO: 3618322 - DNA, 25 bp, Homo sapien
tgtgggtgctcaattcgtcccctac

SEQ ID NO: 3618323 - DNA, 25 bp, Homo sapien
tagtgtgtcattacagtcccttttg

SEQ ID NO: 3618324 - DNA, 25 bp, Homo sapien
tctcttcctctagtgtgtcattaca

SEQ ID NO: 3618325 - DNA, 25 bp, Homo sapien
gaataaatgtgggtgctcaattcgt

SEQ ID NO: 3618326 - DNA, 25 bp, Homo sapien
ggatccgggattccagtccttggca

SEQ ID NO: 3618327 - DNA, 25 bp, Homo sapien
tatgacagagggcttaacatttccc

SEQ ID NO: 3618328 - DNA, 25 bp, Homo sapien
ttttgacagcatgattagcccacag

SEQ ID NO: 3618329 - DNA, 25 bp, Homo sapien
ccacagggtactggaacagtgtcca

SEQ ID NO: 3618330 - DNA, 25 bp, Homo sapien
tgatgttaatattgcctaatagctg

SEQ ID NO: 3618331 - DNA, 25 bp, Homo sapien
aaagtttgagaatacataacatcca

SEQ ID NO: 3618332 - DNA, 25 bp, Homo sapien
gtttgagaatacataacatccatct

SEQ ID NO: 3618333 - DNA, 25 bp, Homo sapien
agggagccgggtagggcgccaccat

SEQ ID NO: 3618334 - DNA, 25 bp, Homo sapien
tattggtatctatctcagcctgttc

SEQ ID NO: 3618335 - DNA, 25 bp, Homo sapien
tcagtgctaacaagacatggctcca

SEQ ID NO: 3618336 - DNA, 25 bp, Homo sapien
tgcaacaaatcatagatcaacctga

SEQ ID NO: 3618337 - DNA, 25 bp, Homo sapien
gatctatgtaaggtaaatgtcagtg

SEQ ID NO: 3618338 - DNA, 25 bp, Homo sapien
aacacctgcctctttactcatggga

SEQ ID NO: 3618339 - DNA, 25 bp, Homo sapien
cactgctccctcttacatgttcata

SEQ ID NO: 3618340 - DNA, 25 bp, Homo sapien
tatttagacagttacggtggagagg

SEQ ID NO: 3618341 - DNA, 25 bp, Homo sapien
gaatcagtgacttcgttatttagac

SEQ ID NO: 3618342 - DNA, 25 bp, Homo sapien
tcatcaataatctctggcttctcca

SEQ ID NO: 3618343 - DNA, 25 bp, Homo sapien
aaagaggatagccatcatacatcgg

SEQ ID NO: 3618344 - DNA, 25 bp, Homo sapien
aagaggatagccatcatacatcgga

SEQ ID NO: 3618345 - DNA, 25 bp, Homo sapien
agaaagaggatagccatcatacatc

SEQ ID NO: 3618346 - DNA, 25 bp, Homo sapien
cttggccaatcagaaagaggatagc

SEQ ID NO: 3618347 - DNA, 25 bp, Homo sapien
tgacataactggaaaggttcttgcc

SEQ ID NO: 3618348 - DNA, 25 bp, Homo sapien
ttcaaactgacataactggaaaggt

SEQ ID NO: 3618349 - DNA, 25 bp, Homo sapien
aactggaaaggttcttgccatctcc

SEQ ID NO: 3618350 - DNA, 25 bp, Homo sapien
tgcctggccagtcacttcaaactga

SEQ ID NO: 3618351 - DNA, 25 bp, Homo sapien
tacaatatctaaatcagcacgaggg

SEQ ID NO: 3618352 - DNA, 25 bp, Homo sapien
ggtaagtccgctcaaggcagctgaa

SEQ ID NO: 3618353 - DNA, 25 bp, Homo sapien
catgggtgccaacatacttctgagc

SEQ ID NO: 3618354 - DNA, 25 bp, Homo sapien
tatacggatgtctggagggagtacc

SEQ ID NO: 3618355 - DNA, 25 bp, Homo sapien
gaatatcctagtattgcttgctttg

SEQ ID NO: 3618356 - DNA, 25 bp, Homo sapien
tgagaaacagtgtattggcccttac

SEQ ID NO: 3618357 - DNA, 25 bp, Homo sapien
cagtgtgtatacctagaatatccta

SEQ ID NO: 3618358 - DNA, 25 bp, Homo sapien
cagtactcagtgtgtatacctagaa

SEQ ID NO: 3618359 - DNA, 25 bp, Homo sapien
taggctattcttagggctacgtgtc

SEQ ID NO: 3618360 - DNA, 25 bp, Homo sapien
tgttctcccacatcggtgatagttg

SEQ ID NO: 3618361 - DNA, 25 bp, Homo sapien
gctacgtgtcttcggccatgagcac

SEQ ID NO: 3618362 - DNA, 25 bp, Homo sapien
tgtgttttcctgactagcaaagccc

SEQ ID NO: 3618363 - DNA, 25 bp, Homo sapien
cccaggaataaacgaaccatacagg

SEQ ID NO: 3618364 - DNA, 25 bp, Homo sapien
gaataaacgaaccatacaggtctgc

SEQ ID NO: 3618365 - DNA, 25 bp, Homo sapien
ccccaggaataaacgaaccatacag

SEQ ID NO: 3618366 - DNA, 25 bp, Homo sapien
aaacgaaccatacaggtctgccctg

SEQ ID NO: 3618367 - DNA, 25 bp, Homo sapien
gaaccgagcttggtgctagaatcta

SEQ ID NO: 3618368 - DNA, 25 bp, Homo sapien
ccctcatgggaggtgtagtccaagt

SEQ ID NO: 3618369 - DNA, 25 bp, Homo sapien
tctacctgaggttttctagtccagc

SEQ ID NO: 3618370 - DNA, 25 bp, Homo sapien
cgcgccgcgtttccgagaaaggaag

SEQ ID NO: 3618371 - DNA, 25 bp, Homo sapien
caataaaaggaggaattgtagtgct

SEQ ID NO: 3618372 - DNA, 25 bp, Homo sapien
taaaaggaggaattgtagtgctacg

SEQ ID NO: 3618373 - DNA, 25 bp, Homo sapien
aataaaaggaggaattgtagtgcta

SEQ ID NO: 3618374 - DNA, 25 bp, Homo sapien
ataaaaggaggaattgtagtgctac

SEQ ID NO: 3618375 - DNA, 25 bp, Homo sapien
tgatgtggaggcggaaatttccagg

SEQ ID NO: 3618376 - DNA, 25 bp, Homo sapien
cttgtgatgtggaggcggaaatttc

SEQ ID NO: 3618377 - DNA, 25 bp, Homo sapien
ttgtgatgtggaggcggaaatttcc

SEQ ID NO: 3618378 - DNA, 25 bp, Homo sapien
tgtggaggcggaaatttccagggaa

SEQ ID NO: 3618379 - DNA, 25 bp, Homo sapien
taaaagtgtggctgtattatgggca

SEQ ID NO: 3618380 - DNA, 25 bp, Homo sapien
gatcttgtaaccagagcgccggtac

SEQ ID NO: 3618381 - DNA, 25 bp, Homo sapien
cattttcccacaagacccattgaga

SEQ ID NO: 3618382 - DNA, 25 bp, Homo sapien
tgagtggccctgtcatcggtggcat

SEQ ID NO: 3618383 - DNA, 25 bp, Homo sapien
taatttttgtttggcagctgttccc

SEQ ID NO: 3618384 - DNA, 25 bp, Homo sapien
tgttcccacaggtctgcatgaacca

SEQ ID NO: 3618385 - DNA, 25 bp, Homo sapien
ccacaggtctgcatgaaccaggtat

SEQ ID NO: 3618386 - DNA, 25 bp, Homo sapien
cctcctcacgtccctttgtctcacc

SEQ ID NO: 3618387 - DNA, 25 bp, Homo sapien
tgagcaagaggctgtgctagccaag

SEQ ID NO: 3618388 - DNA, 25 bp, Homo sapien
ccatatgccaacttgtctgccaggg

SEQ ID NO: 3618389 - DNA, 25 bp, Homo sapien
gagatatgctaggagcaaagcccct

SEQ ID NO: 3618390 - DNA, 25 bp, Homo sapien
aaagccccttagacacctgagcaag

SEQ ID NO: 3618391 - DNA, 25 bp, Homo sapien
ccggcccctccagccatgccctgct

SEQ ID NO: 3618392 - DNA, 25 bp, Homo sapien
acctctgggcctttgccagagccat

SEQ ID NO: 3618393 - DNA, 25 bp, Homo sapien
ccctccagccatgccctgctcaccc

SEQ ID NO: 3618394 - DNA, 25 bp, Homo sapien
ggcccctccagccatgccctgctca

SEQ ID NO: 3618395 - DNA, 25 bp, Homo sapien
gatggagccaatccaaactgagctg

SEQ ID NO: 3618396 - DNA, 25 bp, Homo sapien
tgtaggcatggaaggcacacttgat

SEQ ID NO: 3618397 - DNA, 25 bp, Homo sapien
tcaccatttcactggcggcctggag

SEQ ID NO: 3618398 - DNA, 25 bp, Homo sapien
cctggagggctctcagaaaccaaca

SEQ ID NO: 3618399 - DNA, 25 bp, Homo sapien
ttcggctaccctcaaagctctcagg

SEQ ID NO: 3618400 - DNA, 25 bp, Homo sapien
tcataaacatgtggcgctcggttaa

SEQ ID NO: 3618401 - DNA, 25 bp, Homo sapien
gggccacacccgatgcaaaagactt

SEQ ID NO: 3618402 - DNA, 25 bp, Homo sapien
cagggtcaggtatgttctcagcgtc

SEQ ID NO: 3618403 - DNA, 25 bp, Homo sapien
cagtcagaacagaggggtgtgcaca

SEQ ID NO: 3618404 - DNA, 25 bp, Homo sapien
aagacattcgcccaccccaatcaca

SEQ ID NO: 3618405 - DNA, 25 bp, Homo sapien
caccccaatcacaaactataagcag

SEQ ID NO: 3618406 - DNA, 25 bp, Homo sapien
caaactataagcagcgttgtacaaa

SEQ ID NO: 3618407 - DNA, 25 bp, Homo sapien
gatagatcacagcatacggaacggg

SEQ ID NO: 3618408 - DNA, 25 bp, Homo sapien
caatgtaacttgcaccctggcagca

SEQ ID NO: 3618409 - DNA, 25 bp, Homo sapien
tattctgtgcgctgggactttgtcc

SEQ ID NO: 3618410 - DNA, 25 bp, Homo sapien
tatactataggcacggacatctgga

SEQ ID NO: 3618411 - DNA, 25 bp, Homo sapien
atgtccttgtcacgcagaggcagcc

SEQ ID NO: 3618412 - DNA, 25 bp, Homo sapien
ggagctctgctgaccaacttggctt

SEQ ID NO: 3618413 - DNA, 25 bp, Homo sapien
tgctgaccaacttggctttaggtgc

SEQ ID NO: 3618414 - DNA, 25 bp, Homo sapien
tccttgtcacgcagaggcagccgtg

SEQ ID NO: 3618415 - DNA, 25 bp, Homo sapien
tctgaaaaaggtatcaggaaatttc

SEQ ID NO: 3618416 - DNA, 25 bp, Homo sapien
tgaaaaaggtatcaggaaatttcag

SEQ ID NO: 3618417 - DNA, 25 bp, Homo sapien
atttacaagggtgacattctgaaaa

SEQ ID NO: 3618418 - DNA, 25 bp, Homo sapien
ctatttacaagggtgacattctgaa

SEQ ID NO: 3618419 - DNA, 25 bp, Homo sapien
catactgccgtaattcatcaagacc

SEQ ID NO: 3618420 - DNA, 25 bp, Homo sapien
ttttaaagcagtgggacatgaggca

SEQ ID NO: 3618421 - DNA, 25 bp, Homo sapien
tagtttcggcgtcatggcaccataa

SEQ ID NO: 3618422 - DNA, 25 bp, Homo sapien
caccataagcgtgtccctgtgctaa

SEQ ID NO: 3618423 - DNA, 25 bp, Homo sapien
caagagatgggatcctttgcatgag

SEQ ID NO: 3618424 - DNA, 25 bp, Homo sapien
taccggcttgaagttggaacatgac

SEQ ID NO: 3618425 - DNA, 25 bp, Homo sapien
agctggtggcaaccttcaacgggcc

SEQ ID NO: 3618426 - DNA, 25 bp, Homo sapien
ccaggcctgttgtgtgcagttaccg

SEQ ID NO: 3618427 - DNA, 25 bp, Homo sapien
ctgaaggacctctgtcgggctgtct

SEQ ID NO: 3618428 - DNA, 25 bp, Homo sapien
gaaggacctctgtcgggctgtctaa

SEQ ID NO: 3618429 - DNA, 25 bp, Homo sapien
gctgaaggacctctgtcgggctgtc

SEQ ID NO: 3618430 - DNA, 25 bp, Homo sapien
tgaaggacctctgtcgggctgtcta

SEQ ID NO: 3618431 - DNA, 25 bp, Homo sapien
tctctgtttctgaatgggcacagct

SEQ ID NO: 3618432 - DNA, 25 bp, Homo sapien
tgttgatctctgtttctgaatgggc

SEQ ID NO: 3618433 - DNA, 25 bp, Homo sapien
gatctctgtttctgaatgggcacag

SEQ ID NO: 3618434 - DNA, 25 bp, Homo sapien
ttgatctctgtttctgaatgggcac

SEQ ID NO: 3618435 - DNA, 25 bp, Homo sapien
tctggaatcctaaggttgatcatgc

SEQ ID NO: 3618436 - DNA, 25 bp, Homo sapien
cttcccatacacagctcttagctaa

SEQ ID NO: 3618437 - DNA, 25 bp, Homo sapien
cctaaggttgatcatgccttcctga

SEQ ID NO: 3618438 - DNA, 25 bp, Homo sapien
cacagctcttagctaactgaagatg

SEQ ID NO: 3618439 - DNA, 25 bp, Homo sapien
gtacgctgagtagggactggttcca

SEQ ID NO: 3618440 - DNA, 25 bp, Homo sapien
gccacaatcagggactgcggaagtc

SEQ ID NO: 3618441 - DNA, 25 bp, Homo sapien
tctgagccatcagagctgacgtcat

SEQ ID NO: 3618442 - DNA, 25 bp, Homo sapien
gataaggtgctaccacagggaccac

SEQ ID NO: 3618443 - DNA, 25 bp, Homo sapien
gaggcacggccgtgtacattccacc

SEQ ID NO: 3618444 - DNA, 25 bp, Homo sapien
tgaggcacggccgtgtacattccac

SEQ ID NO: 3618445 - DNA, 25 bp, Homo sapien
cgacaatttcggcagttaacacact

SEQ ID NO: 3618446 - DNA, 25 bp, Homo sapien
ctattgttgtttcgacaatttcggc

SEQ ID NO: 3618447 - DNA, 25 bp, Homo sapien
tgaaggtactcacagaccagtagcc

SEQ ID NO: 3618448 - DNA, 25 bp, Homo sapien
aatgggcacacagtatattctaacc

SEQ ID NO: 3618449 - DNA, 25 bp, Homo sapien
tgagccatgtcaaccataaatgggc

SEQ ID NO: 3618450 - DNA, 25 bp, Homo sapien
cagagcaacgtcattgtgaatatca

SEQ ID NO: 3618451 - DNA, 25 bp, Homo sapien
tgagaccgccattggttaggaagcc

SEQ ID NO: 3618452 - DNA, 25 bp, Homo sapien
ggtgtagtccaccatctgcccgttc

SEQ ID NO: 3618453 - DNA, 25 bp, Homo sapien
tgttcaaaatccacgtgtgtcctgg

SEQ ID NO: 3618454 - DNA, 25 bp, Homo sapien
tagagagttgctgtgcccggagtaa

SEQ ID NO: 3618455 - DNA, 25 bp, Homo sapien
acttcactgttatttcaaagcaggg

SEQ ID NO: 3618456 - DNA, 25 bp, Homo sapien
taggacagtgaggtgaagagaactg

SEQ ID NO: 3618457 - DNA, 25 bp, Homo sapien
tattttataatagctgagataacag

SEQ ID NO: 3618458 - DNA, 25 bp, Homo sapien
aagactaaactctctgcttgatttg

SEQ ID NO: 3618459 - DNA, 25 bp, Homo sapien
gagaaggagatatttatgagtgact

SEQ ID NO: 3618460 - DNA, 25 bp, Homo sapien
aaaagagaaggagatatttatgagt

SEQ ID NO: 3618461 - DNA, 25 bp, Homo sapien
aaagagaaggagatatttatgagtg

SEQ ID NO: 3618462 - DNA, 25 bp, Homo sapien
agatataacatgtcactgcttctgg

SEQ ID NO: 3618463 - DNA, 25 bp, Homo sapien
tataacatgtcactgcttctggcag

SEQ ID NO: 3618464 - DNA, 25 bp, Homo sapien
gatataacatgtcactgcttctggc

SEQ ID NO: 3618465 - DNA, 25 bp, Homo sapien
atataacatgtcactgcttctggca

SEQ ID NO: 3618466 - DNA, 25 bp, Homo sapien
gtttgcgaacggcctgagcaacaca

SEQ ID NO: 3618467 - DNA, 25 bp, Homo sapien
tttgcgaacggcctgagcaacacag

SEQ ID NO: 3618468 - DNA, 25 bp, Homo sapien
agtttgcgaacggcctgagcaacac

SEQ ID NO: 3618469 - DNA, 25 bp, Homo sapien
ccggttcatcggtgttctgggtaat

SEQ ID NO: 3618470 - DNA, 25 bp, Homo sapien
cgataacgaaagctagtaacaggtg

SEQ ID NO: 3618471 - DNA, 25 bp, Homo sapien
ctgggtaatagcgataacgaaagct

SEQ ID NO: 3618472 - DNA, 25 bp, Homo sapien
gctagtaacaggtgggactcaaacc

SEQ ID NO: 3618473 - DNA, 25 bp, Homo sapien
ctgttatggtgccaacaaaccacag

SEQ ID NO: 3618474 - DNA, 25 bp, Homo sapien
catggaaagcacttagagcctggct

SEQ ID NO: 3618475 - DNA, 25 bp, Homo sapien
gagctctgtcaattatctagtggta

SEQ ID NO: 3618476 - DNA, 25 bp, Homo sapien
tattataccgaatctcctgttatgg

SEQ ID NO: 3618477 - DNA, 25 bp, Homo sapien
ttagtctcgcagatcatcacattgc

SEQ ID NO: 3618478 - DNA, 25 bp, Homo sapien
gcattgcattttaatgtcataggag

SEQ ID NO: 3618479 - DNA, 25 bp, Homo sapien
ctggctgcaggtggccaatcatgtg

SEQ ID NO: 3618480 - DNA, 25 bp, Homo sapien
taatgtcataggaggtttctggctg

SEQ ID NO: 3618481 - DNA, 25 bp, Homo sapien
tcccaattccactgtcatggatgca

SEQ ID NO: 3618482 - DNA, 25 bp, Homo sapien
tgcaacgtgaactgacatatgaccg

SEQ ID NO: 3618483 - DNA, 25 bp, Homo sapien
ccactgtcatggatgcaacgtgaac

SEQ ID NO: 3618484 - DNA, 25 bp, Homo sapien
catatgaccgaatgcctgaataaac

SEQ ID NO: 3618485 - DNA, 25 bp, Homo sapien
ggaaaataaccttggcctatggcaa

SEQ ID NO: 3618486 - DNA, 25 bp, Homo sapien
gatgtcactgagaagcgggcattca

SEQ ID NO: 3618487 - DNA, 25 bp, Homo sapien
tcttggagtgcaaaaaagaccttgg

SEQ ID NO: 3618488 - DNA, 25 bp, Homo sapien
tactatcgtgagtcctaagagcaca

SEQ ID NO: 3618489 - DNA, 25 bp, Homo sapien
cattgtcactatctgttggtcggta

SEQ ID NO: 3618490 - DNA, 25 bp, Homo sapien
tgttggtcggtaatagatataaaat

SEQ ID NO: 3618491 - DNA, 25 bp, Homo sapien
taaaatccttgaatgggagtgttat

SEQ ID NO: 3618492 - DNA, 25 bp, Homo sapien
ccttgaatgggagtgttattgttac

SEQ ID NO: 3618493 - DNA, 25 bp, Homo sapien
gaacccaaccacttgataaggacga

SEQ ID NO: 3618494 - DNA, 25 bp, Homo sapien
taaggacgagatgctgaactccgaa

SEQ ID NO: 3618495 - DNA, 25 bp, Homo sapien
tattggacggctggaaaagcgattg

SEQ ID NO: 3618496 - DNA, 25 bp, Homo sapien
catgatctgagtatcgctgacagcc

SEQ ID NO: 3618497 - DNA, 25 bp, Homo sapien
cccgtttgcccgaggaatccaagtg

SEQ ID NO: 3618498 - DNA, 25 bp, Homo sapien
aattgctggtcctcatccgtttata

SEQ ID NO: 3618499 - DNA, 25 bp, Homo sapien
ctaaactacgaacttccactgaaag

SEQ ID NO: 3618500 - DNA, 25 bp, Homo sapien
cgtttatattcgactttgaaggcag

SEQ ID NO: 3618501 - DNA, 25 bp, Homo sapien
gcctagaggaatctgtaagtaccac

SEQ ID NO: 3618502 - DNA, 25 bp, Homo sapien
gcctctgaaacaacgggatacttag

SEQ ID NO: 3618503 - DNA, 25 bp, Homo sapien
acgggatacttagggatgcccacgg

SEQ ID NO: 3618504 - DNA, 25 bp, Homo sapien
ctgtgcctagaggaatctgtaagta

SEQ ID NO: 3618505 - DNA, 25 bp, Homo sapien
gctggttcggaaggtaagcatggca

SEQ ID NO: 3618506 - DNA, 25 bp, Homo sapien
ccagcatgccaaccccatcatccag

SEQ ID NO: 3618507 - DNA, 25 bp, Homo sapien
gggactcgaaccgtgtgccagcttc

SEQ ID NO: 3618508 - DNA, 25 bp, Homo sapien
tcacctgctgcgcttcttgctacca

SEQ ID NO: 3618509 - DNA, 25 bp, Homo sapien
aggaacagagatgccgctggcgttt

SEQ ID NO: 3618510 - DNA, 25 bp, Homo sapien
tgggatggaccttcaccggaaatga

SEQ ID NO: 3618511 - DNA, 25 bp, Homo sapien
cagcatcaggaagtgtgactgtctc

SEQ ID NO: 3618512 - DNA, 25 bp, Homo sapien
ccggaaatgagctcagtaacccagt

SEQ ID NO: 3618513 - DNA, 25 bp, Homo sapien
tcataccaacgaatgaccggaaccg

SEQ ID NO: 3618514 - DNA, 25 bp, Homo sapien
tgggacaggacgaagtacacaggct

SEQ ID NO: 3618515 - DNA, 25 bp, Homo sapien
cactggcattgcaggacagagtaac

SEQ ID NO: 3618516 - DNA, 25 bp, Homo sapien
gagcttgcaccagcttgggacagga

SEQ ID NO: 3618517 - DNA, 25 bp, Homo sapien
cacaatggaccactaagcagcaact

SEQ ID NO: 3618518 - DNA, 25 bp, Homo sapien
cactctctcatgttgtgtgaaacca

SEQ ID NO: 3618519 - DNA, 25 bp, Homo sapien
ttttacaaatactcacacaggcgca

SEQ ID NO: 3618520 - DNA, 25 bp, Homo sapien
catacaaggctgctcaagaaactga

SEQ ID NO: 3618521 - DNA, 25 bp, Homo sapien
tgaataggctgtgcattgtgaaacc

SEQ ID NO: 3618522 - DNA, 25 bp, Homo sapien
cagttagatgtcgtgcagaaggatg

SEQ ID NO: 3618523 - DNA, 25 bp, Homo sapien
tccagtagagtgcataaatccaatc

SEQ ID NO: 3618524 - DNA, 25 bp, Homo sapien
catgaacgtcgcaggtaaagtgtac

SEQ ID NO: 3618525 - DNA, 25 bp, Homo sapien
aacagctaatgcctgtgaatgggtg

SEQ ID NO: 3618526 - DNA, 25 bp, Homo sapien
actccaaggttacagggctacgaga

SEQ ID NO: 3618527 - DNA, 25 bp, Homo sapien
caggaatagtttccggagtccgccg

SEQ ID NO: 3618528 - DNA, 25 bp, Homo sapien
ccgggtcaacgctatcagtggcaag

SEQ ID NO: 3618529 - DNA, 25 bp, Homo sapien
acaaggagctttcggccaataggtt

SEQ ID NO: 3618530 - DNA, 25 bp, Homo sapien
acattcaaaatctgaagatttcctg

SEQ ID NO: 3618531 - DNA, 25 bp, Homo sapien
gatgtgtgacaggattataagctgc

SEQ ID NO: 3618532 - DNA, 25 bp, Homo sapien
cctctaaggatacattcaaaatctg

SEQ ID NO: 3618533 - DNA, 25 bp, Homo sapien
cagccattttccccggattttatag

SEQ ID NO: 3618534 - DNA, 25 bp, Homo sapien
cattttccccggattttatagcgca

SEQ ID NO: 3618535 - DNA, 25 bp, Homo sapien
ccggattttatagcgcacctcagct

SEQ ID NO: 3618536 - DNA, 25 bp, Homo sapien
ttccccggattttatagcgcacctc

SEQ ID NO: 3618537 - DNA, 25 bp, Homo sapien
aatgcagtactacaggtccaccaag

SEQ ID NO: 3618538 - DNA, 25 bp, Homo sapien
tgccacagatactgtcgcagggcca

SEQ ID NO: 3618539 - DNA, 25 bp, Homo sapien
ttggcaaggcactggtagtaaccca

SEQ ID NO: 3618540 - DNA, 25 bp, Homo sapien
tatgcagccatgagatacgagtggt

SEQ ID NO: 3618541 - DNA, 25 bp, Homo sapien
cagcagagagcggctcagaagtaaa

SEQ ID NO: 3618542 - DNA, 25 bp, Homo sapien
acagcagagagcggctcagaagtaa

SEQ ID NO: 3618543 - DNA, 25 bp, Homo sapien
gtaagagtaacatacagcagtgtac

SEQ ID NO: 3618544 - DNA, 25 bp, Homo sapien
gaagagcacagaattgtaagagtaa

SEQ ID NO: 3618545 - DNA, 25 bp, Homo sapien
cagcagtgtacataagggtccaaga

SEQ ID NO: 3618546 - DNA, 25 bp, Homo sapien
cataagggtccaagatccggatgca

SEQ ID NO: 3618547 - DNA, 25 bp, Homo sapien
acagaagcaatcaggacaggcttcc

SEQ ID NO: 3618548 - DNA, 25 bp, Homo sapien
ttacagaagcaatcaggacaggctt

SEQ ID NO: 3618549 - DNA, 25 bp, Homo sapien
cagattacagaagcaatcaggacag

SEQ ID NO: 3618550 - DNA, 25 bp, Homo sapien
gattacagaagcaatcaggacaggc

SEQ ID NO: 3618551 - DNA, 25 bp, Homo sapien
ctgtccacaggggttctcccaaaat

SEQ ID NO: 3618552 - DNA, 25 bp, Homo sapien
cagctggcatacatcttccatgatt

SEQ ID NO: 3618553 - DNA, 25 bp, Homo sapien
aggctttgattagggacggtcttca

SEQ ID NO: 3618554 - DNA, 25 bp, Homo sapien
cccaaaatgagagtaacagctggca

SEQ ID NO: 3618555 - DNA, 25 bp, Homo sapien
ccttgtaggcctcactcttctttga

SEQ ID NO: 3618556 - DNA, 25 bp, Homo sapien
gcaccagggagctttctaaggccaa

SEQ ID NO: 3618557 - DNA, 25 bp, Homo sapien
aaagctgtattgtttcacgtgcccg

SEQ ID NO: 3618558 - DNA, 25 bp, Homo sapien
tgcggacaggcacaaactgcagtgt

SEQ ID NO: 3618559 - DNA, 25 bp, Homo sapien
gcttaagtcaagatcattgcccagg

SEQ ID NO: 3618560 - DNA, 25 bp, Homo sapien
tttcatttacttggcgctgctagca

SEQ ID NO: 3618561 - DNA, 25 bp, Homo sapien
tacatgggagtaggacggaaaagac

SEQ ID NO: 3618562 - DNA, 25 bp, Homo sapien
tagtcctgcttgtaataaagtccgg

SEQ ID NO: 3618563 - DNA, 25 bp, Homo sapien
cattctgcattagctgaaaaccagg

SEQ ID NO: 3618564 - DNA, 25 bp, Homo sapien
ctcaggaccattattcaggagacag

SEQ ID NO: 3618565 - DNA, 25 bp, Homo sapien
tcaggaccattattcaggagacaga

SEQ ID NO: 3618566 - DNA, 25 bp, Homo sapien
gacagatgacaatgatactgtatgt

SEQ ID NO: 3618567 - DNA, 25 bp, Homo sapien
gatgacaatgatactgtatgtttta

SEQ ID NO: 3618568 - DNA, 25 bp, Homo sapien
cttaattcttttcctgcaaagtcaa

SEQ ID NO: 3618569 - DNA, 25 bp, Homo sapien
taattcttttcctgcaaagtcaaac

SEQ ID NO: 3618570 - DNA, 25 bp, Homo sapien
ttcttttcctgcaaagtcaaaccac

SEQ ID NO: 3618571 - DNA, 25 bp, Homo sapien
aagtgaacttaattcttttcctgca

SEQ ID NO: 3618572 - DNA, 25 bp, Homo sapien
caccctctgtcgtcctgatgaggaa

SEQ ID NO: 3618573 - DNA, 25 bp, Homo sapien
tggcataggcctgaaaataaatctc

SEQ ID NO: 3618574 - DNA, 25 bp, Homo sapien
gtctggtttgggacacaaaggctga

SEQ ID NO: 3618575 - DNA, 25 bp, Homo sapien
tgtgagcttttagtccaacctcctg

SEQ ID NO: 3618576 - DNA, 25 bp, Homo sapien
gaagaggtttcgtcgtgtcactgac

SEQ ID NO: 3618577 - DNA, 25 bp, Homo sapien
ctccccgccgggcaagcatcagcat

SEQ ID NO: 3618578 - DNA, 25 bp, Homo sapien
ccccgaggaccatcgtcaagaagag

SEQ ID NO: 3618579 - DNA, 25 bp, Homo sapien
gtttcgtcgtgtcactgacacctca

SEQ ID NO: 3618580 - DNA, 25 bp, Homo sapien
caagtcacggagattcccatcatgc

SEQ ID NO: 3618581 - DNA, 25 bp, Homo sapien
agtcacggagattcccatcatgcct

SEQ ID NO: 3618582 - DNA, 25 bp, Homo sapien
aagtcacggagattcccatcatgcc

SEQ ID NO: 3618583 - DNA, 25 bp, Homo sapien
attcccttggagagacggctcttct

SEQ ID NO: 3618584 - DNA, 25 bp, Homo sapien
tcattcccttggagagacggctctt

SEQ ID NO: 3618585 - DNA, 25 bp, Homo sapien
ctttcattcccttggagagacggct

SEQ ID NO: 3618586 - DNA, 25 bp, Homo sapien
tttcattcccttggagagacggctc

SEQ ID NO: 3618587 - DNA, 25 bp, Homo sapien
tgaaagcctgcctagggtagttaaa

SEQ ID NO: 3618588 - DNA, 25 bp, Homo sapien
tgttctggtagaaacaccaacagga

SEQ ID NO: 3618589 - DNA, 25 bp, Homo sapien
gtcctcagattcttgcagtccttca

SEQ ID NO: 3618590 - DNA, 25 bp, Homo sapien
gttaaaagacgagtgaatgctctca

SEQ ID NO: 3618591 - DNA, 25 bp, Homo sapien
tttcactttgaacccaatgaatatt

SEQ ID NO: 3618592 - DNA, 25 bp, Homo sapien
ccttttcttttgatggaccagaaat

SEQ ID NO: 3618593 - DNA, 25 bp, Homo sapien
agctctcagatgctgaccagcctat

SEQ ID NO: 3618594 - DNA, 25 bp, Homo sapien
cagatgctgaccagcctatgaattt

SEQ ID NO: 3618595 - DNA, 25 bp, Homo sapien
acttcttggaccttgccagcgtgtt

SEQ ID NO: 3618596 - DNA, 25 bp, Homo sapien
cttgccagcgtgttctttggtcctc

SEQ ID NO: 3618597 - DNA, 25 bp, Homo sapien
tctctgcatgaagagtcgccttccc

SEQ ID NO: 3618598 - DNA, 25 bp, Homo sapien
cacagtgccagagtcattgacacct

SEQ ID NO: 3618599 - DNA, 25 bp, Homo sapien
ctcccctatctttagagtctccgct

SEQ ID NO: 3618600 - DNA, 25 bp, Homo sapien
ggctcccctatctttagagtctccg

SEQ ID NO: 3618601 - DNA, 25 bp, Homo sapien
gctcccctatctttagagtctccgc

SEQ ID NO: 3618602 - DNA, 25 bp, Homo sapien
tgtcaagagggccagaagagggccc

SEQ ID NO: 3618603 - DNA, 25 bp, Homo sapien
ggacttgaggaggtgtcaagagggc

SEQ ID NO: 3618604 - DNA, 25 bp, Homo sapien
cccatccgcaccaggcttgaggagg

SEQ ID NO: 3618605 - DNA, 25 bp, Homo sapien
aggaggtgtcaagagggccagaaga

SEQ ID NO: 3618606 - DNA, 25 bp, Homo sapien
taaagtcctgcatatttgctgttat

SEQ ID NO: 3618607 - DNA, 25 bp, Homo sapien
gttattggactccagattggcttct

SEQ ID NO: 3618608 - DNA, 25 bp, Homo sapien
cctgcatatttgctgttattggact

SEQ ID NO: 3618609 - DNA, 25 bp, Homo sapien
tatttgctgttattggactccagat

SEQ ID NO: 3618610 - DNA, 25 bp, Homo sapien
gagggtcttcctccagttagagtag

SEQ ID NO: 3618611 - DNA, 25 bp, Homo sapien
tatcgaggcgctgaaccttgcactg

SEQ ID NO: 3618612 - DNA, 25 bp, Homo sapien
ggctgttgtccggtttctctccaaa

SEQ ID NO: 3618613 - DNA, 25 bp, Homo sapien
tctgagcgttggactgttatcgagg

SEQ ID NO: 3618614 - DNA, 25 bp, Homo sapien
gggtatgagccttataacctccacc

SEQ ID NO: 3618615 - DNA, 25 bp, Homo sapien
tacaggctgttaggagagttagaga

SEQ ID NO: 3618616 - DNA, 25 bp, Homo sapien
tagtaacaacttccttacaggctgt

SEQ ID NO: 3618617 - DNA, 25 bp, Homo sapien
cccaagtatgaagcctaaggtattc

SEQ ID NO: 3618618 - DNA, 25 bp, Homo sapien
gtgtccatggctcggaccacgtcct

SEQ ID NO: 3618619 - DNA, 25 bp, Homo sapien
tggtgtccatggctcggaccacgtc

SEQ ID NO: 3618620 - DNA, 25 bp, Homo sapien
tcaaggtacgcttcaccgtgcactg

SEQ ID NO: 3618621 - DNA, 25 bp, Homo sapien
ggccacatcagccactgtcaggttc

SEQ ID NO: 3618622 - DNA, 25 bp, Homo sapien
cctagtgacaggaacgcaagcttga

SEQ ID NO: 3618623 - DNA, 25 bp, Homo sapien
aagcttgaatctgacccgcctgggt

SEQ ID NO: 3618624 - DNA, 25 bp, Homo sapien
tgtcattattaacacccaggaggag

SEQ ID NO: 3618625 - DNA, 25 bp, Homo sapien
ccatataacatacacctgggtggcg

SEQ ID NO: 3618626 - DNA, 25 bp, Homo sapien
cagcggatagcttggaggtatcgat

SEQ ID NO: 3618627 - DNA, 25 bp, Homo sapien
gatgtatttgaaattgagggcttgg

SEQ ID NO: 3618628 - DNA, 25 bp, Homo sapien
ggcaggcagacccataggggctcct

SEQ ID NO: 3618629 - DNA, 25 bp, Homo sapien
aggtatcgattggtggcccgggctg

SEQ ID NO: 3618630 - DNA, 25 bp, Homo sapien
tctccagttgaatagcagccactct

SEQ ID NO: 3618631 - DNA, 25 bp, Homo sapien
tgttgattatccgtctcctcaccct

SEQ ID NO: 3618632 - DNA, 25 bp, Homo sapien
gtcccttctccagttgaatagcagc

SEQ ID NO: 3618633 - DNA, 25 bp, Homo sapien
ggcctgttgattatccgtctcctca

SEQ ID NO: 3618634 - DNA, 25 bp, Homo sapien
ggccagggcaggttctggaccctac

SEQ ID NO: 3618635 - DNA, 25 bp, Homo sapien
gggcaggttctggaccctactccac

SEQ ID NO: 3618636 - DNA, 25 bp, Homo sapien
cagggcaggttctggaccctactcc

SEQ ID NO: 3618637 - DNA, 25 bp, Homo sapien
tgtggccagggcaggttctggaccc

SEQ ID NO: 3618638 - DNA, 25 bp, Homo sapien
tcctccaagcagtcccgcagtgggt

SEQ ID NO: 3618639 - DNA, 25 bp, Homo sapien
agcagtcccgcagtgggtgccagcc

SEQ ID NO: 3618640 - DNA, 25 bp, Homo sapien
ccaagcagtcccgcagtgggtgcca

SEQ ID NO: 3618641 - DNA, 25 bp, Homo sapien
cctccaagcagtcccgcagtgggtg

SEQ ID NO: 3618642 - DNA, 25 bp, Homo sapien
tggatgcagaaaacttgaagcagag

SEQ ID NO: 3618643 - DNA, 25 bp, Homo sapien
gggattgggcatgataagaaacagc

SEQ ID NO: 3618644 - DNA, 25 bp, Homo sapien
cacatgacagatgtagaggttggga

SEQ ID NO: 3618645 - DNA, 25 bp, Homo sapien
agtgtggatgcagaaaacttgaagc

SEQ ID NO: 3618646 - DNA, 25 bp, Homo sapien
gagtcgcctgtctgctcgcggtgct

SEQ ID NO: 3618647 - DNA, 25 bp, Homo sapien
atgtctttgccacaccctgtccttg

SEQ ID NO: 3618648 - DNA, 25 bp, Homo sapien
ccctcgcaggctattattgtcaaca

SEQ ID NO: 3618649 - DNA, 25 bp, Homo sapien
gatgccctcatctcccatggagtcg

SEQ ID NO: 3618650 - DNA, 25 bp, Homo sapien
gggatttgaggtccccaggcagccc

SEQ ID NO: 3618651 - DNA, 25 bp, Homo sapien
aggactggggatttgaggtccccag

SEQ ID NO: 3618652 - DNA, 25 bp, Homo sapien
ctgggagaaaggactggggatttga

SEQ ID NO: 3618653 - DNA, 25 bp, Homo sapien
ttgaggtccccaggcagcccataat

SEQ ID NO: 3618654 - DNA, 25 bp, Homo sapien
agggtggcagtagctggacactgtc

SEQ ID NO: 3618655 - DNA, 25 bp, Homo sapien
tagggtggcagtagctggacactgt

SEQ ID NO: 3618656 - DNA, 25 bp, Homo sapien
ttagggtggcagtagctggacactg

SEQ ID NO: 3618657 - DNA, 25 bp, Homo sapien
ctatgtcaccgagggatgcaggggc

SEQ ID NO: 3618658 - DNA, 25 bp, Homo sapien
tgcattactcaggataaacttggct

SEQ ID NO: 3618659 - DNA, 25 bp, Homo sapien
ccagtgtattcgttgcattactcag

SEQ ID NO: 3618660 - DNA, 25 bp, Homo sapien
gcttttgcacattcaccttccccga

SEQ ID NO: 3618661 - DNA, 25 bp, Homo sapien
ttgtcgggtgaaaggcacggctgcc

SEQ ID NO: 3618662 - DNA, 25 bp, Homo sapien
ttctgctctggaacgcgaaggccaa

SEQ ID NO: 3618663 - DNA, 25 bp, Homo sapien
cgagtctggatttgggcacccatat

SEQ ID NO: 3618664 - DNA, 25 bp, Homo sapien
gtctgaattcctgtttgaggtcaca

SEQ ID NO: 3618665 - DNA, 25 bp, Homo sapien
tttgggcacccatatccttctgctc

SEQ ID NO: 3618666 - DNA, 25 bp, Homo sapien
tccgatctaaacaaccagcttcagt

SEQ ID NO: 3618667 - DNA, 25 bp, Homo sapien
aaatgatccatgatagaaatgggtt

SEQ ID NO: 3618668 - DNA, 25 bp, Homo sapien
tacacccagattttccgatctaaac

SEQ ID NO: 3618669 - DNA, 25 bp, Homo sapien
agtttctggaaaatgatccatgata

SEQ ID NO: 3618670 - DNA, 25 bp, Homo sapien
gggaatgccagaaccaattcgtggc

SEQ ID NO: 3618671 - DNA, 25 bp, Homo sapien
ttgggaatgccagaaccaattcgtg

SEQ ID NO: 3618672 - DNA, 25 bp, Homo sapien
tggcttggagcattccccttgggaa

SEQ ID NO: 3618673 - DNA, 25 bp, Homo sapien
ggcttggagcattccccttgggaat

SEQ ID NO: 3618674 - DNA, 25 bp, Homo sapien
aggctgggcccaggacctccaccat

SEQ ID NO: 3618675 - DNA, 25 bp, Homo sapien
ggaaaaggcagaccgaggctgggcc

SEQ ID NO: 3618676 - DNA, 25 bp, Homo sapien
cagctgggcatgcaggggaaaaggc

SEQ ID NO: 3618677 - DNA, 25 bp, Homo sapien
gggaaaaggcagaccgaggctgggc

SEQ ID NO: 3618678 - DNA, 25 bp, Homo sapien
ccatgtgagcagacacggcactcag

SEQ ID NO: 3618679 - DNA, 25 bp, Homo sapien
tctctggctgtctggcccgagctgc

SEQ ID NO: 3618680 - DNA, 25 bp, Homo sapien
tgtgagcagacacggcactcagggc

SEQ ID NO: 3618681 - DNA, 25 bp, Homo sapien
ttctctggctgtctggcccgagctg

SEQ ID NO: 3618682 - DNA, 25 bp, Homo sapien
gcctgcaaatagcagcaggcgctca

SEQ ID NO: 3618683 - DNA, 25 bp, Homo sapien
ctgtgtaactgcctgcaaatagcag

SEQ ID NO: 3618684 - DNA, 25 bp, Homo sapien
cctgcaaatagcagcaggcgctcat

SEQ ID NO: 3618685 - DNA, 25 bp, Homo sapien
tgtaactgcctgcaaatagcagcag

SEQ ID NO: 3618686 - DNA, 25 bp, Homo sapien
taagaagtctaccagggactccaga

SEQ ID NO: 3618687 - DNA, 25 bp, Homo sapien
cacatggtaaccttgtgtgcaagaa

SEQ ID NO: 3618688 - DNA, 25 bp, Homo sapien
cccagtcggttctccaagctgtcat

SEQ ID NO: 3618689 - DNA, 25 bp, Homo sapien
ggagctgagcaattagacacatggt

SEQ ID NO: 3618690 - DNA, 25 bp, Homo sapien
agctctccacgccttgatcccaagg

SEQ ID NO: 3618691 - DNA, 25 bp, Homo sapien
gaaataatgacccacaatgtgaccc

SEQ ID NO: 3618692 - DNA, 25 bp, Homo sapien
atgtgaccccatgccgaggacggag

SEQ ID NO: 3618693 - DNA, 25 bp, Homo sapien
atacgcaagggtgatgaggctttgt

SEQ ID NO: 3618694 - DNA, 25 bp, Homo sapien
ctctccagtcggtaagggcagggcc

SEQ ID NO: 3618695 - DNA, 25 bp, Homo sapien
gatgctctccagtcggtaagggcag

SEQ ID NO: 3618696 - DNA, 25 bp, Homo sapien
ctgatgctctccagtcggtaagggc

SEQ ID NO: 3618697 - DNA, 25 bp, Homo sapien
tgctctccagtcggtaagggcaggg

SEQ ID NO: 3618698 - DNA, 25 bp, Homo sapien
ggaggcaaaaggccagtcccagaac

SEQ ID NO: 3618699 - DNA, 25 bp, Homo sapien
cttggcaaggagcaaccgttccaaa

SEQ ID NO: 3618700 - DNA, 25 bp, Homo sapien
aggcaaaaggccagtcccagaacgg

SEQ ID NO: 3618701 - DNA, 25 bp, Homo sapien
gaggcaaaaggccagtcccagaacg

SEQ ID NO: 3618702 - DNA, 25 bp, Homo sapien
tgaagacagtcagcccggctttgca

SEQ ID NO: 3618703 - DNA, 25 bp, Homo sapien
gattcctgagtgaagacagtcagcc

SEQ ID NO: 3618704 - DNA, 25 bp, Homo sapien
tcttgcggagggtattccggttgca

SEQ ID NO: 3618705 - DNA, 25 bp, Homo sapien
ttgcagtattaactggaggcatctc

SEQ ID NO: 3618706 - DNA, 25 bp, Homo sapien
cttgagcacaaacactcggagagct

SEQ ID NO: 3618707 - DNA, 25 bp, Homo sapien
tcattccaacactctaagcctattg

SEQ ID NO: 3618708 - DNA, 25 bp, Homo sapien
tccaacactctaagcctattgggct

SEQ ID NO: 3618709 - DNA, 25 bp, Homo sapien
cactctaagcctattgggctcctca

SEQ ID NO: 3618710 - DNA, 25 bp, Homo sapien
tctaagcctattgggctcctcagcc

SEQ ID NO: 3618711 - DNA, 25 bp, Homo sapien
ggagttgcctccaagaagcgtgaag

SEQ ID NO: 3618712 - DNA, 25 bp, Homo sapien
aagccggctcggagcacctctagtg

SEQ ID NO: 3618713 - DNA, 25 bp, Homo sapien
gctcggagcacctctagtgcccaag

SEQ ID NO: 3618714 - DNA, 25 bp, Homo sapien
tccaagaagcgtgaagccggctcgg

SEQ ID NO: 3618715 - DNA, 25 bp, Homo sapien
tggaagcctccgccagagaggtctt

SEQ ID NO: 3618716 - DNA, 25 bp, Homo sapien
tggatggaagcctccgccagagagg

SEQ ID NO: 3618717 - DNA, 25 bp, Homo sapien
gatggaagcctccgccagagaggtc

SEQ ID NO: 3618718 - DNA, 25 bp, Homo sapien
ggatggaagcctccgccagagaggt

SEQ ID NO: 3618719 - DNA, 25 bp, Homo sapien
accaggcacagatgcagtagggcat

SEQ ID NO: 3618720 - DNA, 25 bp, Homo sapien
aaccaggcacagatgcagtagggca

SEQ ID NO: 3618721 - DNA, 25 bp, Homo sapien
tgggaaggcgagtttgggctctgca

SEQ ID NO: 3618722 - DNA, 25 bp, Homo sapien
ctgggaaggcgagtttgggctctgc

SEQ ID NO: 3618723 - DNA, 25 bp, Homo sapien
acggtgaaacttgcagatgtgaatg

SEQ ID NO: 3618724 - DNA, 25 bp, Homo sapien
gaacggtgaaacttgcagatgtgaa

SEQ ID NO: 3618725 - DNA, 25 bp, Homo sapien
tgggaacggtgaaacttgcagatgt

SEQ ID NO: 3618726 - DNA, 25 bp, Homo sapien
gggctgggaacggtgaaacttgcag

SEQ ID NO: 3618727 - DNA, 25 bp, Homo sapien
tcaggcatagctgcggccagctgca

SEQ ID NO: 3618728 - DNA, 25 bp, Homo sapien
cggcacagcccgtgcctatgtcagg

SEQ ID NO: 3618729 - DNA, 25 bp, Homo sapien
agcggaccgcagctcggacaagttc

SEQ ID NO: 3618730 - DNA, 25 bp, Homo sapien
agggcacagaatgcccagcggaccg

SEQ ID NO: 3618731 - DNA, 25 bp, Homo sapien
tactgtacccaacgcgtgctaagtg

SEQ ID NO: 3618732 - DNA, 25 bp, Homo sapien
cgcgtgctaagtgctcgatgtacat

SEQ ID NO: 3618733 - DNA, 25 bp, Homo sapien
tacccaacgcgtgctaagtgctcga

SEQ ID NO: 3618734 - DNA, 25 bp, Homo sapien
tgttactgtacccaacgcgtgctaa

SEQ ID NO: 3618735 - DNA, 25 bp, Homo sapien
aagtcattggtgaatggctgtggtt

SEQ ID NO: 3618736 - DNA, 25 bp, Homo sapien
agtcattggtgaatggctgtggttt

SEQ ID NO: 3618737 - DNA, 25 bp, Homo sapien
gtcattggtgaatggctgtggtttc

SEQ ID NO: 3618738 - DNA, 25 bp, Homo sapien
agccccttaaaagcctgtaaatatg

SEQ ID NO: 3618739 - DNA, 25 bp, Homo sapien
gtttgtcaccaccaataaaattgtg

SEQ ID NO: 3618740 - DNA, 25 bp, Homo sapien
tgtatccctgtttgtcaccaccaat

SEQ ID NO: 3618741 - DNA, 25 bp, Homo sapien
tatgatgttgtgctccatattcact

SEQ ID NO: 3618742 - DNA, 25 bp, Homo sapien
tggagacacaacgtcacacagagtt

SEQ ID NO: 3618743 - DNA, 25 bp, Homo sapien
gaaagcagtgctgatcccttcagag

SEQ ID NO: 3618744 - DNA, 25 bp, Homo sapien
cgaaagagcctagctaacgactgga

SEQ ID NO: 3618745 - DNA, 25 bp, Homo sapien
cagctgtgcggttggtgttcctgaa

SEQ ID NO: 3618746 - DNA, 25 bp, Homo sapien
gaagaatagtatatccctcacaagg

SEQ ID NO: 3618747 - DNA, 25 bp, Homo sapien
gagtgagtctcagctgtgatcacag

SEQ ID NO: 3618748 - DNA, 25 bp, Homo sapien
tgcagaaattaccacgagtgttggc

SEQ ID NO: 3618749 - DNA, 25 bp, Homo sapien
cctcacaaggctattattgggagct

SEQ ID NO: 3618750 - DNA, 25 bp, Homo sapien
tgtgctgtcactccaactctgtcag

SEQ ID NO: 3618751 - DNA, 25 bp, Homo sapien
tccttcctgagacctaagaacagaa

SEQ ID NO: 3618752 - DNA, 25 bp, Homo sapien
cagagggaacatataaagactgtcc

SEQ ID NO: 3618753 - DNA, 25 bp, Homo sapien
tccctaatggtgttcagtatagccc

SEQ ID NO: 3618754 - DNA, 25 bp, Homo sapien
taatcagagttcagtagggcaccca

SEQ ID NO: 3618755 - DNA, 25 bp, Homo sapien
tattggcaatgagagcccacggcag

SEQ ID NO: 3618756 - DNA, 25 bp, Homo sapien
tccaagtgagaagttagcagagtcc

SEQ ID NO: 3618757 - DNA, 25 bp, Homo sapien
gaaaggatacatactacacgcagcg

SEQ ID NO: 3618758 - DNA, 25 bp, Homo sapien
cactgtgctcccagacacttggctt

SEQ ID NO: 3618759 - DNA, 25 bp, Homo sapien
ctcattttgatcctcatttggcatc

SEQ ID NO: 3618760 - DNA, 25 bp, Homo sapien
tgctcccagacacttggcttcattg

SEQ ID NO: 3618761 - DNA, 25 bp, Homo sapien
tgatcctcatttggcatctctaaac

SEQ ID NO: 3618762 - DNA, 25 bp, Homo sapien
gggatgtagcgggccttcgactgtt

SEQ ID NO: 3618763 - DNA, 25 bp, Homo sapien
cacaaagaagcgaggaagtttgcag

SEQ ID NO: 3618764 - DNA, 25 bp, Homo sapien
ttgcagaccaagttgagttcctcct

SEQ ID NO: 3618765 - DNA, 25 bp, Homo sapien
gccttcgactgttctagccccagct

SEQ ID NO: 3618766 - DNA, 25 bp, Homo sapien
gcttcagtggcatgtctaagaacgg

SEQ ID NO: 3618767 - DNA, 25 bp, Homo sapien
agaacggctcagaactcaggtaagg

SEQ ID NO: 3618768 - DNA, 25 bp, Homo sapien
tctaagaacggctcagaactcaggt

SEQ ID NO: 3618769 - DNA, 25 bp, Homo sapien
tggcatgtctaagaacggctcagaa

SEQ ID NO: 3618770 - DNA, 25 bp, Homo sapien
ttctttttggccagtgctttttggc

SEQ ID NO: 3618771 - DNA, 25 bp, Homo sapien
attctttttggccagtgctttttgg

SEQ ID NO: 3618772 - DNA, 25 bp, Homo sapien
gacattctttttggccagtgctttt

SEQ ID NO: 3618773 - DNA, 25 bp, Homo sapien
caagacattctttttggccagtgct

SEQ ID NO: 3618774 - DNA, 25 bp, Homo sapien
gacaatccaatccaaaagacaagtg

SEQ ID NO: 3618775 - DNA, 25 bp, Homo sapien
gggccaacctattccagtctgagta

SEQ ID NO: 3618776 - DNA, 25 bp, Homo sapien
tctgagtacttgtgatcaccaagga

SEQ ID NO: 3618777 - DNA, 25 bp, Homo sapien
tgaactcgaagctgatgttttattc

SEQ ID NO: 3618778 - DNA, 25 bp, Homo sapien
cattttcccatcgtccatgcggtag

SEQ ID NO: 3618779 - DNA, 25 bp, Homo sapien
ctggagctccacgagggcggaggag

SEQ ID NO: 3618780 - DNA, 25 bp, Homo sapien
tggtactgagttacagcaacttgcg

SEQ ID NO: 3618781 - DNA, 25 bp, Homo sapien
ggctgcgccgcactttcaccatttt

SEQ ID NO: 3618782 - DNA, 25 bp, Homo sapien
ctccacaatggggatgtccacgact

SEQ ID NO: 3618783 - DNA, 25 bp, Homo sapien
tgtccacgactcctgctgagggcat

SEQ ID NO: 3618784 - DNA, 25 bp, Homo sapien
gggatgtccacgactcctgctgagg

SEQ ID NO: 3618785 - DNA, 25 bp, Homo sapien
cacaatggggatgtccacgactcct

SEQ ID NO: 3618786 - DNA, 25 bp, Homo sapien
gaactcctagatttggccacttaga

SEQ ID NO: 3618787 - DNA, 25 bp, Homo sapien
gaactgtacccgaagaagtcacagg

SEQ ID NO: 3618788 - DNA, 25 bp, Homo sapien
gattctcttggtgtaatgcttagcc

SEQ ID NO: 3618789 - DNA, 25 bp, Homo sapien
cacttagaggatttcacgctggacc

SEQ ID NO: 3618790 - DNA, 25 bp, Homo sapien
gacacagttgagagttgaacacaca

SEQ ID NO: 3618791 - DNA, 25 bp, Homo sapien
tctgtgggtaagtctcaatcataca

SEQ ID NO: 3618792 - DNA, 25 bp, Homo sapien
gagctgtaagcgctgtaatcctagc

SEQ ID NO: 3618793 - DNA, 25 bp, Homo sapien
ccacacttacgaatgagaacttctg

SEQ ID NO: 3618794 - DNA, 25 bp, Homo sapien
gacaccagtcacagcgattgacgct

SEQ ID NO: 3618795 - DNA, 25 bp, Homo sapien
gagacagctctaaacgtatgacaca

SEQ ID NO: 3618796 - DNA, 25 bp, Homo sapien
tatatatgctcgataactctggaag

SEQ ID NO: 3618797 - DNA, 25 bp, Homo sapien
catacagcggtatttcacagagcaa

SEQ ID NO: 3618798 - DNA, 25 bp, Homo sapien
agtgcagtgccttctattaatggga

SEQ ID NO: 3618799 - DNA, 25 bp, Homo sapien
tgtgccactataccggactaacttc

SEQ ID NO: 3618800 - DNA, 25 bp, Homo sapien
tgttctccgactcttggcctaaagt

SEQ ID NO: 3618801 - DNA, 25 bp, Homo sapien
tacaatctcgcaggtcatagtgcag

SEQ ID NO: 3618802 - DNA, 25 bp, Homo sapien
ggttctaaacaactcttggacttga

SEQ ID NO: 3618803 - DNA, 25 bp, Homo sapien
catgaagcatctttgccaggatagg

SEQ ID NO: 3618804 - DNA, 25 bp, Homo sapien
tacacctgtggtttccttgtccagc

SEQ ID NO: 3618805 - DNA, 25 bp, Homo sapien
ccaggataggtagtacatcagtgat

SEQ ID NO: 3618806 - DNA, 25 bp, Homo sapien
ttcttgcactctccgctgaacagcg

SEQ ID NO: 3618807 - DNA, 25 bp, Homo sapien
tggagaattcctcgggtcagtgcct

SEQ ID NO: 3618808 - DNA, 25 bp, Homo sapien
tcagtgccttagcaagcacgttggg

SEQ ID NO: 3618809 - DNA, 25 bp, Homo sapien
gaccgtagggcttattgatgaccac

SEQ ID NO: 3618810 - DNA, 25 bp, Homo sapien
cgtttctgggctcggagcttctccg

SEQ ID NO: 3618811 - DNA, 25 bp, Homo sapien
tgttcccgtttctgggctcggagct

SEQ ID NO: 3618812 - DNA, 25 bp, Homo sapien
cttgttcccgtttctgggctcggag

SEQ ID NO: 3618813 - DNA, 25 bp, Homo sapien
gggctcggagcttctccgctaatct

SEQ ID NO: 3618814 - DNA, 25 bp, Homo sapien
ctgggcatttatggccgtagaggca

SEQ ID NO: 3618815 - DNA, 25 bp, Homo sapien
gcatttatggccgtagaggcagcgg

SEQ ID NO: 3618816 - DNA, 25 bp, Homo sapien
atttatggccgtagaggcagcggca

SEQ ID NO: 3618817 - DNA, 25 bp, Homo sapien
gggcatttatggccgtagaggcagc

SEQ ID NO: 3618818 - DNA, 25 bp, Homo sapien
agagactcccgcaaccttggccgtt

SEQ ID NO: 3618819 - DNA, 25 bp, Homo sapien
gacgagagtgaagagactcccgcaa

SEQ ID NO: 3618820 - DNA, 25 bp, Homo sapien
agtgaagagactcccgcaaccttgg

SEQ ID NO: 3618821 - DNA, 25 bp, Homo sapien
ctttgagacgagagtgaagagactc

SEQ ID NO: 3618822 - DNA, 25 bp, Homo sapien
ccaggcctttttatcggtgtgtgta

SEQ ID NO: 3618823 - DNA, 25 bp, Homo sapien
tatgtgattgtatacccaggccttt

SEQ ID NO: 3618824 - DNA, 25 bp, Homo sapien
tagtacgtatttgccagcgcggtgg

SEQ ID NO: 3618825 - DNA, 25 bp, Homo sapien
actggtgttaaaatgtagtacgtat

SEQ ID NO: 3618826 - DNA, 25 bp, Homo sapien
tgacattgagtgatcccttaggcag

SEQ ID NO: 3618827 - DNA, 25 bp, Homo sapien
tttccttgagcaaatccgatgatgg

SEQ ID NO: 3618828 - DNA, 25 bp, Homo sapien
tgacctctgggcacataaatctaaa

SEQ ID NO: 3618829 - DNA, 25 bp, Homo sapien
tgttcaaaccagaagtattcgctgc

SEQ ID NO: 3618830 - DNA, 25 bp, Homo sapien
ttggtggagattctacagatatgcc

SEQ ID NO: 3618831 - DNA, 25 bp, Homo sapien
taattggatgattgcacaatcacac

SEQ ID NO: 3618832 - DNA, 25 bp, Homo sapien
caaatctttgacctagaaatcccat

SEQ ID NO: 3618833 - DNA, 25 bp, Homo sapien
caattgtacaaagatgcatgcgtgg

SEQ ID NO: 3618834 - DNA, 25 bp, Homo sapien
ggcaaattcccagtaaccgcacaaa

SEQ ID NO: 3618835 - DNA, 25 bp, Homo sapien
aaacctcacattgccaggctccaga

SEQ ID NO: 3618836 - DNA, 25 bp, Homo sapien
gcaaaatggtgattaaagattcagc

SEQ ID NO: 3618837 - DNA, 25 bp, Homo sapien
caaacatttttggtatcagctaaac

SEQ ID NO: 3618838 - DNA, 25 bp, Homo sapien
cacagcttcttccatggctatgctt

SEQ ID NO: 3618839 - DNA, 25 bp, Homo sapien
gctatgctttgatggaaccagactt

SEQ ID NO: 3618840 - DNA, 25 bp, Homo sapien
cacacttgagactttgagaaggctt

SEQ ID NO: 3618841 - DNA, 25 bp, Homo sapien
tcctgcagtgttctagactctcctg

SEQ ID NO: 3618842 - DNA, 25 bp, Homo sapien
attattcctgttaggcaacgtctga

SEQ ID NO: 3618843 - DNA, 25 bp, Homo sapien
tatctatgccaagtgttatccagta

SEQ ID NO: 3618844 - DNA, 25 bp, Homo sapien
tgtatatttgagtaccatgcctgtt

SEQ ID NO: 3618845 - DNA, 25 bp, Homo sapien
tcactgtaatcaggtcaaagatcag

SEQ ID NO: 3618846 - DNA, 25 bp, Homo sapien
gtagtgcactgtggaaactcactgc

SEQ ID NO: 3618847 - DNA, 25 bp, Homo sapien
tgtctacaagcaatcgtagtgcact

SEQ ID NO: 3618848 - DNA, 25 bp, Homo sapien
tggtgcaccgttgaaatgtggccag

SEQ ID NO: 3618849 - DNA, 25 bp, Homo sapien
gcttccctgttaggtaatgcaagtc

SEQ ID NO: 3618850 - DNA, 25 bp, Homo sapien
ggtcagctaaatggctcatctgcag

SEQ ID NO: 3618851 - DNA, 25 bp, Homo sapien
gaaataagaggtatactgtttccta

SEQ ID NO: 3618852 - DNA, 25 bp, Homo sapien
gctgatgtcctctatttagcaggga

SEQ ID NO: 3618853 - DNA, 25 bp, Homo sapien
cctctatttagcagggatggtgaga

SEQ ID NO: 3618854 - DNA, 25 bp, Homo sapien
tgatacttccactgaccggctgcag

SEQ ID NO: 3618855 - DNA, 25 bp, Homo sapien
cgtttagaccaagctgtaaggccct

SEQ ID NO: 3618856 - DNA, 25 bp, Homo sapien
gagctagagaaatcaccaccgttta

SEQ ID NO: 3618857 - DNA, 25 bp, Homo sapien
gttcatttacttgccaggaccctgg

SEQ ID NO: 3618858 - DNA, 25 bp, Homo sapien
tcattctcaggacaaccgtttactt

SEQ ID NO: 3618859 - DNA, 25 bp, Homo sapien
catacatatgtcctagaactacagt

SEQ ID NO: 3618860 - DNA, 25 bp, Homo sapien
acttacctgattcctcggagcatta

SEQ ID NO: 3618861 - DNA, 25 bp, Homo sapien
gaactacagttaagtgtgttgtgga

SEQ ID NO: 3618862 - DNA, 25 bp, Homo sapien
ataaattacttatttctctgggcag

SEQ ID NO: 3618863 - DNA, 25 bp, Homo sapien
ttatataaattacttatttctctgg

SEQ ID NO: 3618864 - DNA, 25 bp, Homo sapien
atataaattacttatttctctgggc

SEQ ID NO: 3618865 - DNA, 25 bp, Homo sapien
taaattacttatttctctgggcaga

SEQ ID NO: 3618866 - DNA, 25 bp, Homo sapien
caatgtagcacttgtctaccaggca

SEQ ID NO: 3618867 - DNA, 25 bp, Homo sapien
tccttctgacaattggtttcctccc

SEQ ID NO: 3618868 - DNA, 25 bp, Homo sapien
tatcaagctacaggacaagtcttaa

SEQ ID NO: 3618869 - DNA, 25 bp, Homo sapien
cagccttcaccttattgcactaata

SEQ ID NO: 3618870 - DNA, 25 bp, Homo sapien
tcttaacctaatgcagctgggactc

SEQ ID NO: 3618871 - DNA, 25 bp, Homo sapien
tatcctagggagaggtgccattcaa

SEQ ID NO: 3618872 - DNA, 25 bp, Homo sapien
gacggctcttgaccacactaattat

SEQ ID NO: 3618873 - DNA, 25 bp, Homo sapien
tgggactcattaggctcagacggct

SEQ ID NO: 3618874 - DNA, 25 bp, Homo sapien
cccacaaagacgatgggtttgcttg

SEQ ID NO: 3618875 - DNA, 25 bp, Homo sapien
cattgaggctgcgtaggtcacagta

SEQ ID NO: 3618876 - DNA, 25 bp, Homo sapien
gatgtacgtcatagaaatagcagct

SEQ ID NO: 3618877 - DNA, 25 bp, Homo sapien
ggtcacagtaggtctggccggtgcc

SEQ ID NO: 3618878 - DNA, 25 bp, Homo sapien
ccatcaacacaagcccacttttcac

SEQ ID NO: 3618879 - DNA, 25 bp, Homo sapien
cacaagcccacttttcactcaccct

SEQ ID NO: 3618880 - DNA, 25 bp, Homo sapien
ttcactcaccctctcaggaacagga

SEQ ID NO: 3618881 - DNA, 25 bp, Homo sapien
ttgtgcaggacgcccattccagcct

SEQ ID NO: 3618882 - DNA, 25 bp, Homo sapien
caatgccatcaatgagccgaggtgt

SEQ ID NO: 3618883 - DNA, 25 bp, Homo sapien
gaacaatgccatcaatgagccgagg

SEQ ID NO: 3618884 - DNA, 25 bp, Homo sapien
atggtatcaaatttggtaagaacaa

SEQ ID NO: 3618885 - DNA, 25 bp, Homo sapien
tggtatcaaatttggtaagaacaat

SEQ ID NO: 3618886 - DNA, 25 bp, Homo sapien
gagccatagaatggtcagccaaggc

SEQ ID NO: 3618887 - DNA, 25 bp, Homo sapien
tgagccatagaatggtcagccaagg

SEQ ID NO: 3618888 - DNA, 25 bp, Homo sapien
ctgagccatagaatggtcagccaag

SEQ ID NO: 3618889 - DNA, 25 bp, Homo sapien
ctactaaggcttctcctacaaacag

SEQ ID NO: 3618890 - DNA, 25 bp, Homo sapien
caaatcaggtgtattgacagtaatg

SEQ ID NO: 3618891 - DNA, 25 bp, Homo sapien
cattgtcttgcatgcggcctgccgt

SEQ ID NO: 3618892 - DNA, 25 bp, Homo sapien
gcaccacgtcaaagccttggttacg

SEQ ID NO: 3618893 - DNA, 25 bp, Homo sapien
gtagtcaactctgaacacctggact

SEQ ID NO: 3618894 - DNA, 25 bp, Homo sapien
acttgattatatgcttggccatcac

SEQ ID NO: 3618895 - DNA, 25 bp, Homo sapien
caaaaagtcctagtttgactacctg

SEQ ID NO: 3618896 - DNA, 25 bp, Homo sapien
tgtcttgggctctggatttggttcc

SEQ ID NO: 3618897 - DNA, 25 bp, Homo sapien
tgtagtagcacaagcctgatcttct

SEQ ID NO: 3618898 - DNA, 25 bp, Homo sapien
tgcaaattccaagagaacccaagga

SEQ ID NO: 3618899 - DNA, 25 bp, Homo sapien
tgtaattgaccaacgagtctgtagt

SEQ ID NO: 3618900 - DNA, 25 bp, Homo sapien
cacaagcctgatcttctgcaaattc

SEQ ID NO: 3618901 - DNA, 25 bp, Homo sapien
aagcaatggcttccatggcaatgcc

SEQ ID NO: 3618902 - DNA, 25 bp, Homo sapien
tttcaaacaactgcaccatggtgcg

SEQ ID NO: 3618903 - DNA, 25 bp, Homo sapien
gccccagcacgaaatgtatcacagg

SEQ ID NO: 3618904 - DNA, 25 bp, Homo sapien
tgtagggcactcaaacgccgggtgt

SEQ ID NO: 3618905 - DNA, 25 bp, Homo sapien
cattaacgccgcagaaggtgacgac

SEQ ID NO: 3618906 - DNA, 25 bp, Homo sapien
gatgtcccggagcatgtctacacga

SEQ ID NO: 3618907 - DNA, 25 bp, Homo sapien
cagggactcctgtagggcttgcttt

SEQ ID NO: 3618908 - DNA, 25 bp, Homo sapien
gtctacacgacgctgtggctgcaga

SEQ ID NO: 3618909 - DNA, 25 bp, Homo sapien
gtaaattagactcttgtcccagaaa

SEQ ID NO: 3618910 - DNA, 25 bp, Homo sapien
tgcctaacacctttctgagctaagg

SEQ ID NO: 3618911 - DNA, 25 bp, Homo sapien
gaacagacgcacattacaaggacta

SEQ ID NO: 3618912 - DNA, 25 bp, Homo sapien
aggttgcagctgtgaaactcaagga

SEQ ID NO: 3618913 - DNA, 25 bp, Homo sapien
agagctggacggcaatgtctgcagc

SEQ ID NO: 3618914 - DNA, 25 bp, Homo sapien
caacttgttggcaacagattcacag

SEQ ID NO: 3618915 - DNA, 25 bp, Homo sapien
gacggcaatgtctgcagccacgttc

SEQ ID NO: 3618916 - DNA, 25 bp, Homo sapien
tcccttccaacttgttggcaacaga

SEQ ID NO: 3618917 - DNA, 25 bp, Homo sapien
atgtcttcacgactcaagctctttg

SEQ ID NO: 3618918 - DNA, 25 bp, Homo sapien
gcataccaaacatgccacccagtgt

SEQ ID NO: 3618919 - DNA, 25 bp, Homo sapien
tgatcacgcatcttgtccagcacag

SEQ ID NO: 3618920 - DNA, 25 bp, Homo sapien
acaaggcccttcagcataccaaaca

SEQ ID NO: 3618921 - DNA, 25 bp, Homo sapien
gagcagccccttcgtcatcagagct

SEQ ID NO: 3618922 - DNA, 25 bp, Homo sapien
agcagccccttcgtcatcagagctg

SEQ ID NO: 3618923 - DNA, 25 bp, Homo sapien
tgtaatccaacacttctttgttagc

SEQ ID NO: 3618924 - DNA, 25 bp, Homo sapien
taatccaacacttctttgttagcac

SEQ ID NO: 3618925 - DNA, 25 bp, Homo sapien
gtggtgggagtactgtaatccaaca

SEQ ID NO: 3618926 - DNA, 25 bp, Homo sapien
ggtgggagtactgtaatccaacact

SEQ ID NO: 3618927 - DNA, 25 bp, Homo sapien
gagccagagaccagaactcccttgc

SEQ ID NO: 3618928 - DNA, 25 bp, Homo sapien
cccttgcacccattgtgtctagata

SEQ ID NO: 3618929 - DNA, 25 bp, Homo sapien
cagaactcccttgcacccattgtgt

SEQ ID NO: 3618930 - DNA, 25 bp, Homo sapien
agccagagaccagaactcccttgca

SEQ ID NO: 3618931 - DNA, 25 bp, Homo sapien
tacccctcccatgcttctgaatgaa

SEQ ID NO: 3618932 - DNA, 25 bp, Homo sapien
ttctccatacccctcccatgcttct

SEQ ID NO: 3618933 - DNA, 25 bp, Homo sapien
tggacttctccatacccctcccatg

SEQ ID NO: 3618934 - DNA, 25 bp, Homo sapien
catacccctcccatgcttctgaatg

SEQ ID NO: 3618935 - DNA, 25 bp, Homo sapien
cccactggaagacctgacttttctg

SEQ ID NO: 3618936 - DNA, 25 bp, Homo sapien
tcctcgcgcttcctgcggatcagct

SEQ ID NO: 3618937 - DNA, 25 bp, Homo sapien
tttggaaagttctactccgttctca

SEQ ID NO: 3618938 - DNA, 25 bp, Homo sapien
actccgttctcaggacccactggaa

SEQ ID NO: 3618939 - DNA, 25 bp, Homo sapien
ctggtagccaaaggaccatcagaac

SEQ ID NO: 3618940 - DNA, 25 bp, Homo sapien
gcaatgacaaaaggaaggaccacct

SEQ ID NO: 3618941 - DNA, 25 bp, Homo sapien
tcatgtcccagtatatccaaagaac

SEQ ID NO: 3618942 - DNA, 25 bp, Homo sapien
tggtgaccatttgagtgagaagcag

SEQ ID NO: 3618943 - DNA, 25 bp, Homo sapien
acctcagtccttagcaccgtgttaa

SEQ ID NO: 3618944 - DNA, 25 bp, Homo sapien
cttttccccccgtgtctcaatcatg

SEQ ID NO: 3618945 - DNA, 25 bp, Homo sapien
gcttttccccccgtgtctcaatcat

SEQ ID NO: 3618946 - DNA, 25 bp, Homo sapien
ggcttttccccccgtgtctcaatca

SEQ ID NO: 3618947 - DNA, 25 bp, Homo sapien
cttcatggtagtgggagcacggatc

SEQ ID NO: 3618948 - DNA, 25 bp, Homo sapien
gcacggatcttactgctctcctctg

SEQ ID NO: 3618949 - DNA, 25 bp, Homo sapien
gtagtgggagcacggatcttactgc

SEQ ID NO: 3618950 - DNA, 25 bp, Homo sapien
aatttcttcatggtagtgggagcac

SEQ ID NO: 3618951 - DNA, 25 bp, Homo sapien
actgggtagcaaattaggaatgtct

SEQ ID NO: 3618952 - DNA, 25 bp, Homo sapien
ggtttatctttctaccccatgcaga

SEQ ID NO: 3618953 - DNA, 25 bp, Homo sapien
tcacacccaagaggacaatgagaac

SEQ ID NO: 3618954 - DNA, 25 bp, Homo sapien
cacctttgaaccaccttcagagagg

SEQ ID NO: 3618955 - DNA, 25 bp, Homo sapien
gatgcacgtcatctatcaatttgtc

SEQ ID NO: 3618956 - DNA, 25 bp, Homo sapien
ttgtcccgaaacagccgatgcacgt

SEQ ID NO: 3618957 - DNA, 25 bp, Homo sapien
cgaaggagccgcaggaagtcatttt

SEQ ID NO: 3618958 - DNA, 25 bp, Homo sapien
gatctctgtgcggtacttgtcccga

SEQ ID NO: 3618959 - DNA, 25 bp, Homo sapien
tgcctgggcccagtagctgctgttt

SEQ ID NO: 3618960 - DNA, 25 bp, Homo sapien
cagttacgtcatcatatacactggc

SEQ ID NO: 3618961 - DNA, 25 bp, Homo sapien
tacactggctgcaattaatcagagt

SEQ ID NO: 3618962 - DNA, 25 bp, Homo sapien
tatgttaacaatgcaatcgtccctc

SEQ ID NO: 3618963 - DNA, 25 bp, Homo sapien
catgggtgaaggagttgttacctcc

SEQ ID NO: 3618964 - DNA, 25 bp, Homo sapien
ttatacttgagtgtgagtgcctcat

SEQ ID NO: 3618965 - DNA, 25 bp, Homo sapien
caaactggttgtccagtttatactt

SEQ ID NO: 3618966 - DNA, 25 bp, Homo sapien
tcatgggtgaaggagttgttacctc

SEQ ID NO: 3618967 - DNA, 25 bp, Homo sapien
cagtgttcagactatccccagaaaa

SEQ ID NO: 3618968 - DNA, 25 bp, Homo sapien
gaaagagtatgtctcagtgttcaga

SEQ ID NO: 3618969 - DNA, 25 bp, Homo sapien
acaagaggatgttggggcacttctc

SEQ ID NO: 3618970 - DNA, 25 bp, Homo sapien
cagactatccccagaaaacccaggt

SEQ ID NO: 3618971 - DNA, 25 bp, Homo sapien
gaattcggctagagttgagacacca

SEQ ID NO: 3618972 - DNA, 25 bp, Homo sapien
tcacctaggctcgaaacaacaaaac

SEQ ID NO: 3618973 - DNA, 25 bp, Homo sapien
gagaatcccaaaggcgccggaattc

SEQ ID NO: 3618974 - DNA, 25 bp, Homo sapien
catgggagccaaaagggaagtagtc

SEQ ID NO: 3618975 - DNA, 25 bp, Homo sapien
tcaacgcgttaacgggtccggtgca

SEQ ID NO: 3618976 - DNA, 25 bp, Homo sapien
gcatgagtcgctaacgccctggaag

SEQ ID NO: 3618977 - DNA, 25 bp, Homo sapien
gccctggaagcaccagagcacaagc

SEQ ID NO: 3618978 - DNA, 25 bp, Homo sapien
tgcagcagcacggaacgaatcaacg

SEQ ID NO: 3618979 - DNA, 25 bp, Homo sapien
gcgcgggacacgtcacaccagtggc

SEQ ID NO: 3618980 - DNA, 25 bp, Homo sapien
ggccggcgccgggaattcaggccgc

SEQ ID NO: 3618981 - DNA, 25 bp, Homo sapien
ttcctgctgcgccaagcgcgggaca

SEQ ID NO: 3618982 - DNA, 25 bp, Homo sapien
gccgggaattcaggccgcgttcgcc

SEQ ID NO: 3618983 - DNA, 25 bp, Homo sapien
gacacaccctgatgcccagctattt

SEQ ID NO: 3618984 - DNA, 25 bp, Homo sapien
ttacagggacacaccctgatgccca

SEQ ID NO: 3618985 - DNA, 25 bp, Homo sapien
gagattacagggacacaccctgatg

SEQ ID NO: 3618986 - DNA, 25 bp, Homo sapien
agggacacaccctgatgcccagcta

SEQ ID NO: 3618987 - DNA, 25 bp, Homo sapien
gaaccccagtgttttgtgcacccgc

SEQ ID NO: 3618988 - DNA, 25 bp, Homo sapien
caatagcgagtgatgagcgggatcc

SEQ ID NO: 3618989 - DNA, 25 bp, Homo sapien
gcctgggccggctattacgactaca

SEQ ID NO: 3618990 - DNA, 25 bp, Homo sapien
tgacagtggagcacattggtcccct

SEQ ID NO: 3618991 - DNA, 25 bp, Homo sapien
cagcatactgcagcgctgttcataa

SEQ ID NO: 3618992 - DNA, 25 bp, Homo sapien
caggacttccagcatcttgcctaca

SEQ ID NO: 3618993 - DNA, 25 bp, Homo sapien
cacgctgtttgcagcggctctgcag

SEQ ID NO: 3618994 - DNA, 25 bp, Homo sapien
tcataacgcccatgtgggatcaccg

SEQ ID NO: 3618995 - DNA, 25 bp, Homo sapien
tttctgtcgcaaagaagctcgcgcg

SEQ ID NO: 3618996 - DNA, 25 bp, Homo sapien
gccctccgaggagaatgtcaccttt

SEQ ID NO: 3618997 - DNA, 25 bp, Homo sapien
acacgcaagcggcatgaaagggccc

SEQ ID NO: 3618998 - DNA, 25 bp, Homo sapien
tttcgcttgcctcgctggaagagcc

SEQ ID NO: 3618999 - DNA, 25 bp, Homo sapien
cttcctctgctcttcgggttgtcat

SEQ ID NO: 3619000 - DNA, 25 bp, Homo sapien
tgtggcagtgattcagcaagtgcat

SEQ ID NO: 3619001 - DNA, 25 bp, Homo sapien
gaccaggttttagcactcaactgaa

SEQ ID NO: 3619002 - DNA, 25 bp, Homo sapien
caaggttcttaatcacagctgccga

SEQ ID NO: 3619003 - DNA, 25 bp, Homo sapien
caggaaagaacccatggacttgcct

SEQ ID NO: 3619004 - DNA, 25 bp, Homo sapien
gattatcctgccgttctaagatggg

SEQ ID NO: 3619005 - DNA, 25 bp, Homo sapien
gaaagcgactgcgtattagaccaca

SEQ ID NO: 3619006 - DNA, 25 bp, Homo sapien
caagatatgatgacagttaccaggt

SEQ ID NO: 3619007 - DNA, 25 bp, Homo sapien
aaggtgcatggcgtcttggattcca

SEQ ID NO: 3619008 - DNA, 25 bp, Homo sapien
tatgtgacagttccacagctccagc

SEQ ID NO: 3619009 - DNA, 25 bp, Homo sapien
tcacagatccaccaaagagaaagca

SEQ ID NO: 3619010 - DNA, 25 bp, Homo sapien
gctgaaagagtgtccgccatcaggg

SEQ ID NO: 3619011 - DNA, 25 bp, Homo sapien
tcctctgtcactacggtgggaaaag

SEQ ID NO: 3619012 - DNA, 25 bp, Homo sapien
gttgctctgccagcctttcacagga

SEQ ID NO: 3619013 - DNA, 25 bp, Homo sapien
gagacagccctgtagcctagtagtt

SEQ ID NO: 3619014 - DNA, 25 bp, Homo sapien
tcaagtcaaagaagctgtcatgcgt

SEQ ID NO: 3619015 - DNA, 25 bp, Homo sapien
ttcatgtactacgtcgatggcaggg

SEQ ID NO: 3619016 - DNA, 25 bp, Homo sapien
cctgatggtggctttcgtcaagtca

SEQ ID NO: 3619017 - DNA, 25 bp, Homo sapien
gattgcaggcctcaccatggatggt

SEQ ID NO: 3619018 - DNA, 25 bp, Homo sapien
ggaaaccctggaatgggcatcagga

SEQ ID NO: 3619019 - DNA, 25 bp, Homo sapien
aagaagcctagattgcaggcctcac

SEQ ID NO: 3619020 - DNA, 25 bp, Homo sapien
gatggtcttcctagttgcctgggga

SEQ ID NO: 3619021 - DNA, 25 bp, Homo sapien
ttcacctgagatcacaagcccatgg

SEQ ID NO: 3619022 - DNA, 25 bp, Homo sapien
gggctcagggttcaatgccttcacc

SEQ ID NO: 3619023 - DNA, 25 bp, Homo sapien
tcatcagtggtctggctaaagctga

SEQ ID NO: 3619024 - DNA, 25 bp, Homo sapien
gacacaaacctagaagcctagaggc

SEQ ID NO: 3619025 - DNA, 25 bp, Homo sapien
tctgttctcagtaagtttgttgttg

SEQ ID NO: 3619026 - DNA, 25 bp, Homo sapien
atctgttctcagtaagtttgttgtt

SEQ ID NO: 3619027 - DNA, 25 bp, Homo sapien
tcatctgttctcagtaagtttgttg

SEQ ID NO: 3619028 - DNA, 25 bp, Homo sapien
catctgttctcagtaagtttgttgt

SEQ ID NO: 3619029 - DNA, 25 bp, Homo sapien
tttttctagaagatgccacagtttc

SEQ ID NO: 3619030 - DNA, 25 bp, Homo sapien
ttttaaatgtttgctaatctggtgg

SEQ ID NO: 3619031 - DNA, 25 bp, Homo sapien
ggctgtaccaatttaagttcctaca

SEQ ID NO: 3619032 - DNA, 25 bp, Homo sapien
ttcatgttcttgctaacgttcagag

SEQ ID NO: 3619033 - DNA, 25 bp, Homo sapien
agtcctcccctacatctgttttctt

SEQ ID NO: 3619034 - DNA, 25 bp, Homo sapien
tttgttgttctttagtcaaagatcc

SEQ ID NO: 3619035 - DNA, 25 bp, Homo sapien
tttactcaggaagtcctcccctaca

SEQ ID NO: 3619036 - DNA, 25 bp, Homo sapien
tgttctttagtcaaagatccaattc

SEQ ID NO: 3619037 - DNA, 25 bp, Homo sapien
gaacaacggttgaagcaggcaagtt

SEQ ID NO: 3619038 - DNA, 25 bp, Homo sapien
taccatttgagcctagaatattctg

SEQ ID NO: 3619039 - DNA, 25 bp, Homo sapien
gaatgtttggtagactcatctgtaa

SEQ ID NO: 3619040 - DNA, 25 bp, Homo sapien
gaagtctgtctgcatgaagaatcat

SEQ ID NO: 3619041 - DNA, 25 bp, Homo sapien
ctcactacaatactccgcccgcgtt

SEQ ID NO: 3619042 - DNA, 25 bp, Homo sapien
aactcttcacaaaatttagatctgt

SEQ ID NO: 3619043 - DNA, 25 bp, Homo sapien
caccagtgaaaaacgggctaaccag

SEQ ID NO: 3619044 - DNA, 25 bp, Homo sapien
gcgcctgtccgtaagtaccaactct

SEQ ID NO: 3619045 - DNA, 25 bp, Homo sapien
aaggtgctgagggagtctgcgcggg

SEQ ID NO: 3619046 - DNA, 25 bp, Homo sapien
ctgcgcgggacaaaatcattttcct

SEQ ID NO: 3619047 - DNA, 25 bp, Homo sapien
ctgagggagtctgcgcgggacaaaa

SEQ ID NO: 3619048 - DNA, 25 bp, Homo sapien
gagtctgcgcgggacaaaatcattt

SEQ ID NO: 3619049 - DNA, 25 bp, Homo sapien
gtagtgcggtggcgtcgtgatctca

SEQ ID NO: 3619050 - DNA, 25 bp, Homo sapien
ttacagacacccgccaccgcgccca

SEQ ID NO: 3619051 - DNA, 25 bp, Homo sapien
ggattacagacacccgccaccgcgc

SEQ ID NO: 3619052 - DNA, 25 bp, Homo sapien
tgatctcagctgactgcaacctccg

SEQ ID NO: 3619053 - DNA, 25 bp, Homo sapien
gaagtttccagtaggatcctgacca

SEQ ID NO: 3619054 - DNA, 25 bp, Homo sapien
gatgacttaagatccacggcagcca

SEQ ID NO: 3619055 - DNA, 25 bp, Homo sapien
tcagcaacggctggaaagcagtctt

SEQ ID NO: 3619056 - DNA, 25 bp, Homo sapien
tctggcatgccttgcgaagtccggt

SEQ ID NO: 3619057 - DNA, 25 bp, Homo sapien
tcggtgggcccgtctagtttctgca

SEQ ID NO: 3619058 - DNA, 25 bp, Homo sapien
tttctgcacccgtcaaaggctggag

SEQ ID NO: 3619059 - DNA, 25 bp, Homo sapien
cttaacacagactggaacctggctg

SEQ ID NO: 3619060 - DNA, 25 bp, Homo sapien
tgtggctgcctatgacaccttcagt

SEQ ID NO: 3619061 - DNA, 25 bp, Homo sapien
caggttttcagccaggttgtgctca

SEQ ID NO: 3619062 - DNA, 25 bp, Homo sapien
gacagtgacgcatagaacagccgaa

SEQ ID NO: 3619063 - DNA, 25 bp, Homo sapien
catggatggaattaccaggcaaggc

SEQ ID NO: 3619064 - DNA, 25 bp, Homo sapien
tgtgggctcatctgcagaaggtcta

SEQ ID NO: 3619065 - DNA, 25 bp, Homo sapien
cactgtggaatcactaaatcgggct

SEQ ID NO: 3619066 - DNA, 25 bp, Homo sapien
gctagactacgcatggaaccaagag

SEQ ID NO: 3619067 - DNA, 25 bp, Homo sapien
tacacacgagatcacgcagcgtttg

SEQ ID NO: 3619068 - DNA, 25 bp, Homo sapien
caagatatttgctatggcctgaacg

SEQ ID NO: 3619069 - DNA, 25 bp, Homo sapien
tctgactgattaagccaaaggcacc

SEQ ID NO: 3619070 - DNA, 25 bp, Homo sapien
tggtgcaatgccaaacagcttctgc

SEQ ID NO: 3619071 - DNA, 25 bp, Homo sapien
gatttagcatggagcacagtcacct

SEQ ID NO: 3619072 - DNA, 25 bp, Homo sapien
tctctgtgccgctggatggtaagct

SEQ ID NO: 3619073 - DNA, 25 bp, Homo sapien
ggcgccattcacaggcagtgcctgc

SEQ ID NO: 3619074 - DNA, 25 bp, Homo sapien
cctggcgccattcacaggcagtgcc

SEQ ID NO: 3619075 - DNA, 25 bp, Homo sapien
gtgcctgccctggccctgtgctcac

SEQ ID NO: 3619076 - DNA, 25 bp, Homo sapien
cagtgcctgccctggccctgtgctc

SEQ ID NO: 3619077 - DNA, 25 bp, Homo sapien
ctctctggcacccacggcgcccctg

SEQ ID NO: 3619078 - DNA, 25 bp, Homo sapien
ccgggtctcggaggcgcgaacacca

SEQ ID NO: 3619079 - DNA, 25 bp, Homo sapien
tgcttgcctctgtccgggtctcgga

SEQ ID NO: 3619080 - DNA, 25 bp, Homo sapien
tcccaagcctgcgaccgcgcggcat

SEQ ID NO: 3619081 - DNA, 25 bp, Homo sapien
tgtgaactaccgtgctccgcctggc

SEQ ID NO: 3619082 - DNA, 25 bp, Homo sapien
aggtgtgaactaccgtgctccgcct

SEQ ID NO: 3619083 - DNA, 25 bp, Homo sapien
taggtgtgaactaccgtgctccgcc

SEQ ID NO: 3619084 - DNA, 25 bp, Homo sapien
tataggtgtgaactaccgtgctccg

SEQ ID NO: 3619085 - DNA, 25 bp, Homo sapien
gattctaaccctgtgggagaactcc

SEQ ID NO: 3619086 - DNA, 25 bp, Homo sapien
taatgacgtcaaatgcacagtccag

SEQ ID NO: 3619087 - DNA, 25 bp, Homo sapien
gtacctggcagttgtattaatgacg

SEQ ID NO: 3619088 - DNA, 25 bp, Homo sapien
gaccgtctgtatccgagtgttgatc

SEQ ID NO: 3619089 - DNA, 25 bp, Homo sapien
ggacttggatgtgcttgagacccct

SEQ ID NO: 3619090 - DNA, 25 bp, Homo sapien
tgcttgagaccccttcccctaattg

SEQ ID NO: 3619091 - DNA, 25 bp, Homo sapien
tcactgtgcggagccttcgaaggac

SEQ ID NO: 3619092 - DNA, 25 bp, Homo sapien
gggcttgacaggctcttcgtcactg

SEQ ID NO: 3619093 - DNA, 25 bp, Homo sapien
ccatggccacagttagcagttacat

SEQ ID NO: 3619094 - DNA, 25 bp, Homo sapien
catggccacagttagcagttacata

SEQ ID NO: 3619095 - DNA, 25 bp, Homo sapien
ccacagttagcagttacatagtcag

SEQ ID NO: 3619096 - DNA, 25 bp, Homo sapien
tggccacagttagcagttacatagt

SEQ ID NO: 3619097 - DNA, 25 bp, Homo sapien
gatacagtctcactctgtcttgccc

SEQ ID NO: 3619098 - DNA, 25 bp, Homo sapien
cagtggtgtgatcttggctcactgc

SEQ ID NO: 3619099 - DNA, 25 bp, Homo sapien
tgagatacagtctcactctgtcttg

SEQ ID NO: 3619100 - DNA, 25 bp, Homo sapien
aggctggagtgtgcagtggtgtgat

SEQ ID NO: 3619101 - DNA, 25 bp, Homo sapien
tcatctttctggagcctgagcatct

SEQ ID NO: 3619102 - DNA, 25 bp, Homo sapien
aagagctgccgcatggagcttccct

SEQ ID NO: 3619103 - DNA, 25 bp, Homo sapien
gcttccctgactggtgacctccacc

SEQ ID NO: 3619104 - DNA, 25 bp, Homo sapien
cctgactggtgacctccaccctctt

SEQ ID NO: 3619105 - DNA, 25 bp, Homo sapien
tatagggcttgtagtaatgaaagct

SEQ ID NO: 3619106 - DNA, 25 bp, Homo sapien
gagtaggaagacttatagggcttgt

SEQ ID NO: 3619107 - DNA, 25 bp, Homo sapien
gaggctgtgggagtaggaagactta

SEQ ID NO: 3619108 - DNA, 25 bp, Homo sapien
ggaagacttatagggcttgtagtaa

SEQ ID NO: 3619109 - DNA, 25 bp, Homo sapien
cttgtgccttcggttctgattccat

SEQ ID NO: 3619110 - DNA, 25 bp, Homo sapien
tctgattccataatagcaaatgacc

SEQ ID NO: 3619111 - DNA, 25 bp, Homo sapien
aatgacccaagcagcacatactcct

SEQ ID NO: 3619112 - DNA, 25 bp, Homo sapien
cctttctcttgttctaagaaatctc

SEQ ID NO: 3619113 - DNA, 25 bp, Homo sapien
tccagcgggtcttgttctctgaacc

SEQ ID NO: 3619114 - DNA, 25 bp, Homo sapien
gcctggtggtctagactctttccag

SEQ ID NO: 3619115 - DNA, 25 bp, Homo sapien
taaaatgttagggtgcctggtggtc

SEQ ID NO: 3619116 - DNA, 25 bp, Homo sapien
tctttccagcgggtcttgttctctg

SEQ ID NO: 3619117 - DNA, 25 bp, Homo sapien
ggtttaattgccaccacaatcagag

SEQ ID NO: 3619118 - DNA, 25 bp, Homo sapien
caacgcattctatgagctcttgggt

SEQ ID NO: 3619119 - DNA, 25 bp, Homo sapien
tggcctggccagtatctagtgtgac

SEQ ID NO: 3619120 - DNA, 25 bp, Homo sapien
ggtgagtcccacacgtcctctggat

SEQ ID NO: 3619121 - DNA, 25 bp, Homo sapien
gctcagtgctgggaagacgtcatcc

SEQ ID NO: 3619122 - DNA, 25 bp, Homo sapien
tcagcggcatcaagtccaaggacag

SEQ ID NO: 3619123 - DNA, 25 bp, Homo sapien
gagtggaccgcagtttcatgaaagc

SEQ ID NO: 3619124 - DNA, 25 bp, Homo sapien
gagagaggctcctttagccaaggcc

SEQ ID NO: 3619125 - DNA, 25 bp, Homo sapien
ttagacgtgagtctgcatccgccgc

SEQ ID NO: 3619126 - DNA, 25 bp, Homo sapien
tgaaggtgttgacgctgtagtagcc

SEQ ID NO: 3619127 - DNA, 25 bp, Homo sapien
tcacactgcgtgtccaggaaggagc

SEQ ID NO: 3619128 - DNA, 25 bp, Homo sapien
aaaccgctgcccgtagtcgtagagg

SEQ ID NO: 3619129 - DNA, 25 bp, Homo sapien
agcaacctggtagggagcaaactca

SEQ ID NO: 3619130 - DNA, 25 bp, Homo sapien
tttccaggctgagcccgtcccctta

SEQ ID NO: 3619131 - DNA, 25 bp, Homo sapien
gagaggaagaggagcgtcacctggt

SEQ ID NO: 3619132 - DNA, 25 bp, Homo sapien
ggctgagcccgtccccttatgcggg

SEQ ID NO: 3619133 - DNA, 25 bp, Homo sapien
tgcagggaaggtgcaggggaagaag

SEQ ID NO: 3619134 - DNA, 25 bp, Homo sapien
gggaaggtgcaggggaagaaggaca

SEQ ID NO: 3619135 - DNA, 25 bp, Homo sapien
ctgcagggaaggtgcaggggaagaa

SEQ ID NO: 3619136 - DNA, 25 bp, Homo sapien
cagggaaggtgcaggggaagaagga

SEQ ID NO: 3619137 - DNA, 25 bp, Homo sapien
tcttgctggaattcaccccggtcca

SEQ ID NO: 3619138 - DNA, 25 bp, Homo sapien
gctgtttcaggactgagtcttgctg

SEQ ID NO: 3619139 - DNA, 25 bp, Homo sapien
cttgctggaattcaccccggtccat

SEQ ID NO: 3619140 - DNA, 25 bp, Homo sapien
gtcttgctggaattcaccccggtcc

SEQ ID NO: 3619141 - DNA, 25 bp, Homo sapien
ctccacttcccccaaggaaaagatg

SEQ ID NO: 3619142 - DNA, 25 bp, Homo sapien
actcaaaagattgccctgtataacc

SEQ ID NO: 3619143 - DNA, 25 bp, Homo sapien
gataggaggtggctaaacctccact

SEQ ID NO: 3619144 - DNA, 25 bp, Homo sapien
cccaaaaaaggctgctcagtagata

SEQ ID NO: 3619145 - DNA, 25 bp, Homo sapien
gacaactaggtagatgatggcccat

SEQ ID NO: 3619146 - DNA, 25 bp, Homo sapien
tgttacgaccgaggcaaccagaaac

SEQ ID NO: 3619147 - DNA, 25 bp, Homo sapien
cgtagccgagggaaaagtcagtttg

SEQ ID NO: 3619148 - DNA, 25 bp, Homo sapien
taaacgtctgtgagcctctaccagg

SEQ ID NO: 3619149 - DNA, 25 bp, Homo sapien
gaacacaagcacagtacagcaggca

SEQ ID NO: 3619150 - DNA, 25 bp, Homo sapien
gagtgtgtgcctcacctattgtggg

SEQ ID NO: 3619151 - DNA, 25 bp, Homo sapien
ggcacacactcacatttgttggctg

SEQ ID NO: 3619152 - DNA, 25 bp, Homo sapien
gttcattgagaagcctctagtccca

SEQ ID NO: 3619153 - DNA, 25 bp, Homo sapien
gaggctggttccttgtggacaattt

SEQ ID NO: 3619154 - DNA, 25 bp, Homo sapien
tttccactcggatatcatttttggc

SEQ ID NO: 3619155 - DNA, 25 bp, Homo sapien
tttggctgacacaacacctttgaga

SEQ ID NO: 3619156 - DNA, 25 bp, Homo sapien
tgatggtggagtgctcctcaccctc

SEQ ID NO: 3619157 - DNA, 25 bp, Homo sapien
gcaaggatcaaaccacaaaccgctt

SEQ ID NO: 3619158 - DNA, 25 bp, Homo sapien
cagttcctgactgaaagagctatgt

SEQ ID NO: 3619159 - DNA, 25 bp, Homo sapien
ggctcacatacaccgatgcatcaga

SEQ ID NO: 3619160 - DNA, 25 bp, Homo sapien
gaagttcagtctagtccaggtcaac

SEQ ID NO: 3619161 - DNA, 25 bp, Homo sapien
gacccctgttcattgcactcctgct

SEQ ID NO: 3619162 - DNA, 25 bp, Homo sapien
ggacccctgttcattgcactcctgc

SEQ ID NO: 3619163 - DNA, 25 bp, Homo sapien
aggacccctgttcattgcactcctg

SEQ ID NO: 3619164 - DNA, 25 bp, Homo sapien
gctctccggggcagcctaagcctgg

SEQ ID NO: 3619165 - DNA, 25 bp, Homo sapien
tgagatcccggatctccctcccgta

SEQ ID NO: 3619166 - DNA, 25 bp, Homo sapien
cccctccctgagatcccggatctcc

SEQ ID NO: 3619167 - DNA, 25 bp, Homo sapien
gcagcctaagcctggcctttttctc

SEQ ID NO: 3619168 - DNA, 25 bp, Homo sapien
gaacgccacgatggttgccataagg

SEQ ID NO: 3619169 - DNA, 25 bp, Homo sapien
gctcctacggccaccccaatgatga

SEQ ID NO: 3619170 - DNA, 25 bp, Homo sapien
cgatggttgccataaggacgaggaa

SEQ ID NO: 3619171 - DNA, 25 bp, Homo sapien
acgggcacagcagaacgccacgatg

SEQ ID NO: 3619172 - DNA, 25 bp, Homo sapien
gcccggctcccgacttcatttccga

SEQ ID NO: 3619173 - DNA, 25 bp, Homo sapien
agatgacgccctcctcggtgctgat

SEQ ID NO: 3619174 - DNA, 25 bp, Homo sapien
agaacgttctccttccaggaccagg

SEQ ID NO: 3619175 - DNA, 25 bp, Homo sapien
ttgtagatggtctggaagtcggccc

SEQ ID NO: 3619176 - DNA, 25 bp, Homo sapien
gatgatctcagtgtcggagccgaag

SEQ ID NO: 3619177 - DNA, 25 bp, Homo sapien
ccacccaggtattggcaaaagtgac

SEQ ID NO: 3619178 - DNA, 25 bp, Homo sapien
cacccaggtattggcaaaagtgact

SEQ ID NO: 3619179 - DNA, 25 bp, Homo sapien
tggccacccaggtattggcaaaagt

SEQ ID NO: 3619180 - DNA, 25 bp, Homo sapien
cccgcccgccgtccctggagcactc

SEQ ID NO: 3619181 - DNA, 25 bp, Homo sapien
ggcgtgctccggatgaagcacttga

SEQ ID NO: 3619182 - DNA, 25 bp, Homo sapien
cggcggcggcgtgctccggatgaag

SEQ ID NO: 3619183 - DNA, 25 bp, Homo sapien
gcggcgtgctccggatgaagcactt

SEQ ID NO: 3619184 - DNA, 25 bp, Homo sapien
ccgtggagggcgtgctgggtctggg

SEQ ID NO: 3619185 - DNA, 25 bp, Homo sapien
taaagtgcaaggtagaggactcaga

SEQ ID NO: 3619186 - DNA, 25 bp, Homo sapien
cctctcaagggatcatgagcgaatg

SEQ ID NO: 3619187 - DNA, 25 bp, Homo sapien
tgagaaacagcgtcccattaggcac

SEQ ID NO: 3619188 - DNA, 25 bp, Homo sapien
ccgaaggcctgtatgtgcaaggtaa

SEQ ID NO: 3619189 - DNA, 25 bp, Homo sapien
tctaaagtgacagcagatgtcagct

SEQ ID NO: 3619190 - DNA, 25 bp, Homo sapien
cagaaacgccaatgctcatttgatg

SEQ ID NO: 3619191 - DNA, 25 bp, Homo sapien
gtctaaagtgacagcagatgtcagc

SEQ ID NO: 3619192 - DNA, 25 bp, Homo sapien
ctgcttttccccagaaacgccaatg

SEQ ID NO: 3619193 - DNA, 25 bp, Homo sapien
tcctggcgcacggatttgagggtca

SEQ ID NO: 3619194 - DNA, 25 bp, Homo sapien
ggcacacgtacttgcccgcgtcctc

SEQ ID NO: 3619195 - DNA, 25 bp, Homo sapien
gtcctcctggcgcacggatttgagg

SEQ ID NO: 3619196 - DNA, 25 bp, Homo sapien
cgcgtcctcctggcgcacggatttg

SEQ ID NO: 3619197 - DNA, 25 bp, Homo sapien
agagcccagatccacgagcaaggat

SEQ ID NO: 3619198 - DNA, 25 bp, Homo sapien
gagccccgcttcatccagacgatgg

SEQ ID NO: 3619199 - DNA, 25 bp, Homo sapien
ggttctgtggtcatccggggcccaa

SEQ ID NO: 3619200 - DNA, 25 bp, Homo sapien
gtcagggatgggttgccggtccagg

SEQ ID NO: 3619201 - DNA, 25 bp, Homo sapien
tagacgtcaaccgtgcggctgaggt

SEQ ID NO: 3619202 - DNA, 25 bp, Homo sapien
gctctgagaagtacgtgtagtccac

SEQ ID NO: 3619203 - DNA, 25 bp, Homo sapien
cctcacaggagacgggctctgagaa

SEQ ID NO: 3619204 - DNA, 25 bp, Homo sapien
gtggtcctgtacacctctccagatg

SEQ ID NO: 3619205 - DNA, 25 bp, Homo sapien
tctgaaagtggagtcagcttaagcc

SEQ ID NO: 3619206 - DNA, 25 bp, Homo sapien
taagcctctcccaatcaatgtctaa

SEQ ID NO: 3619207 - DNA, 25 bp, Homo sapien
cttaagcctctcccaatcaatgtct

SEQ ID NO: 3619208 - DNA, 25 bp, Homo sapien
aagcctctcccaatcaatgtctaat

SEQ ID NO: 3619209 - DNA, 25 bp, Homo sapien
gtgtttagggaccaggagcagagac

SEQ ID NO: 3619210 - DNA, 25 bp, Homo sapien
ggtgtttagggaccaggagcagaga

SEQ ID NO: 3619211 - DNA, 25 bp, Homo sapien
ctggtgtttagggaccaggagcaga

SEQ ID NO: 3619212 - DNA, 25 bp, Homo sapien
tggtgtttagggaccaggagcagag

SEQ ID NO: 3619213 - DNA, 25 bp, Homo sapien
ggaaagtgacgacgttgtcctccag

SEQ ID NO: 3619214 - DNA, 25 bp, Homo sapien
tgacagctgggttggcctttgcaga

SEQ ID NO: 3619215 - DNA, 25 bp, Homo sapien
gctgtggctccaccgagaggttgac

SEQ ID NO: 3619216 - DNA, 25 bp, Homo sapien
cctttgcagagcagtggaaagtgac

SEQ ID NO: 3619217 - DNA, 25 bp, Homo sapien
gtcacttgtagaccggagaaagaat

SEQ ID NO: 3619218 - DNA, 25 bp, Homo sapien
acttgtagaccggagaaagaatggg

SEQ ID NO: 3619219 - DNA, 25 bp, Homo sapien
agaggagagtcacttgtagaccgga

SEQ ID NO: 3619220 - DNA, 25 bp, Homo sapien
gagagtcacttgtagaccggagaaa

SEQ ID NO: 3619221 - DNA, 25 bp, Homo sapien
gactgtgaatcagacaagaatttca

SEQ ID NO: 3619222 - DNA, 25 bp, Homo sapien
tgacagggtgttagagagaaagacc

SEQ ID NO: 3619223 - DNA, 25 bp, Homo sapien
acatagggcccgacaatgacagggt

SEQ ID NO: 3619224 - DNA, 25 bp, Homo sapien
gagaaagaccaagtcaaacaacgag

SEQ ID NO: 3619225 - DNA, 25 bp, Homo sapien
cccatggtgtccttagtaaacagtt

SEQ ID NO: 3619226 - DNA, 25 bp, Homo sapien
tccttagtaaacagttggatgctga

SEQ ID NO: 3619227 - DNA, 25 bp, Homo sapien
tgcttttgctgagtttggatgcttc

SEQ ID NO: 3619228 - DNA, 25 bp, Homo sapien
ctgagggctttgtcttccgttgggt

SEQ ID NO: 3619229 - DNA, 25 bp, Homo sapien
ggccagctagattgtcacttttgtc

SEQ ID NO: 3619230 - DNA, 25 bp, Homo sapien
gtaacattttgtacaggcctcctga

SEQ ID NO: 3619231 - DNA, 25 bp, Homo sapien
cacttttgtccaggagtctgtaaca

SEQ ID NO: 3619232 - DNA, 25 bp, Homo sapien
tcgcagggggccagctagattgtca

SEQ ID NO: 3619233 - DNA, 25 bp, Homo sapien
aaggctccttggtacaggggtatgt

SEQ ID NO: 3619234 - DNA, 25 bp, Homo sapien
gggacctccttcagtcaccctagct

SEQ ID NO: 3619235 - DNA, 25 bp, Homo sapien
gtgaatgaggatgccagaaggctcc

SEQ ID NO: 3619236 - DNA, 25 bp, Homo sapien
agtcaccctagctctaggcttggcc

SEQ ID NO: 3619237 - DNA, 25 bp, Homo sapien
gaagagggtgctgacgatgctctcc

SEQ ID NO: 3619238 - DNA, 25 bp, Homo sapien
gatggctttgttggtggcacgacac

SEQ ID NO: 3619239 - DNA, 25 bp, Homo sapien
ggtggcacgacacacgatgctctgg

SEQ ID NO: 3619240 - DNA, 25 bp, Homo sapien
ctggatgtcaatggtgaccgacgtc

SEQ ID NO: 3619241 - DNA, 25 bp, Homo sapien
caacgagatggtttgcaaccagcag

SEQ ID NO: 3619242 - DNA, 25 bp, Homo sapien
gaagcaacgagatggtttgcaacca

SEQ ID NO: 3619243 - DNA, 25 bp, Homo sapien
gctctgtaggaagcaacgagatggt

SEQ ID NO: 3619244 - DNA, 25 bp, Homo sapien
agatggtttgcaaccagcagggact

SEQ ID NO: 3619245 - DNA, 25 bp, Homo sapien
gtgcagcgggtatcccagggaggaa

SEQ ID NO: 3619246 - DNA, 25 bp, Homo sapien
tgcagcgggtatcccagggaggaag

SEQ ID NO: 3619247 - DNA, 25 bp, Homo sapien
ccccgtgcagcgggtatcccaggga

SEQ ID NO: 3619248 - DNA, 25 bp, Homo sapien
ccgtgcagcgggtatcccagggagg

SEQ ID NO: 3619249 - DNA, 25 bp, Homo sapien
cggctcgcccaggttgcccatgtga

SEQ ID NO: 3619250 - DNA, 25 bp, Homo sapien
cccaggttgcccatgtgactgccat

SEQ ID NO: 3619251 - DNA, 25 bp, Homo sapien
gcccaggttgcccatgtgactgcca

SEQ ID NO: 3619252 - DNA, 25 bp, Homo sapien
ctcgcccaggttgcccatgtgactg

SEQ ID NO: 3619253 - DNA, 25 bp, Homo sapien
tcagagtggggacgggcctgcctca

SEQ ID NO: 3619254 - DNA, 25 bp, Homo sapien
cagagtggggacgggcctgcctcac

SEQ ID NO: 3619255 - DNA, 25 bp, Homo sapien
tcggatgaccaaggccctgcttatc

SEQ ID NO: 3619256 - DNA, 25 bp, Homo sapien
atcctcggatgaccaaggccctgct

SEQ ID NO: 3619257 - DNA, 25 bp, Homo sapien
ctcggatgaccaaggccctgcttat

SEQ ID NO: 3619258 - DNA, 25 bp, Homo sapien
ttgcttagaggactggtgggtaggg

SEQ ID NO: 3619259 - DNA, 25 bp, Homo sapien
caggcttggcattgtctgcgtggca

SEQ ID NO: 3619260 - DNA, 25 bp, Homo sapien
cgcaaccagatgatggaggctgcag

SEQ ID NO: 3619261 - DNA, 25 bp, Homo sapien
ccgcacgcaggctgatcacagggcc

SEQ ID NO: 3619262 - DNA, 25 bp, Homo sapien
tctccctttcgcaaccagatgatgg

SEQ ID NO: 3619263 - DNA, 25 bp, Homo sapien
agtggaggatattcctgccagtcat

SEQ ID NO: 3619264 - DNA, 25 bp, Homo sapien
gaggatattcctgccagtcatcgca

SEQ ID NO: 3619265 - DNA, 25 bp, Homo sapien
cagtcatcgcatccctgctcaggac

SEQ ID NO: 3619266 - DNA, 25 bp, Homo sapien
gatattcctgccagtcatcgcatcc

SEQ ID NO: 3619267 - DNA, 25 bp, Homo sapien
ccactggggtcaccctttgattccg

SEQ ID NO: 3619268 - DNA, 25 bp, Homo sapien
aaggatggtggatgatcatggtttg

SEQ ID NO: 3619269 - DNA, 25 bp, Homo sapien
gggtcaccctttgattccgatgagg

SEQ ID NO: 3619270 - DNA, 25 bp, Homo sapien
cctttgattccgatgaggaccatgg

SEQ ID NO: 3619271 - DNA, 25 bp, Homo sapien
tgcttggggacacgttgagagtctc

SEQ ID NO: 3619272 - DNA, 25 bp, Homo sapien
acacgttgagagtctcaggcctctg

SEQ ID NO: 3619273 - DNA, 25 bp, Homo sapien
gcttggggacacgttgagagtctca

SEQ ID NO: 3619274 - DNA, 25 bp, Homo sapien
gggacacgttgagagtctcaggcct

SEQ ID NO: 3619275 - DNA, 25 bp, Homo sapien
cctggctcgcagttggtgctttggc

SEQ ID NO: 3619276 - DNA, 25 bp, Homo sapien
cgcagttggtgctttggcgatgtct

SEQ ID NO: 3619277 - DNA, 25 bp, Homo sapien
ggaagcatgagcctggctcgcagtt

SEQ ID NO: 3619278 - DNA, 25 bp, Homo sapien
ttccctccccgcagtctgaatttca

SEQ ID NO: 3619279 - DNA, 25 bp, Homo sapien
tctggttctgggccgcgtgtaatcc

SEQ ID NO: 3619280 - DNA, 25 bp, Homo sapien
ttgtagtccgcccagctctttgctg

SEQ ID NO: 3619281 - DNA, 25 bp, Homo sapien
gtaatcccagcttccggtttcctca

SEQ ID NO: 3619282 - DNA, 25 bp, Homo sapien
gaacggacgaatgttgtttgtagtc

SEQ ID NO: 3619283 - DNA, 25 bp, Homo sapien
cagatgcgccacctaatggccacaa

SEQ ID NO: 3619284 - DNA, 25 bp, Homo sapien
agatgcgccacctaatggccacaat

SEQ ID NO: 3619285 - DNA, 25 bp, Homo sapien
tacagatgcgccacctaatggccac

SEQ ID NO: 3619286 - DNA, 25 bp, Homo sapien
atacagatgcgccacctaatggcca

SEQ ID NO: 3619287 - DNA, 25 bp, Homo sapien
cttgcctcaaagcacctttaaacca

SEQ ID NO: 3619288 - DNA, 25 bp, Homo sapien
gacagtcactggaagtgagcttcct

SEQ ID NO: 3619289 - DNA, 25 bp, Homo sapien
gcttcctgtctttagccacagacaa

SEQ ID NO: 3619290 - DNA, 25 bp, Homo sapien
ccagcatgagtccttctgtcctgtc

SEQ ID NO: 3619291 - DNA, 25 bp, Homo sapien
actccagagtggaactcagcaggga

SEQ ID NO: 3619292 - DNA, 25 bp, Homo sapien
aagacgggatccttgccgcaggcca

SEQ ID NO: 3619293 - DNA, 25 bp, Homo sapien
tccgagactgcgcttcctttccttt

SEQ ID NO: 3619294 - DNA, 25 bp, Homo sapien
cagccacatagccacgggcctcgga

SEQ ID NO: 3619295 - DNA, 25 bp, Homo sapien
acgggcctcggaccctggatctgtg

SEQ ID NO: 3619296 - DNA, 25 bp, Homo sapien
tctggattttgggtccatcccgtag

SEQ ID NO: 3619297 - DNA, 25 bp, Homo sapien
ctgcacgaggagggggcgtttggag

SEQ ID NO: 3619298 - DNA, 25 bp, Homo sapien
tggattttgggtccatcccgtagtg

SEQ ID NO: 3619299 - DNA, 25 bp, Homo sapien
gattttgggtccatcccgtagtgga

SEQ ID NO: 3619300 - DNA, 25 bp, Homo sapien
cccgagacccagctctttcctcctc

SEQ ID NO: 3619301 - DNA, 25 bp, Homo sapien
ctgccccgagacccagctctttcct

SEQ ID NO: 3619302 - DNA, 25 bp, Homo sapien
cgagacccagctctttcctcctctt

SEQ ID NO: 3619303 - DNA, 25 bp, Homo sapien
tgccccgagacccagctctttcctc

SEQ ID NO: 3619304 - DNA, 25 bp, Homo sapien
tgggacggggagaagcgggtgagca

SEQ ID NO: 3619305 - DNA, 25 bp, Homo sapien
ccgggcctgagggatgcgggtggcg

SEQ ID NO: 3619306 - DNA, 25 bp, Homo sapien
aagcgggtgagcagacgctcctgta

SEQ ID NO: 3619307 - DNA, 25 bp, Homo sapien
cttaatcaggccacaagggccccgg

SEQ ID NO: 3619308 - DNA, 25 bp, Homo sapien
gaagcgaccctgttgtgtcctccct

SEQ ID NO: 3619309 - DNA, 25 bp, Homo sapien
ggaaggaagcgaccctgttgtgtcc

SEQ ID NO: 3619310 - DNA, 25 bp, Homo sapien
ttcctcctccgggtctagcgccacc

SEQ ID NO: 3619311 - DNA, 25 bp, Homo sapien
ctcaggaaggaagcgaccctgttgt

SEQ ID NO: 3619312 - DNA, 25 bp, Homo sapien
aagaagccacgccagtgcacatgga

SEQ ID NO: 3619313 - DNA, 25 bp, Homo sapien
agccacgccagtgcacatggatgca

SEQ ID NO: 3619314 - DNA, 25 bp, Homo sapien
agatgaagaagccacgccagtgcac

SEQ ID NO: 3619315 - DNA, 25 bp, Homo sapien
atgaagaagccacgccagtgcacat

SEQ ID NO: 3619316 - DNA, 25 bp, Homo sapien
tttcttcccccaaaatgatgtcatc

SEQ ID NO: 3619317 - DNA, 25 bp, Homo sapien
ttcttcccccaaaatgatgtcatca

SEQ ID NO: 3619318 - DNA, 25 bp, Homo sapien
tcttcccccaaaatgatgtcatcag

SEQ ID NO: 3619319 - DNA, 25 bp, Homo sapien
catttaataagatttacaggtggca

SEQ ID NO: 3619320 - DNA, 25 bp, Homo sapien
gatttctccctcattgggtgtcacc

SEQ ID NO: 3619321 - DNA, 25 bp, Homo sapien
tggtgtgcggctcagataatcggcc

SEQ ID NO: 3619322 - DNA, 25 bp, Homo sapien
tctctcttgcgatggaatccattta

SEQ ID NO: 3619323 - DNA, 25 bp, Homo sapien
gaaaagggagtgttgctggcagaaa

SEQ ID NO: 3619324 - DNA, 25 bp, Homo sapien
gtttggtgtgaaaagggagtgttgc

SEQ ID NO: 3619325 - DNA, 25 bp, Homo sapien
tggggggcgtccgagcctgtggatc

SEQ ID NO: 3619326 - DNA, 25 bp, Homo sapien
ggtggggggcgtccgagcctgtgga

SEQ ID NO: 3619327 - DNA, 25 bp, Homo sapien
gaacttctcatgagtgaaagccagt

SEQ ID NO: 3619328 - DNA, 25 bp, Homo sapien
catgggatataccttctgctcctgc

SEQ ID NO: 3619329 - DNA, 25 bp, Homo sapien
cctgtctttcctagtacctatcaga

SEQ ID NO: 3619330 - DNA, 25 bp, Homo sapien
gagcatcttatctctgatgaacccc

SEQ ID NO: 3619331 - DNA, 25 bp, Homo sapien
tgcagggatgtcaccaggtatgcca

SEQ ID NO: 3619332 - DNA, 25 bp, Homo sapien
aagagctatacaaagagtggacccc

SEQ ID NO: 3619333 - DNA, 25 bp, Homo sapien
cagagagttgttggttgtgcctcca

SEQ ID NO: 3619334 - DNA, 25 bp, Homo sapien
cctccagggctagtgcacataggga

SEQ ID NO: 3619335 - DNA, 25 bp, Homo sapien
tgctgtgaaacccttgttttgggcc

SEQ ID NO: 3619336 - DNA, 25 bp, Homo sapien
atttcatgctgtaatggagattcat

SEQ ID NO: 3619337 - DNA, 25 bp, Homo sapien
agattcattgccagttttaaatcca

SEQ ID NO: 3619338 - DNA, 25 bp, Homo sapien
gaaggcttccatttagtggcatttt

SEQ ID NO: 3619339 - DNA, 25 bp, Homo sapien
tgcaccagcgcatttgtccttgagg

SEQ ID NO: 3619340 - DNA, 25 bp, Homo sapien
cgtgcaccagcgcatttgtccttga

SEQ ID NO: 3619341 - DNA, 25 bp, Homo sapien
cagcgcatttgtccttgaggcgaag

SEQ ID NO: 3619342 - DNA, 25 bp, Homo sapien
atttgtccttgaggcgaagctgtcc

SEQ ID NO: 3619343 - DNA, 25 bp, Homo sapien
gactgaggatcccagtagggcacca

SEQ ID NO: 3619344 - DNA, 25 bp, Homo sapien
gtgtgtatccttatgattggcacat

SEQ ID NO: 3619345 - DNA, 25 bp, Homo sapien
acagaggtgggctcttgctgtgctt

SEQ ID NO: 3619346 - DNA, 25 bp, Homo sapien
tggcacataaatggggaatcctgtc

SEQ ID NO: 3619347 - DNA, 25 bp, Homo sapien
cctgtcttcaggcaagatgatccag

SEQ ID NO: 3619348 - DNA, 25 bp, Homo sapien
accgagcccattcccctgtcttcag

SEQ ID NO: 3619349 - DNA, 25 bp, Homo sapien
ttaagaggtcaccgagcccattccc

SEQ ID NO: 3619350 - DNA, 25 bp, Homo sapien
aagatgatccaggaacgctgggctc

SEQ ID NO: 3619351 - DNA, 25 bp, Homo sapien
tggcactcgtacaccgcatcgtctt

SEQ ID NO: 3619352 - DNA, 25 bp, Homo sapien
tgctcccctgacaggtggttcccta

SEQ ID NO: 3619353 - DNA, 25 bp, Homo sapien
gtgctcccctgacaggtggttccct

SEQ ID NO: 3619354 - DNA, 25 bp, Homo sapien
tacaccgcatcgtcttgcagctctg

SEQ ID NO: 3619355 - DNA, 25 bp, Homo sapien
cgcaaagtagcgtcactggctgtcc

SEQ ID NO: 3619356 - DNA, 25 bp, Homo sapien
gagccaagccgtccttgatccacag

SEQ ID NO: 3619357 - DNA, 25 bp, Homo sapien
gatggcgcaaagtagcgtcactggc

SEQ ID NO: 3619358 - DNA, 25 bp, Homo sapien
acagaacgaagccatcgtattcggg

SEQ ID NO: 3619359 - DNA, 25 bp, Homo sapien
cccaacccgggagagtcaggggcag

SEQ ID NO: 3619360 - DNA, 25 bp, Homo sapien
tcaggggcagccacagacgtcctgg

SEQ ID NO: 3619361 - DNA, 25 bp, Homo sapien
ggcagccacagacgtcctggacact

SEQ ID NO: 3619362 - DNA, 25 bp, Homo sapien
gccacagacgtcctggacactggct

SEQ ID NO: 3619363 - DNA, 25 bp, Homo sapien
agctgtgggtgagcaccggttacac

SEQ ID NO: 3619364 - DNA, 25 bp, Homo sapien
tcctgtgacccagatggaatcttct

SEQ ID NO: 3619365 - DNA, 25 bp, Homo sapien
aataaggaagaaacagtgtacactt

SEQ ID NO: 3619366 - DNA, 25 bp, Homo sapien
tatatgtcagatgctgatgaaacag

SEQ ID NO: 3619367 - DNA, 25 bp, Homo sapien
cagttttcactaaagacaaggatgt

SEQ ID NO: 3619368 - DNA, 25 bp, Homo sapien
ggatgtactctctttgcaggaggac

SEQ ID NO: 3619369 - DNA, 25 bp, Homo sapien
caggaggacctcagtgtagcatcca

SEQ ID NO: 3619370 - DNA, 25 bp, Homo sapien
ccatgggttctcaggtgggtctcaa

SEQ ID NO: 3619371 - DNA, 25 bp, Homo sapien
ttggccagctgctgtgagccatgcc

SEQ ID NO: 3619372 - DNA, 25 bp, Homo sapien
tcaggtgttggaagccttggccagc

SEQ ID NO: 3619373 - DNA, 25 bp, Homo sapien
caggtgttggaagccttggccagct

SEQ ID NO: 3619374 - DNA, 25 bp, Homo sapien
gccttggccagctgctgtgagccat

SEQ ID NO: 3619375 - DNA, 25 bp, Homo sapien
ctgagaaggtagaagcttcaggagt

SEQ ID NO: 3619376 - DNA, 25 bp, Homo sapien
gaggtcgaggtgctgagcaggcagg

SEQ ID NO: 3619377 - DNA, 25 bp, Homo sapien
caggcagggccttttgcagccttgt

SEQ ID NO: 3619378 - DNA, 25 bp, Homo sapien
gcagccttgtctccaaattgcagga

SEQ ID NO: 3619379 - DNA, 25 bp, Homo sapien
gacctgataattcaactccaaatat

SEQ ID NO: 3619380 - DNA, 25 bp, Homo sapien
ccaaatatggaaagttatagatgtt

SEQ ID NO: 3619381 - DNA, 25 bp, Homo sapien
ttggtgttgacctgataattcaact

SEQ ID NO: 3619382 - DNA, 25 bp, Homo sapien
tatggaaagttatagatgttgttgt

SEQ ID NO: 3619383 - DNA, 25 bp, Homo sapien
catccttcctgatgagctgcccctg

SEQ ID NO: 3619384 - DNA, 25 bp, Homo sapien
ctccttggagaccaggcacagagcc

SEQ ID NO: 3619385 - DNA, 25 bp, Homo sapien
gggcagaagcaagcgggccgctttc

SEQ ID NO: 3619386 - DNA, 25 bp, Homo sapien
agcaagcgggccgctttctgtccat

SEQ ID NO: 3619387 - DNA, 25 bp, Homo sapien
aaagccctggataattcatctcagc

SEQ ID NO: 3619388 - DNA, 25 bp, Homo sapien
gcaagccattaagcgccttcgttta

SEQ ID NO: 3619389 - DNA, 25 bp, Homo sapien
taaaaactttatggcaccgcaagcc

SEQ ID NO: 3619390 - DNA, 25 bp, Homo sapien
tgaacctgctcattccagcgcacgg

SEQ ID NO: 3619391 - DNA, 25 bp, Homo sapien
ttctgtgatgaagcctttgaggctg

SEQ ID NO: 3619392 - DNA, 25 bp, Homo sapien
aattctgtgatgaagcctttgaggc

SEQ ID NO: 3619393 - DNA, 25 bp, Homo sapien
tcaaagaattctgtgatgaagcctt

SEQ ID NO: 3619394 - DNA, 25 bp, Homo sapien
aagaattctgtgatgaagcctttga

SEQ ID NO: 3619395 - DNA, 25 bp, Homo sapien
tagaatgcgaaaactgcagcctcct

SEQ ID NO: 3619396 - DNA, 25 bp, Homo sapien
gcagttgacatagtggagaccccag

SEQ ID NO: 3619397 - DNA, 25 bp, Homo sapien
taagaatattagtcgcacgcctgta

SEQ ID NO: 3619398 - DNA, 25 bp, Homo sapien
tgggtcccctcgtcatcagtaaagc

SEQ ID NO: 3619399 - DNA, 25 bp, Homo sapien
agaattgcatagttatctagcatcc

SEQ ID NO: 3619400 - DNA, 25 bp, Homo sapien
caagaattgcatagttatctagcat

SEQ ID NO: 3619401 - DNA, 25 bp, Homo sapien
tagttatctagcatccttcccacat

SEQ ID NO: 3619402 - DNA, 25 bp, Homo sapien
ttgcatagttatctagcatccttcc

SEQ ID NO: 3619403 - DNA, 25 bp, Homo sapien
gctatctgcgtgtcgattcccgtca

SEQ ID NO: 3619404 - DNA, 25 bp, Homo sapien
tacccatttcatgagcccaggtggc

SEQ ID NO: 3619405 - DNA, 25 bp, Homo sapien
gctagctgtgtttagagccttccca

SEQ ID NO: 3619406 - DNA, 25 bp, Homo sapien
caaagggaacatgtccagattcagc

SEQ ID NO: 3619407 - DNA, 25 bp, Homo sapien
cctgacaaatagtctgtggcatctg

SEQ ID NO: 3619408 - DNA, 25 bp, Homo sapien
gaatcctgacaaatagtctgtggca

SEQ ID NO: 3619409 - DNA, 25 bp, Homo sapien
tcctgacaaatagtctgtggcatct

SEQ ID NO: 3619410 - DNA, 25 bp, Homo sapien
ggcatccccagccattgtttatcta

SEQ ID NO: 3619411 - DNA, 25 bp, Homo sapien
aagccttcagtgacccaatgaagcc

SEQ ID NO: 3619412 - DNA, 25 bp, Homo sapien
ccttcagtgacccaatgaagccagt

SEQ ID NO: 3619413 - DNA, 25 bp, Homo sapien
agccttcagtgacccaatgaagcca

SEQ ID NO: 3619414 - DNA, 25 bp, Homo sapien
cttcagtgacccaatgaagccagtg

SEQ ID NO: 3619415 - DNA, 25 bp, Homo sapien
tcattctccgaaacttgtccttggc

SEQ ID NO: 3619416 - DNA, 25 bp, Homo sapien
cttcattcattctccgaaacttgtc

SEQ ID NO: 3619417 - DNA, 25 bp, Homo sapien
gaaacttgtccttggccatgtagcc

SEQ ID NO: 3619418 - DNA, 25 bp, Homo sapien
cttgtccttggccatgtagcccagc

SEQ ID NO: 3619419 - DNA, 25 bp, Homo sapien
tccttgtcccatagcatggagatga

SEQ ID NO: 3619420 - DNA, 25 bp, Homo sapien
tcagtagcagaaacacccagatact

SEQ ID NO: 3619421 - DNA, 25 bp, Homo sapien
gaaacacccagatactctaaagctg

SEQ ID NO: 3619422 - DNA, 25 bp, Homo sapien
tgggagagtcagatcacagatgcac

SEQ ID NO: 3619423 - DNA, 25 bp, Homo sapien
gaaagttcatagcaaggaagtccag

SEQ ID NO: 3619424 - DNA, 25 bp, Homo sapien
cctggcttaaaaggaaagttcatag

SEQ ID NO: 3619425 - DNA, 25 bp, Homo sapien
aggaaagttcatagcaaggaagtcc

SEQ ID NO: 3619426 - DNA, 25 bp, Homo sapien
aagttcatagcaaggaagtccaggg

SEQ ID NO: 3619427 - DNA, 25 bp, Homo sapien
gtggagggcactgtcccaggaacaa

SEQ ID NO: 3619428 - DNA, 25 bp, Homo sapien
agggcactgtcccaggaacaaggaa

SEQ ID NO: 3619429 - DNA, 25 bp, Homo sapien
cactgtcccaggaacaaggaaggtt

SEQ ID NO: 3619430 - DNA, 25 bp, Homo sapien
ggcactgtcccaggaacaaggaagg

SEQ ID NO: 3619431 - DNA, 25 bp, Homo sapien
caacagtgacatggactggaaatgt

SEQ ID NO: 3619432 - DNA, 25 bp, Homo sapien
gagctattaggttgcatacttccca

SEQ ID NO: 3619433 - DNA, 25 bp, Homo sapien
cagggtgatataatgagctattagg

SEQ ID NO: 3619434 - DNA, 25 bp, Homo sapien
tcccaggttagcacgtagccaacag

SEQ ID NO: 3619435 - DNA, 25 bp, Homo sapien
ctttctcccaactgatgaattgcct

SEQ ID NO: 3619436 - DNA, 25 bp, Homo sapien
tttctcccaactgatgaattgcctg

SEQ ID NO: 3619437 - DNA, 25 bp, Homo sapien
tctttctcccaactgatgaattgcc

SEQ ID NO: 3619438 - DNA, 25 bp, Homo sapien
agggcattgtaacttgggccacctt

SEQ ID NO: 3619439 - DNA, 25 bp, Homo sapien
gagaggactgtcctctagggcattg

SEQ ID NO: 3619440 - DNA, 25 bp, Homo sapien
tccctcacacgtttccgcagagagg

SEQ ID NO: 3619441 - DNA, 25 bp, Homo sapien
cacacgtttccgcagagaggactgt

SEQ ID NO: 3619442 - DNA, 25 bp, Homo sapien
cagtctcctcaatgtgtacaatgga

SEQ ID NO: 3619443 - DNA, 25 bp, Homo sapien
ttcagtctcctcaatgtgtacaatg

SEQ ID NO: 3619444 - DNA, 25 bp, Homo sapien
tcctcaatgtgtacaatggagaggt

SEQ ID NO: 3619445 - DNA, 25 bp, Homo sapien
caatgtgtacaatggagaggtcttg

SEQ ID NO: 3619446 - DNA, 25 bp, Homo sapien
aatgtctcggagaggtcctcccttc

SEQ ID NO: 3619447 - DNA, 25 bp, Homo sapien
cccttcctgccagccattgatgatc

SEQ ID NO: 3619448 - DNA, 25 bp, Homo sapien
caatgtctcggagaggtcctccctt

SEQ ID NO: 3619449 - DNA, 25 bp, Homo sapien
tcctcccttcctgccagccattgat

SEQ ID NO: 3619450 - DNA, 25 bp, Homo sapien
gtgcgggccccagggagttccacca

SEQ ID NO: 3619451 - DNA, 25 bp, Homo sapien
ctggaggatgaacgggtcgtctaaa

SEQ ID NO: 3619452 - DNA, 25 bp, Homo sapien
taaaacagatgacgctggtgcgggc

SEQ ID NO: 3619453 - DNA, 25 bp, Homo sapien
ggccccagggagttccaccaagagc

SEQ ID NO: 3619454 - DNA, 25 bp, Homo sapien
cagtggcaacacagaggtgccttca

SEQ ID NO: 3619455 - DNA, 25 bp, Homo sapien
agtggcaacacagaggtgccttcac

SEQ ID NO: 3619456 - DNA, 25 bp, Homo sapien
ggtatcagaacgcattcccctgatg

SEQ ID NO: 3619457 - DNA, 25 bp, Homo sapien
gtttggtatcagaacgcattcccct

SEQ ID NO: 3619458 - DNA, 25 bp, Homo sapien
ttggtatcagaacgcattcccctga

SEQ ID NO: 3619459 - DNA, 25 bp, Homo sapien
agcaataatccagacacggttcggg

SEQ ID NO: 3619460 - DNA, 25 bp, Homo sapien
ccacggcagggacagctgagaagca

SEQ ID NO: 3619461 - DNA, 25 bp, Homo sapien
ccagtctgaattccacggcagggac

SEQ ID NO: 3619462 - DNA, 25 bp, Homo sapien
agtctgaattccacggcagggacag

SEQ ID NO: 3619463 - DNA, 25 bp, Homo sapien
agaagcaggcggatggatgacctta

SEQ ID NO: 3619464 - DNA, 25 bp, Homo sapien
cactcagagtaacaccaccaatgac

SEQ ID NO: 3619465 - DNA, 25 bp, Homo sapien
agagtaacaccaccaatgacactac

SEQ ID NO: 3619466 - DNA, 25 bp, Homo sapien
cagagtaacaccaccaatgacacta

SEQ ID NO: 3619467 - DNA, 25 bp, Homo sapien
ggcactcagagtaacaccaccaatg

SEQ ID NO: 3619468 - DNA, 25 bp, Homo sapien
gagcttccccactgtgacacccttg

SEQ ID NO: 3619469 - DNA, 25 bp, Homo sapien
tgtcgtttagatctggggcagagct

SEQ ID NO: 3619470 - DNA, 25 bp, Homo sapien
gtgacacccttgaagttgcaggcca

SEQ ID NO: 3619471 - DNA, 25 bp, Homo sapien
tcgtttagatctggggcagagcttc

SEQ ID NO: 3619472 - DNA, 25 bp, Homo sapien
ctgggagggctatgctggctgatag

SEQ ID NO: 3619473 - DNA, 25 bp, Homo sapien
tgggagggctatgctggctgatagg

SEQ ID NO: 3619474 - DNA, 25 bp, Homo sapien
cttggtagcgggagccgcccttctt

SEQ ID NO: 3619475 - DNA, 25 bp, Homo sapien
ttggtagcgggagccgcccttcttg

SEQ ID NO: 3619476 - DNA, 25 bp, Homo sapien
ttgggaccactccctcgctggccat

SEQ ID NO: 3619477 - DNA, 25 bp, Homo sapien
ggaccactccctcgctggccatccc

SEQ ID NO: 3619478 - DNA, 25 bp, Homo sapien
gatctgaagtaagctgtgggactca

SEQ ID NO: 3619479 - DNA, 25 bp, Homo sapien
cctgagatctgaagtaagctgtggg

SEQ ID NO: 3619480 - DNA, 25 bp, Homo sapien
ctgccctgagatctgaagtaagctg

SEQ ID NO: 3619481 - DNA, 25 bp, Homo sapien
ctgaagtaagctgtgggactcatct

SEQ ID NO: 3619482 - DNA, 25 bp, Homo sapien
tgatggcatacaaagcctccaggtg

SEQ ID NO: 3619483 - DNA, 25 bp, Homo sapien
agtgacagacgccagccaggacatc

SEQ ID NO: 3619484 - DNA, 25 bp, Homo sapien
gccagccaggacatcctttccagaa

SEQ ID NO: 3619485 - DNA, 25 bp, Homo sapien
agaaccttctctagctctgctggca

SEQ ID NO: 3619486 - DNA, 25 bp, Homo sapien
ggccttgataaacccctctgccctg

SEQ ID NO: 3619487 - DNA, 25 bp, Homo sapien
cttgctgttctgtcgggggcagttc

SEQ ID NO: 3619488 - DNA, 25 bp, Homo sapien
gagcttgctgttctgtcgggggcag

SEQ ID NO: 3619489 - DNA, 25 bp, Homo sapien
accacggccttgataaacccctctg

SEQ ID NO: 3619490 - DNA, 25 bp, Homo sapien
agaagggaggagcttttcatgagct

SEQ ID NO: 3619491 - DNA, 25 bp, Homo sapien
taagaagggaggagcttttcatgag

SEQ ID NO: 3619492 - DNA, 25 bp, Homo sapien
tgggaggacaggtaagaagggagga

SEQ ID NO: 3619493 - DNA, 25 bp, Homo sapien
caggtaagaagggaggagcttttca

SEQ ID NO: 3619494 - DNA, 25 bp, Homo sapien
tggtagctccggattgaccagggtt

SEQ ID NO: 3619495 - DNA, 25 bp, Homo sapien
ctgcctggtgcgcagcagccatatc

SEQ ID NO: 3619496 - DNA, 25 bp, Homo sapien
aggaacatgcttgggtcttggcccc

SEQ ID NO: 3619497 - DNA, 25 bp, Homo sapien
agctgtgctggagccacgcctcagt

SEQ ID NO: 3619498 - DNA, 25 bp, Homo sapien
taatgtgctgcacttaatgtagagg

SEQ ID NO: 3619499 - DNA, 25 bp, Homo sapien
tgcagttggtgcctccttagtcact

SEQ ID NO: 3619500 - DNA, 25 bp, Homo sapien
taatgtagaggatcagggtcccagt

SEQ ID NO: 3619501 - DNA, 25 bp, Homo sapien
tccttagtcactgccaggattccag

SEQ ID NO: 3619502 - DNA, 25 bp, Homo sapien
ggtgcccttcctctgtctgtgggag

SEQ ID NO: 3619503 - DNA, 25 bp, Homo sapien
tctgtgggaggtgcgcgtctggcat

SEQ ID NO: 3619504 - DNA, 25 bp, Homo sapien
ctctgtctgtgggaggtgcgcgtct

SEQ ID NO: 3619505 - DNA, 25 bp, Homo sapien
ttccaccaggtttagcccctggtgc

SEQ ID NO: 3619506 - DNA, 25 bp, Homo sapien
ggctgaggttgcagacaggacccac

SEQ ID NO: 3619507 - DNA, 25 bp, Homo sapien
gggcttaggagtttgctttcacagc

SEQ ID NO: 3619508 - DNA, 25 bp, Homo sapien
cacagattctagtgggcctgttagc

SEQ ID NO: 3619509 - DNA, 25 bp, Homo sapien
ggcctggcctcatagatgtttcaaa

SEQ ID NO: 3619510 - DNA, 25 bp, Homo sapien
ccacccaagtcttatgttcagttgt

SEQ ID NO: 3619511 - DNA, 25 bp, Homo sapien
tgattggataatgtggttggtgttc

SEQ ID NO: 3619512 - DNA, 25 bp, Homo sapien
tgtggttggtgttctcatgaatggc

SEQ ID NO: 3619513 - DNA, 25 bp, Homo sapien
caagtcttatgttcagttgtgatcc

SEQ ID NO: 3619514 - DNA, 25 bp, Homo sapien
ggagaagggaagagctaatctcctc

SEQ ID NO: 3619515 - DNA, 25 bp, Homo sapien
gagaagggaagagctaatctcctct

SEQ ID NO: 3619516 - DNA, 25 bp, Homo sapien
gaagggaagagctaatctcctcttc

SEQ ID NO: 3619517 - DNA, 25 bp, Homo sapien
agaagggaagagctaatctcctctt

SEQ ID NO: 3619518 - DNA, 25 bp, Homo sapien
ggaccatccttgctggtgatggatg

SEQ ID NO: 3619519 - DNA, 25 bp, Homo sapien
gcttgggaaggaccatccttgctgg

SEQ ID NO: 3619520 - DNA, 25 bp, Homo sapien
ctgtggcttgggaaggaccatcctt

SEQ ID NO: 3619521 - DNA, 25 bp, Homo sapien
atgttgatttagtgctttgagatcc

SEQ ID NO: 3619522 - DNA, 25 bp, Homo sapien
tcttgtgtatcttcctgcattggaa

SEQ ID NO: 3619523 - DNA, 25 bp, Homo sapien
tatcttcctgcattggaatttggat

SEQ ID NO: 3619524 - DNA, 25 bp, Homo sapien
tgtatcttcctgcattggaatttgg

SEQ ID NO: 3619525 - DNA, 25 bp, Homo sapien
ttggaatttggatttctgcggttgg

SEQ ID NO: 3619526 - DNA, 25 bp, Homo sapien
ttttcccactcgtaagtaattgtga

SEQ ID NO: 3619527 - DNA, 25 bp, Homo sapien
cattgttcaattaagttatgatctc

SEQ ID NO: 3619528 - DNA, 25 bp, Homo sapien
tagcttgttacacgtaatgtgtgaa

SEQ ID NO: 3619529 - DNA, 25 bp, Homo sapien
tatttggctcggaggaaggcagcac

SEQ ID NO: 3619530 - DNA, 25 bp, Homo sapien
cacacagccgacatcgtgagaggtc

SEQ ID NO: 3619531 - DNA, 25 bp, Homo sapien
taggattggcctttctgggaagacc

SEQ ID NO: 3619532 - DNA, 25 bp, Homo sapien
tccattgagaagaaactacgggtaa

SEQ ID NO: 3619533 - DNA, 25 bp, Homo sapien
gactagcctattgggtcagaggcca

SEQ ID NO: 3619534 - DNA, 25 bp, Homo sapien
caggagagctctcgctgttgcctgc

SEQ ID NO: 3619535 - DNA, 25 bp, Homo sapien
agctctcgctgttgcctgcttttat

SEQ ID NO: 3619536 - DNA, 25 bp, Homo sapien
gagagctctcgctgttgcctgcttt

SEQ ID NO: 3619537 - DNA, 25 bp, Homo sapien
ccaggagagctctcgctgttgcctg

SEQ ID NO: 3619538 - DNA, 25 bp, Homo sapien
tctgtcccaaataacgacgagagat

SEQ ID NO: 3619539 - DNA, 25 bp, Homo sapien
cccaaataacgacgagagatgaatc

SEQ ID NO: 3619540 - DNA, 25 bp, Homo sapien
aataacgacgagagatgaatcacct

SEQ ID NO: 3619541 - DNA, 25 bp, Homo sapien
tgagagaagtcccctacaactttta

SEQ ID NO: 3619542 - DNA, 25 bp, Homo sapien
gaaacagctctgtcatactgggcta

SEQ ID NO: 3619543 - DNA, 25 bp, Homo sapien
atgaaacagctctgtcatactgggc

SEQ ID NO: 3619544 - DNA, 25 bp, Homo sapien
tgggctagagcaatctcaggtgcag

SEQ ID NO: 3619545 - DNA, 25 bp, Homo sapien
gtgcagggaaggcatagatcttctg

SEQ ID NO: 3619546 - DNA, 25 bp, Homo sapien
ttgttatcctcctccctgtatctat

SEQ ID NO: 3619547 - DNA, 25 bp, Homo sapien
tcctcctccctgtatctataatgga

SEQ ID NO: 3619548 - DNA, 25 bp, Homo sapien
tatcctcctccctgtatctataatg

SEQ ID NO: 3619549 - DNA, 25 bp, Homo sapien
gtatctataatggacagccttgggt

SEQ ID NO: 3619550 - DNA, 25 bp, Homo sapien
cctgtccaggcacccgttcctcttt

SEQ ID NO: 3619551 - DNA, 25 bp, Homo sapien
ctcctgtccaggcacccgttcctct

SEQ ID NO: 3619552 - DNA, 25 bp, Homo sapien
tcctgtccaggcacccgttcctctt

SEQ ID NO: 3619553 - DNA, 25 bp, Homo sapien
attttgatagcttctcctaaccaag

SEQ ID NO: 3619554 - DNA, 25 bp, Homo sapien
cctaaccaaggaatttatgctgatt

SEQ ID NO: 3619555 - DNA, 25 bp, Homo sapien
tggatccagatggatagtattttga

SEQ ID NO: 3619556 - DNA, 25 bp, Homo sapien
gaatttatgctgattttcaggaccc

SEQ ID NO: 3619557 - DNA, 25 bp, Homo sapien
gtgttttcactcaccaccacagtca

SEQ ID NO: 3619558 - DNA, 25 bp, Homo sapien
ttccaaaattcatctgtgttttcac

SEQ ID NO: 3619559 - DNA, 25 bp, Homo sapien
tctgtgttttcactcaccaccacag

SEQ ID NO: 3619560 - DNA, 25 bp, Homo sapien
ttttcactcaccaccacagtcaggg

SEQ ID NO: 3619561 - DNA, 25 bp, Homo sapien
tagggagtgaagtttgttatgatag

SEQ ID NO: 3619562 - DNA, 25 bp, Homo sapien
ggagtgaagtttgttatgataggat

SEQ ID NO: 3619563 - DNA, 25 bp, Homo sapien
tagtagggagtgaagtttgttatga

SEQ ID NO: 3619564 - DNA, 25 bp, Homo sapien
gaagtttgttatgataggattgaaa

SEQ ID NO: 3619565 - DNA, 25 bp, Homo sapien
gaagcatgcaggaaaccacacaaga

SEQ ID NO: 3619566 - DNA, 25 bp, Homo sapien
gcagggaacttatcatctcattata

SEQ ID NO: 3619567 - DNA, 25 bp, Homo sapien
cacacaagatagatggcagctttca

SEQ ID NO: 3619568 - DNA, 25 bp, Homo sapien
attttttcagtatggttatacgcgg

SEQ ID NO: 3619569 - DNA, 25 bp, Homo sapien
cagtcatcaggggagcacgaagctt

SEQ ID NO: 3619570 - DNA, 25 bp, Homo sapien
cttgcctacctgtccaggaaaagtg

SEQ ID NO: 3619571 - DNA, 25 bp, Homo sapien
gcacgaagcttgaggtaggtgggct

SEQ ID NO: 3619572 - DNA, 25 bp, Homo sapien
gttagccttacatccaatcacttgc

SEQ ID NO: 3619573 - DNA, 25 bp, Homo sapien
tgtctgtgagctttcgtgtcttggg

SEQ ID NO: 3619574 - DNA, 25 bp, Homo sapien
aaatacttctagagacaccggtgtg

SEQ ID NO: 3619575 - DNA, 25 bp, Homo sapien
tgaaacctttgtgagtcagctgcat

SEQ ID NO: 3619576 - DNA, 25 bp, Homo sapien
gggctctgctgcattgcaagaagga

SEQ ID NO: 3619577 - DNA, 25 bp, Homo sapien
tcagcctccaggcaggtcctcacct

SEQ ID NO: 3619578 - DNA, 25 bp, Homo sapien
agcctccaggcaggtcctcacctct

SEQ ID NO: 3619579 - DNA, 25 bp, Homo sapien
tttcagcctccaggcaggtcctcac

SEQ ID NO: 3619580 - DNA, 25 bp, Homo sapien
tccaggcaggtcctcacctctgcca

SEQ ID NO: 3619581 - DNA, 25 bp, Homo sapien
ctttatcagtcatttgtgctataca

SEQ ID NO: 3619582 - DNA, 25 bp, Homo sapien
ttagctctttatcagtcatttgtgc

SEQ ID NO: 3619583 - DNA, 25 bp, Homo sapien
tacatcacacattttaagagatgga

SEQ ID NO: 3619584 - DNA, 25 bp, Homo sapien
cattttaagagatggaatgcaatgg

SEQ ID NO: 3619585 - DNA, 25 bp, Homo sapien
ggcactccttgctgatggaccggga

SEQ ID NO: 3619586 - DNA, 25 bp, Homo sapien
actccttgctgatggaccgggacct

SEQ ID NO: 3619587 - DNA, 25 bp, Homo sapien
cttgctgatggaccgggacctcctc

SEQ ID NO: 3619588 - DNA, 25 bp, Homo sapien
ctgggcactccttgctgatggaccg

SEQ ID NO: 3619589 - DNA, 25 bp, Homo sapien
tcccagtggtcctcttccgacatga

SEQ ID NO: 3619590 - DNA, 25 bp, Homo sapien
aggaaaagcaaaacagcgcgcagcg

SEQ ID NO: 3619591 - DNA, 25 bp, Homo sapien
cgcgcagcgactttcctactctagt

SEQ ID NO: 3619592 - DNA, 25 bp, Homo sapien
tcctcttccgacatgaaagatgcca

SEQ ID NO: 3619593 - DNA, 25 bp, Homo sapien
aatagagtctctgttttgccaccgg

SEQ ID NO: 3619594 - DNA, 25 bp, Homo sapien
gacaatgcccagacaactaatagag

SEQ ID NO: 3619595 - DNA, 25 bp, Homo sapien
aagcctgtgacactttcaccttgtg

SEQ ID NO: 3619596 - DNA, 25 bp, Homo sapien
taatgatcaggttcttgtgcaagcc

SEQ ID NO: 3619597 - DNA, 25 bp, Homo sapien
tcctcgctggactttagctgttgaa

SEQ ID NO: 3619598 - DNA, 25 bp, Homo sapien
ggctgtcctcgctggactttagctg

SEQ ID NO: 3619599 - DNA, 25 bp, Homo sapien
tgtcctcgctggactttagctgttg

SEQ ID NO: 3619600 - DNA, 25 bp, Homo sapien
cctcgctggactttagctgttgaac

SEQ ID NO: 3619601 - DNA, 25 bp, Homo sapien
tcaccggaatttgcgctgagaggag

SEQ ID NO: 3619602 - DNA, 25 bp, Homo sapien
tgagaggagggcttgcatcccagct

SEQ ID NO: 3619603 - DNA, 25 bp, Homo sapien
aaggtagcatcaccggaatttgcgc

SEQ ID NO: 3619604 - DNA, 25 bp, Homo sapien
agaggagggcttgcatcccagctct

SEQ ID NO: 3619605 - DNA, 25 bp, Homo sapien
gggtcaccagcacggtccctgacat

SEQ ID NO: 3619606 - DNA, 25 bp, Homo sapien
caccagcacggtccctgacatagga

SEQ ID NO: 3619607 - DNA, 25 bp, Homo sapien
gtcaccagcacggtccctgacatag

SEQ ID NO: 3619608 - DNA, 25 bp, Homo sapien
tcaccagcacggtccctgacatagg

SEQ ID NO: 3619609 - DNA, 25 bp, Homo sapien
gattgggaagcaagactgagacctg

SEQ ID NO: 3619610 - DNA, 25 bp, Homo sapien
ctgagacctgcttatgggccaaggg

SEQ ID NO: 3619611 - DNA, 25 bp, Homo sapien
tgggaagcaagactgagacctgctt

SEQ ID NO: 3619612 - DNA, 25 bp, Homo sapien
attgggaagcaagactgagacctgc

SEQ ID NO: 3619613 - DNA, 25 bp, Homo sapien
tagttgcctgacttgctgactctgg

SEQ ID NO: 3619614 - DNA, 25 bp, Homo sapien
tctcaaggagatgctagtgagctcc

SEQ ID NO: 3619615 - DNA, 25 bp, Homo sapien
tatctctggcagagtgcgctatcag

SEQ ID NO: 3619616 - DNA, 25 bp, Homo sapien
aatggtgctaacacccgcatgggca

SEQ ID NO: 3619617 - DNA, 25 bp, Homo sapien
gccgtccttgtctggaggaggcctg

SEQ ID NO: 3619618 - DNA, 25 bp, Homo sapien
ggccgtccttgtctggaggaggcct

SEQ ID NO: 3619619 - DNA, 25 bp, Homo sapien
gaggccgtccttgtctggaggaggc

SEQ ID NO: 3619620 - DNA, 25 bp, Homo sapien
agaggccgtccttgtctggaggagg

SEQ ID NO: 3619621 - DNA, 25 bp, Homo sapien
caggcagttggtctgtgtcagtaac

SEQ ID NO: 3619622 - DNA, 25 bp, Homo sapien
gcttcccctcgctgagtctcagttt

SEQ ID NO: 3619623 - DNA, 25 bp, Homo sapien
ccaccaactcactgagggactttgt

SEQ ID NO: 3619624 - DNA, 25 bp, Homo sapien
gagggactttgtcaagttgcttccc

SEQ ID NO: 3619625 - DNA, 25 bp, Homo sapien
catggaaacatgtggactgcagtgg

SEQ ID NO: 3619626 - DNA, 25 bp, Homo sapien
tctaaggcccttctgtggaacccta

SEQ ID NO: 3619627 - DNA, 25 bp, Homo sapien
gggctatcctgttggctttatgaaa

SEQ ID NO: 3619628 - DNA, 25 bp, Homo sapien
ctggagaacgcccttctgagtgccc

SEQ ID NO: 3619629 - DNA, 25 bp, Homo sapien
tggctattccccttggaggccggct

SEQ ID NO: 3619630 - DNA, 25 bp, Homo sapien
cagtgagaatcccttgcagacctgg

SEQ ID NO: 3619631 - DNA, 25 bp, Homo sapien
caattgctacggaaacgctgtctct

SEQ ID NO: 3619632 - DNA, 25 bp, Homo sapien
taaacaattcacagtggtcccctgg

SEQ ID NO: 3619633 - DNA, 25 bp, Homo sapien
ataaacaatcacttctgttagggag

SEQ ID NO: 3619634 - DNA, 25 bp, Homo sapien
actaatgtggcatttacaacataaa

SEQ ID NO: 3619635 - DNA, 25 bp, Homo sapien
aattccatctccatttcatggagac

SEQ ID NO: 3619636 - DNA, 25 bp, Homo sapien
acataaacaatcacttctgttaggg

SEQ ID NO: 3619637 - DNA, 25 bp, Homo sapien
tcagacagcaggtcgctctggtcaa

SEQ ID NO: 3619638 - DNA, 25 bp, Homo sapien
agcaggtcgctctggtcaatgggcc

SEQ ID NO: 3619639 - DNA, 25 bp, Homo sapien
ggcatcagacagcaggtcgctctgg

SEQ ID NO: 3619640 - DNA, 25 bp, Homo sapien
gctctggtcaatgggcccacggcag

SEQ ID NO: 3619641 - DNA, 25 bp, Homo sapien
cagtgatcttgtgaaagccactaaa

SEQ ID NO: 3619642 - DNA, 25 bp, Homo sapien
gcatctggatcttcataatttggcc

SEQ ID NO: 3619643 - DNA, 25 bp, Homo sapien
cactaaaggtatcatggttctccaa

SEQ ID NO: 3619644 - DNA, 25 bp, Homo sapien
gactgttgttgaccaaagccattag

SEQ ID NO: 3619645 - DNA, 25 bp, Homo sapien
tgctttggtcatccacgctctgggc

SEQ ID NO: 3619646 - DNA, 25 bp, Homo sapien
gaaagaactccgagtccactgtgga

SEQ ID NO: 3619647 - DNA, 25 bp, Homo sapien
gcagcttgagcgtgcagtatgcaaa

SEQ ID NO: 3619648 - DNA, 25 bp, Homo sapien
gaagaaacccctcattgccgaagaa

SEQ ID NO: 3619649 - DNA, 25 bp, Homo sapien
ccatgcaaaggtaaacgagtaccca

SEQ ID NO: 3619650 - DNA, 25 bp, Homo sapien
agtatatatcttccccgagcagcct

SEQ ID NO: 3619651 - DNA, 25 bp, Homo sapien
ctcttgacagaacatcaagcttggg

SEQ ID NO: 3619652 - DNA, 25 bp, Homo sapien
atatcttccccgagcagcctcttga

SEQ ID NO: 3619653 - DNA, 25 bp, Homo sapien
ctggcagcccagtagcaaatgtgct

SEQ ID NO: 3619654 - DNA, 25 bp, Homo sapien
caaatgtgctgccaccgggctcctt

SEQ ID NO: 3619655 - DNA, 25 bp, Homo sapien
tggccaggccgttggttgagatgga

SEQ ID NO: 3619656 - DNA, 25 bp, Homo sapien
cttgggctgaaaccatgaagcatga

SEQ ID NO: 3619657 - DNA, 25 bp, Homo sapien
tccacattatagaccacaaaggccc

SEQ ID NO: 3619658 - DNA, 25 bp, Homo sapien
gtattatccgcatcatagggcaagg

SEQ ID NO: 3619659 - DNA, 25 bp, Homo sapien
aaggccctacaattgctatcaaagg

SEQ ID NO: 3619660 - DNA, 25 bp, Homo sapien
tttgatctggaagccgtcagagttc

SEQ ID NO: 3619661 - DNA, 25 bp, Homo sapien
tagaaaatcagcattgtaaataatc

SEQ ID NO: 3619662 - DNA, 25 bp, Homo sapien
gaaaatcagcattgtaaataatcat

SEQ ID NO: 3619663 - DNA, 25 bp, Homo sapien
tgtagaaaatcagcattgtaaataa

SEQ ID NO: 3619664 - DNA, 25 bp, Homo sapien
gtgtagaaaatcagcattgtaaata

SEQ ID NO: 3619665 - DNA, 25 bp, Homo sapien
tctaaacatcaacactccagaatgc

SEQ ID NO: 3619666 - DNA, 25 bp, Homo sapien
tcagcactgggtcgatgtatatgag

SEQ ID NO: 3619667 - DNA, 25 bp, Homo sapien
gaaataattgcattctgacttgctc

SEQ ID NO: 3619668 - DNA, 25 bp, Homo sapien
tgtaaatcagaagcaccgggagcaa

SEQ ID NO: 3619669 - DNA, 25 bp, Homo sapien
tttgtcatgcaaacgaagaaaaaca

SEQ ID NO: 3619670 - DNA, 25 bp, Homo sapien
gttgagacggagaatatattttgcc

SEQ ID NO: 3619671 - DNA, 25 bp, Homo sapien
gattaaatgctgaattgtattttgg

SEQ ID NO: 3619672 - DNA, 25 bp, Homo sapien
tttggggtctgagttttgtcatgca

SEQ ID NO: 3619673 - DNA, 25 bp, Homo sapien
aaggcagcgtgttgagtcactgacc

SEQ ID NO: 3619674 - DNA, 25 bp, Homo sapien
catggctcgaaatagatgtctctca

SEQ ID NO: 3619675 - DNA, 25 bp, Homo sapien
cattcgcctcagcttgtttcatggc

SEQ ID NO: 3619676 - DNA, 25 bp, Homo sapien
aattttggcaaacgaggttgtcctg

SEQ ID NO: 3619677 - DNA, 25 bp, Homo sapien
caagccctcaaacattaatttacag

SEQ ID NO: 3619678 - DNA, 25 bp, Homo sapien
aaatcagatcaagccctcaaacatt

SEQ ID NO: 3619679 - DNA, 25 bp, Homo sapien
ttctaagagaaatcagatcaagccc

SEQ ID NO: 3619680 - DNA, 25 bp, Homo sapien
cctggccagcaatgaacttctaaga

SEQ ID NO: 3619681 - DNA, 25 bp, Homo sapien
gttgaggatgtttacttttgcatct

SEQ ID NO: 3619682 - DNA, 25 bp, Homo sapien
ttgacttccttagacatgagacatg

SEQ ID NO: 3619683 - DNA, 25 bp, Homo sapien
tattgattgacagatattctcctgc

SEQ ID NO: 3619684 - DNA, 25 bp, Homo sapien
tcctggtccaatgcctaacccatgg

SEQ ID NO: 3619685 - DNA, 25 bp, Homo sapien
tccccattgtgtagactctggaaag

SEQ ID NO: 3619686 - DNA, 25 bp, Homo sapien
catctcgcaggaggtaccgttctgt

SEQ ID NO: 3619687 - DNA, 25 bp, Homo sapien
tcaccggcaggagtgatagatggtt

SEQ ID NO: 3619688 - DNA, 25 bp, Homo sapien
gaggacaagggaagcaactacctga

SEQ ID NO: 3619689 - DNA, 25 bp, Homo sapien
gtccctagcatgctgggcagcctga

SEQ ID NO: 3619690 - DNA, 25 bp, Homo sapien
gggcattttagattaccttagagaa

SEQ ID NO: 3619691 - DNA, 25 bp, Homo sapien
taccttagagaatgataatattgcc

SEQ ID NO: 3619692 - DNA, 25 bp, Homo sapien
cctcttctaggggtgagaaaaacag

SEQ ID NO: 3619693 - DNA, 25 bp, Homo sapien
cactttcgaggatattcatttgaac

SEQ ID NO: 3619694 - DNA, 25 bp, Homo sapien
agcttctcaccaagtcccaccagca

SEQ ID NO: 3619695 - DNA, 25 bp, Homo sapien
ttctcaccaagtcccaccagcagct

SEQ ID NO: 3619696 - DNA, 25 bp, Homo sapien
ccagcagctgcaaatattcattaat

SEQ ID NO: 3619697 - DNA, 25 bp, Homo sapien
cagcagctgcaaatattcattaata

SEQ ID NO: 3619698 - DNA, 25 bp, Homo sapien
taacgttaaaggtctgcactgaagc

SEQ ID NO: 3619699 - DNA, 25 bp, Homo sapien
cctttaaatcaacggaatgtgtccg

SEQ ID NO: 3619700 - DNA, 25 bp, Homo sapien
ttcaggctgccacaccacctttaaa

SEQ ID NO: 3619701 - DNA, 25 bp, Homo sapien
agagaattccgcgtttcaggctgcc

SEQ ID NO: 3619702 - DNA, 25 bp, Homo sapien
gtgaggagtggatgcgtgtccactg

SEQ ID NO: 3619703 - DNA, 25 bp, Homo sapien
tgaggagtggatgcgtgtccactga

SEQ ID NO: 3619704 - DNA, 25 bp, Homo sapien
tagcagtcctagggggtaaccttgc

SEQ ID NO: 3619705 - DNA, 25 bp, Homo sapien
ataaggaagcacaatagcagtccta

SEQ ID NO: 3619706 - DNA, 25 bp, Homo sapien
taacagtgtcctcgttctcacctgc

SEQ ID NO: 3619707 - DNA, 25 bp, Homo sapien
taaatgcagggcctttacttggtgc

SEQ ID NO: 3619708 - DNA, 25 bp, Homo sapien
tctccatcggagagaatatgggtca

SEQ ID NO: 3619709 - DNA, 25 bp, Homo sapien
tacttggtgctgtgaggaacttgtg

SEQ ID NO: 3619710 - DNA, 25 bp, Homo sapien
tcacagacatttgactaaagggcgg

SEQ ID NO: 3619711 - DNA, 25 bp, Homo sapien
gagaacgggcacttgatggtcatga

SEQ ID NO: 3619712 - DNA, 25 bp, Homo sapien
aaaggcttgggcaacgcagagatgt

SEQ ID NO: 3619713 - DNA, 25 bp, Homo sapien
caacgcagagatgtctagtcacaga

SEQ ID NO: 3619714 - DNA, 25 bp, Homo sapien
gctgtaaagcagaccgtggctcctc

SEQ ID NO: 3619715 - DNA, 25 bp, Homo sapien
ctgtaaagcagaccgtggctcctct

SEQ ID NO: 3619716 - DNA, 25 bp, Homo sapien
gtaaagcagaccgtggctcctctac

SEQ ID NO: 3619717 - DNA, 25 bp, Homo sapien
tgtaaagcagaccgtggctcctcta

SEQ ID NO: 3619718 - DNA, 25 bp, Homo sapien
taatctctcttaagcccatttgcat

SEQ ID NO: 3619719 - DNA, 25 bp, Homo sapien
ggctataatcttagctctactattt

SEQ ID NO: 3619720 - DNA, 25 bp, Homo sapien
gcgcccggccgatcatggctataat

SEQ ID NO: 3619721 - DNA, 25 bp, Homo sapien
tattacttatctagcctaggaccaa

SEQ ID NO: 3619722 - DNA, 25 bp, Homo sapien
ggcacccagccaggtccccacttac

SEQ ID NO: 3619723 - DNA, 25 bp, Homo sapien
cactttaacatgctggcacccagcc

SEQ ID NO: 3619724 - DNA, 25 bp, Homo sapien
tgctggcacccagccaggtccccac

SEQ ID NO: 3619725 - DNA, 25 bp, Homo sapien
ctggcacccagccaggtccccactt

SEQ ID NO: 3619726 - DNA, 25 bp, Homo sapien
gaactgcctcgccaaatgtgccagg

SEQ ID NO: 3619727 - DNA, 25 bp, Homo sapien
cgtgtgaactgcctcgccaaatgtg

SEQ ID NO: 3619728 - DNA, 25 bp, Homo sapien
tgtgaactgcctcgccaaatgtgcc

SEQ ID NO: 3619729 - DNA, 25 bp, Homo sapien
gcctcgccaaatgtgccaggagcct

SEQ ID NO: 3619730 - DNA, 25 bp, Homo sapien
ctggatctgaagtggagtgtggact

SEQ ID NO: 3619731 - DNA, 25 bp, Homo sapien
tgtggacgtccaaaaggctgccagg

SEQ ID NO: 3619732 - DNA, 25 bp, Homo sapien
tgcttctcgagggatagtccttgag

SEQ ID NO: 3619733 - DNA, 25 bp, Homo sapien
ggagtgtggactgactgcttctcga

SEQ ID NO: 3619734 - DNA, 25 bp, Homo sapien
ggactgtaccgtgtgatacaaaacc

SEQ ID NO: 3619735 - DNA, 25 bp, Homo sapien
tgggcacctgtctctaaacctttcc

SEQ ID NO: 3619736 - DNA, 25 bp, Homo sapien
taaacctttcccatcagaccagttg

SEQ ID NO: 3619737 - DNA, 25 bp, Homo sapien
cagttgagtgcacatgagcatggct

SEQ ID NO: 3619738 - DNA, 25 bp, Homo sapien
accacagagagcccaagcatcacac

SEQ ID NO: 3619739 - DNA, 25 bp, Homo sapien
ctgaccacagagagcccaagcatca

SEQ ID NO: 3619740 - DNA, 25 bp, Homo sapien
tgaccacagagagcccaagcatcac

SEQ ID NO: 3619741 - DNA, 25 bp, Homo sapien
tctgaccacagagagcccaagcatc

SEQ ID NO: 3619742 - DNA, 25 bp, Homo sapien
ctgtggtcatgacagccagcactgg

SEQ ID NO: 3619743 - DNA, 25 bp, Homo sapien
gctctgtggtcatgacagccagcac

SEQ ID NO: 3619744 - DNA, 25 bp, Homo sapien
ctgctctgtggtcatgacagccagc

SEQ ID NO: 3619745 - DNA, 25 bp, Homo sapien
tctgtggtcatgacagccagcactg

SEQ ID NO: 3619746 - DNA, 25 bp, Homo sapien
aattcaaggcttagggagtgtgatg

SEQ ID NO: 3619747 - DNA, 25 bp, Homo sapien
gtgtgatggttagggactggcccac

SEQ ID NO: 3619748 - DNA, 25 bp, Homo sapien
ctgtgagtgacaaggtgttaattca

SEQ ID NO: 3619749 - DNA, 25 bp, Homo sapien
gagtgtgatggttagggactggccc

SEQ ID NO: 3619750 - DNA, 25 bp, Homo sapien
gcctgcttcccccacatgaaagtgt

SEQ ID NO: 3619751 - DNA, 25 bp, Homo sapien
tgaaagtgtggaacacagcacgaag

SEQ ID NO: 3619752 - DNA, 25 bp, Homo sapien
gggctgctggcttggaacgtgctac

SEQ ID NO: 3619753 - DNA, 25 bp, Homo sapien
cacagcacgaaggtgtttctgcagc

SEQ ID NO: 3619754 - DNA, 25 bp, Homo sapien
gggtgctgataaaggagcatctccg

SEQ ID NO: 3619755 - DNA, 25 bp, Homo sapien
ccaaaataattccaagggtgctgat

SEQ ID NO: 3619756 - DNA, 25 bp, Homo sapien
tgctgataaaggagcatctccgctc

SEQ ID NO: 3619757 - DNA, 25 bp, Homo sapien
gcacagcttgcagtatgcctgcctg

SEQ ID NO: 3619758 - DNA, 25 bp, Homo sapien
gctgaataatacagtagccagccca

SEQ ID NO: 3619759 - DNA, 25 bp, Homo sapien
tctgcgctgaataatacagtagcca

SEQ ID NO: 3619760 - DNA, 25 bp, Homo sapien
gcctcctctgcgctgaataatacag

SEQ ID NO: 3619761 - DNA, 25 bp, Homo sapien
aatacagtagccagcccagtagaca

SEQ ID NO: 3619762 - DNA, 25 bp, Homo sapien
gagaagccaaagattaccccacagt

SEQ ID NO: 3619763 - DNA, 25 bp, Homo sapien
gctgataccatgctactaaggacgt

SEQ ID NO: 3619764 - DNA, 25 bp, Homo sapien
tccccaggcaaatggaatcgctcct

SEQ ID NO: 3619765 - DNA, 25 bp, Homo sapien
tatctaaacactgcggagaagccaa

SEQ ID NO: 3619766 - DNA, 25 bp, Homo sapien
tgaagcaacgtcagacacagcctgg

SEQ ID NO: 3619767 - DNA, 25 bp, Homo sapien
tatgagggtaggtgcttgccaaagc

SEQ ID NO: 3619768 - DNA, 25 bp, Homo sapien
tagaattaagcatcccagttggctg

SEQ ID NO: 3619769 - DNA, 25 bp, Homo sapien
gatgactgcactcggaagaattttc

SEQ ID NO: 3619770 - DNA, 25 bp, Homo sapien
gaccttgtgtccaaagcgtaggcca

SEQ ID NO: 3619771 - DNA, 25 bp, Homo sapien
tcccctagtgaaaaacgagagacat

SEQ ID NO: 3619772 - DNA, 25 bp, Homo sapien
gaaattgaatctcgggttccctgga

SEQ ID NO: 3619773 - DNA, 25 bp, Homo sapien
catccagtgggctttctagcaagca

SEQ ID NO: 3619774 - DNA, 25 bp, Homo sapien
tagagcagtagcactgacccatttc

SEQ ID NO: 3619775 - DNA, 25 bp, Homo sapien
ctgaccgtgggcaagacaacagacc

SEQ ID NO: 3619776 - DNA, 25 bp, Homo sapien
catacttagataaatggtggagcca

SEQ ID NO: 3619777 - DNA, 25 bp, Homo sapien
ttacagagtaatccacagtccacgg

SEQ ID NO: 3619778 - DNA, 25 bp, Homo sapien
caaggtttgtgggaatcacttcata

SEQ ID NO: 3619779 - DNA, 25 bp, Homo sapien
gctgtggcagccaatcatagcctct

SEQ ID NO: 3619780 - DNA, 25 bp, Homo sapien
catagcctctaattgcattcactgc

SEQ ID NO: 3619781 - DNA, 25 bp, Homo sapien
cacttttagcccttagctgtggcag

SEQ ID NO: 3619782 - DNA, 25 bp, Homo sapien
gctggtctggcactctaattgtcca

SEQ ID NO: 3619783 - DNA, 25 bp, Homo sapien
tatttctgaaaactccacgtgctgg

SEQ ID NO: 3619784 - DNA, 25 bp, Homo sapien
tccacgtgctggtctggcactctaa

SEQ ID NO: 3619785 - DNA, 25 bp, Homo sapien
ggcactctaattgtccaatctgctg

SEQ ID NO: 3619786 - DNA, 25 bp, Homo sapien
tctgggcatgcttactggaatcagt

SEQ ID NO: 3619787 - DNA, 25 bp, Homo sapien
tctcaggaggcagattaaaaactca

SEQ ID NO: 3619788 - DNA, 25 bp, Homo sapien
cagagccgcgtgtgacttggtattt

SEQ ID NO: 3619789 - DNA, 25 bp, Homo sapien
tcttgctgctagcatattctgggca

SEQ ID NO: 3619790 - DNA, 25 bp, Homo sapien
agcgcgtgttctcctctttcatagc

SEQ ID NO: 3619791 - DNA, 25 bp, Homo sapien
ccaagcgcgtgttctcctctttcat

SEQ ID NO: 3619792 - DNA, 25 bp, Homo sapien
gtgttctcctctttcatagcttcca

SEQ ID NO: 3619793 - DNA, 25 bp, Homo sapien
gcgtgttctcctctttcatagcttc

SEQ ID NO: 3619794 - DNA, 25 bp, Homo sapien
cacttgtgggttactttgacagaaa

SEQ ID NO: 3619795 - DNA, 25 bp, Homo sapien
tccatgttgcacaataccacatcaa

SEQ ID NO: 3619796 - DNA, 25 bp, Homo sapien
tcatctccagtttcggacgagcagc

SEQ ID NO: 3619797 - DNA, 25 bp, Homo sapien
tcctctgataagatggcacttgtgg

SEQ ID NO: 3619798 - DNA, 25 bp, Homo sapien
ttctgttgaagtattgacaaatgac

SEQ ID NO: 3619799 - DNA, 25 bp, Homo sapien
tcatcttcacccttgtggtaagaag

SEQ ID NO: 3619800 - DNA, 25 bp, Homo sapien
ctcatcttcacccttgtggtaagaa

SEQ ID NO: 3619801 - DNA, 25 bp, Homo sapien
gaagtattgacaaatgactcatctt

SEQ ID NO: 3619802 - DNA, 25 bp, Homo sapien
tgctggcaaggaaatacccactgtg

SEQ ID NO: 3619803 - DNA, 25 bp, Homo sapien
gaggcttgttccagtggtctcatca

SEQ ID NO: 3619804 - DNA, 25 bp, Homo sapien
tgatagctcgtccaccaaaaggtgc

SEQ ID NO: 3619805 - DNA, 25 bp, Homo sapien
aaaaggtgctgtcattgatgctggc

SEQ ID NO: 3619806 - DNA, 25 bp, Homo sapien
cagtgtctgtggcaatgtttaatta

SEQ ID NO: 3619807 - DNA, 25 bp, Homo sapien
tgaggaattgaataattgaggttgc

SEQ ID NO: 3619808 - DNA, 25 bp, Homo sapien
aaagaggccacttaaattcaactct

SEQ ID NO: 3619809 - DNA, 25 bp, Homo sapien
caactctccatggatacagtgtctg

SEQ ID NO: 3619810 - DNA, 25 bp, Homo sapien
gctgagtttattactacccataacc

SEQ ID NO: 3619811 - DNA, 25 bp, Homo sapien
catttctggccttgactgctgagtt

SEQ ID NO: 3619812 - DNA, 25 bp, Homo sapien
ccttttctcatttcctactattatc

SEQ ID NO: 3619813 - DNA, 25 bp, Homo sapien
tcatttcctactattatcacatttc

SEQ ID NO: 3619814 - DNA, 25 bp, Homo sapien
tgcaataagactgatcactagtggg

SEQ ID NO: 3619815 - DNA, 25 bp, Homo sapien
tatcatttggacaccgaacttcaga

SEQ ID NO: 3619816 - DNA, 25 bp, Homo sapien
tctgtattttatggcccgaagcccc

SEQ ID NO: 3619817 - DNA, 25 bp, Homo sapien
gcaactgataaaaggaacctgctcc

SEQ ID NO: 3619818 - DNA, 25 bp, Homo sapien
cactgattggataaggtgagtgaac

SEQ ID NO: 3619819 - DNA, 25 bp, Homo sapien
gtgagtgaacccgagctccaggtgc

SEQ ID NO: 3619820 - DNA, 25 bp, Homo sapien
gataaggtgagtgaacccgagctcc

SEQ ID NO: 3619821 - DNA, 25 bp, Homo sapien
cctcccaagtccactgtgaagatgc

SEQ ID NO: 3619822 - DNA, 25 bp, Homo sapien
gacgcattgcactcatccttgcata

SEQ ID NO: 3619823 - DNA, 25 bp, Homo sapien
ggcaagagagcaaggacgcattgca

SEQ ID NO: 3619824 - DNA, 25 bp, Homo sapien
aggacgcattgcactcatccttgca

SEQ ID NO: 3619825 - DNA, 25 bp, Homo sapien
gagcaaggacgcattgcactcatcc

SEQ ID NO: 3619826 - DNA, 25 bp, Homo sapien
ttccttcagcacgtgctaagcgccg

SEQ ID NO: 3619827 - DNA, 25 bp, Homo sapien
cagagtgagagccatgcctattcct

SEQ ID NO: 3619828 - DNA, 25 bp, Homo sapien
aagcgccgactctcagggcatggct

SEQ ID NO: 3619829 - DNA, 25 bp, Homo sapien
agtgagagccatgcctattccttca

SEQ ID NO: 3619830 - DNA, 25 bp, Homo sapien
cagggactgccaggtatccttgctc

SEQ ID NO: 3619831 - DNA, 25 bp, Homo sapien
aaacatctctgatggcagggactgc

SEQ ID NO: 3619832 - DNA, 25 bp, Homo sapien
cagtgatgctggactagacccctgg

SEQ ID NO: 3619833 - DNA, 25 bp, Homo sapien
ccttgctctcagatgatgtcagcag

SEQ ID NO: 3619834 - DNA, 25 bp, Homo sapien
ttccgatggctccagtcctaagcac

SEQ ID NO: 3619835 - DNA, 25 bp, Homo sapien
cctcacagtaggcatcaaccaagaa

SEQ ID NO: 3619836 - DNA, 25 bp, Homo sapien
tggttcagcacttccgatggctcca

SEQ ID NO: 3619837 - DNA, 25 bp, Homo sapien
cacagtaggcatcaaccaagaacat

SEQ ID NO: 3619838 - DNA, 25 bp, Homo sapien
cttccttcaagaggccatgctgggt

SEQ ID NO: 3619839 - DNA, 25 bp, Homo sapien
gccatgctgggtagcaatggggctc

SEQ ID NO: 3619840 - DNA, 25 bp, Homo sapien
caagaggccatgctgggtagcaatg

SEQ ID NO: 3619841 - DNA, 25 bp, Homo sapien
ggctcctgcccctgctgttcatcat

SEQ ID NO: 3619842 - DNA, 25 bp, Homo sapien
caagccaagggcaagtttacggatc

SEQ ID NO: 3619843 - DNA, 25 bp, Homo sapien
aatcacttctgttaaagtagcatgg

SEQ ID NO: 3619844 - DNA, 25 bp, Homo sapien
gttccagttgagtaattaaaatcac

SEQ ID NO: 3619845 - DNA, 25 bp, Homo sapien
agtagcatggttggctcaacaagcc

SEQ ID NO: 3619846 - DNA, 25 bp, Homo sapien
cccatgacgtacttgtcacttgtca

SEQ ID NO: 3619847 - DNA, 25 bp, Homo sapien
ccccatgacgtacttgtcacttgtc

SEQ ID NO: 3619848 - DNA, 25 bp, Homo sapien
acagatgaaagttttcaaagatgaa

SEQ ID NO: 3619849 - DNA, 25 bp, Homo sapien
tgtcacttgtcattcttcttattgt

SEQ ID NO: 3619850 - DNA, 25 bp, Homo sapien
ctccactgggtctatgactgccagc

SEQ ID NO: 3619851 - DNA, 25 bp, Homo sapien
cttggcagtatgtcttcctgttgtc

SEQ ID NO: 3619852 - DNA, 25 bp, Homo sapien
aggagatgattggtaagaagaacgc

SEQ ID NO: 3619853 - DNA, 25 bp, Homo sapien
gatgattggtaagaagaacgctgga

SEQ ID NO: 3619854 - DNA, 25 bp, Homo sapien
taagaagaacgctggaggtgcacac

SEQ ID NO: 3619855 - DNA, 25 bp, Homo sapien
cacacaatcactttgggcctcagcc

SEQ ID NO: 3619856 - DNA, 25 bp, Homo sapien
gaaaagcaacgaagatttccagtgc

SEQ ID NO: 3619857 - DNA, 25 bp, Homo sapien
gaaaatgcggacattatggaaaact

SEQ ID NO: 3619858 - DNA, 25 bp, Homo sapien
gaatgtgctttgatatccacccggg

SEQ ID NO: 3619859 - DNA, 25 bp, Homo sapien
tctcctttgaccactctgcctttgg

SEQ ID NO: 3619860 - DNA, 25 bp, Homo sapien
catttgcctaagagcgattccacgc

SEQ ID NO: 3619861 - DNA, 25 bp, Homo sapien
caagacccagagttccatccaggaa

SEQ ID NO: 3619862 - DNA, 25 bp, Homo sapien
gaaaaatgctcctctgcgctctctt

SEQ ID NO: 3619863 - DNA, 25 bp, Homo sapien
gagtcctcttgggtatgaaagttcc

SEQ ID NO: 3619864 - DNA, 25 bp, Homo sapien
gtgcctatattcaaagcattggaat

SEQ ID NO: 3619865 - DNA, 25 bp, Homo sapien
tgtgcctatattcaaagcattggaa

SEQ ID NO: 3619866 - DNA, 25 bp, Homo sapien
ttgtgcctatattcaaagcattgga

SEQ ID NO: 3619867 - DNA, 25 bp, Homo sapien
cattggaattgggctgctccaggct

SEQ ID NO: 3619868 - DNA, 25 bp, Homo sapien
cagaacctatcgcagtgtctggcac

SEQ ID NO: 3619869 - DNA, 25 bp, Homo sapien
cctgtttcttggacactgttgtttc

SEQ ID NO: 3619870 - DNA, 25 bp, Homo sapien
tccagaacctatcgcagtgtctggc

SEQ ID NO: 3619871 - DNA, 25 bp, Homo sapien
tgtttcttggacactgttgtttctt

SEQ ID NO: 3619872 - DNA, 25 bp, Homo sapien
gaggaatggcatgaacaccggagtc

SEQ ID NO: 3619873 - DNA, 25 bp, Homo sapien
taagtaatgccattaaaaatggatg

SEQ ID NO: 3619874 - DNA, 25 bp, Homo sapien
gctgtagaacgtataggaaactctt

SEQ ID NO: 3619875 - DNA, 25 bp, Homo sapien
tcaagagtattaacagacagttcat

SEQ ID NO: 3619876 - DNA, 25 bp, Homo sapien
gcagaccttacaaacggccttcact

SEQ ID NO: 3619877 - DNA, 25 bp, Homo sapien
tatgaatccattagctcagcagacc

SEQ ID NO: 3619878 - DNA, 25 bp, Homo sapien
gccttcactactctggactgcattt

SEQ ID NO: 3619879 - DNA, 25 bp, Homo sapien
atttacaacagagagaagtaacttt

SEQ ID NO: 3619880 - DNA, 25 bp, Homo sapien
cattatgcttcgctttaggtttgct

SEQ ID NO: 3619881 - DNA, 25 bp, Homo sapien
tctgcctcgagttctccattatgct

SEQ ID NO: 3619882 - DNA, 25 bp, Homo sapien
tctccattatgcttcgctttaggtt

SEQ ID NO: 3619883 - DNA, 25 bp, Homo sapien
tctatctgcctcgagttctccatta

SEQ ID NO: 3619884 - DNA, 25 bp, Homo sapien
gctgaaggactctaccataacctga

SEQ ID NO: 3619885 - DNA, 25 bp, Homo sapien
tttgctgcactactcagagcagacg

SEQ ID NO: 3619886 - DNA, 25 bp, Homo sapien
caaaagatctgtgaattggctaagc

SEQ ID NO: 3619887 - DNA, 25 bp, Homo sapien
cagacgtagtgaccaggaattcaag

SEQ ID NO: 3619888 - DNA, 25 bp, Homo sapien
cagatgcatacacaacacagccctt

SEQ ID NO: 3619889 - DNA, 25 bp, Homo sapien
catccagccaagctcacatcgagtt

SEQ ID NO: 3619890 - DNA, 25 bp, Homo sapien
tgggtaccagttgcatcaacagatg

SEQ ID NO: 3619891 - DNA, 25 bp, Homo sapien
tcagtgtaggagacttcattctcca

SEQ ID NO: 3619892 - DNA, 25 bp, Homo sapien
cttgtctgtgatgaaggtgagagca

SEQ ID NO: 3619893 - DNA, 25 bp, Homo sapien
ttgtctgtgatgaaggtgagagcat

SEQ ID NO: 3619894 - DNA, 25 bp, Homo sapien
tgatcaatgttatggtgcacctagc

SEQ ID NO: 3619895 - DNA, 25 bp, Homo sapien
cttgatcaatgttatggtgcaccta

SEQ ID NO: 3619896 - DNA, 25 bp, Homo sapien
gatcaatgttatggtgcacctagct

SEQ ID NO: 3619897 - DNA, 25 bp, Homo sapien
caatgttatggtgcacctagctaaa

SEQ ID NO: 3619898 - DNA, 25 bp, Homo sapien
cccactctccattgagtggatttct

SEQ ID NO: 3619899 - DNA, 25 bp, Homo sapien
gatttctgtagtacgactctgctgc

SEQ ID NO: 3619900 - DNA, 25 bp, Homo sapien
tctgctgccagtctactgacagcct

SEQ ID NO: 3619901 - DNA, 25 bp, Homo sapien
cactcagtttctgggcacgacatgt

SEQ ID NO: 3619902 - DNA, 25 bp, Homo sapien
tgaatacattgaggtacacctgcct

SEQ ID NO: 3619903 - DNA, 25 bp, Homo sapien
ctgtgtccctgaatacattgaggta

SEQ ID NO: 3619904 - DNA, 25 bp, Homo sapien
ccctgaatacattgaggtacacctg

SEQ ID NO: 3619905 - DNA, 25 bp, Homo sapien
cattgaggtacacctgcctttctga

SEQ ID NO: 3619906 - DNA, 25 bp, Homo sapien
tatgagaccctgaagaaggaggctg

SEQ ID NO: 3619907 - DNA, 25 bp, Homo sapien
tgttcttagtgttcagcctgggacc

SEQ ID NO: 3619908 - DNA, 25 bp, Homo sapien
cacccgactctatgaagcaaaggca

SEQ ID NO: 3619909 - DNA, 25 bp, Homo sapien
gaagagctaaacacatggtccctgt

SEQ ID NO: 3619910 - DNA, 25 bp, Homo sapien
aacctgagggagacttcataaagcc

SEQ ID NO: 3619911 - DNA, 25 bp, Homo sapien
gacacctaagttgatcctggagctg

SEQ ID NO: 3619912 - DNA, 25 bp, Homo sapien
taacagcctcaagtcttctatggag

SEQ ID NO: 3619913 - DNA, 25 bp, Homo sapien
tgatgcatctggtgggaagacactg

SEQ ID NO: 3619914 - DNA, 25 bp, Homo sapien
catgggacccaatgatagttgcatc

SEQ ID NO: 3619915 - DNA, 25 bp, Homo sapien
aaatcaaagtgcaggcagtaagcct

SEQ ID NO: 3619916 - DNA, 25 bp, Homo sapien
tcatacatggacaaacgcagggtcc

SEQ ID NO: 3619917 - DNA, 25 bp, Homo sapien
tctagccagatcctcagccaaatgc

SEQ ID NO: 3619918 - DNA, 25 bp, Homo sapien
tgcctttggttcttgcggtagacag

SEQ ID NO: 3619919 - DNA, 25 bp, Homo sapien
cacagagaggtaggataggaaagcc

SEQ ID NO: 3619920 - DNA, 25 bp, Homo sapien
gataatcccaatagatacacacggg

SEQ ID NO: 3619921 - DNA, 25 bp, Homo sapien
aagggagggctcatctaacgtctgc

SEQ ID NO: 3619922 - DNA, 25 bp, Homo sapien
tgaaccagagaaccccgagaataat

SEQ ID NO: 3619923 - DNA, 25 bp, Homo sapien
tagaggttaattctccccatgagcc

SEQ ID NO: 3619924 - DNA, 25 bp, Homo sapien
cacatggcaccttgtcttgaaaaga

SEQ ID NO: 3619925 - DNA, 25 bp, Homo sapien
tgagaaaacttgcacgcccagaaag

SEQ ID NO: 3619926 - DNA, 25 bp, Homo sapien
gagggcctcagtcaagagcagtttt

SEQ ID NO: 3619927 - DNA, 25 bp, Homo sapien
cagagacccttgtgccatagttgga

SEQ ID NO: 3619928 - DNA, 25 bp, Homo sapien
cagacggacacttcatggcagatgc

SEQ ID NO: 3619929 - DNA, 25 bp, Homo sapien
cctgtatgactttagagaggccact

SEQ ID NO: 3619930 - DNA, 25 bp, Homo sapien
aggcacgagggagcagagcacattc

SEQ ID NO: 3619931 - DNA, 25 bp, Homo sapien
gggagactttcattctgagactctt

SEQ ID NO: 3619932 - DNA, 25 bp, Homo sapien
tcggacaatgtcagcggctccgtgt

SEQ ID NO: 3619933 - DNA, 25 bp, Homo sapien
cagcggctccgtgtgttggagtaaa

SEQ ID NO: 3619934 - DNA, 25 bp, Homo sapien
tgtgagtgagcaaatctagcagagt

SEQ ID NO: 3619935 - DNA, 25 bp, Homo sapien
agggagtctacacctagaattaagg

SEQ ID NO: 3619936 - DNA, 25 bp, Homo sapien
ctgtcaggaacacgcaaagggagtc

SEQ ID NO: 3619937 - DNA, 25 bp, Homo sapien
gaattaaggggatacactgacccac

SEQ ID NO: 3619938 - DNA, 25 bp, Homo sapien
tcagaaatactggtgcctccacagc

SEQ ID NO: 3619939 - DNA, 25 bp, Homo sapien
ctgatggtcacacggctgtcgggac

SEQ ID NO: 3619940 - DNA, 25 bp, Homo sapien
ccacagccgtgtcgagggcacaggt

SEQ ID NO: 3619941 - DNA, 25 bp, Homo sapien
cacaggtgggcataggcctggaggt

SEQ ID NO: 3619942 - DNA, 25 bp, Homo sapien
ttgcaggtgactgacagaaatgggc

SEQ ID NO: 3619943 - DNA, 25 bp, Homo sapien
tggtgacccaaagggcattcaaagc

SEQ ID NO: 3619944 - DNA, 25 bp, Homo sapien
tggcgttgtctctggtgacccaaag

SEQ ID NO: 3619945 - DNA, 25 bp, Homo sapien
gacatttgcaggtgactgacagaaa

SEQ ID NO: 3619946 - DNA, 25 bp, Homo sapien
tcttgctgaacaatcggggttttgc

SEQ ID NO: 3619947 - DNA, 25 bp, Homo sapien
ttcttgctgaacaatcggggttttg

SEQ ID NO: 3619948 - DNA, 25 bp, Homo sapien
cggggttttgcttcatcattgagct

SEQ ID NO: 3619949 - DNA, 25 bp, Homo sapien
gaacaatcggggttttgcttcatca

SEQ ID NO: 3619950 - DNA, 25 bp, Homo sapien
aggacaggacgctctaggaatgcca

SEQ ID NO: 3619951 - DNA, 25 bp, Homo sapien
cctttcttaagagcgagtgtctgga

SEQ ID NO: 3619952 - DNA, 25 bp, Homo sapien
gctacctaagctgtgcatgtgcagg

SEQ ID NO: 3619953 - DNA, 25 bp, Homo sapien
tctggagtagaaggcgccaagttct

SEQ ID NO: 3619954 - DNA, 25 bp, Homo sapien
tctgaacaaagcatgaccgtcctga

SEQ ID NO: 3619955 - DNA, 25 bp, Homo sapien
tggcagctctccattcccttgttgg

SEQ ID NO: 3619956 - DNA, 25 bp, Homo sapien
tgtgctgtgacattatccctctctg

SEQ ID NO: 3619957 - DNA, 25 bp, Homo sapien
gaacatgtctattctcagcaggagg

SEQ ID NO: 3619958 - DNA, 25 bp, Homo sapien
cattggcattccaaaagagcgggaa

SEQ ID NO: 3619959 - DNA, 25 bp, Homo sapien
tccaaactcaattccacaggtgact

SEQ ID NO: 3619960 - DNA, 25 bp, Homo sapien
ggaaggagcccatgtacttgcccct

SEQ ID NO: 3619961 - DNA, 25 bp, Homo sapien
ctcagatggcagaggtgcattggca

SEQ ID NO: 3619962 - DNA, 25 bp, Homo sapien
gttctttccggagagtccacctgct

SEQ ID NO: 3619963 - DNA, 25 bp, Homo sapien
cagtggcaaggagcctagaggtggc

SEQ ID NO: 3619964 - DNA, 25 bp, Homo sapien
tggcaaagttctttccggagagtcc

SEQ ID NO: 3619965 - DNA, 25 bp, Homo sapien
gcaaagttctttccggagagtccac

SEQ ID NO: 3619966 - DNA, 25 bp, Homo sapien
tgtgcaagtcaaaccctattcaagc

SEQ ID NO: 3619967 - DNA, 25 bp, Homo sapien
tcagagcggcataaccacagagata

SEQ ID NO: 3619968 - DNA, 25 bp, Homo sapien
gcaccacgggcgaaatttcatttta

SEQ ID NO: 3619969 - DNA, 25 bp, Homo sapien
cctaatttagggaactcgatgacgt

SEQ ID NO: 3619970 - DNA, 25 bp, Homo sapien
atcagtccgagttcccgaagcctgc

SEQ ID NO: 3619971 - DNA, 25 bp, Homo sapien
tcgcaaaggcgaagaggcaatgcca

SEQ ID NO: 3619972 - DNA, 25 bp, Homo sapien
ggcaccgagagacgcatccatcagt

SEQ ID NO: 3619973 - DNA, 25 bp, Homo sapien
ggcaatgccagagcatctcagcccg

SEQ ID NO: 3619974 - DNA, 25 bp, Homo sapien
aagcagacgaagagcagatcgagct

SEQ ID NO: 3619975 - DNA, 25 bp, Homo sapien
agacgaagagcagatcgagctggaa

SEQ ID NO: 3619976 - DNA, 25 bp, Homo sapien
gaagagcagatcgagctggaagggt

SEQ ID NO: 3619977 - DNA, 25 bp, Homo sapien
agagcagatcgagctggaagggttt

SEQ ID NO: 3619978 - DNA, 25 bp, Homo sapien
cttagcgcagcgaaggaaagccggc

SEQ ID NO: 3619979 - DNA, 25 bp, Homo sapien
aagccggcggggtaacttggctgtg

SEQ ID NO: 3619980 - DNA, 25 bp, Homo sapien
tccttagcgcagcgaaggaaagccg

SEQ ID NO: 3619981 - DNA, 25 bp, Homo sapien
gccggtcctctcgggttcgcgccta

SEQ ID NO: 3619982 - DNA, 25 bp, Homo sapien
tgcagccagccgacacaaactgcct

SEQ ID NO: 3619983 - DNA, 25 bp, Homo sapien
agccagccgacacaaactgcctgtt

SEQ ID NO: 3619984 - DNA, 25 bp, Homo sapien
tatctgcagccagccgacacaaact

SEQ ID NO: 3619985 - DNA, 25 bp, Homo sapien
ctgcagccagccgacacaaactgcc

SEQ ID NO: 3619986 - DNA, 25 bp, Homo sapien
agctagtgacgagtgacagaaggac

SEQ ID NO: 3619987 - DNA, 25 bp, Homo sapien
tcttggcatcccaggcacacggctt

SEQ ID NO: 3619988 - DNA, 25 bp, Homo sapien
ggattgtcagcaatgtccccactcg

SEQ ID NO: 3619989 - DNA, 25 bp, Homo sapien
cactcggagaagatccattctctgg

SEQ ID NO: 3619990 - DNA, 25 bp, Homo sapien
ggatgactatccacatgcatgtgca

SEQ ID NO: 3619991 - DNA, 25 bp, Homo sapien
tccacacgatgtcctgtttaacagt

SEQ ID NO: 3619992 - DNA, 25 bp, Homo sapien
gagctgtgactttttgtccacacga

SEQ ID NO: 3619993 - DNA, 25 bp, Homo sapien
gagatctatgcaaaacggacagtgg

SEQ ID NO: 3619994 - DNA, 25 bp, Homo sapien
tgcaggacccacagccggtcgggct

SEQ ID NO: 3619995 - DNA, 25 bp, Homo sapien
acccacagccggtcgggctctggcg

SEQ ID NO: 3619996 - DNA, 25 bp, Homo sapien
gggctcggttagcctcctggcgctg

SEQ ID NO: 3619997 - DNA, 25 bp, Homo sapien
tctggcgccagcctcgacggcggcc

SEQ ID NO: 3619998 - DNA, 25 bp, Homo sapien
gcaaggctcccccggaaagcgtcca

SEQ ID NO: 3619999 - DNA, 25 bp, Homo sapien
ttccaagccttgctgcgtgttgccc

SEQ ID NO: 3620000 - DNA, 25 bp, Homo sapien
gccttgctgcgtgttgcccccaggg

SEQ ID NO: 3620001 - DNA, 25 bp, Homo sapien
ccggaaagcgtccaagccctgctct

SEQ ID NO: 3620002 - DNA, 25 bp, Homo sapien
tgtcagcccaatgtctatcatgtgt

SEQ ID NO: 3620003 - DNA, 25 bp, Homo sapien
tcaaaggcctgttttggatacttaa

SEQ ID NO: 3620004 - DNA, 25 bp, Homo sapien
tatcatgtgttattccctcggtttg

SEQ ID NO: 3620005 - DNA, 25 bp, Homo sapien
gatacttaaagacatgtggaataac

SEQ ID NO: 3620006 - DNA, 25 bp, Homo sapien
gcccagtgtccccactgtcctatcc

SEQ ID NO: 3620007 - DNA, 25 bp, Homo sapien
cccagtgtccccactgtcctatcct

SEQ ID NO: 3620008 - DNA, 25 bp, Homo sapien
gaagctatcatactgtataacaagt

SEQ ID NO: 3620009 - DNA, 25 bp, Homo sapien
ttcaaagtaaatgaggaaagccaac

SEQ ID NO: 3620010 - DNA, 25 bp, Homo sapien
taacaagtatgcagacataggttca

SEQ ID NO: 3620011 - DNA, 25 bp, Homo sapien
taatggcacaatcccaaatcagttg

SEQ ID NO: 3620012 - DNA, 25 bp, Homo sapien
tctgaggtctgcgtctcttctttgt

SEQ ID NO: 3620013 - DNA, 25 bp, Homo sapien
tcagtgtttttctgaggtctgcgtc

SEQ ID NO: 3620014 - DNA, 25 bp, Homo sapien
agtgtttttctgaggtctgcgtctc

SEQ ID NO: 3620015 - DNA, 25 bp, Homo sapien
gtttttctgaggtctgcgtctcttc

SEQ ID NO: 3620016 - DNA, 25 bp, Homo sapien
ctctgagaaactcaagagaatattt

SEQ ID NO: 3620017 - DNA, 25 bp, Homo sapien
aactgacacttgcacggagcatgat

SEQ ID NO: 3620018 - DNA, 25 bp, Homo sapien
cacggagcatgatttgatagcaata

SEQ ID NO: 3620019 - DNA, 25 bp, Homo sapien
gagaaactcaagagaatatttgttc

SEQ ID NO: 3620020 - DNA, 25 bp, Homo sapien
ctttctgtgcctcatctgaatttga

SEQ ID NO: 3620021 - DNA, 25 bp, Homo sapien
tttctgtgcctcatctgaatttgaa

SEQ ID NO: 3620022 - DNA, 25 bp, Homo sapien
tgtgcctcatctgaatttgaattat

SEQ ID NO: 3620023 - DNA, 25 bp, Homo sapien
tctgtgcctcatctgaatttgaatt

SEQ ID NO: 3620024 - DNA, 25 bp, Homo sapien
ctgtctttgcgtattgagatgacac

SEQ ID NO: 3620025 - DNA, 25 bp, Homo sapien
tgtcttccgcagctgtctttgcgta

SEQ ID NO: 3620026 - DNA, 25 bp, Homo sapien
gtagagcctagtccctcctgtcttc

SEQ ID NO: 3620027 - DNA, 25 bp, Homo sapien
tgaaagtagagcctagtccctcctg

SEQ ID NO: 3620028 - DNA, 25 bp, Homo sapien
ccatccactgattcacaataccgat

SEQ ID NO: 3620029 - DNA, 25 bp, Homo sapien
cacaataccgatgtcagctccgaac

SEQ ID NO: 3620030 - DNA, 25 bp, Homo sapien
taattctcagtccattcacacccat

SEQ ID NO: 3620031 - DNA, 25 bp, Homo sapien
gatgtcagctccgaacttccattct

SEQ ID NO: 3620032 - DNA, 25 bp, Homo sapien
catgacaagggtttgctctcttcct

SEQ ID NO: 3620033 - DNA, 25 bp, Homo sapien
gcagtatcatgacaagggtttgctc

SEQ ID NO: 3620034 - DNA, 25 bp, Homo sapien
tgaatccgatggcagtatcatgaca

SEQ ID NO: 3620035 - DNA, 25 bp, Homo sapien
cgatggcagtatcatgacaagggtt

SEQ ID NO: 3620036 - DNA, 25 bp, Homo sapien
tgagatgtcacctggtgagtgacac

SEQ ID NO: 3620037 - DNA, 25 bp, Homo sapien
tctcctcagcaccttggactgctgt

SEQ ID NO: 3620038 - DNA, 25 bp, Homo sapien
ctgagggacaggatgccgtagcact

SEQ ID NO: 3620039 - DNA, 25 bp, Homo sapien
tgagtgacacggcacatgcaagtca

SEQ ID NO: 3620040 - DNA, 25 bp, Homo sapien
ctgcactggctcgagatgcctcaca

SEQ ID NO: 3620041 - DNA, 25 bp, Homo sapien
cctcacactcccgtttcagatggga

SEQ ID NO: 3620042 - DNA, 25 bp, Homo sapien
gcactggctcgagatgcctcacact

SEQ ID NO: 3620043 - DNA, 25 bp, Homo sapien
actcccgtttcagatgggagtgcat

SEQ ID NO: 3620044 - DNA, 25 bp, Homo sapien
cctttcagcaccaagctcacagagc

SEQ ID NO: 3620045 - DNA, 25 bp, Homo sapien
cctcattgattaaagggaagacaga

SEQ ID NO: 3620046 - DNA, 25 bp, Homo sapien
gacctcattgattaaagggaagaca

SEQ ID NO: 3620047 - DNA, 25 bp, Homo sapien
ctcattgattaaagggaagacagaa

SEQ ID NO: 3620048 - DNA, 25 bp, Homo sapien
gacattgctggattcagacgaacag

SEQ ID NO: 3620049 - DNA, 25 bp, Homo sapien
ttgctggattcagacgaacagctcc

SEQ ID NO: 3620050 - DNA, 25 bp, Homo sapien
gctggattcagacgaacagctccaa

SEQ ID NO: 3620051 - DNA, 25 bp, Homo sapien
acaggacattgctggattcagacga

SEQ ID NO: 3620052 - DNA, 25 bp, Homo sapien
tctgctgcagatggacctggcacag

SEQ ID NO: 3620053 - DNA, 25 bp, Homo sapien
gtatgggatgcagctgtacggacac

SEQ ID NO: 3620054 - DNA, 25 bp, Homo sapien
cagctgtacggacactctgtctctg

SEQ ID NO: 3620055 - DNA, 25 bp, Homo sapien
gaatctgagtggtagcttccccagt

SEQ ID NO: 3620056 - DNA, 25 bp, Homo sapien
caggaggaatctgagtggtagcttc

SEQ ID NO: 3620057 - DNA, 25 bp, Homo sapien
tttccgggcaggctgagcttctctg

SEQ ID NO: 3620058 - DNA, 25 bp, Homo sapien
ctgagcttctctgagtggaacagca

SEQ ID NO: 3620059 - DNA, 25 bp, Homo sapien
tccatttccgggcaggctgagcttc

SEQ ID NO: 3620060 - DNA, 25 bp, Homo sapien
caggctgagcttctctgagtggaac

SEQ ID NO: 3620061 - DNA, 25 bp, Homo sapien
cacatcggtggtaaacatgcttctt

SEQ ID NO: 3620062 - DNA, 25 bp, Homo sapien
tccctctgtgaatgatcacatcggt

SEQ ID NO: 3620063 - DNA, 25 bp, Homo sapien
taaacccgttttgagcagggctgtg

SEQ ID NO: 3620064 - DNA, 25 bp, Homo sapien
tgaatgatcacatcggtggtaaaca

SEQ ID NO: 3620065 - DNA, 25 bp, Homo sapien
tatagaacagctgccgcggcccact

SEQ ID NO: 3620066 - DNA, 25 bp, Homo sapien
ggcccactgaaagcttcaagccgag

SEQ ID NO: 3620067 - DNA, 25 bp, Homo sapien
gagacctgaggtgcatgaaccctcc

SEQ ID NO: 3620068 - DNA, 25 bp, Homo sapien
aacaggtgcaactgcctatagaaca

SEQ ID NO: 3620069 - DNA, 25 bp, Homo sapien
tactacctgagctgtttttgcccat

SEQ ID NO: 3620070 - DNA, 25 bp, Homo sapien
cattactacctgagctgtttttgcc

SEQ ID NO: 3620071 - DNA, 25 bp, Homo sapien
ttactacctgagctgtttttgccca

SEQ ID NO: 3620072 - DNA, 25 bp, Homo sapien
cttcattactacctgagctgttttt

SEQ ID NO: 3620073 - DNA, 25 bp, Homo sapien
tgcggattgtagctgcaccctccat

SEQ ID NO: 3620074 - DNA, 25 bp, Homo sapien
ttcttctgtgcggattgtagctgca

SEQ ID NO: 3620075 - DNA, 25 bp, Homo sapien
ttctgtgcggattgtagctgcaccc

SEQ ID NO: 3620076 - DNA, 25 bp, Homo sapien
tgtgcggattgtagctgcaccctcc

SEQ ID NO: 3620077 - DNA, 25 bp, Homo sapien
ttcacaggaatcatcgtttcaacat

SEQ ID NO: 3620078 - DNA, 25 bp, Homo sapien
ctggatatcaaaactcatcaattcc

SEQ ID NO: 3620079 - DNA, 25 bp, Homo sapien
ctctggatatcaaaactcatcaatt

SEQ ID NO: 3620080 - DNA, 25 bp, Homo sapien
ggatatcaaaactcatcaattccat

SEQ ID NO: 3620081 - DNA, 25 bp, Homo sapien
atgggcacaagcacgtgcacgcctg

SEQ ID NO: 3620082 - DNA, 25 bp, Homo sapien
ttacatgggcacaagcacgtgcacg

SEQ ID NO: 3620083 - DNA, 25 bp, Homo sapien
acgtgcacgcctgtgagtgtatatc

SEQ ID NO: 3620084 - DNA, 25 bp, Homo sapien
gtgagtgtatatctgagtgttttga

SEQ ID NO: 3620085 - DNA, 25 bp, Homo sapien
ttccatggaccctccaagttcagag

SEQ ID NO: 3620086 - DNA, 25 bp, Homo sapien
gcatcagatacaaggaccccagtag

SEQ ID NO: 3620087 - DNA, 25 bp, Homo sapien
tgtatttccagaggttaggtcctgg

SEQ ID NO: 3620088 - DNA, 25 bp, Homo sapien
ttcctctcgtaaggctctggcatca

SEQ ID NO: 3620089 - DNA, 25 bp, Homo sapien
aggggagaattggagtcttgcacaa

SEQ ID NO: 3620090 - DNA, 25 bp, Homo sapien
ggagaattggagtcttgcacaatga

SEQ ID NO: 3620091 - DNA, 25 bp, Homo sapien
gtcttgcacaatgaaaggacaacat

SEQ ID NO: 3620092 - DNA, 25 bp, Homo sapien
ttgcacaatgaaaggacaacattgc

SEQ ID NO: 3620093 - DNA, 25 bp, Homo sapien
gatgtttcaggtccatgtgcaactt

SEQ ID NO: 3620094 - DNA, 25 bp, Homo sapien
ctgcttattgcaagtgaggcccaaa

SEQ ID NO: 3620095 - DNA, 25 bp, Homo sapien
ggtccatgtgcaacttattcccaga

SEQ ID NO: 3620096 - DNA, 25 bp, Homo sapien
tcatcctgcttattgcaagtgaggc

SEQ ID NO: 3620097 - DNA, 25 bp, Homo sapien
ctaagaagcaacacactagctggtc

SEQ ID NO: 3620098 - DNA, 25 bp, Homo sapien
cctaagaagcaacacactagctggt

SEQ ID NO: 3620099 - DNA, 25 bp, Homo sapien
ctccctaagaagcaacacactagct

SEQ ID NO: 3620100 - DNA, 25 bp, Homo sapien
tccctaagaagcaacacactagctg

SEQ ID NO: 3620101 - DNA, 25 bp, Homo sapien
ttaccatccggctgggctgtagtta

SEQ ID NO: 3620102 - DNA, 25 bp, Homo sapien
gctgggctgtagttattcttgtcac

SEQ ID NO: 3620103 - DNA, 25 bp, Homo sapien
ctgctctttaccatccggctgggct

SEQ ID NO: 3620104 - DNA, 25 bp, Homo sapien
ctgtagttattcttgtcacagctga

SEQ ID NO: 3620105 - DNA, 25 bp, Homo sapien
tgctggaaatgggtgagtgtaaccc

SEQ ID NO: 3620106 - DNA, 25 bp, Homo sapien
tgcatttgcaaagaacggctgtcaa

SEQ ID NO: 3620107 - DNA, 25 bp, Homo sapien
aagaacggctgtcaattttaatgca

SEQ ID NO: 3620108 - DNA, 25 bp, Homo sapien
ctctgcatttgcaaagaacggctgt

SEQ ID NO: 3620109 - DNA, 25 bp, Homo sapien
catcttatgatgaggtttgatcttc

SEQ ID NO: 3620110 - DNA, 25 bp, Homo sapien
ttcaggtcacacagcccaaaactct

SEQ ID NO: 3620111 - DNA, 25 bp, Homo sapien
aaatgacatatttcccttgtagtgg

SEQ ID NO: 3620112 - DNA, 25 bp, Homo sapien
ggcttttttccgattttcagattca

SEQ ID NO: 3620113 - DNA, 25 bp, Homo sapien
tagccgtgctacatggaattctcat

SEQ ID NO: 3620114 - DNA, 25 bp, Homo sapien
tattttatgagctaatcggatggag

SEQ ID NO: 3620115 - DNA, 25 bp, Homo sapien
ccccttatcgactgcaaatatttta

SEQ ID NO: 3620116 - DNA, 25 bp, Homo sapien
cggatggagccaacccactgttcca

SEQ ID NO: 3620117 - DNA, 25 bp, Homo sapien
ctgcaggtacactcctgtggaagat

SEQ ID NO: 3620118 - DNA, 25 bp, Homo sapien
ccatggccagtgtagcgcttgatca

SEQ ID NO: 3620119 - DNA, 25 bp, Homo sapien
cagtgtagcgcttgatcatttgcaa

SEQ ID NO: 3620120 - DNA, 25 bp, Homo sapien
gccagtgtagcgcttgatcatttgc

SEQ ID NO: 3620121 - DNA, 25 bp, Homo sapien
atggccagtgtagcgcttgatcatt

SEQ ID NO: 3620122 - DNA, 25 bp, Homo sapien
cttgtaggaaacatggatgccacac

SEQ ID NO: 3620123 - DNA, 25 bp, Homo sapien
ttgtccatttgttcttgtaggaaac

SEQ ID NO: 3620124 - DNA, 25 bp, Homo sapien
tgttcttgtaggaaacatggatgcc

SEQ ID NO: 3620125 - DNA, 25 bp, Homo sapien
tgtccatttgttcttgtaggaaaca

SEQ ID NO: 3620126 - DNA, 25 bp, Homo sapien
gtgccatctaagttcatttctaagg

SEQ ID NO: 3620127 - DNA, 25 bp, Homo sapien
tttctaaggcataatagggaagtaa

SEQ ID NO: 3620128 - DNA, 25 bp, Homo sapien
agacaaatatgccacactggtgaca

SEQ ID NO: 3620129 - DNA, 25 bp, Homo sapien
acactggagaatatgttctctcgac

SEQ ID NO: 3620130 - DNA, 25 bp, Homo sapien
tccaacactgtactcctgctcagta

SEQ ID NO: 3620131 - DNA, 25 bp, Homo sapien
gcctccagagtcagacgcaggcctg

SEQ ID NO: 3620132 - DNA, 25 bp, Homo sapien
tggcacagcaaatgccccgcctgag

SEQ ID NO: 3620133 - DNA, 25 bp, Homo sapien
tgctcagtactgaccagtcctctag

SEQ ID NO: 3620134 - DNA, 25 bp, Homo sapien
tctctgtagcttttagtgcataagg

SEQ ID NO: 3620135 - DNA, 25 bp, Homo sapien
tgaagagtctgtatattccgtaggc

SEQ ID NO: 3620136 - DNA, 25 bp, Homo sapien
gagggttgggtatgatctgcatcca

SEQ ID NO: 3620137 - DNA, 25 bp, Homo sapien
catccacagtggatgtgtggtagcc

SEQ ID NO: 3620138 - DNA, 25 bp, Homo sapien
tatgcatgtgtgactgttcagcgcc

SEQ ID NO: 3620139 - DNA, 25 bp, Homo sapien
gttccaatgggagcgtgcacagcat

SEQ ID NO: 3620140 - DNA, 25 bp, Homo sapien
tctgtaggccatctaatgggttcca

SEQ ID NO: 3620141 - DNA, 25 bp, Homo sapien
gccattagccttgtttttagagctg

SEQ ID NO: 3620142 - DNA, 25 bp, Homo sapien
caagtctccaaatggcagtggccaa

SEQ ID NO: 3620143 - DNA, 25 bp, Homo sapien
tttttgtttctatcaagtctccaaa

SEQ ID NO: 3620144 - DNA, 25 bp, Homo sapien
cagtggccaaaatgaatatcggtca

SEQ ID NO: 3620145 - DNA, 25 bp, Homo sapien
ctatcaagtctccaaatggcagtgg

SEQ ID NO: 3620146 - DNA, 25 bp, Homo sapien
cctcgtccaggaggataagaatcat

SEQ ID NO: 3620147 - DNA, 25 bp, Homo sapien
tcccttgagaaagcgtgaagtttga

SEQ ID NO: 3620148 - DNA, 25 bp, Homo sapien
tatttctaataaaagatgattccct

SEQ ID NO: 3620149 - DNA, 25 bp, Homo sapien
ccttgagaaagcgtgaagtttgaaa

SEQ ID NO: 3620150 - DNA, 25 bp, Homo sapien
tgagaaagcgtgaagtttgaaagtt

SEQ ID NO: 3620151 - DNA, 25 bp, Homo sapien
gattcagaacttgccaacagttgga

SEQ ID NO: 3620152 - DNA, 25 bp, Homo sapien
gtaatagtaccctgctgacacaggc

SEQ ID NO: 3620153 - DNA, 25 bp, Homo sapien
gaatccagtatcagggacctattgc

SEQ ID NO: 3620154 - DNA, 25 bp, Homo sapien
caggcacagatctaaaaggaatggc

SEQ ID NO: 3620155 - DNA, 25 bp, Homo sapien
gagaaaattggttatggccggccat

SEQ ID NO: 3620156 - DNA, 25 bp, Homo sapien
ctttctcatattgcttgccttcttt

SEQ ID NO: 3620157 - DNA, 25 bp, Homo sapien
gctttctcatattgcttgccttctt

SEQ ID NO: 3620158 - DNA, 25 bp, Homo sapien
ggctttctcatattgcttgccttct

SEQ ID NO: 3620159 - DNA, 25 bp, Homo sapien
aggctttctcatattgcttgccttc

SEQ ID NO: 3620160 - DNA, 25 bp, Homo sapien
tagagccataaagaggtaaccccaa

SEQ ID NO: 3620161 - DNA, 25 bp, Homo sapien
ctagagccataaagaggtaacccca

SEQ ID NO: 3620162 - DNA, 25 bp, Homo sapien
tcccatgagtgatgtaaagatgaat

SEQ ID NO: 3620163 - DNA, 25 bp, Homo sapien
taaaacccttagagcactgagtatc

SEQ ID NO: 3620164 - DNA, 25 bp, Homo sapien
ctttcaatcagggacactttctctc

SEQ ID NO: 3620165 - DNA, 25 bp, Homo sapien
tgacatctacaccagaggaaacagc

SEQ ID NO: 3620166 - DNA, 25 bp, Homo sapien
tcacaatctggtggaatttgaggaa

SEQ ID NO: 3620167 - DNA, 25 bp, Homo sapien
cacaatctggtggaatttgaggaat

SEQ ID NO: 3620168 - DNA, 25 bp, Homo sapien
caatctggtggaatttgaggaatgc

SEQ ID NO: 3620169 - DNA, 25 bp, Homo sapien
aatctggtggaatttgaggaatgct

SEQ ID NO: 3620170 - DNA, 25 bp, Homo sapien
tttttctgaagtctggaggtgagga

SEQ ID NO: 3620171 - DNA, 25 bp, Homo sapien
gtttttctgaagtctggaggtgagg

SEQ ID NO: 3620172 - DNA, 25 bp, Homo sapien
gaatctgggccccttcagcgaagcc

SEQ ID NO: 3620173 - DNA, 25 bp, Homo sapien
cttcccggcaggcagaaaacagaat

SEQ ID NO: 3620174 - DNA, 25 bp, Homo sapien
tgggcacagcctggaaccgtgttgg

SEQ ID NO: 3620175 - DNA, 25 bp, Homo sapien
tgggccccttcagcgaagccaggtg

SEQ ID NO: 3620176 - DNA, 25 bp, Homo sapien
tagtcctagttgctggagagcctgg

SEQ ID NO: 3620177 - DNA, 25 bp, Homo sapien
taaacaacatgaggagtaggattgc

SEQ ID NO: 3620178 - DNA, 25 bp, Homo sapien
catgaggagtaggattgccaatccc

SEQ ID NO: 3620179 - DNA, 25 bp, Homo sapien
gtggcctgccttagtcctagttgct

SEQ ID NO: 3620180 - DNA, 25 bp, Homo sapien
caaaagcgtttcttaagccccaatg

SEQ ID NO: 3620181 - DNA, 25 bp, Homo sapien
ccgataggaaagcaaaagcgtttct

SEQ ID NO: 3620182 - DNA, 25 bp, Homo sapien
tcttaagccccaatgggaagatggc

SEQ ID NO: 3620183 - DNA, 25 bp, Homo sapien
gataggaaagcaaaagcgtttctta

SEQ ID NO: 3620184 - DNA, 25 bp, Homo sapien
ctgactgttctctatgacctatggg

SEQ ID NO: 3620185 - DNA, 25 bp, Homo sapien
gcatcatggagctcgggagattgta

SEQ ID NO: 3620186 - DNA, 25 bp, Homo sapien
tggccacaggttagagctggcatca

SEQ ID NO: 3620187 - DNA, 25 bp, Homo sapien
tgtccctagacttgtgcaggatgaa

SEQ ID NO: 3620188 - DNA, 25 bp, Homo sapien
agagcaaaggcccttcagggtccag

SEQ ID NO: 3620189 - DNA, 25 bp, Homo sapien
gggattcctgtggatttcacaatgg

SEQ ID NO: 3620190 - DNA, 25 bp, Homo sapien
ggtccaggtatgataattctatagc

SEQ ID NO: 3620191 - DNA, 25 bp, Homo sapien
ggtgagtgtgaagcacagcttaaac

SEQ ID NO: 3620192 - DNA, 25 bp, Homo sapien
gcagcaatttgcagaggaactgttg

SEQ ID NO: 3620193 - DNA, 25 bp, Homo sapien
tctgaggtgcctaatgcagcaattt

SEQ ID NO: 3620194 - DNA, 25 bp, Homo sapien
ccagcctttctgaggtgcctaatgc

SEQ ID NO: 3620195 - DNA, 25 bp, Homo sapien
cagcaatttgcagaggaactgttgc

SEQ ID NO: 3620196 - DNA, 25 bp, Homo sapien
gcagaaacactgacttggtgctgaa

SEQ ID NO: 3620197 - DNA, 25 bp, Homo sapien
aacactgacttggtgctgaatcagg

SEQ ID NO: 3620198 - DNA, 25 bp, Homo sapien
gaaacactgacttggtgctgaatca

SEQ ID NO: 3620199 - DNA, 25 bp, Homo sapien
cagaaacactgacttggtgctgaat

SEQ ID NO: 3620200 - DNA, 25 bp, Homo sapien
aatcaaatgttttagtggcctggat

SEQ ID NO: 3620201 - DNA, 25 bp, Homo sapien
ttagtggcctggatactacaactct

SEQ ID NO: 3620202 - DNA, 25 bp, Homo sapien
tggatactacaactcttgacatgaa

SEQ ID NO: 3620203 - DNA, 25 bp, Homo sapien
ttttagctccacttagctctctcaa

SEQ ID NO: 3620204 - DNA, 25 bp, Homo sapien
gactggtgctgcagagcttgtattt

SEQ ID NO: 3620205 - DNA, 25 bp, Homo sapien
cgacgttgtcttgactggtgctgca

SEQ ID NO: 3620206 - DNA, 25 bp, Homo sapien
cttcggcacgacgttgtcttgactg

SEQ ID NO: 3620207 - DNA, 25 bp, Homo sapien
ttgtcttgactggtgctgcagagct

SEQ ID NO: 3620208 - DNA, 25 bp, Homo sapien
gacagccttggcaaaaatcactctt

SEQ ID NO: 3620209 - DNA, 25 bp, Homo sapien
aatgtagttgtagttgcgatggcac

SEQ ID NO: 3620210 - DNA, 25 bp, Homo sapien
tgttttcaggcgctcatgacagcct

SEQ ID NO: 3620211 - DNA, 25 bp, Homo sapien
catatccgttctcacctcagaggtg

SEQ ID NO: 3620212 - DNA, 25 bp, Homo sapien
actggctggctcgtagtctcttctt

SEQ ID NO: 3620213 - DNA, 25 bp, Homo sapien
ctgactggctggctcgtagtctctt

SEQ ID NO: 3620214 - DNA, 25 bp, Homo sapien
gactggctggctcgtagtctcttct

SEQ ID NO: 3620215 - DNA, 25 bp, Homo sapien
tgactggctggctcgtagtctcttc

SEQ ID NO: 3620216 - DNA, 25 bp, Homo sapien
gagcaagctgggatgagctctcctg

SEQ ID NO: 3620217 - DNA, 25 bp, Homo sapien
tcctggccggactttctttctgctg

SEQ ID NO: 3620218 - DNA, 25 bp, Homo sapien
aggttagtcaccttgctctttaccg

SEQ ID NO: 3620219 - DNA, 25 bp, Homo sapien
tgatggttgatgaggttagtcacct

SEQ ID NO: 3620220 - DNA, 25 bp, Homo sapien
tctgtggagaagcataaaagctgta

SEQ ID NO: 3620221 - DNA, 25 bp, Homo sapien
tacccaactcggaccaaatggctga

SEQ ID NO: 3620222 - DNA, 25 bp, Homo sapien
cacttggcgcatgagttggaaacct

SEQ ID NO: 3620223 - DNA, 25 bp, Homo sapien
gaggatttcctgaagtatacccaac

SEQ ID NO: 3620224 - DNA, 25 bp, Homo sapien
aagtgaccatgatatggtttgcaaa

SEQ ID NO: 3620225 - DNA, 25 bp, Homo sapien
atggtttgcaaaagccgtgctaaac

SEQ ID NO: 3620226 - DNA, 25 bp, Homo sapien
gccgtgctaaacaggacgtgtccat

SEQ ID NO: 3620227 - DNA, 25 bp, Homo sapien
tgcaaaagccgtgctaaacaggacg

SEQ ID NO: 3620228 - DNA, 25 bp, Homo sapien
gcccacgtgtatgcaaatccagaaa

SEQ ID NO: 3620229 - DNA, 25 bp, Homo sapien
tgtttagaagcaatctgcagcatgg

SEQ ID NO: 3620230 - DNA, 25 bp, Homo sapien
cagcatgttagggaagataactcct

SEQ ID NO: 3620231 - DNA, 25 bp, Homo sapien
taattaaaacatccagcccacgtgt

SEQ ID NO: 3620232 - DNA, 25 bp, Homo sapien
tttcaaagaagagatcccccagatt

SEQ ID NO: 3620233 - DNA, 25 bp, Homo sapien
ttcaaagaagagatcccccagatta

SEQ ID NO: 3620234 - DNA, 25 bp, Homo sapien
catttcaaagaagagatcccccaga

SEQ ID NO: 3620235 - DNA, 25 bp, Homo sapien
ctaaattctaaggaagacaaagtct

SEQ ID NO: 3620236 - DNA, 25 bp, Homo sapien
ctcagtaatattagtggccatggca

SEQ ID NO: 3620237 - DNA, 25 bp, Homo sapien
ggtgatgtttaagcaatactcagta

SEQ ID NO: 3620238 - DNA, 25 bp, Homo sapien
gagagacagctgtacagctgtcagg

SEQ ID NO: 3620239 - DNA, 25 bp, Homo sapien
tcatgggaacttggatgcacgagag

SEQ ID NO: 3620240 - DNA, 25 bp, Homo sapien
ctggctgcatctgcataggtacctt

SEQ ID NO: 3620241 - DNA, 25 bp, Homo sapien
gctgcatctgcataggtaccttagg

SEQ ID NO: 3620242 - DNA, 25 bp, Homo sapien
taggtaccttaggaagtcttgctga

SEQ ID NO: 3620243 - DNA, 25 bp, Homo sapien
tctgcataggtaccttaggaagtct

SEQ ID NO: 3620244 - DNA, 25 bp, Homo sapien
cctctttgcagggtttagccctatc

SEQ ID NO: 3620245 - DNA, 25 bp, Homo sapien
tttgcagggtttagccctatcacca

SEQ ID NO: 3620246 - DNA, 25 bp, Homo sapien
tctttgcagggtttagccctatcac

SEQ ID NO: 3620247 - DNA, 25 bp, Homo sapien
ttgcagggtttagccctatcaccag

SEQ ID NO: 3620248 - DNA, 25 bp, Homo sapien
atgccttcctatctctttgatgttg

SEQ ID NO: 3620249 - DNA, 25 bp, Homo sapien
atgagaaataggcttggatttcttc

SEQ ID NO: 3620250 - DNA, 25 bp, Homo sapien
aataggcttggatttcttccaatgc

SEQ ID NO: 3620251 - DNA, 25 bp, Homo sapien
tttcttccaatgccttcctatctct

SEQ ID NO: 3620252 - DNA, 25 bp, Homo sapien
tgcattctgccaggaacatttcttc

SEQ ID NO: 3620253 - DNA, 25 bp, Homo sapien
tatcagacttgcattctgccaggaa

SEQ ID NO: 3620254 - DNA, 25 bp, Homo sapien
gacttgcattctgccaggaacattt

SEQ ID NO: 3620255 - DNA, 25 bp, Homo sapien
ggtatcagacttgcattctgccagg

SEQ ID NO: 3620256 - DNA, 25 bp, Homo sapien
tgaacaagacttggcaaatactggg

SEQ ID NO: 3620257 - DNA, 25 bp, Homo sapien
ccccaggataatgaacaagacttgg

SEQ ID NO: 3620258 - DNA, 25 bp, Homo sapien
acctgagccaacagagaacatccgc

SEQ ID NO: 3620259 - DNA, 25 bp, Homo sapien
aaatactgggccctgatacctgagc

SEQ ID NO: 3620260 - DNA, 25 bp, Homo sapien
taggattagatgtaacgtacatgaa

SEQ ID NO: 3620261 - DNA, 25 bp, Homo sapien
ttagatgtaacgtacatgaaaaaca

SEQ ID NO: 3620262 - DNA, 25 bp, Homo sapien
tagatgtaacgtacatgaaaaacat

SEQ ID NO: 3620263 - DNA, 25 bp, Homo sapien
taaacctgttccaatcaaactcatc

SEQ ID NO: 3620264 - DNA, 25 bp, Homo sapien
taactgtagcctctatgtgagagga

SEQ ID NO: 3620265 - DNA, 25 bp, Homo sapien
gcttctgactggcatttccacctaa

SEQ ID NO: 3620266 - DNA, 25 bp, Homo sapien
tccacctaatccgtgcctaaaacta

SEQ ID NO: 3620267 - DNA, 25 bp, Homo sapien
cttgtattaagtcatcggaaaagat

SEQ ID NO: 3620268 - DNA, 25 bp, Homo sapien
agacagctggactagattggcaggt

SEQ ID NO: 3620269 - DNA, 25 bp, Homo sapien
ttgtgaaaggtaaagacagctggac

SEQ ID NO: 3620270 - DNA, 25 bp, Homo sapien
ttggcaggtggaaaatttgttgtta

SEQ ID NO: 3620271 - DNA, 25 bp, Homo sapien
tctggagtcatcatgtaaacttggg

SEQ ID NO: 3620272 - DNA, 25 bp, Homo sapien
agcttgttctgacggcttttactgg

SEQ ID NO: 3620273 - DNA, 25 bp, Homo sapien
tgacgggctgcagcgagaggtggct

SEQ ID NO: 3620274 - DNA, 25 bp, Homo sapien
tgcgtgtgttgccagcgtcggtgac

SEQ ID NO: 3620275 - DNA, 25 bp, Homo sapien
tctgtcccaagcagcttcagaattt

SEQ ID NO: 3620276 - DNA, 25 bp, Homo sapien
caagcagcttcagaatttgttctac

SEQ ID NO: 3620277 - DNA, 25 bp, Homo sapien
tcccaagcagcttcagaatttgttc

SEQ ID NO: 3620278 - DNA, 25 bp, Homo sapien
ttagccttctgtcccaagcagcttc

SEQ ID NO: 3620279 - DNA, 25 bp, Homo sapien
tttggcttggccatcaggctgttgt

SEQ ID NO: 3620280 - DNA, 25 bp, Homo sapien
gctgaagatctttggcttggccatc

SEQ ID NO: 3620281 - DNA, 25 bp, Homo sapien
tactggttattgtctctgggctgaa

SEQ ID NO: 3620282 - DNA, 25 bp, Homo sapien
gttattgtctctgggctgaagatct

SEQ ID NO: 3620283 - DNA, 25 bp, Homo sapien
ccatttctgggctagagcttgctct

SEQ ID NO: 3620284 - DNA, 25 bp, Homo sapien
gggacagtcgggctcctgccagtgt

SEQ ID NO: 3620285 - DNA, 25 bp, Homo sapien
tagagcttgctctaagcatgagttc

SEQ ID NO: 3620286 - DNA, 25 bp, Homo sapien
tgctctaagcatgagttctagcagc

SEQ ID NO: 3620287 - DNA, 25 bp, Homo sapien
cttccatattcagctggggcaccat

SEQ ID NO: 3620288 - DNA, 25 bp, Homo sapien
cttccatattcagctgggacaccat

SEQ ID NO: 3620289 - DNA, 25 bp, Homo sapien
agtgttatcttcagagcggctgctg

SEQ ID NO: 3620290 - DNA, 25 bp, Homo sapien
gctagttgtactttggtgtgagaaa

SEQ ID NO: 3620291 - DNA, 25 bp, Homo sapien
aagtgttatcttcagagcggctgct

SEQ ID NO: 3620292 - DNA, 25 bp, Homo sapien
agttgtactttggtgtgagaaatga

SEQ ID NO: 3620293 - DNA, 25 bp, Homo sapien
ctttaatggagcgtatactatatgc

SEQ ID NO: 3620294 - DNA, 25 bp, Homo sapien
accacgcagctcctttaatggagcg

SEQ ID NO: 3620295 - DNA, 25 bp, Homo sapien
tggagcgtatactatatgcagagag

SEQ ID NO: 3620296 - DNA, 25 bp, Homo sapien
tactatatgcagagagttgataaac

SEQ ID NO: 3620297 - DNA, 25 bp, Homo sapien
ggatagtcgtcctcttcaagtgcgc

SEQ ID NO: 3620298 - DNA, 25 bp, Homo sapien
ccctggtgatcaatgcgatgacata

SEQ ID NO: 3620299 - DNA, 25 bp, Homo sapien
gtcctcctctacaagggatagtcgt

SEQ ID NO: 3620300 - DNA, 25 bp, Homo sapien
tgcagattcgagcagaggagcacag

SEQ ID NO: 3620301 - DNA, 25 bp, Homo sapien
gagtaacttgacagatgggtgagtt

SEQ ID NO: 3620302 - DNA, 25 bp, Homo sapien
aacttgacagatgggtgagtttgca

SEQ ID NO: 3620303 - DNA, 25 bp, Homo sapien
tgaaaggagtaacttgacagatggg

SEQ ID NO: 3620304 - DNA, 25 bp, Homo sapien
aaggagtaacttgacagatgggtga

SEQ ID NO: 3620305 - DNA, 25 bp, Homo sapien
tactaagctccggaagcttttggtc

SEQ ID NO: 3620306 - DNA, 25 bp, Homo sapien
gtaattgctcataaatcctactaag

SEQ ID NO: 3620307 - DNA, 25 bp, Homo sapien
tgctcataaatcctactaagctccg

SEQ ID NO: 3620308 - DNA, 25 bp, Homo sapien
ctcataaatcctactaagctccgga

SEQ ID NO: 3620309 - DNA, 25 bp, Homo sapien
atagatgtagaagcatatgcaattc

SEQ ID NO: 3620310 - DNA, 25 bp, Homo sapien
gatgtagaagcatatgcaattcttc

SEQ ID NO: 3620311 - DNA, 25 bp, Homo sapien
gaaatagatgtagaagcatatgcaa

SEQ ID NO: 3620312 - DNA, 25 bp, Homo sapien
atgtagaagcatatgcaattcttcc

SEQ ID NO: 3620313 - DNA, 25 bp, Homo sapien
ggtggagttgattaaacagaggcag

SEQ ID NO: 3620314 - DNA, 25 bp, Homo sapien
tgtgacgctgactgactgagtgctc

SEQ ID NO: 3620315 - DNA, 25 bp, Homo sapien
gctgatgcctgtgacgctgactgac

SEQ ID NO: 3620316 - DNA, 25 bp, Homo sapien
cctacagcaggtgttagtgaaaaca

SEQ ID NO: 3620317 - DNA, 25 bp, Homo sapien
actgtgccccggatagatgtttcat

SEQ ID NO: 3620318 - DNA, 25 bp, Homo sapien
aagatgccaaagactgtgccccgga

SEQ ID NO: 3620319 - DNA, 25 bp, Homo sapien
gactgtgccccggatagatgtttca

SEQ ID NO: 3620320 - DNA, 25 bp, Homo sapien
gccaaagactgtgccccggatagat

SEQ ID NO: 3620321 - DNA, 25 bp, Homo sapien
tctggttttgcggcaggatctgaag

SEQ ID NO: 3620322 - DNA, 25 bp, Homo sapien
aggcgaatggctaatgttgtgtgaa

SEQ ID NO: 3620323 - DNA, 25 bp, Homo sapien
cagagtgcttggagagtggaggcga

SEQ ID NO: 3620324 - DNA, 25 bp, Homo sapien
gagtaaataattactgctttgtctt

SEQ ID NO: 3620325 - DNA, 25 bp, Homo sapien
gaaaaggtgtcccaaagaggaggca

SEQ ID NO: 3620326 - DNA, 25 bp, Homo sapien
gaagtgtaaacagcggtgctatgat

SEQ ID NO: 3620327 - DNA, 25 bp, Homo sapien
tgaagtgtaaacagcggtgctatga

SEQ ID NO: 3620328 - DNA, 25 bp, Homo sapien
ggcctgtgacagcatgtctttgctc

SEQ ID NO: 3620329 - DNA, 25 bp, Homo sapien
tcaaaacagtggagttaaggattac

SEQ ID NO: 3620330 - DNA, 25 bp, Homo sapien
ccatctcccagctgtaatacaacat

SEQ ID NO: 3620331 - DNA, 25 bp, Homo sapien
catataatcagagcaggcctgtgac

SEQ ID NO: 3620332 - DNA, 25 bp, Homo sapien
aatgggggtgggtgctgagaggagc

SEQ ID NO: 3620333 - DNA, 25 bp, Homo sapien
taatgggggtgggtgctgagaggag

SEQ ID NO: 3620334 - DNA, 25 bp, Homo sapien
ctaatgggggtgggtgctgagagga

SEQ ID NO: 3620335 - DNA, 25 bp, Homo sapien
ccgtgtgatcagcaggcatcccctg

SEQ ID NO: 3620336 - DNA, 25 bp, Homo sapien
catggcccctcgaagcagccttgtt

SEQ ID NO: 3620337 - DNA, 25 bp, Homo sapien
tttccttagtaggtcccgtgtgatc

SEQ ID NO: 3620338 - DNA, 25 bp, Homo sapien
tcatgggtgaatacgtggagatcca

SEQ ID NO: 3620339 - DNA, 25 bp, Homo sapien
acttcttgcactctcccctccgtag

SEQ ID NO: 3620340 - DNA, 25 bp, Homo sapien
tcccctccgtagcctccaaaccaca

SEQ ID NO: 3620341 - DNA, 25 bp, Homo sapien
tctcccctccgtagcctccaaacca

SEQ ID NO: 3620342 - DNA, 25 bp, Homo sapien
ttcttgcactctcccctccgtagcc

SEQ ID NO: 3620343 - DNA, 25 bp, Homo sapien
ccagattcaacctcacagatgggac

SEQ ID NO: 3620344 - DNA, 25 bp, Homo sapien
cacagatgggactcttggtaaaggg

SEQ ID NO: 3620345 - DNA, 25 bp, Homo sapien
gggccccagattcaacctcacagat

SEQ ID NO: 3620346 - DNA, 25 bp, Homo sapien
tcaacctcacagatgggactcttgg

SEQ ID NO: 3620347 - DNA, 25 bp, Homo sapien
tgtgtttaaatgtgacagctgtttc

SEQ ID NO: 3620348 - DNA, 25 bp, Homo sapien
tgtgtgtttaaatgtgacagctgtt

SEQ ID NO: 3620349 - DNA, 25 bp, Homo sapien
tgtgtgtgtttaaatgtgacagctg

SEQ ID NO: 3620350 - DNA, 25 bp, Homo sapien
ctgtgtgtgtttaaatgtgacagct

SEQ ID NO: 3620351 - DNA, 25 bp, Homo sapien
tatgctgggatgttcacctacaatt

SEQ ID NO: 3620352 - DNA, 25 bp, Homo sapien
taagaggctgcaataacaggccagc

SEQ ID NO: 3620353 - DNA, 25 bp, Homo sapien
tttggacgcggcattgcctatgctg

SEQ ID NO: 3620354 - DNA, 25 bp, Homo sapien
aagaatgggtcattttggacgcggc

SEQ ID NO: 3620355 - DNA, 25 bp, Homo sapien
ccctgtcttatggaatgcaatcctg

SEQ ID NO: 3620356 - DNA, 25 bp, Homo sapien
aggttgtatagtagcttctgtctgc

SEQ ID NO: 3620357 - DNA, 25 bp, Homo sapien
tatgaactgtctgctagaactggcc

SEQ ID NO: 3620358 - DNA, 25 bp, Homo sapien
ctttctgtcttatggaagctgtagg

SEQ ID NO: 3620359 - DNA, 25 bp, Homo sapien
ccaatagctgcctgaacacaaacct

SEQ ID NO: 3620360 - DNA, 25 bp, Homo sapien
cagtgccttcgggatggggtcacca

SEQ ID NO: 3620361 - DNA, 25 bp, Homo sapien
gggtcaccaagggctgacacacttt

SEQ ID NO: 3620362 - DNA, 25 bp, Homo sapien
acaaacctttggcagctggtcaccc

SEQ ID NO: 3620363 - DNA, 25 bp, Homo sapien
caagaaagaagcctcagtgcatctc

SEQ ID NO: 3620364 - DNA, 25 bp, Homo sapien
cttgaccacatgctgcacctgctgg

SEQ ID NO: 3620365 - DNA, 25 bp, Homo sapien
cacctgctggcagcaagaaagaagc

SEQ ID NO: 3620366 - DNA, 25 bp, Homo sapien
gtgcatctctgcctttggagccaca

SEQ ID NO: 3620367 - DNA, 25 bp, Homo sapien
gcctgcatcgagactccacatcagt

SEQ ID NO: 3620368 - DNA, 25 bp, Homo sapien
tgagaaactcttgtaacaggctggg

SEQ ID NO: 3620369 - DNA, 25 bp, Homo sapien
ttttttcctcggtgccagcctgcat

SEQ ID NO: 3620370 - DNA, 25 bp, Homo sapien
ccacatcagtccttgcaatggtggg

SEQ ID NO: 3620371 - DNA, 25 bp, Homo sapien
caaggtaactattgcattcagttga

SEQ ID NO: 3620372 - DNA, 25 bp, Homo sapien
cagattaagtattggctagtttgca

SEQ ID NO: 3620373 - DNA, 25 bp, Homo sapien
tagtttgcaacactctatggcccaa

SEQ ID NO: 3620374 - DNA, 25 bp, Homo sapien
aggccctgtactctgcaaattgtgt

SEQ ID NO: 3620375 - DNA, 25 bp, Homo sapien
atctctgtgtcctcaatacagtaca

SEQ ID NO: 3620376 - DNA, 25 bp, Homo sapien
tctctgtgtcctcaatacagtacat

SEQ ID NO: 3620377 - DNA, 25 bp, Homo sapien
gacaatcactgtggtgatgtttaag

SEQ ID NO: 3620378 - DNA, 25 bp, Homo sapien
caggcttgtcactctattcttgaca

SEQ ID NO: 3620379 - DNA, 25 bp, Homo sapien
caacacatggcaaagcatcgagagg

SEQ ID NO: 3620380 - DNA, 25 bp, Homo sapien
tgggcttgtagggatcagccaaacc

SEQ ID NO: 3620381 - DNA, 25 bp, Homo sapien
gagatctctcattggcgttgagctg

SEQ ID NO: 3620382 - DNA, 25 bp, Homo sapien
tgtctccatgcagtctcattgggcc

SEQ ID NO: 3620383 - DNA, 25 bp, Homo sapien
tcaatgtccccaagacttagcgaag

SEQ ID NO: 3620384 - DNA, 25 bp, Homo sapien
tcagaactggtctggaagccaatca

SEQ ID NO: 3620385 - DNA, 25 bp, Homo sapien
ccacaggcacttggtcatatacctg

SEQ ID NO: 3620386 - DNA, 25 bp, Homo sapien
taaactgagctttgatccgatccat

SEQ ID NO: 3620387 - DNA, 25 bp, Homo sapien
atccataataaacctccacaggcac

SEQ ID NO: 3620388 - DNA, 25 bp, Homo sapien
acaggcacttggtcatatacctggc

SEQ ID NO: 3620389 - DNA, 25 bp, Homo sapien
tgagcttggctcaaactgcagactt

SEQ ID NO: 3620390 - DNA, 25 bp, Homo sapien
gtgaaactgagagcgatatcactcc

SEQ ID NO: 3620391 - DNA, 25 bp, Homo sapien
cagactttctcggtgaaactgagag

SEQ ID NO: 3620392 - DNA, 25 bp, Homo sapien
gaggtaatgagcttggctcaaactg

SEQ ID NO: 3620393 - DNA, 25 bp, Homo sapien
caacactatccccaggcctttggga

SEQ ID NO: 3620394 - DNA, 25 bp, Homo sapien
ccagggagtctggacataacacggg

SEQ ID NO: 3620395 - DNA, 25 bp, Homo sapien
ctgtggaagggctttaatctgagga

SEQ ID NO: 3620396 - DNA, 25 bp, Homo sapien
actgggacagacatgcgccgtagga

SEQ ID NO: 3620397 - DNA, 25 bp, Homo sapien
cagacatgcgccgtaggaagatcat

SEQ ID NO: 3620398 - DNA, 25 bp, Homo sapien
gtgaacttgggaatctgagtaacca

SEQ ID NO: 3620399 - DNA, 25 bp, Homo sapien
ggaatctgagtaaccaggaaatttg

SEQ ID NO: 3620400 - DNA, 25 bp, Homo sapien
ctgagtaaccaggaaatttgaagtc

SEQ ID NO: 3620401 - DNA, 25 bp, Homo sapien
taaccaggaaatttgaagtcttgct

SEQ ID NO: 3620402 - DNA, 25 bp, Homo sapien
cttggactggagttcaggttatctc

SEQ ID NO: 3620403 - DNA, 25 bp, Homo sapien
aaatctggccatctcaagcgggtac

SEQ ID NO: 3620404 - DNA, 25 bp, Homo sapien
tcccaaggaattcatggtacatgcc

SEQ ID NO: 3620405 - DNA, 25 bp, Homo sapien
cctatctccttgactagattcttaa

SEQ ID NO: 3620406 - DNA, 25 bp, Homo sapien
cattctccttttattgtggctatca

SEQ ID NO: 3620407 - DNA, 25 bp, Homo sapien
attttggaagtgacattctcctttt

SEQ ID NO: 3620408 - DNA, 25 bp, Homo sapien
ttttggaagtgacattctcctttta

SEQ ID NO: 3620409 - DNA, 25 bp, Homo sapien
tgacattctccttttattgtggcta

SEQ ID NO: 3620410 - DNA, 25 bp, Homo sapien
tgccatgatttagaggcagactcct

SEQ ID NO: 3620411 - DNA, 25 bp, Homo sapien
tttgcggctgacaacacatccctct

SEQ ID NO: 3620412 - DNA, 25 bp, Homo sapien
tgtcgctacccaatagcgggatttg

SEQ ID NO: 3620413 - DNA, 25 bp, Homo sapien
tgagtccagatcatgtttccagcac

SEQ ID NO: 3620414 - DNA, 25 bp, Homo sapien
atttagaatgctcgtcaatcacttc

SEQ ID NO: 3620415 - DNA, 25 bp, Homo sapien
tagaatgctcgtcaatcacttctga

SEQ ID NO: 3620416 - DNA, 25 bp, Homo sapien
gaatgctcgtcaatcacttctgaag

SEQ ID NO: 3620417 - DNA, 25 bp, Homo sapien
tctaatttagaatgctcgtcaatca

SEQ ID NO: 3620418 - DNA, 25 bp, Homo sapien
ccgagccaactgtgctcagaaacgt

SEQ ID NO: 3620419 - DNA, 25 bp, Homo sapien
tgctccgtctctggcgtgtgtccag

SEQ ID NO: 3620420 - DNA, 25 bp, Homo sapien
cttcgccgagccaactgtgctcaga

SEQ ID NO: 3620421 - DNA, 25 bp, Homo sapien
ctcagaaacgtctgctccgtctctg

SEQ ID NO: 3620422 - DNA, 25 bp, Homo sapien
aaaaggtgagtcagctactgagcta

SEQ ID NO: 3620423 - DNA, 25 bp, Homo sapien
aatggcctcaggattagacagtaac

SEQ ID NO: 3620424 - DNA, 25 bp, Homo sapien
cagctactgagctagccctcttcag

SEQ ID NO: 3620425 - DNA, 25 bp, Homo sapien
taaccatgtcgtctgatgatcacaa

SEQ ID NO: 3620426 - DNA, 25 bp, Homo sapien
ggagcccaggggatctgatctaaac

SEQ ID NO: 3620427 - DNA, 25 bp, Homo sapien
gatctgatctaaacctgtgctcttt

SEQ ID NO: 3620428 - DNA, 25 bp, Homo sapien
ggtgtggatgcaggacttttctggc

SEQ ID NO: 3620429 - DNA, 25 bp, Homo sapien
tgcaagaagcagatgataggagccc

SEQ ID NO: 3620430 - DNA, 25 bp, Homo sapien
ccagtgatgtgaatgacagcaggac

SEQ ID NO: 3620431 - DNA, 25 bp, Homo sapien
gtgatgtgaatgacagcaggacccc

SEQ ID NO: 3620432 - DNA, 25 bp, Homo sapien
cttggccagtgatgtgaatgacagc

SEQ ID NO: 3620433 - DNA, 25 bp, Homo sapien
atgtgaatgacagcaggaccccatc

SEQ ID NO: 3620434 - DNA, 25 bp, Homo sapien
ggccctgatctaggggcttcagttc

SEQ ID NO: 3620435 - DNA, 25 bp, Homo sapien
atagggccctgatctaggggcttca

SEQ ID NO: 3620436 - DNA, 25 bp, Homo sapien
tgcagaagaatagggccctgatcta

SEQ ID NO: 3620437 - DNA, 25 bp, Homo sapien
ctgcagaagaatagggccctgatct

SEQ ID NO: 3620438 - DNA, 25 bp, Homo sapien
cttggtggcccaaatgcctccctga

SEQ ID NO: 3620439 - DNA, 25 bp, Homo sapien
gagaaacgaggtctggactagacct

SEQ ID NO: 3620440 - DNA, 25 bp, Homo sapien
ggatccgatccacccagtctataac

SEQ ID NO: 3620441 - DNA, 25 bp, Homo sapien
tactaggtttctctttgctaaagga

SEQ ID NO: 3620442 - DNA, 25 bp, Homo sapien
ctaccagggccatagccagtgcttt

SEQ ID NO: 3620443 - DNA, 25 bp, Homo sapien
ctttcagctcatgacacgcacctgc

SEQ ID NO: 3620444 - DNA, 25 bp, Homo sapien
tctaccagggccatagccagtgctt

SEQ ID NO: 3620445 - DNA, 25 bp, Homo sapien
gacacgcacctgcattaccactcag

SEQ ID NO: 3620446 - DNA, 25 bp, Homo sapien
ttaggaaggacaataaactctgaag

SEQ ID NO: 3620447 - DNA, 25 bp, Homo sapien
ttcccaagtctggtaaacaaagatg

SEQ ID NO: 3620448 - DNA, 25 bp, Homo sapien
ttttaaactggcatattgctggatt

SEQ ID NO: 3620449 - DNA, 25 bp, Homo sapien
ttgctggatttcttcccaagtctgg

SEQ ID NO: 3620450 - DNA, 25 bp, Homo sapien
ggcacagtgatgctgaaagaggaac

SEQ ID NO: 3620451 - DNA, 25 bp, Homo sapien
cagaggcacagtgatgctgaaagag

SEQ ID NO: 3620452 - DNA, 25 bp, Homo sapien
acagtgatgctgaaagaggaaccat

SEQ ID NO: 3620453 - DNA, 25 bp, Homo sapien
gcagaggcacagtgatgctgaaaga

SEQ ID NO: 3620454 - DNA, 25 bp, Homo sapien
taactagaaacttttagctctatta

SEQ ID NO: 3620455 - DNA, 25 bp, Homo sapien
agaaacttttagctctattaatctt

SEQ ID NO: 3620456 - DNA, 25 bp, Homo sapien
ctagaaacttttagctctattaatc

SEQ ID NO: 3620457 - DNA, 25 bp, Homo sapien
actagaaacttttagctctattaat

SEQ ID NO: 3620458 - DNA, 25 bp, Homo sapien
tcaaaacttcttcttatgaagttca

SEQ ID NO: 3620459 - DNA, 25 bp, Homo sapien
ttcttatgaagttcagggggatgct

SEQ ID NO: 3620460 - DNA, 25 bp, Homo sapien
cttatgaagttcagggggatgctgt

SEQ ID NO: 3620461 - DNA, 25 bp, Homo sapien
aaacttcttcttatgaagttcaggg

SEQ ID NO: 3620462 - DNA, 25 bp, Homo sapien
cactcactaccacatggcaggtcag

SEQ ID NO: 3620463 - DNA, 25 bp, Homo sapien
cttagccagcatgagagactcactc

SEQ ID NO: 3620464 - DNA, 25 bp, Homo sapien
ataaccaccaaactccttccaaatg

SEQ ID NO: 3620465 - DNA, 25 bp, Homo sapien
gccagcatgagagactcactcacta

SEQ ID NO: 3620466 - DNA, 25 bp, Homo sapien
ttaaagctgaaatcgatggagcaaa

SEQ ID NO: 3620467 - DNA, 25 bp, Homo sapien
cagccagccttatggttcggataat

SEQ ID NO: 3620468 - DNA, 25 bp, Homo sapien
ggccagccagccttatggttcggat

SEQ ID NO: 3620469 - DNA, 25 bp, Homo sapien
tgaaatcgatggagcaaaagcaaag

SEQ ID NO: 3620470 - DNA, 25 bp, Homo sapien
tcagcgggatacttctcatcgtgtc

SEQ ID NO: 3620471 - DNA, 25 bp, Homo sapien
tcagccctctgctcagcgggatact

SEQ ID NO: 3620472 - DNA, 25 bp, Homo sapien
tctgctcagcgggatacttctcatc

SEQ ID NO: 3620473 - DNA, 25 bp, Homo sapien
gccctctgctcagcgggatacttct

SEQ ID NO: 3620474 - DNA, 25 bp, Homo sapien
tgctttaaggaagatcttaccattc

SEQ ID NO: 3620475 - DNA, 25 bp, Homo sapien
tctttctttagaaccatctccccat

SEQ ID NO: 3620476 - DNA, 25 bp, Homo sapien
cttagttctaacagttggtgtgagc

SEQ ID NO: 3620477 - DNA, 25 bp, Homo sapien
cccagtttagcaagtgtgaaaatcc

SEQ ID NO: 3620478 - DNA, 25 bp, Homo sapien
cgaacccctgttctctaacactgtt

SEQ ID NO: 3620479 - DNA, 25 bp, Homo sapien
tttccggctattctcagagccttcc

SEQ ID NO: 3620480 - DNA, 25 bp, Homo sapien
gaacccctgttctctaacactgttg

SEQ ID NO: 3620481 - DNA, 25 bp, Homo sapien
tccctcggttttccggctattctca

SEQ ID NO: 3620482 - DNA, 25 bp, Homo sapien
ttcacagcagaagttgaccttggcc

SEQ ID NO: 3620483 - DNA, 25 bp, Homo sapien
agggtccatgcaaccatgttcacag

SEQ ID NO: 3620484 - DNA, 25 bp, Homo sapien
tccagggtccatgcaaccatgttca

SEQ ID NO: 3620485 - DNA, 25 bp, Homo sapien
catgttcacagcagaagttgacctt

SEQ ID NO: 3620486 - DNA, 25 bp, Homo sapien
tgaagtgaatcagacttatgttgca

SEQ ID NO: 3620487 - DNA, 25 bp, Homo sapien
ctctacacccacatcaaggttttgt

SEQ ID NO: 3620488 - DNA, 25 bp, Homo sapien
catcaaggttttgtgggttgaggat

SEQ ID NO: 3620489 - DNA, 25 bp, Homo sapien
gctccccaattgtttcgatgaagtg

SEQ ID NO: 3620490 - DNA, 25 bp, Homo sapien
cccaggtgtgaagagaggctttata

SEQ ID NO: 3620491 - DNA, 25 bp, Homo sapien
tgtgttgcaatgatggtagactctc

SEQ ID NO: 3620492 - DNA, 25 bp, Homo sapien
ctattgctagcagttgggatggaaa

SEQ ID NO: 3620493 - DNA, 25 bp, Homo sapien
gagtgttgtacacataaagatccag

SEQ ID NO: 3620494 - DNA, 25 bp, Homo sapien
tttagagtgcttctgggatgaagca

SEQ ID NO: 3620495 - DNA, 25 bp, Homo sapien
gggatgaagcatcaatcccatatct

SEQ ID NO: 3620496 - DNA, 25 bp, Homo sapien
tctgggatgaagcatcaatcccata

SEQ ID NO: 3620497 - DNA, 25 bp, Homo sapien
ggtagtctttagagtgcttctggga

SEQ ID NO: 3620498 - DNA, 25 bp, Homo sapien
ctgtgtttgtacagaaaatcctgtt

SEQ ID NO: 3620499 - DNA, 25 bp, Homo sapien
ccgtggtgatcaatgggactgtatt

SEQ ID NO: 3620500 - DNA, 25 bp, Homo sapien
tcttatcccatctattcccgtggtg

SEQ ID NO: 3620501 - DNA, 25 bp, Homo sapien
tattcacggtaggaaccagtcccga

SEQ ID NO: 3620502 - DNA, 25 bp, Homo sapien
gcgttttgccaaggaactgagcctc

SEQ ID NO: 3620503 - DNA, 25 bp, Homo sapien
aaaagagactctgtgcgttttgcca

SEQ ID NO: 3620504 - DNA, 25 bp, Homo sapien
cgatatggcaagtttggagcaaaag

SEQ ID NO: 3620505 - DNA, 25 bp, Homo sapien
gccataaccacttcatgtcaagtcc

SEQ ID NO: 3620506 - DNA, 25 bp, Homo sapien
taagtgtaggatgatcaggccccct

SEQ ID NO: 3620507 - DNA, 25 bp, Homo sapien
tggtctacataggtcgctgtaagaa

SEQ ID NO: 3620508 - DNA, 25 bp, Homo sapien
caatggtggttgatacatggtctac

SEQ ID NO: 3620509 - DNA, 25 bp, Homo sapien
cataggtcgctgtaagaatattgct

SEQ ID NO: 3620510 - DNA, 25 bp, Homo sapien
catctttaaagaaacgaaatcccat

SEQ ID NO: 3620511 - DNA, 25 bp, Homo sapien
ccttctgtggcatagtcaggactta

SEQ ID NO: 3620512 - DNA, 25 bp, Homo sapien
cctgtagggctatagagatcaaatc

SEQ ID NO: 3620513 - DNA, 25 bp, Homo sapien
caagatgtatgaagtctccagagag

SEQ ID NO: 3620514 - DNA, 25 bp, Homo sapien
tgtctgataacccacattctgaaca

SEQ ID NO: 3620515 - DNA, 25 bp, Homo sapien
taaaggggatgtctgataacccaca

SEQ ID NO: 3620516 - DNA, 25 bp, Homo sapien
ataaaggggatgtctgataacccac

SEQ ID NO: 3620517 - DNA, 25 bp, Homo sapien
gggatgtctgataacccacattctg

SEQ ID NO: 3620518 - DNA, 25 bp, Homo sapien
ttctagcattgccacttgttaaaca

SEQ ID NO: 3620519 - DNA, 25 bp, Homo sapien
taaacacgcatctttcgtttctatc

SEQ ID NO: 3620520 - DNA, 25 bp, Homo sapien
tgtgccaccaatttgtgttctcctc

SEQ ID NO: 3620521 - DNA, 25 bp, Homo sapien
tcactgtgccaccaatttgtgttct

SEQ ID NO: 3620522 - DNA, 25 bp, Homo sapien
gaataacccagagcctgaacaggaa

SEQ ID NO: 3620523 - DNA, 25 bp, Homo sapien
aagaataacccagagcctgaacagg

SEQ ID NO: 3620524 - DNA, 25 bp, Homo sapien
tcaagaataacccagagcctgaaca

SEQ ID NO: 3620525 - DNA, 25 bp, Homo sapien
aaagagtattgaattcatctataaa

SEQ ID NO: 3620526 - DNA, 25 bp, Homo sapien
tccatgatccaattagcagggaaag

SEQ ID NO: 3620527 - DNA, 25 bp, Homo sapien
ccatgatccaattagcagggaaagg

SEQ ID NO: 3620528 - DNA, 25 bp, Homo sapien
ggtgagatacacctctctgcagctg

SEQ ID NO: 3620529 - DNA, 25 bp, Homo sapien
caaagttgcaagttacccaggaagc

SEQ ID NO: 3620530 - DNA, 25 bp, Homo sapien
tatgtgtagacagcagatgatccct

SEQ ID NO: 3620531 - DNA, 25 bp, Homo sapien
tgtatttgatccataggaggccaca

SEQ ID NO: 3620532 - DNA, 25 bp, Homo sapien
ggctgtctgctgtccggttgctctg

SEQ ID NO: 3620533 - DNA, 25 bp, Homo sapien
tgggctgtctgctgtccggttgctc

SEQ ID NO: 3620534 - DNA, 25 bp, Homo sapien
ctgggctgtctgctgtccggttgct

SEQ ID NO: 3620535 - DNA, 25 bp, Homo sapien
gctgtctgctgtccggttgctctgg

SEQ ID NO: 3620536 - DNA, 25 bp, Homo sapien
cagagttaaggttagcctgacggaa

SEQ ID NO: 3620537 - DNA, 25 bp, Homo sapien
tcgatggtagaacacgctgtgctca

SEQ ID NO: 3620538 - DNA, 25 bp, Homo sapien
agagttttcttgcacacctgtccaa

SEQ ID NO: 3620539 - DNA, 25 bp, Homo sapien
cctgtccaattaagaatctgggccc

SEQ ID NO: 3620540 - DNA, 25 bp, Homo sapien
tggtcaagcagggactcggggggcc

SEQ ID NO: 3620541 - DNA, 25 bp, Homo sapien
gatggtcatggtcaagcagggactc

SEQ ID NO: 3620542 - DNA, 25 bp, Homo sapien
tcaagcagggactcggggggccttg

SEQ ID NO: 3620543 - DNA, 25 bp, Homo sapien
ggtcatggtcaagcagggactcggg

SEQ ID NO: 3620544 - DNA, 25 bp, Homo sapien
caatgaaaagcaggtccatgctggt

SEQ ID NO: 3620545 - DNA, 25 bp, Homo sapien
gaagaatcgtcctggcaatgttaac

SEQ ID NO: 3620546 - DNA, 25 bp, Homo sapien
tgacaaagacccagtttaccagctt

SEQ ID NO: 3620547 - DNA, 25 bp, Homo sapien
aatgttaacttcacagcaggccgac

SEQ ID NO: 3620548 - DNA, 25 bp, Homo sapien
tattgttaaggactttaactggcca

SEQ ID NO: 3620549 - DNA, 25 bp, Homo sapien
ctgctccttaccatttattgttaag

SEQ ID NO: 3620550 - DNA, 25 bp, Homo sapien
ggactttaactggccatcttcttca

SEQ ID NO: 3620551 - DNA, 25 bp, Homo sapien
tgttaaggactttaactggccatct

SEQ ID NO: 3620552 - DNA, 25 bp, Homo sapien
tctttcttgaccgttctcgacaatt

SEQ ID NO: 3620553 - DNA, 25 bp, Homo sapien
ctactctttcttgaccgttctcgac

SEQ ID NO: 3620554 - DNA, 25 bp, Homo sapien
tttcttgaccgttctcgacaattct

SEQ ID NO: 3620555 - DNA, 25 bp, Homo sapien
actctttcttgaccgttctcgacaa

SEQ ID NO: 3620556 - DNA, 25 bp, Homo sapien
tttgtagtgatttttctgccattaa

SEQ ID NO: 3620557 - DNA, 25 bp, Homo sapien
cattaaccattttagttgaagttga

SEQ ID NO: 3620558 - DNA, 25 bp, Homo sapien
tttctgccattaaccattttagttg

SEQ ID NO: 3620559 - DNA, 25 bp, Homo sapien
ttgtagtgatttttctgccattaac

SEQ ID NO: 3620560 - DNA, 25 bp, Homo sapien
actaccaccaaatgacgtggaagag

SEQ ID NO: 3620561 - DNA, 25 bp, Homo sapien
ctatttgaagttgcccatgccacta

SEQ ID NO: 3620562 - DNA, 25 bp, Homo sapien
ccaccaaatgacgtggaagagaatg

SEQ ID NO: 3620563 - DNA, 25 bp, Homo sapien
atgccactaccaccaaatgacgtgg

SEQ ID NO: 3620564 - DNA, 25 bp, Homo sapien
ctagtgacccaaatgaagtaaatcc

SEQ ID NO: 3620565 - DNA, 25 bp, Homo sapien
ccaaatgaagtaaatcctgtatcaa

SEQ ID NO: 3620566 - DNA, 25 bp, Homo sapien
tgacccaaatgaagtaaatcctgta

SEQ ID NO: 3620567 - DNA, 25 bp, Homo sapien
gacccaaatgaagtaaatcctgtat

SEQ ID NO: 3620568 - DNA, 25 bp, Homo sapien
gtccctcggcttctgcttcctcggg

SEQ ID NO: 3620569 - DNA, 25 bp, Homo sapien
agaagtcaaatgaaaatgggtccct

SEQ ID NO: 3620570 - DNA, 25 bp, Homo sapien
ccttcgattcccaaagaagtcctca

SEQ ID NO: 3620571 - DNA, 25 bp, Homo sapien
tcaaaagggtcttcaaagaagtcaa

SEQ ID NO: 3620572 - DNA, 25 bp, Homo sapien
cgattcccaaagaagtcctcaaaag

SEQ ID NO: 3620573 - DNA, 25 bp, Homo sapien
ctgggttacggaatgtgaagccaaa

SEQ ID NO: 3620574 - DNA, 25 bp, Homo sapien
atctgggttacggaatgtgaagcca

SEQ ID NO: 3620575 - DNA, 25 bp, Homo sapien
tctgggttacggaatgtgaagccaa

SEQ ID NO: 3620576 - DNA, 25 bp, Homo sapien
tgccatatttgtcatagatgtcctg

SEQ ID NO: 3620577 - DNA, 25 bp, Homo sapien
tgtcctgtttcttagcatccgacag

SEQ ID NO: 3620578 - DNA, 25 bp, Homo sapien
cctgtttcttagcatccgacagcac

SEQ ID NO: 3620579 - DNA, 25 bp, Homo sapien
gatgtcctgtttcttagcatccgac

SEQ ID NO: 3620580 - DNA, 25 bp, Homo sapien
ttctttattctcaggatttttatct

SEQ ID NO: 3620581 - DNA, 25 bp, Homo sapien
tcttctttattctcaggatttttat

SEQ ID NO: 3620582 - DNA, 25 bp, Homo sapien
tttattctcaggatttttatctgga

SEQ ID NO: 3620583 - DNA, 25 bp, Homo sapien
ctacttgcttgaattttctctctgc

SEQ ID NO: 3620584 - DNA, 25 bp, Homo sapien
ctttttaatatcctcgggtgaggca

SEQ ID NO: 3620585 - DNA, 25 bp, Homo sapien
gtctctgcacgcctagaacttcata

SEQ ID NO: 3620586 - DNA, 25 bp, Homo sapien
gaggcatgtctctgcacgcctagaa

SEQ ID NO: 3620587 - DNA, 25 bp, Homo sapien
gccagtttccgatatgcctttttaa

SEQ ID NO: 3620588 - DNA, 25 bp, Homo sapien
ttttacgagattgttggaatgggtc

SEQ ID NO: 3620589 - DNA, 25 bp, Homo sapien
agggtgacggcccgaatctcctcac

SEQ ID NO: 3620590 - DNA, 25 bp, Homo sapien
ggcggcggctcctcgcgctttcctt

SEQ ID NO: 3620591 - DNA, 25 bp, Homo sapien
ctccaggactgctgcgctggtggtg

SEQ ID NO: 3620592 - DNA, 25 bp, Homo sapien
agctccaggactgctgcgctggtgg

SEQ ID NO: 3620593 - DNA, 25 bp, Homo sapien
tggtggcggcggctcctcgcgcttt

SEQ ID NO: 3620594 - DNA, 25 bp, Homo sapien
ctgataaagattgcatcatggattc

SEQ ID NO: 3620595 - DNA, 25 bp, Homo sapien
gataaagattgcatcatggattccc

SEQ ID NO: 3620596 - DNA, 25 bp, Homo sapien
aagattgcatcatggattcccaaga

SEQ ID NO: 3620597 - DNA, 25 bp, Homo sapien
acttctgataaagattgcatcatgg

SEQ ID NO: 3620598 - DNA, 25 bp, Homo sapien
tgcacacaaacagctgtcgttgagg

SEQ ID NO: 3620599 - DNA, 25 bp, Homo sapien
tgtcgttgaggttgttctagtgccc

SEQ ID NO: 3620600 - DNA, 25 bp, Homo sapien
tctagtgcccgatggaagaagagct

SEQ ID NO: 3620601 - DNA, 25 bp, Homo sapien
tccagggagcaagaagtcagacatg

SEQ ID NO: 3620602 - DNA, 25 bp, Homo sapien
attctctgtgcatgtctcaggcagt

SEQ ID NO: 3620603 - DNA, 25 bp, Homo sapien
ttctctgtgcatgtctcaggcagtt

SEQ ID NO: 3620604 - DNA, 25 bp, Homo sapien
cgatccttatgacagctggcaattt

SEQ ID NO: 3620605 - DNA, 25 bp, Homo sapien
tatgaccggcactctgccctgtttt

SEQ ID NO: 3620606 - DNA, 25 bp, Homo sapien
caggacaatgttgatctgccgatcc

SEQ ID NO: 3620607 - DNA, 25 bp, Homo sapien
tatcaactgtatgaccggcactctg

SEQ ID NO: 3620608 - DNA, 25 bp, Homo sapien
actgccatcacagatgtgctcctta

SEQ ID NO: 3620609 - DNA, 25 bp, Homo sapien
cttctgcttttctggcaacactgcc

SEQ ID NO: 3620610 - DNA, 25 bp, Homo sapien
ccatcacagatgtgctccttatata

SEQ ID NO: 3620611 - DNA, 25 bp, Homo sapien
tcattttccagcactaacatttctt

SEQ ID NO: 3620612 - DNA, 25 bp, Homo sapien
tgtagaggctactgagctgtggcca

SEQ ID NO: 3620613 - DNA, 25 bp, Homo sapien
gagctatctgtagaggctactgagc

SEQ ID NO: 3620614 - DNA, 25 bp, Homo sapien
tatctgtagaggctactgagctgtg

SEQ ID NO: 3620615 - DNA, 25 bp, Homo sapien
cagagctatctgtagaggctactga

SEQ ID NO: 3620616 - DNA, 25 bp, Homo sapien
gccatctataaggtttcagccacag

SEQ ID NO: 3620617 - DNA, 25 bp, Homo sapien
tagcactacataagagggaacttct

SEQ ID NO: 3620618 - DNA, 25 bp, Homo sapien
gcctcattccatgctctgttactag

SEQ ID NO: 3620619 - DNA, 25 bp, Homo sapien
gaaaaatctgcttttgccttgaagt

SEQ ID NO: 3620620 - DNA, 25 bp, Homo sapien
aatgtggcaaatgttccatcaccct

SEQ ID NO: 3620621 - DNA, 25 bp, Homo sapien
atgtggcaaatgttccatcaccctc

SEQ ID NO: 3620622 - DNA, 25 bp, Homo sapien
aagccaagtggcatgaagccaaggg

SEQ ID NO: 3620623 - DNA, 25 bp, Homo sapien
ccacaaagaaggagcccaaagccaa

SEQ ID NO: 3620624 - DNA, 25 bp, Homo sapien
gagttacacaagaccacgtggccac

SEQ ID NO: 3620625 - DNA, 25 bp, Homo sapien
gggtctggagttacacaagaccacg

SEQ ID NO: 3620626 - DNA, 25 bp, Homo sapien
tcccattaacaatgctatccacggg

SEQ ID NO: 3620627 - DNA, 25 bp, Homo sapien
actgagctgtcccattaacaatgct

SEQ ID NO: 3620628 - DNA, 25 bp, Homo sapien
ggaagcaactgagctgtcccattaa

SEQ ID NO: 3620629 - DNA, 25 bp, Homo sapien
gggggaaggatggaagcaactgagc

SEQ ID NO: 3620630 - DNA, 25 bp, Homo sapien
ctggcggagacatgatgggcccaac

SEQ ID NO: 3620631 - DNA, 25 bp, Homo sapien
agctggcggagacatgatgggccca

SEQ ID NO: 3620632 - DNA, 25 bp, Homo sapien
tgagctggcggagacatgatgggcc

SEQ ID NO: 3620633 - DNA, 25 bp, Homo sapien
gcggagacatgatgggcccaacaga

SEQ ID NO: 3620634 - DNA, 25 bp, Homo sapien
ggagaggggtgatttgctcagagcc

SEQ ID NO: 3620635 - DNA, 25 bp, Homo sapien
ctgaggagaggggtgatttgctcag

SEQ ID NO: 3620636 - DNA, 25 bp, Homo sapien
gaggggtgatttgctcagagccttc

SEQ ID NO: 3620637 - DNA, 25 bp, Homo sapien
gctcagagccttctttgcaatgcat

SEQ ID NO: 3620638 - DNA, 25 bp, Homo sapien
ctgggtgttgcgcatgggtgaggaa

SEQ ID NO: 3620639 - DNA, 25 bp, Homo sapien
ctggatggctcagtgtgattatggc

SEQ ID NO: 3620640 - DNA, 25 bp, Homo sapien
tgatgaggcttctcttctagggacc

SEQ ID NO: 3620641 - DNA, 25 bp, Homo sapien
tgaggaagagacactggatggctca

SEQ ID NO: 3620642 - DNA, 25 bp, Homo sapien
catctgccttgagaaagtttctgta

SEQ ID NO: 3620643 - DNA, 25 bp, Homo sapien
ctcatctgccttgagaaagtttctg

SEQ ID NO: 3620644 - DNA, 25 bp, Homo sapien
tcatctgccttgagaaagtttctgt

SEQ ID NO: 3620645 - DNA, 25 bp, Homo sapien
atctgccttgagaaagtttctgtac

SEQ ID NO: 3620646 - DNA, 25 bp, Homo sapien
gatttctggcccaggtgtgacagca

SEQ ID NO: 3620647 - DNA, 25 bp, Homo sapien
gaagctaccgagtgtgttctcaggt

SEQ ID NO: 3620648 - DNA, 25 bp, Homo sapien
gatacgaatgcagaatcaacagcct

SEQ ID NO: 3620649 - DNA, 25 bp, Homo sapien
cagatggcacacctcgagctaaggg

SEQ ID NO: 3620650 - DNA, 25 bp, Homo sapien
gcatccccgtttctcttggattcct

SEQ ID NO: 3620651 - DNA, 25 bp, Homo sapien
ggtggcatccccgtttctcttggat

SEQ ID NO: 3620652 - DNA, 25 bp, Homo sapien
acctggtggcatccccgtttctctt

SEQ ID NO: 3620653 - DNA, 25 bp, Homo sapien
tggcatccccgtttctcttggattc

SEQ ID NO: 3620654 - DNA, 25 bp, Homo sapien
cagaagaacttgaatgaggctgggc

SEQ ID NO: 3620655 - DNA, 25 bp, Homo sapien
gggcctgagagaagctgacatattt

SEQ ID NO: 3620656 - DNA, 25 bp, Homo sapien
aggaacactcaggtacaaatcccag

SEQ ID NO: 3620657 - DNA, 25 bp, Homo sapien
gacctagtcataaacttctccatgc

SEQ ID NO: 3620658 - DNA, 25 bp, Homo sapien
gaagaaggagctaccaaaacatttg

SEQ ID NO: 3620659 - DNA, 25 bp, Homo sapien
tgtattgcacatcttaagaactttg

SEQ ID NO: 3620660 - DNA, 25 bp, Homo sapien
cagagtctttgttctaatgtgggag

SEQ ID NO: 3620661 - DNA, 25 bp, Homo sapien
ctggactgcataatctcagagtctt

SEQ ID NO: 3620662 - DNA, 25 bp, Homo sapien
tcacccctgaagaactaaaggccag

SEQ ID NO: 3620663 - DNA, 25 bp, Homo sapien
gctaagggacttacgcaaggaaaca

SEQ ID NO: 3620664 - DNA, 25 bp, Homo sapien
cagtcctcaagggagagtgttagcc

SEQ ID NO: 3620665 - DNA, 25 bp, Homo sapien
ccaagaggtcaagtagctacgtaac

SEQ ID NO: 3620666 - DNA, 25 bp, Homo sapien
tacatgagccagatattcctccagg

SEQ ID NO: 3620667 - DNA, 25 bp, Homo sapien
atacatgagccagatattcctccag

SEQ ID NO: 3620668 - DNA, 25 bp, Homo sapien
aggctatgaaacctaaaactatcac

SEQ ID NO: 3620669 - DNA, 25 bp, Homo sapien
aaggctatgaaacctaaaactatca

SEQ ID NO: 3620670 - DNA, 25 bp, Homo sapien
ggtcctccagcggattccgtcagcg

SEQ ID NO: 3620671 - DNA, 25 bp, Homo sapien
gattccgtcagcgtttgcttgtagt

SEQ ID NO: 3620672 - DNA, 25 bp, Homo sapien
gcttgtagtcttcatgcatgatgac

SEQ ID NO: 3620673 - DNA, 25 bp, Homo sapien
cagcggattccgtcagcgtttgctt

SEQ ID NO: 3620674 - DNA, 25 bp, Homo sapien
ccaggcaagctcattaccattcaaa

SEQ ID NO: 3620675 - DNA, 25 bp, Homo sapien
tctacccaggcaagctcattaccat

SEQ ID NO: 3620676 - DNA, 25 bp, Homo sapien
cccaggcaagctcattaccattcaa

SEQ ID NO: 3620677 - DNA, 25 bp, Homo sapien
tacccaggcaagctcattaccattc

SEQ ID NO: 3620678 - DNA, 25 bp, Homo sapien
ccacacattttgtctatgcctgttc

SEQ ID NO: 3620679 - DNA, 25 bp, Homo sapien
ctgatttccctccacacattttgtc

SEQ ID NO: 3620680 - DNA, 25 bp, Homo sapien
ttccctccacacattttgtctatgc

SEQ ID NO: 3620681 - DNA, 25 bp, Homo sapien
cacacattttgtctatgcctgttct

SEQ ID NO: 3620682 - DNA, 25 bp, Homo sapien
catccgaccttgtgcggaaggtgtc

SEQ ID NO: 3620683 - DNA, 25 bp, Homo sapien
tgtgcatccgaccttgtgcggaagg

SEQ ID NO: 3620684 - DNA, 25 bp, Homo sapien
aggaagaggaatgtgcatccgacct

SEQ ID NO: 3620685 - DNA, 25 bp, Homo sapien
gaggaatgtgcatccgaccttgtgc

SEQ ID NO: 3620686 - DNA, 25 bp, Homo sapien
gattgtctcacctccaatgcaggtt

SEQ ID NO: 3620687 - DNA, 25 bp, Homo sapien
tgcaggtttccaggaagatttgttt

SEQ ID NO: 3620688 - DNA, 25 bp, Homo sapien
tctcacctccaatgcaggtttccag

SEQ ID NO: 3620689 - DNA, 25 bp, Homo sapien
ttgtctcacctccaatgcaggtttc

SEQ ID NO: 3620690 - DNA, 25 bp, Homo sapien
aattggaccattcccatgctgaaat

SEQ ID NO: 3620691 - DNA, 25 bp, Homo sapien
cattcccatgctgaaattccacaag

SEQ ID NO: 3620692 - DNA, 25 bp, Homo sapien
tccacaagaatcttgttatcgcctg

SEQ ID NO: 3620693 - DNA, 25 bp, Homo sapien
tgcacattgcttaggcaaacataat

SEQ ID NO: 3620694 - DNA, 25 bp, Homo sapien
gtgttgtcaggagtctatttctatt

SEQ ID NO: 3620695 - DNA, 25 bp, Homo sapien
gttgtcaggagtctatttctattcc

SEQ ID NO: 3620696 - DNA, 25 bp, Homo sapien
tgttgtcaggagtctatttctattc

SEQ ID NO: 3620697 - DNA, 25 bp, Homo sapien
tcaagggacacagagttagggttct

SEQ ID NO: 3620698 - DNA, 25 bp, Homo sapien
caagggacacagagttagggttctt

SEQ ID NO: 3620699 - DNA, 25 bp, Homo sapien
gatatgagcctacatgaaattcaaa

SEQ ID NO: 3620700 - DNA, 25 bp, Homo sapien
caaatagagaaacgtccttactgtc

SEQ ID NO: 3620701 - DNA, 25 bp, Homo sapien
gagacatgattcaccttctactgga

SEQ ID NO: 3620702 - DNA, 25 bp, Homo sapien
gctctcccacatgatatgagacatg

SEQ ID NO: 3620703 - DNA, 25 bp, Homo sapien
taccaggaagaatttgtgtcctgac

SEQ ID NO: 3620704 - DNA, 25 bp, Homo sapien
caggaagaatttgtgtcctgaccgt

SEQ ID NO: 3620705 - DNA, 25 bp, Homo sapien
agaatttgtgtcctgaccgtggcat

SEQ ID NO: 3620706 - DNA, 25 bp, Homo sapien
gaagaatttgtgtcctgaccgtggc

SEQ ID NO: 3620707 - DNA, 25 bp, Homo sapien
tctagacagatagactgactcagct

SEQ ID NO: 3620708 - DNA, 25 bp, Homo sapien
gacatgtacactttctgggcaaaga

SEQ ID NO: 3620709 - DNA, 25 bp, Homo sapien
acagcgtaagtgttgaggagtgttc

SEQ ID NO: 3620710 - DNA, 25 bp, Homo sapien
cataagccgacagtaataagcaagt

SEQ ID NO: 3620711 - DNA, 25 bp, Homo sapien
acagatttgatgctagggccttgag

SEQ ID NO: 3620712 - DNA, 25 bp, Homo sapien
ggatttgatgctacagatttgatgc

SEQ ID NO: 3620713 - DNA, 25 bp, Homo sapien
gaaacccatatgtcaggctcacagt

SEQ ID NO: 3620714 - DNA, 25 bp, Homo sapien
gattgagtagttgcctcatcccagt

SEQ ID NO: 3620715 - DNA, 25 bp, Homo sapien
gctgagttaaccagaagactaacca

SEQ ID NO: 3620716 - DNA, 25 bp, Homo sapien
gacattcgtccacattatcatgggt

SEQ ID NO: 3620717 - DNA, 25 bp, Homo sapien
caataaaacattagggattccgcaa

SEQ ID NO: 3620718 - DNA, 25 bp, Homo sapien
cagtaacacccagactagcgtttga

SEQ ID NO: 3620719 - DNA, 25 bp, Homo sapien
ccggaatttgagagacatgagaagg

SEQ ID NO: 3620720 - DNA, 25 bp, Homo sapien
ctcaacgactgttgggtaaggatgg

SEQ ID NO: 3620721 - DNA, 25 bp, Homo sapien
tggaaagagataaggtgtctcaacg

SEQ ID NO: 3620722 - DNA, 25 bp, Homo sapien
tcctaaccggaatttgagagacatg

SEQ ID NO: 3620723 - DNA, 25 bp, Homo sapien
gaaggtcccttcatgcagtccctgc

SEQ ID NO: 3620724 - DNA, 25 bp, Homo sapien
tcagaccccctcgagtgatgagagt

SEQ ID NO: 3620725 - DNA, 25 bp, Homo sapien
tgtgccccatttgcccttgtgcaat

SEQ ID NO: 3620726 - DNA, 25 bp, Homo sapien
atgctggagcccacatctgttttca

SEQ ID NO: 3620727 - DNA, 25 bp, Homo sapien
tcaggaagttgtatccactggccca

SEQ ID NO: 3620728 - DNA, 25 bp, Homo sapien
ttagtagctttcctccagtcatggg

SEQ ID NO: 3620729 - DNA, 25 bp, Homo sapien
tctcaatcatgttagcgaaggctca

SEQ ID NO: 3620730 - DNA, 25 bp, Homo sapien
tgctccttggacaaaagcccacgtg

SEQ ID NO: 3620731 - DNA, 25 bp, Homo sapien
gccttgccactcttctattcctctg

SEQ ID NO: 3620732 - DNA, 25 bp, Homo sapien
cttctgttcgtatcagcaacatcag

SEQ ID NO: 3620733 - DNA, 25 bp, Homo sapien
ccttgccttctgttcgtatcagcaa

SEQ ID NO: 3620734 - DNA, 25 bp, Homo sapien
agcctgcggctgatcttctctccaa

SEQ ID NO: 3620735 - DNA, 25 bp, Homo sapien
tccttcctagacagatggcagatcg

SEQ ID NO: 3620736 - DNA, 25 bp, Homo sapien
taaagggctcatatcctagtagaaa

SEQ ID NO: 3620737 - DNA, 25 bp, Homo sapien
ccttagaagagataagctgatgcac

SEQ ID NO: 3620738 - DNA, 25 bp, Homo sapien
aatgtcaggttagctttgaggccag

SEQ ID NO: 3620739 - DNA, 25 bp, Homo sapien
gaatgcactcgaagagcaggaacag

SEQ ID NO: 3620740 - DNA, 25 bp, Homo sapien
gatcctcagcttggttgccccagaa

SEQ ID NO: 3620741 - DNA, 25 bp, Homo sapien
tttctgaaaactcgccctggtcggc

SEQ ID NO: 3620742 - DNA, 25 bp, Homo sapien
tctgcaaaccatcccaggccaaaag

SEQ ID NO: 3620743 - DNA, 25 bp, Homo sapien
cagttcctggtcctggaaaaatgtg

SEQ ID NO: 3620744 - DNA, 25 bp, Homo sapien
acacagttcctggtcctggaaaaat

SEQ ID NO: 3620745 - DNA, 25 bp, Homo sapien
tcacaaacacagttcctggtcctgg

SEQ ID NO: 3620746 - DNA, 25 bp, Homo sapien
gttcctggtcctggaaaaatgtgac

SEQ ID NO: 3620747 - DNA, 25 bp, Homo sapien
tgttgttccaacagggataaccagt

SEQ ID NO: 3620748 - DNA, 25 bp, Homo sapien
tcagggttggaagcttaggtactta

SEQ ID NO: 3620749 - DNA, 25 bp, Homo sapien
agctgacacagagagcccaaagcag

SEQ ID NO: 3620750 - DNA, 25 bp, Homo sapien
ggaagcaggtcaactgagagctgac

SEQ ID NO: 3620751 - DNA, 25 bp, Homo sapien
aaaatcttgtaagcagtcccacagg

SEQ ID NO: 3620752 - DNA, 25 bp, Homo sapien
gattttattcttgctgccactaagg

SEQ ID NO: 3620753 - DNA, 25 bp, Homo sapien
gccactaaggctgctataatggttg

SEQ ID NO: 3620754 - DNA, 25 bp, Homo sapien
gactttgggaactggatgatccttc

SEQ ID NO: 3620755 - DNA, 25 bp, Homo sapien
agttactgacaaggtaatgtcagga

SEQ ID NO: 3620756 - DNA, 25 bp, Homo sapien
ggtaatattctaggcatagacaaag

SEQ ID NO: 3620757 - DNA, 25 bp, Homo sapien
tcgaagctgggatgaacgatgaaag

SEQ ID NO: 3620758 - DNA, 25 bp, Homo sapien
ggatgaacgatgaaaggaggtaata

SEQ ID NO: 3620759 - DNA, 25 bp, Homo sapien
acatcatgaagaacatcgaagctgg

SEQ ID NO: 3620760 - DNA, 25 bp, Homo sapien
ttcactgccagagacttgtcaatgg

SEQ ID NO: 3620761 - DNA, 25 bp, Homo sapien
tctccattggtaagaagcattcact

SEQ ID NO: 3620762 - DNA, 25 bp, Homo sapien
tgtcctgctgcgaattaaacctgtc

SEQ ID NO: 3620763 - DNA, 25 bp, Homo sapien
tacttgcactgatagcaactgtaat

SEQ ID NO: 3620764 - DNA, 25 bp, Homo sapien
tgaagcagctcgatgaactcttgta

SEQ ID NO: 3620765 - DNA, 25 bp, Homo sapien
attgatgaagcagctcgatgaactc

SEQ ID NO: 3620766 - DNA, 25 bp, Homo sapien
aagcagctcgatgaactcttgtaag

SEQ ID NO: 3620767 - DNA, 25 bp, Homo sapien
gatgaagcagctcgatgaactcttg

SEQ ID NO: 3620768 - DNA, 25 bp, Homo sapien
catctttacaaatccgagatcccat

SEQ ID NO: 3620769 - DNA, 25 bp, Homo sapien
ttcattacatctttacaaatccgag

SEQ ID NO: 3620770 - DNA, 25 bp, Homo sapien
ttacatctttacaaatccgagatcc

SEQ ID NO: 3620771 - DNA, 25 bp, Homo sapien
tcattacatctttacaaatccgaga

SEQ ID NO: 3620772 - DNA, 25 bp, Homo sapien
gcttcactggaagttggtgcatgga

SEQ ID NO: 3620773 - DNA, 25 bp, Homo sapien
cactggaagttggtgcatggacttc

SEQ ID NO: 3620774 - DNA, 25 bp, Homo sapien
catgagcgcttcactggaagttggt

SEQ ID NO: 3620775 - DNA, 25 bp, Homo sapien
tttgtgaccatgagcgcttcactgg

SEQ ID NO: 3620776 - DNA, 25 bp, Homo sapien
aagaaatggagcacatgccagctcc

SEQ ID NO: 3620777 - DNA, 25 bp, Homo sapien
tgatacaaggaacattcaatctggg

SEQ ID NO: 3620778 - DNA, 25 bp, Homo sapien
tggaaatcaccctgtaacttagaaa

SEQ ID NO: 3620779 - DNA, 25 bp, Homo sapien
cacctggtatgctttaacatgaaga

SEQ ID NO: 3620780 - DNA, 25 bp, Homo sapien
tctgctccattattgtcactgatgg

SEQ ID NO: 3620781 - DNA, 25 bp, Homo sapien
ccattattgtcactgatggactcat

SEQ ID NO: 3620782 - DNA, 25 bp, Homo sapien
gagtcaccggcaatttgtatagttt

SEQ ID NO: 3620783 - DNA, 25 bp, Homo sapien
gtggctactgagtcaccggcaattt

SEQ ID NO: 3620784 - DNA, 25 bp, Homo sapien
ggcctgattgatgccagattgcctg

SEQ ID NO: 3620785 - DNA, 25 bp, Homo sapien
aaaacatctgggttgcatcccgagc

SEQ ID NO: 3620786 - DNA, 25 bp, Homo sapien
taaaaggttatcagcttctcttctc

SEQ ID NO: 3620787 - DNA, 25 bp, Homo sapien
cctggcacgggacagaaatgctatt

SEQ ID NO: 3620788 - DNA, 25 bp, Homo sapien
taggctctgtgtcaaagactctgcc

SEQ ID NO: 3620789 - DNA, 25 bp, Homo sapien
gcagcattgcaatgaaggacaaaca

SEQ ID NO: 3620790 - DNA, 25 bp, Homo sapien
aaacataaaccacttaggctctgtg

SEQ ID NO: 3620791 - DNA, 25 bp, Homo sapien
cagccacccatggaagaaggcagca

SEQ ID NO: 3620792 - DNA, 25 bp, Homo sapien
aatgtcagtcatccctgtgagtgtg

SEQ ID NO: 3620793 - DNA, 25 bp, Homo sapien
cagaatgtcagtcatccctgtgagt

SEQ ID NO: 3620794 - DNA, 25 bp, Homo sapien
tgtcagtcatccctgtgagtgtgaa

SEQ ID NO: 3620795 - DNA, 25 bp, Homo sapien
agaatgtcagtcatccctgtgagtg

SEQ ID NO: 3620796 - DNA, 25 bp, Homo sapien
ctttgctcgtcttctatttctgttt

SEQ ID NO: 3620797 - DNA, 25 bp, Homo sapien
ctatgaggtcacataagcatttcca

SEQ ID NO: 3620798 - DNA, 25 bp, Homo sapien
tgaggtcacataagcatttccatac

SEQ ID NO: 3620799 - DNA, 25 bp, Homo sapien
tcacataagcatttccatacaccac

SEQ ID NO: 3620800 - DNA, 25 bp, Homo sapien
gaggtcacataagcatttccataca

SEQ ID NO: 3620801 - DNA, 25 bp, Homo sapien
tccttatctgcagcaccatgttttt

SEQ ID NO: 3620802 - DNA, 25 bp, Homo sapien
ccttatctgcagcaccatgtttttg

SEQ ID NO: 3620803 - DNA, 25 bp, Homo sapien
ctccttatctgcagcaccatgtttt

SEQ ID NO: 3620804 - DNA, 25 bp, Homo sapien
cttatctgcagcaccatgtttttga

SEQ ID NO: 3620805 - DNA, 25 bp, Homo sapien
atgttttttatgcaagccctttggc

SEQ ID NO: 3620806 - DNA, 25 bp, Homo sapien
cgatgcattggtgccaaataaaggt

SEQ ID NO: 3620807 - DNA, 25 bp, Homo sapien
gccctttggcataaacgatgcattg

SEQ ID NO: 3620808 - DNA, 25 bp, Homo sapien
tatgcaagccctttggcataaacga

SEQ ID NO: 3620809 - DNA, 25 bp, Homo sapien
tggattctttcgctacatgtgcgcg

SEQ ID NO: 3620810 - DNA, 25 bp, Homo sapien
gattctttcgctacatgtgcgcgct

SEQ ID NO: 3620811 - DNA, 25 bp, Homo sapien
agattggattctttcgctacatgtg

SEQ ID NO: 3620812 - DNA, 25 bp, Homo sapien
tctttcgctacatgtgcgcgctgac

SEQ ID NO: 3620813 - DNA, 25 bp, Homo sapien
gacagtctcggagtctttagccaca

SEQ ID NO: 3620814 - DNA, 25 bp, Homo sapien
tgcagtggtgcagagacagtctcgg

SEQ ID NO: 3620815 - DNA, 25 bp, Homo sapien
ttagccacaggacggctgacacagg

SEQ ID NO: 3620816 - DNA, 25 bp, Homo sapien
tcggagtctttagccacaggacggc

SEQ ID NO: 3620817 - DNA, 25 bp, Homo sapien
aaaaccaccaaatgagctttcacag

SEQ ID NO: 3620818 - DNA, 25 bp, Homo sapien
ttacaaaaccaccaaatgagctttc

SEQ ID NO: 3620819 - DNA, 25 bp, Homo sapien
accaccaaatgagctttcacaggag

SEQ ID NO: 3620820 - DNA, 25 bp, Homo sapien
caccaaatgagctttcacaggagac

SEQ ID NO: 3620821 - DNA, 25 bp, Homo sapien
tttaaggtgagattccaggatcttt

SEQ ID NO: 3620822 - DNA, 25 bp, Homo sapien
tctttctcatgaaagatccccagag

SEQ ID NO: 3620823 - DNA, 25 bp, Homo sapien
tctttttcatctaatttaaggtgag

SEQ ID NO: 3620824 - DNA, 25 bp, Homo sapien
tgtgcctgctaaacttgatagagtc

SEQ ID NO: 3620825 - DNA, 25 bp, Homo sapien
tggtgtcagtctggaatgccagcca

SEQ ID NO: 3620826 - DNA, 25 bp, Homo sapien
gaagcaattgcaaatagtctctcaa

SEQ ID NO: 3620827 - DNA, 25 bp, Homo sapien
caaatagtctctcaatgtggaagct

SEQ ID NO: 3620828 - DNA, 25 bp, Homo sapien
gccagccaggaatttgggcaacaag

SEQ ID NO: 3620829 - DNA, 25 bp, Homo sapien
ctggtgcctacttctgagcaaaggg

SEQ ID NO: 3620830 - DNA, 25 bp, Homo sapien
ctttggccaaggcattggatttctc

SEQ ID NO: 3620831 - DNA, 25 bp, Homo sapien
agcatctttggccaaggcattggat

SEQ ID NO: 3620832 - DNA, 25 bp, Homo sapien
gccagtggactggtgcctacttctg

SEQ ID NO: 3620833 - DNA, 25 bp, Homo sapien
ggaaagcaatggtagctgctcaaat

SEQ ID NO: 3620834 - DNA, 25 bp, Homo sapien
gggaaagcaatggtagctgctcaaa

SEQ ID NO: 3620835 - DNA, 25 bp, Homo sapien
ctagggaaagcaatggtagctgctc

SEQ ID NO: 3620836 - DNA, 25 bp, Homo sapien
tagggaaagcaatggtagctgctca

SEQ ID NO: 3620837 - DNA, 25 bp, Homo sapien
caggaaaggtaatcttgtgccttac

SEQ ID NO: 3620838 - DNA, 25 bp, Homo sapien
acaggaaaggtaatcttgtgcctta

SEQ ID NO: 3620839 - DNA, 25 bp, Homo sapien
gacaggaaaggtaatcttgtgcctt

SEQ ID NO: 3620840 - DNA, 25 bp, Homo sapien
gactgagcttgtccgtagcccttgc

SEQ ID NO: 3620841 - DNA, 25 bp, Homo sapien
caaagtagactgagcttgtccgtag

SEQ ID NO: 3620842 - DNA, 25 bp, Homo sapien
cccaaagtagactgagcttgtccgt

SEQ ID NO: 3620843 - DNA, 25 bp, Homo sapien
agtagactgagcttgtccgtagccc

SEQ ID NO: 3620844 - DNA, 25 bp, Homo sapien
tatcacacgctgttgccatggaggc

SEQ ID NO: 3620845 - DNA, 25 bp, Homo sapien
catggaggcagctgttatggccaaa

SEQ ID NO: 3620846 - DNA, 25 bp, Homo sapien
tcttttgagggcctttggacagcaa

SEQ ID NO: 3620847 - DNA, 25 bp, Homo sapien
gacctgtgcgtccagcaccttggag

SEQ ID NO: 3620848 - DNA, 25 bp, Homo sapien
gcctggtcatcttcaagcttgagtt

SEQ ID NO: 3620849 - DNA, 25 bp, Homo sapien
agttcctgactggtgtcatcttggc

SEQ ID NO: 3620850 - DNA, 25 bp, Homo sapien
ggctgacacagattccctccacttc

SEQ ID NO: 3620851 - DNA, 25 bp, Homo sapien
gagccccctggagaatgatgggaaa

SEQ ID NO: 3620852 - DNA, 25 bp, Homo sapien
tagtagtgtggaaacacttatactc

SEQ ID NO: 3620853 - DNA, 25 bp, Homo sapien
tcattcccccactgtagtagtgtgg

SEQ ID NO: 3620854 - DNA, 25 bp, Homo sapien
ggaaacacttatactcagtgtcaaa

SEQ ID NO: 3620855 - DNA, 25 bp, Homo sapien
agtgtggaaacacttatactcagtg

SEQ ID NO: 3620856 - DNA, 25 bp, Homo sapien
ctggttcttaggatctcacagcctc

SEQ ID NO: 3620857 - DNA, 25 bp, Homo sapien
ctgcctggtgcagctcccactacag

SEQ ID NO: 3620858 - DNA, 25 bp, Homo sapien
tcttaggatctcacagcctcctctg

SEQ ID NO: 3620859 - DNA, 25 bp, Homo sapien
aagtcatttaggcatcctctcccag

SEQ ID NO: 3620860 - DNA, 25 bp, Homo sapien
tcctggtgatttaccgagaatttta

SEQ ID NO: 3620861 - DNA, 25 bp, Homo sapien
ggatttggccgtttgcagtgaaaaa

SEQ ID NO: 3620862 - DNA, 25 bp, Homo sapien
ctggtgatttaccgagaattttact

SEQ ID NO: 3620863 - DNA, 25 bp, Homo sapien
tggatttggccgtttgcagtgaaaa

SEQ ID NO: 3620864 - DNA, 25 bp, Homo sapien
cagccggaatgaataagcaggtgca

SEQ ID NO: 3620865 - DNA, 25 bp, Homo sapien
gaatgaataagcaggtgcaagcgtc

SEQ ID NO: 3620866 - DNA, 25 bp, Homo sapien
ccggaatgaataagcaggtgcaagc

SEQ ID NO: 3620867 - DNA, 25 bp, Homo sapien
aataagcaggtgcaagcgtctgccc

SEQ ID NO: 3620868 - DNA, 25 bp, Homo sapien
ttgtcactgcttgctcgggtccctt

SEQ ID NO: 3620869 - DNA, 25 bp, Homo sapien
gggtcccttgtcagctcccacatgg

SEQ ID NO: 3620870 - DNA, 25 bp, Homo sapien
tgcttgctcgggtcccttgtcagct

SEQ ID NO: 3620871 - DNA, 25 bp, Homo sapien
ggtcccttgtcagctcccacatgga

SEQ ID NO: 3620872 - DNA, 25 bp, Homo sapien
gacattgagatacaccaggcaatct

SEQ ID NO: 3620873 - DNA, 25 bp, Homo sapien
caggcaatctgatgcaactggcttt

SEQ ID NO: 3620874 - DNA, 25 bp, Homo sapien
tgtgggcagatgatcatcgccatca

SEQ ID NO: 3620875 - DNA, 25 bp, Homo sapien
gattccctaggttgctgtgggcaga

SEQ ID NO: 3620876 - DNA, 25 bp, Homo sapien
ctttgtacaactagaactgagtcgc

SEQ ID NO: 3620877 - DNA, 25 bp, Homo sapien
gccatgaggatggtcaaggatccct

SEQ ID NO: 3620878 - DNA, 25 bp, Homo sapien
aaggatccctgtatacaagccagag

SEQ ID NO: 3620879 - DNA, 25 bp, Homo sapien
gcagcatgccgagccaatatgccca

SEQ ID NO: 3620880 - DNA, 25 bp, Homo sapien
agcaatacggcatcatggaaagaac

SEQ ID NO: 3620881 - DNA, 25 bp, Homo sapien
ctatgccagcaatacggcatcatgg

SEQ ID NO: 3620882 - DNA, 25 bp, Homo sapien
ctgatgacctcttgtactctcttcc

SEQ ID NO: 3620883 - DNA, 25 bp, Homo sapien
gaacagggcttagaagtcagatggt

SEQ ID NO: 3620884 - DNA, 25 bp, Homo sapien
ttatagcagtcgagtcagagtagac

SEQ ID NO: 3620885 - DNA, 25 bp, Homo sapien
cagtcgagtcagagtagacttggtt

SEQ ID NO: 3620886 - DNA, 25 bp, Homo sapien
caaagttatagcagtcgagtcagag

SEQ ID NO: 3620887 - DNA, 25 bp, Homo sapien
tgctccaaagttatagcagtcgagt

SEQ ID NO: 3620888 - DNA, 25 bp, Homo sapien
gatcctcccaaattctgcaactgct

SEQ ID NO: 3620889 - DNA, 25 bp, Homo sapien
cagcagtattgttaagaggaatcac

SEQ ID NO: 3620890 - DNA, 25 bp, Homo sapien
gaggaatcaccaaagcccggttgcc

SEQ ID NO: 3620891 - DNA, 25 bp, Homo sapien
gaagatactgtctcctctacagacc

SEQ ID NO: 3620892 - DNA, 25 bp, Homo sapien
aatctttatctccaatggtcctgag

SEQ ID NO: 3620893 - DNA, 25 bp, Homo sapien
aaatctttatctccaatggtcctga

SEQ ID NO: 3620894 - DNA, 25 bp, Homo sapien
attctttgtttttaatttcacacag

SEQ ID NO: 3620895 - DNA, 25 bp, Homo sapien
taatttcacacagtttaaaatacaa

SEQ ID NO: 3620896 - DNA, 25 bp, Homo sapien
ttaatttcacacagtttaaaataca

SEQ ID NO: 3620897 - DNA, 25 bp, Homo sapien
caacaaaggttaaggcatctctggg

SEQ ID NO: 3620898 - DNA, 25 bp, Homo sapien
caataattgatacccggccctggtt

SEQ ID NO: 3620899 - DNA, 25 bp, Homo sapien
cccaacagagtaagcggcatgcaca

SEQ ID NO: 3620900 - DNA, 25 bp, Homo sapien
gaattttagcaaacaagcgggcgga

SEQ ID NO: 3620901 - DNA, 25 bp, Homo sapien
ctgaaatatttctttccttctctca

SEQ ID NO: 3620902 - DNA, 25 bp, Homo sapien
tgaaatatttctttccttctctcat

SEQ ID NO: 3620903 - DNA, 25 bp, Homo sapien
caactgggcaactatagagtgaggg

SEQ ID NO: 3620904 - DNA, 25 bp, Homo sapien
gaaagatgactaccttgcttgacta

SEQ ID NO: 3620905 - DNA, 25 bp, Homo sapien
tcctccttatcctttcaactgggca

SEQ ID NO: 3620906 - DNA, 25 bp, Homo sapien
tctattcaaatctcatggacaacct

SEQ ID NO: 3620907 - DNA, 25 bp, Homo sapien
gacatcagacccaagcaagaggccc

SEQ ID NO: 3620908 - DNA, 25 bp, Homo sapien
acatcagacccaagcaagaggccct

SEQ ID NO: 3620909 - DNA, 25 bp, Homo sapien
tctactgaataacagagttggcggt

SEQ ID NO: 3620910 - DNA, 25 bp, Homo sapien
tactgtcgtccaaaaccagggatgc

SEQ ID NO: 3620911 - DNA, 25 bp, Homo sapien
gtccaaaccccgagaatccactgat

SEQ ID NO: 3620912 - DNA, 25 bp, Homo sapien
tagtttggaacgacatgcattcagg

SEQ ID NO: 3620913 - DNA, 25 bp, Homo sapien
tgatattgcaatactgagaccacct

SEQ ID NO: 3620914 - DNA, 25 bp, Homo sapien
tgtgacagaatcctcagccggcaaa

SEQ ID NO: 3620915 - DNA, 25 bp, Homo sapien
catgaatttgggatccctgatctca

SEQ ID NO: 3620916 - DNA, 25 bp, Homo sapien
cagtgagagcgttttgcttttccaa

SEQ ID NO: 3620917 - DNA, 25 bp, Homo sapien
caatgtcacttgctaatgggtccac

SEQ ID NO: 3620918 - DNA, 25 bp, Homo sapien
caattgattacagctgcaactgact

SEQ ID NO: 3620919 - DNA, 25 bp, Homo sapien
tgggtccacaactcaagacactttt

SEQ ID NO: 3620920 - DNA, 25 bp, Homo sapien
ttcagagtccaaccaacacggctgt

SEQ ID NO: 3620921 - DNA, 25 bp, Homo sapien
tacacgtagcgtttccccgctgtct

SEQ ID NO: 3620922 - DNA, 25 bp, Homo sapien
tttccccgctgtcttgtggatgatg

SEQ ID NO: 3620923 - DNA, 25 bp, Homo sapien
ggccacggctcagtttctcataatt

SEQ ID NO: 3620924 - DNA, 25 bp, Homo sapien
ttgacgtccagcatggcgtgcagct

SEQ ID NO: 3620925 - DNA, 25 bp, Homo sapien
tcctctttccccatctcctggccac

SEQ ID NO: 3620926 - DNA, 25 bp, Homo sapien
ttttcctctttccccatctcctggc

SEQ ID NO: 3620927 - DNA, 25 bp, Homo sapien
tttcctctttccccatctcctggcc

SEQ ID NO: 3620928 - DNA, 25 bp, Homo sapien
ttcctctttccccatctcctggcca

SEQ ID NO: 3620929 - DNA, 25 bp, Homo sapien
gaaagtttgaattcccagccatctc

SEQ ID NO: 3620930 - DNA, 25 bp, Homo sapien
tgccatagctggattggtccactgc

SEQ ID NO: 3620931 - DNA, 25 bp, Homo sapien
aagactgacaggatttatcagtgag

SEQ ID NO: 3620932 - DNA, 25 bp, Homo sapien
tatcagtgagtaattccagaagaaa

SEQ ID NO: 3620933 - DNA, 25 bp, Homo sapien
cagtgcacatgtcggaggaagtgtt

SEQ ID NO: 3620934 - DNA, 25 bp, Homo sapien
caagccattgtgaatcattacacca

SEQ ID NO: 3620935 - DNA, 25 bp, Homo sapien
tttgattaacttaaggatcggttca

SEQ ID NO: 3620936 - DNA, 25 bp, Homo sapien
gatattcagcactctacgcagctaa

SEQ ID NO: 3620937 - DNA, 25 bp, Homo sapien
agcagttgcaggacacgggatagcc

SEQ ID NO: 3620938 - DNA, 25 bp, Homo sapien
agccagtggttctcccagtcatccg

SEQ ID NO: 3620939 - DNA, 25 bp, Homo sapien
ggacacgggatagccagtggttctc

SEQ ID NO: 3620940 - DNA, 25 bp, Homo sapien
agtggttctcccagtcatccgacca

SEQ ID NO: 3620941 - DNA, 25 bp, Homo sapien
cacctccacaggagatatttccagc

SEQ ID NO: 3620942 - DNA, 25 bp, Homo sapien
ccacctccacaggagatatttccag

SEQ ID NO: 3620943 - DNA, 25 bp, Homo sapien
atccacctccacaggagatatttcc

SEQ ID NO: 3620944 - DNA, 25 bp, Homo sapien
ggcatccacctccacaggagatatt

SEQ ID NO: 3620945 - DNA, 25 bp, Homo sapien
ttgtcatcatccacacaaagggtcc

SEQ ID NO: 3620946 - DNA, 25 bp, Homo sapien
gatcttgctgtttgtcatcatccac

SEQ ID NO: 3620947 - DNA, 25 bp, Homo sapien
aacacagatcttgctgtttgtcatc

SEQ ID NO: 3620948 - DNA, 25 bp, Homo sapien
tcaatagaaacacagatcttgctgt

SEQ ID NO: 3620949 - DNA, 25 bp, Homo sapien
gaggatactgttcccacatttgaac

SEQ ID NO: 3620950 - DNA, 25 bp, Homo sapien
tcataactatagctttcgctcctgg

SEQ ID NO: 3620951 - DNA, 25 bp, Homo sapien
agggcgtagtgccactgaggatact

SEQ ID NO: 3620952 - DNA, 25 bp, Homo sapien
gataataaagccgagtaagagaagg

SEQ ID NO: 3620953 - DNA, 25 bp, Homo sapien
tgaaagatgactggctgctccagga

SEQ ID NO: 3620954 - DNA, 25 bp, Homo sapien
ctccaggactgggtgaggcgatcac

SEQ ID NO: 3620955 - DNA, 25 bp, Homo sapien
cagccggatagtcctctgagtcgaa

SEQ ID NO: 3620956 - DNA, 25 bp, Homo sapien
gctgtcataggagggaacacgctgc

SEQ ID NO: 3620957 - DNA, 25 bp, Homo sapien
actatcgtagctctctatgctttca

SEQ ID NO: 3620958 - DNA, 25 bp, Homo sapien
aactatcgtagctctctatgctttc

SEQ ID NO: 3620959 - DNA, 25 bp, Homo sapien
catacttgagggagaggagctcttc

SEQ ID NO: 3620960 - DNA, 25 bp, Homo sapien
gatggagcgtctgataggactctgt

SEQ ID NO: 3620961 - DNA, 25 bp, Homo sapien
cactgggcatgctcaataccatagc

SEQ ID NO: 3620962 - DNA, 25 bp, Homo sapien
ggtgacgacttcttgtttgatagca

SEQ ID NO: 3620963 - DNA, 25 bp, Homo sapien
gataggctgggttgactccattaac

SEQ ID NO: 3620964 - DNA, 25 bp, Homo sapien
ctccattaacttgatatggtttcac

SEQ ID NO: 3620965 - DNA, 25 bp, Homo sapien
ttctggataggctgggttgactcca

SEQ ID NO: 3620966 - DNA, 25 bp, Homo sapien
taatccgaggtatagcgggattctg

SEQ ID NO: 3620967 - DNA, 25 bp, Homo sapien
ggccagctcgagaaagcagtcttta

SEQ ID NO: 3620968 - DNA, 25 bp, Homo sapien
cagagggctgctccattcatacaga

SEQ ID NO: 3620969 - DNA, 25 bp, Homo sapien
ctagatgttcccataagatgtcccc

SEQ ID NO: 3620970 - DNA, 25 bp, Homo sapien
cagtcccgaacatgggtttctgtcc

SEQ ID NO: 3620971 - DNA, 25 bp, Homo sapien
ttttgggatccccagtcgttgctgt

SEQ ID NO: 3620972 - DNA, 25 bp, Homo sapien
ctgcttggagttaatagtgggacat

SEQ ID NO: 3620973 - DNA, 25 bp, Homo sapien
ctttgctgcttggagttaatagtgg

SEQ ID NO: 3620974 - DNA, 25 bp, Homo sapien
tttgggatccccagtcgttgctgtt

SEQ ID NO: 3620975 - DNA, 25 bp, Homo sapien
aatctctgctatgtccatccagatc

SEQ ID NO: 3620976 - DNA, 25 bp, Homo sapien
catccagatcctcctgtatttgcag

SEQ ID NO: 3620977 - DNA, 25 bp, Homo sapien
tctctgctatgtccatccagatcct

SEQ ID NO: 3620978 - DNA, 25 bp, Homo sapien
cagatcctcctgtatttgcagacca

SEQ ID NO: 3620979 - DNA, 25 bp, Homo sapien
tgaagtcctgaggatttggtgactc

SEQ ID NO: 3620980 - DNA, 25 bp, Homo sapien
gaagtcctgaggatttggtgactca

SEQ ID NO: 3620981 - DNA, 25 bp, Homo sapien
aagtcctgaggatttggtgactcac

SEQ ID NO: 3620982 - DNA, 25 bp, Homo sapien
actgaagtcctgaggatttggtgac

SEQ ID NO: 3620983 - DNA, 25 bp, Homo sapien
caggctcacacatggttccaatgag

SEQ ID NO: 3620984 - DNA, 25 bp, Homo sapien
ttgaccattacatggtagggaagca

SEQ ID NO: 3620985 - DNA, 25 bp, Homo sapien
tgtaattcggcagcgccggagttca

SEQ ID NO: 3620986 - DNA, 25 bp, Homo sapien
gaaagcagttgtaattcggcagcgc

SEQ ID NO: 3620987 - DNA, 25 bp, Homo sapien
ccatctggagggtgcgctcataaac

SEQ ID NO: 3620988 - DNA, 25 bp, Homo sapien
cattgggagggaactagtagcaaac

SEQ ID NO: 3620989 - DNA, 25 bp, Homo sapien
cacatgctggatactgctagggcca

SEQ ID NO: 3620990 - DNA, 25 bp, Homo sapien
taatgtgcacaagcccataacaagc

SEQ ID NO: 3620991 - DNA, 25 bp, Homo sapien
cagttttaacaaccgctgaagtaat

SEQ ID NO: 3620992 - DNA, 25 bp, Homo sapien
gaggtgtcaagtggaaaattttctg

SEQ ID NO: 3620993 - DNA, 25 bp, Homo sapien
taagaatgcgtgagaggcatttgaa

SEQ ID NO: 3620994 - DNA, 25 bp, Homo sapien
acagcgacagcagcaatgaactttt

SEQ ID NO: 3620995 - DNA, 25 bp, Homo sapien
ccctataatgacaagcctgacagag

SEQ ID NO: 3620996 - DNA, 25 bp, Homo sapien
aaatgagtgcgttcttcctgcccct

SEQ ID NO: 3620997 - DNA, 25 bp, Homo sapien
tggattctgtctaagtaggaaggcc

SEQ ID NO: 3620998 - DNA, 25 bp, Homo sapien
tgaaaactctatggctttgggcaaa

SEQ ID NO: 3620999 - DNA, 25 bp, Homo sapien
cagcaacggctcatggaaaagggaa

SEQ ID NO: 3621000 - DNA, 25 bp, Homo sapien
cgctgcaactgcagcaacggctcat

SEQ ID NO: 3621001 - DNA, 25 bp, Homo sapien
tccaggtgagaacctgcactggagc

SEQ ID NO: 3621002 - DNA, 25 bp, Homo sapien
aggtgagaacctgcactggagctgc

SEQ ID NO: 3621003 - DNA, 25 bp, Homo sapien
gctgtcttgtgccaggacaactcca

SEQ ID NO: 3621004 - DNA, 25 bp, Homo sapien
actatctatggcctctctgcaagca

SEQ ID NO: 3621005 - DNA, 25 bp, Homo sapien
tagtttgccaagctatgtctcatca

SEQ ID NO: 3621006 - DNA, 25 bp, Homo sapien
tctggaggctcagcgaaggactgac

SEQ ID NO: 3621007 - DNA, 25 bp, Homo sapien
gctgactgtagcgttaggccttatt

SEQ ID NO: 3621008 - DNA, 25 bp, Homo sapien
cagtaactgaaatgacggcaccata

SEQ ID NO: 3621009 - DNA, 25 bp, Homo sapien
caaacctctttacaatgaatggcag

SEQ ID NO: 3621010 - DNA, 25 bp, Homo sapien
catacaaaagatgaccaatggcttg

SEQ ID NO: 3621011 - DNA, 25 bp, Homo sapien
atgaaagagttggacaacaccatgt

SEQ ID NO: 3621012 - DNA, 25 bp, Homo sapien
acaacaccatgtaccaaagacacaa

SEQ ID NO: 3621013 - DNA, 25 bp, Homo sapien
gaaagagttggacaacaccatgtac

SEQ ID NO: 3621014 - DNA, 25 bp, Homo sapien
tgaaagagttggacaacaccatgta

SEQ ID NO: 3621015 - DNA, 25 bp, Homo sapien
gatgatggtgagagtcggcttgaga

SEQ ID NO: 3621016 - DNA, 25 bp, Homo sapien
actttttccgtcttgatgatggtga

SEQ ID NO: 3621017 - DNA, 25 bp, Homo sapien
ggaaaagctccagatcgactttttc

SEQ ID NO: 3621018 - DNA, 25 bp, Homo sapien
gcttgagatcgacggccgccttcat

SEQ ID NO: 3621019 - DNA, 25 bp, Homo sapien
aagttggcactttgcggcgaagtga

SEQ ID NO: 3621020 - DNA, 25 bp, Homo sapien
cgtacgggatggtagcaagtttgca

SEQ ID NO: 3621021 - DNA, 25 bp, Homo sapien
agtgagcgcgctcgggtcccagcct

SEQ ID NO: 3621022 - DNA, 25 bp, Homo sapien
aaaaatctcaaattcccgctgcctt

SEQ ID NO: 3621023 - DNA, 25 bp, Homo sapien
agaagcagagataagtggagcacaa

SEQ ID NO: 3621024 - DNA, 25 bp, Homo sapien
tcaagaagcagagataagtggagca

SEQ ID NO: 3621025 - DNA, 25 bp, Homo sapien
aagcagagataagtggagcacaaaa

SEQ ID NO: 3621026 - DNA, 25 bp, Homo sapien
taagtggagcacaaaaaggagaaat

SEQ ID NO: 3621027 - DNA, 25 bp, Homo sapien
aattaatatgaatcctagcttcacc

SEQ ID NO: 3621028 - DNA, 25 bp, Homo sapien
ttatagtgtcataatgaattaatat

SEQ ID NO: 3621029 - DNA, 25 bp, Homo sapien
gaattaatatgaatcctagcttcac

SEQ ID NO: 3621030 - DNA, 25 bp, Homo sapien
tgaattaatatgaatcctagcttca

SEQ ID NO: 3621031 - DNA, 25 bp, Homo sapien
gcaatgacttcaggctaagctggcc

SEQ ID NO: 3621032 - DNA, 25 bp, Homo sapien
ggagcagccgtgttgacagttcatg

SEQ ID NO: 3621033 - DNA, 25 bp, Homo sapien
tctgatccaattgagactgtgagca

SEQ ID NO: 3621034 - DNA, 25 bp, Homo sapien
tcaatacattgggtaaacagactgt

SEQ ID NO: 3621035 - DNA, 25 bp, Homo sapien
gaaatgcttttcctaaagaattcgc

SEQ ID NO: 3621036 - DNA, 25 bp, Homo sapien
tctcattaccccagtgcttaggttt

SEQ ID NO: 3621037 - DNA, 25 bp, Homo sapien
agaattcgcacacaaataatctcat

SEQ ID NO: 3621038 - DNA, 25 bp, Homo sapien
cttaggtttatacagcagacgtctt

SEQ ID NO: 3621039 - DNA, 25 bp, Homo sapien
gaaggcttgcctttccactgtcact

SEQ ID NO: 3621040 - DNA, 25 bp, Homo sapien
gatgttcgagaagctgcgagttcga

SEQ ID NO: 3621041 - DNA, 25 bp, Homo sapien
gaggcttcggtttgtctgtcttggt

SEQ ID NO: 3621042 - DNA, 25 bp, Homo sapien
ctggtctctaacctgggtgtgcagc

SEQ ID NO: 3621043 - DNA, 25 bp, Homo sapien
gaacctcaggtagggttacagcttg

SEQ ID NO: 3621044 - DNA, 25 bp, Homo sapien
ctcaggtagggttacagcttgctcc

SEQ ID NO: 3621045 - DNA, 25 bp, Homo sapien
ctggaacctcaggtagggttacagc

SEQ ID NO: 3621046 - DNA, 25 bp, Homo sapien
acctcaggtagggttacagcttgct

SEQ ID NO: 3621047 - DNA, 25 bp, Homo sapien
tgttcagtgaccaaagacatagcaa

SEQ ID NO: 3621048 - DNA, 25 bp, Homo sapien
gactataggttcctcctcatgaagg

SEQ ID NO: 3621049 - DNA, 25 bp, Homo sapien
taacggaagagctgatgcaaacaca

SEQ ID NO: 3621050 - DNA, 25 bp, Homo sapien
gcaaacacaagcaacctgggtccag

SEQ ID NO: 3621051 - DNA, 25 bp, Homo sapien
taagaggctccattgattcacaagg

SEQ ID NO: 3621052 - DNA, 25 bp, Homo sapien
gcaacagacatttcagccgtgtctt

SEQ ID NO: 3621053 - DNA, 25 bp, Homo sapien
ccgtgtcttgtgtaagaggctccat

SEQ ID NO: 3621054 - DNA, 25 bp, Homo sapien
tccctaacagaaggatgacgagaag

SEQ ID NO: 3621055 - DNA, 25 bp, Homo sapien
tgacaacagccaaaacgggtgtcag

SEQ ID NO: 3621056 - DNA, 25 bp, Homo sapien
aacgggtgtcaggaaatgcaggata

SEQ ID NO: 3621057 - DNA, 25 bp, Homo sapien
caaaacgggtgtcaggaaatgcagg

SEQ ID NO: 3621058 - DNA, 25 bp, Homo sapien
cagccaaaacgggtgtcaggaaatg

SEQ ID NO: 3621059 - DNA, 25 bp, Homo sapien
ccagtaggaacttcctgagttgcca

SEQ ID NO: 3621060 - DNA, 25 bp, Homo sapien
aaccacagttcattcgaggatcttc

SEQ ID NO: 3621061 - DNA, 25 bp, Homo sapien
caaggtctttgctggtgataattgg

SEQ ID NO: 3621062 - DNA, 25 bp, Homo sapien
gacacagtgttcaagaccagtagga

SEQ ID NO: 3621063 - DNA, 25 bp, Homo sapien
tgcagagccaaaagttatcggaggt

SEQ ID NO: 3621064 - DNA, 25 bp, Homo sapien
cttacgactgacaaccttcattgga

SEQ ID NO: 3621065 - DNA, 25 bp, Homo sapien
taaacagccacaccacggtgggcga

SEQ ID NO: 3621066 - DNA, 25 bp, Homo sapien
tgtgacatacaatgtgcccttgaac

SEQ ID NO: 3621067 - DNA, 25 bp, Homo sapien
tcattctctcccgaagccctgctcc

SEQ ID NO: 3621068 - DNA, 25 bp, Homo sapien
tcttcattctctcccgaagccctgc

SEQ ID NO: 3621069 - DNA, 25 bp, Homo sapien
attctctcccgaagccctgctccaa

SEQ ID NO: 3621070 - DNA, 25 bp, Homo sapien
ttctctcccgaagccctgctccaac

SEQ ID NO: 3621071 - DNA, 25 bp, Homo sapien
tcacagccaacactcgctgaaacag

SEQ ID NO: 3621072 - DNA, 25 bp, Homo sapien
cacagccaacactcgctgaaacagg

SEQ ID NO: 3621073 - DNA, 25 bp, Homo sapien
ctcacagccaacactcgctgaaaca

SEQ ID NO: 3621074 - DNA, 25 bp, Homo sapien
cactcacagccaacactcgctgaaa

SEQ ID NO: 3621075 - DNA, 25 bp, Homo sapien
gggtccctcccaaggtgacatccag

SEQ ID NO: 3621076 - DNA, 25 bp, Homo sapien
ccctgttcattcagtgctcgtacgt

SEQ ID NO: 3621077 - DNA, 25 bp, Homo sapien
tacgtctgcaatacccttgatttca

SEQ ID NO: 3621078 - DNA, 25 bp, Homo sapien
ccagcatgaactcaggcttatttcc

SEQ ID NO: 3621079 - DNA, 25 bp, Homo sapien
aggctggcatggattttaaccactg

SEQ ID NO: 3621080 - DNA, 25 bp, Homo sapien
gcatggattttaaccactgtggctc

SEQ ID NO: 3621081 - DNA, 25 bp, Homo sapien
tgaggctggcatggattttaaccac

SEQ ID NO: 3621082 - DNA, 25 bp, Homo sapien
ggattttaaccactgtggctcccat

SEQ ID NO: 3621083 - DNA, 25 bp, Homo sapien
agaccatctcaaagaaagatcactt

SEQ ID NO: 3621084 - DNA, 25 bp, Homo sapien
gcgagaccatctcaaagaaagatca

SEQ ID NO: 3621085 - DNA, 25 bp, Homo sapien
acccagaagatagaggttggagtga

SEQ ID NO: 3621086 - DNA, 25 bp, Homo sapien
aataaacttatctgtccgtatttca

SEQ ID NO: 3621087 - DNA, 25 bp, Homo sapien
cactgcaggacgaggcgctgagtaa

SEQ ID NO: 3621088 - DNA, 25 bp, Homo sapien
caccactgcaggacgaggcgctgag

SEQ ID NO: 3621089 - DNA, 25 bp, Homo sapien
gctgagtaagggacggggctgctcc

SEQ ID NO: 3621090 - DNA, 25 bp, Homo sapien
ctgagtaagggacggggctgctccc

SEQ ID NO: 3621091 - DNA, 25 bp, Homo sapien
ccctggttgcaaggtaacatggata

SEQ ID NO: 3621092 - DNA, 25 bp, Homo sapien
caggaaccagttcttgtgtgtctcc

SEQ ID NO: 3621093 - DNA, 25 bp, Homo sapien
gacctcagacagaaccagttccctg

SEQ ID NO: 3621094 - DNA, 25 bp, Homo sapien
tccttaggagccaaccagttcactt

SEQ ID NO: 3621095 - DNA, 25 bp, Homo sapien
tcacgtggtttagatatgcctgtcc

SEQ ID NO: 3621096 - DNA, 25 bp, Homo sapien
gaaaagctcaaagtaccctaggcca

SEQ ID NO: 3621097 - DNA, 25 bp, Homo sapien
ccctaggccagggacattgttaaca

SEQ ID NO: 3621098 - DNA, 25 bp, Homo sapien
taagagtaagatgcatgtcacgtgg

SEQ ID NO: 3621099 - DNA, 25 bp, Homo sapien
aaggcagcgctggactaacttggtt

SEQ ID NO: 3621100 - DNA, 25 bp, Homo sapien
gaattgagtagctcaggacctgtca

SEQ ID NO: 3621101 - DNA, 25 bp, Homo sapien
gatcctgttacaatgcagtctgctg

SEQ ID NO: 3621102 - DNA, 25 bp, Homo sapien
caggtgcaatacaaacccggctggg

SEQ ID NO: 3621103 - DNA, 25 bp, Homo sapien
gaagtcatttggattaaggattaca

SEQ ID NO: 3621104 - DNA, 25 bp, Homo sapien
tttacaattgtaaaagactcacatg

SEQ ID NO: 3621105 - DNA, 25 bp, Homo sapien
taaggattacaagaggtgccaagag

SEQ ID NO: 3621106 - DNA, 25 bp, Homo sapien
gacatggttctagttatttggtccc

SEQ ID NO: 3621107 - DNA, 25 bp, Homo sapien
tactttgccggagagcagatcctga

SEQ ID NO: 3621108 - DNA, 25 bp, Homo sapien
aactacctgcgggaatcctctgctc

SEQ ID NO: 3621109 - DNA, 25 bp, Homo sapien
cataatgtttctaatagagctgcct

SEQ ID NO: 3621110 - DNA, 25 bp, Homo sapien
cgtagcttaagaggatgcaaagacc

SEQ ID NO: 3621111 - DNA, 25 bp, Homo sapien
tcatttgctgatgcatttactctct

SEQ ID NO: 3621112 - DNA, 25 bp, Homo sapien
tttgctgatgcatttactctctgct

SEQ ID NO: 3621113 - DNA, 25 bp, Homo sapien
gctgatgcatttactctctgctgaa

SEQ ID NO: 3621114 - DNA, 25 bp, Homo sapien
ctcatcatttgctgatgcatttact

SEQ ID NO: 3621115 - DNA, 25 bp, Homo sapien
cagctgtcacagcagttagccatgg

SEQ ID NO: 3621116 - DNA, 25 bp, Homo sapien
tcctgccattcttaacacggcagct

SEQ ID NO: 3621117 - DNA, 25 bp, Homo sapien
gtcacagcagttagccatggaaaga

SEQ ID NO: 3621118 - DNA, 25 bp, Homo sapien
tagccatggaaagacccattctctc

SEQ ID NO: 3621119 - DNA, 25 bp, Homo sapien
gaggttaagtgttcttggcgggcag

SEQ ID NO: 3621120 - DNA, 25 bp, Homo sapien
tgggacttcgagctccacccttgtg

SEQ ID NO: 3621121 - DNA, 25 bp, Homo sapien
acccttgtggcacagatgtcattcg

SEQ ID NO: 3621122 - DNA, 25 bp, Homo sapien
tgtcattcgtggaggttaagtgttc

SEQ ID NO: 3621123 - DNA, 25 bp, Homo sapien
gacttttgtagtcagaataggcaat

SEQ ID NO: 3621124 - DNA, 25 bp, Homo sapien
gtttgctgtgaaccttagcagtgaa

SEQ ID NO: 3621125 - DNA, 25 bp, Homo sapien
gcagtgaatgcctctatctttgcct

SEQ ID NO: 3621126 - DNA, 25 bp, Homo sapien
tagcaaagcaccacaagaggccatt

SEQ ID NO: 3621127 - DNA, 25 bp, Homo sapien
taaaaatgctctctggaaagtattc

SEQ ID NO: 3621128 - DNA, 25 bp, Homo sapien
caacaagggcttgagaaaccaagga

SEQ ID NO: 3621129 - DNA, 25 bp, Homo sapien
gaaagtattcaacaagggcttgaga

SEQ ID NO: 3621130 - DNA, 25 bp, Homo sapien
tgctctctggaaagtattcaacaag

SEQ ID NO: 3621131 - DNA, 25 bp, Homo sapien
ctaagagtgcaagggtggaagaggg

SEQ ID NO: 3621132 - DNA, 25 bp, Homo sapien
ggacgcaatgcactgtggccctcct

SEQ ID NO: 3621133 - DNA, 25 bp, Homo sapien
aagagggctggacgcaatgcactgt

SEQ ID NO: 3621134 - DNA, 25 bp, Homo sapien
ggctggacgcaatgcactgtggccc

SEQ ID NO: 3621135 - DNA, 25 bp, Homo sapien
gaggatggtccctgtaatctgtgga

SEQ ID NO: 3621136 - DNA, 25 bp, Homo sapien
tctgtgatagactcataaaacaatg

SEQ ID NO: 3621137 - DNA, 25 bp, Homo sapien
ggatacagttaggtggataccaggt

SEQ ID NO: 3621138 - DNA, 25 bp, Homo sapien
ccatgtccgtcataatctgtgatag

SEQ ID NO: 3621139 - DNA, 25 bp, Homo sapien
ggagtgggagtgaacatgtccttct

SEQ ID NO: 3621140 - DNA, 25 bp, Homo sapien
aggagtgggagtgaacatgtccttc

SEQ ID NO: 3621141 - DNA, 25 bp, Homo sapien
gaagcagaccaagcttccctggcaa

SEQ ID NO: 3621142 - DNA, 25 bp, Homo sapien
ctgagtgagaccacggcagctgtga

SEQ ID NO: 3621143 - DNA, 25 bp, Homo sapien
tccttcatcggcaggttcagggcac

SEQ ID NO: 3621144 - DNA, 25 bp, Homo sapien
gaccaagacacctgctgtgggtagg

SEQ ID NO: 3621145 - DNA, 25 bp, Homo sapien
taattcatgtctattccgtgcaggt

SEQ ID NO: 3621146 - DNA, 25 bp, Homo sapien
caataaacacgtgagcatgaggcaa

SEQ ID NO: 3621147 - DNA, 25 bp, Homo sapien
taaagtgcttcccagttagtgaaca

SEQ ID NO: 3621148 - DNA, 25 bp, Homo sapien
gcaggtctatgccaagcactaggaa

SEQ ID NO: 3621149 - DNA, 25 bp, Homo sapien
cctgccatgtgtcacaaggctcttg

SEQ ID NO: 3621150 - DNA, 25 bp, Homo sapien
gctctgcccaggaccgtccttgagg

SEQ ID NO: 3621151 - DNA, 25 bp, Homo sapien
tcaaaagtggcagtgctgtgtccac

SEQ ID NO: 3621152 - DNA, 25 bp, Homo sapien
ggctcttgagactcaaagtagagct

SEQ ID NO: 3621153 - DNA, 25 bp, Homo sapien
tcaaggcaggcatattgaagagctg

SEQ ID NO: 3621154 - DNA, 25 bp, Homo sapien
tgcaatgggcattgagtagggtcct

SEQ ID NO: 3621155 - DNA, 25 bp, Homo sapien
gaagacagacgacaaaccatgagca

SEQ ID NO: 3621156 - DNA, 25 bp, Homo sapien
ggcggaggagcatgctgccacctca

SEQ ID NO: 3621157 - DNA, 25 bp, Homo sapien
tccagggagtagatacaagtgacag

SEQ ID NO: 3621158 - DNA, 25 bp, Homo sapien
aatggtccagggagtagatacaagt

SEQ ID NO: 3621159 - DNA, 25 bp, Homo sapien
gatacaagtgacagccctcaacagt

SEQ ID NO: 3621160 - DNA, 25 bp, Homo sapien
gagtagatacaagtgacagccctca

SEQ ID NO: 3621161 - DNA, 25 bp, Homo sapien
tgacaggctttaatgtgcgccccag

SEQ ID NO: 3621162 - DNA, 25 bp, Homo sapien
tgataagtaattccacaagacaagc

SEQ ID NO: 3621163 - DNA, 25 bp, Homo sapien
caagacaagcagaaggaatccagac

SEQ ID NO: 3621164 - DNA, 25 bp, Homo sapien
tagtgtttacggataggaaggcctg

SEQ ID NO: 3621165 - DNA, 25 bp, Homo sapien
gggctgtgtcacaatctcaatgctg

SEQ ID NO: 3621166 - DNA, 25 bp, Homo sapien
aaactggcatcttgctacaccaagc

SEQ ID NO: 3621167 - DNA, 25 bp, Homo sapien
tcaatgctgtctggcggcagtttgt

SEQ ID NO: 3621168 - DNA, 25 bp, Homo sapien
ggcagcccatagtcctaaactggca

SEQ ID NO: 3621169 - DNA, 25 bp, Homo sapien
gccagatgttcttgtaaccctgttt

SEQ ID NO: 3621170 - DNA, 25 bp, Homo sapien
cccgatgactggatagtattactga

SEQ ID NO: 3621171 - DNA, 25 bp, Homo sapien
cagccgagtgcgtggaactgtgcaa

SEQ ID NO: 3621172 - DNA, 25 bp, Homo sapien
tgaaatatctttgcgccagccgagt

SEQ ID NO: 3621173 - DNA, 25 bp, Homo sapien
tgcgtggccaagtccccagctctta

SEQ ID NO: 3621174 - DNA, 25 bp, Homo sapien
gttcacataataggtcagatcctct

SEQ ID NO: 3621175 - DNA, 25 bp, Homo sapien
acataataggtcagatcctcttggg

SEQ ID NO: 3621176 - DNA, 25 bp, Homo sapien
ctagtgttcacataataggtcagat

SEQ ID NO: 3621177 - DNA, 25 bp, Homo sapien
cagattctgcactcaatgattccag

SEQ ID NO: 3621178 - DNA, 25 bp, Homo sapien
tcagattctgcactcaatgattcca

SEQ ID NO: 3621179 - DNA, 25 bp, Homo sapien
tggagaacccagtgtgcctccagct

SEQ ID NO: 3621180 - DNA, 25 bp, Homo sapien
cactagctggagctgcttagatttt

SEQ ID NO: 3621181 - DNA, 25 bp, Homo sapien
tgtctggatccccactagctggagc

SEQ ID NO: 3621182 - DNA, 25 bp, Homo sapien
aaagcccctggccagatttgcacct

SEQ ID NO: 3621183 - DNA, 25 bp, Homo sapien
ttagatattgatattcgcagcccat

SEQ ID NO: 3621184 - DNA, 25 bp, Homo sapien
cattagatattgatattcgcagccc

SEQ ID NO: 3621185 - DNA, 25 bp, Homo sapien
gacattagatattgatattcgcagc

SEQ ID NO: 3621186 - DNA, 25 bp, Homo sapien
attagatattgatattcgcagccca

SEQ ID NO: 3621187 - DNA, 25 bp, Homo sapien
gctgaagtgagagggcctaaacacc

SEQ ID NO: 3621188 - DNA, 25 bp, Homo sapien
cattgttgatcttggtgggtgccac

SEQ ID NO: 3621189 - DNA, 25 bp, Homo sapien
ccagcagttgcaagggagctgaagt

SEQ ID NO: 3621190 - DNA, 25 bp, Homo sapien
aacaccagcaatgtgttcccttcat

SEQ ID NO: 3621191 - DNA, 25 bp, Homo sapien
aaattcagcccatagtgcccgtcat

SEQ ID NO: 3621192 - DNA, 25 bp, Homo sapien
tataggctggcgagggagcataact

SEQ ID NO: 3621193 - DNA, 25 bp, Homo sapien
tgctgtaacctccacacgagagtct

SEQ ID NO: 3621194 - DNA, 25 bp, Homo sapien
taaggccctgtatcccatcagcgtc

SEQ ID NO: 3621195 - DNA, 25 bp, Homo sapien
gttggctttaatgagtcctccctgc

SEQ ID NO: 3621196 - DNA, 25 bp, Homo sapien
ttcagcaattttcttccggtgaatt

SEQ ID NO: 3621197 - DNA, 25 bp, Homo sapien
ttccggtgaattgaaggctccaggt

SEQ ID NO: 3621198 - DNA, 25 bp, Homo sapien
tccaggtgacaaagggagttggcca

SEQ ID NO: 3621199 - DNA, 25 bp, Homo sapien
gagttccgctcctgcgggcttagca

SEQ ID NO: 3621200 - DNA, 25 bp, Homo sapien
gcaccaagaactaacacatcctgga

SEQ ID NO: 3621201 - DNA, 25 bp, Homo sapien
gggcacacaggataggcaccaagaa

SEQ ID NO: 3621202 - DNA, 25 bp, Homo sapien
aaagggtgcctaaggtgagtgccca

SEQ ID NO: 3621203 - DNA, 25 bp, Homo sapien
tgcgggcatccccagttcgaaactg

SEQ ID NO: 3621204 - DNA, 25 bp, Homo sapien
ttccagaacaagctgcgggcatccc

SEQ ID NO: 3621205 - DNA, 25 bp, Homo sapien
tgtcctggtcgcgttctctcctcaa

SEQ ID NO: 3621206 - DNA, 25 bp, Homo sapien
tcctcaacacgcaccaagaactaga

SEQ ID NO: 3621207 - DNA, 25 bp, Homo sapien
taggttgagaagcaacgctcctggc

SEQ ID NO: 3621208 - DNA, 25 bp, Homo sapien
ctcgtggatctcaagctagggcgct

SEQ ID NO: 3621209 - DNA, 25 bp, Homo sapien
catcaaggtaagacatggcagcgtc

SEQ ID NO: 3621210 - DNA, 25 bp, Homo sapien
tagctacccacgatgtttcagacag

SEQ ID NO: 3621211 - DNA, 25 bp, Homo sapien
gtgctccccagaccggtcagtgagg

SEQ ID NO: 3621212 - DNA, 25 bp, Homo sapien
ctccgagtagggacccaaagcttag

SEQ ID NO: 3621213 - DNA, 25 bp, Homo sapien
catctgagtcagtccgagagcggag

SEQ ID NO: 3621214 - DNA, 25 bp, Homo sapien
tgagctccctcgagtgtcgggcaaa

SEQ ID NO: 3621215 - DNA, 25 bp, Homo sapien
ccacaaagtttgtattgttgcacaa

SEQ ID NO: 3621216 - DNA, 25 bp, Homo sapien
gctgtgggccgccagagaagctgct

SEQ ID NO: 3621217 - DNA, 25 bp, Homo sapien
ccacgggtcagggacaaagcggagg

SEQ ID NO: 3621218 - DNA, 25 bp, Homo sapien
gaggcgaggagacggcagtctggga

SEQ ID NO: 3621219 - DNA, 25 bp, Homo sapien
ctatgcatctagtggtgcctgtgcc

SEQ ID NO: 3621220 - DNA, 25 bp, Homo sapien
gcatctagtggtgcctgtgccaggc

SEQ ID NO: 3621221 - DNA, 25 bp, Homo sapien
aggctctccactaccccccgcccat

SEQ ID NO: 3621222 - DNA, 25 bp, Homo sapien
tatgcatctagtggtgcctgtgcca

SEQ ID NO: 3621223 - DNA, 25 bp, Homo sapien
gacagtataggaatgttcgggtgac

SEQ ID NO: 3621224 - DNA, 25 bp, Homo sapien
tataggaatgttcgggtgactactg

SEQ ID NO: 3621225 - DNA, 25 bp, Homo sapien
cagtataggaatgttcgggtgacta

SEQ ID NO: 3621226 - DNA, 25 bp, Homo sapien
ctgaaaggaattgggggacagtata

SEQ ID NO: 3621227 - DNA, 25 bp, Homo sapien
tgaagatgatctgtcacttgccaga

SEQ ID NO: 3621228 - DNA, 25 bp, Homo sapien
gaaagagaaacctagccatggtgtc

SEQ ID NO: 3621229 - DNA, 25 bp, Homo sapien
cacagagggaccctctaaagtgcta

SEQ ID NO: 3621230 - DNA, 25 bp, Homo sapien
tgccagaccaacaggagttggaaag

SEQ ID NO: 3621231 - DNA, 25 bp, Homo sapien
ctctgcaactggccagcaccaggaa

SEQ ID NO: 3621232 - DNA, 25 bp, Homo sapien
tcctgaaagctctgttgtagtttga

SEQ ID NO: 3621233 - DNA, 25 bp, Homo sapien
tgtgggatgccatgaacagcctctg

SEQ ID NO: 3621234 - DNA, 25 bp, Homo sapien
gttggagtcctttctggctgaatga

SEQ ID NO: 3621235 - DNA, 25 bp, Homo sapien
tttcctctctggaaagcacgtggaa

SEQ ID NO: 3621236 - DNA, 25 bp, Homo sapien
taacctctttcctctctggaaagca

SEQ ID NO: 3621237 - DNA, 25 bp, Homo sapien
cctctctggaaagcacgtggaaacg

SEQ ID NO: 3621238 - DNA, 25 bp, Homo sapien
tctttcctctctggaaagcacgtgg

SEQ ID NO: 3621239 - DNA, 25 bp, Homo sapien
aagtctcaattgctggcaggctgca

SEQ ID NO: 3621240 - DNA, 25 bp, Homo sapien
tggagccgaattgatgagactaatt

SEQ ID NO: 3621241 - DNA, 25 bp, Homo sapien
tctggtcacgttcagacccgtgtct

SEQ ID NO: 3621242 - DNA, 25 bp, Homo sapien
tctgtattcgaacccaaaattggag

SEQ ID NO: 3621243 - DNA, 25 bp, Homo sapien
ccaattgacttggatctcctctgga

SEQ ID NO: 3621244 - DNA, 25 bp, Homo sapien
caattgacttggatctcctctggat

SEQ ID NO: 3621245 - DNA, 25 bp, Homo sapien
ttcttccaattgacttggatctcct

SEQ ID NO: 3621246 - DNA, 25 bp, Homo sapien
ttccaattgacttggatctcctctg

SEQ ID NO: 3621247 - DNA, 25 bp, Homo sapien
cctcgaggctgctccaactggggcg

SEQ ID NO: 3621248 - DNA, 25 bp, Homo sapien
taacctgttttggatgtccgggaga

SEQ ID NO: 3621249 - DNA, 25 bp, Homo sapien
gagcaagtccaaagcgtggtccgga

SEQ ID NO: 3621250 - DNA, 25 bp, Homo sapien
tgggtagggaggacggtccagagcg

SEQ ID NO: 3621251 - DNA, 25 bp, Homo sapien
gtcccgcggtagtgtcagttccctg

SEQ ID NO: 3621252 - DNA, 25 bp, Homo sapien
cgactcttgcctgggagtcagtgct

SEQ ID NO: 3621253 - DNA, 25 bp, Homo sapien
cgagaagatgcggataggtggccta

SEQ ID NO: 3621254 - DNA, 25 bp, Homo sapien
tgactgtcctagagggaacgtcccg

SEQ ID NO: 3621255 - DNA, 25 bp, Homo sapien
gagtctgccgcgtctcggcagcgga

SEQ ID NO: 3621256 - DNA, 25 bp, Homo sapien
tctcctaacaatgcgcccggaatgg

SEQ ID NO: 3621257 - DNA, 25 bp, Homo sapien
ccggaatggagtccgcgccctgaca

SEQ ID NO: 3621258 - DNA, 25 bp, Homo sapien
aatccgcttcgatgagtgggtgagc

SEQ ID NO: 3621259 - DNA, 25 bp, Homo sapien
ccgcagccctagccaactctccctc

SEQ ID NO: 3621260 - DNA, 25 bp, Homo sapien
agtttgtctccggctggaaaaagca

SEQ ID NO: 3621261 - DNA, 25 bp, Homo sapien
gtttgtctccggctggaaaaagcat

SEQ ID NO: 3621262 - DNA, 25 bp, Homo sapien
atgtggacaccctaaggaaaagtga

SEQ ID NO: 3621263 - DNA, 25 bp, Homo sapien
cctcttctgatccagaagggtggta

SEQ ID NO: 3621264 - DNA, 25 bp, Homo sapien
ctgaaggcctcttctgatccagaag

SEQ ID NO: 3621265 - DNA, 25 bp, Homo sapien
ccagaagggtggtaagatggcctca

SEQ ID NO: 3621266 - DNA, 25 bp, Homo sapien
gggtttccagatcctgttcccacaa

SEQ ID NO: 3621267 - DNA, 25 bp, Homo sapien
ggacagtggaccaggagagaggcca

SEQ ID NO: 3621268 - DNA, 25 bp, Homo sapien
ttggtgagaatgaaccgtccattaa

SEQ ID NO: 3621269 - DNA, 25 bp, Homo sapien
gttcccacaatagttcaaatactgt

SEQ ID NO: 3621270 - DNA, 25 bp, Homo sapien
gtcctcaagaaggtgttgctgcctc

SEQ ID NO: 3621271 - DNA, 25 bp, Homo sapien
tgaggaatacttgggaacagaggct

SEQ ID NO: 3621272 - DNA, 25 bp, Homo sapien
agatggcctctgtctattgatctgt

SEQ ID NO: 3621273 - DNA, 25 bp, Homo sapien
caccttgtaatctccatgtcacctg

SEQ ID NO: 3621274 - DNA, 25 bp, Homo sapien
tatcagaccaagtgagacttcctgt

SEQ ID NO: 3621275 - DNA, 25 bp, Homo sapien
gtgagacttcctgtggactggccca

SEQ ID NO: 3621276 - DNA, 25 bp, Homo sapien
tccttttatcagaccaagtgagact

SEQ ID NO: 3621277 - DNA, 25 bp, Homo sapien
cctcacaccagttccttttatcaga

SEQ ID NO: 3621278 - DNA, 25 bp, Homo sapien
tggtcgaagggcacaagtcctcttt

SEQ ID NO: 3621279 - DNA, 25 bp, Homo sapien
tacggtctttggtgcaacataggac

SEQ ID NO: 3621280 - DNA, 25 bp, Homo sapien
cataggacttccctagaggtgaggg

SEQ ID NO: 3621281 - DNA, 25 bp, Homo sapien
tctccataataagaacacattggtc

SEQ ID NO: 3621282 - DNA, 25 bp, Homo sapien
tttatcaaaaggatagtcacgaatc

SEQ ID NO: 3621283 - DNA, 25 bp, Homo sapien
tatcaaaaggatagtcacgaatcat

SEQ ID NO: 3621284 - DNA, 25 bp, Homo sapien
ttatcaaaaggatagtcacgaatca

SEQ ID NO: 3621285 - DNA, 25 bp, Homo sapien
tctcatggggagatctgacttcatt

SEQ ID NO: 3621286 - DNA, 25 bp, Homo sapien
ttactgaggtctcgctaatgagcag

SEQ ID NO: 3621287 - DNA, 25 bp, Homo sapien
gaataaataccccaggctttctcat

SEQ ID NO: 3621288 - DNA, 25 bp, Homo sapien
tattgcctgctacacctcctgtggt

SEQ ID NO: 3621289 - DNA, 25 bp, Homo sapien
ggcataaatttgtgaggtgaactgt

SEQ ID NO: 3621290 - DNA, 25 bp, Homo sapien
gcgaaggtcaatcctgtgtccatca

SEQ ID NO: 3621291 - DNA, 25 bp, Homo sapien
gatgggcagactcctctcagaaaat

SEQ ID NO: 3621292 - DNA, 25 bp, Homo sapien
tttggaagtcttcaggtacacatca

SEQ ID NO: 3621293 - DNA, 25 bp, Homo sapien
gcaaggtttgtgatgtaggcacaga

SEQ ID NO: 3621294 - DNA, 25 bp, Homo sapien
taatgacaagtggaacatttccagg

SEQ ID NO: 3621295 - DNA, 25 bp, Homo sapien
cctctcctggttgcattgtggtctg

SEQ ID NO: 3621296 - DNA, 25 bp, Homo sapien
gaagccaccatccactaaggagagc

SEQ ID NO: 3621297 - DNA, 25 bp, Homo sapien
tacttttcaagaggccaatccctgg

SEQ ID NO: 3621298 - DNA, 25 bp, Homo sapien
tcttagtgaatagcagtcgactgtg

SEQ ID NO: 3621299 - DNA, 25 bp, Homo sapien
gtgcagactcggtgagaccagcaga

SEQ ID NO: 3621300 - DNA, 25 bp, Homo sapien
tccaaattgggctgaaaaaatctca

SEQ ID NO: 3621301 - DNA, 25 bp, Homo sapien
tagctctgccatttccggccatgtg

SEQ ID NO: 3621302 - DNA, 25 bp, Homo sapien
cggccatgtgactggacctgtcaga

SEQ ID NO: 3621303 - DNA, 25 bp, Homo sapien
cctgtaattacggagctttgggact

SEQ ID NO: 3621304 - DNA, 25 bp, Homo sapien
tgggactcactacacccacagtggc

SEQ ID NO: 3621305 - DNA, 25 bp, Homo sapien
gacagctggaatggtcaagcccttc

SEQ ID NO: 3621306 - DNA, 25 bp, Homo sapien
agctggaatggtcaagcccttcagg

SEQ ID NO: 3621307 - DNA, 25 bp, Homo sapien
cctgtaggatgcaccacagacagct

SEQ ID NO: 3621308 - DNA, 25 bp, Homo sapien
ctgtaggatgcaccacagacagctg

SEQ ID NO: 3621309 - DNA, 25 bp, Homo sapien
cctttccgtgagatgcaggcagcca

SEQ ID NO: 3621310 - DNA, 25 bp, Homo sapien
ttgcggaaagggctgatgtatcagc

SEQ ID NO: 3621311 - DNA, 25 bp, Homo sapien
cccaagggccaggtctagagtagtg

SEQ ID NO: 3621312 - DNA, 25 bp, Homo sapien
tcaaaggctgacttgctgcagccca

SEQ ID NO: 3621313 - DNA, 25 bp, Homo sapien
catttcttccataactgcagtggcc

SEQ ID NO: 3621314 - DNA, 25 bp, Homo sapien
tgcagtggcccctgtgagtaaaatc

SEQ ID NO: 3621315 - DNA, 25 bp, Homo sapien
gacgcttggacactttttgaacaac

SEQ ID NO: 3621316 - DNA, 25 bp, Homo sapien
tgagtgtccttgtgaccagagccac

SEQ ID NO: 3621317 - DNA, 25 bp, Homo sapien
tgagtatcaggtaaacctgccttgg

SEQ ID NO: 3621318 - DNA, 25 bp, Homo sapien
ctgagtatcaggtaaacctgccttg

SEQ ID NO: 3621319 - DNA, 25 bp, Homo sapien
gctacatcaagtccagggatatgat

SEQ ID NO: 3621320 - DNA, 25 bp, Homo sapien
ctgccttggctacatcaagtccagg

SEQ ID NO: 3621321 - DNA, 25 bp, Homo sapien
tgggtctacacagatatgacacagc

SEQ ID NO: 3621322 - DNA, 25 bp, Homo sapien
acagctacccgtgtctgcctcggtt

SEQ ID NO: 3621323 - DNA, 25 bp, Homo sapien
aaccactttgggtctacacagatat

SEQ ID NO: 3621324 - DNA, 25 bp, Homo sapien
gatatgacacagctacccgtgtctg

SEQ ID NO: 3621325 - DNA, 25 bp, Homo sapien
ggttcttgagaaccaggctggaaga

SEQ ID NO: 3621326 - DNA, 25 bp, Homo sapien
gatggcaaccagatcattcacctct

SEQ ID NO: 3621327 - DNA, 25 bp, Homo sapien
cccattccaagagcccggttcttga

SEQ ID NO: 3621328 - DNA, 25 bp, Homo sapien
aggatggcaaccagatcattcacct

SEQ ID NO: 3621329 - DNA, 25 bp, Homo sapien
tcagtagctgcgctgctcatcctat

SEQ ID NO: 3621330 - DNA, 25 bp, Homo sapien
ctttgtgggtcagcctctcagtagc

SEQ ID NO: 3621331 - DNA, 25 bp, Homo sapien
agcctctcagtagctgcgctgctca

SEQ ID NO: 3621332 - DNA, 25 bp, Homo sapien
agtagctgcgctgctcatcctattc

SEQ ID NO: 3621333 - DNA, 25 bp, Homo sapien
taaagaccaggcctcaagggacatt

SEQ ID NO: 3621334 - DNA, 25 bp, Homo sapien
ttccctttgtcacgcagagtcctct

SEQ ID NO: 3621335 - DNA, 25 bp, Homo sapien
ttctcaagcaataggaaagctccgg

SEQ ID NO: 3621336 - DNA, 25 bp, Homo sapien
caggaatcgaagagacaaccaaggg

SEQ ID NO: 3621337 - DNA, 25 bp, Homo sapien
tgctgtgagtcttgattttgccgtc

SEQ ID NO: 3621338 - DNA, 25 bp, Homo sapien
tgcctccagaaccgctggctttgtg

SEQ ID NO: 3621339 - DNA, 25 bp, Homo sapien
tgagtcttgattttgccgtctgcat

SEQ ID NO: 3621340 - DNA, 25 bp, Homo sapien
tctttgctgtgagtcttgattttgc

SEQ ID NO: 3621341 - DNA, 25 bp, Homo sapien
gtgacaaccagcactttaaacgctt

SEQ ID NO: 3621342 - DNA, 25 bp, Homo sapien
agtttgaggcgatgagtcaaggcaa

SEQ ID NO: 3621343 - DNA, 25 bp, Homo sapien
ccagtgcttgtggagagtttgaggc

SEQ ID NO: 3621344 - DNA, 25 bp, Homo sapien
ggctggcgatcgtgtctgctctgtt

SEQ ID NO: 3621345 - DNA, 25 bp, Homo sapien
cgaagaaacggagggcgccgggctg

SEQ ID NO: 3621346 - DNA, 25 bp, Homo sapien
cggacacaccccgtgtggcagagga

SEQ ID NO: 3621347 - DNA, 25 bp, Homo sapien
ctctgggcctgactgtcggccccac

SEQ ID NO: 3621348 - DNA, 25 bp, Homo sapien
agctgctgcgggaacgagatttgtc

SEQ ID NO: 3621349 - DNA, 25 bp, Homo sapien
tgactcaggcagtttgctcctcgga

SEQ ID NO: 3621350 - DNA, 25 bp, Homo sapien
gctcctcggagaccatcatttttct

SEQ ID NO: 3621351 - DNA, 25 bp, Homo sapien
aatgactcaggcagtttgctcctcg

SEQ ID NO: 3621352 - DNA, 25 bp, Homo sapien
tcaggcagtttgctcctcggagacc

SEQ ID NO: 3621353 - DNA, 25 bp, Homo sapien
taccctcacctgtgaaaggacccat

SEQ ID NO: 3621354 - DNA, 25 bp, Homo sapien
aacatacctgtgtaccttaccctca

SEQ ID NO: 3621355 - DNA, 25 bp, Homo sapien
cctccaccagtaacatacctgtgta

SEQ ID NO: 3621356 - DNA, 25 bp, Homo sapien
tgtaccttaccctcacctgtgaaag

SEQ ID NO: 3621357 - DNA, 25 bp, Homo sapien
cactcaccctttagggccgtggtca

SEQ ID NO: 3621358 - DNA, 25 bp, Homo sapien
tccttcaaacatgacttggttcctg

SEQ ID NO: 3621359 - DNA, 25 bp, Homo sapien
gggtatacctttcatccgtctcagt

SEQ ID NO: 3621360 - DNA, 25 bp, Homo sapien
taggttctgacccaaagacctgtcc

SEQ ID NO: 3621361 - DNA, 25 bp, Homo sapien
tacggtcttgtgcacccttccccag

SEQ ID NO: 3621362 - DNA, 25 bp, Homo sapien
cacctcattacggtcttgtgcaccc

SEQ ID NO: 3621363 - DNA, 25 bp, Homo sapien
tcattacggtcttgtgcacccttcc

SEQ ID NO: 3621364 - DNA, 25 bp, Homo sapien
cctcattacggtcttgtgcaccctt

SEQ ID NO: 3621365 - DNA, 25 bp, Homo sapien
caaccaccgcaggatcctgctgcca

SEQ ID NO: 3621366 - DNA, 25 bp, Homo sapien
ccttcaggtctctgcccatcaggag

SEQ ID NO: 3621367 - DNA, 25 bp, Homo sapien
ccttcttggcccaaccaccgcagga

SEQ ID NO: 3621368 - DNA, 25 bp, Homo sapien
tcacaagatgatggcaccagagccc

SEQ ID NO: 3621369 - DNA, 25 bp, Homo sapien
ctacactgaacccagagacttgtcc

SEQ ID NO: 3621370 - DNA, 25 bp, Homo sapien
cacttctgctacactgaacccagag

SEQ ID NO: 3621371 - DNA, 25 bp, Homo sapien
cactgaacccagagacttgtccttt

SEQ ID NO: 3621372 - DNA, 25 bp, Homo sapien
ctgtccacttctgctacactgaacc

SEQ ID NO: 3621373 - DNA, 25 bp, Homo sapien
caaggtctcagtggatgccaagctc

SEQ ID NO: 3621374 - DNA, 25 bp, Homo sapien
tgctctttgggatgtaagacgccgc

SEQ ID NO: 3621375 - DNA, 25 bp, Homo sapien
gctgaagtgaaggtttaatagcccc

SEQ ID NO: 3621376 - DNA, 25 bp, Homo sapien
taatagcccctctagaatggtggga

SEQ ID NO: 3621377 - DNA, 25 bp, Homo sapien
ttccctgtcggagtctgggagtgaa

SEQ ID NO: 3621378 - DNA, 25 bp, Homo sapien
tgaatcttcctcctcgtgggcttgg

SEQ ID NO: 3621379 - DNA, 25 bp, Homo sapien
cctgtcggagtctgggagtgaatct

SEQ ID NO: 3621380 - DNA, 25 bp, Homo sapien
gtgaatcttcctcctcgtgggcttg

SEQ ID NO: 3621381 - DNA, 25 bp, Homo sapien
tggctgccacctcaagtttgtcagt

SEQ ID NO: 3621382 - DNA, 25 bp, Homo sapien
ccaggcaccacattcgagagggcct

SEQ ID NO: 3621383 - DNA, 25 bp, Homo sapien
gtgccgacggccacatttttacaca

SEQ ID NO: 3621384 - DNA, 25 bp, Homo sapien
agatcatcaactggtacactggtgc

SEQ ID NO: 3621385 - DNA, 25 bp, Homo sapien
ggacatcaggttctccaccaagtgg

SEQ ID NO: 3621386 - DNA, 25 bp, Homo sapien
gatgatgacatgtcgaagtctaccc

SEQ ID NO: 3621387 - DNA, 25 bp, Homo sapien
tgaggctaagtcgtaccaatttccc

SEQ ID NO: 3621388 - DNA, 25 bp, Homo sapien
ccttgatactgggtagatttcctca

SEQ ID NO: 3621389 - DNA, 25 bp, Homo sapien
tagaagcttactcatcagtggcctt

SEQ ID NO: 3621390 - DNA, 25 bp, Homo sapien
gaataattccatgggccagtatgcc

SEQ ID NO: 3621391 - DNA, 25 bp, Homo sapien
cacttactggatgctttggactcaa

SEQ ID NO: 3621392 - DNA, 25 bp, Homo sapien
gacacagaatcatggacttaacccg

SEQ ID NO: 3621393 - DNA, 25 bp, Homo sapien
gcagttttactatcgaatcaatcgc

SEQ ID NO: 3621394 - DNA, 25 bp, Homo sapien
gttgacctcggtcacaaaagcagtt

SEQ ID NO: 3621395 - DNA, 25 bp, Homo sapien
ttgtcagaccatcagaccagggcca

SEQ ID NO: 3621396 - DNA, 25 bp, Homo sapien
taaactcaagcagattcgcaagtgc

SEQ ID NO: 3621397 - DNA, 25 bp, Homo sapien
tacaatgaaaagagtgagacctggg

SEQ ID NO: 3621398 - DNA, 25 bp, Homo sapien
cactccagcaaagaataagcgccct

SEQ ID NO: 3621399 - DNA, 25 bp, Homo sapien
gaccaggactttatggctcatgcag

SEQ ID NO: 3621400 - DNA, 25 bp, Homo sapien
gagcaaagcgagctggtctatccag

SEQ ID NO: 3621401 - DNA, 25 bp, Homo sapien
tatcctttatgcatgagggcctgct

SEQ ID NO: 3621402 - DNA, 25 bp, Homo sapien
tagctttgctcagtcaactggccaa

SEQ ID NO: 3621403 - DNA, 25 bp, Homo sapien
gagggagcctattctactgccagca

SEQ ID NO: 3621404 - DNA, 25 bp, Homo sapien
taagacaactgcagttggtccctgg

SEQ ID NO: 3621405 - DNA, 25 bp, Homo sapien
tctgcaagctctgaactaagaatcg

SEQ ID NO: 3621406 - DNA, 25 bp, Homo sapien
cacattcttcatggagagcagtgac

SEQ ID NO: 3621407 - DNA, 25 bp, Homo sapien
cagtgacataatttcagacccagcc

SEQ ID NO: 3621408 - DNA, 25 bp, Homo sapien
gctgaagacttctcatcgaggaaga

SEQ ID NO: 3621409 - DNA, 25 bp, Homo sapien
aacaggaactcttggagggacagcc

SEQ ID NO: 3621410 - DNA, 25 bp, Homo sapien
ataggcattcatgcaggcttcctgg

SEQ ID NO: 3621411 - DNA, 25 bp, Homo sapien
gatggctcctttgagttgataggca

SEQ ID NO: 3621412 - DNA, 25 bp, Homo sapien
gagacaggaacctcaggagaacagg

SEQ ID NO: 3621413 - DNA, 25 bp, Homo sapien
ctttgtgcccagggggagcacagac

SEQ ID NO: 3621414 - DNA, 25 bp, Homo sapien
agccagagtggattgtccagggccc

SEQ ID NO: 3621415 - DNA, 25 bp, Homo sapien
gcaggaaggcctaattccggtggct

SEQ ID NO: 3621416 - DNA, 25 bp, Homo sapien
tctgttagtgtggagactagaggct

SEQ ID NO: 3621417 - DNA, 25 bp, Homo sapien
gagggtgctcgtgggcggcatcccg

SEQ ID NO: 3621418 - DNA, 25 bp, Homo sapien
cctagggttgtgaggaagagatggc

SEQ ID NO: 3621419 - DNA, 25 bp, Homo sapien
catgaggtccgcctaagcgtgggaa

SEQ ID NO: 3621420 - DNA, 25 bp, Homo sapien
agtgtcctgtaaaggtggaaacttg

SEQ ID NO: 3621421 - DNA, 25 bp, Homo sapien
gatggctctgcagaagacgattgct

SEQ ID NO: 3621422 - DNA, 25 bp, Homo sapien
ccctccacccatcatttgactaact

SEQ ID NO: 3621423 - DNA, 25 bp, Homo sapien
ccatcatttgactaactcttccttt

SEQ ID NO: 3621424 - DNA, 25 bp, Homo sapien
tccacccatcatttgactaactctt

SEQ ID NO: 3621425 - DNA, 25 bp, Homo sapien
acccatcatttgactaactcttcct

SEQ ID NO: 3621426 - DNA, 25 bp, Homo sapien
tttctgatcctggctaccaccttcc

SEQ ID NO: 3621427 - DNA, 25 bp, Homo sapien
ttctgatcctggctaccaccttcca

SEQ ID NO: 3621428 - DNA, 25 bp, Homo sapien
tctgatcctggctaccaccttccag

SEQ ID NO: 3621429 - DNA, 25 bp, Homo sapien
gggtttgaatccactactagccatg

SEQ ID NO: 3621430 - DNA, 25 bp, Homo sapien
caaaagctcattggacagatgtggg

SEQ ID NO: 3621431 - DNA, 25 bp, Homo sapien
gaggaactctgctggtgctaggaat

SEQ ID NO: 3621432 - DNA, 25 bp, Homo sapien
caggccccttgactaatgactggtc

SEQ ID NO: 3621433 - DNA, 25 bp, Homo sapien
taacccagcatctgtagcaaatagc

SEQ ID NO: 3621434 - DNA, 25 bp, Homo sapien
ctgatgtagtcagattccaccggga

SEQ ID NO: 3621435 - DNA, 25 bp, Homo sapien
tacaagcagtttggccttctcaggc

SEQ ID NO: 3621436 - DNA, 25 bp, Homo sapien
tatcaaaagttacctgttccaggcc

SEQ ID NO: 3621437 - DNA, 25 bp, Homo sapien
cgtaccacatgagaagcttagagcc

SEQ ID NO: 3621438 - DNA, 25 bp, Homo sapien
taagatttcaagagagcacctatgt

SEQ ID NO: 3621439 - DNA, 25 bp, Homo sapien
caaggtcgagccttccataagctgg

SEQ ID NO: 3621440 - DNA, 25 bp, Homo sapien
gagactttgctttactcccgttgaa

SEQ ID NO: 3621441 - DNA, 25 bp, Homo sapien
tactatgggagcaaaacggtagccc

SEQ ID NO: 3621442 - DNA, 25 bp, Homo sapien
tcttgctgaacgtaatggtcttggc

SEQ ID NO: 3621443 - DNA, 25 bp, Homo sapien
cactcggattaggaggcaaagcttc

SEQ ID NO: 3621444 - DNA, 25 bp, Homo sapien
gatgtccggacttggcaggtagcac

SEQ ID NO: 3621445 - DNA, 25 bp, Homo sapien
tgcataccacaggagaccaaagaaa

SEQ ID NO: 3621446 - DNA, 25 bp, Homo sapien
gccattaatattctccacacaggga

SEQ ID NO: 3621447 - DNA, 25 bp, Homo sapien
cacacagggagtgtgattggcagaa

SEQ ID NO: 3621448 - DNA, 25 bp, Homo sapien
ggtctttgtgaatgtacgctactgc

SEQ ID NO: 3621449 - DNA, 25 bp, Homo sapien
aaaagcgagtgacgacccatttccg

SEQ ID NO: 3621450 - DNA, 25 bp, Homo sapien
gccgagaatgcccaaaaaagcgagt

SEQ ID NO: 3621451 - DNA, 25 bp, Homo sapien
gactagccttgctctttgccgagaa

SEQ ID NO: 3621452 - DNA, 25 bp, Homo sapien
caagtaccgttgtccagatgtccac

SEQ ID NO: 3621453 - DNA, 25 bp, Homo sapien
actggggagcactgatttaagtaat

SEQ ID NO: 3621454 - DNA, 25 bp, Homo sapien
aacacatctaacacttccttcccta

SEQ ID NO: 3621455 - DNA, 25 bp, Homo sapien
gagccaccatcaacacatctaacac

SEQ ID NO: 3621456 - DNA, 25 bp, Homo sapien
catcaacacatctaacacttccttc

SEQ ID NO: 3621457 - DNA, 25 bp, Homo sapien
gtgtgcccaccctggtccgcaatgt

SEQ ID NO: 3621458 - DNA, 25 bp, Homo sapien
caagaatatcaaggtgtgcccaccc

SEQ ID NO: 3621459 - DNA, 25 bp, Homo sapien
ggtccgcaatgtcttcagggtattt

SEQ ID NO: 3621460 - DNA, 25 bp, Homo sapien
ccccatgcccaagaatatcaaggtg

SEQ ID NO: 3621461 - DNA, 25 bp, Homo sapien
caaacacattccgactggaagcatt

SEQ ID NO: 3621462 - DNA, 25 bp, Homo sapien
aacacattccgactggaagcattca

SEQ ID NO: 3621463 - DNA, 25 bp, Homo sapien
tcaaacacattccgactggaagcat

SEQ ID NO: 3621464 - DNA, 25 bp, Homo sapien
aaacacattccgactggaagcattc

SEQ ID NO: 3621465 - DNA, 25 bp, Homo sapien
ctggttgttggtctttctatgcaga

SEQ ID NO: 3621466 - DNA, 25 bp, Homo sapien
tagactcagcctaatttattgtagg

SEQ ID NO: 3621467 - DNA, 25 bp, Homo sapien
tattgtaggcgacagtcagtggact

SEQ ID NO: 3621468 - DNA, 25 bp, Homo sapien
tcagtggactgacgctaatttgtgt

SEQ ID NO: 3621469 - DNA, 25 bp, Homo sapien
gatctgcaaaggttcagagccccga

SEQ ID NO: 3621470 - DNA, 25 bp, Homo sapien
gcagtaaaccatctagctccacaga

SEQ ID NO: 3621471 - DNA, 25 bp, Homo sapien
caagctattggaggatcaccaccct

SEQ ID NO: 3621472 - DNA, 25 bp, Homo sapien
tgtagtagacagagagtggcatttc

SEQ ID NO: 3621473 - DNA, 25 bp, Homo sapien
tcctggagcgaaatgggccatattg

SEQ ID NO: 3621474 - DNA, 25 bp, Homo sapien
tattggagactacagccaatggagg

SEQ ID NO: 3621475 - DNA, 25 bp, Homo sapien
gaaaaggcttccgtgagagtgatga

SEQ ID NO: 3621476 - DNA, 25 bp, Homo sapien
tcaactatgctagcttcagagccca

SEQ ID NO: 3621477 - DNA, 25 bp, Homo sapien
ggtaaaaatggaagtgcaaggcaca

SEQ ID NO: 3621478 - DNA, 25 bp, Homo sapien
ttgctggagacacacgctgcggcag

SEQ ID NO: 3621479 - DNA, 25 bp, Homo sapien
agtctccagagagtgtggaatggcc

SEQ ID NO: 3621480 - DNA, 25 bp, Homo sapien
tggaatggccattaaggcggccaga

SEQ ID NO: 3621481 - DNA, 25 bp, Homo sapien
gatcttcccaactgacaagtctttg

SEQ ID NO: 3621482 - DNA, 25 bp, Homo sapien
taaactcatggtaactctaggaggc

SEQ ID NO: 3621483 - DNA, 25 bp, Homo sapien
cctgtagtgtcatccgaggcacgga

SEQ ID NO: 3621484 - DNA, 25 bp, Homo sapien
tactctgcgccaggaatggttttct

SEQ ID NO: 3621485 - DNA, 25 bp, Homo sapien
tctgtcagaagaggttcaggagatg

SEQ ID NO: 3621486 - DNA, 25 bp, Homo sapien
gctgcttggtttgggattccacctg

SEQ ID NO: 3621487 - DNA, 25 bp, Homo sapien
gggctcagaacttgtcacactgtct

SEQ ID NO: 3621488 - DNA, 25 bp, Homo sapien
tataagtagatcttggggtgaccag

SEQ ID NO: 3621489 - DNA, 25 bp, Homo sapien
ggaggcaatcttgtccctatctgtg

SEQ ID NO: 3621490 - DNA, 25 bp, Homo sapien
tgccatgcattgaatgaaaggaggc

SEQ ID NO: 3621491 - DNA, 25 bp, Homo sapien
tgggctgctcttgctactgtgcagg

SEQ ID NO: 3621492 - DNA, 25 bp, Homo sapien
tctgtgaggcctttaatcctgggct

SEQ ID NO: 3621493 - DNA, 25 bp, Homo sapien
catagagctgcccttcagcaaatgc

SEQ ID NO: 3621494 - DNA, 25 bp, Homo sapien
tgctcttgaccaatcctcgtgtctg

SEQ ID NO: 3621495 - DNA, 25 bp, Homo sapien
agccagcagcttcggtgaccctttg

SEQ ID NO: 3621496 - DNA, 25 bp, Homo sapien
tgaccctttgttccatgccatagag

SEQ ID NO: 3621497 - DNA, 25 bp, Homo sapien
tgcaggtctgagaacggtgtttggt

SEQ ID NO: 3621498 - DNA, 25 bp, Homo sapien
agaacggtgtttggttacgatcctg

SEQ ID NO: 3621499 - DNA, 25 bp, Homo sapien
ggttacgatcctgggttggcagctc

SEQ ID NO: 3621500 - DNA, 25 bp, Homo sapien
ccagggtgaagtccctcacacctcc

SEQ ID NO: 3621501 - DNA, 25 bp, Homo sapien
tgccagacccaaggacggtaccact

SEQ ID NO: 3621502 - DNA, 25 bp, Homo sapien
cccaaggacggtaccactgtgcctg

SEQ ID NO: 3621503 - DNA, 25 bp, Homo sapien
gacccaaggacggtaccactgtgcc

SEQ ID NO: 3621504 - DNA, 25 bp, Homo sapien
cagacccaaggacggtaccactgtg

SEQ ID NO: 3621505 - DNA, 25 bp, Homo sapien
ggcctgtcagaagcatctttgtgta

SEQ ID NO: 3621506 - DNA, 25 bp, Homo sapien
gcctgtcagaagcatctttgtgtac

SEQ ID NO: 3621507 - DNA, 25 bp, Homo sapien
cttccagacccggaggcaaccaggg

SEQ ID NO: 3621508 - DNA, 25 bp, Homo sapien
tggatgcctggcgtgatcctttctc

SEQ ID NO: 3621509 - DNA, 25 bp, Homo sapien
ttcctctgaggttagcacgaccagc

SEQ ID NO: 3621510 - DNA, 25 bp, Homo sapien
aggttagcacgaccagccttccaga

SEQ ID NO: 3621511 - DNA, 25 bp, Homo sapien
cacatgtgatgtacgctgggacagc

SEQ ID NO: 3621512 - DNA, 25 bp, Homo sapien
aaaaatgtcctagcaccatcttctt

SEQ ID NO: 3621513 - DNA, 25 bp, Homo sapien
gcaccctcagagtgcagggcagaga

SEQ ID NO: 3621514 - DNA, 25 bp, Homo sapien
ctgggcataggcatcttggactgaa

SEQ ID NO: 3621515 - DNA, 25 bp, Homo sapien
ctgttcagagcagagataaacagtt

SEQ ID NO: 3621516 - DNA, 25 bp, Homo sapien
ttcagagcagagataaacagttggc

SEQ ID NO: 3621517 - DNA, 25 bp, Homo sapien
tgttcagagcagagataaacagttg

SEQ ID NO: 3621518 - DNA, 25 bp, Homo sapien
cagagcagagataaacagttggcat

SEQ ID NO: 3621519 - DNA, 25 bp, Homo sapien
tccaaatgtatccattcagaatggt

SEQ ID NO: 3621520 - DNA, 25 bp, Homo sapien
tcactggtatagagcaattgtcaca

SEQ ID NO: 3621521 - DNA, 25 bp, Homo sapien
gaatggtgcaaaattcctataaagt

SEQ ID NO: 3621522 - DNA, 25 bp, Homo sapien
cacaacagtcattaggaagctgaac

SEQ ID NO: 3621523 - DNA, 25 bp, Homo sapien
cccgaggccctgttgattttatgag

SEQ ID NO: 3621524 - DNA, 25 bp, Homo sapien
agtccctgcacctttgatgcaagag

SEQ ID NO: 3621525 - DNA, 25 bp, Homo sapien
gtctgtgggccagctcagaccggct

SEQ ID NO: 3621526 - DNA, 25 bp, Homo sapien
ttctcgatgtgagcaagtccctgca

SEQ ID NO: 3621527 - DNA, 25 bp, Homo sapien
tgcagaagggttcccatgcgaagtg

SEQ ID NO: 3621528 - DNA, 25 bp, Homo sapien
gggaggagacccacactaaggagct

SEQ ID NO: 3621529 - DNA, 25 bp, Homo sapien
gattaagtcatcaggtagagccctt

SEQ ID NO: 3621530 - DNA, 25 bp, Homo sapien
gctcgagggaggaggttcattctct

SEQ ID NO: 3621531 - DNA, 25 bp, Homo sapien
tgcccccaatcttcaaaactgggcc

SEQ ID NO: 3621532 - DNA, 25 bp, Homo sapien
gccttaccactgtcttcacggagaa

SEQ ID NO: 3621533 - DNA, 25 bp, Homo sapien
ggcaactgcttcactacctctgtag

SEQ ID NO: 3621534 - DNA, 25 bp, Homo sapien
aaatgatagcgtttgccctgatgga

SEQ ID NO: 3621535 - DNA, 25 bp, Homo sapien
gaaattccgttcctgctgtggcgcc

SEQ ID NO: 3621536 - DNA, 25 bp, Homo sapien
gcagcacggtatttttccatctccc

SEQ ID NO: 3621537 - DNA, 25 bp, Homo sapien
gcacggtatttttccatctccccac

SEQ ID NO: 3621538 - DNA, 25 bp, Homo sapien
taagcagcacggtatttttccatct

SEQ ID NO: 3621539 - DNA, 25 bp, Homo sapien
ctaagcagcacggtatttttccatc

SEQ ID NO: 3621540 - DNA, 25 bp, Homo sapien
gactcgatagcgctgtcctgggaac

SEQ ID NO: 3621541 - DNA, 25 bp, Homo sapien
tccctttaggtagaccgcgtggagc

SEQ ID NO: 3621542 - DNA, 25 bp, Homo sapien
tagagatgaatagggtgccgacgcc

SEQ ID NO: 3621543 - DNA, 25 bp, Homo sapien
cacaggaatgaaacggcgatgagcc

SEQ ID NO: 3621544 - DNA, 25 bp, Homo sapien
tctgaaaagccttggacctccactc

SEQ ID NO: 3621545 - DNA, 25 bp, Homo sapien
tgatgatcttcactggaggctacaa

SEQ ID NO: 3621546 - DNA, 25 bp, Homo sapien
gacccacggtgttaccaggttatga

SEQ ID NO: 3621547 - DNA, 25 bp, Homo sapien
tactgtgtgtataacccaccctctc

SEQ ID NO: 3621548 - DNA, 25 bp, Homo sapien
gctgagtggcccctatactgtgtgt

SEQ ID NO: 3621549 - DNA, 25 bp, Homo sapien
tatagccaggaacgaggaagttcca

SEQ ID NO: 3621550 - DNA, 25 bp, Homo sapien
tcaaatatagccaggaacgaggaag

SEQ ID NO: 3621551 - DNA, 25 bp, Homo sapien
ggaacgaggaagttccagtgtcagt

SEQ ID NO: 3621552 - DNA, 25 bp, Homo sapien
taaagtcaaatatagccaggaacga

SEQ ID NO: 3621553 - DNA, 25 bp, Homo sapien
agccttccccggctgtaacctgcgg

SEQ ID NO: 3621554 - DNA, 25 bp, Homo sapien
aatgcacagcggaggccacgccgag

SEQ ID NO: 3621555 - DNA, 25 bp, Homo sapien
tgtaacctgcgggtagagacagctg

SEQ ID NO: 3621556 - DNA, 25 bp, Homo sapien
tccccggctgtaacctgcgggtaga

SEQ ID NO: 3621557 - DNA, 25 bp, Homo sapien
ccagcccccctgtagggagagatgt

SEQ ID NO: 3621558 - DNA, 25 bp, Homo sapien
gtagggagagatgtgctgatcgtgc

SEQ ID NO: 3621559 - DNA, 25 bp, Homo sapien
gggagagatgtgctgatcgtgccat

SEQ ID NO: 3621560 - DNA, 25 bp, Homo sapien
tgtccagcccccctgtagggagaga

SEQ ID NO: 3621561 - DNA, 25 bp, Homo sapien
gagacggggttggttggccaggatg

SEQ ID NO: 3621562 - DNA, 25 bp, Homo sapien
agacggggttggttggccaggatgg

SEQ ID NO: 3621563 - DNA, 25 bp, Homo sapien
tctacaggtgaaaaattgaagccca

SEQ ID NO: 3621564 - DNA, 25 bp, Homo sapien
tcatctggctgaatgaggcgctcag

SEQ ID NO: 3621565 - DNA, 25 bp, Homo sapien
caaatgatgtgggagttagaggccc

SEQ ID NO: 3621566 - DNA, 25 bp, Homo sapien
gcagggccaccattgaaagacagga

SEQ ID NO: 3621567 - DNA, 25 bp, Homo sapien
tcgtcagccacgaaggaatctttct

SEQ ID NO: 3621568 - DNA, 25 bp, Homo sapien
agtgtttccaagtgcggatctgtca

SEQ ID NO: 3621569 - DNA, 25 bp, Homo sapien
tatagacaggtcattgagggctggc

SEQ ID NO: 3621570 - DNA, 25 bp, Homo sapien
taactgttaagatagtcgtcagcca

SEQ ID NO: 3621571 - DNA, 25 bp, Homo sapien
tgtgatgcaaagctacctgaaaggc

SEQ ID NO: 3621572 - DNA, 25 bp, Homo sapien
tattcatcctaagcaaatgggagcc

SEQ ID NO: 3621573 - DNA, 25 bp, Homo sapien
gattttgcaagtaagccaagcgagg

SEQ ID NO: 3621574 - DNA, 25 bp, Homo sapien
tacgtacagtcctcaataatgggct

SEQ ID NO: 3621575 - DNA, 25 bp, Homo sapien
aggcctattgctaaatctcccagtg

SEQ ID NO: 3621576 - DNA, 25 bp, Homo sapien
cccctttgttgtgcagccagaagcc

SEQ ID NO: 3621577 - DNA, 25 bp, Homo sapien
cacagtcggtgtttctgtgtctaca

SEQ ID NO: 3621578 - DNA, 25 bp, Homo sapien
ttacataaaacttcacagtcggtgt

SEQ ID NO: 3621579 - DNA, 25 bp, Homo sapien
aaatgagttaacccaaatttgtgtg

SEQ ID NO: 3621580 - DNA, 25 bp, Homo sapien
ctggaaatgagttaacccaaatttg

SEQ ID NO: 3621581 - DNA, 25 bp, Homo sapien
ccttctggcaagcccaactatccaa

SEQ ID NO: 3621582 - DNA, 25 bp, Homo sapien
tgagttaacccaaatttgtgtgcct

SEQ ID NO: 3621583 - DNA, 25 bp, Homo sapien
tctccgagcaaaacgagggacactg

SEQ ID NO: 3621584 - DNA, 25 bp, Homo sapien
cagtccagagtagtgcacgcaaaca

SEQ ID NO: 3621585 - DNA, 25 bp, Homo sapien
tatataggaaagagacccagggtgg

SEQ ID NO: 3621586 - DNA, 25 bp, Homo sapien
gcttgcccaggtcaggatgtctccg

SEQ ID NO: 3621587 - DNA, 25 bp, Homo sapien
ggagctcccctttgagggactgagg

SEQ ID NO: 3621588 - DNA, 25 bp, Homo sapien
ggaaacctgggcgtcagtgacagct

SEQ ID NO: 3621589 - DNA, 25 bp, Homo sapien
ggaggcacaggatgtactgagaagg

SEQ ID NO: 3621590 - DNA, 25 bp, Homo sapien
cagggatggtgggtctgagcaacgc

SEQ ID NO: 3621591 - DNA, 25 bp, Homo sapien
taacagcttggcaatcagagaacgc

SEQ ID NO: 3621592 - DNA, 25 bp, Homo sapien
aatcagagaacgctgtgtgcacgga

SEQ ID NO: 3621593 - DNA, 25 bp, Homo sapien
gctccgcggggatgaagtgtcccat

SEQ ID NO: 3621594 - DNA, 25 bp, Homo sapien
gctcccttccgcagagtgcttaaca

SEQ ID NO: 3621595 - DNA, 25 bp, Homo sapien
gaagaggcggaagagctgtgcatgc

SEQ ID NO: 3621596 - DNA, 25 bp, Homo sapien
tgacaaagactgttctgagatccgc

SEQ ID NO: 3621597 - DNA, 25 bp, Homo sapien
actgaaagccccttgccctgattct

SEQ ID NO: 3621598 - DNA, 25 bp, Homo sapien
ggcattctgcttcgagaagaggcgg

SEQ ID NO: 3621599 - DNA, 25 bp, Homo sapien
tggaaggactcagcgcttgcagtca

SEQ ID NO: 3621600 - DNA, 25 bp, Homo sapien
tgaactggaggactatcgcactgcc

SEQ ID NO: 3621601 - DNA, 25 bp, Homo sapien
gcatccattacatcggcgccaggaa

SEQ ID NO: 3621602 - DNA, 25 bp, Homo sapien
gacatctctccccattgagaccatt

SEQ ID NO: 3621603 - DNA, 25 bp, Homo sapien
ggagaaggcagcgaggaaccccgca

SEQ ID NO: 3621604 - DNA, 25 bp, Homo sapien
ggaggagaaggcagcgaggaacccc

SEQ ID NO: 3621605 - DNA, 25 bp, Homo sapien
tgcagcaggtttgcacagggtgcca

SEQ ID NO: 3621606 - DNA, 25 bp, Homo sapien
cagggtgccagttagggaggagaag

SEQ ID NO: 3621607 - DNA, 25 bp, Homo sapien
agggatgtcatagcagccgtctgca

SEQ ID NO: 3621608 - DNA, 25 bp, Homo sapien
gaacagggatgtcatagcagccgtc

SEQ ID NO: 3621609 - DNA, 25 bp, Homo sapien
aggaacagggatgtcatagcagccg

SEQ ID NO: 3621610 - DNA, 25 bp, Homo sapien
gatgtcatagcagccgtctgcatgg

SEQ ID NO: 3621611 - DNA, 25 bp, Homo sapien
gactgacaggtaatgtttgtggcag

SEQ ID NO: 3621612 - DNA, 25 bp, Homo sapien
ggccttgcagattgagttctcctct

SEQ ID NO: 3621613 - DNA, 25 bp, Homo sapien
tctctactatcatgggccttgcaga

SEQ ID NO: 3621614 - DNA, 25 bp, Homo sapien
caccggaaccaggctgatgggcact

SEQ ID NO: 3621615 - DNA, 25 bp, Homo sapien
tctggttactatggcatgcacatcc

SEQ ID NO: 3621616 - DNA, 25 bp, Homo sapien
ggttactatggcatgcacatcctgc

SEQ ID NO: 3621617 - DNA, 25 bp, Homo sapien
agccacagccgtgggtgtagacggc

SEQ ID NO: 3621618 - DNA, 25 bp, Homo sapien
aggttctggttactatggcatgcac

SEQ ID NO: 3621619 - DNA, 25 bp, Homo sapien
gaggtgttaccctcactcctgacag

SEQ ID NO: 3621620 - DNA, 25 bp, Homo sapien
ggaggtgttaccctcactcctgaca

SEQ ID NO: 3621621 - DNA, 25 bp, Homo sapien
cagcggaccacatggcaggaaatca

SEQ ID NO: 3621622 - DNA, 25 bp, Homo sapien
acagccctggctggcgggaagtgac

SEQ ID NO: 3621623 - DNA, 25 bp, Homo sapien
cagctgttagatgagtagggagcat

SEQ ID NO: 3621624 - DNA, 25 bp, Homo sapien
tagaaacaccgaggagcagctgtta

SEQ ID NO: 3621625 - DNA, 25 bp, Homo sapien
cctggggccagattctgggactagg

SEQ ID NO: 3621626 - DNA, 25 bp, Homo sapien
ctgttggagtcacctggggccagat

SEQ ID NO: 3621627 - DNA, 25 bp, Homo sapien
ggggccagattctgggactaggcat

SEQ ID NO: 3621628 - DNA, 25 bp, Homo sapien
cacctggggccagattctgggacta

SEQ ID NO: 3621629 - DNA, 25 bp, Homo sapien
ccagctgatggcagcgtgcgtccag

SEQ ID NO: 3621630 - DNA, 25 bp, Homo sapien
agcgtgcgtccagggcggagaggtc

SEQ ID NO: 3621631 - DNA, 25 bp, Homo sapien
cggagaggtcgtgctactcaggtgt

SEQ ID NO: 3621632 - DNA, 25 bp, Homo sapien
gtcgtgctactcaggtgtgcactga

SEQ ID NO: 3621633 - DNA, 25 bp, Homo sapien
ctgcggcttcttagcaaaaccgcgg

SEQ ID NO: 3621634 - DNA, 25 bp, Homo sapien
ttcttagcaaaaccgcggactctgg

SEQ ID NO: 3621635 - DNA, 25 bp, Homo sapien
gcttcttagcaaaaccgcggactct

SEQ ID NO: 3621636 - DNA, 25 bp, Homo sapien
cggcttcttagcaaaaccgcggact

SEQ ID NO: 3621637 - DNA, 25 bp, Homo sapien
gtgcaagggaaagccctgggacctg

SEQ ID NO: 3621638 - DNA, 25 bp, Homo sapien
ctctcgcacgatccggccaagagat

SEQ ID NO: 3621639 - DNA, 25 bp, Homo sapien
gccagggatgaaggtgcaagggaaa

SEQ ID NO: 3621640 - DNA, 25 bp, Homo sapien
gctctggcgaccccggaagcgagaa

SEQ ID NO: 3621641 - DNA, 25 bp, Homo sapien
cccgggagtgggagcacgatgctga

SEQ ID NO: 3621642 - DNA, 25 bp, Homo sapien
aactgaagataatgcctctctcccg

SEQ ID NO: 3621643 - DNA, 25 bp, Homo sapien
agtgggagcacgatgctgacacacc

SEQ ID NO: 3621644 - DNA, 25 bp, Homo sapien
tgtaaactgaagataatgcctctct

SEQ ID NO: 3621645 - DNA, 25 bp, Homo sapien
ttcgcagcagctctttttggtgagt

SEQ ID NO: 3621646 - DNA, 25 bp, Homo sapien
cttcgcagcagctctttttggtgag

SEQ ID NO: 3621647 - DNA, 25 bp, Homo sapien
gtatacaaatatctccatatgagac

SEQ ID NO: 3621648 - DNA, 25 bp, Homo sapien
catatgagacataagcacgccctcc

SEQ ID NO: 3621649 - DNA, 25 bp, Homo sapien
gggcagcctgttcaccaaccagttt

SEQ ID NO: 3621650 - DNA, 25 bp, Homo sapien
tcatcccgtgtttcaaagctcagag

SEQ ID NO: 3621651 - DNA, 25 bp, Homo sapien
aaactctcacatccacggcaccacg

SEQ ID NO: 3621652 - DNA, 25 bp, Homo sapien
gcttccatccatgatgtgcccctgt

SEQ ID NO: 3621653 - DNA, 25 bp, Homo sapien
ggtcgcgccgattcacatgctgtgc

SEQ ID NO: 3621654 - DNA, 25 bp, Homo sapien
cctgtggcgggataattgggaaaca

SEQ ID NO: 3621655 - DNA, 25 bp, Homo sapien
ggacttgggccaaaagcacgtgctg

SEQ ID NO: 3621656 - DNA, 25 bp, Homo sapien
attcagccatgagcaaaactacctg

SEQ ID NO: 3621657 - DNA, 25 bp, Homo sapien
acagtaaccaggcatcagcaaatct

SEQ ID NO: 3621658 - DNA, 25 bp, Homo sapien
gcatcagcaaatctgtgcgtgggac

SEQ ID NO: 3621659 - DNA, 25 bp, Homo sapien
gtgggaaagacccatgcaaaggcca

SEQ ID NO: 3621660 - DNA, 25 bp, Homo sapien
ttcagggtgggaaagacccatgcaa

SEQ ID NO: 3621661 - DNA, 25 bp, Homo sapien
agggtgggaaagacccatgcaaagg

SEQ ID NO: 3621662 - DNA, 25 bp, Homo sapien
gggaaagacccatgcaaaggccagg

SEQ ID NO: 3621663 - DNA, 25 bp, Homo sapien
caggagctgatcatcctgatcattc

SEQ ID NO: 3621664 - DNA, 25 bp, Homo sapien
cctttggaatcggtggagctttgca

SEQ ID NO: 3621665 - DNA, 25 bp, Homo sapien
tttgcagggcattccaacaaccatc

SEQ ID NO: 3621666 - DNA, 25 bp, Homo sapien
tagtccaggagctgatcatcctgat

SEQ ID NO: 3621667 - DNA, 25 bp, Homo sapien
gtcacgggtcatcagccacattggg

SEQ ID NO: 3621668 - DNA, 25 bp, Homo sapien
tgagatggtgtgacccgtcctttct

SEQ ID NO: 3621669 - DNA, 25 bp, Homo sapien
ctttctcctgtaggtcacgggtcat

SEQ ID NO: 3621670 - DNA, 25 bp, Homo sapien
gggcacggtctgacagctctatctg

SEQ ID NO: 3621671 - DNA, 25 bp, Homo sapien
caacgtggagaaggcttccagctca

SEQ ID NO: 3621672 - DNA, 25 bp, Homo sapien
gagaaggcttccagctcacagccct

SEQ ID NO: 3621673 - DNA, 25 bp, Homo sapien
tggagaaggcttccagctcacagcc

SEQ ID NO: 3621674 - DNA, 25 bp, Homo sapien
acgtggagaaggcttccagctcaca

SEQ ID NO: 3621675 - DNA, 25 bp, Homo sapien
tgcttccacatccatttcaataggc

SEQ ID NO: 3621676 - DNA, 25 bp, Homo sapien
gcttccacatccatttcaataggca

SEQ ID NO: 3621677 - DNA, 25 bp, Homo sapien
ctgcttccacatccatttcaatagg

SEQ ID NO: 3621678 - DNA, 25 bp, Homo sapien
ggacggccaaaggacctctcctgca

SEQ ID NO: 3621679 - DNA, 25 bp, Homo sapien
gcagacccaccatcgccgaggacgg

SEQ ID NO: 3621680 - DNA, 25 bp, Homo sapien
gccgaggacggccaaaggacctctc

SEQ ID NO: 3621681 - DNA, 25 bp, Homo sapien
caccatcgccgaggacggccaaagg

SEQ ID NO: 3621682 - DNA, 25 bp, Homo sapien
tcactgcgttggtttctattgtgat

SEQ ID NO: 3621683 - DNA, 25 bp, Homo sapien
tgcgttggtttctattgtgatgtct

SEQ ID NO: 3621684 - DNA, 25 bp, Homo sapien
aagcattcctttaaacttcctgtca

SEQ ID NO: 3621685 - DNA, 25 bp, Homo sapien
cactgcgttggtttctattgtgatg

SEQ ID NO: 3621686 - DNA, 25 bp, Homo sapien
gaaggtgaacctagaatgcacaagg

SEQ ID NO: 3621687 - DNA, 25 bp, Homo sapien
tgtcatgtagactatggctcagctg

SEQ ID NO: 3621688 - DNA, 25 bp, Homo sapien
cccagaatttcaggatgaggcagct

SEQ ID NO: 3621689 - DNA, 25 bp, Homo sapien
tgtggcatccaatgtgggcgattga

SEQ ID NO: 3621690 - DNA, 25 bp, Homo sapien
aatgaggtggccgctagtcagcgct

SEQ ID NO: 3621691 - DNA, 25 bp, Homo sapien
cagcgctggagccatttctcgacgg

SEQ ID NO: 3621692 - DNA, 25 bp, Homo sapien
gggatacagaaggatgcaaaatgag

SEQ ID NO: 3621693 - DNA, 25 bp, Homo sapien
atgaggcaacctagccacccaactg

SEQ ID NO: 3621694 - DNA, 25 bp, Homo sapien
caacctcaacggtgcttttttctga

SEQ ID NO: 3621695 - DNA, 25 bp, Homo sapien
ctgagctcaaatgctgaccccagtg

SEQ ID NO: 3621696 - DNA, 25 bp, Homo sapien
ttctgatcatagctgagctcaaatg

SEQ ID NO: 3621697 - DNA, 25 bp, Homo sapien
cactgcaacctcaacggtgcttttt

SEQ ID NO: 3621698 - DNA, 25 bp, Homo sapien
taggacatactacgtacaggtgctg

SEQ ID NO: 3621699 - DNA, 25 bp, Homo sapien
tctttgcaaaacgtatggagtcctt

SEQ ID NO: 3621700 - DNA, 25 bp, Homo sapien
caattagcttggctgtagtgaccac

SEQ ID NO: 3621701 - DNA, 25 bp, Homo sapien
caaatttcaggagagggtcaaactc

SEQ ID NO: 3621702 - DNA, 25 bp, Homo sapien
ctgacagagcttctattccccggca

SEQ ID NO: 3621703 - DNA, 25 bp, Homo sapien
tgaggaccaagatccagacgagact

SEQ ID NO: 3621704 - DNA, 25 bp, Homo sapien
gatccagacagttgctgaggaccaa

SEQ ID NO: 3621705 - DNA, 25 bp, Homo sapien
tgggcacccaaaactaagggatctg

SEQ ID NO: 3621706 - DNA, 25 bp, Homo sapien
gacagagacagcaaatcagcccaaa

SEQ ID NO: 3621707 - DNA, 25 bp, Homo sapien
gcaaagtgatgacgctgccactcag

SEQ ID NO: 3621708 - DNA, 25 bp, Homo sapien
gcagcgccgtctcttggatggttta

SEQ ID NO: 3621709 - DNA, 25 bp, Homo sapien
caaagaacagacataaaccggcgct

SEQ ID NO: 3621710 - DNA, 25 bp, Homo sapien
cctagaaacccaggattccgaggag

SEQ ID NO: 3621711 - DNA, 25 bp, Homo sapien
catctggacaaaagcaggatccggg

SEQ ID NO: 3621712 - DNA, 25 bp, Homo sapien
agtaagtgactggtgctccgaggcc

SEQ ID NO: 3621713 - DNA, 25 bp, Homo sapien
agagcccacaagcttccgagtgcgt

SEQ ID NO: 3621714 - DNA, 25 bp, Homo sapien
gctctgtccaatgctctgaactggg

SEQ ID NO: 3621715 - DNA, 25 bp, Homo sapien
gagtctgaaaacttgggatgtcggc

SEQ ID NO: 3621716 - DNA, 25 bp, Homo sapien
gaccgtctcggttttcactgcaggg

SEQ ID NO: 3621717 - DNA, 25 bp, Homo sapien
gggacagtccgcatgcagctctgag

SEQ ID NO: 3621718 - DNA, 25 bp, Homo sapien
ggccccactgcaggaagcttgagca

SEQ ID NO: 3621719 - DNA, 25 bp, Homo sapien
gtgtctgagccctgccattcggagg

SEQ ID NO: 3621720 - DNA, 25 bp, Homo sapien
gaagctcgcctcagaggaagatccc

SEQ ID NO: 3621721 - DNA, 25 bp, Homo sapien
cctgccattcggaggcatcaccgag

SEQ ID NO: 3621722 - DNA, 25 bp, Homo sapien
ctcctcatttgttgttagggccagt

SEQ ID NO: 3621723 - DNA, 25 bp, Homo sapien
gcagaaagcagagaacttggcttct

SEQ ID NO: 3621724 - DNA, 25 bp, Homo sapien
catttgttgttagggccagtcccta

SEQ ID NO: 3621725 - DNA, 25 bp, Homo sapien
aagcagagaacttggcttctcctca

SEQ ID NO: 3621726 - DNA, 25 bp, Homo sapien
gccttataccaagccaaagtgctga

SEQ ID NO: 3621727 - DNA, 25 bp, Homo sapien
tcttgctcagcttaaaataggcctc

SEQ ID NO: 3621728 - DNA, 25 bp, Homo sapien
catcgtttccatgtgtgcagcagaa

SEQ ID NO: 3621729 - DNA, 25 bp, Homo sapien
gccagctcgctgtatgtgcacatcg

SEQ ID NO: 3621730 - DNA, 25 bp, Homo sapien
cagttcccggttccccactgagatt

SEQ ID NO: 3621731 - DNA, 25 bp, Homo sapien
agctgatgcctgtaagaccgacaaa

SEQ ID NO: 3621732 - DNA, 25 bp, Homo sapien
ccttgtcgagttgaccctgagtctg

SEQ ID NO: 3621733 - DNA, 25 bp, Homo sapien
tctgcatcagctcaaacgcagttcc

SEQ ID NO: 3621734 - DNA, 25 bp, Homo sapien
gcttgaacattgttatccatgcatg

SEQ ID NO: 3621735 - DNA, 25 bp, Homo sapien
tgcggttactgtggcttgaacattg

SEQ ID NO: 3621736 - DNA, 25 bp, Homo sapien
gtttaccagtgtgcggttactgtgg

SEQ ID NO: 3621737 - DNA, 25 bp, Homo sapien
ttgttatccatgcatggtacttctc

SEQ ID NO: 3621738 - DNA, 25 bp, Homo sapien
tgagagttgacatgatgtggacata

SEQ ID NO: 3621739 - DNA, 25 bp, Homo sapien
catagctgtatcctcttcattgagc

SEQ ID NO: 3621740 - DNA, 25 bp, Homo sapien
gagaggactgagttgggtgggagaa

SEQ ID NO: 3621741 - DNA, 25 bp, Homo sapien
ctctacaatcagtgagagttgacat

SEQ ID NO: 3621742 - DNA, 25 bp, Homo sapien
aggttacttgatgcgtccctcaaca

SEQ ID NO: 3621743 - DNA, 25 bp, Homo sapien
tctcgtaggttacttgatgcgtccc

SEQ ID NO: 3621744 - DNA, 25 bp, Homo sapien
cgtaggttacttgatgcgtccctca

SEQ ID NO: 3621745 - DNA, 25 bp, Homo sapien
cattttctcgtaggttacttgatgc

SEQ ID NO: 3621746 - DNA, 25 bp, Homo sapien
ggagctgcggctgtatcttttcttt

SEQ ID NO: 3621747 - DNA, 25 bp, Homo sapien
tagttggcatggaaagcagagtcct

SEQ ID NO: 3621748 - DNA, 25 bp, Homo sapien
tcagaggtacactgtcaactgtatg

SEQ ID NO: 3621749 - DNA, 25 bp, Homo sapien
tttctggtgtttccagatgcccaag

SEQ ID NO: 3621750 - DNA, 25 bp, Homo sapien
tgcaggcacagaaaagacggttggc

SEQ ID NO: 3621751 - DNA, 25 bp, Homo sapien
aataaacaggcaacttttcctattg

SEQ ID NO: 3621752 - DNA, 25 bp, Homo sapien
tagggccatctggaataaacaggca

SEQ ID NO: 3621753 - DNA, 25 bp, Homo sapien
aagacggttggcttactagggccat

SEQ ID NO: 3621754 - DNA, 25 bp, Homo sapien
tgaatattgagggtcctccccgcct

SEQ ID NO: 3621755 - DNA, 25 bp, Homo sapien
tcaataggaaaaccaatattcaaca

SEQ ID NO: 3621756 - DNA, 25 bp, Homo sapien
gggccctaacacctcaaaatgaaga

SEQ ID NO: 3621757 - DNA, 25 bp, Homo sapien
ttgcaacttgactctcaataggaaa

SEQ ID NO: 3621758 - DNA, 25 bp, Homo sapien
ctcaaatagcgtacccctgggcata

SEQ ID NO: 3621759 - DNA, 25 bp, Homo sapien
ccgctctacagggaacagtgtttga

SEQ ID NO: 3621760 - DNA, 25 bp, Homo sapien
gatggatcaagaggtctccaccgct

SEQ ID NO: 3621761 - DNA, 25 bp, Homo sapien
tgagaagtgcacactcgggaaccag

SEQ ID NO: 3621762 - DNA, 25 bp, Homo sapien
caatgggttgcctacttgacaagaa

SEQ ID NO: 3621763 - DNA, 25 bp, Homo sapien
aatgtgcaggccctagtcgtgggac

SEQ ID NO: 3621764 - DNA, 25 bp, Homo sapien
tttttagccagacgtccagggaata

SEQ ID NO: 3621765 - DNA, 25 bp, Homo sapien
taaagccgtgtgtatctcctggtca

SEQ ID NO: 3621766 - DNA, 25 bp, Homo sapien
caagtatagagtaagcaaacgacag

SEQ ID NO: 3621767 - DNA, 25 bp, Homo sapien
tgtaaacataggactgccttgctag

SEQ ID NO: 3621768 - DNA, 25 bp, Homo sapien
aacgacagtaatgccttaggacagc

SEQ ID NO: 3621769 - DNA, 25 bp, Homo sapien
tgcaactttcaaaactcgtgggtgt

SEQ ID NO: 3621770 - DNA, 25 bp, Homo sapien
caaattcagttaaaggcagtcctca

SEQ ID NO: 3621771 - DNA, 25 bp, Homo sapien
tgatatgagcctgttcactgaaccg

SEQ ID NO: 3621772 - DNA, 25 bp, Homo sapien
gaacacaagatccttctcagacggg

SEQ ID NO: 3621773 - DNA, 25 bp, Homo sapien
gacgcctaccaggaaatcgatgtga

SEQ ID NO: 3621774 - DNA, 25 bp, Homo sapien
gcttcaactctattgctcgcagggc

SEQ ID NO: 3621775 - DNA, 25 bp, Homo sapien
ggctgcttcaactctattgctcgca

SEQ ID NO: 3621776 - DNA, 25 bp, Homo sapien
cagaggctgcttcaactctattgct

SEQ ID NO: 3621777 - DNA, 25 bp, Homo sapien
cagcagaggctgcttcaactctatt

SEQ ID NO: 3621778 - DNA, 25 bp, Homo sapien
tgcactctccggatggtagggtacg

SEQ ID NO: 3621779 - DNA, 25 bp, Homo sapien
tcgggatgcctcctatagaagcggt

SEQ ID NO: 3621780 - DNA, 25 bp, Homo sapien
tggacccggccattctcaaagtaag

SEQ ID NO: 3621781 - DNA, 25 bp, Homo sapien
gatgctgcaaggacaactctgcggg

SEQ ID NO: 3621782 - DNA, 25 bp, Homo sapien
ccaaagggttcagtggtgacatcgg

SEQ ID NO: 3621783 - DNA, 25 bp, Homo sapien
ttcagtggtgacatcgggcctagca

SEQ ID NO: 3621784 - DNA, 25 bp, Homo sapien
catcgggcctagcaaaggaggagta

SEQ ID NO: 3621785 - DNA, 25 bp, Homo sapien
ttatctggaccaaagggttcagtgg

SEQ ID NO: 3621786 - DNA, 25 bp, Homo sapien
cacagaggtggatgaagcagtgaca

SEQ ID NO: 3621787 - DNA, 25 bp, Homo sapien
tggacagctgtagccatgggacact

SEQ ID NO: 3621788 - DNA, 25 bp, Homo sapien
taaaggcaatgcatcgtccacagag

SEQ ID NO: 3621789 - DNA, 25 bp, Homo sapien
ggtcatccatggctcgaggttcagg

SEQ ID NO: 3621790 - DNA, 25 bp, Homo sapien
gataacaacacaccctgctgaaaag

SEQ ID NO: 3621791 - DNA, 25 bp, Homo sapien
gggaactatctcatggaaaccagcc

SEQ ID NO: 3621792 - DNA, 25 bp, Homo sapien
tctctcattgaaacaggcacctgac

SEQ ID NO: 3621793 - DNA, 25 bp, Homo sapien
taaatgcgagatgaggttgcctatg

SEQ ID NO: 3621794 - DNA, 25 bp, Homo sapien
ttaatcctatattggttgctgcttg

SEQ ID NO: 3621795 - DNA, 25 bp, Homo sapien
aatcctatattggttgctgcttgta

SEQ ID NO: 3621796 - DNA, 25 bp, Homo sapien
atcctatattggttgctgcttgtac

SEQ ID NO: 3621797 - DNA, 25 bp, Homo sapien
atttaatcctatattggttgctgct

SEQ ID NO: 3621798 - DNA, 25 bp, Homo sapien
tgccccacaactggtggctgctctg

SEQ ID NO: 3621799 - DNA, 25 bp, Homo sapien
ctgccccacaactggtggctgctct

SEQ ID NO: 3621800 - DNA, 25 bp, Homo sapien
gccccacaactggtggctgctctgc

SEQ ID NO: 3621801 - DNA, 25 bp, Homo sapien
ccccacaactggtggctgctctgca

SEQ ID NO: 3621802 - DNA, 25 bp, Homo sapien
tagttctgtgcgtgcgctgaagtgt

SEQ ID NO: 3621803 - DNA, 25 bp, Homo sapien
gattagttctgtgcgtgcgctgaag

SEQ ID NO: 3621804 - DNA, 25 bp, Homo sapien
acgattagttctgtgcgtgcgctga

SEQ ID NO: 3621805 - DNA, 25 bp, Homo sapien
ggacgattagttctgtgcgtgcgct

SEQ ID NO: 3621806 - DNA, 25 bp, Homo sapien
gattatcttcagttgtagccaccgc

SEQ ID NO: 3621807 - DNA, 25 bp, Homo sapien
cataatttgtatacccagcctgaga

SEQ ID NO: 3621808 - DNA, 25 bp, Homo sapien
taatgctagcgccaacattcgggca

SEQ ID NO: 3621809 - DNA, 25 bp, Homo sapien
gctctgctggtcgatcggtttggaa

SEQ ID NO: 3621810 - DNA, 25 bp, Homo sapien
aaggctagctgtggacaaatttctc

SEQ ID NO: 3621811 - DNA, 25 bp, Homo sapien
ttctctcttaaaaggcacagatggc

SEQ ID NO: 3621812 - DNA, 25 bp, Homo sapien
taaatggaaagccaaacactcccca

SEQ ID NO: 3621813 - DNA, 25 bp, Homo sapien
gaatcaagagctacgcagttgtgca

SEQ ID NO: 3621814 - DNA, 25 bp, Homo sapien
tatcataggagttacagcggttccc

SEQ ID NO: 3621815 - DNA, 25 bp, Homo sapien
tcttcggagagaaagcatagacgac

SEQ ID NO: 3621816 - DNA, 25 bp, Homo sapien
ccaatgtctggtgggctcaagtcaa

SEQ ID NO: 3621817 - DNA, 25 bp, Homo sapien
aatgacttctgacacccgtggtggt

SEQ ID NO: 3621818 - DNA, 25 bp, Homo sapien
atggagagatgtaagagactcctca

SEQ ID NO: 3621819 - DNA, 25 bp, Homo sapien
ttagctgaacggagggttccttctg

SEQ ID NO: 3621820 - DNA, 25 bp, Homo sapien
ggagagatgtaagagactcctcact

SEQ ID NO: 3621821 - DNA, 25 bp, Homo sapien
catcaactgcatggagagatgtaag

SEQ ID NO: 3621822 - DNA, 25 bp, Homo sapien
tgcagctttcgtttagaaacagatg

SEQ ID NO: 3621823 - DNA, 25 bp, Homo sapien
tacccacaggagactttttcatctt

SEQ ID NO: 3621824 - DNA, 25 bp, Homo sapien
ttgaaaaaggaacgccagctaccca

SEQ ID NO: 3621825 - DNA, 25 bp, Homo sapien
actctcattccgctgcagctttcgt

SEQ ID NO: 3621826 - DNA, 25 bp, Homo sapien
tacatgacattgtaaagcaagaatc

SEQ ID NO: 3621827 - DNA, 25 bp, Homo sapien
aagcggtaagtatcatccatattcg

SEQ ID NO: 3621828 - DNA, 25 bp, Homo sapien
ataaacaggtttctctgggactagc

SEQ ID NO: 3621829 - DNA, 25 bp, Homo sapien
gcatcattccccatgaagcggtaag

SEQ ID NO: 3621830 - DNA, 25 bp, Homo sapien
tcatatcccaaaataggatttaaca

SEQ ID NO: 3621831 - DNA, 25 bp, Homo sapien
gacctgagcttgtgttcgtgcctgg

SEQ ID NO: 3621832 - DNA, 25 bp, Homo sapien
caggtccttctcctacttcgatata

SEQ ID NO: 3621833 - DNA, 25 bp, Homo sapien
gggcctcttccaatgtcagcagttt

SEQ ID NO: 3621834 - DNA, 25 bp, Homo sapien
cacaattggagaattgacctgagct

SEQ ID NO: 3621835 - DNA, 25 bp, Homo sapien
tcttgcatggccatgctgattctgc

SEQ ID NO: 3621836 - DNA, 25 bp, Homo sapien
gcatggccatgctgattctgccgct

SEQ ID NO: 3621837 - DNA, 25 bp, Homo sapien
tggccatgctgattctgccgctgaa

SEQ ID NO: 3621838 - DNA, 25 bp, Homo sapien
ttgcatggccatgctgattctgccg

SEQ ID NO: 3621839 - DNA, 25 bp, Homo sapien
gactgaatcctcacttccatgaaag

SEQ ID NO: 3621840 - DNA, 25 bp, Homo sapien
cacagactgaatcctcacttccatg

SEQ ID NO: 3621841 - DNA, 25 bp, Homo sapien
tgaagcaggcagattctatctgttt

SEQ ID NO: 3621842 - DNA, 25 bp, Homo sapien
tgaactcaacaaccacagactgaat

SEQ ID NO: 3621843 - DNA, 25 bp, Homo sapien
gtgatggaacaatagtcagctagaa

SEQ ID NO: 3621844 - DNA, 25 bp, Homo sapien
tagtcagctagaagagacaagtgtc

SEQ ID NO: 3621845 - DNA, 25 bp, Homo sapien
tagaagagacaagtgtctcatcagg

SEQ ID NO: 3621846 - DNA, 25 bp, Homo sapien
tttggagcccaaacaattgctagat

SEQ ID NO: 3621847 - DNA, 25 bp, Homo sapien
ttacaggtcaaccgacttctacctc

SEQ ID NO: 3621848 - DNA, 25 bp, Homo sapien
aggtcaaccgacttctacctctgcc

SEQ ID NO: 3621849 - DNA, 25 bp, Homo sapien
acaggtcaaccgacttctacctctg

SEQ ID NO: 3621850 - DNA, 25 bp, Homo sapien
atggaagtttaattagaactccaag

SEQ ID NO: 3621851 - DNA, 25 bp, Homo sapien
gagctgctggatgacatcgtggatt

SEQ ID NO: 3621852 - DNA, 25 bp, Homo sapien
ctggatgacatcgtggatttttatc

SEQ ID NO: 3621853 - DNA, 25 bp, Homo sapien
catctgttgctgctgaaactgcatc

SEQ ID NO: 3621854 - DNA, 25 bp, Homo sapien
atgacatcgtggatttttatcagcc

SEQ ID NO: 3621855 - DNA, 25 bp, Homo sapien
catacggttctttcgtcaggtcggg

SEQ ID NO: 3621856 - DNA, 25 bp, Homo sapien
cagctggtaggtaagcagagggttt

SEQ ID NO: 3621857 - DNA, 25 bp, Homo sapien
ccggaagtacagcttacatagggaa

SEQ ID NO: 3621858 - DNA, 25 bp, Homo sapien
gcttacatagggaacccacagaatg

SEQ ID NO: 3621859 - DNA, 25 bp, Homo sapien
agaagaggacaagcaaatcatttga

SEQ ID NO: 3621860 - DNA, 25 bp, Homo sapien
cagaagaggacaagcaaatcatttg

SEQ ID NO: 3621861 - DNA, 25 bp, Homo sapien
gaagaggacaagcaaatcatttgat

SEQ ID NO: 3621862 - DNA, 25 bp, Homo sapien
acagaagaggacaagcaaatcattt

SEQ ID NO: 3621863 - DNA, 25 bp, Homo sapien
tagtctctggatattggaggcaaca

SEQ ID NO: 3621864 - DNA, 25 bp, Homo sapien
ctctcaatgaatgctgtgcagcttt

SEQ ID NO: 3621865 - DNA, 25 bp, Homo sapien
accagaaaggcgatagattccatcc

SEQ ID NO: 3621866 - DNA, 25 bp, Homo sapien
tccacgatgccatatctctcaatga

SEQ ID NO: 3621867 - DNA, 25 bp, Homo sapien
gcaggggtcacacttatctctgtat

SEQ ID NO: 3621868 - DNA, 25 bp, Homo sapien
catttttgtgcaggggtcacactta

SEQ ID NO: 3621869 - DNA, 25 bp, Homo sapien
tttgtgcaggggtcacacttatctc

SEQ ID NO: 3621870 - DNA, 25 bp, Homo sapien
ggtcacacttatctctgtattgttc

SEQ ID NO: 3621871 - DNA, 25 bp, Homo sapien
cccaggtcacaaccaaacaccctct

SEQ ID NO: 3621872 - DNA, 25 bp, Homo sapien
cctctctttcaagattccccgctgc

SEQ ID NO: 3621873 - DNA, 25 bp, Homo sapien
cagaatttagaaggtgttcccccag

SEQ ID NO: 3621874 - DNA, 25 bp, Homo sapien
tctctttcaagattccccgctgctt

SEQ ID NO: 3621875 - DNA, 25 bp, Homo sapien
gaatgttcgtaagaacgtaatgagc

SEQ ID NO: 3621876 - DNA, 25 bp, Homo sapien
gaacgtaatgagcttgccgtgcttt

SEQ ID NO: 3621877 - DNA, 25 bp, Homo sapien
tcgtaagaacgtaatgagcttgccg

SEQ ID NO: 3621878 - DNA, 25 bp, Homo sapien
aatgagcttgccgtgctttttagac

SEQ ID NO: 3621879 - DNA, 25 bp, Homo sapien
tttattatgctgacacatgttcctt

SEQ ID NO: 3621880 - DNA, 25 bp, Homo sapien
gtaagatgctagctatgggtctgta

SEQ ID NO: 3621881 - DNA, 25 bp, Homo sapien
gctgacacatgttccttctatatat

SEQ ID NO: 3621882 - DNA, 25 bp, Homo sapien
ctagctatgggtctgtagtatatgg

SEQ ID NO: 3621883 - DNA, 25 bp, Homo sapien
cagattaggtcctatgttgattttc

SEQ ID NO: 3621884 - DNA, 25 bp, Homo sapien
tttgtgtgacctaacatgtggtcta

SEQ ID NO: 3621885 - DNA, 25 bp, Homo sapien
cagatttgtgtgacctaacatgtgg

SEQ ID NO: 3621886 - DNA, 25 bp, Homo sapien
tttcagatttgtgtgacctaacatg

SEQ ID NO: 3621887 - DNA, 25 bp, Homo sapien
ttccaggatgaactagtactacttg

SEQ ID NO: 3621888 - DNA, 25 bp, Homo sapien
aagatttgcattttaccagaagcag

SEQ ID NO: 3621889 - DNA, 25 bp, Homo sapien
tagtactatctcaggaagacatgct

SEQ ID NO: 3621890 - DNA, 25 bp, Homo sapien
taacttgctgactttaccacctcgg

SEQ ID NO: 3621891 - DNA, 25 bp, Homo sapien
tgccaataccaaagaggcggggaag

SEQ ID NO: 3621892 - DNA, 25 bp, Homo sapien
caatgccaataccaaagaggcgggg

SEQ ID NO: 3621893 - DNA, 25 bp, Homo sapien
aatgccaataccaaagaggcgggga

SEQ ID NO: 3621894 - DNA, 25 bp, Homo sapien
gccaataccaaagaggcggggaaga

SEQ ID NO: 3621895 - DNA, 25 bp, Homo sapien
tcttcgtgcaaacttgaggagcctc

SEQ ID NO: 3621896 - DNA, 25 bp, Homo sapien
ggttacttcttcgtgcaaacttgag

SEQ ID NO: 3621897 - DNA, 25 bp, Homo sapien
caaacttgaggagcctctttacaca

SEQ ID NO: 3621898 - DNA, 25 bp, Homo sapien
tcgtgcaaacttgaggagcctcttt

SEQ ID NO: 3621899 - DNA, 25 bp, Homo sapien
ttgttgtggtacaagttttaagatc

SEQ ID NO: 3621900 - DNA, 25 bp, Homo sapien
ctcttgttgtggtacaagttttaag

SEQ ID NO: 3621901 - DNA, 25 bp, Homo sapien
tggtacaagttttaagatcaatact

SEQ ID NO: 3621902 - DNA, 25 bp, Homo sapien
tgtggtacaagttttaagatcaata

SEQ ID NO: 3621903 - DNA, 25 bp, Homo sapien
tttcagtccagtcagtggagcccag

SEQ ID NO: 3621904 - DNA, 25 bp, Homo sapien
tctgcattccgtacaagagtgtaga

SEQ ID NO: 3621905 - DNA, 25 bp, Homo sapien
cactgccgggttccagctgttttca

SEQ ID NO: 3621906 - DNA, 25 bp, Homo sapien
gattcatcaggatacaacagctctg

SEQ ID NO: 3621907 - DNA, 25 bp, Homo sapien
tattgtttcgtctttcacatacaga

SEQ ID NO: 3621908 - DNA, 25 bp, Homo sapien
gggttaaataaggatcaggcttctc

SEQ ID NO: 3621909 - DNA, 25 bp, Homo sapien
tctgtacacatctataccaacgtcg

SEQ ID NO: 3621910 - DNA, 25 bp, Homo sapien
caacgtcgtaattagtgaagctttc

SEQ ID NO: 3621911 - DNA, 25 bp, Homo sapien
gttttggcactgagttggtcactga

SEQ ID NO: 3621912 - DNA, 25 bp, Homo sapien
tggcactgagttggtcactgactgg

SEQ ID NO: 3621913 - DNA, 25 bp, Homo sapien
tttggttaattaactcaacacagtg

SEQ ID NO: 3621914 - DNA, 25 bp, Homo sapien
ttaattaactcaacacagtgtccag

SEQ ID NO: 3621915 - DNA, 25 bp, Homo sapien
agggcagctccatggttactttttc

SEQ ID NO: 3621916 - DNA, 25 bp, Homo sapien
gcatggggataaggcccagcgtttc

SEQ ID NO: 3621917 - DNA, 25 bp, Homo sapien
ttcccacttaaaccaatcagggcag

SEQ ID NO: 3621918 - DNA, 25 bp, Homo sapien
cacttaaaccaatcagggcagctcc

SEQ ID NO: 3621919 - DNA, 25 bp, Homo sapien
tctccaccatgtgcttaacactttc

SEQ ID NO: 3621920 - DNA, 25 bp, Homo sapien
ccaccatgtgcttaacactttcggg

SEQ ID NO: 3621921 - DNA, 25 bp, Homo sapien
tggaatccgtgcttgcctctccacc

SEQ ID NO: 3621922 - DNA, 25 bp, Homo sapien
atccgtgcttgcctctccaccatgt

SEQ ID NO: 3621923 - DNA, 25 bp, Homo sapien
caataacagaaacaatgtctcccac

SEQ ID NO: 3621924 - DNA, 25 bp, Homo sapien
gtcaataacagaaacaatgtctccc

SEQ ID NO: 3621925 - DNA, 25 bp, Homo sapien
tcaataacagaaacaatgtctccca

SEQ ID NO: 3621926 - DNA, 25 bp, Homo sapien
caccgacagcaggagtgttgatgga

SEQ ID NO: 3621927 - DNA, 25 bp, Homo sapien
gatgactcctcatgaaccaaaaggt

SEQ ID NO: 3621928 - DNA, 25 bp, Homo sapien
gggcccgagcagtgtacctcttgat

SEQ ID NO: 3621929 - DNA, 25 bp, Homo sapien
caaaaggtgatttcccttattatca

SEQ ID NO: 3621930 - DNA, 25 bp, Homo sapien
tgacaggtaagccataagcatctga

SEQ ID NO: 3621931 - DNA, 25 bp, Homo sapien
ccacagttgatcttgttgccagcga

SEQ ID NO: 3621932 - DNA, 25 bp, Homo sapien
taagggcgggcccacagttgatctt

SEQ ID NO: 3621933 - DNA, 25 bp, Homo sapien
ttgccagcgatagctgaaaggcgtg

SEQ ID NO: 3621934 - DNA, 25 bp, Homo sapien
tcaagtacccgaaaatcttcataac

SEQ ID NO: 3621935 - DNA, 25 bp, Homo sapien
tgtccttcagggtgtcagaacgggg

SEQ ID NO: 3621936 - DNA, 25 bp, Homo sapien
agatgtttatcaagtacccgaaaat

SEQ ID NO: 3621937 - DNA, 25 bp, Homo sapien
gaaaatcttcggtcataaatacaca

SEQ ID NO: 3621938 - DNA, 25 bp, Homo sapien
attactcctttggaagaagtggtca

SEQ ID NO: 3621939 - DNA, 25 bp, Homo sapien
agtggtcaagatcactgaaatgtag

SEQ ID NO: 3621940 - DNA, 25 bp, Homo sapien
tattactcctttggaagaagtggtc

SEQ ID NO: 3621941 - DNA, 25 bp, Homo sapien
agaagtggtcaagatcactgaaatg

SEQ ID NO: 3621942 - DNA, 25 bp, Homo sapien
ttactcataagtgtcaaaagcctta

SEQ ID NO: 3621943 - DNA, 25 bp, Homo sapien
ctcataagtgtcaaaagccttagga

SEQ ID NO: 3621944 - DNA, 25 bp, Homo sapien
cataagtgtcaaaagccttaggaac

SEQ ID NO: 3621945 - DNA, 25 bp, Homo sapien
tactcataagtgtcaaaagccttag

SEQ ID NO: 3621946 - DNA, 25 bp, Homo sapien
ctgtggattatatcctttaggcaaa

SEQ ID NO: 3621947 - DNA, 25 bp, Homo sapien
cctttaggcaaatcacgttatagaa

SEQ ID NO: 3621948 - DNA, 25 bp, Homo sapien
taatcatcactcaacctaattctta

SEQ ID NO: 3621949 - DNA, 25 bp, Homo sapien
caatagtcattattgcacaatctca

SEQ ID NO: 3621950 - DNA, 25 bp, Homo sapien
ctgacaagcaatctgcacgaggtag

SEQ ID NO: 3621951 - DNA, 25 bp, Homo sapien
tctgcacgaggtagaccagctcttt

SEQ ID NO: 3621952 - DNA, 25 bp, Homo sapien
caagcaatctgcacgaggtagacca

SEQ ID NO: 3621953 - DNA, 25 bp, Homo sapien
cacgaggtagaccagctctttagat

SEQ ID NO: 3621954 - DNA, 25 bp, Homo sapien
tcaactgattcccacaggtactcac

SEQ ID NO: 3621955 - DNA, 25 bp, Homo sapien
catcaactgattcccacaggtactc

SEQ ID NO: 3621956 - DNA, 25 bp, Homo sapien
atcaactgattcccacaggtactca

SEQ ID NO: 3621957 - DNA, 25 bp, Homo sapien
ccatcaactgattcccacaggtact

SEQ ID NO: 3621958 - DNA, 25 bp, Homo sapien
agggatatcgggtgagtaaaccaag

SEQ ID NO: 3621959 - DNA, 25 bp, Homo sapien
cagggatatcgggtgagtaaaccaa

SEQ ID NO: 3621960 - DNA, 25 bp, Homo sapien
cccaaagtgtggctagcattatttt

SEQ ID NO: 3621961 - DNA, 25 bp, Homo sapien
cacattctttcctacatcatttcaa

SEQ ID NO: 3621962 - DNA, 25 bp, Homo sapien
ttttaattccacattctttcctaca

SEQ ID NO: 3621963 - DNA, 25 bp, Homo sapien
catttcaaaggctaatatattttaa

SEQ ID NO: 3621964 - DNA, 25 bp, Homo sapien
gcctgtgcttagttctcagccataa

SEQ ID NO: 3621965 - DNA, 25 bp, Homo sapien
actcccttgtgggatatcatttaca

SEQ ID NO: 3621966 - DNA, 25 bp, Homo sapien
gtttcctagctgtgcaaaaggttct

SEQ ID NO: 3621967 - DNA, 25 bp, Homo sapien
gaagagggtgtgtcctttatcaatg

SEQ ID NO: 3621968 - DNA, 25 bp, Homo sapien
ctggtccagagacttgatgtttctg

SEQ ID NO: 3621969 - DNA, 25 bp, Homo sapien
tttctggtccagagacttgatgttt

SEQ ID NO: 3621970 - DNA, 25 bp, Homo sapien
acaagggcttaatttctggtccaga

SEQ ID NO: 3621971 - DNA, 25 bp, Homo sapien
tctggtccagagacttgatgtttct

SEQ ID NO: 3621972 - DNA, 25 bp, Homo sapien
tctcataatggaaatgcgcacattc

SEQ ID NO: 3621973 - DNA, 25 bp, Homo sapien
tgtatgctgccgaactcaacattct

SEQ ID NO: 3621974 - DNA, 25 bp, Homo sapien
cattcagccatcttcggaaagtgac

SEQ ID NO: 3621975 - DNA, 25 bp, Homo sapien
tcttcggaaagtgacctttagtgaa

SEQ ID NO: 3621976 - DNA, 25 bp, Homo sapien
gtcacagcccatcagtcctggagtg

SEQ ID NO: 3621977 - DNA, 25 bp, Homo sapien
gttgtcacagcccatcagtcctgga

SEQ ID NO: 3621978 - DNA, 25 bp, Homo sapien
aatgttgtcacagcccatcagtcct

SEQ ID NO: 3621979 - DNA, 25 bp, Homo sapien
gaatgttgtcacagcccatcagtcc

SEQ ID NO: 3621980 - DNA, 25 bp, Homo sapien
cgtcttaagagtaagatctccagga

SEQ ID NO: 3621981 - DNA, 25 bp, Homo sapien
ggaatctctggaacatctgcgcctc

SEQ ID NO: 3621982 - DNA, 25 bp, Homo sapien
catgcttaaccttcatactggctgt

SEQ ID NO: 3621983 - DNA, 25 bp, Homo sapien
ggctgtactgccacacgtcttaaga

SEQ ID NO: 3621984 - DNA, 25 bp, Homo sapien
aatattcagctttactgtataaggg

SEQ ID NO: 3621985 - DNA, 25 bp, Homo sapien
atattcagctttactgtataaggga

SEQ ID NO: 3621986 - DNA, 25 bp, Homo sapien
attcagctttactgtataagggaaa

SEQ ID NO: 3621987 - DNA, 25 bp, Homo sapien
tattcagctttactgtataagggaa

SEQ ID NO: 3621988 - DNA, 25 bp, Homo sapien
ctgactggactgtagatggaaacat

SEQ ID NO: 3621989 - DNA, 25 bp, Homo sapien
gacccaaaggtaaatccacaggcta

SEQ ID NO: 3621990 - DNA, 25 bp, Homo sapien
caggctatgcaaaagggcctgacgg

SEQ ID NO: 3621991 - DNA, 25 bp, Homo sapien
aaatccacaggctatgcaaaagggc

SEQ ID NO: 3621992 - DNA, 25 bp, Homo sapien
aaggtaaatccacaggctatgcaaa

SEQ ID NO: 3621993 - DNA, 25 bp, Homo sapien
gaaggtaggatgtcccaactccaga

SEQ ID NO: 3621994 - DNA, 25 bp, Homo sapien
gctctcatactttgacaaggcaccg

SEQ ID NO: 3621995 - DNA, 25 bp, Homo sapien
tctgaacagtagtggagacccctct

SEQ ID NO: 3621996 - DNA, 25 bp, Homo sapien
gaaatgttatttgccaggatcggcc

SEQ ID NO: 3621997 - DNA, 25 bp, Homo sapien
atcaggccgctctcgagggtgtaca

SEQ ID NO: 3621998 - DNA, 25 bp, Homo sapien
tcttcccaatcaggccgctctcgag

SEQ ID NO: 3621999 - DNA, 25 bp, Homo sapien
tagctctggaacaaaatcatcttct

SEQ ID NO: 3622000 - DNA, 25 bp, Homo sapien
tgtagctctggaacaaaatcatctt

SEQ ID NO: 3622001 - DNA, 25 bp, Homo sapien
aagataactggtccacggtccaggg

SEQ ID NO: 3622002 - DNA, 25 bp, Homo sapien
acaatagcttctaacttgtggcatc

SEQ ID NO: 3622003 - DNA, 25 bp, Homo sapien
aataagataactggtccacggtcca

SEQ ID NO: 3622004 - DNA, 25 bp, Homo sapien
ttagactgccacaatagcttctaac

SEQ ID NO: 3622005 - DNA, 25 bp, Homo sapien
atgccaaagaactagaacctttcat

SEQ ID NO: 3622006 - DNA, 25 bp, Homo sapien
tcatcccctaaagtgctactctcac

SEQ ID NO: 3622007 - DNA, 25 bp, Homo sapien
cagaagacactgtcatcccctaaag

SEQ ID NO: 3622008 - DNA, 25 bp, Homo sapien
tataacttcagactccaaccagaag

SEQ ID NO: 3622009 - DNA, 25 bp, Homo sapien
ataacttcagactccaaccagaaga

SEQ ID NO: 3622010 - DNA, 25 bp, Homo sapien
aatttcgaactagctggttctcatc

SEQ ID NO: 3622011 - DNA, 25 bp, Homo sapien
cagcagtaatttcgaactagctggt

SEQ ID NO: 3622012 - DNA, 25 bp, Homo sapien
tcaccagcagtaatttcgaactagc

SEQ ID NO: 3622013 - DNA, 25 bp, Homo sapien
gcagtaatttcgaactagctggttc

SEQ ID NO: 3622014 - DNA, 25 bp, Homo sapien
taaacatgctatgactggctcctaa

SEQ ID NO: 3622015 - DNA, 25 bp, Homo sapien
aattgcttccatcaaaaacgctggg

SEQ ID NO: 3622016 - DNA, 25 bp, Homo sapien
tctatgcaagccgaaagtcaggagt

SEQ ID NO: 3622017 - DNA, 25 bp, Homo sapien
aaacgctgggcatctaacacaatag

SEQ ID NO: 3622018 - DNA, 25 bp, Homo sapien
cagcatttgcttacgcgtgacttca

SEQ ID NO: 3622019 - DNA, 25 bp, Homo sapien
gagcactaggtacggtcagcaaact

SEQ ID NO: 3622020 - DNA, 25 bp, Homo sapien
tgctctccagaggtggactacagtc

SEQ ID NO: 3622021 - DNA, 25 bp, Homo sapien
gacttcatctgacaagagcactagg

SEQ ID NO: 3622022 - DNA, 25 bp, Homo sapien
gaaacctgtggtctatgctctgaaa

SEQ ID NO: 3622023 - DNA, 25 bp, Homo sapien
caacagtagtgcaagataggtcacc

SEQ ID NO: 3622024 - DNA, 25 bp, Homo sapien
ggtaggaagatgttaaatcccaggc

SEQ ID NO: 3622025 - DNA, 25 bp, Homo sapien
taacactgcctaagtggtaggaaga

SEQ ID NO: 3622026 - DNA, 25 bp, Homo sapien
aaattatttcaacaggaaccatatc

SEQ ID NO: 3622027 - DNA, 25 bp, Homo sapien
caagtttagtataggcattgtgtct

SEQ ID NO: 3622028 - DNA, 25 bp, Homo sapien
ggttttctattgagacatcctgccc

SEQ ID NO: 3622029 - DNA, 25 bp, Homo sapien
gtgtcttctccaagctatattagtg

SEQ ID NO: 3622030 - DNA, 25 bp, Homo sapien
tattgatctgaaagaagtcctcctg

SEQ ID NO: 3622031 - DNA, 25 bp, Homo sapien
gacagggcagcatggacacaattat

SEQ ID NO: 3622032 - DNA, 25 bp, Homo sapien
tgatttcggactttagcccttcgga

SEQ ID NO: 3622033 - DNA, 25 bp, Homo sapien
tacctggaccctgtaaagactgcac

SEQ ID NO: 3622034 - DNA, 25 bp, Homo sapien
attggcttaagtatgttaaaccatc

SEQ ID NO: 3622035 - DNA, 25 bp, Homo sapien
tgcttatgtggtgtaccacaattat

SEQ ID NO: 3622036 - DNA, 25 bp, Homo sapien
ggtgtaccacaattattggcttaag

SEQ ID NO: 3622037 - DNA, 25 bp, Homo sapien
tggatttgtggtagatagcttttat

SEQ ID NO: 3622038 - DNA, 25 bp, Homo sapien
gactcagttcactagtattttgttg

SEQ ID NO: 3622039 - DNA, 25 bp, Homo sapien
atcaatgttcatcgggggtactggt

SEQ ID NO: 3622040 - DNA, 25 bp, Homo sapien
cgggggtactggtctgtagtcttct

SEQ ID NO: 3622041 - DNA, 25 bp, Homo sapien
tgttcatcgggggtactggtctgta

SEQ ID NO: 3622042 - DNA, 25 bp, Homo sapien
caggcccagcccaaaactactattt

SEQ ID NO: 3622043 - DNA, 25 bp, Homo sapien
gagatggagcccttgtctgtcgctc

SEQ ID NO: 3622044 - DNA, 25 bp, Homo sapien
caaagtcgttttataaggcctggca

SEQ ID NO: 3622045 - DNA, 25 bp, Homo sapien
tggcagaactacaaaaatcctggga

SEQ ID NO: 3622046 - DNA, 25 bp, Homo sapien
gacatatgaacctcgtcttagtccg

SEQ ID NO: 3622047 - DNA, 25 bp, Homo sapien
tatagacatatgtttcgagaccccg

SEQ ID NO: 3622048 - DNA, 25 bp, Homo sapien
tagtactgccataaaggaacacctg

SEQ ID NO: 3622049 - DNA, 25 bp, Homo sapien
tgactctgatctaggttactatgga

SEQ ID NO: 3622050 - DNA, 25 bp, Homo sapien
ggcgtccctgcgccccgctggccgc

SEQ ID NO: 3622051 - DNA, 25 bp, Homo sapien
ctgcgccccgctggccgctccgtgt

SEQ ID NO: 3622052 - DNA, 25 bp, Homo sapien
cgcgccgccgcggcgtccctgcgcc

SEQ ID NO: 3622053 - DNA, 25 bp, Homo sapien
gccgcgccgccgcggcgtccctgcg

SEQ ID NO: 3622054 - DNA, 25 bp, Homo sapien
ggcgtcccccgcgccagcgcctcat

SEQ ID NO: 3622055 - DNA, 25 bp, Homo sapien
gcctggccgccgagggcagccgcgg

SEQ ID NO: 3622056 - DNA, 25 bp, Homo sapien
ctcggccgggcgtcccccgcgccag

SEQ ID NO: 3622057 - DNA, 25 bp, Homo sapien
ctagcgcctggccgccgagggcagc

SEQ ID NO: 3622058 - DNA, 25 bp, Homo sapien
taaaacgtggccttgaccgcgatta

SEQ ID NO: 3622059 - DNA, 25 bp, Homo sapien
agggcatacgtgaagcaggatttca

SEQ ID NO: 3622060 - DNA, 25 bp, Homo sapien
tagcagaatgtcaagggcatacgtg

SEQ ID NO: 3622061 - DNA, 25 bp, Homo sapien
gccttgaccgcgattagcagaatgt

SEQ ID NO: 3622062 - DNA, 25 bp, Homo sapien
tggtacggaagccaatcgcatcctt

SEQ ID NO: 3622063 - DNA, 25 bp, Homo sapien
catgtctgccctccccgtgatcttt

SEQ ID NO: 3622064 - DNA, 25 bp, Homo sapien
tcttaaccacgaacacccatgtctg

SEQ ID NO: 3622065 - DNA, 25 bp, Homo sapien
ctgggtgactgggacagacgaacca

SEQ ID NO: 3622066 - DNA, 25 bp, Homo sapien
aaggctgtcgcagacgcacttttca

SEQ ID NO: 3622067 - DNA, 25 bp, Homo sapien
aaaggctgtcgcagacgcacttttc

SEQ ID NO: 3622068 - DNA, 25 bp, Homo sapien
aggctgtcgcagacgcacttttcag

SEQ ID NO: 3622069 - DNA, 25 bp, Homo sapien
ggctgtcgcagacgcacttttcagc

SEQ ID NO: 3622070 - DNA, 25 bp, Homo sapien
aaattattgaaagtctggcatccgt

SEQ ID NO: 3622071 - DNA, 25 bp, Homo sapien
tattgaaagtctggcatccgttttc

SEQ ID NO: 3622072 - DNA, 25 bp, Homo sapien
attattgaaagtctggcatccgttt

SEQ ID NO: 3622073 - DNA, 25 bp, Homo sapien
aattattgaaagtctggcatccgtt

SEQ ID NO: 3622074 - DNA, 25 bp, Homo sapien
tagtgagcctgatagtggctagccc

SEQ ID NO: 3622075 - DNA, 25 bp, Homo sapien
acgaagtttccacaccagctgaggg

SEQ ID NO: 3622076 - DNA, 25 bp, Homo sapien
gatcgaatgccttcttgcaaccctt

SEQ ID NO: 3622077 - DNA, 25 bp, Homo sapien
tggctagccctatgcttaaatgggt

SEQ ID NO: 3622078 - DNA, 25 bp, Homo sapien
ccttacgttcagagggcgattctcc

SEQ ID NO: 3622079 - DNA, 25 bp, Homo sapien
tcaaggctgcatctgaatttaaacc

SEQ ID NO: 3622080 - DNA, 25 bp, Homo sapien
taatgtgctgcatctgaagtcatcc

SEQ ID NO: 3622081 - DNA, 25 bp, Homo sapien
gactgagctattgccaaaggccttg

SEQ ID NO: 3622082 - DNA, 25 bp, Homo sapien
gcactaaccggctcggccaggttta

SEQ ID NO: 3622083 - DNA, 25 bp, Homo sapien
gatcagggccgtcgctgggctccac

SEQ ID NO: 3622084 - DNA, 25 bp, Homo sapien
acagctgtcctctcattcgcttctg

SEQ ID NO: 3622085 - DNA, 25 bp, Homo sapien
caggtaacagaggctccggatcagg

SEQ ID NO: 3622086 - DNA, 25 bp, Homo sapien
ttcccagcttccatcccctttgccc

SEQ ID NO: 3622087 - DNA, 25 bp, Homo sapien
gctgcagaatttcctgaccctggag

SEQ ID NO: 3622088 - DNA, 25 bp, Homo sapien
gagctgcagaatttcctgaccctgg

SEQ ID NO: 3622089 - DNA, 25 bp, Homo sapien
ggagctgcagaatttcctgaccctg

SEQ ID NO: 3622090 - DNA, 25 bp, Homo sapien
gctgtttgccctgcacagcctgagc

SEQ ID NO: 3622091 - DNA, 25 bp, Homo sapien
cagcacaggttctggaagccatgct

SEQ ID NO: 3622092 - DNA, 25 bp, Homo sapien
gccagtgcaaatccccagcacaggt

SEQ ID NO: 3622093 - DNA, 25 bp, Homo sapien
aagccatgctgctgtttgccctgca

SEQ ID NO: 3622094 - DNA, 25 bp, Homo sapien
caggacaataaggaggaaattggtt

SEQ ID NO: 3622095 - DNA, 25 bp, Homo sapien
agcaatttctctatcagcagagtag

SEQ ID NO: 3622096 - DNA, 25 bp, Homo sapien
ctgcaggacaataaggaggaaattg

SEQ ID NO: 3622097 - DNA, 25 bp, Homo sapien
gcaatttctctatcagcagagtagt

SEQ ID NO: 3622098 - DNA, 25 bp, Homo sapien
tagatgaagaaatcgctgggtactg

SEQ ID NO: 3622099 - DNA, 25 bp, Homo sapien
tccagaaatggaggacagggcagcc

SEQ ID NO: 3622100 - DNA, 25 bp, Homo sapien
ctgggtactggatgttttgaggaaa

SEQ ID NO: 3622101 - DNA, 25 bp, Homo sapien
gattctcaggaacgtagccatccag

SEQ ID NO: 3622102 - DNA, 25 bp, Homo sapien
gttgcctgtgtctcgacatatgttt

SEQ ID NO: 3622103 - DNA, 25 bp, Homo sapien
tgtttgttcccggttcctgctgatt

SEQ ID NO: 3622104 - DNA, 25 bp, Homo sapien
gattttcctgacagctgtccaaatc

SEQ ID NO: 3622105 - DNA, 25 bp, Homo sapien
gctttcacagtctgatgttgcctgt

SEQ ID NO: 3622106 - DNA, 25 bp, Homo sapien
tctcgacttgtcaaataccatattg

SEQ ID NO: 3622107 - DNA, 25 bp, Homo sapien
gttcacctgttctcgacttgtcaaa

SEQ ID NO: 3622108 - DNA, 25 bp, Homo sapien
ctattttggagttcacctgttctcg

SEQ ID NO: 3622109 - DNA, 25 bp, Homo sapien
ctttctggggaataccagttgctat

SEQ ID NO: 3622110 - DNA, 25 bp, Homo sapien
catgtacaacgattttcggtggaga

SEQ ID NO: 3622111 - DNA, 25 bp, Homo sapien
tacccttattaatcagaagtagagc

SEQ ID NO: 3622112 - DNA, 25 bp, Homo sapien
agtccttgatggtgagaatgatcag

SEQ ID NO: 3622113 - DNA, 25 bp, Homo sapien
tcaaatcctccttgttcaataccct

SEQ ID NO: 3622114 - DNA, 25 bp, Homo sapien
ccctgctgtccggtagagggcagta

SEQ ID NO: 3622115 - DNA, 25 bp, Homo sapien
gcaaccctgagaagtggcgggtacc

SEQ ID NO: 3622116 - DNA, 25 bp, Homo sapien
ccttaggatcctttctgattgcaga

SEQ ID NO: 3622117 - DNA, 25 bp, Homo sapien
tgcttcgtgccgatagagggagacc

SEQ ID NO: 3622118 - DNA, 25 bp, Homo sapien
gaggtgaaaaactttcgagaactca

SEQ ID NO: 3622119 - DNA, 25 bp, Homo sapien
aactttcgagaactcagagcaatcc

SEQ ID NO: 3622120 - DNA, 25 bp, Homo sapien
gaactcagagcaatccaatggacag

SEQ ID NO: 3622121 - DNA, 25 bp, Homo sapien
cagagcaatccaatggacagtccat

SEQ ID NO: 3622122 - DNA, 25 bp, Homo sapien
gcaggtggcaccctctcttggaagc

SEQ ID NO: 3622123 - DNA, 25 bp, Homo sapien
cttggaagcagcatgacgacgagaa

SEQ ID NO: 3622124 - DNA, 25 bp, Homo sapien
cacaggtgctcaaaggatgggcaaa

SEQ ID NO: 3622125 - DNA, 25 bp, Homo sapien
aagcattgagggcattcgtgcaaag

SEQ ID NO: 3622126 - DNA, 25 bp, Homo sapien
tccttttcactcggtgaattaacca

SEQ ID NO: 3622127 - DNA, 25 bp, Homo sapien
ccttttcactcggtgaattaaccat

SEQ ID NO: 3622128 - DNA, 25 bp, Homo sapien
gagtccttttcactcggtgaattaa

SEQ ID NO: 3622129 - DNA, 25 bp, Homo sapien
caatctctgggtcacggtgcttcca

SEQ ID NO: 3622130 - DNA, 25 bp, Homo sapien
ctgtgtccgtgtctgtgtagcattc

SEQ ID NO: 3622131 - DNA, 25 bp, Homo sapien
tcacggtgcttccatcagctgtcat

SEQ ID NO: 3622132 - DNA, 25 bp, Homo sapien
tagcattcgctaccaatctctgggt

SEQ ID NO: 3622133 - DNA, 25 bp, Homo sapien
tacaatgaacacttgtgtctaccca

SEQ ID NO: 3622134 - DNA, 25 bp, Homo sapien
agttctagggaatgtattagtgtcc

SEQ ID NO: 3622135 - DNA, 25 bp, Homo sapien
tgtctacccaccacccagtttaaga

SEQ ID NO: 3622136 - DNA, 25 bp, Homo sapien
tgagttaatgacagggacacagttc

SEQ ID NO: 3622137 - DNA, 25 bp, Homo sapien
gaggaccagcactacccttgaagga

SEQ ID NO: 3622138 - DNA, 25 bp, Homo sapien
tctgggattgacaatatttccattg

SEQ ID NO: 3622139 - DNA, 25 bp, Homo sapien
tgaaggatcctgctgttgtgtcaac

SEQ ID NO: 3622140 - DNA, 25 bp, Homo sapien
tacaactctgctgtcgccagtgatg

SEQ ID NO: 3622141 - DNA, 25 bp, Homo sapien
cggtagcaccggcttatttaatgca

SEQ ID NO: 3622142 - DNA, 25 bp, Homo sapien
tctctgtgtgctccggtagcaccgg

SEQ ID NO: 3622143 - DNA, 25 bp, Homo sapien
taataataaccaccagatccatccg

SEQ ID NO: 3622144 - DNA, 25 bp, Homo sapien
tgcatgacatcgactgtctctccca

SEQ ID NO: 3622145 - DNA, 25 bp, Homo sapien
cttggggcccctcacaccagcatac

SEQ ID NO: 3622146 - DNA, 25 bp, Homo sapien
ttggggcccctcacaccagcataca

SEQ ID NO: 3622147 - DNA, 25 bp, Homo sapien
tggggcccctcacaccagcatacat

SEQ ID NO: 3622148 - DNA, 25 bp, Homo sapien
tgctccatacgtttatagctgtttt

SEQ ID NO: 3622149 - DNA, 25 bp, Homo sapien
ctccatacgtttatagctgttttgt

SEQ ID NO: 3622150 - DNA, 25 bp, Homo sapien
gctccatacgtttatagctgttttg

SEQ ID NO: 3622151 - DNA, 25 bp, Homo sapien
gttgctccatacgtttatagctgtt

SEQ ID NO: 3622152 - DNA, 25 bp, Homo sapien
catgtcctcaaatcccatattagca

SEQ ID NO: 3622153 - DNA, 25 bp, Homo sapien
gtcctcaaatcccatattagcatta

SEQ ID NO: 3622154 - DNA, 25 bp, Homo sapien
atgtcctcaaatcccatattagcat

SEQ ID NO: 3622155 - DNA, 25 bp, Homo sapien
cctcaaatcccatattagcattaca

SEQ ID NO: 3622156 - DNA, 25 bp, Homo sapien
tttcctgaggcttccgattggatcc

SEQ ID NO: 3622157 - DNA, 25 bp, Homo sapien
tgaggcttccgattggatccaacgt

SEQ ID NO: 3622158 - DNA, 25 bp, Homo sapien
tagcccccttcttaggctcctcaga

SEQ ID NO: 3622159 - DNA, 25 bp, Homo sapien
tccgattggatccaacgtgactggg

SEQ ID NO: 3622160 - DNA, 25 bp, Homo sapien
tcttgtctctaccagtcagcacaga

SEQ ID NO: 3622161 - DNA, 25 bp, Homo sapien
accactcagcctttgccacatgttt

SEQ ID NO: 3622162 - DNA, 25 bp, Homo sapien
gggcagagatcaggaattgcttctc

SEQ ID NO: 3622163 - DNA, 25 bp, Homo sapien
tgttcaacagagttccctaatgatg

SEQ ID NO: 3622164 - DNA, 25 bp, Homo sapien
acgctgccctggctactgagttagg

SEQ ID NO: 3622165 - DNA, 25 bp, Homo sapien
aagaagtggaaggtatacgctgccc

SEQ ID NO: 3622166 - DNA, 25 bp, Homo sapien
gacagctacagcgattgaatcaatc

SEQ ID NO: 3622167 - DNA, 25 bp, Homo sapien
tgagcaccggttctggatttagcag

SEQ ID NO: 3622168 - DNA, 25 bp, Homo sapien
gacccaagaactgataagctttggt

SEQ ID NO: 3622169 - DNA, 25 bp, Homo sapien
tgaagacacgtgtgcctttgtaccc

SEQ ID NO: 3622170 - DNA, 25 bp, Homo sapien
tataagatggtcataagacccaaga

SEQ ID NO: 3622171 - DNA, 25 bp, Homo sapien
aaaacatttgtgaccttcggcataa

SEQ ID NO: 3622172 - DNA, 25 bp, Homo sapien
cgtctggcagttttccataggtgct

SEQ ID NO: 3622173 - DNA, 25 bp, Homo sapien
tacctaaatcttcccccgcattgta

SEQ ID NO: 3622174 - DNA, 25 bp, Homo sapien
ctagctggtagtcggatcgtctggc

SEQ ID NO: 3622175 - DNA, 25 bp, Homo sapien
ttcccccgcattgtatttgaaagga

SEQ ID NO: 3622176 - DNA, 25 bp, Homo sapien
tccaaagcccaaagacaggacttag

SEQ ID NO: 3622177 - DNA, 25 bp, Homo sapien
agctttcaggattggagccaaaatc

SEQ ID NO: 3622178 - DNA, 25 bp, Homo sapien
acttagaggatctggattctcgtgg

SEQ ID NO: 3622179 - DNA, 25 bp, Homo sapien
caaaatctcagaataagcagcagcc

SEQ ID NO: 3622180 - DNA, 25 bp, Homo sapien
gagatggcaacgacttgagagaggg

SEQ ID NO: 3622181 - DNA, 25 bp, Homo sapien
agatggcaacgacttgagagagggc

SEQ ID NO: 3622182 - DNA, 25 bp, Homo sapien
gcagccttcctgcctccttttccac

SEQ ID NO: 3622183 - DNA, 25 bp, Homo sapien
ggcagccttcctgcctccttttcca

SEQ ID NO: 3622184 - DNA, 25 bp, Homo sapien
tggacagtggatggggcagccttcc

SEQ ID NO: 3622185 - DNA, 25 bp, Homo sapien
ccatggacagtggatggggcagcct

SEQ ID NO: 3622186 - DNA, 25 bp, Homo sapien
cggaaaccgcctgccgaggggtgct

SEQ ID NO: 3622187 - DNA, 25 bp, Homo sapien
cgaggggtgctgtgtaaatcaccat

SEQ ID NO: 3622188 - DNA, 25 bp, Homo sapien
cctgccgaggggtgctgtgtaaatc

SEQ ID NO: 3622189 - DNA, 25 bp, Homo sapien
aaaccgcctgccgaggggtgctgtg

SEQ ID NO: 3622190 - DNA, 25 bp, Homo sapien
tcttccatacagtctcctcatttaa

SEQ ID NO: 3622191 - DNA, 25 bp, Homo sapien
caagtagccttccaaaaacaactgg

SEQ ID NO: 3622192 - DNA, 25 bp, Homo sapien
acagtctcctcatttaaccctttct

SEQ ID NO: 3622193 - DNA, 25 bp, Homo sapien
gcttttcttccatacagtctcctca

SEQ ID NO: 3622194 - DNA, 25 bp, Homo sapien
catcttgagagttcttaactgtgtg

SEQ ID NO: 3622195 - DNA, 25 bp, Homo sapien
atgcataggaatctccctttacaga

SEQ ID NO: 3622196 - DNA, 25 bp, Homo sapien
gtgtgtgccaatatgcataggaatc

SEQ ID NO: 3622197 - DNA, 25 bp, Homo sapien
gagagttcttaactgtgtgtgccaa

SEQ ID NO: 3622198 - DNA, 25 bp, Homo sapien
tctcaatggttctttgtgtggcaat

SEQ ID NO: 3622199 - DNA, 25 bp, Homo sapien
tgaagtgagataggccttccaacca

SEQ ID NO: 3622200 - DNA, 25 bp, Homo sapien
aatggttctttgtgtggcaatctcc

SEQ ID NO: 3622201 - DNA, 25 bp, Homo sapien
tctcctgtgaagtgagataggcctt

SEQ ID NO: 3622202 - DNA, 25 bp, Homo sapien
cggtcggcaggaaagttctggcact

SEQ ID NO: 3622203 - DNA, 25 bp, Homo sapien
gaaagctcttaataatgtcgactca

SEQ ID NO: 3622204 - DNA, 25 bp, Homo sapien
tacgattcagagtcagcggtcggca

SEQ ID NO: 3622205 - DNA, 25 bp, Homo sapien
taatgtcgactcataggcgatacga

SEQ ID NO: 3622206 - DNA, 25 bp, Homo sapien
cagccctccggtttggagaaaggtg

SEQ ID NO: 3622207 - DNA, 25 bp, Homo sapien
ctgtgtgaataagcgcatggaggca

SEQ ID NO: 3622208 - DNA, 25 bp, Homo sapien
cgaaggacatgcaggtctggacagc

SEQ ID NO: 3622209 - DNA, 25 bp, Homo sapien
gactgggcagtgctgcgaaggacat

SEQ ID NO: 3622210 - DNA, 25 bp, Homo sapien
gattggaacctgtgaaattcttcaa

SEQ ID NO: 3622211 - DNA, 25 bp, Homo sapien
ctagaaatacgtcttgccagattgg

SEQ ID NO: 3622212 - DNA, 25 bp, Homo sapien
tagaaatacgtcttgccagattgga

SEQ ID NO: 3622213 - DNA, 25 bp, Homo sapien
agaaatacgtcttgccagattggaa

SEQ ID NO: 3622214 - DNA, 25 bp, Homo sapien
gagaaatcgcagttgtcagcccttg

SEQ ID NO: 3622215 - DNA, 25 bp, Homo sapien
aggggcaatttccttcacacctgga

SEQ ID NO: 3622216 - DNA, 25 bp, Homo sapien
cctggagatgagaaatcgcagttgt

SEQ ID NO: 3622217 - DNA, 25 bp, Homo sapien
gagatgagaaatcgcagttgtcagc

SEQ ID NO: 3622218 - DNA, 25 bp, Homo sapien
aggaataaggacacattccattccc

SEQ ID NO: 3622219 - DNA, 25 bp, Homo sapien
caggaataaggacacattccattcc

SEQ ID NO: 3622220 - DNA, 25 bp, Homo sapien
gcaggaataaggacacattccattc

SEQ ID NO: 3622221 - DNA, 25 bp, Homo sapien
tgcaggaataaggacacattccatt

SEQ ID NO: 3622222 - DNA, 25 bp, Homo sapien
cctgggaacgcttgctcctccttga

SEQ ID NO: 3622223 - DNA, 25 bp, Homo sapien
ctcgatacaccaggatgtactgcat

SEQ ID NO: 3622224 - DNA, 25 bp, Homo sapien
caccaggatgtactgcatcttctca

SEQ ID NO: 3622225 - DNA, 25 bp, Homo sapien
gagcccactcctgcatctacctggg

SEQ ID NO: 3622226 - DNA, 25 bp, Homo sapien
gccttgcacacaggaagaacgtgct

SEQ ID NO: 3622227 - DNA, 25 bp, Homo sapien
ggccttgcacacaggaagaacgtgc

SEQ ID NO: 3622228 - DNA, 25 bp, Homo sapien
aggagtctccttggtctgctaaagt

SEQ ID NO: 3622229 - DNA, 25 bp, Homo sapien
ttaggagtctccttggtctgctaaa

SEQ ID NO: 3622230 - DNA, 25 bp, Homo sapien
taggagtctccttggtctgctaaag

SEQ ID NO: 3622231 - DNA, 25 bp, Homo sapien
taaagggctcgctgaaatgccttgc

SEQ ID NO: 3622232 - DNA, 25 bp, Homo sapien
tggttgaagtaagcctcgttcccca

SEQ ID NO: 3622233 - DNA, 25 bp, Homo sapien
cagaaaagccacgtttggcaggtaa

SEQ ID NO: 3622234 - DNA, 25 bp, Homo sapien
cctgatgagtgagcttgtaaagggc

SEQ ID NO: 3622235 - DNA, 25 bp, Homo sapien
agtggtatttccagaccgctcgtta

SEQ ID NO: 3622236 - DNA, 25 bp, Homo sapien
ttatccaccgggtagccgtgaggct

SEQ ID NO: 3622237 - DNA, 25 bp, Homo sapien
ggagtggtatttccagaccgctcgt

SEQ ID NO: 3622238 - DNA, 25 bp, Homo sapien
cagaccgctcgttatccaccgggta

SEQ ID NO: 3622239 - DNA, 25 bp, Homo sapien
cagctgccaggaactttgctaaaag

SEQ ID NO: 3622240 - DNA, 25 bp, Homo sapien
gactactgggccctttagagctgtt

SEQ ID NO: 3622241 - DNA, 25 bp, Homo sapien
cagtagcagcgctaatctctgagcc

SEQ ID NO: 3622242 - DNA, 25 bp, Homo sapien
caaaagccgtttaagtggtcacagc

SEQ ID NO: 3622243 - DNA, 25 bp, Homo sapien
ttgttttgacagcaccgggagctgg

SEQ ID NO: 3622244 - DNA, 25 bp, Homo sapien
gttttgacagcaccgggagctggtc

SEQ ID NO: 3622245 - DNA, 25 bp, Homo sapien
gaagagcagcaacctcgctcctttc

SEQ ID NO: 3622246 - DNA, 25 bp, Homo sapien
cgagaagagcagcaacctcgctcct

SEQ ID NO: 3622247 - DNA, 25 bp, Homo sapien
gagaaaatgcccacggtgttcccag

SEQ ID NO: 3622248 - DNA, 25 bp, Homo sapien
cttcttcctctcgtggagctctcag

SEQ ID NO: 3622249 - DNA, 25 bp, Homo sapien
gcactcaagagccccttcagtaaga

SEQ ID NO: 3622250 - DNA, 25 bp, Homo sapien
aggcaggtgttccatgtcagtttcc

SEQ ID NO: 3622251 - DNA, 25 bp, Homo sapien
ttcccggaagtgctgagttaaatcg

SEQ ID NO: 3622252 - DNA, 25 bp, Homo sapien
tgccaagttgtaggtcaggagacct

SEQ ID NO: 3622253 - DNA, 25 bp, Homo sapien
ttaaatcggcactggatgcagccac

SEQ ID NO: 3622254 - DNA, 25 bp, Homo sapien
tgaatcttccccaggaacgagcctg

SEQ ID NO: 3622255 - DNA, 25 bp, Homo sapien
tagctgggcctttcaggtatgcagg

SEQ ID NO: 3622256 - DNA, 25 bp, Homo sapien
gaaggagggcatcctaattcccagc

SEQ ID NO: 3622257 - DNA, 25 bp, Homo sapien
tatccaccgctttgcaagaaccagg

SEQ ID NO: 3622258 - DNA, 25 bp, Homo sapien
gccaaactggcatgactagagtaga

SEQ ID NO: 3622259 - DNA, 25 bp, Homo sapien
gggcaagcactagcagacaaggaat

SEQ ID NO: 3622260 - DNA, 25 bp, Homo sapien
taaaagggataagatgcactggctc

SEQ ID NO: 3622261 - DNA, 25 bp, Homo sapien
aatgggatggtaatacgtgcccctg

SEQ ID NO: 3622262 - DNA, 25 bp, Homo sapien
ctgggagccagcgagaattaaaagg

SEQ ID NO: 3622263 - DNA, 25 bp, Homo sapien
tcctcgcgcacatgttcagggtcat

SEQ ID NO: 3622264 - DNA, 25 bp, Homo sapien
actgcgcgggccttgagacgctggt

SEQ ID NO: 3622265 - DNA, 25 bp, Homo sapien
gggttggcctgctcctcgcgcacat

SEQ ID NO: 3622266 - DNA, 25 bp, Homo sapien
atgttcagggtcatccgcgctgcgc

SEQ ID NO: 3622267 - DNA, 25 bp, Homo sapien
gctaggctgacatttccatatttgt

SEQ ID NO: 3622268 - DNA, 25 bp, Homo sapien
ccatatttgttttgtctagtctttt

SEQ ID NO: 3622269 - DNA, 25 bp, Homo sapien
tccatatttgttttgtctagtcttt

SEQ ID NO: 3622270 - DNA, 25 bp, Homo sapien
cctctgctaggctgacatttccata

SEQ ID NO: 3622271 - DNA, 25 bp, Homo sapien
ctactcctagtaccattaccttggg

SEQ ID NO: 3622272 - DNA, 25 bp, Homo sapien
aacatctgcccaccatgatctctga

SEQ ID NO: 3622273 - DNA, 25 bp, Homo sapien
gatctctgacctatggcagatagcc

SEQ ID NO: 3622274 - DNA, 25 bp, Homo sapien
tcagggaactcaacttcattgcaac

SEQ ID NO: 3622275 - DNA, 25 bp, Homo sapien
tataatgttctagtaagccacccga

SEQ ID NO: 3622276 - DNA, 25 bp, Homo sapien
tatttgaagcaacatgttccctgac

SEQ ID NO: 3622277 - DNA, 25 bp, Homo sapien
ttccaagtatgttgaccgcccaaca

SEQ ID NO: 3622278 - DNA, 25 bp, Homo sapien
cccgaaactgacctaaaatctgaat

SEQ ID NO: 3622279 - DNA, 25 bp, Homo sapien
tcattggagtaaagagtacatcaca

SEQ ID NO: 3622280 - DNA, 25 bp, Homo sapien
caatatcctccataacgagagatgc

SEQ ID NO: 3622281 - DNA, 25 bp, Homo sapien
gataatggttgagtttaacccagga

SEQ ID NO: 3622282 - DNA, 25 bp, Homo sapien
caatgtaatttaccatattgacaag

SEQ ID NO: 3622283 - DNA, 25 bp, Homo sapien
tgtgagttggaaagccttggctggc

SEQ ID NO: 3622284 - DNA, 25 bp, Homo sapien
aacctgtttctgcaacttgatgctc

SEQ ID NO: 3622285 - DNA, 25 bp, Homo sapien
cagccatgaccgtggagagctgtga

SEQ ID NO: 3622286 - DNA, 25 bp, Homo sapien
ctctagcattgggtcatttgcagct

SEQ ID NO: 3622287 - DNA, 25 bp, Homo sapien
tagaggtgcaccaaacccgaggcat

SEQ ID NO: 3622288 - DNA, 25 bp, Homo sapien
gagggtagaggtgcaccaaacccga

SEQ ID NO: 3622289 - DNA, 25 bp, Homo sapien
gtggtgatggttccttggagggtag

SEQ ID NO: 3622290 - DNA, 25 bp, Homo sapien
ccttggagggtagaggtgcaccaaa

SEQ ID NO: 3622291 - DNA, 25 bp, Homo sapien
cacagcaacctctaacttttgtatt

SEQ ID NO: 3622292 - DNA, 25 bp, Homo sapien
tgttttttaatgtcgcaagtacatt

SEQ ID NO: 3622293 - DNA, 25 bp, Homo sapien
gcctactatagtattcattacatag

SEQ ID NO: 3622294 - DNA, 25 bp, Homo sapien
ccaacctattgttttaatgcctact

SEQ ID NO: 3622295 - DNA, 25 bp, Homo sapien
taagtcattcgtatgctctgcaatt

SEQ ID NO: 3622296 - DNA, 25 bp, Homo sapien
gagtccgtgccaatttttcctgcag

SEQ ID NO: 3622297 - DNA, 25 bp, Homo sapien
atgggaaggagtccgtgccaatttt

SEQ ID NO: 3622298 - DNA, 25 bp, Homo sapien
caagctatttgaagtggtgacagat

SEQ ID NO: 3622299 - DNA, 25 bp, Homo sapien
gctacacctattgcagtgggaacta

SEQ ID NO: 3622300 - DNA, 25 bp, Homo sapien
ggctccagcaacagtaccagagcag

SEQ ID NO: 3622301 - DNA, 25 bp, Homo sapien
ccagagcagccagtgtacagtctaa

SEQ ID NO: 3622302 - DNA, 25 bp, Homo sapien
ggcacctagtagacactcagtacat

SEQ ID NO: 3622303 - DNA, 25 bp, Homo sapien
tccccggagaatcctaagaccacat

SEQ ID NO: 3622304 - DNA, 25 bp, Homo sapien
gagaatcctaagaccacatctccag

SEQ ID NO: 3622305 - DNA, 25 bp, Homo sapien
aggccccaggcactctgagcataga

SEQ ID NO: 3622306 - DNA, 25 bp, Homo sapien
ggcactctgagcatagaccagctaa

SEQ ID NO: 3622307 - DNA, 25 bp, Homo sapien
cacaggtacagcagtcggattcggt

SEQ ID NO: 3622308 - DNA, 25 bp, Homo sapien
ttctcagtgaagtcgtaggtttgca

SEQ ID NO: 3622309 - DNA, 25 bp, Homo sapien
cagtctgacacccaatgatctcgca

SEQ ID NO: 3622310 - DNA, 25 bp, Homo sapien
ccagaggattttagtcgtgaagcac

SEQ ID NO: 3622311 - DNA, 25 bp, Homo sapien
cccgactacaggactctggggacac

SEQ ID NO: 3622312 - DNA, 25 bp, Homo sapien
tcccgactacaggactctggggaca

SEQ ID NO: 3622313 - DNA, 25 bp, Homo sapien
aatgtcccgactacaggactctggg

SEQ ID NO: 3622314 - DNA, 25 bp, Homo sapien
tcaaatgtcccgactacaggactct

SEQ ID NO: 3622315 - DNA, 25 bp, Homo sapien
taaaattcttgccagcgctgcaccg

SEQ ID NO: 3622316 - DNA, 25 bp, Homo sapien
tatcctaacctgaactcggtcctgg

SEQ ID NO: 3622317 - DNA, 25 bp, Homo sapien
cagctgccagcaatgtagacttgag

SEQ ID NO: 3622318 - DNA, 25 bp, Homo sapien
tcccagggcgatcggaatctctgca

SEQ ID NO: 3622319 - DNA, 25 bp, Homo sapien
cttggtccagcagcctatccacgtg

SEQ ID NO: 3622320 - DNA, 25 bp, Homo sapien
gaagccggcctcctggactgagctt

SEQ ID NO: 3622321 - DNA, 25 bp, Homo sapien
taacttggcaagaacaggcaaacgc

SEQ ID NO: 3622322 - DNA, 25 bp, Homo sapien
agagccctggctgtctggaggcaca

SEQ ID NO: 3622323 - DNA, 25 bp, Homo sapien
gattggcccacacagattttgtaag

SEQ ID NO: 3622324 - DNA, 25 bp, Homo sapien
caggccgtcctgagcctattcaaag

SEQ ID NO: 3622325 - DNA, 25 bp, Homo sapien
tgtacaagatgttttgctcgctgga

SEQ ID NO: 3622326 - DNA, 25 bp, Homo sapien
gcgccatctgccgaacgttctgtca

SEQ ID NO: 3622327 - DNA, 25 bp, Homo sapien
ggaagcaccagatttattttaaatg

SEQ ID NO: 3622328 - DNA, 25 bp, Homo sapien
gaagcaccagatttattttaaatga

SEQ ID NO: 3622329 - DNA, 25 bp, Homo sapien
taaataaggccaatggtgggttgat

SEQ ID NO: 3622330 - DNA, 25 bp, Homo sapien
aaggccaatggtgggttgataatat

SEQ ID NO: 3622331 - DNA, 25 bp, Homo sapien
aataaggccaatggtgggttgataa

SEQ ID NO: 3622332 - DNA, 25 bp, Homo sapien
ccagtaaataaggccaatggtgggt

SEQ ID NO: 3622333 - DNA, 25 bp, Homo sapien
cattagacacggagaggaacaggag

SEQ ID NO: 3622334 - DNA, 25 bp, Homo sapien
gaacattagacacggagaggaacag

SEQ ID NO: 3622335 - DNA, 25 bp, Homo sapien
tggcagtggaacattagacacggag

SEQ ID NO: 3622336 - DNA, 25 bp, Homo sapien
tgcatgtgggcctgaaagtccctgc

SEQ ID NO: 3622337 - DNA, 25 bp, Homo sapien
tcgtgccgcttctccagccagaatg

SEQ ID NO: 3622338 - DNA, 25 bp, Homo sapien
gccgcttctccagccagaatggtag

SEQ ID NO: 3622339 - DNA, 25 bp, Homo sapien
gtgccgcttctccagccagaatggt

SEQ ID NO: 3622340 - DNA, 25 bp, Homo sapien
tgccgcttctccagccagaatggta

SEQ ID NO: 3622341 - DNA, 25 bp, Homo sapien
taataaattacgcttacagtgctcc

SEQ ID NO: 3622342 - DNA, 25 bp, Homo sapien
ttctgtaggccaccttagagctttc

SEQ ID NO: 3622343 - DNA, 25 bp, Homo sapien
tcctgctgatgaaggcacctgagct

SEQ ID NO: 3622344 - DNA, 25 bp, Homo sapien
tgagctgaatacagttacatccggg

SEQ ID NO: 3622345 - DNA, 25 bp, Homo sapien
gatggagaggaggttccgactcgca

SEQ ID NO: 3622346 - DNA, 25 bp, Homo sapien
ggagaggaggttccgactcgcaggg

SEQ ID NO: 3622347 - DNA, 25 bp, Homo sapien
tcagacgtccgtacccgcagggggc

SEQ ID NO: 3622348 - DNA, 25 bp, Homo sapien
gggctcgaacctggaggagggctcg

SEQ ID NO: 3622349 - DNA, 25 bp, Homo sapien
cacctctgggagcaacgtaatgtta

SEQ ID NO: 3622350 - DNA, 25 bp, Homo sapien
taatgttagagagtgctggttgcca

SEQ ID NO: 3622351 - DNA, 25 bp, Homo sapien
caaacacgtggttggaactgagtag

SEQ ID NO: 3622352 - DNA, 25 bp, Homo sapien
aaccttctaggacagctggcatacc

SEQ ID NO: 3622353 - DNA, 25 bp, Homo sapien
gcgcccggcctcagagaattaaaga

SEQ ID NO: 3622354 - DNA, 25 bp, Homo sapien
ccacatacgtgtaatggaagccgca

SEQ ID NO: 3622355 - DNA, 25 bp, Homo sapien
tatacctgttgggatggctgttgcc

SEQ ID NO: 3622356 - DNA, 25 bp, Homo sapien
tcgaattcactagatgggctcaata

SEQ ID NO: 3622357 - DNA, 25 bp, Homo sapien
gcctttgtgcctcagtgtcaagaga

SEQ ID NO: 3622358 - DNA, 25 bp, Homo sapien
acacagggctggaggttctacaaca

SEQ ID NO: 3622359 - DNA, 25 bp, Homo sapien
tcagatgaggaatgagccgagatgc

SEQ ID NO: 3622360 - DNA, 25 bp, Homo sapien
gctgtggtctgatcttaagggtcta

SEQ ID NO: 3622361 - DNA, 25 bp, Homo sapien
tagaaaaacgtcaggtatggaaggc

SEQ ID NO: 3622362 - DNA, 25 bp, Homo sapien
tcaggaagctggttactggctctac

SEQ ID NO: 3622363 - DNA, 25 bp, Homo sapien
caaagtcaccctaaaagaagatctg

SEQ ID NO: 3622364 - DNA, 25 bp, Homo sapien
tcataccagggtactgcaataccac

SEQ ID NO: 3622365 - DNA, 25 bp, Homo sapien
tgctgagaggcaagtacaaaccacg

SEQ ID NO: 3622366 - DNA, 25 bp, Homo sapien
cactttgcaacagcactgaaatggc

SEQ ID NO: 3622367 - DNA, 25 bp, Homo sapien
tagttacatccagtgtgatgggtgc

SEQ ID NO: 3622368 - DNA, 25 bp, Homo sapien
cctgagatatgtgtccagcaaggag

SEQ ID NO: 3622369 - DNA, 25 bp, Homo sapien
catcccaggtagagagggtagcaca

SEQ ID NO: 3622370 - DNA, 25 bp, Homo sapien
caaataatactttccgtgtgcatag

SEQ ID NO: 3622371 - DNA, 25 bp, Homo sapien
ttcagattctgagatgcaccctatc

SEQ ID NO: 3622372 - DNA, 25 bp, Homo sapien
tgagttaggaccaagttgatgggcc

SEQ ID NO: 3622373 - DNA, 25 bp, Homo sapien
caagctcaacctgggaggcccattc

SEQ ID NO: 3622374 - DNA, 25 bp, Homo sapien
gacacactcgcctttctcaggtgga

SEQ ID NO: 3622375 - DNA, 25 bp, Homo sapien
gactcatgtcttccaacggttaaag

SEQ ID NO: 3622376 - DNA, 25 bp, Homo sapien
caggctcgccaggatacatcacagc

SEQ ID NO: 3622377 - DNA, 25 bp, Homo sapien
tattgttgacaaccagtgcttgaat

SEQ ID NO: 3622378 - DNA, 25 bp, Homo sapien
taaatgacctgcaaatctagactgg

SEQ ID NO: 3622379 - DNA, 25 bp, Homo sapien
tgaaatagccaggattaaatgacct

SEQ ID NO: 3622380 - DNA, 25 bp, Homo sapien
taaaatatcgtcctgagctctgcct

SEQ ID NO: 3622381 - DNA, 25 bp, Homo sapien
ggccatccagtctctatgtcaacta

SEQ ID NO: 3622382 - DNA, 25 bp, Homo sapien
ctactcaattctgccttcgaatctg

SEQ ID NO: 3622383 - DNA, 25 bp, Homo sapien
tactttaggcttcagggccatccag

SEQ ID NO: 3622384 - DNA, 25 bp, Homo sapien
ttctgccttcgaatctgaaagcagc

SEQ ID NO: 3622385 - DNA, 25 bp, Homo sapien
tcctcatggagaaccagcctattcg

SEQ ID NO: 3622386 - DNA, 25 bp, Homo sapien
gaaggtatactctgaactgcaacaa

SEQ ID NO: 3622387 - DNA, 25 bp, Homo sapien
ctatctttaagaggcagtgccaagc

SEQ ID NO: 3622388 - DNA, 25 bp, Homo sapien
tgcactctgcaactggtaagccttc

SEQ ID NO: 3622389 - DNA, 25 bp, Homo sapien
gtaactggtaattcctgcaatttca

SEQ ID NO: 3622390 - DNA, 25 bp, Homo sapien
tcagaactctggcttgttggacgta

SEQ ID NO: 3622391 - DNA, 25 bp, Homo sapien
aactggtaattcctgcaatttcaac

SEQ ID NO: 3622392 - DNA, 25 bp, Homo sapien
gcttgttggacgtaactggtaattc

SEQ ID NO: 3622393 - DNA, 25 bp, Homo sapien
caggcatggtctttcacggaagcca

SEQ ID NO: 3622394 - DNA, 25 bp, Homo sapien
tatggcacgtggcagcagaatccag

SEQ ID NO: 3622395 - DNA, 25 bp, Homo sapien
aaaacaatgatgcaacctccctggt

SEQ ID NO: 3622396 - DNA, 25 bp, Homo sapien
tctcagggtgctccactatggcacg

SEQ ID NO: 3622397 - DNA, 25 bp, Homo sapien
caacagtggagactgctttggagga

SEQ ID NO: 3622398 - DNA, 25 bp, Homo sapien
gtcacaacaacagtggagactgctt

SEQ ID NO: 3622399 - DNA, 25 bp, Homo sapien
atgcagggacagtctggatgcgcac

SEQ ID NO: 3622400 - DNA, 25 bp, Homo sapien
ctcaggtgcctgtttaggagacgga

SEQ ID NO: 3622401 - DNA, 25 bp, Homo sapien
gcagtgaggaaactaacaggcttat

SEQ ID NO: 3622402 - DNA, 25 bp, Homo sapien
gaaactaacaggcttattgccagca

SEQ ID NO: 3622403 - DNA, 25 bp, Homo sapien
tgccagcaatgagcttagtgcctgc

SEQ ID NO: 3622404 - DNA, 25 bp, Homo sapien
tgaggatgatgttgcggcccaaccc

SEQ ID NO: 3622405 - DNA, 25 bp, Homo sapien
gggaactgtgatccgtgtaggcaac

SEQ ID NO: 3622406 - DNA, 25 bp, Homo sapien
tgaccacgctcttgcccttcattgg

SEQ ID NO: 3622407 - DNA, 25 bp, Homo sapien
gggctgtgaccacgctcttgccctt

SEQ ID NO: 3622408 - DNA, 25 bp, Homo sapien
ctgtgatccgtgtaggcaacttccc

SEQ ID NO: 3622409 - DNA, 25 bp, Homo sapien
tattttatactgtccatacacaccc

SEQ ID NO: 3622410 - DNA, 25 bp, Homo sapien
aggcttccctatatagcttgctcag

SEQ ID NO: 3622411 - DNA, 25 bp, Homo sapien
gcttgctcagtaaagcgaaactgta

SEQ ID NO: 3622412 - DNA, 25 bp, Homo sapien
tgctctggcttttatcccaatttat

SEQ ID NO: 3622413 - DNA, 25 bp, Homo sapien
gaagacacagacacgaaacctagaa

SEQ ID NO: 3622414 - DNA, 25 bp, Homo sapien
taaaaagacgtggtatcagcactgc

SEQ ID NO: 3622415 - DNA, 25 bp, Homo sapien
gcaaagatttactcaccagggagca

SEQ ID NO: 3622416 - DNA, 25 bp, Homo sapien
ttttcaccagtaagacaggtatgcg

SEQ ID NO: 3622417 - DNA, 25 bp, Homo sapien
gcagagccccttctaccggttacta

SEQ ID NO: 3622418 - DNA, 25 bp, Homo sapien
tcagtatctgtgtatggcctagaac

SEQ ID NO: 3622419 - DNA, 25 bp, Homo sapien
gaaacgttcacacataagcccagac

SEQ ID NO: 3622420 - DNA, 25 bp, Homo sapien
gaaacgcatcctttagcagagcccc

SEQ ID NO: 3622421 - DNA, 25 bp, Homo sapien
tgaaaagaatgtatgcaagtatcat

SEQ ID NO: 3622422 - DNA, 25 bp, Homo sapien
tattttgtctgcactgttctttacc

SEQ ID NO: 3622423 - DNA, 25 bp, Homo sapien
aacacagacaaaagcctatcagtaa

SEQ ID NO: 3622424 - DNA, 25 bp, Homo sapien
cacagtctgacacataaattgtgtt

SEQ ID NO: 3622425 - DNA, 25 bp, Homo sapien
taaggacaccgctgaagtatggaca

SEQ ID NO: 3622426 - DNA, 25 bp, Homo sapien
catgtccggagtgattcgcagaacc

SEQ ID NO: 3622427 - DNA, 25 bp, Homo sapien
taacctgggacttggccaatgtggc

SEQ ID NO: 3622428 - DNA, 25 bp, Homo sapien
tagtgttgcctcctgtcccgaagag

SEQ ID NO: 3622429 - DNA, 25 bp, Homo sapien
caaacttccgtttcatgggtagatg

SEQ ID NO: 3622430 - DNA, 25 bp, Homo sapien
gtgtacaactgagcccggcttccca

SEQ ID NO: 3622431 - DNA, 25 bp, Homo sapien
tgtaacagatgcaagccttttaacc

SEQ ID NO: 3622432 - DNA, 25 bp, Homo sapien
taaccttactcagggacttcgtctc

SEQ ID NO: 3622433 - DNA, 25 bp, Homo sapien
gacttgtcaccgtgagccctgtctg

SEQ ID NO: 3622434 - DNA, 25 bp, Homo sapien
gacattttgaatgacggcagccgtg

SEQ ID NO: 3622435 - DNA, 25 bp, Homo sapien
tcgtggctggcttactcacagggct

SEQ ID NO: 3622436 - DNA, 25 bp, Homo sapien
acagtggctgccgtagtctgcgctt

SEQ ID NO: 3622437 - DNA, 25 bp, Homo sapien
atctctgcttcccaatgaccacggc

SEQ ID NO: 3622438 - DNA, 25 bp, Homo sapien
caatgaccacggcttccctgtttac

SEQ ID NO: 3622439 - DNA, 25 bp, Homo sapien
actcatcagcccacctctgggtctg

SEQ ID NO: 3622440 - DNA, 25 bp, Homo sapien
ccagacactgcccatctgactcatc

SEQ ID NO: 3622441 - DNA, 25 bp, Homo sapien
ggctggaacccggatctgcggtcct

SEQ ID NO: 3622442 - DNA, 25 bp, Homo sapien
gaaggctaggctgggccaccactcg

SEQ ID NO: 3622443 - DNA, 25 bp, Homo sapien
gggcactactttggtctgtgtggca

SEQ ID NO: 3622444 - DNA, 25 bp, Homo sapien
ggcaatgtctgtgccggccctcccg

SEQ ID NO: 3622445 - DNA, 25 bp, Homo sapien
acagtccagcagagccagagtggct

SEQ ID NO: 3622446 - DNA, 25 bp, Homo sapien
cagtccagcagagccagagtggctc

SEQ ID NO: 3622447 - DNA, 25 bp, Homo sapien
agacagtccagcagagccagagtgg

SEQ ID NO: 3622448 - DNA, 25 bp, Homo sapien
ctgagacagtccagcagagccagag

SEQ ID NO: 3622449 - DNA, 25 bp, Homo sapien
cccagatgtggcattgttggtgaag

SEQ ID NO: 3622450 - DNA, 25 bp, Homo sapien
tgttcccagatgtggcattgttggt

SEQ ID NO: 3622451 - DNA, 25 bp, Homo sapien
tggggaaagcattgttcccagatgt

SEQ ID NO: 3622452 - DNA, 25 bp, Homo sapien
tcccagatgtggcattgttggtgaa

SEQ ID NO: 3622453 - DNA, 25 bp, Homo sapien
gctaaggacctttatggagctctcc

SEQ ID NO: 3622454 - DNA, 25 bp, Homo sapien
tctgagactgtggaagggccgcttt

SEQ ID NO: 3622455 - DNA, 25 bp, Homo sapien
tgttcactgccgatacaggtggagg

SEQ ID NO: 3622456 - DNA, 25 bp, Homo sapien
ggcatactggagtcactgaggctca

SEQ ID NO: 3622457 - DNA, 25 bp, Homo sapien
cagctgcttgtgcttggtgaatccg

SEQ ID NO: 3622458 - DNA, 25 bp, Homo sapien
gatgggggcttgggtttttgctgaa

SEQ ID NO: 3622459 - DNA, 25 bp, Homo sapien
tgcagctgcttgtgcttggtgaatc

SEQ ID NO: 3622460 - DNA, 25 bp, Homo sapien
tgggggcttgggtttttgctgaaga

SEQ ID NO: 3622461 - DNA, 25 bp, Homo sapien
gatccacagctttcgtccaatgtcg

SEQ ID NO: 3622462 - DNA, 25 bp, Homo sapien
gtaatgtagccgatccagtgcacca

SEQ ID NO: 3622463 - DNA, 25 bp, Homo sapien
cggtcacgatgcaggtagatccaca

SEQ ID NO: 3622464 - DNA, 25 bp, Homo sapien
caatgtcgtatttcacacagggatc

SEQ ID NO: 3622465 - DNA, 25 bp, Homo sapien
actgggagtccttaagcagttcaca

SEQ ID NO: 3622466 - DNA, 25 bp, Homo sapien
gtgcaagaaactgggagtccttaag

SEQ ID NO: 3622467 - DNA, 25 bp, Homo sapien
tgagtgctggtgacatctggtgcaa

SEQ ID NO: 3622468 - DNA, 25 bp, Homo sapien
ctgagtgctggtgacatctggtgca

SEQ ID NO: 3622469 - DNA, 25 bp, Homo sapien
tctccattaggcagtcgagccgcag

SEQ ID NO: 3622470 - DNA, 25 bp, Homo sapien
ttaggcagtcgagccgcagcgtccc

SEQ ID NO: 3622471 - DNA, 25 bp, Homo sapien
ttctccattaggcagtcgagccgca

SEQ ID NO: 3622472 - DNA, 25 bp, Homo sapien
ccattaggcagtcgagccgcagcgt

SEQ ID NO: 3622473 - DNA, 25 bp, Homo sapien
gttcctacggaggtacaatctcctg

SEQ ID NO: 3622474 - DNA, 25 bp, Homo sapien
acaagtcaggcagggttcctacgga

SEQ ID NO: 3622475 - DNA, 25 bp, Homo sapien
cagtccacaagtcaggcagggttcc

SEQ ID NO: 3622476 - DNA, 25 bp, Homo sapien
tcaggcagggttcctacggaggtac

SEQ ID NO: 3622477 - DNA, 25 bp, Homo sapien
gcagggagtgctcccgagccttgtt

SEQ ID NO: 3622478 - DNA, 25 bp, Homo sapien
accacagactcaaagccgtgcatgc

SEQ ID NO: 3622479 - DNA, 25 bp, Homo sapien
gagcgaggtctccttgtcaaacacg

SEQ ID NO: 3622480 - DNA, 25 bp, Homo sapien
catgcgaaaggtgaacgccttatgg

SEQ ID NO: 3622481 - DNA, 25 bp, Homo sapien
cccgtgctgggacgcaccacatagt

SEQ ID NO: 3622482 - DNA, 25 bp, Homo sapien
cgtgctgggacgcaccacatagtca

SEQ ID NO: 3622483 - DNA, 25 bp, Homo sapien
gctgggacgcaccacatagtcagtt

SEQ ID NO: 3622484 - DNA, 25 bp, Homo sapien
gggacgcaccacatagtcagttctt

SEQ ID NO: 3622485 - DNA, 25 bp, Homo sapien
agaaaactaccgaaccatgccaggg

SEQ ID NO: 3622486 - DNA, 25 bp, Homo sapien
catggaaagatgtccctcaagaagc

SEQ ID NO: 3622487 - DNA, 25 bp, Homo sapien
ttctaaaggcaacaaacaattcggc

SEQ ID NO: 3622488 - DNA, 25 bp, Homo sapien
acagctggcacgtgtgtcagaccca

SEQ ID NO: 3622489 - DNA, 25 bp, Homo sapien
tggactaagatggcctagatgaata

SEQ ID NO: 3622490 - DNA, 25 bp, Homo sapien
aacttcatgcttccatttactggac

SEQ ID NO: 3622491 - DNA, 25 bp, Homo sapien
aaagtatgtccacctacaaagcagg

SEQ ID NO: 3622492 - DNA, 25 bp, Homo sapien
taattctcaagtaggagcccaggga

SEQ ID NO: 3622493 - DNA, 25 bp, Homo sapien
acccaccactacagtattgtactca

SEQ ID NO: 3622494 - DNA, 25 bp, Homo sapien
gaagcccattacagctctagcatac

SEQ ID NO: 3622495 - DNA, 25 bp, Homo sapien
tctagcataccaagaagtattaaca

SEQ ID NO: 3622496 - DNA, 25 bp, Homo sapien
aaaaccaaggcagtatctgaactac

SEQ ID NO: 3622497 - DNA, 25 bp, Homo sapien
ccgagggacaggtgttgtggcatct

SEQ ID NO: 3622498 - DNA, 25 bp, Homo sapien
cgagggacaggtgttgtggcatctg

SEQ ID NO: 3622499 - DNA, 25 bp, Homo sapien
aagagggcagctaattccttttcat

SEQ ID NO: 3622500 - DNA, 25 bp, Homo sapien
caagcaacttccactgctgggtttt

SEQ ID NO: 3622501 - DNA, 25 bp, Homo sapien
tttctctttgaattcaacaaatgga

SEQ ID NO: 3622502 - DNA, 25 bp, Homo sapien
tctttgaattcaacaaatggagaga

SEQ ID NO: 3622503 - DNA, 25 bp, Homo sapien
ctgggttttctctttgaattcaaca

SEQ ID NO: 3622504 - DNA, 25 bp, Homo sapien
gggctggtagtaccaactcagccca

SEQ ID NO: 3622505 - DNA, 25 bp, Homo sapien
gtagtaccaactcagcccagttggg

SEQ ID NO: 3622506 - DNA, 25 bp, Homo sapien
gctggcgatgactgccaatccaaaa

SEQ ID NO: 3622507 - DNA, 25 bp, Homo sapien
ggctggcgatgactgccaatccaaa

SEQ ID NO: 3622508 - DNA, 25 bp, Homo sapien
taggaaggctagcctgactctccag

SEQ ID NO: 3622509 - DNA, 25 bp, Homo sapien
ataggaaggctagcctgactctcca

SEQ ID NO: 3622510 - DNA, 25 bp, Homo sapien
cataggaaggctagcctgactctcc

SEQ ID NO: 3622511 - DNA, 25 bp, Homo sapien
gcaaggcttgaggtcttcaaggggc

SEQ ID NO: 3622512 - DNA, 25 bp, Homo sapien
ttcattgattccaaggcaaggcttg

SEQ ID NO: 3622513 - DNA, 25 bp, Homo sapien
tcattgattccaaggcaaggcttga

SEQ ID NO: 3622514 - DNA, 25 bp, Homo sapien
cttgatagcaggaattgccagcgga

SEQ ID NO: 3622515 - DNA, 25 bp, Homo sapien
ttaaggacagccaagtcatataagg

SEQ ID NO: 3622516 - DNA, 25 bp, Homo sapien
ggtgcgaccccttcagtactgctta

SEQ ID NO: 3622517 - DNA, 25 bp, Homo sapien
tgcttagcggctcggccaggtcctc

SEQ ID NO: 3622518 - DNA, 25 bp, Homo sapien
tgtcattgagagtcaggtcccctgt

SEQ ID NO: 3622519 - DNA, 25 bp, Homo sapien
ttcctgccagcatttactcgagtca

SEQ ID NO: 3622520 - DNA, 25 bp, Homo sapien
tcatgatgtcattgagagtcaggtc

SEQ ID NO: 3622521 - DNA, 25 bp, Homo sapien
gcatttactcgagtcatgatgtcat

SEQ ID NO: 3622522 - DNA, 25 bp, Homo sapien
tcagcaggccctgcgaagtcaaagc

SEQ ID NO: 3622523 - DNA, 25 bp, Homo sapien
gagacgattcctatactcgacagtg

SEQ ID NO: 3622524 - DNA, 25 bp, Homo sapien
acatacagacgaggcagtgatgccc

SEQ ID NO: 3622525 - DNA, 25 bp, Homo sapien
gtgatgccccgtgtcttcctcagga

SEQ ID NO: 3622526 - DNA, 25 bp, Homo sapien
tcgtggtgcttctttaacattatct

SEQ ID NO: 3622527 - DNA, 25 bp, Homo sapien
tcaggtctccaccgcaatgtcccag

SEQ ID NO: 3622528 - DNA, 25 bp, Homo sapien
ggtctccaccgcaatgtcccagaat

SEQ ID NO: 3622529 - DNA, 25 bp, Homo sapien
gtgacagcggcagcttggttctcac

SEQ ID NO: 3622530 - DNA, 25 bp, Homo sapien
aggtctccaccgcaatgtcccagaa

SEQ ID NO: 3622531 - DNA, 25 bp, Homo sapien
cgtggttgaaagtgtgggcaccacc

SEQ ID NO: 3622532 - DNA, 25 bp, Homo sapien
ctgcagttttcatatccgtggttga

SEQ ID NO: 3622533 - DNA, 25 bp, Homo sapien
ggcaccgcaggactaggagaacgtg

SEQ ID NO: 3622534 - DNA, 25 bp, Homo sapien
ttcatatccgtggttgaaagtgtgg

SEQ ID NO: 3622535 - DNA, 25 bp, Homo sapien
tggagagctcggaagccatgagctg

SEQ ID NO: 3622536 - DNA, 25 bp, Homo sapien
aaattgttcttgtaaatccaacgtg

SEQ ID NO: 3622537 - DNA, 25 bp, Homo sapien
aattgttcttgtaaatccaacgtgg

SEQ ID NO: 3622538 - DNA, 25 bp, Homo sapien
agccaacaacatggaggccagggtt

SEQ ID NO: 3622539 - DNA, 25 bp, Homo sapien
catttgggttcaacaaggctaagcc

SEQ ID NO: 3622540 - DNA, 25 bp, Homo sapien
acatggaggccagggttccacaatc

SEQ ID NO: 3622541 - DNA, 25 bp, Homo sapien
gtggccatttgggttcaacaaggct

SEQ ID NO: 3622542 - DNA, 25 bp, Homo sapien
ctaccccagaggagctggagcacac

SEQ ID NO: 3622543 - DNA, 25 bp, Homo sapien
gagccactactactctcctgtaagg

SEQ ID NO: 3622544 - DNA, 25 bp, Homo sapien
gaagagagacttcaacagagtgctg

SEQ ID NO: 3622545 - DNA, 25 bp, Homo sapien
tgcagcaggccaagagccactacta

SEQ ID NO: 3622546 - DNA, 25 bp, Homo sapien
aagagagacttcaacagagtgctgg

SEQ ID NO: 3622547 - DNA, 25 bp, Homo sapien
actcccgctcctcaggtgtgcggga

SEQ ID NO: 3622548 - DNA, 25 bp, Homo sapien
aagaccttcaagtagcgctgctggg

SEQ ID NO: 3622549 - DNA, 25 bp, Homo sapien
catcagatgacagggctgtgtcacc

SEQ ID NO: 3622550 - DNA, 25 bp, Homo sapien
tctttcacttcccttaagaccttca

SEQ ID NO: 3622551 - DNA, 25 bp, Homo sapien
gcggggccactccgccgggccatct

SEQ ID NO: 3622552 - DNA, 25 bp, Homo sapien
ggccactccgccgggccatctccag

SEQ ID NO: 3622553 - DNA, 25 bp, Homo sapien
ggcggggccactccgccgggccatc

SEQ ID NO: 3622554 - DNA, 25 bp, Homo sapien
ggggccactccgccgggccatctcc

SEQ ID NO: 3622555 - DNA, 25 bp, Homo sapien
actccgggaagcaagaatttgcttc

SEQ ID NO: 3622556 - DNA, 25 bp, Homo sapien
gcttcagcagccgatggaaatactg

SEQ ID NO: 3622557 - DNA, 25 bp, Homo sapien
aggtagcgcttgtactgtgacttga

SEQ ID NO: 3622558 - DNA, 25 bp, Homo sapien
ataactgccggtacttgaccacctc

SEQ ID NO: 3622559 - DNA, 25 bp, Homo sapien
tgtaacttaaagagtggcccaaagc

SEQ ID NO: 3622560 - DNA, 25 bp, Homo sapien
cagaacaaagtcaccctggaaggga

SEQ ID NO: 3622561 - DNA, 25 bp, Homo sapien
ggtgaaaaggctactctctctggtc

SEQ ID NO: 3622562 - DNA, 25 bp, Homo sapien
cagttgagaatcacccatggaagca

SEQ ID NO: 3622563 - DNA, 25 bp, Homo sapien
acagcctagacagcaaagtgttaca

SEQ ID NO: 3622564 - DNA, 25 bp, Homo sapien
gcaaagtgttacacaaaaccgctct

SEQ ID NO: 3622565 - DNA, 25 bp, Homo sapien
gatgctggttacaagctgaattcat

SEQ ID NO: 3622566 - DNA, 25 bp, Homo sapien
tgctggttacaagctgatgctggtt

SEQ ID NO: 3622567 - DNA, 25 bp, Homo sapien
ccacataaagtgaacgtgtgcccat

SEQ ID NO: 3622568 - DNA, 25 bp, Homo sapien
ggaatacccacataaagtgaacgtg

SEQ ID NO: 3622569 - DNA, 25 bp, Homo sapien
gaaaggaatacccacataaagtgaa

SEQ ID NO: 3622570 - DNA, 25 bp, Homo sapien
tacccacataaagtgaacgtgtgcc

SEQ ID NO: 3622571 - DNA, 25 bp, Homo sapien
tgcagagggtttccaaagcggaagt

SEQ ID NO: 3622572 - DNA, 25 bp, Homo sapien
aacaaggctaagatgagttcattct

SEQ ID NO: 3622573 - DNA, 25 bp, Homo sapien
taagatgagttcattctgctgctca

SEQ ID NO: 3622574 - DNA, 25 bp, Homo sapien
tctgggcaatgtgcagagggtttcc

SEQ ID NO: 3622575 - DNA, 25 bp, Homo sapien
taatgatgacaatgacgcatcttgc

SEQ ID NO: 3622576 - DNA, 25 bp, Homo sapien
ttaatgatgacaatgacgcatcttg

SEQ ID NO: 3622577 - DNA, 25 bp, Homo sapien
cttaatgatgacaatgacgcatctt

SEQ ID NO: 3622578 - DNA, 25 bp, Homo sapien
cgtgcttgcagtgggactcaatatt

SEQ ID NO: 3622579 - DNA, 25 bp, Homo sapien
gaaaatagatccaggcattaagcat

SEQ ID NO: 3622580 - DNA, 25 bp, Homo sapien
ccagtgatgttctacggttgaaaag

SEQ ID NO: 3622581 - DNA, 25 bp, Homo sapien
gccttgtccgtgcttgcagtgggac

SEQ ID NO: 3622582 - DNA, 25 bp, Homo sapien
agttattctggcatgttattaaaca

SEQ ID NO: 3622583 - DNA, 25 bp, Homo sapien
attaaacatgcggaacgtagcttgt

SEQ ID NO: 3622584 - DNA, 25 bp, Homo sapien
ccatggttaaaatacacaaccattt

SEQ ID NO: 3622585 - DNA, 25 bp, Homo sapien
aaatagggcttaaatcatgttatca

SEQ ID NO: 3622586 - DNA, 25 bp, Homo sapien
gaggcaatcctccatgatgcgcgtg

SEQ ID NO: 3622587 - DNA, 25 bp, Homo sapien
ggtcctcgggcagactaactctggt

SEQ ID NO: 3622588 - DNA, 25 bp, Homo sapien
cacacggaccaagttccagaggatc

SEQ ID NO: 3622589 - DNA, 25 bp, Homo sapien
tgtcagcatatggtctaaggaatcc

SEQ ID NO: 3622590 - DNA, 25 bp, Homo sapien
cagaaaggcagaaattccagggatc

SEQ ID NO: 3622591 - DNA, 25 bp, Homo sapien
ggaaaacattcaacctccagccagt

SEQ ID NO: 3622592 - DNA, 25 bp, Homo sapien
tatccttgcaccctaattacagcta

SEQ ID NO: 3622593 - DNA, 25 bp, Homo sapien
tccagggatctagttgatgctaaca

SEQ ID NO: 3622594 - DNA, 25 bp, Homo sapien
gcgggcagtccccttgaatccatga

SEQ ID NO: 3622595 - DNA, 25 bp, Homo sapien
ggcgggcagtccccttgaatccatg

SEQ ID NO: 3622596 - DNA, 25 bp, Homo sapien
aggcgggcagtccccttgaatccat

SEQ ID NO: 3622597 - DNA, 25 bp, Homo sapien
caggcgggcagtccccttgaatcca

SEQ ID NO: 3622598 - DNA, 25 bp, Homo sapien
aaacaccacattccacaaatcttac

SEQ ID NO: 3622599 - DNA, 25 bp, Homo sapien
caaacaccacattccacaaatctta

SEQ ID NO: 3622600 - DNA, 25 bp, Homo sapien
acgccaggtgtcaatttccttattt

SEQ ID NO: 3622601 - DNA, 25 bp, Homo sapien
cacgccaggtgtcaatttccttatt

SEQ ID NO: 3622602 - DNA, 25 bp, Homo sapien
cgccaggtgtcaatttccttatttg

SEQ ID NO: 3622603 - DNA, 25 bp, Homo sapien
gccaggtgtcaatttccttatttga

SEQ ID NO: 3622604 - DNA, 25 bp, Homo sapien
ccgcgggctcccagacgcactcgct

SEQ ID NO: 3622605 - DNA, 25 bp, Homo sapien
tagtagaagcagggttacaccgtgt

SEQ ID NO: 3622606 - DNA, 25 bp, Homo sapien
gaggtggagtcttgcactgtgaccc

SEQ ID NO: 3622607 - DNA, 25 bp, Homo sapien
aggtggagtcttgcactgtgaccca

SEQ ID NO: 3622608 - DNA, 25 bp, Homo sapien
tagaagcagggttacaccgtgttgg

SEQ ID NO: 3622609 - DNA, 25 bp, Homo sapien
tgtcttgagagaggccacaatatcc

SEQ ID NO: 3622610 - DNA, 25 bp, Homo sapien
gggaacaactacatgaacgcagtct

SEQ ID NO: 3622611 - DNA, 25 bp, Homo sapien
tctgttctgtggcaaaaaccgaggg

SEQ ID NO: 3622612 - DNA, 25 bp, Homo sapien
tgagcttctgacctaatccactgag

SEQ ID NO: 3622613 - DNA, 25 bp, Homo sapien
cgctgcttccgttcccgttggtggt

SEQ ID NO: 3622614 - DNA, 25 bp, Homo sapien
tcgctgcttccgttcccgttggtgg

SEQ ID NO: 3622615 - DNA, 25 bp, Homo sapien
ttcgctgcttccgttcccgttggtg

SEQ ID NO: 3622616 - DNA, 25 bp, Homo sapien
gtgtgcaggtggctcgacctggact

SEQ ID NO: 3622617 - DNA, 25 bp, Homo sapien
gaagtaaccgccttcacctggccag

SEQ ID NO: 3622618 - DNA, 25 bp, Homo sapien
cgaagtaaccgccttcacctggcca

SEQ ID NO: 3622619 - DNA, 25 bp, Homo sapien
gaggaagcgtcatcatttgaatctc

SEQ ID NO: 3622620 - DNA, 25 bp, Homo sapien
gacccggaggaagcgtcatcatttg

SEQ ID NO: 3622621 - DNA, 25 bp, Homo sapien
cccggaggaagcgtcatcatttgaa

SEQ ID NO: 3622622 - DNA, 25 bp, Homo sapien
ctgacccggaggaagcgtcatcatt

SEQ ID NO: 3622623 - DNA, 25 bp, Homo sapien
aatagccacggaaggaattccaagc

SEQ ID NO: 3622624 - DNA, 25 bp, Homo sapien
atagccacggaaggaattccaagca

SEQ ID NO: 3622625 - DNA, 25 bp, Homo sapien
tagccacggaaggaattccaagcac

SEQ ID NO: 3622626 - DNA, 25 bp, Homo sapien
gccacggaaggaattccaagcactg

SEQ ID NO: 3622627 - DNA, 25 bp, Homo sapien
ctgagggactcaacggctgcccaga

SEQ ID NO: 3622628 - DNA, 25 bp, Homo sapien
gctgagggactcaacggctgcccag

SEQ ID NO: 3622629 - DNA, 25 bp, Homo sapien
ggctgagggactcaacggctgccca

SEQ ID NO: 3622630 - DNA, 25 bp, Homo sapien
tgggctgagggactcaacggctgcc

SEQ ID NO: 3622631 - DNA, 25 bp, Homo sapien
ctgggcggaggacggggccgaggcg

SEQ ID NO: 3622632 - DNA, 25 bp, Homo sapien
gacggggccgaggcggtaggctcgc

SEQ ID NO: 3622633 - DNA, 25 bp, Homo sapien
ggggccgaggcggtaggctcgctga

SEQ ID NO: 3622634 - DNA, 25 bp, Homo sapien
gggccgaggcggtaggctcgctgac

SEQ ID NO: 3622635 - DNA, 25 bp, Homo sapien
gctggccaacatccacagtggactg

SEQ ID NO: 3622636 - DNA, 25 bp, Homo sapien
tggagctggccaacatccacagtgg

SEQ ID NO: 3622637 - DNA, 25 bp, Homo sapien
catccacagtggactgctgtgactg

SEQ ID NO: 3622638 - DNA, 25 bp, Homo sapien
aggatcatggagctggccaacatcc

SEQ ID NO: 3622639 - DNA, 25 bp, Homo sapien
tgctaaggccagaggcctcatcagc

SEQ ID NO: 3622640 - DNA, 25 bp, Homo sapien
ttgctaaggccagaggcctcatcag

SEQ ID NO: 3622641 - DNA, 25 bp, Homo sapien
attgctaaggccagaggcctcatca

SEQ ID NO: 3622642 - DNA, 25 bp, Homo sapien
aatgaggtgctagtggcaacacggc

SEQ ID NO: 3622643 - DNA, 25 bp, Homo sapien
caaggctcagaacttccacgcagaa

SEQ ID NO: 3622644 - DNA, 25 bp, Homo sapien
ggacattacatagatcccagcccca

SEQ ID NO: 3622645 - DNA, 25 bp, Homo sapien
gcagttgtaaaatgcccaaggctca

SEQ ID NO: 3622646 - DNA, 25 bp, Homo sapien
cagttctgtcattgcttgggtgagc

SEQ ID NO: 3622647 - DNA, 25 bp, Homo sapien
gcttctttcgaatgtgctggaccat

SEQ ID NO: 3622648 - DNA, 25 bp, Homo sapien
attctctggtaatccccttgtggcg

SEQ ID NO: 3622649 - DNA, 25 bp, Homo sapien
gggtggcactgatcacagctgtcgt

SEQ ID NO: 3622650 - DNA, 25 bp, Homo sapien
tctccaggaccagcgggtcggagct

SEQ ID NO: 3622651 - DNA, 25 bp, Homo sapien
ggttcttcagaatgtgggctttgcg

SEQ ID NO: 3622652 - DNA, 25 bp, Homo sapien
tgcgcttgctggcacttttataaac

SEQ ID NO: 3622653 - DNA, 25 bp, Homo sapien
gcttccgaatgctcggtgggagctc

SEQ ID NO: 3622654 - DNA, 25 bp, Homo sapien
gccttgccatgaaagcagtatacag

SEQ ID NO: 3622655 - DNA, 25 bp, Homo sapien
cagtatacagttccactttcttgct

SEQ ID NO: 3622656 - DNA, 25 bp, Homo sapien
ctgcaaatgtaagcgccttgccatg

SEQ ID NO: 3622657 - DNA, 25 bp, Homo sapien
taagcgccttgccatgaaagcagta

SEQ ID NO: 3622658 - DNA, 25 bp, Homo sapien
ctctggcacctcttctatcttcatg

SEQ ID NO: 3622659 - DNA, 25 bp, Homo sapien
actgacaaaagtaatcacgattggg

SEQ ID NO: 3622660 - DNA, 25 bp, Homo sapien
tatgatgggtagagttaactctggc

SEQ ID NO: 3622661 - DNA, 25 bp, Homo sapien
tctgggtgtctcttcgataagtgat

SEQ ID NO: 3622662 - DNA, 25 bp, Homo sapien
gcttgaacgtcttggagcggctgat

SEQ ID NO: 3622663 - DNA, 25 bp, Homo sapien
tctgcatgtgttcccgtagtttgtc

SEQ ID NO: 3622664 - DNA, 25 bp, Homo sapien
aagctgtcgtagtctgtggacgtga

SEQ ID NO: 3622665 - DNA, 25 bp, Homo sapien
cacaggcggcacttgaacgtgaagc

SEQ ID NO: 3622666 - DNA, 25 bp, Homo sapien
tctttgcatctgttacaaatatacc

SEQ ID NO: 3622667 - DNA, 25 bp, Homo sapien
accagctttgcaaactctatttctc

SEQ ID NO: 3622668 - DNA, 25 bp, Homo sapien
gcatctgttacaaatatacccttag

SEQ ID NO: 3622669 - DNA, 25 bp, Homo sapien
tatacccttagttttcctctcctga

SEQ ID NO: 3622670 - DNA, 25 bp, Homo sapien
caggaagtctttgcggtccgaatgc

SEQ ID NO: 3622671 - DNA, 25 bp, Homo sapien
tggaacacaggaagtctttgcggtc

SEQ ID NO: 3622672 - DNA, 25 bp, Homo sapien
agtctttgcggtccgaatgccggag

SEQ ID NO: 3622673 - DNA, 25 bp, Homo sapien
aacacaggaagtctttgcggtccga

SEQ ID NO: 3622674 - DNA, 25 bp, Homo sapien
ttgtcacactctgtgcactggtaga

SEQ ID NO: 3622675 - DNA, 25 bp, Homo sapien
tatcggggcgacagaaggccttgtc

SEQ ID NO: 3622676 - DNA, 25 bp, Homo sapien
actggtagatcttttctgagtggaa

SEQ ID NO: 3622677 - DNA, 25 bp, Homo sapien
tctgagtggaagctgcgcacgtgtt

SEQ ID NO: 3622678 - DNA, 25 bp, Homo sapien
ttcatgtggctctccaaggatgtgc

SEQ ID NO: 3622679 - DNA, 25 bp, Homo sapien
tgttacagagatcacaggtcagtgg

SEQ ID NO: 3622680 - DNA, 25 bp, Homo sapien
tacaagttgggcaggtgaagtagcc

SEQ ID NO: 3622681 - DNA, 25 bp, Homo sapien
tctttcaacaaatcaaggcggtcaa

SEQ ID NO: 3622682 - DNA, 25 bp, Homo sapien
tggaagacttcccttcagttggtca

SEQ ID NO: 3622683 - DNA, 25 bp, Homo sapien
ttcccttcagttggtcattaccaat

SEQ ID NO: 3622684 - DNA, 25 bp, Homo sapien
caattggattggaagacttcccttc

SEQ ID NO: 3622685 - DNA, 25 bp, Homo sapien
ttggattggaagacttcccttcagt

SEQ ID NO: 3622686 - DNA, 25 bp, Homo sapien
ttctggttgatccagcccattcaga

SEQ ID NO: 3622687 - DNA, 25 bp, Homo sapien
gctggttcagcctcatcaaattgct

SEQ ID NO: 3622688 - DNA, 25 bp, Homo sapien
gctctcttcatgctgcggctgcagg

SEQ ID NO: 3622689 - DNA, 25 bp, Homo sapien
tctgcgcatgtcgtcggctgtcagc

SEQ ID NO: 3622690 - DNA, 25 bp, Homo sapien
atagagatcagtgccggagggactg

SEQ ID NO: 3622691 - DNA, 25 bp, Homo sapien
cagtgccggagggactgtcagctca

SEQ ID NO: 3622692 - DNA, 25 bp, Homo sapien
agatcagtgccggagggactgtcag

SEQ ID NO: 3622693 - DNA, 25 bp, Homo sapien
tgccggagggactgtcagctcagat

SEQ ID NO: 3622694 - DNA, 25 bp, Homo sapien
tagattcataatactcagaaaaaat

SEQ ID NO: 3622695 - DNA, 25 bp, Homo sapien
gattcataatactcagaaaaaatat

SEQ ID NO: 3622696 - DNA, 25 bp, Homo sapien
ctagattcataatactcagaaaaaa

SEQ ID NO: 3622697 - DNA, 25 bp, Homo sapien
ttcataatactcagaaaaaatattc

SEQ ID NO: 3622698 - DNA, 25 bp, Homo sapien
ccggccgtcgacctggaccgaatcg

SEQ ID NO: 3622699 - DNA, 25 bp, Homo sapien
caggcggataaattttggaggacgc

SEQ ID NO: 3622700 - DNA, 25 bp, Homo sapien
cccattttcgctggtgatttccagg

SEQ ID NO: 3622701 - DNA, 25 bp, Homo sapien
gaccgaatcgcctcttgcctcgtcc

SEQ ID NO: 3622702 - DNA, 25 bp, Homo sapien
ctaaggtgaaagcatctcccattgc

SEQ ID NO: 3622703 - DNA, 25 bp, Homo sapien
gcatctcccattgctgggtattggt

SEQ ID NO: 3622704 - DNA, 25 bp, Homo sapien
ctcccattgctgggtattggttatg

SEQ ID NO: 3622705 - DNA, 25 bp, Homo sapien
catctcccattgctgggtattggtt

SEQ ID NO: 3622706 - DNA, 25 bp, Homo sapien
tgctgttgcaactgctccgagctta

SEQ ID NO: 3622707 - DNA, 25 bp, Homo sapien
acattcatagcagggccaattcttc

SEQ ID NO: 3622708 - DNA, 25 bp, Homo sapien
cacatctagtttctcatcatgagaa

SEQ ID NO: 3622709 - DNA, 25 bp, Homo sapien
aaatcggcggttacattcatagcag

SEQ ID NO: 3622710 - DNA, 25 bp, Homo sapien
gaattttctggttcacgaactcagc

SEQ ID NO: 3622711 - DNA, 25 bp, Homo sapien
tgtcatgaattttctggttcacgaa

SEQ ID NO: 3622712 - DNA, 25 bp, Homo sapien
ttttctggttcacgaactcagcata

SEQ ID NO: 3622713 - DNA, 25 bp, Homo sapien
catgaattttctggttcacgaactc

SEQ ID NO: 3622714 - DNA, 25 bp, Homo sapien
tgggctggccgtacaaacatcatcc

SEQ ID NO: 3622715 - DNA, 25 bp, Homo sapien
aatacacatggtggccatactggta

SEQ ID NO: 3622716 - DNA, 25 bp, Homo sapien
catcatccagttacaaagcgtctca

SEQ ID NO: 3622717 - DNA, 25 bp, Homo sapien
tcatcagacaactcaaaccataggt

SEQ ID NO: 3622718 - DNA, 25 bp, Homo sapien
gggatgcgccgcttggagaacaccc

SEQ ID NO: 3622719 - DNA, 25 bp, Homo sapien
gaaacctgtctatgtagagcaccag

SEQ ID NO: 3622720 - DNA, 25 bp, Homo sapien
tcggacacactgaagcatgcgcgtt

SEQ ID NO: 3622721 - DNA, 25 bp, Homo sapien
catgcgcgttattgcactcctcaca

SEQ ID NO: 3622722 - DNA, 25 bp, Homo sapien
tctacactctcgatggaaggcagca

SEQ ID NO: 3622723 - DNA, 25 bp, Homo sapien
ggctcccagtcatccagatccgtgt

SEQ ID NO: 3622724 - DNA, 25 bp, Homo sapien
tttggcctccagtctgcctagaggg

SEQ ID NO: 3622725 - DNA, 25 bp, Homo sapien
agttgccaaagggtcggacccatct

SEQ ID NO: 3622726 - DNA, 25 bp, Homo sapien
gcaaaagttgaaggcacagagtaag

SEQ ID NO: 3622727 - DNA, 25 bp, Homo sapien
ctgggcaaaagttgaaggcacagag

SEQ ID NO: 3622728 - DNA, 25 bp, Homo sapien
tgggcaaaagttgaaggcacagagt

SEQ ID NO: 3622729 - DNA, 25 bp, Homo sapien
ttgaaggcacagagtaagcagacat

SEQ ID NO: 3622730 - DNA, 25 bp, Homo sapien
ggacacctgcttttggttcgctggt

SEQ ID NO: 3622731 - DNA, 25 bp, Homo sapien
acacctgcttttggttcgctggtgc

SEQ ID NO: 3622732 - DNA, 25 bp, Homo sapien
gacacctgcttttggttcgctggtg

SEQ ID NO: 3622733 - DNA, 25 bp, Homo sapien
actgctcacagcctttaagcctctg

SEQ ID NO: 3622734 - DNA, 25 bp, Homo sapien
aaacagggcgcaagggctggctgaa

SEQ ID NO: 3622735 - DNA, 25 bp, Homo sapien
tcatttttgatctgactgctcacag

SEQ ID NO: 3622736 - DNA, 25 bp, Homo sapien
aaatgacttccatctaccggctgtg

SEQ ID NO: 3622737 - DNA, 25 bp, Homo sapien
ctgctgagctgtagcatcctgttgg

SEQ ID NO: 3622738 - DNA, 25 bp, Homo sapien
gttggacataagctacctggccggg

SEQ ID NO: 3622739 - DNA, 25 bp, Homo sapien
tgtagcatcctgttggacataagct

SEQ ID NO: 3622740 - DNA, 25 bp, Homo sapien
tcctgttggacataagctacctggc

SEQ ID NO: 3622741 - DNA, 25 bp, Homo sapien
gggcgaacctggtcatcggtataga

SEQ ID NO: 3622742 - DNA, 25 bp, Homo sapien
tgtgtaggaggcaccatctgccgtg

SEQ ID NO: 3622743 - DNA, 25 bp, Homo sapien
tcggtatagacaatctgagccactg

SEQ ID NO: 3622744 - DNA, 25 bp, Homo sapien
ttcctgtgtccggaacaaagtgcac

SEQ ID NO: 3622745 - DNA, 25 bp, Homo sapien
tagaatctgcatacttaaatgtttc

SEQ ID NO: 3622746 - DNA, 25 bp, Homo sapien
cattacacgtgtatgtttactacaa

SEQ ID NO: 3622747 - DNA, 25 bp, Homo sapien
ggtccatactgagactttttaatca

SEQ ID NO: 3622748 - DNA, 25 bp, Homo sapien
tgattttgatactggtactatggtt

SEQ ID NO: 3622749 - DNA, 25 bp, Homo sapien
tcaagtgactaacctctaaagtggc

SEQ ID NO: 3622750 - DNA, 25 bp, Homo sapien
cacggtgagccacatcgatggagca

SEQ ID NO: 3622751 - DNA, 25 bp, Homo sapien
ggtctagctctcctaactcacggtg

SEQ ID NO: 3622752 - DNA, 25 bp, Homo sapien
taaagtggctgactcataatggaac

SEQ ID NO: 3622753 - DNA, 25 bp, Homo sapien
cctctcaataccaagctggaaaaga

SEQ ID NO: 3622754 - DNA, 25 bp, Homo sapien
tagtcactactagatagcagctgta

SEQ ID NO: 3622755 - DNA, 25 bp, Homo sapien
ttcatgtcggctcctaacgactagt

SEQ ID NO: 3622756 - DNA, 25 bp, Homo sapien
aacctctcaataccaagctggaaaa

SEQ ID NO: 3622757 - DNA, 25 bp, Homo sapien
ccacacatgcgagctttcatctttg

SEQ ID NO: 3622758 - DNA, 25 bp, Homo sapien
tcggccacacatgcgagctttcatc

SEQ ID NO: 3622759 - DNA, 25 bp, Homo sapien
tgtcggccacacatgcgagctttca

SEQ ID NO: 3622760 - DNA, 25 bp, Homo sapien
gatgtcggccacacatgcgagcttt

SEQ ID NO: 3622761 - DNA, 25 bp, Homo sapien
ttctcccaactggacagctccacgt

SEQ ID NO: 3622762 - DNA, 25 bp, Homo sapien
cttctcccaactggacagctccacg

SEQ ID NO: 3622763 - DNA, 25 bp, Homo sapien
cagggtacaggacagtcatctgtct

SEQ ID NO: 3622764 - DNA, 25 bp, Homo sapien
acagggtacaggacagtcatctgtc

SEQ ID NO: 3622765 - DNA, 25 bp, Homo sapien
gggtacaggacagtcatctgtctac

SEQ ID NO: 3622766 - DNA, 25 bp, Homo sapien
cacagggtacaggacagtcatctgt

SEQ ID NO: 3622767 - DNA, 25 bp, Homo sapien
tcatgaaggacggaaaggtctgtct

SEQ ID NO: 3622768 - DNA, 25 bp, Homo sapien
cacgtgtgttcatgaaggacggaaa

SEQ ID NO: 3622769 - DNA, 25 bp, Homo sapien
tgtgttcatgaaggacggaaaggtc

SEQ ID NO: 3622770 - DNA, 25 bp, Homo sapien
cacacgtgtgttcatgaaggacgga

SEQ ID NO: 3622771 - DNA, 25 bp, Homo sapien
taggcacgcaagcaaatctttcttc

SEQ ID NO: 3622772 - DNA, 25 bp, Homo sapien
tccaagtaggcacgcaagcaaatct

SEQ ID NO: 3622773 - DNA, 25 bp, Homo sapien
cctccaagtaggcacgcaagcaaat

SEQ ID NO: 3622774 - DNA, 25 bp, Homo sapien
caagtaggcacgcaagcaaatcttt

SEQ ID NO: 3622775 - DNA, 25 bp, Homo sapien
gaatgctgccggatctcccttcaaa

SEQ ID NO: 3622776 - DNA, 25 bp, Homo sapien
ggagggaacccgacatgaatgctgc

SEQ ID NO: 3622777 - DNA, 25 bp, Homo sapien
tagcctagaggaaagcaacatgaac

SEQ ID NO: 3622778 - DNA, 25 bp, Homo sapien
tcagattccgaagtccgccattatg

SEQ ID NO: 3622779 - DNA, 25 bp, Homo sapien
aagcatttaccgtcagttaggcgag

SEQ ID NO: 3622780 - DNA, 25 bp, Homo sapien
tccctgagacggcacattctagagt

SEQ ID NO: 3622781 - DNA, 25 bp, Homo sapien
ccagcctttagggtggcaacagcca

SEQ ID NO: 3622782 - DNA, 25 bp, Homo sapien
tatgtgtgcactacctgtcctcctg

SEQ ID NO: 3622783 - DNA, 25 bp, Homo sapien
ttatggagcacctatcccgtgccag

SEQ ID NO: 3622784 - DNA, 25 bp, Homo sapien
ttagacttgatctcgagggaaccag

SEQ ID NO: 3622785 - DNA, 25 bp, Homo sapien
gctttcatcctaggcaaagtggcca

SEQ ID NO: 3622786 - DNA, 25 bp, Homo sapien
cagatgacgcaatcaccaggttaga

SEQ ID NO: 3622787 - DNA, 25 bp, Homo sapien
tactgtttctggactccatatggtg

SEQ ID NO: 3622788 - DNA, 25 bp, Homo sapien
cattattctattagtgcctgtagca

SEQ ID NO: 3622789 - DNA, 25 bp, Homo sapien
caagtgtctggctatgcataatact

SEQ ID NO: 3622790 - DNA, 25 bp, Homo sapien
cctccaggtcataaatcaagtgtct

SEQ ID NO: 3622791 - DNA, 25 bp, Homo sapien
cagtttgaccgaagtggcggttcca

SEQ ID NO: 3622792 - DNA, 25 bp, Homo sapien
ccgaagtggcggttccaaaagagat

SEQ ID NO: 3622793 - DNA, 25 bp, Homo sapien
gaagtggcggttccaaaagagataa

SEQ ID NO: 3622794 - DNA, 25 bp, Homo sapien
aagaccagtttgaccgaagtggcgg

SEQ ID NO: 3622795 - DNA, 25 bp, Homo sapien
agcacagcagtgaacctctttgccc

SEQ ID NO: 3622796 - DNA, 25 bp, Homo sapien
ggcatcctcacttggaatctatgag

SEQ ID NO: 3622797 - DNA, 25 bp, Homo sapien
ggtgagtgattaacaggcatcctca

SEQ ID NO: 3622798 - DNA, 25 bp, Homo sapien
tgaggttgattactgttattatccc

SEQ ID NO: 3622799 - DNA, 25 bp, Homo sapien
gagtatcaacacctagctgcagggt

SEQ ID NO: 3622800 - DNA, 25 bp, Homo sapien
taaaggcgcgcacacaaattcaaca

SEQ ID NO: 3622801 - DNA, 25 bp, Homo sapien
taaacctgcttaacaaaagctggcg

SEQ ID NO: 3622802 - DNA, 25 bp, Homo sapien
caaggtttcaacaggcaaagcagca

SEQ ID NO: 3622803 - DNA, 25 bp, Homo sapien
cccgagtgaggtgcctcgtcccagc

SEQ ID NO: 3622804 - DNA, 25 bp, Homo sapien
cccggctggactgtaccatcgggcg

SEQ ID NO: 3622805 - DNA, 25 bp, Homo sapien
gtgcctcgtcccagccccggctgga

SEQ ID NO: 3622806 - DNA, 25 bp, Homo sapien
ccatcgggcggtgccgccgggattt

SEQ ID NO: 3622807 - DNA, 25 bp, Homo sapien
gccgggctctgagacgcggaaagag

SEQ ID NO: 3622808 - DNA, 25 bp, Homo sapien
gggtagtctggaccctggcttatct

SEQ ID NO: 3622809 - DNA, 25 bp, Homo sapien
ccagtctatggggtagtctggaccc

SEQ ID NO: 3622810 - DNA, 25 bp, Homo sapien
tctggaccctggcttatctggttcc

SEQ ID NO: 3622811 - DNA, 25 bp, Homo sapien
tcagcgggtccccgatcctctctcc

SEQ ID NO: 3622812 - DNA, 25 bp, Homo sapien
gaagatcagcgggtccccgatcctc

SEQ ID NO: 3622813 - DNA, 25 bp, Homo sapien
tgaggggagctggaagatcagcggg

SEQ ID NO: 3622814 - DNA, 25 bp, Homo sapien
agatcagcgggtccccgatcctctc

SEQ ID NO: 3622815 - DNA, 25 bp, Homo sapien
actgacaggcccagatttaggagtc

SEQ ID NO: 3622816 - DNA, 25 bp, Homo sapien
cgtgcctagagacgagaaacgctgg

SEQ ID NO: 3622817 - DNA, 25 bp, Homo sapien
gcctggcaacctgatctcgacgtta

SEQ ID NO: 3622818 - DNA, 25 bp, Homo sapien
gccgcagagtgggagcagcataaaa

SEQ ID NO: 3622819 - DNA, 25 bp, Homo sapien
caaatctcttttattgggggtaatg

SEQ ID NO: 3622820 - DNA, 25 bp, Homo sapien
taatgggcctctcgggggtcttcac

SEQ ID NO: 3622821 - DNA, 25 bp, Homo sapien
gtaatgggcctctcgggggtcttca

SEQ ID NO: 3622822 - DNA, 25 bp, Homo sapien
ttttcagactcccaaatctctttta

SEQ ID NO: 3622823 - DNA, 25 bp, Homo sapien
ccaagagttggtagtccttgtacag

SEQ ID NO: 3622824 - DNA, 25 bp, Homo sapien
gcttgaggattccctccacgacgcg

SEQ ID NO: 3622825 - DNA, 25 bp, Homo sapien
ctcaaaggcgtcgtgtgcccggaag

SEQ ID NO: 3622826 - DNA, 25 bp, Homo sapien
acagggcctcaaaggcgtcgtgtgc

SEQ ID NO: 3622827 - DNA, 25 bp, Homo sapien
gctcgaacaccgtgctggactcctt

SEQ ID NO: 3622828 - DNA, 25 bp, Homo sapien
ggatcacgaggaacacgtccatagc

SEQ ID NO: 3622829 - DNA, 25 bp, Homo sapien
cttgtggcgccggatcacgaggaac

SEQ ID NO: 3622830 - DNA, 25 bp, Homo sapien
tggcgccggatcacgaggaacacgt

SEQ ID NO: 3622831 - DNA, 25 bp, Homo sapien
acatgactgtgcagggccaaggaca

SEQ ID NO: 3622832 - DNA, 25 bp, Homo sapien
ccagaagacccaggtgtcggagact

SEQ ID NO: 3622833 - DNA, 25 bp, Homo sapien
gctttgccaccttcgattcggatga

SEQ ID NO: 3622834 - DNA, 25 bp, Homo sapien
aatacaaggtctcgtcctgcgctgg

SEQ ID NO: 3622835 - DNA, 25 bp, Homo sapien
gcatttcccgctgttccgcagagct

SEQ ID NO: 3622836 - DNA, 25 bp, Homo sapien
gaagcgctttcgcatttcccgctgt

SEQ ID NO: 3622837 - DNA, 25 bp, Homo sapien
gtcgagaacagagaagcgctttcgc

SEQ ID NO: 3622838 - DNA, 25 bp, Homo sapien
tcacactggagaccggggtccacgg

SEQ ID NO: 3622839 - DNA, 25 bp, Homo sapien
catccagtcagagtccgtggaagcg

SEQ ID NO: 3622840 - DNA, 25 bp, Homo sapien
atcatcatccagtcagagtccgtgg

SEQ ID NO: 3622841 - DNA, 25 bp, Homo sapien
ctcctgcggcttcatcatcatccag

SEQ ID NO: 3622842 - DNA, 25 bp, Homo sapien
tccagtcagagtccgtggaagcgga

SEQ ID NO: 3622843 - DNA, 25 bp, Homo sapien
tggcaggtagcatgacgtggaggtt

SEQ ID NO: 3622844 - DNA, 25 bp, Homo sapien
gtggcaggtagcatgacgtggaggt

SEQ ID NO: 3622845 - DNA, 25 bp, Homo sapien
ggcaggtagcatgacgtggaggttc

SEQ ID NO: 3622846 - DNA, 25 bp, Homo sapien
gcaggtagcatgacgtggaggttca

SEQ ID NO: 3622847 - DNA, 25 bp, Homo sapien
tgggatagtccgaaaggcgcggctc

SEQ ID NO: 3622848 - DNA, 25 bp, Homo sapien
gatagtccgaaaggcgcggctcgca

SEQ ID NO: 3622849 - DNA, 25 bp, Homo sapien
gagaatgggatagtccgaaaggcgc

SEQ ID NO: 3622850 - DNA, 25 bp, Homo sapien
gaatgggatagtccgaaaggcgcgg

SEQ ID NO: 3622851 - DNA, 25 bp, Homo sapien
actgccatgagagtctgaactcgga

SEQ ID NO: 3622852 - DNA, 25 bp, Homo sapien
gaccacagggcatctcttgtggagg

SEQ ID NO: 3622853 - DNA, 25 bp, Homo sapien
cagagaggaccacagggcatctctt

SEQ ID NO: 3622854 - DNA, 25 bp, Homo sapien
attcctggacaagcgggcatcagca

SEQ ID NO: 3622855 - DNA, 25 bp, Homo sapien
tcctctcattcccataatcttcttg

SEQ ID NO: 3622856 - DNA, 25 bp, Homo sapien
tcatcaccatattctcccaggccca

SEQ ID NO: 3622857 - DNA, 25 bp, Homo sapien
atcatcatcaccatattctcccagg

SEQ ID NO: 3622858 - DNA, 25 bp, Homo sapien
ccctatttctgccaatggcatcatc

SEQ ID NO: 3622859 - DNA, 25 bp, Homo sapien
aaaattcggtccatagcaagagcca

SEQ ID NO: 3622860 - DNA, 25 bp, Homo sapien
gatcatgcggctgtgtcagtcagct

SEQ ID NO: 3622861 - DNA, 25 bp, Homo sapien
aaagagagtcccaagcgatggagga

SEQ ID NO: 3622862 - DNA, 25 bp, Homo sapien
tcttgctgtgttcgcacatggagga

SEQ ID NO: 3622863 - DNA, 25 bp, Homo sapien
gagccgcgcgctagagcgacccggc

SEQ ID NO: 3622864 - DNA, 25 bp, Homo sapien
gcgacccggcgagggatggcggcca

SEQ ID NO: 3622865 - DNA, 25 bp, Homo sapien
ggccgccgcagccacgggcaggctc

SEQ ID NO: 3622866 - DNA, 25 bp, Homo sapien
ctgccttggcgctggccggctacat

SEQ ID NO: 3622867 - DNA, 25 bp, Homo sapien
gggataatgctatccagaagagaat

SEQ ID NO: 3622868 - DNA, 25 bp, Homo sapien
taatgctatcattttaaagggataa

SEQ ID NO: 3622869 - DNA, 25 bp, Homo sapien
gcgtttgttagatctgggataatgc

SEQ ID NO: 3622870 - DNA, 25 bp, Homo sapien
catctgagacatcacaatgcgtttg

SEQ ID NO: 3622871 - DNA, 25 bp, Homo sapien
tcgaactaaggaaagctcaggacca

SEQ ID NO: 3622872 - DNA, 25 bp, Homo sapien
cagcccctggtgatctatgaatttg

SEQ ID NO: 3622873 - DNA, 25 bp, Homo sapien
aaaacctcccaacaggctgagtgcg

SEQ ID NO: 3622874 - DNA, 25 bp, Homo sapien
tacatgtagatatgggagtccctgc

SEQ ID NO: 3622875 - DNA, 25 bp, Homo sapien
tgttgctgagcctcaaatcgcaatg

SEQ ID NO: 3622876 - DNA, 25 bp, Homo sapien
ggctcttgcagccaatgccggaaca

SEQ ID NO: 3622877 - DNA, 25 bp, Homo sapien
caaatcgcaatgttttgtgggaagt

SEQ ID NO: 3622878 - DNA, 25 bp, Homo sapien
ccggaacaggatttgctgttgctga

SEQ ID NO: 3622879 - DNA, 25 bp, Homo sapien
caattagcagtgatcacgcctccga

SEQ ID NO: 3622880 - DNA, 25 bp, Homo sapien
gtgatcacgcctccgataaacctca

SEQ ID NO: 3622881 - DNA, 25 bp, Homo sapien
tagcagtgatcacgcctccgataaa

SEQ ID NO: 3622882 - DNA, 25 bp, Homo sapien
ttcaattagcagtgatcacgcctcc

SEQ ID NO: 3622883 - DNA, 25 bp, Homo sapien
ctggctaagatggtatctacattca

SEQ ID NO: 3622884 - DNA, 25 bp, Homo sapien
ggccccgttatgctggttcctgtgt

SEQ ID NO: 3622885 - DNA, 25 bp, Homo sapien
caggagtagtgcgataccagtttgt

SEQ ID NO: 3622886 - DNA, 25 bp, Homo sapien
ggagtatcacagaagggttctcact

SEQ ID NO: 3622887 - DNA, 25 bp, Homo sapien
caatgaaatgatagagcggatgctg

SEQ ID NO: 3622888 - DNA, 25 bp, Homo sapien
ggcgataaatcctaactgcagctta

SEQ ID NO: 3622889 - DNA, 25 bp, Homo sapien
tggaggcttcctcaagtaggtaaac

SEQ ID NO: 3622890 - DNA, 25 bp, Homo sapien
gatggctgccatagcactgctggag

SEQ ID NO: 3622891 - DNA, 25 bp, Homo sapien
gattactactatgacaccttcaaag

SEQ ID NO: 3622892 - DNA, 25 bp, Homo sapien
aagtggtggaggaccgagattacta

SEQ ID NO: 3622893 - DNA, 25 bp, Homo sapien
agaatcctactgaacccggcagcga

SEQ ID NO: 3622894 - DNA, 25 bp, Homo sapien
accttcaaaggagatgactacaatg

SEQ ID NO: 3622895 - DNA, 25 bp, Homo sapien
gaatctagtcgtgcaagtctttaaa

SEQ ID NO: 3622896 - DNA, 25 bp, Homo sapien
gtatccagtgacagtagacctttag

SEQ ID NO: 3622897 - DNA, 25 bp, Homo sapien
taagcatccttgctgaggcaatacc

SEQ ID NO: 3622898 - DNA, 25 bp, Homo sapien
agacctttagtttgctcagtgccac

SEQ ID NO: 3622899 - DNA, 25 bp, Homo sapien
tacgggaccagctgccataatatag

SEQ ID NO: 3622900 - DNA, 25 bp, Homo sapien
caacggttacttgaaggaaaatgca

SEQ ID NO: 3622901 - DNA, 25 bp, Homo sapien
aaatgcatacgggaccagctgccat

SEQ ID NO: 3622902 - DNA, 25 bp, Homo sapien
gtctgttctgagatacgtctccaca

SEQ ID NO: 3622903 - DNA, 25 bp, Homo sapien
gaggaagaggcagtatggcaccatc

SEQ ID NO: 3622904 - DNA, 25 bp, Homo sapien
ggcagtatggcaccatcagccacgg

SEQ ID NO: 3622905 - DNA, 25 bp, Homo sapien
gctggtcatcgcagtggccattgcc

SEQ ID NO: 3622906 - DNA, 25 bp, Homo sapien
ttgccacggtcatcgtcatcagcct

SEQ ID NO: 3622907 - DNA, 25 bp, Homo sapien
gagagaccctcgcaaaatgatgtga

SEQ ID NO: 3622908 - DNA, 25 bp, Homo sapien
caactatgtccagatgtgcaggctc

SEQ ID NO: 3622909 - DNA, 25 bp, Homo sapien
gattccgatcgactgccaagcagca

SEQ ID NO: 3622910 - DNA, 25 bp, Homo sapien
ggctgtccctgaaactgagtctgtg

SEQ ID NO: 3622911 - DNA, 25 bp, Homo sapien
acagactgtcctcgctcactgtctc

SEQ ID NO: 3622912 - DNA, 25 bp, Homo sapien
cacagactgtcctcgctcactgtct

SEQ ID NO: 3622913 - DNA, 25 bp, Homo sapien
ttgacggacactgatcagctccaca

SEQ ID NO: 3622914 - DNA, 25 bp, Homo sapien
ccacagactgtcctcgctcactgtc

SEQ ID NO: 3622915 - DNA, 25 bp, Homo sapien
acgacgcctgtgagacccgcgagcg

SEQ ID NO: 3622916 - DNA, 25 bp, Homo sapien
gatggtgagggccttagcgaccacc

SEQ ID NO: 3622917 - DNA, 25 bp, Homo sapien
gccacaccctgaaactacctgcgtg

SEQ ID NO: 3622918 - DNA, 25 bp, Homo sapien
ttcggcgcgggactcaagtacaact

SEQ ID NO: 3622919 - DNA, 25 bp, Homo sapien
gcaatgattactggagtgtctagaa

SEQ ID NO: 3622920 - DNA, 25 bp, Homo sapien
taactgtgtacctagtcctgggtca

SEQ ID NO: 3622921 - DNA, 25 bp, Homo sapien
caagtattacccttctcagagacaa

SEQ ID NO: 3622922 - DNA, 25 bp, Homo sapien
gatgtggtcttactagtctttgaga

SEQ ID NO: 3622923 - DNA, 25 bp, Homo sapien
ggctgatttgtggttctaatggttt

SEQ ID NO: 3622924 - DNA, 25 bp, Homo sapien
tatggtttggtagttttataatagc

SEQ ID NO: 3622925 - DNA, 25 bp, Homo sapien
tccagccttggctgatttgtggttc

SEQ ID NO: 3622926 - DNA, 25 bp, Homo sapien
ggtttggtagttttataatagctca

SEQ ID NO: 3622927 - DNA, 25 bp, Homo sapien
caggaaggtgacactcggtgtgtcc

SEQ ID NO: 3622928 - DNA, 25 bp, Homo sapien
gagggatgacacaagaggagctggg

SEQ ID NO: 3622929 - DNA, 25 bp, Homo sapien
gagccgcccatgtgtcctggagtcg

SEQ ID NO: 3622930 - DNA, 25 bp, Homo sapien
cagcccccagaatcggtctggttgg

SEQ ID NO: 3622931 - DNA, 25 bp, Homo sapien
tgctggctgactgccgaggcagaaa

SEQ ID NO: 3622932 - DNA, 25 bp, Homo sapien
cacagcgatgagctcaactgcagtg

SEQ ID NO: 3622933 - DNA, 25 bp, Homo sapien
atggctgggccgactgcaccgacca

SEQ ID NO: 3622934 - DNA, 25 bp, Homo sapien
tatccggaaggagctgcgctgtgat

SEQ ID NO: 3622935 - DNA, 25 bp, Homo sapien
aacagacgggtctgagactgaaatt

SEQ ID NO: 3622936 - DNA, 25 bp, Homo sapien
ggccgaggcgcgtttgtgcatatct

SEQ ID NO: 3622937 - DNA, 25 bp, Homo sapien
tctctaaggagcagcgggaacggag

SEQ ID NO: 3622938 - DNA, 25 bp, Homo sapien
tggtggttctactgacccaactggg

SEQ ID NO: 3622939 - DNA, 25 bp, Homo sapien
gcctgcctgaatgtcgagaagcatt

SEQ ID NO: 3622940 - DNA, 25 bp, Homo sapien
catcagatgcccagagccgcagttt

SEQ ID NO: 3622941 - DNA, 25 bp, Homo sapien
gccgcagtttgcaggacatccttgg

SEQ ID NO: 3622942 - DNA, 25 bp, Homo sapien
tagcagtgggtcatgccattccaag

SEQ ID NO: 3622943 - DNA, 25 bp, Homo sapien
gctgaggatggcagtccagacctgc

SEQ ID NO: 3622944 - DNA, 25 bp, Homo sapien
cagcctttccttcacccaggtgaag

SEQ ID NO: 3622945 - DNA, 25 bp, Homo sapien
agaggcctgcgtaggtctgtgctga

SEQ ID NO: 3622946 - DNA, 25 bp, Homo sapien
ccttgctgaggatggcagtccagac

SEQ ID NO: 3622947 - DNA, 25 bp, Homo sapien
gtctccagagacctagcgctacgga

SEQ ID NO: 3622948 - DNA, 25 bp, Homo sapien
aggtctccagagacctagcgctacg

SEQ ID NO: 3622949 - DNA, 25 bp, Homo sapien
tctccagagacctagcgctacggac

SEQ ID NO: 3622950 - DNA, 25 bp, Homo sapien
ggaggtctccagagacctagcgcta

SEQ ID NO: 3622951 - DNA, 25 bp, Homo sapien
ccacacggtggcgatgttgcgccgt

SEQ ID NO: 3622952 - DNA, 25 bp, Homo sapien
ttgttcaggtcgacggccacacggt

SEQ ID NO: 3622953 - DNA, 25 bp, Homo sapien
tgttgttggcggctgccttctgctg

SEQ ID NO: 3622954 - DNA, 25 bp, Homo sapien
gaagctgttgttcaggtcgacggcc

SEQ ID NO: 3622955 - DNA, 25 bp, Homo sapien
catgagacacaaccggccccagaga

SEQ ID NO: 3622956 - DNA, 25 bp, Homo sapien
aagtggaactttatcccatgagaca

SEQ ID NO: 3622957 - DNA, 25 bp, Homo sapien
gatggcttttgagattgaggacaga

SEQ ID NO: 3622958 - DNA, 25 bp, Homo sapien
tggtgacctgtggatggccaccaag

SEQ ID NO: 3622959 - DNA, 25 bp, Homo sapien
aaattggatcttcagccagtgattc

SEQ ID NO: 3622960 - DNA, 25 bp, Homo sapien
ggaaaattggatcttcagccagtga

SEQ ID NO: 3622961 - DNA, 25 bp, Homo sapien
cagatacttgaatttcttggagcag

SEQ ID NO: 3622962 - DNA, 25 bp, Homo sapien
ggtgaggaaaattggatcttcagcc

SEQ ID NO: 3622963 - DNA, 25 bp, Homo sapien
tggatccacatgacctggaacctgc

SEQ ID NO: 3622964 - DNA, 25 bp, Homo sapien
tggacactggctattcttgtaacgg

SEQ ID NO: 3622965 - DNA, 25 bp, Homo sapien
ttaagatgcgtgagcctcctctgtt

SEQ ID NO: 3622966 - DNA, 25 bp, Homo sapien
catggccacccagatgcttttcatc

SEQ ID NO: 3622967 - DNA, 25 bp, Homo sapien
gaaagtgcgctgatgcacacgagag

SEQ ID NO: 3622968 - DNA, 25 bp, Homo sapien
ctacgctttcctctggaagaggaac

SEQ ID NO: 3622969 - DNA, 25 bp, Homo sapien
cacacgagaggtggggcaaaccgat

SEQ ID NO: 3622970 - DNA, 25 bp, Homo sapien
acgctttcctctggaagaggaactg

SEQ ID NO: 3622971 - DNA, 25 bp, Homo sapien
tcaggggtctcagttaagtccgtat

SEQ ID NO: 3622972 - DNA, 25 bp, Homo sapien
gggtctcagttaagtccgtatgcat

SEQ ID NO: 3622973 - DNA, 25 bp, Homo sapien
ggggtctcagttaagtccgtatgca

SEQ ID NO: 3622974 - DNA, 25 bp, Homo sapien
caggggtctcagttaagtccgtatg

SEQ ID NO: 3622975 - DNA, 25 bp, Homo sapien
taggctggctgcactaggaagtact

SEQ ID NO: 3622976 - DNA, 25 bp, Homo sapien
tctacctgatgcaacgggaggcacc

SEQ ID NO: 3622977 - DNA, 25 bp, Homo sapien
cctccaagttggacataaggtgcca

SEQ ID NO: 3622978 - DNA, 25 bp, Homo sapien
caatcaggctagcaaaaaggtactc

SEQ ID NO: 3622979 - DNA, 25 bp, Homo sapien
agtatatcgccacaaccgtgcctgg

SEQ ID NO: 3622980 - DNA, 25 bp, Homo sapien
gtattagctgaagccggcctgggtc

SEQ ID NO: 3622981 - DNA, 25 bp, Homo sapien
tcagatactgccaaaccgagatacc

SEQ ID NO: 3622982 - DNA, 25 bp, Homo sapien
gaaaggcttcccatcttgaacacag

SEQ ID NO: 3622983 - DNA, 25 bp, Homo sapien
cttctggcaactttgggtctgtttc

SEQ ID NO: 3622984 - DNA, 25 bp, Homo sapien
tctaaagtacatcacacctatttgg

SEQ ID NO: 3622985 - DNA, 25 bp, Homo sapien
tactgtaagccagaatgattgctga

SEQ ID NO: 3622986 - DNA, 25 bp, Homo sapien
gctgataaaatagataactggcctc

SEQ ID NO: 3622987 - DNA, 25 bp, Homo sapien
catgtttgatgcttccactattaga

SEQ ID NO: 3622988 - DNA, 25 bp, Homo sapien
ggtattgataagatctgggcagcag

SEQ ID NO: 3622989 - DNA, 25 bp, Homo sapien
tatcttggagctaccaacattgtgc

SEQ ID NO: 3622990 - DNA, 25 bp, Homo sapien
tctacttgggaaggaatacccagtg

SEQ ID NO: 3622991 - DNA, 25 bp, Homo sapien
tagataccacaaagttaccctcctg

SEQ ID NO: 3622992 - DNA, 25 bp, Homo sapien
cttgctctttcaaaaaccacctctt

SEQ ID NO: 3622993 - DNA, 25 bp, Homo sapien
ctcttgctctttcaaaaaccacctc

SEQ ID NO: 3622994 - DNA, 25 bp, Homo sapien
gctctttcaaaaaccacctcttgga

SEQ ID NO: 3622995 - DNA, 25 bp, Homo sapien
tgctctttcaaaaaccacctcttgg

SEQ ID NO: 3622996 - DNA, 25 bp, Homo sapien
gaagggaacacacctatgtttggca

SEQ ID NO: 3622997 - DNA, 25 bp, Homo sapien
taaatggtgggagcctatcataacc

SEQ ID NO: 3622998 - DNA, 25 bp, Homo sapien
gaaaagtatacccaagtctagagga

SEQ ID NO: 3622999 - DNA, 25 bp, Homo sapien
gaaagtaatgcaaccctatcagtga

SEQ ID NO: 3623000 - DNA, 25 bp, Homo sapien
aaaactgatccgggcaatgacacag

SEQ ID NO: 3623001 - DNA, 25 bp, Homo sapien
actgatccgggcaatgacacagtca

SEQ ID NO: 3623002 - DNA, 25 bp, Homo sapien
atggcagcacgccaatatatgcaag

SEQ ID NO: 3623003 - DNA, 25 bp, Homo sapien
gcagcacgccaatatatgcaagaga

SEQ ID NO: 3623004 - DNA, 25 bp, Homo sapien
aaaagcagtatgagaagagttccta

SEQ ID NO: 3623005 - DNA, 25 bp, Homo sapien
ttttaatctgaaaagcagtatgaga

SEQ ID NO: 3623006 - DNA, 25 bp, Homo sapien
ccaggtaaacagcaattttaatctg

SEQ ID NO: 3623007 - DNA, 25 bp, Homo sapien
gagttcctatgaagctgggatttac

SEQ ID NO: 3623008 - DNA, 25 bp, Homo sapien
tttcatccacagcttgactgttgtc

SEQ ID NO: 3623009 - DNA, 25 bp, Homo sapien
ttcatccacagcttgactgttgtca

SEQ ID NO: 3623010 - DNA, 25 bp, Homo sapien
tcatccacagcttgactgttgtcaa

SEQ ID NO: 3623011 - DNA, 25 bp, Homo sapien
atggttccttgcctttggagtggta

SEQ ID NO: 3623012 - DNA, 25 bp, Homo sapien
tcatggttccttgcctttggagtgg

SEQ ID NO: 3623013 - DNA, 25 bp, Homo sapien
catggttccttgcctttggagtggt

SEQ ID NO: 3623014 - DNA, 25 bp, Homo sapien
ccaagcacaggcactttccaaaaaa

SEQ ID NO: 3623015 - DNA, 25 bp, Homo sapien
tcctctctagctaatgatctgttgt

SEQ ID NO: 3623016 - DNA, 25 bp, Homo sapien
tctagctaatgatctgttgttagcc

SEQ ID NO: 3623017 - DNA, 25 bp, Homo sapien
aagcacaggcactttccaaaaaaca

SEQ ID NO: 3623018 - DNA, 25 bp, Homo sapien
ctactcaatagttatagaagacagc

SEQ ID NO: 3623019 - DNA, 25 bp, Homo sapien
ccgtgttctccaagatcatattgaa

SEQ ID NO: 3623020 - DNA, 25 bp, Homo sapien
caagatcatattgaacaagggtctc

SEQ ID NO: 3623021 - DNA, 25 bp, Homo sapien
gagttgctttcaaaaccgtgttctc

SEQ ID NO: 3623022 - DNA, 25 bp, Homo sapien
caaaaccgtgttctccaagatcata

SEQ ID NO: 3623023 - DNA, 25 bp, Homo sapien
tttctctaagtttcaagctttttca

SEQ ID NO: 3623024 - DNA, 25 bp, Homo sapien
ttcatgtgtaaagtgacaggtttaa

SEQ ID NO: 3623025 - DNA, 25 bp, Homo sapien
aagctttttcatgtgtaaagtgaca

SEQ ID NO: 3623026 - DNA, 25 bp, Homo sapien
attttatctttctctaagtttcaag

SEQ ID NO: 3623027 - DNA, 25 bp, Homo sapien
gagctagatctagaagctgatttcc

SEQ ID NO: 3623028 - DNA, 25 bp, Homo sapien
gatctagaagctgatttcctgggat

SEQ ID NO: 3623029 - DNA, 25 bp, Homo sapien
ctagaagctgatttcctgggatgcc

SEQ ID NO: 3623030 - DNA, 25 bp, Homo sapien
tagatctagaagctgatttcctggg

SEQ ID NO: 3623031 - DNA, 25 bp, Homo sapien
aaatgtgactgactagctggcaacc

SEQ ID NO: 3623032 - DNA, 25 bp, Homo sapien
ttagagtatgaacagtgggaatccg

SEQ ID NO: 3623033 - DNA, 25 bp, Homo sapien
tcctggttgggttttcgttgtgcac

SEQ ID NO: 3623034 - DNA, 25 bp, Homo sapien
tgtaaaaacacagaaggctgcccta

SEQ ID NO: 3623035 - DNA, 25 bp, Homo sapien
tctggaagtagtttgctagctctga

SEQ ID NO: 3623036 - DNA, 25 bp, Homo sapien
ctggaagtagtttgctagctctgat

SEQ ID NO: 3623037 - DNA, 25 bp, Homo sapien
tccccgaaggaagtgaaagtggcac

SEQ ID NO: 3623038 - DNA, 25 bp, Homo sapien
cagagttggtgaacatggcgccaca

SEQ ID NO: 3623039 - DNA, 25 bp, Homo sapien
taatgtgccgggaaaccctcatgtg

SEQ ID NO: 3623040 - DNA, 25 bp, Homo sapien
tacatatctggcaccggaaacagcg

SEQ ID NO: 3623041 - DNA, 25 bp, Homo sapien
agcgagtaagccctggtgaactttt

SEQ ID NO: 3623042 - DNA, 25 bp, Homo sapien
gcgatgcatctttagcgagtaagcc

SEQ ID NO: 3623043 - DNA, 25 bp, Homo sapien
catgctttaggcgatgcatctttag

SEQ ID NO: 3623044 - DNA, 25 bp, Homo sapien
tctttagcgagtaagccctggtgaa

SEQ ID NO: 3623045 - DNA, 25 bp, Homo sapien
ctgtaaataaagcaaaacaaaatat

SEQ ID NO: 3623046 - DNA, 25 bp, Homo sapien
agagaaacgagaagaaagaacaatt

SEQ ID NO: 3623047 - DNA, 25 bp, Homo sapien
catttggacttggtcgctctgtact

SEQ ID NO: 3623048 - DNA, 25 bp, Homo sapien
gagcatgtgctgctttaggttctga

SEQ ID NO: 3623049 - DNA, 25 bp, Homo sapien
taggttctgaatacgggtgaatcgc

SEQ ID NO: 3623050 - DNA, 25 bp, Homo sapien
cgcaggttggacactgaaaaggtct

SEQ ID NO: 3623051 - DNA, 25 bp, Homo sapien
aaggagcaatgtagagttggtaggg

SEQ ID NO: 3623052 - DNA, 25 bp, Homo sapien
tgtagagttggtagggatactgaac

SEQ ID NO: 3623053 - DNA, 25 bp, Homo sapien
ggtagggatactgaacattttccaa

SEQ ID NO: 3623054 - DNA, 25 bp, Homo sapien
gagttggtagggatactgaacattt

SEQ ID NO: 3623055 - DNA, 25 bp, Homo sapien
tgccaacacttggtacagatacgat

SEQ ID NO: 3623056 - DNA, 25 bp, Homo sapien
tttttcacagcagtccgtacagcac

SEQ ID NO: 3623057 - DNA, 25 bp, Homo sapien
ggcagaagtcatatcgtgtagggct

SEQ ID NO: 3623058 - DNA, 25 bp, Homo sapien
ggtatacagatcagactttggcaga

SEQ ID NO: 3623059 - DNA, 25 bp, Homo sapien
catcatccggaggagcattagtgct

SEQ ID NO: 3623060 - DNA, 25 bp, Homo sapien
cattagtgctagacgtgctttgaag

SEQ ID NO: 3623061 - DNA, 25 bp, Homo sapien
cctcagaaacgccttcatctactga

SEQ ID NO: 3623062 - DNA, 25 bp, Homo sapien
tgctttgaagtgtaggcaagccctc

SEQ ID NO: 3623063 - DNA, 25 bp, Homo sapien
agccacacgaaagcacggccagcat

SEQ ID NO: 3623064 - DNA, 25 bp, Homo sapien
acacacaagccacacgaaagcacgg

SEQ ID NO: 3623065 - DNA, 25 bp, Homo sapien
cgaaagcacggccagcatcctggaa

SEQ ID NO: 3623066 - DNA, 25 bp, Homo sapien
acaagccacacgaaagcacggccag

SEQ ID NO: 3623067 - DNA, 25 bp, Homo sapien
tgtgaaatgccagagttgtctgcct

SEQ ID NO: 3623068 - DNA, 25 bp, Homo sapien
tgtcacatatttacggaatctccct

SEQ ID NO: 3623069 - DNA, 25 bp, Homo sapien
taccaacctggtgtatgtcttacaa

SEQ ID NO: 3623070 - DNA, 25 bp, Homo sapien
caatttgtatataagcccttggtca

SEQ ID NO: 3623071 - DNA, 25 bp, Homo sapien
tacatttgttgtcttccgcaccctt

SEQ ID NO: 3623072 - DNA, 25 bp, Homo sapien
ttctcttctgttgagtgcaatgtgc

SEQ ID NO: 3623073 - DNA, 25 bp, Homo sapien
tgtgctgccaaaatgttcacggaga

SEQ ID NO: 3623074 - DNA, 25 bp, Homo sapien
tttggtactccttaaatctgctatg

SEQ ID NO: 3623075 - DNA, 25 bp, Homo sapien
ttggcctacccactcaaagtctgtg

SEQ ID NO: 3623076 - DNA, 25 bp, Homo sapien
gccaaggcaggtttttctacagtcc

SEQ ID NO: 3623077 - DNA, 25 bp, Homo sapien
tggagccgctaggtcactgaataca

SEQ ID NO: 3623078 - DNA, 25 bp, Homo sapien
tctagtccgctcattgccaaggcag

SEQ ID NO: 3623079 - DNA, 25 bp, Homo sapien
tgtaggacagagaaccagataatgc

SEQ ID NO: 3623080 - DNA, 25 bp, Homo sapien
tcaatcagtcctgggctaagaaact

SEQ ID NO: 3623081 - DNA, 25 bp, Homo sapien
agacctatttgacggtgctctgaac

SEQ ID NO: 3623082 - DNA, 25 bp, Homo sapien
cagtatttagcgttggtcccatgga

SEQ ID NO: 3623083 - DNA, 25 bp, Homo sapien
ccctctggaattgaaaagcaattac

SEQ ID NO: 3623084 - DNA, 25 bp, Homo sapien
attgaaaagcaattacagtggtcat

SEQ ID NO: 3623085 - DNA, 25 bp, Homo sapien
gaattgaaaagcaattacagtggtc

SEQ ID NO: 3623086 - DNA, 25 bp, Homo sapien
aagatccctctggaattgaaaagca

SEQ ID NO: 3623087 - DNA, 25 bp, Homo sapien
caccaagaaaaacacagaaggcatt

SEQ ID NO: 3623088 - DNA, 25 bp, Homo sapien
aagaaaaacacagaaggcattatac

SEQ ID NO: 3623089 - DNA, 25 bp, Homo sapien
ttatagcaccaagaaaaacacagaa

SEQ ID NO: 3623090 - DNA, 25 bp, Homo sapien
ccaagaaaaacacagaaggcattat

SEQ ID NO: 3623091 - DNA, 25 bp, Homo sapien
gactaatcagaaggtcctcttggac

SEQ ID NO: 3623092 - DNA, 25 bp, Homo sapien
tgacaggctgggacacttcctcatg

SEQ ID NO: 3623093 - DNA, 25 bp, Homo sapien
ttcctggaactgtctgctgatcact

SEQ ID NO: 3623094 - DNA, 25 bp, Homo sapien
gctgatcactcagcgaactctgaga

SEQ ID NO: 3623095 - DNA, 25 bp, Homo sapien
tttgacccggacatcttcttcggta

SEQ ID NO: 3623096 - DNA, 25 bp, Homo sapien
ttgacccggacatcttcttcggtac

SEQ ID NO: 3623097 - DNA, 25 bp, Homo sapien
cactttacaggactttcaggagaca

SEQ ID NO: 3623098 - DNA, 25 bp, Homo sapien
ttcttctaccggtctcagatgggcc

SEQ ID NO: 3623099 - DNA, 25 bp, Homo sapien
gaaatgctcccatctcgagaagtaa

SEQ ID NO: 3623100 - DNA, 25 bp, Homo sapien
cacactgcactctgaggacacggga

SEQ ID NO: 3623101 - DNA, 25 bp, Homo sapien
ggctgttgggtgtattccataaaat

SEQ ID NO: 3623102 - DNA, 25 bp, Homo sapien
gcttgatttcatgaactctgagcag

SEQ ID NO: 3623103 - DNA, 25 bp, Homo sapien
atttgcatatagctggctgctgcta

SEQ ID NO: 3623104 - DNA, 25 bp, Homo sapien
ctggcaacactgaacatttgcatat

SEQ ID NO: 3623105 - DNA, 25 bp, Homo sapien
cctacaagtttggtgcgaaagaaat

SEQ ID NO: 3623106 - DNA, 25 bp, Homo sapien
tgtcctggacacgaatagtgatatc

SEQ ID NO: 3623107 - DNA, 25 bp, Homo sapien
tcatcctcggcttggcctacaagtt

SEQ ID NO: 3623108 - DNA, 25 bp, Homo sapien
gctagtaccaccttatgtgcccgga

SEQ ID NO: 3623109 - DNA, 25 bp, Homo sapien
gctatgagtaaatgttttcacaccc

SEQ ID NO: 3623110 - DNA, 25 bp, Homo sapien
ggaagaggagctatgagtaaatgtt

SEQ ID NO: 3623111 - DNA, 25 bp, Homo sapien
gagctatgagtaaatgttttcacac

SEQ ID NO: 3623112 - DNA, 25 bp, Homo sapien
tgtgggaagaggagctatgagtaaa

SEQ ID NO: 3623113 - DNA, 25 bp, Homo sapien
tctacagatgctcttcaaggatgca

SEQ ID NO: 3623114 - DNA, 25 bp, Homo sapien
tcttctacagatgctcttcaaggat

SEQ ID NO: 3623115 - DNA, 25 bp, Homo sapien
ttcctcttctacagatgctcttcaa

SEQ ID NO: 3623116 - DNA, 25 bp, Homo sapien
tacagatgctcttcaaggatgcaaa

SEQ ID NO: 3623117 - DNA, 25 bp, Homo sapien
gctcaactgatccccctacctcagt

SEQ ID NO: 3623118 - DNA, 25 bp, Homo sapien
cactgaagccttgatctgctgggct

SEQ ID NO: 3623119 - DNA, 25 bp, Homo sapien
gaagccttgatctgctgggctcaac

SEQ ID NO: 3623120 - DNA, 25 bp, Homo sapien
aactgatccccctacctcagtctcc

SEQ ID NO: 3623121 - DNA, 25 bp, Homo sapien
gtactctggaatagagtagtatttg

SEQ ID NO: 3623122 - DNA, 25 bp, Homo sapien
tctggaatagagtagtatttgttcc

SEQ ID NO: 3623123 - DNA, 25 bp, Homo sapien
ctctggaatagagtagtatttgttc

SEQ ID NO: 3623124 - DNA, 25 bp, Homo sapien
tcttgtactctggaatagagtagta

SEQ ID NO: 3623125 - DNA, 25 bp, Homo sapien
gcagaaactcaaactgcggcaccag

SEQ ID NO: 3623126 - DNA, 25 bp, Homo sapien
gaagatcaagaagcagaaactcaaa

SEQ ID NO: 3623127 - DNA, 25 bp, Homo sapien
agaagatcaagaagcagaaactcaa

SEQ ID NO: 3623128 - DNA, 25 bp, Homo sapien
ggtctctaaatatcaatgacttacc

SEQ ID NO: 3623129 - DNA, 25 bp, Homo sapien
aaaatccttgtgcatggttggtggg

SEQ ID NO: 3623130 - DNA, 25 bp, Homo sapien
cacctcatacccatttgaatgtcta

SEQ ID NO: 3623131 - DNA, 25 bp, Homo sapien
gaagtgaaagcaaggacacaccagt

SEQ ID NO: 3623132 - DNA, 25 bp, Homo sapien
gagaaacttctctagaaacaaacta

SEQ ID NO: 3623133 - DNA, 25 bp, Homo sapien
aacttctctagaaacaaactataga

SEQ ID NO: 3623134 - DNA, 25 bp, Homo sapien
ttttccagtgctctacatattcaga

SEQ ID NO: 3623135 - DNA, 25 bp, Homo sapien
tctagaaacaaactatagaaatgat

SEQ ID NO: 3623136 - DNA, 25 bp, Homo sapien
gatgatacaaacttatacctagaaa

SEQ ID NO: 3623137 - DNA, 25 bp, Homo sapien
tatacaccaatgatgaccaagccga

SEQ ID NO: 3623138 - DNA, 25 bp, Homo sapien
aatgatgaccaagccgagaatcaaa

SEQ ID NO: 3623139 - DNA, 25 bp, Homo sapien
tgctgatgatacaaacttataccta

SEQ ID NO: 3623140 - DNA, 25 bp, Homo sapien
atggcggcacagccaccggcgtgcc

SEQ ID NO: 3623141 - DNA, 25 bp, Homo sapien
ccgcgagtgggagtgcgaggaggcg

SEQ ID NO: 3623142 - DNA, 25 bp, Homo sapien
ctaggcccgtgagcagcctgtggtg

SEQ ID NO: 3623143 - DNA, 25 bp, Homo sapien
gcggagcgcggctcgctgcctctct

SEQ ID NO: 3623144 - DNA, 25 bp, Homo sapien
aggaagtgtgcgggcctccccgaag

SEQ ID NO: 3623145 - DNA, 25 bp, Homo sapien
cggaggaagtgtgcgggcctccccg

SEQ ID NO: 3623146 - DNA, 25 bp, Homo sapien
gaagtgtgcgggcctccccgaagta

SEQ ID NO: 3623147 - DNA, 25 bp, Homo sapien
ttcccggaggaagtgtgcgggcctc

SEQ ID NO: 3623148 - DNA, 25 bp, Homo sapien
gaggactggcggccacagagcaggg

SEQ ID NO: 3623149 - DNA, 25 bp, Homo sapien
cagcgcgcttttatggatgctgggt

SEQ ID NO: 3623150 - DNA, 25 bp, Homo sapien
catgcgcgttagtcggggtggcggg

SEQ ID NO: 3623151 - DNA, 25 bp, Homo sapien
tgcagcgcgcttttatggatgctgg

SEQ ID NO: 3623152 - DNA, 25 bp, Homo sapien
aggtgcagcgcgcttttatggatgc

SEQ ID NO: 3623153 - DNA, 25 bp, Homo sapien
gccatattgagaagttaggccaggg

SEQ ID NO: 3623154 - DNA, 25 bp, Homo sapien
tttccagccaaagacaccagggata

SEQ ID NO: 3623155 - DNA, 25 bp, Homo sapien
aaaaccaagaccttgccatattgag

SEQ ID NO: 3623156 - DNA, 25 bp, Homo sapien
cagccaaagacaccagggataaaac

SEQ ID NO: 3623157 - DNA, 25 bp, Homo sapien
cgcctaagttctttgattgggactc

SEQ ID NO: 3623158 - DNA, 25 bp, Homo sapien
tcataaaggccagatgctgcctcag

SEQ ID NO: 3623159 - DNA, 25 bp, Homo sapien
cacagggacatgtccattctaggat

SEQ ID NO: 3623160 - DNA, 25 bp, Homo sapien
cattctaggatgtccctcataaagg

SEQ ID NO: 3623161 - DNA, 25 bp, Homo sapien
ttcttggcgctttggctcccaagca

SEQ ID NO: 3623162 - DNA, 25 bp, Homo sapien
cttgtgtagtttcttggcgctttgg

SEQ ID NO: 3623163 - DNA, 25 bp, Homo sapien
gcagtctcggcggagcaggcttggt

SEQ ID NO: 3623164 - DNA, 25 bp, Homo sapien
ctcggcggagcaggcttggtggcaa

SEQ ID NO: 3623165 - DNA, 25 bp, Homo sapien
acggccccttggttctctgttgcag

SEQ ID NO: 3623166 - DNA, 25 bp, Homo sapien
gcacgccttctgttactctggtact

SEQ ID NO: 3623167 - DNA, 25 bp, Homo sapien
tctcccttccagtgtcaggagaggg

SEQ ID NO: 3623168 - DNA, 25 bp, Homo sapien
agcagggcgaggaggtccagttgga

SEQ ID NO: 3623169 - DNA, 25 bp, Homo sapien
cacagtctgaacttccggtggatag

SEQ ID NO: 3623170 - DNA, 25 bp, Homo sapien
tctggatttaacttccccacgagca

SEQ ID NO: 3623171 - DNA, 25 bp, Homo sapien
ctggatttaacttccccacgagcag

SEQ ID NO: 3623172 - DNA, 25 bp, Homo sapien
gcagatcacacagtctgaacttccg

SEQ ID NO: 3623173 - DNA, 25 bp, Homo sapien
ttgggatctgaagaaccatctccat

SEQ ID NO: 3623174 - DNA, 25 bp, Homo sapien
ctttgggatctgaagaaccatctcc

SEQ ID NO: 3623175 - DNA, 25 bp, Homo sapien
gaaccatctccatctaacagtgaaa

SEQ ID NO: 3623176 - DNA, 25 bp, Homo sapien
ggatctgaagaaccatctccatcta

SEQ ID NO: 3623177 - DNA, 25 bp, Homo sapien
ggaggcgctgaacgtggagtccaag

SEQ ID NO: 3623178 - DNA, 25 bp, Homo sapien
gaacactggcaagattgaggtggag

SEQ ID NO: 3623179 - DNA, 25 bp, Homo sapien
aatgggtgccgtgtgaggctctgcc

SEQ ID NO: 3623180 - DNA, 25 bp, Homo sapien
ctgcttgtagcaggatgacgtgaga

SEQ ID NO: 3623181 - DNA, 25 bp, Homo sapien
acgccatagcgcagggctgacaagg

SEQ ID NO: 3623182 - DNA, 25 bp, Homo sapien
gctcaacgctgcagacgccatagcg

SEQ ID NO: 3623183 - DNA, 25 bp, Homo sapien
ggaaagcccagtacacgcagctgct

SEQ ID NO: 3623184 - DNA, 25 bp, Homo sapien
tgggcagggtagtctgcaccacgca

SEQ ID NO: 3623185 - DNA, 25 bp, Homo sapien
aaccgggagagccaagctggattcc

SEQ ID NO: 3623186 - DNA, 25 bp, Homo sapien
cattagaagagagtaccagtttcca

SEQ ID NO: 3623187 - DNA, 25 bp, Homo sapien
aagtatgcgttctgagagcctcgcc

SEQ ID NO: 3623188 - DNA, 25 bp, Homo sapien
caagtcagggcctcccattagaaga

SEQ ID NO: 3623189 - DNA, 25 bp, Homo sapien
atggatccacccctgcaggtggcag

SEQ ID NO: 3623190 - DNA, 25 bp, Homo sapien
ttgaaatggatccacccctgcaggt

SEQ ID NO: 3623191 - DNA, 25 bp, Homo sapien
cttgaaatggatccacccctgcagg

SEQ ID NO: 3623192 - DNA, 25 bp, Homo sapien
gaaatggatccacccctgcaggtgg

SEQ ID NO: 3623193 - DNA, 25 bp, Homo sapien
ccccttaggaatttgtgcagtactg

SEQ ID NO: 3623194 - DNA, 25 bp, Homo sapien
caaacagactgacgctgagtgtcct

SEQ ID NO: 3623195 - DNA, 25 bp, Homo sapien
ttgatatggccaagggacccagtca

SEQ ID NO: 3623196 - DNA, 25 bp, Homo sapien
ttgaacccgagcaaggtccagtcca

SEQ ID NO: 3623197 - DNA, 25 bp, Homo sapien
gtcttcagcgccaggtagttcccat

SEQ ID NO: 3623198 - DNA, 25 bp, Homo sapien
tcagagccttgttgcaggtggcaga

SEQ ID NO: 3623199 - DNA, 25 bp, Homo sapien
ggtgctagagcactcagaccagtcc

SEQ ID NO: 3623200 - DNA, 25 bp, Homo sapien
cgatggagccgctgtacttcaggat

SEQ ID NO: 3623201 - DNA, 25 bp, Homo sapien
ggcccacacagggtgccatcaatca

SEQ ID NO: 3623202 - DNA, 25 bp, Homo sapien
ttcctgcaggagttgcctttgcccc

SEQ ID NO: 3623203 - DNA, 25 bp, Homo sapien
ttccgaggcgagtccaccacatggt

SEQ ID NO: 3623204 - DNA, 25 bp, Homo sapien
atggtcacagccggccttgacacac

SEQ ID NO: 3623205 - DNA, 25 bp, Homo sapien
catctctggatctgagtcccagggt

SEQ ID NO: 3623206 - DNA, 25 bp, Homo sapien
ccatctctggatctgagtcccaggg

SEQ ID NO: 3623207 - DNA, 25 bp, Homo sapien
atctctggatctgagtcccagggtg

SEQ ID NO: 3623208 - DNA, 25 bp, Homo sapien
cccatctctggatctgagtcccagg

SEQ ID NO: 3623209 - DNA, 25 bp, Homo sapien
cttggcctcgaacactttgaactcg

SEQ ID NO: 3623210 - DNA, 25 bp, Homo sapien
ccccgggctcggcagaacaacttgc

SEQ ID NO: 3623211 - DNA, 25 bp, Homo sapien
cccgggctcggcagaacaacttgca

SEQ ID NO: 3623212 - DNA, 25 bp, Homo sapien
ggcctcgaacactttgaactcgctc

SEQ ID NO: 3623213 - DNA, 25 bp, Homo sapien
taattgtaggcattatacttctcac

SEQ ID NO: 3623214 - DNA, 25 bp, Homo sapien
tcagtgtaattgtaggcattatact

SEQ ID NO: 3623215 - DNA, 25 bp, Homo sapien
ccatgtcagtgtaattgtaggcatt

SEQ ID NO: 3623216 - DNA, 25 bp, Homo sapien
gagattcccgtccatgtcagtgtaa

SEQ ID NO: 3623217 - DNA, 25 bp, Homo sapien
aagcaggagcatccggtggagaaat

SEQ ID NO: 3623218 - DNA, 25 bp, Homo sapien
aggaagaaacggcatggaggtgaca

SEQ ID NO: 3623219 - DNA, 25 bp, Homo sapien
gagaaatcccgaatttacagcactt

SEQ ID NO: 3623220 - DNA, 25 bp, Homo sapien
ttttgaactcaacccaggcgcccag

SEQ ID NO: 3623221 - DNA, 25 bp, Homo sapien
ccctttactgcctctaagttaatgt

SEQ ID NO: 3623222 - DNA, 25 bp, Homo sapien
tctaagttaatgttcatggtttcca

SEQ ID NO: 3623223 - DNA, 25 bp, Homo sapien
tgctgcccctttactgcctctaagt

SEQ ID NO: 3623224 - DNA, 25 bp, Homo sapien
tactgcctctaagttaatgttcatg

SEQ ID NO: 3623225 - DNA, 25 bp, Homo sapien
tcctccacaggtccgagaacattct

SEQ ID NO: 3623226 - DNA, 25 bp, Homo sapien
gggcattcctccgtgtggcatgact

SEQ ID NO: 3623227 - DNA, 25 bp, Homo sapien
catgactggtacttggctctccgac

SEQ ID NO: 3623228 - DNA, 25 bp, Homo sapien
cacggtgtgaaaactgtactcctcc

SEQ ID NO: 3623229 - DNA, 25 bp, Homo sapien
gcatggagtgccgtaaactgcctca

SEQ ID NO: 3623230 - DNA, 25 bp, Homo sapien
tgcacaggccccacggtaacaatta

SEQ ID NO: 3623231 - DNA, 25 bp, Homo sapien
ccaggaggcttcagtatctgtgtca

SEQ ID NO: 3623232 - DNA, 25 bp, Homo sapien
tgtgtcactgggtggccaatgccct

SEQ ID NO: 3623233 - DNA, 25 bp, Homo sapien
tgtctccaccccgctcaccaatctg

SEQ ID NO: 3623234 - DNA, 25 bp, Homo sapien
tctccaccccgctcaccaatctgca

SEQ ID NO: 3623235 - DNA, 25 bp, Homo sapien
cccgctcaccaatctgcacctgcac

SEQ ID NO: 3623236 - DNA, 25 bp, Homo sapien
caccccgctcaccaatctgcacctg

SEQ ID NO: 3623237 - DNA, 25 bp, Homo sapien
tccagctggtacagggccatgcggc

SEQ ID NO: 3623238 - DNA, 25 bp, Homo sapien
agtggcggaaatccggcccaaagat

SEQ ID NO: 3623239 - DNA, 25 bp, Homo sapien
cccgcacggcgtgccgtcagcccag

SEQ ID NO: 3623240 - DNA, 25 bp, Homo sapien
ggcaccaaagctgggcgcagacgtc

SEQ ID NO: 3623241 - DNA, 25 bp, Homo sapien
cagggccgcagcaggggcatccagg

SEQ ID NO: 3623242 - DNA, 25 bp, Homo sapien
gcaggggcatccaggagacagtctc

SEQ ID NO: 3623243 - DNA, 25 bp, Homo sapien
ggcagggccgcagcaggggcatcca

SEQ ID NO: 3623244 - DNA, 25 bp, Homo sapien
cagcaggggcatccaggagacagtc

SEQ ID NO: 3623245 - DNA, 25 bp, Homo sapien
gcccgccgtccagaagctctgtgag

SEQ ID NO: 3623246 - DNA, 25 bp, Homo sapien
gccgtccagaagctctgtgagatac

SEQ ID NO: 3623247 - DNA, 25 bp, Homo sapien
ccgccgtccagaagctctgtgagat

SEQ ID NO: 3623248 - DNA, 25 bp, Homo sapien
gtgcccgccgtccagaagctctgtg

SEQ ID NO: 3623249 - DNA, 25 bp, Homo sapien
ccatgggcccgaagagccgtgtgca

SEQ ID NO: 3623250 - DNA, 25 bp, Homo sapien
tgtgcagggcttggagtcgtcgtgg

SEQ ID NO: 3623251 - DNA, 25 bp, Homo sapien
ttcaggtggacgaacagcggtgcca

SEQ ID NO: 3623252 - DNA, 25 bp, Homo sapien
catcacgtggtgcttgcccatgggc

SEQ ID NO: 3623253 - DNA, 25 bp, Homo sapien
gagcccctcatcctcgatcacggag

SEQ ID NO: 3623254 - DNA, 25 bp, Homo sapien
cctcgatcacggagcagcttttgtt

SEQ ID NO: 3623255 - DNA, 25 bp, Homo sapien
aaatggtcccgatgtctgccacacc

SEQ ID NO: 3623256 - DNA, 25 bp, Homo sapien
gtcacaaatggtcccgatgtctgcc

SEQ ID NO: 3623257 - DNA, 25 bp, Homo sapien
gctgccacagacattaacgtcagga

SEQ ID NO: 3623258 - DNA, 25 bp, Homo sapien
tgcttgtagattcgggctgccacag

SEQ ID NO: 3623259 - DNA, 25 bp, Homo sapien
gttgaaacgccgctgccagttgcag

SEQ ID NO: 3623260 - DNA, 25 bp, Homo sapien
gatcagcacttttaccaccatcagg

SEQ ID NO: 3623261 - DNA, 25 bp, Homo sapien
cagatgggaactcgctctcctgcct

SEQ ID NO: 3623262 - DNA, 25 bp, Homo sapien
ctgcctcagcgaccccttgaagtgg

SEQ ID NO: 3623263 - DNA, 25 bp, Homo sapien
gcatacatcactgcttggcctctgt

SEQ ID NO: 3623264 - DNA, 25 bp, Homo sapien
ccatgtgcttgggatctcacctgct

SEQ ID NO: 3623265 - DNA, 25 bp, Homo sapien
tgtgaagaatgtgaacggggtcctg

SEQ ID NO: 3623266 - DNA, 25 bp, Homo sapien
gtgaagaatgtgaacggggtcctgg

SEQ ID NO: 3623267 - DNA, 25 bp, Homo sapien
tgaagaatgtgaacggggtcctggc

SEQ ID NO: 3623268 - DNA, 25 bp, Homo sapien
gaagaatgtgaacggggtcctggcc

SEQ ID NO: 3623269 - DNA, 25 bp, Homo sapien
cgccccgatgtcatcattacatcca

SEQ ID NO: 3623270 - DNA, 25 bp, Homo sapien
tacatccagccggtttgcgcttcac

SEQ ID NO: 3623271 - DNA, 25 bp, Homo sapien
cctcccgccccgatgtcatcattac

SEQ ID NO: 3623272 - DNA, 25 bp, Homo sapien
cattacatccagccggtttgcgctt

SEQ ID NO: 3623273 - DNA, 25 bp, Homo sapien
ggctccacagctttcccttgcggcg

SEQ ID NO: 3623274 - DNA, 25 bp, Homo sapien
gtggctccacagctttcccttgcgg

SEQ ID NO: 3623275 - DNA, 25 bp, Homo sapien
cggtggctccacagctttcccttgc

SEQ ID NO: 3623276 - DNA, 25 bp, Homo sapien
ctccacagctttcccttgcggcgcg

SEQ ID NO: 3623277 - DNA, 25 bp, Homo sapien
cgagtgttctgctggactttgggaa

SEQ ID NO: 3623278 - DNA, 25 bp, Homo sapien
tgctcactgcagaagcactggcggg

SEQ ID NO: 3623279 - DNA, 25 bp, Homo sapien
agatgagcgccacttttcggaccct

SEQ ID NO: 3623280 - DNA, 25 bp, Homo sapien
gaggactcgaaaactctgctcactg

SEQ ID NO: 3623281 - DNA, 25 bp, Homo sapien
tcctttcagaaaggcccctctgtct

SEQ ID NO: 3623282 - DNA, 25 bp, Homo sapien
agcagcagctggacgtagacagagc

SEQ ID NO: 3623283 - DNA, 25 bp, Homo sapien
gctggacgtagacagagctaatgga

SEQ ID NO: 3623284 - DNA, 25 bp, Homo sapien
gacagagctaatggagtcttcccag

SEQ ID NO: 3623285 - DNA, 25 bp, Homo sapien
tctcccctgtttaggtaagagctgt

SEQ ID NO: 3623286 - DNA, 25 bp, Homo sapien
cacctggtctttaggggagaaattg

SEQ ID NO: 3623287 - DNA, 25 bp, Homo sapien
tctttgcatctagttagaaatggtc

SEQ ID NO: 3623288 - DNA, 25 bp, Homo sapien
gtctggttaggtagccatcccctgg

SEQ ID NO: 3623289 - DNA, 25 bp, Homo sapien
gggaatgcgttgatacccactttcg

SEQ ID NO: 3623290 - DNA, 25 bp, Homo sapien
gatgagagggatgggcgtcggcagc

SEQ ID NO: 3623291 - DNA, 25 bp, Homo sapien
cacgtgccgcgggagattcggatga

SEQ ID NO: 3623292 - DNA, 25 bp, Homo sapien
tttcgggtcagtgcgccacgtgccg

SEQ ID NO: 3623293 - DNA, 25 bp, Homo sapien
ggtcggccccgtagaaggcagccat

SEQ ID NO: 3623294 - DNA, 25 bp, Homo sapien
aaggcagccatggacgcatcggcca

SEQ ID NO: 3623295 - DNA, 25 bp, Homo sapien
caaaccgcttggtcctactcgtggc

SEQ ID NO: 3623296 - DNA, 25 bp, Homo sapien
gcgtctccacgaagcgcgcctcaga

SEQ ID NO: 3623297 - DNA, 25 bp, Homo sapien
cctcgctgtcctcctggtggtctcc

SEQ ID NO: 3623298 - DNA, 25 bp, Homo sapien
tcctgcctctgaccctctcccgtct

SEQ ID NO: 3623299 - DNA, 25 bp, Homo sapien
tgcctctgaccctctcccgtctcca

SEQ ID NO: 3623300 - DNA, 25 bp, Homo sapien
tgtcctcctggtggtctcctctctc

SEQ ID NO: 3623301 - DNA, 25 bp, Homo sapien
actcgggcgctaggaagctgtcgtc

SEQ ID NO: 3623302 - DNA, 25 bp, Homo sapien
gtgccggagaagaagcagccgcgca

SEQ ID NO: 3623303 - DNA, 25 bp, Homo sapien
cgcgccctgcggctggatggtgaac

SEQ ID NO: 3623304 - DNA, 25 bp, Homo sapien
cccgaggcgctcgatcttgaactcg

SEQ ID NO: 3623305 - DNA, 25 bp, Homo sapien
ccgggcaaccgcgtgggcaccacca

SEQ ID NO: 3623306 - DNA, 25 bp, Homo sapien
ctgccgggcaaccgcgtgggcacca

SEQ ID NO: 3623307 - DNA, 25 bp, Homo sapien
gggcaaccgcgtgggcaccaccagc

SEQ ID NO: 3623308 - DNA, 25 bp, Homo sapien
tgccgggcaaccgcgtgggcaccac

SEQ ID NO: 3623309 - DNA, 25 bp, Homo sapien
gcagcaggagcggaggccaccgggg

SEQ ID NO: 3623310 - DNA, 25 bp, Homo sapien
cagcagcaggagcggaggccaccgg

SEQ ID NO: 3623311 - DNA, 25 bp, Homo sapien
agcaggagcggaggccaccgggggg

SEQ ID NO: 3623312 - DNA, 25 bp, Homo sapien
ggggcgccgcgggccagcggcagca

SEQ ID NO: 3623313 - DNA, 25 bp, Homo sapien
gaatcaatcgggtgcaaggccgact

SEQ ID NO: 3623314 - DNA, 25 bp, Homo sapien
tctccaggaaaagcggaatcaatcg

SEQ ID NO: 3623315 - DNA, 25 bp, Homo sapien
tcccggcttgacataagaggtttat

SEQ ID NO: 3623316 - DNA, 25 bp, Homo sapien
ggctgccgagcccttcttatttata

SEQ ID NO: 3623317 - DNA, 25 bp, Homo sapien
cgtttcccctcccctgggatcagag

SEQ ID NO: 3623318 - DNA, 25 bp, Homo sapien
ccctcccctgggatcagagagagaa

SEQ ID NO: 3623319 - DNA, 25 bp, Homo sapien
ttcccctcccctgggatcagagaga

SEQ ID NO: 3623320 - DNA, 25 bp, Homo sapien
tttcccctcccctgggatcagagag

SEQ ID NO: 3623321 - DNA, 25 bp, Homo sapien
tccctctacgcgtggacccacgtta

SEQ ID NO: 3623322 - DNA, 25 bp, Homo sapien
tcctttccctctacgcgtggaccca

SEQ ID NO: 3623323 - DNA, 25 bp, Homo sapien
gaagtgtcaactacaacttctttcc

SEQ ID NO: 3623324 - DNA, 25 bp, Homo sapien
tcaggcagcgagacccgtccgccac

SEQ ID NO: 3623325 - DNA, 25 bp, Homo sapien
aagaggctcgtgcactggtctcagc

SEQ ID NO: 3623326 - DNA, 25 bp, Homo sapien
gctttctcctctgcggccaagagtc

SEQ ID NO: 3623327 - DNA, 25 bp, Homo sapien
gatccctgcagagtccgactgcaga

SEQ ID NO: 3623328 - DNA, 25 bp, Homo sapien
tccaggatgcatcttccgaagaggc

SEQ ID NO: 3623329 - DNA, 25 bp, Homo sapien
aaggttcctgagcttttcattgtaa

SEQ ID NO: 3623330 - DNA, 25 bp, Homo sapien
gaaggttcctgagcttttcattgta

SEQ ID NO: 3623331 - DNA, 25 bp, Homo sapien
tgtgcttatgctggggatgttgaca

SEQ ID NO: 3623332 - DNA, 25 bp, Homo sapien
tctgtgcttatgctggggatgttga

SEQ ID NO: 3623333 - DNA, 25 bp, Homo sapien
ttatgctggggatgttgacagtcga

SEQ ID NO: 3623334 - DNA, 25 bp, Homo sapien
gcttatgctggggatgttgacagtc

SEQ ID NO: 3623335 - DNA, 25 bp, Homo sapien
ccatgggctctaaatcactgtacta

SEQ ID NO: 3623336 - DNA, 25 bp, Homo sapien
caggcagtgggtagaatttgtatcc

SEQ ID NO: 3623337 - DNA, 25 bp, Homo sapien
gacctctgagctaggataacccctt

SEQ ID NO: 3623338 - DNA, 25 bp, Homo sapien
gatcagtgatagaagtggagtgcca

SEQ ID NO: 3623339 - DNA, 25 bp, Homo sapien
ggcgcttccaagagtggatccttta

SEQ ID NO: 3623340 - DNA, 25 bp, Homo sapien
tctagagcctgaaaaactccttggg

SEQ ID NO: 3623341 - DNA, 25 bp, Homo sapien
tatcaggagagagtagcaaagcctc

SEQ ID NO: 3623342 - DNA, 25 bp, Homo sapien
tctgcggagaggtaagaaggatctt

SEQ ID NO: 3623343 - DNA, 25 bp, Homo sapien
taatgtccgtgattaacagctggct

SEQ ID NO: 3623344 - DNA, 25 bp, Homo sapien
ttttaataatgtccgtgattaacag

SEQ ID NO: 3623345 - DNA, 25 bp, Homo sapien
aatgtccgtgattaacagctggctg

SEQ ID NO: 3623346 - DNA, 25 bp, Homo sapien
taataatgtccgtgattaacagctg

SEQ ID NO: 3623347 - DNA, 25 bp, Homo sapien
tcttagagatcgtgactccgggccc

SEQ ID NO: 3623348 - DNA, 25 bp, Homo sapien
tcaatggtcaagttccacggcgcgg

SEQ ID NO: 3623349 - DNA, 25 bp, Homo sapien
ccgaggcgccgagtatgtcattagc

SEQ ID NO: 3623350 - DNA, 25 bp, Homo sapien
gattgtacttaagctcccagggcgc

SEQ ID NO: 3623351 - DNA, 25 bp, Homo sapien
aaactcgtgttggtcgcgggtctga

SEQ ID NO: 3623352 - DNA, 25 bp, Homo sapien
gaggtgtgacgcattgcaaagaaca

SEQ ID NO: 3623353 - DNA, 25 bp, Homo sapien
tattagggcacgttcagctttagca

SEQ ID NO: 3623354 - DNA, 25 bp, Homo sapien
gcaaagaacatctagaaactcgtgt

SEQ ID NO: 3623355 - DNA, 25 bp, Homo sapien
ttactcaggcagcttcttagaagac

SEQ ID NO: 3623356 - DNA, 25 bp, Homo sapien
tcttatacgctctggacacgcaggc

SEQ ID NO: 3623357 - DNA, 25 bp, Homo sapien
ttccaacgcccctggctagggaggc

SEQ ID NO: 3623358 - DNA, 25 bp, Homo sapien
agaagacaacgttccctccagcaag

SEQ ID NO: 3623359 - DNA, 25 bp, Homo sapien
ggggccaccaggcgcaaaatcaaga

SEQ ID NO: 3623360 - DNA, 25 bp, Homo sapien
gggccaccaggcgcaaaatcaagac

SEQ ID NO: 3623361 - DNA, 25 bp, Homo sapien
aggggccaccaggcgcaaaatcaag

SEQ ID NO: 3623362 - DNA, 25 bp, Homo sapien
ttggtgttgaaggattatgggtgat

SEQ ID NO: 3623363 - DNA, 25 bp, Homo sapien
ctgtgggaatggcaccgcctgcctg

SEQ ID NO: 3623364 - DNA, 25 bp, Homo sapien
ttccagcggagctggttggtgttga

SEQ ID NO: 3623365 - DNA, 25 bp, Homo sapien
aggtggctggtttcctctgtatccc

SEQ ID NO: 3623366 - DNA, 25 bp, Homo sapien
tttgcatctagggactgaatgccaa

SEQ ID NO: 3623367 - DNA, 25 bp, Homo sapien
tgatccagtttgcatctagggactg

SEQ ID NO: 3623368 - DNA, 25 bp, Homo sapien
catctagggactgaatgccaatttc

SEQ ID NO: 3623369 - DNA, 25 bp, Homo sapien
tccagtttgcatctagggactgaat

SEQ ID NO: 3623370 - DNA, 25 bp, Homo sapien
cttccatcagggcatatcttgtgat

SEQ ID NO: 3623371 - DNA, 25 bp, Homo sapien
gcatatcttgtgatgctcacaggct

SEQ ID NO: 3623372 - DNA, 25 bp, Homo sapien
gtttctagaaggtttgggttcagca

SEQ ID NO: 3623373 - DNA, 25 bp, Homo sapien
ggtttgggttcagcacaagattcca

SEQ ID NO: 3623374 - DNA, 25 bp, Homo sapien
caaggcccccagggatgggggtgag

SEQ ID NO: 3623375 - DNA, 25 bp, Homo sapien
cagggatgggggtgagggccttcac

SEQ ID NO: 3623376 - DNA, 25 bp, Homo sapien
ccagggatgggggtgagggccttca

SEQ ID NO: 3623377 - DNA, 25 bp, Homo sapien
ctgtagtgaatgggttgggagcaag

SEQ ID NO: 3623378 - DNA, 25 bp, Homo sapien
gtagtgaatgggttgggagcaagta

SEQ ID NO: 3623379 - DNA, 25 bp, Homo sapien
tagtgaatgggttgggagcaagtat

SEQ ID NO: 3623380 - DNA, 25 bp, Homo sapien
tgtagtgaatgggttgggagcaagt

SEQ ID NO: 3623381 - DNA, 25 bp, Homo sapien
ctgcgagatccaccgggcgatgcct

SEQ ID NO: 3623382 - DNA, 25 bp, Homo sapien
cctctgcgagatccaccgggcgatg

SEQ ID NO: 3623383 - DNA, 25 bp, Homo sapien
tccaccgggcgatgccttgttgcag

SEQ ID NO: 3623384 - DNA, 25 bp, Homo sapien
agccgcccctctgcgagatccaccg

SEQ ID NO: 3623385 - DNA, 25 bp, Homo sapien
gccagtcaagccgtgctggtagaca

SEQ ID NO: 3623386 - DNA, 25 bp, Homo sapien
tcaaacaggctggaggcgatcttgg

SEQ ID NO: 3623387 - DNA, 25 bp, Homo sapien
gctggaggcgatcttggtgaagtac

SEQ ID NO: 3623388 - DNA, 25 bp, Homo sapien
agtcaagccgtgctggtagacatgt

SEQ ID NO: 3623389 - DNA, 25 bp, Homo sapien
gtcgtcctggtgatggcgagctgcc

SEQ ID NO: 3623390 - DNA, 25 bp, Homo sapien
tgccggttgatgtcgtcctggtgat

SEQ ID NO: 3623391 - DNA, 25 bp, Homo sapien
tcatagtgccggttgatgtcgtcct

SEQ ID NO: 3623392 - DNA, 25 bp, Homo sapien
ctccgaagtcatagtgccggttgat

SEQ ID NO: 3623393 - DNA, 25 bp, Homo sapien
ctgatggtggtaaaaaacgtagctg

SEQ ID NO: 3623394 - DNA, 25 bp, Homo sapien
tggtggtaaaaaacgtagctgcgga

SEQ ID NO: 3623395 - DNA, 25 bp, Homo sapien
tagctgcggaaaacccctccatgtc

SEQ ID NO: 3623396 - DNA, 25 bp, Homo sapien
ttcctgctgatggtggtaaaaaacg

SEQ ID NO: 3623397 - DNA, 25 bp, Homo sapien
tggctttgagagttcagagttttgc

SEQ ID NO: 3623398 - DNA, 25 bp, Homo sapien
gaactgaattagtatgggcagcctg

SEQ ID NO: 3623399 - DNA, 25 bp, Homo sapien
tcttggctttgagagttcagagttt

SEQ ID NO: 3623400 - DNA, 25 bp, Homo sapien
tttgagagttcagagttttgcctgc

SEQ ID NO: 3623401 - DNA, 25 bp, Homo sapien
tttttggtctgcgtgcctggcctca

SEQ ID NO: 3623402 - DNA, 25 bp, Homo sapien
ggcaaaggagttggaccctggacca

SEQ ID NO: 3623403 - DNA, 25 bp, Homo sapien
cagttcctgtggctatgttcctggg

SEQ ID NO: 3623404 - DNA, 25 bp, Homo sapien
cacatttttgccatcggccagctct

SEQ ID NO: 3623405 - DNA, 25 bp, Homo sapien
ccaaaaggagatgcctgaaagggag

SEQ ID NO: 3623406 - DNA, 25 bp, Homo sapien
gattcagtcgagttccattgttttc

SEQ ID NO: 3623407 - DNA, 25 bp, Homo sapien
aagggagtcagtgattcagtcgagt

SEQ ID NO: 3623408 - DNA, 25 bp, Homo sapien
agccaaaaggagatgcctgaaaggg

SEQ ID NO: 3623409 - DNA, 25 bp, Homo sapien
tctggattaagatgtcaatgttttt

SEQ ID NO: 3623410 - DNA, 25 bp, Homo sapien
ttgccactgtgaggatctgtttttc

SEQ ID NO: 3623411 - DNA, 25 bp, Homo sapien
tcaatgtttttaaaggtctcaggca

SEQ ID NO: 3623412 - DNA, 25 bp, Homo sapien
gagatgaaatttgccactgtgagga

SEQ ID NO: 3623413 - DNA, 25 bp, Homo sapien
cttgggatctgccttcttgaactct

SEQ ID NO: 3623414 - DNA, 25 bp, Homo sapien
tcttggtcagggttgttggagagaa

SEQ ID NO: 3623415 - DNA, 25 bp, Homo sapien
tcaccctagccagtaactaactgaa

SEQ ID NO: 3623416 - DNA, 25 bp, Homo sapien
gaacgtgatgattctgttgttttct

SEQ ID NO: 3623417 - DNA, 25 bp, Homo sapien
ccttcgcagcccagttcctccttta

SEQ ID NO: 3623418 - DNA, 25 bp, Homo sapien
tttatgaagtcaaaacctatatggc

SEQ ID NO: 3623419 - DNA, 25 bp, Homo sapien
acctatatggccttcgcagcccagt

SEQ ID NO: 3623420 - DNA, 25 bp, Homo sapien
tccctctctatcatatcttcccatt

SEQ ID NO: 3623421 - DNA, 25 bp, Homo sapien
cagccgtgcaaacatacacagtgtt

SEQ ID NO: 3623422 - DNA, 25 bp, Homo sapien
cttccagccgtgcaaacatacacag

SEQ ID NO: 3623423 - DNA, 25 bp, Homo sapien
atccttccagccgtgcaaacataca

SEQ ID NO: 3623424 - DNA, 25 bp, Homo sapien
tctggatccttccagccgtgcaaac

SEQ ID NO: 3623425 - DNA, 25 bp, Homo sapien
gctgccacccctcgggctggggtca

SEQ ID NO: 3623426 - DNA, 25 bp, Homo sapien
ccttgtgagtttctgacatggtcct

SEQ ID NO: 3623427 - DNA, 25 bp, Homo sapien
tgtccttgtgagtttctgacatggt

SEQ ID NO: 3623428 - DNA, 25 bp, Homo sapien
gtcactggggcatggcccaccagcg

SEQ ID NO: 3623429 - DNA, 25 bp, Homo sapien
tgcagccatgctcaaacggattgtc

SEQ ID NO: 3623430 - DNA, 25 bp, Homo sapien
cacttctctttgcagccatgctcaa

SEQ ID NO: 3623431 - DNA, 25 bp, Homo sapien
tctctttgcagccatgctcaaacgg

SEQ ID NO: 3623432 - DNA, 25 bp, Homo sapien
ctttgcagccatgctcaaacggatt

SEQ ID NO: 3623433 - DNA, 25 bp, Homo sapien
ggccaggctgagagtctaaggctct

SEQ ID NO: 3623434 - DNA, 25 bp, Homo sapien
cagctcacggcatgtgatgtggaca

SEQ ID NO: 3623435 - DNA, 25 bp, Homo sapien
aagggttgacggtacgagcacagca

SEQ ID NO: 3623436 - DNA, 25 bp, Homo sapien
tacttcagaagtaatagcatccgtg

SEQ ID NO: 3623437 - DNA, 25 bp, Homo sapien
tatcccagcacgtagagatggttgg

SEQ ID NO: 3623438 - DNA, 25 bp, Homo sapien
gagtcaaggacaggagtttgcccat

SEQ ID NO: 3623439 - DNA, 25 bp, Homo sapien
cctttgcgcggccatgatgtttctc

SEQ ID NO: 3623440 - DNA, 25 bp, Homo sapien
gcaaaaaccaaccatgtgccacgga

SEQ ID NO: 3623441 - DNA, 25 bp, Homo sapien
tcaggaaagtagcaagagccgagtt

SEQ ID NO: 3623442 - DNA, 25 bp, Homo sapien
gacaagcagtgtcggtgacgtagca

SEQ ID NO: 3623443 - DNA, 25 bp, Homo sapien
tacactaaccattggctggcctggg

SEQ ID NO: 3623444 - DNA, 25 bp, Homo sapien
gagacggccagattgaggtaaagca

SEQ ID NO: 3623445 - DNA, 25 bp, Homo sapien
aaagctgagctctttaacctccaca

SEQ ID NO: 3623446 - DNA, 25 bp, Homo sapien
actcctaggcactctgaggctatgg

SEQ ID NO: 3623447 - DNA, 25 bp, Homo sapien
cacatcatgtggattcaaaatctgc

SEQ ID NO: 3623448 - DNA, 25 bp, Homo sapien
caggtgttctgattggggccccgct

SEQ ID NO: 3623449 - DNA, 25 bp, Homo sapien
gtgccaccccagatgcaataactgc

SEQ ID NO: 3623450 - DNA, 25 bp, Homo sapien
ctgcccagcggggaaggtcagccat

SEQ ID NO: 3623451 - DNA, 25 bp, Homo sapien
caataactgcccagcggggaaggtc

SEQ ID NO: 3623452 - DNA, 25 bp, Homo sapien
tctgtgccaccccagatgcaataac

SEQ ID NO: 3623453 - DNA, 25 bp, Homo sapien
tttgtttaaccattagagctgtgta

SEQ ID NO: 3623454 - DNA, 25 bp, Homo sapien
taaatggtttattgctagaaggttc

SEQ ID NO: 3623455 - DNA, 25 bp, Homo sapien
ccattagagctgtgtaataattaaa

SEQ ID NO: 3623456 - DNA, 25 bp, Homo sapien
tgtgagaatggatgatgcagatttg

SEQ ID NO: 3623457 - DNA, 25 bp, Homo sapien
tacacactgatggaatttttgcaca

SEQ ID NO: 3623458 - DNA, 25 bp, Homo sapien
tcacagtaataagtgggagactgat

SEQ ID NO: 3623459 - DNA, 25 bp, Homo sapien
taagaatggaatgcagcgctaccat

SEQ ID NO: 3623460 - DNA, 25 bp, Homo sapien
taagagtgcagctcttcccggcact

SEQ ID NO: 3623461 - DNA, 25 bp, Homo sapien
aatagaaataacgtagcaacgttca

SEQ ID NO: 3623462 - DNA, 25 bp, Homo sapien
gtcaatagaaataacgtagcaacgt

SEQ ID NO: 3623463 - DNA, 25 bp, Homo sapien
tagaaataacgtagcaacgttcatt

SEQ ID NO: 3623464 - DNA, 25 bp, Homo sapien
caatagaaataacgtagcaacgttc

SEQ ID NO: 3623465 - DNA, 25 bp, Homo sapien
tgctgacccgccgtctggaatctgc

SEQ ID NO: 3623466 - DNA, 25 bp, Homo sapien
gaagatgctgacccgccgtctggaa

SEQ ID NO: 3623467 - DNA, 25 bp, Homo sapien
tgacccgccgtctggaatctgctct

SEQ ID NO: 3623468 - DNA, 25 bp, Homo sapien
gagtcagcaatggtctctatcccca

SEQ ID NO: 3623469 - DNA, 25 bp, Homo sapien
ctacaggtcagctcctatggtctct

SEQ ID NO: 3623470 - DNA, 25 bp, Homo sapien
caggtcagctcctatggtctctgat

SEQ ID NO: 3623471 - DNA, 25 bp, Homo sapien
tacaggtcagctcctatggtctctg

SEQ ID NO: 3623472 - DNA, 25 bp, Homo sapien
acaggtcagctcctatggtctctga

SEQ ID NO: 3623473 - DNA, 25 bp, Homo sapien
ggccagctctgattttgacctccag

SEQ ID NO: 3623474 - DNA, 25 bp, Homo sapien
cagctctgattttgacctccagatg

SEQ ID NO: 3623475 - DNA, 25 bp, Homo sapien
gacctccagatgcttcctacttttt

SEQ ID NO: 3623476 - DNA, 25 bp, Homo sapien
gattttgacctccagatgcttccta

SEQ ID NO: 3623477 - DNA, 25 bp, Homo sapien
tacagcctccccaagaagtgtttct

SEQ ID NO: 3623478 - DNA, 25 bp, Homo sapien
agcctccccaagaagtgtttctgca

SEQ ID NO: 3623479 - DNA, 25 bp, Homo sapien
cccaagaagtgtttctgcaagggca

SEQ ID NO: 3623480 - DNA, 25 bp, Homo sapien
ccccaagaagtgtttctgcaagggc

SEQ ID NO: 3623481 - DNA, 25 bp, Homo sapien
ggaggccaggtagtgagtgccaagg

SEQ ID NO: 3623482 - DNA, 25 bp, Homo sapien
caggtagtgagtgccaagggcttac

SEQ ID NO: 3623483 - DNA, 25 bp, Homo sapien
ccaggtagtgagtgccaagggctta

SEQ ID NO: 3623484 - DNA, 25 bp, Homo sapien
ggccaggtagtgagtgccaagggct

SEQ ID NO: 3623485 - DNA, 25 bp, Homo sapien
ccatatttggggttgctgatgtctg

SEQ ID NO: 3623486 - DNA, 25 bp, Homo sapien
ttggccattgccctccatatttggg

SEQ ID NO: 3623487 - DNA, 25 bp, Homo sapien
gttgctgatgtctgtgtagcagaca

SEQ ID NO: 3623488 - DNA, 25 bp, Homo sapien
tatttggggttgctgatgtctgtgt

SEQ ID NO: 3623489 - DNA, 25 bp, Homo sapien
ccatcacaggcggcaggtatttcga

SEQ ID NO: 3623490 - DNA, 25 bp, Homo sapien
tggtcgaaatgcaagtgggtccttc

SEQ ID NO: 3623491 - DNA, 25 bp, Homo sapien
tccatcacaggcggcaggtatttcg

SEQ ID NO: 3623492 - DNA, 25 bp, Homo sapien
cttgatggtcatggcctcagtgacc

SEQ ID NO: 3623493 - DNA, 25 bp, Homo sapien
catggcctcagtgaccagggacatc

SEQ ID NO: 3623494 - DNA, 25 bp, Homo sapien
tggcctcagtgaccagggacatcat

SEQ ID NO: 3623495 - DNA, 25 bp, Homo sapien
cctcagtgaccagggacatcatgag

SEQ ID NO: 3623496 - DNA, 25 bp, Homo sapien
ccacctcaggttacatgtttcactc

SEQ ID NO: 3623497 - DNA, 25 bp, Homo sapien
cacctcaggttacatgtttcactcc

SEQ ID NO: 3623498 - DNA, 25 bp, Homo sapien
ctcaggttacatgtttcactcctgg

SEQ ID NO: 3623499 - DNA, 25 bp, Homo sapien
acctcaggttacatgtttcactcct

SEQ ID NO: 3623500 - DNA, 25 bp, Homo sapien
ccatgggagagatagatggacagta

SEQ ID NO: 3623501 - DNA, 25 bp, Homo sapien
gtggaggaaggtgggagtgtttcat

SEQ ID NO: 3623502 - DNA, 25 bp, Homo sapien
gccatgggagagatagatggacagt

SEQ ID NO: 3623503 - DNA, 25 bp, Homo sapien
ggaaggtgggagtgtttcatggaat

SEQ ID NO: 3623504 - DNA, 25 bp, Homo sapien
aataacctcagctttccacggcctg

SEQ ID NO: 3623505 - DNA, 25 bp, Homo sapien
ggccataatttggaggagtcccatg

SEQ ID NO: 3623506 - DNA, 25 bp, Homo sapien
ggtccccttggcaaacataacttga

SEQ ID NO: 3623507 - DNA, 25 bp, Homo sapien
tgagtgaaggtgtccaactggaaac

SEQ ID NO: 3623508 - DNA, 25 bp, Homo sapien
agtatcagagtcacccacagctgtg

SEQ ID NO: 3623509 - DNA, 25 bp, Homo sapien
gggcacaggcactttctaagtgtct

SEQ ID NO: 3623510 - DNA, 25 bp, Homo sapien
gctcagtgtgctggtgaaggagctc

SEQ ID NO: 3623511 - DNA, 25 bp, Homo sapien
acatgtgtggatcacctcggcaggg

SEQ ID NO: 3623512 - DNA, 25 bp, Homo sapien
gaacatacatgtttaggccagagtg

SEQ ID NO: 3623513 - DNA, 25 bp, Homo sapien
catacatgtttaggccagagtgggc

SEQ ID NO: 3623514 - DNA, 25 bp, Homo sapien
acatacatgtttaggccagagtggg

SEQ ID NO: 3623515 - DNA, 25 bp, Homo sapien
aaagaacatacatgtttaggccaga

SEQ ID NO: 3623516 - DNA, 25 bp, Homo sapien
ccatggagcgtgcagatgaatcaag

SEQ ID NO: 3623517 - DNA, 25 bp, Homo sapien
ggatcctgagatgtgcctatagaca

SEQ ID NO: 3623518 - DNA, 25 bp, Homo sapien
gatgtgcctatagacatcagcatga

SEQ ID NO: 3623519 - DNA, 25 bp, Homo sapien
cagcatgatggtacatctgaaacca

SEQ ID NO: 3623520 - DNA, 25 bp, Homo sapien
ctaccgtaggtcctttgactgttga

SEQ ID NO: 3623521 - DNA, 25 bp, Homo sapien
taccgtaggtcctttgactgttgag

SEQ ID NO: 3623522 - DNA, 25 bp, Homo sapien
gacttccacctccatatatggtggc

SEQ ID NO: 3623523 - DNA, 25 bp, Homo sapien
acttccacctccatatatggtggcc

SEQ ID NO: 3623524 - DNA, 25 bp, Homo sapien
tccacctccatatatggtggccatt

SEQ ID NO: 3623525 - DNA, 25 bp, Homo sapien
acctccatatatggtggccatttgc

SEQ ID NO: 3623526 - DNA, 25 bp, Homo sapien
accatcccctgcaccttgttgaggg

SEQ ID NO: 3623527 - DNA, 25 bp, Homo sapien
tcccctgcaccttgttgagggttgc

SEQ ID NO: 3623528 - DNA, 25 bp, Homo sapien
cccctgcaccttgttgagggttgct

SEQ ID NO: 3623529 - DNA, 25 bp, Homo sapien
catcccctgcaccttgttgagggtt

SEQ ID NO: 3623530 - DNA, 25 bp, Homo sapien
tggtctgacgaaggctgagccccag

SEQ ID NO: 3623531 - DNA, 25 bp, Homo sapien
ccagctctgcccgtggtctgacgaa

SEQ ID NO: 3623532 - DNA, 25 bp, Homo sapien
ctgcccgtggtctgacgaaggctga

SEQ ID NO: 3623533 - DNA, 25 bp, Homo sapien
cccgtggtctgacgaaggctgagcc

SEQ ID NO: 3623534 - DNA, 25 bp, Homo sapien
ccgcactgagctcgcctgtgcaccg

SEQ ID NO: 3623535 - DNA, 25 bp, Homo sapien
tcccgcactgagctcgcctgtgcac

SEQ ID NO: 3623536 - DNA, 25 bp, Homo sapien
ctgtgcaccggcctcaggactcgcc

SEQ ID NO: 3623537 - DNA, 25 bp, Homo sapien
ttcccgcactgagctcgcctgtgca

SEQ ID NO: 3623538 - DNA, 25 bp, Homo sapien
taaggctgacaatgcccactttctg

SEQ ID NO: 3623539 - DNA, 25 bp, Homo sapien
gacaatgcccactttctgcagcagg

SEQ ID NO: 3623540 - DNA, 25 bp, Homo sapien
aaggctgacaatgcccactttctgc

SEQ ID NO: 3623541 - DNA, 25 bp, Homo sapien
aatgcccactttctgcagcagggcc

SEQ ID NO: 3623542 - DNA, 25 bp, Homo sapien
cagatgatttcaatttaagcagcat

SEQ ID NO: 3623543 - DNA, 25 bp, Homo sapien
aacagatgatttcaatttaagcagc

SEQ ID NO: 3623544 - DNA, 25 bp, Homo sapien
acagatgatttcaatttaagcagca

SEQ ID NO: 3623545 - DNA, 25 bp, Homo sapien
gaacagatgatttcaatttaagcag

SEQ ID NO: 3623546 - DNA, 25 bp, Homo sapien
ttcatcttccaaggcgaatgctctg

SEQ ID NO: 3623547 - DNA, 25 bp, Homo sapien
aaagcatggtgtggacatcgttcac

SEQ ID NO: 3623548 - DNA, 25 bp, Homo sapien
cacaaagtttcgatccaaagggagg

SEQ ID NO: 3623549 - DNA, 25 bp, Homo sapien
gcccaaggacccagatgtgttgata

SEQ ID NO: 3623550 - DNA, 25 bp, Homo sapien
cgcgcctggtctatgaatcagttct

SEQ ID NO: 3623551 - DNA, 25 bp, Homo sapien
gctgccagatattgggtgtccctga

SEQ ID NO: 3623552 - DNA, 25 bp, Homo sapien
tccattaatagttgaggctcccaag

SEQ ID NO: 3623553 - DNA, 25 bp, Homo sapien
gaagccagttgtgtctattggcctc

SEQ ID NO: 3623554 - DNA, 25 bp, Homo sapien
ccagactcggcaataaatgtaaaac

SEQ ID NO: 3623555 - DNA, 25 bp, Homo sapien
aaaccagactcggcaataaatgtaa

SEQ ID NO: 3623556 - DNA, 25 bp, Homo sapien
aacccaagtccctcggccacatttg

SEQ ID NO: 3623557 - DNA, 25 bp, Homo sapien
cagactcggcaataaatgtaaaacc

SEQ ID NO: 3623558 - DNA, 25 bp, Homo sapien
cagttcctgagcctgatggttgtca

SEQ ID NO: 3623559 - DNA, 25 bp, Homo sapien
ggataaacttcccacctgatctcag

SEQ ID NO: 3623560 - DNA, 25 bp, Homo sapien
catcagtggtgggtctctgaagcag

SEQ ID NO: 3623561 - DNA, 25 bp, Homo sapien
cttgtggctccagagactagcactc

SEQ ID NO: 3623562 - DNA, 25 bp, Homo sapien
gaactcctaacttccaatgtggcta

SEQ ID NO: 3623563 - DNA, 25 bp, Homo sapien
gggctttagcagacagtgagacaat

SEQ ID NO: 3623564 - DNA, 25 bp, Homo sapien
gaaacatttgaggataactacagct

SEQ ID NO: 3623565 - DNA, 25 bp, Homo sapien
tgagtgatagaccaacgcaagcaga

SEQ ID NO: 3623566 - DNA, 25 bp, Homo sapien
tctgtctctttcttcggcaccaagt

SEQ ID NO: 3623567 - DNA, 25 bp, Homo sapien
tctttcttcggcaccaagtaccatc

SEQ ID NO: 3623568 - DNA, 25 bp, Homo sapien
ttcttcggcaccaagtaccatctct

SEQ ID NO: 3623569 - DNA, 25 bp, Homo sapien
tgtctctttcttcggcaccaagtac

SEQ ID NO: 3623570 - DNA, 25 bp, Homo sapien
cagcagaggagcctatgtgatccag

SEQ ID NO: 3623571 - DNA, 25 bp, Homo sapien
aagcagcagaggagcctatgtgatc

SEQ ID NO: 3623572 - DNA, 25 bp, Homo sapien
agaggagcctatgtgatccagagaa

SEQ ID NO: 3623573 - DNA, 25 bp, Homo sapien
gcagaggagcctatgtgatccagag

SEQ ID NO: 3623574 - DNA, 25 bp, Homo sapien
tgaccatttggtactcacgctggag

SEQ ID NO: 3623575 - DNA, 25 bp, Homo sapien
gaactcagggtacactgtgtgctcc

SEQ ID NO: 3623576 - DNA, 25 bp, Homo sapien
cacagtcctgcgtctttagaactca

SEQ ID NO: 3623577 - DNA, 25 bp, Homo sapien
cgtcaatgctcatgaccatttggta

SEQ ID NO: 3623578 - DNA, 25 bp, Homo sapien
ttccgttgaacacgtggaagaccta

SEQ ID NO: 3623579 - DNA, 25 bp, Homo sapien
gaatttccgttgaacacgtggaaga

SEQ ID NO: 3623580 - DNA, 25 bp, Homo sapien
gaatttgtgaatttccgttgaacac

SEQ ID NO: 3623581 - DNA, 25 bp, Homo sapien
tgggtggcactgtttggccgccaca

SEQ ID NO: 3623582 - DNA, 25 bp, Homo sapien
gggtggcactgtttggccgccacag

SEQ ID NO: 3623583 - DNA, 25 bp, Homo sapien
gcgtccggcgcttggctttgtttcc

SEQ ID NO: 3623584 - DNA, 25 bp, Homo sapien
ctagcgtccggcgcttggctttgtt

SEQ ID NO: 3623585 - DNA, 25 bp, Homo sapien
aagttgggctgcgaaaatgactccg

SEQ ID NO: 3623586 - DNA, 25 bp, Homo sapien
ccacctctgaggtttgagtggttca

SEQ ID NO: 3623587 - DNA, 25 bp, Homo sapien
tgatggctaaagcaacagcgccacc

SEQ ID NO: 3623588 - DNA, 25 bp, Homo sapien
gcgccctcttgtggaatttcagaag

SEQ ID NO: 3623589 - DNA, 25 bp, Homo sapien
ggtgacatgtcacgctccctggaga

SEQ ID NO: 3623590 - DNA, 25 bp, Homo sapien
gcatcttgggaacgtgagctcaact

SEQ ID NO: 3623591 - DNA, 25 bp, Homo sapien
caatcgttggatatccctggctggg

SEQ ID NO: 3623592 - DNA, 25 bp, Homo sapien
ccccggtttgaagcactcaggaaca

SEQ ID NO: 3623593 - DNA, 25 bp, Homo sapien
ccaagagattactgctgttaaactg

SEQ ID NO: 3623594 - DNA, 25 bp, Homo sapien
gattactgctgttaaactgttggtt

SEQ ID NO: 3623595 - DNA, 25 bp, Homo sapien
tgccaagagattactgctgttaaac

SEQ ID NO: 3623596 - DNA, 25 bp, Homo sapien
ctgtcctgccaagagattactgctg

SEQ ID NO: 3623597 - DNA, 25 bp, Homo sapien
cgtggcgcagacactagttctgaag

SEQ ID NO: 3623598 - DNA, 25 bp, Homo sapien
caagcatccaatgcgtggcgcagac

SEQ ID NO: 3623599 - DNA, 25 bp, Homo sapien
catgtgccaagcatccaatgcgtgg

SEQ ID NO: 3623600 - DNA, 25 bp, Homo sapien
ggaaggacgcatgtgccaagcatcc

SEQ ID NO: 3623601 - DNA, 25 bp, Homo sapien
gaggcgtcattctctaagtgctgaa

SEQ ID NO: 3623602 - DNA, 25 bp, Homo sapien
aagggctgtatacctcacaggccac

SEQ ID NO: 3623603 - DNA, 25 bp, Homo sapien
gaaggatggctgcttagcgctgcct

SEQ ID NO: 3623604 - DNA, 25 bp, Homo sapien
cccagaggcccagttaaggaaggat

SEQ ID NO: 3623605 - DNA, 25 bp, Homo sapien
tgtggatgtggaatatgcccaggac

SEQ ID NO: 3623606 - DNA, 25 bp, Homo sapien
tgccagccgcacactggtgcccgcc

SEQ ID NO: 3623607 - DNA, 25 bp, Homo sapien
gagcctcgggcatcagaccctgtgt

SEQ ID NO: 3623608 - DNA, 25 bp, Homo sapien
gatgtggaatatgcccaggactgca

SEQ ID NO: 3623609 - DNA, 25 bp, Homo sapien
cctgagccgcgagggacattctcag

SEQ ID NO: 3623610 - DNA, 25 bp, Homo sapien
cagagaaacctgagccgcgagggac

SEQ ID NO: 3623611 - DNA, 25 bp, Homo sapien
atcagacctcaatggccagtgcttg

SEQ ID NO: 3623612 - DNA, 25 bp, Homo sapien
tcagacctcaatggccagtgcttgc

SEQ ID NO: 3623613 - DNA, 25 bp, Homo sapien
gagaccatcatcgttgttccggaat

SEQ ID NO: 3623614 - DNA, 25 bp, Homo sapien
tggaacccatgactacaaggcagct

SEQ ID NO: 3623615 - DNA, 25 bp, Homo sapien
caacggagggcagcgtggtttacca

SEQ ID NO: 3623616 - DNA, 25 bp, Homo sapien
tgggaaacgctctgggacatgaaca

SEQ ID NO: 3623617 - DNA, 25 bp, Homo sapien
tgccacaagaaggttgccaacgtca

SEQ ID NO: 3623618 - DNA, 25 bp, Homo sapien
tgtatgtctcagtcaagctgtgcgg

SEQ ID NO: 3623619 - DNA, 25 bp, Homo sapien
acccgaggatggaggcactagctga

SEQ ID NO: 3623620 - DNA, 25 bp, Homo sapien
tgtgcgggtccagccaatttaagat

SEQ ID NO: 3623621 - DNA, 25 bp, Homo sapien
ttcttgtctacaaaggcagggtgag

SEQ ID NO: 3623622 - DNA, 25 bp, Homo sapien
catagtgtgtctgccaaggtctgcg

SEQ ID NO: 3623623 - DNA, 25 bp, Homo sapien
caaactgactcatgggacaaacccg

SEQ ID NO: 3623624 - DNA, 25 bp, Homo sapien
gacaacttggctgaatgggttcctg

SEQ ID NO: 3623625 - DNA, 25 bp, Homo sapien
tgttggcagaatgacccatccctag

SEQ ID NO: 3623626 - DNA, 25 bp, Homo sapien
tttacgctacagtggaaaagctgag

SEQ ID NO: 3623627 - DNA, 25 bp, Homo sapien
cattctcagtgtcagtggattggca

SEQ ID NO: 3623628 - DNA, 25 bp, Homo sapien
tatactacgtagactcagaggcaga

SEQ ID NO: 3623629 - DNA, 25 bp, Homo sapien
gagagcacagctgacctaattagaa

SEQ ID NO: 3623630 - DNA, 25 bp, Homo sapien
gagcatcctgattcatatagccagg

SEQ ID NO: 3623631 - DNA, 25 bp, Homo sapien
tatagccagggaccatagttacaca

SEQ ID NO: 3623632 - DNA, 25 bp, Homo sapien
ttcctccaggacctaacaactggtg

SEQ ID NO: 3623633 - DNA, 25 bp, Homo sapien
tccacttatatgaggcgttcaaagt

SEQ ID NO: 3623634 - DNA, 25 bp, Homo sapien
acgaggagtggctgttcaatgggta

SEQ ID NO: 3623635 - DNA, 25 bp, Homo sapien
cttttggttatgcaagatgaaaaac

SEQ ID NO: 3623636 - DNA, 25 bp, Homo sapien
tgaggcgttcaaagtagtcaaactc

SEQ ID NO: 3623637 - DNA, 25 bp, Homo sapien
aaatggaaattggagtagcttgtat

SEQ ID NO: 3623638 - DNA, 25 bp, Homo sapien
tgtactgtacacttaagagggtaga

SEQ ID NO: 3623639 - DNA, 25 bp, Homo sapien
ttaaaatttatacatgctctcactc

SEQ ID NO: 3623640 - DNA, 25 bp, Homo sapien
ttggagtagcttgtattgattttaa

SEQ ID NO: 3623641 - DNA, 25 bp, Homo sapien
ttcttgtcaaagtctagggctggag

SEQ ID NO: 3623642 - DNA, 25 bp, Homo sapien
catcgagaataggatcttagccctc

SEQ ID NO: 3623643 - DNA, 25 bp, Homo sapien
gctctaatacattggctggactcct

SEQ ID NO: 3623644 - DNA, 25 bp, Homo sapien
gcaagaattgcacacctaagcctcc

SEQ ID NO: 3623645 - DNA, 25 bp, Homo sapien
ggaaataaacgtgcatacaactggg

SEQ ID NO: 3623646 - DNA, 25 bp, Homo sapien
tggtaattcagcgaaagcaaggcgc

SEQ ID NO: 3623647 - DNA, 25 bp, Homo sapien
gattctggcaaacaatctcagggag

SEQ ID NO: 3623648 - DNA, 25 bp, Homo sapien
gagtaactctacttccctgacctgg

SEQ ID NO: 3623649 - DNA, 25 bp, Homo sapien
aagaggagacacccatcctcttaga

SEQ ID NO: 3623650 - DNA, 25 bp, Homo sapien
ctaagaggagacacccatcctctta

SEQ ID NO: 3623651 - DNA, 25 bp, Homo sapien
agaggagacacccatcctcttagag

SEQ ID NO: 3623652 - DNA, 25 bp, Homo sapien
taagaggagacacccatcctcttag

SEQ ID NO: 3623653 - DNA, 25 bp, Homo sapien
cagctcagccggcatttgttcaccc

SEQ ID NO: 3623654 - DNA, 25 bp, Homo sapien
cccagctcagccggcatttgttcac

SEQ ID NO: 3623655 - DNA, 25 bp, Homo sapien
ccagctcagccggcatttgttcacc

SEQ ID NO: 3623656 - DNA, 25 bp, Homo sapien
ggtgcagctgtagagttcctttcca

SEQ ID NO: 3623657 - DNA, 25 bp, Homo sapien
ccattcccttggcatcagctgagca

SEQ ID NO: 3623658 - DNA, 25 bp, Homo sapien
tggataaaagaattgcagccctgtt

SEQ ID NO: 3623659 - DNA, 25 bp, Homo sapien
ccagcaggtagagagaaagttatta

SEQ ID NO: 3623660 - DNA, 25 bp, Homo sapien
ggacttgttaaattagctacctgca

SEQ ID NO: 3623661 - DNA, 25 bp, Homo sapien
gacttgttaaattagctacctgcac

SEQ ID NO: 3623662 - DNA, 25 bp, Homo sapien
tggacttgttaaattagctacctgc

SEQ ID NO: 3623663 - DNA, 25 bp, Homo sapien
aaaagggcctccgtctctgggtgag

SEQ ID NO: 3623664 - DNA, 25 bp, Homo sapien
tatgtgccatctaccgtacaagaag

SEQ ID NO: 3623665 - DNA, 25 bp, Homo sapien
gaagagcaagtctcaagtctgccct

SEQ ID NO: 3623666 - DNA, 25 bp, Homo sapien
tatttatggagcgttcactatgtgc

SEQ ID NO: 3623667 - DNA, 25 bp, Homo sapien
gaaatccttgaccatcacagctgga

SEQ ID NO: 3623668 - DNA, 25 bp, Homo sapien
ttctattcatgcacggaagactcgt

SEQ ID NO: 3623669 - DNA, 25 bp, Homo sapien
tggcaggtagctctggaacaattac

SEQ ID NO: 3623670 - DNA, 25 bp, Homo sapien
gaagactcgtttgatcctgcaccac

SEQ ID NO: 3623671 - DNA, 25 bp, Homo sapien
cacatggcattaggacaaggatatc

SEQ ID NO: 3623672 - DNA, 25 bp, Homo sapien
ttgaatgaacattaatttatctgat

SEQ ID NO: 3623673 - DNA, 25 bp, Homo sapien
cattaatttatctgatggggacagg

SEQ ID NO: 3623674 - DNA, 25 bp, Homo sapien
gggacaggacctcacatggcattag

SEQ ID NO: 3623675 - DNA, 25 bp, Homo sapien
gattcaggacattatccattaaaca

SEQ ID NO: 3623676 - DNA, 25 bp, Homo sapien
agattcaggacattatccattaaac

SEQ ID NO: 3623677 - DNA, 25 bp, Homo sapien
tagattcaggacattatccattaaa

SEQ ID NO: 3623678 - DNA, 25 bp, Homo sapien
tctctctgatgccgttcccaggcct

SEQ ID NO: 3623679 - DNA, 25 bp, Homo sapien
ctctgatgccgttcccaggcctctg

SEQ ID NO: 3623680 - DNA, 25 bp, Homo sapien
tttctctctgatgccgttcccaggc

SEQ ID NO: 3623681 - DNA, 25 bp, Homo sapien
ttttctctctgatgccgttcccagg

SEQ ID NO: 3623682 - DNA, 25 bp, Homo sapien
tgtcctgtaactatccagacccaag

SEQ ID NO: 3623683 - DNA, 25 bp, Homo sapien
gaatcatgtacttcaagggaagact

SEQ ID NO: 3623684 - DNA, 25 bp, Homo sapien
ccgagggcaagaaactaccacttct

SEQ ID NO: 3623685 - DNA, 25 bp, Homo sapien
gaaagttcaacactgctgccctctg

SEQ ID NO: 3623686 - DNA, 25 bp, Homo sapien
gctgtatatgggacaaacactggtc

SEQ ID NO: 3623687 - DNA, 25 bp, Homo sapien
ggttctgcagaaagcatacatccca

SEQ ID NO: 3623688 - DNA, 25 bp, Homo sapien
gaaactgtgggctaatacaccagcg

SEQ ID NO: 3623689 - DNA, 25 bp, Homo sapien
taacgaagtgcctaccacagagaaa

SEQ ID NO: 3623690 - DNA, 25 bp, Homo sapien
ggttcagcgaactaatgatggcagg

SEQ ID NO: 3623691 - DNA, 25 bp, Homo sapien
tcactgcagagactataggatccaa

SEQ ID NO: 3623692 - DNA, 25 bp, Homo sapien
ttgtccccgtgtgaacagcaagcct

SEQ ID NO: 3623693 - DNA, 25 bp, Homo sapien
caaatctagtgtgcctctgaagtct

SEQ ID NO: 3623694 - DNA, 25 bp, Homo sapien
gacagaagtctatggcgtccaaggc

SEQ ID NO: 3623695 - DNA, 25 bp, Homo sapien
ggaagagaacccaagtaccctgcaa

SEQ ID NO: 3623696 - DNA, 25 bp, Homo sapien
tccaaggcagtaatgtacacaggtc

SEQ ID NO: 3623697 - DNA, 25 bp, Homo sapien
tatggctcagctacccgtggtttca

SEQ ID NO: 3623698 - DNA, 25 bp, Homo sapien
tcaacgtttacactctgaatgctaa

SEQ ID NO: 3623699 - DNA, 25 bp, Homo sapien
gctgatgctgacgagattatcaacg

SEQ ID NO: 3623700 - DNA, 25 bp, Homo sapien
cacagggtgcttccaggtatgagac

SEQ ID NO: 3623701 - DNA, 25 bp, Homo sapien
tccatgtctataatgcacagggtgc

SEQ ID NO: 3623702 - DNA, 25 bp, Homo sapien
taaacagagtggagccccttttcaa

SEQ ID NO: 3623703 - DNA, 25 bp, Homo sapien
tatattaaactgatcaaagtgtaac

SEQ ID NO: 3623704 - DNA, 25 bp, Homo sapien
tctgtggttgggtcatggtccactc

SEQ ID NO: 3623705 - DNA, 25 bp, Homo sapien
tacctagagccccagtatattaaac

SEQ ID NO: 3623706 - DNA, 25 bp, Homo sapien
aaagctttctgatactctcaaggca

SEQ ID NO: 3623707 - DNA, 25 bp, Homo sapien
cattatgccagaagtcttacagtct

SEQ ID NO: 3623708 - DNA, 25 bp, Homo sapien
tgtccaccataaccaagtgagaggt

SEQ ID NO: 3623709 - DNA, 25 bp, Homo sapien
taagtattttaggatcacacacagt

SEQ ID NO: 3623710 - DNA, 25 bp, Homo sapien
tttgcatgttttcggtacatagcca

SEQ ID NO: 3623711 - DNA, 25 bp, Homo sapien
ttgcatgttttcggtacatagccat

SEQ ID NO: 3623712 - DNA, 25 bp, Homo sapien
ttttgcatgttttcggtacatagcc

SEQ ID NO: 3623713 - DNA, 25 bp, Homo sapien
cttttgcatgttttcggtacatagc

SEQ ID NO: 3623714 - DNA, 25 bp, Homo sapien
gatgttcaacatgtacaggctggac

SEQ ID NO: 3623715 - DNA, 25 bp, Homo sapien
tccctctagagatatgatgttcaac

SEQ ID NO: 3623716 - DNA, 25 bp, Homo sapien
cacagacttaaattgaggccctcag

SEQ ID NO: 3623717 - DNA, 25 bp, Homo sapien
gatagaagaagggtttcaggcctaa

SEQ ID NO: 3623718 - DNA, 25 bp, Homo sapien
ctatgtactactcatctctgtgccc

SEQ ID NO: 3623719 - DNA, 25 bp, Homo sapien
tctgctgcttgattccgctgtggca

SEQ ID NO: 3623720 - DNA, 25 bp, Homo sapien
tcctgctggattagaacttcctgtg

SEQ ID NO: 3623721 - DNA, 25 bp, Homo sapien
caatattatcagcatgatctcatcc

SEQ ID NO: 3623722 - DNA, 25 bp, Homo sapien
cccaagtaccaagtggatgccaccc

SEQ ID NO: 3623723 - DNA, 25 bp, Homo sapien
gtaccaagtggatgccaccctggct

SEQ ID NO: 3623724 - DNA, 25 bp, Homo sapien
taccaagtggatgccaccctggctc

SEQ ID NO: 3623725 - DNA, 25 bp, Homo sapien
aagtaccaagtggatgccaccctgg

SEQ ID NO: 3623726 - DNA, 25 bp, Homo sapien
aactgtccacacgtcctttgggagg

SEQ ID NO: 3623727 - DNA, 25 bp, Homo sapien
ggctgcatctgacacgcaactgtcc

SEQ ID NO: 3623728 - DNA, 25 bp, Homo sapien
cttttgttggctgcatttccagtaa

SEQ ID NO: 3623729 - DNA, 25 bp, Homo sapien
gtcttgggctggcacggctgcatct

SEQ ID NO: 3623730 - DNA, 25 bp, Homo sapien
catcgcagacatggatagagtctca

SEQ ID NO: 3623731 - DNA, 25 bp, Homo sapien
ccatcgcagacatggatagagtctc

SEQ ID NO: 3623732 - DNA, 25 bp, Homo sapien
tcgcagacatggatagagtctcaga

SEQ ID NO: 3623733 - DNA, 25 bp, Homo sapien
cgcagacatggatagagtctcagac

SEQ ID NO: 3623734 - DNA, 25 bp, Homo sapien
cacatatggaatgctgacagtaggg

SEQ ID NO: 3623735 - DNA, 25 bp, Homo sapien
taccgaagttgcaagtaaaacaggc

SEQ ID NO: 3623736 - DNA, 25 bp, Homo sapien
gtaggaattccaaaccacttagaga

SEQ ID NO: 3623737 - DNA, 25 bp, Homo sapien
ggtataaaacccaactgatgctatg

SEQ ID NO: 3623738 - DNA, 25 bp, Homo sapien
agtgctggagaaattttactggatg

SEQ ID NO: 3623739 - DNA, 25 bp, Homo sapien
tgtgcttcagtcacacttagtgctg

SEQ ID NO: 3623740 - DNA, 25 bp, Homo sapien
gaaattttactggatgagaacctca

SEQ ID NO: 3623741 - DNA, 25 bp, Homo sapien
ccttcctggagacaataaagaatct

SEQ ID NO: 3623742 - DNA, 25 bp, Homo sapien
cacactaagggctggcaagtactga

SEQ ID NO: 3623743 - DNA, 25 bp, Homo sapien
tccagtaagggtacatgtggtgccc

SEQ ID NO: 3623744 - DNA, 25 bp, Homo sapien
cagttactaaaataggccctgcagg

SEQ ID NO: 3623745 - DNA, 25 bp, Homo sapien
gagtctgttattgctggcccatgaa

SEQ ID NO: 3623746 - DNA, 25 bp, Homo sapien
ttctgtctggggcttgctttcggtc

SEQ ID NO: 3623747 - DNA, 25 bp, Homo sapien
tgtctggggcttgctttcggtctcg

SEQ ID NO: 3623748 - DNA, 25 bp, Homo sapien
tctggggcttgctttcggtctcggc

SEQ ID NO: 3623749 - DNA, 25 bp, Homo sapien
ctggggcttgctttcggtctcggcc

SEQ ID NO: 3623750 - DNA, 25 bp, Homo sapien
tattctagagaccataaatggtttc

SEQ ID NO: 3623751 - DNA, 25 bp, Homo sapien
ctattctagagaccataaatggttt

SEQ ID NO: 3623752 - DNA, 25 bp, Homo sapien
tctattctagagaccataaatggtt

SEQ ID NO: 3623753 - DNA, 25 bp, Homo sapien
ttaggaatgattctaggaggctctt

SEQ ID NO: 3623754 - DNA, 25 bp, Homo sapien
gattctaggaggctcttacgggctt

SEQ ID NO: 3623755 - DNA, 25 bp, Homo sapien
aatgattctaggaggctcttacggg

SEQ ID NO: 3623756 - DNA, 25 bp, Homo sapien
ggaatgattctaggaggctcttacg

SEQ ID NO: 3623757 - DNA, 25 bp, Homo sapien
tggaagatctggaaagagcttttta

SEQ ID NO: 3623758 - DNA, 25 bp, Homo sapien
ggaagatctggaaagagctttttag

SEQ ID NO: 3623759 - DNA, 25 bp, Homo sapien
gagaacctggcgcatattttcaagc

SEQ ID NO: 3623760 - DNA, 25 bp, Homo sapien
taatgagggcacctatctcacaggc

SEQ ID NO: 3623761 - DNA, 25 bp, Homo sapien
tctcacaggctgacgggagcattaa

SEQ ID NO: 3623762 - DNA, 25 bp, Homo sapien
gggctcaatccctactataatgatg

SEQ ID NO: 3623763 - DNA, 25 bp, Homo sapien
gcagttggcagtaaaggactacctc

SEQ ID NO: 3623764 - DNA, 25 bp, Homo sapien
gttccccatgcctgagagttgtcat

SEQ ID NO: 3623765 - DNA, 25 bp, Homo sapien
cctctgaaagaatgtgattgctgct

SEQ ID NO: 3623766 - DNA, 25 bp, Homo sapien
caccaacttacaggcacaggtggaa

SEQ ID NO: 3623767 - DNA, 25 bp, Homo sapien
actcctgaagcaaatccagggagca

SEQ ID NO: 3623768 - DNA, 25 bp, Homo sapien
agcgtggctcgacgtgggaagcaag

SEQ ID NO: 3623769 - DNA, 25 bp, Homo sapien
cgatccctcccataaaccaacaggc

SEQ ID NO: 3623770 - DNA, 25 bp, Homo sapien
ttgaaacggcattctcctccccgat

SEQ ID NO: 3623771 - DNA, 25 bp, Homo sapien
caacaggccaatcagcgtggctcga

SEQ ID NO: 3623772 - DNA, 25 bp, Homo sapien
cgatagcgacgattcacagtgtggt

SEQ ID NO: 3623773 - DNA, 25 bp, Homo sapien
ccagacgggtctgcagattcaagaa

SEQ ID NO: 3623774 - DNA, 25 bp, Homo sapien
gaactcccgatagcgacgattcaca

SEQ ID NO: 3623775 - DNA, 25 bp, Homo sapien
gattcaagaactcccgatagcgacg

SEQ ID NO: 3623776 - DNA, 25 bp, Homo sapien
ctgttttcaccgtcaagggctgtct

SEQ ID NO: 3623777 - DNA, 25 bp, Homo sapien
tttcaccgtcaagggctgtctcgta

SEQ ID NO: 3623778 - DNA, 25 bp, Homo sapien
tgttttcaccgtcaagggctgtctc

SEQ ID NO: 3623779 - DNA, 25 bp, Homo sapien
gttttcaccgtcaagggctgtctcg

SEQ ID NO: 3623780 - DNA, 25 bp, Homo sapien
tactgactacttggtcaatggccac

SEQ ID NO: 3623781 - DNA, 25 bp, Homo sapien
gaaatgagtttcactcctccgcact

SEQ ID NO: 3623782 - DNA, 25 bp, Homo sapien
attacagggctaaacatcataaggg

SEQ ID NO: 3623783 - DNA, 25 bp, Homo sapien
gccacatagcaagagtacgaaacta

SEQ ID NO: 3623784 - DNA, 25 bp, Homo sapien
tccaatgggtaggatcttgtccaag

SEQ ID NO: 3623785 - DNA, 25 bp, Homo sapien
ggagtgtagcaagcaggctgtccct

SEQ ID NO: 3623786 - DNA, 25 bp, Homo sapien
tccctggtggtagcttgtggactca

SEQ ID NO: 3623787 - DNA, 25 bp, Homo sapien
tcatgatgcagctgtgttgagcaga

SEQ ID NO: 3623788 - DNA, 25 bp, Homo sapien
tcacagtatagagtgtgtatgggtg

SEQ ID NO: 3623789 - DNA, 25 bp, Homo sapien
caggaattcagtgtggagaccggca

SEQ ID NO: 3623790 - DNA, 25 bp, Homo sapien
gtatagagtgtgtatgggtggaatc

SEQ ID NO: 3623791 - DNA, 25 bp, Homo sapien
gtaggatcaagggagctcacatcat

SEQ ID NO: 3623792 - DNA, 25 bp, Homo sapien
ggctcactgtaacttaggaatactg

SEQ ID NO: 3623793 - DNA, 25 bp, Homo sapien
tctttcttcacacatcccacccaaa

SEQ ID NO: 3623794 - DNA, 25 bp, Homo sapien
ttcgtggccttcttcaacctctgga

SEQ ID NO: 3623795 - DNA, 25 bp, Homo sapien
agcttcgtggccttcttcaacctct

SEQ ID NO: 3623796 - DNA, 25 bp, Homo sapien
agttcgaccactacatggcgtccgg

SEQ ID NO: 3623797 - DNA, 25 bp, Homo sapien
tggcgtccggtacgagtctccaagt

SEQ ID NO: 3623798 - DNA, 25 bp, Homo sapien
gacaaccgcagagagtcagaacact

SEQ ID NO: 3623799 - DNA, 25 bp, Homo sapien
tgaagcgttccagatgcagtcgacc

SEQ ID NO: 3623800 - DNA, 25 bp, Homo sapien
tggagtttcctggaacggtggcact

SEQ ID NO: 3623801 - DNA, 25 bp, Homo sapien
agctggagtttcctggaacggtggc

SEQ ID NO: 3623802 - DNA, 25 bp, Homo sapien
aggttattgaggtgacagctcgatc

SEQ ID NO: 3623803 - DNA, 25 bp, Homo sapien
tgacagctcgatccagctggagttt

SEQ ID NO: 3623804 - DNA, 25 bp, Homo sapien
gcatgaactgtgtctcagatatggg

SEQ ID NO: 3623805 - DNA, 25 bp, Homo sapien
aagtcctacaggcactgcaaagcga

SEQ ID NO: 3623806 - DNA, 25 bp, Homo sapien
ggaggaaaactctgtggccttcaca

SEQ ID NO: 3623807 - DNA, 25 bp, Homo sapien
aacggacaaggtggcttccccagat

SEQ ID NO: 3623808 - DNA, 25 bp, Homo sapien
aagactgggtcacacgccgccggga

SEQ ID NO: 3623809 - DNA, 25 bp, Homo sapien
cagcggccggcgaagactgggtcac

SEQ ID NO: 3623810 - DNA, 25 bp, Homo sapien
ggcgaagactgggtcacacgccgcc

SEQ ID NO: 3623811 - DNA, 25 bp, Homo sapien
gccggcgaagactgggtcacacgcc

SEQ ID NO: 3623812 - DNA, 25 bp, Homo sapien
cctgtgtgaaggctgaccgccggcc

SEQ ID NO: 3623813 - DNA, 25 bp, Homo sapien
tgaagtggactcatcgcggtcctct

SEQ ID NO: 3623814 - DNA, 25 bp, Homo sapien
acagcttccgggtcgacgtcgacgg

SEQ ID NO: 3623815 - DNA, 25 bp, Homo sapien
tctgccgccgtaaacctgggcgact

SEQ ID NO: 3623816 - DNA, 25 bp, Homo sapien
ggccaaatcaccgatatccaaacac

SEQ ID NO: 3623817 - DNA, 25 bp, Homo sapien
tatccggccaaatcaccgatatcca

SEQ ID NO: 3623818 - DNA, 25 bp, Homo sapien
tccggccaaatcaccgatatccaaa

SEQ ID NO: 3623819 - DNA, 25 bp, Homo sapien
ttatccggccaaatcaccgatatcc

SEQ ID NO: 3623820 - DNA, 25 bp, Homo sapien
catgggatctggaggatgctttcac

SEQ ID NO: 3623821 - DNA, 25 bp, Homo sapien
tcatgggatctggaggatgctttca

SEQ ID NO: 3623822 - DNA, 25 bp, Homo sapien
agagatgcattgagcgtggcagcca

SEQ ID NO: 3623823 - DNA, 25 bp, Homo sapien
cttgacatccttggtactggatgcc

SEQ ID NO: 3623824 - DNA, 25 bp, Homo sapien
tgcattgagcgtggcagccaatgaa

SEQ ID NO: 3623825 - DNA, 25 bp, Homo sapien
gccctggaaactgttcatatgaaaa

SEQ ID NO: 3623826 - DNA, 25 bp, Homo sapien
ccgaccactcctgttgcaaagtcag

SEQ ID NO: 3623827 - DNA, 25 bp, Homo sapien
atgttgtcttcggaggaagtgggat

SEQ ID NO: 3623828 - DNA, 25 bp, Homo sapien
gaccactcctgttgcaaagtcagcc

SEQ ID NO: 3623829 - DNA, 25 bp, Homo sapien
cactcctgttgcaaagtcagcctga

SEQ ID NO: 3623830 - DNA, 25 bp, Homo sapien
ctacgtgtccacacagctcctgtct

SEQ ID NO: 3623831 - DNA, 25 bp, Homo sapien
gcagcagggagatggcctctgctca

SEQ ID NO: 3623832 - DNA, 25 bp, Homo sapien
ggagatggcctctgctcacatccat

SEQ ID NO: 3623833 - DNA, 25 bp, Homo sapien
cagggagatggcctctgctcacatc

SEQ ID NO: 3623834 - DNA, 25 bp, Homo sapien
gcagcagcagggagatggcctctgc

SEQ ID NO: 3623835 - DNA, 25 bp, Homo sapien
agactaacagtggatatctcagcag

SEQ ID NO: 3623836 - DNA, 25 bp, Homo sapien
actaacagtggatatctcagcagaa

SEQ ID NO: 3623837 - DNA, 25 bp, Homo sapien
tacaagccagaagagagtgggggcc

SEQ ID NO: 3623838 - DNA, 25 bp, Homo sapien
acagtggatatctcagcagaaactc

SEQ ID NO: 3623839 - DNA, 25 bp, Homo sapien
gggactgccaatcacataatttgac

SEQ ID NO: 3623840 - DNA, 25 bp, Homo sapien
gactgccaatcacataatttgactc

SEQ ID NO: 3623841 - DNA, 25 bp, Homo sapien
aggggactgccaatcacataatttg

SEQ ID NO: 3623842 - DNA, 25 bp, Homo sapien
gccaatcacataatttgactcttct

SEQ ID NO: 3623843 - DNA, 25 bp, Homo sapien
tacactttaggactgagaaactgat

SEQ ID NO: 3623844 - DNA, 25 bp, Homo sapien
ccctattattaagggcactggcatt

SEQ ID NO: 3623845 - DNA, 25 bp, Homo sapien
tgcgtgaccgttccatggtctcttg

SEQ ID NO: 3623846 - DNA, 25 bp, Homo sapien
gataaatagcaattagagctgccct

SEQ ID NO: 3623847 - DNA, 25 bp, Homo sapien
cagcacctgtattctttctacccta

SEQ ID NO: 3623848 - DNA, 25 bp, Homo sapien
taaatagtgttaatgggttgagctc

SEQ ID NO: 3623849 - DNA, 25 bp, Homo sapien
ggaggctcttcagcaattcatgcaa

SEQ ID NO: 3623850 - DNA, 25 bp, Homo sapien
tacgagtattctctcaggaggctct

SEQ ID NO: 3623851 - DNA, 25 bp, Homo sapien
tcttctgtactctcatgccattgtg

SEQ ID NO: 3623852 - DNA, 25 bp, Homo sapien
tgtcaattttgatgtgtccaatgca

SEQ ID NO: 3623853 - DNA, 25 bp, Homo sapien
gtccaatgcattactttgataagcg

SEQ ID NO: 3623854 - DNA, 25 bp, Homo sapien
tgtgtataagagagggctttccata

SEQ ID NO: 3623855 - DNA, 25 bp, Homo sapien
tctgttatcaggcagcctgggtgga

SEQ ID NO: 3623856 - DNA, 25 bp, Homo sapien
tggttggtatatagacacagctgga

SEQ ID NO: 3623857 - DNA, 25 bp, Homo sapien
cctgggtggagtaaagtacagacgc

SEQ ID NO: 3623858 - DNA, 25 bp, Homo sapien
gagtaaagtacagacgctgcaggga

SEQ ID NO: 3623859 - DNA, 25 bp, Homo sapien
atgacatcacagagccataggaagt

SEQ ID NO: 3623860 - DNA, 25 bp, Homo sapien
agagccataggaagtgcccatagat

SEQ ID NO: 3623861 - DNA, 25 bp, Homo sapien
gagccataggaagtgcccatagatg

SEQ ID NO: 3623862 - DNA, 25 bp, Homo sapien
acatcacagagccataggaagtgcc

SEQ ID NO: 3623863 - DNA, 25 bp, Homo sapien
gaatggtgctgtacccatctgagtg

SEQ ID NO: 3623864 - DNA, 25 bp, Homo sapien
tctgaatggtgctgtacccatctga

SEQ ID NO: 3623865 - DNA, 25 bp, Homo sapien
gtgctgtacccatctgagtggggct

SEQ ID NO: 3623866 - DNA, 25 bp, Homo sapien
aatggtgctgtacccatctgagtgg

SEQ ID NO: 3623867 - DNA, 25 bp, Homo sapien
tcccgattgaaaggagctacttgta

SEQ ID NO: 3623868 - DNA, 25 bp, Homo sapien
tacttgtagagaaattatcatagac

SEQ ID NO: 3623869 - DNA, 25 bp, Homo sapien
catgaattctcgtaaaatccatggg

SEQ ID NO: 3623870 - DNA, 25 bp, Homo sapien
tatcatagacagtggatcatcaact

SEQ ID NO: 3623871 - DNA, 25 bp, Homo sapien
tgtgaaaacctgataggcagagctg

SEQ ID NO: 3623872 - DNA, 25 bp, Homo sapien
gaaaacctgataggcagagctgact

SEQ ID NO: 3623873 - DNA, 25 bp, Homo sapien
aacctgataggcagagctgacttca

SEQ ID NO: 3623874 - DNA, 25 bp, Homo sapien
tagtgtgaaaacctgataggcagag

SEQ ID NO: 3623875 - DNA, 25 bp, Homo sapien
aacagggatccaaataggcttcatc

SEQ ID NO: 3623876 - DNA, 25 bp, Homo sapien
gatcaaagacttggagtctagaaca

SEQ ID NO: 3623877 - DNA, 25 bp, Homo sapien
ctatatgatcaaagacttggagtct

SEQ ID NO: 3623878 - DNA, 25 bp, Homo sapien
tgattaccatgttggatcgaatggt

SEQ ID NO: 3623879 - DNA, 25 bp, Homo sapien
gcttaaagaagctatgcccaaaaga

SEQ ID NO: 3623880 - DNA, 25 bp, Homo sapien
gaagctatgcccaaaagatactctt

SEQ ID NO: 3623881 - DNA, 25 bp, Homo sapien
gatataggcttaaagaagctatgcc

SEQ ID NO: 3623882 - DNA, 25 bp, Homo sapien
atttgacaagtgatataggcttaaa

SEQ ID NO: 3623883 - DNA, 25 bp, Homo sapien
tttttcacagaaccggcagttttgc

SEQ ID NO: 3623884 - DNA, 25 bp, Homo sapien
tgaaaatccaccgtttctcccctga

SEQ ID NO: 3623885 - DNA, 25 bp, Homo sapien
tacctatttgtcctcctggattcca

SEQ ID NO: 3623886 - DNA, 25 bp, Homo sapien
cagttttgcggctcttgtgaaaatc

SEQ ID NO: 3623887 - DNA, 25 bp, Homo sapien
tgtgaaatggagctcgccagtggaa

SEQ ID NO: 3623888 - DNA, 25 bp, Homo sapien
ctgtgaaatggagctcgccagtgga

SEQ ID NO: 3623889 - DNA, 25 bp, Homo sapien
tgaaatggagctcgccagtggaagg

SEQ ID NO: 3623890 - DNA, 25 bp, Homo sapien
aatggagctcgccagtggaaggact

SEQ ID NO: 3623891 - DNA, 25 bp, Homo sapien
tcctcacggatgtcattaattttgc

SEQ ID NO: 3623892 - DNA, 25 bp, Homo sapien
cagcagagagtttattatagacgaa

SEQ ID NO: 3623893 - DNA, 25 bp, Homo sapien
tggagtgggtattgttggccaaacc

SEQ ID NO: 3623894 - DNA, 25 bp, Homo sapien
caaaccaagaatacaccacataggg

SEQ ID NO: 3623895 - DNA, 25 bp, Homo sapien
ttctctggtgtctttaactggccta

SEQ ID NO: 3623896 - DNA, 25 bp, Homo sapien
gaacgtgcttgtggagccttctttc

SEQ ID NO: 3623897 - DNA, 25 bp, Homo sapien
cgtgcttgtggagccttctttcaaa

SEQ ID NO: 3623898 - DNA, 25 bp, Homo sapien
aacgtgcttgtggagccttctttca

SEQ ID NO: 3623899 - DNA, 25 bp, Homo sapien
tgcttgtggagccttctttcaaagg

SEQ ID NO: 3623900 - DNA, 25 bp, Homo sapien
aagggtgtaggaatgcagagcaaaa

SEQ ID NO: 3623901 - DNA, 25 bp, Homo sapien
catgcaggctagagccagccacaca

SEQ ID NO: 3623902 - DNA, 25 bp, Homo sapien
taaatgccaatacaaagggtgtagg

SEQ ID NO: 3623903 - DNA, 25 bp, Homo sapien
ctgctcttcgggcttaactggtaaa

SEQ ID NO: 3623904 - DNA, 25 bp, Homo sapien
ctggtccggccacctctaccagtcc

SEQ ID NO: 3623905 - DNA, 25 bp, Homo sapien
cccgctgccgctaccagtccctttt

SEQ ID NO: 3623906 - DNA, 25 bp, Homo sapien
agcattgaaaacagggggtttcaga

SEQ ID NO: 3623907 - DNA, 25 bp, Homo sapien
tgattccaggaacctcaccctgagg

SEQ ID NO: 3623908 - DNA, 25 bp, Homo sapien
tcagaggcaggcacgacagggatac

SEQ ID NO: 3623909 - DNA, 25 bp, Homo sapien
ggcacgacagggataccttgtatct

SEQ ID NO: 3623910 - DNA, 25 bp, Homo sapien
gacagggataccttgtatctgtgag

SEQ ID NO: 3623911 - DNA, 25 bp, Homo sapien
gaggcaggcacgacagggatacctt

SEQ ID NO: 3623912 - DNA, 25 bp, Homo sapien
cttgatcactgatgtttccaagttg

SEQ ID NO: 3623913 - DNA, 25 bp, Homo sapien
ttcttgatcactgatgtttccaagt

SEQ ID NO: 3623914 - DNA, 25 bp, Homo sapien
tcttgatcactgatgtttccaagtt

SEQ ID NO: 3623915 - DNA, 25 bp, Homo sapien
agatttccacggaagtataagccat

SEQ ID NO: 3623916 - DNA, 25 bp, Homo sapien
cagatttccacggaagtataagcca

SEQ ID NO: 3623917 - DNA, 25 bp, Homo sapien
gccagatttccacggaagtataagc

SEQ ID NO: 3623918 - DNA, 25 bp, Homo sapien
acagccagatttccacggaagtata

SEQ ID NO: 3623919 - DNA, 25 bp, Homo sapien
tgtttttggatcaacggacaagaag

SEQ ID NO: 3623920 - DNA, 25 bp, Homo sapien
tggatcaacggacaagaagaggagt

SEQ ID NO: 3623921 - DNA, 25 bp, Homo sapien
tttggatcaacggacaagaagagga

SEQ ID NO: 3623922 - DNA, 25 bp, Homo sapien
tcaacggacaagaagaggagtcaca

SEQ ID NO: 3623923 - DNA, 25 bp, Homo sapien
ccacctacatgtaattcatcaagca

SEQ ID NO: 3623924 - DNA, 25 bp, Homo sapien
tttgacttctaaccctgcagtagtt

SEQ ID NO: 3623925 - DNA, 25 bp, Homo sapien
cacatcaccctttgctgtcattgag

SEQ ID NO: 3623926 - DNA, 25 bp, Homo sapien
tagttttactaaaaggctgcaccca

SEQ ID NO: 3623927 - DNA, 25 bp, Homo sapien
tcagccaatacgattgtggcagaga

SEQ ID NO: 3623928 - DNA, 25 bp, Homo sapien
agccaatacgattgtggcagagaaa

SEQ ID NO: 3623929 - DNA, 25 bp, Homo sapien
cagccaatacgattgtggcagagaa

SEQ ID NO: 3623930 - DNA, 25 bp, Homo sapien
gccaatacgattgtggcagagaaac

SEQ ID NO: 3623931 - DNA, 25 bp, Homo sapien
tgaccggctggttttcgctgtgctg

SEQ ID NO: 3623932 - DNA, 25 bp, Homo sapien
ctacatctcagtttggctcatggct

SEQ ID NO: 3623933 - DNA, 25 bp, Homo sapien
tgtgtctggtggcagcaactccccg

SEQ ID NO: 3623934 - DNA, 25 bp, Homo sapien
tgtctgcagttggtgctgaccggct

SEQ ID NO: 3623935 - DNA, 25 bp, Homo sapien
ttcccaaagattgcagaactgctcc

SEQ ID NO: 3623936 - DNA, 25 bp, Homo sapien
cagactggactgaaactggcattca

SEQ ID NO: 3623937 - DNA, 25 bp, Homo sapien
tctaggggatcaagggtgcaagata

SEQ ID NO: 3623938 - DNA, 25 bp, Homo sapien
aagatagtgtagaaaacagccttgc

SEQ ID NO: 3623939 - DNA, 25 bp, Homo sapien
ggcagtgacttcaaggtgaaagtct

SEQ ID NO: 3623940 - DNA, 25 bp, Homo sapien
agtgacttcaaggtgaaagtctcca

SEQ ID NO: 3623941 - DNA, 25 bp, Homo sapien
gtgacttcaaggtgaaagtctccat

SEQ ID NO: 3623942 - DNA, 25 bp, Homo sapien
tgaggcagtgacttcaaggtgaaag

SEQ ID NO: 3623943 - DNA, 25 bp, Homo sapien
tggcacttgcaggttagatgggaac

SEQ ID NO: 3623944 - DNA, 25 bp, Homo sapien
atgggaactgccagaccggaaccca

SEQ ID NO: 3623945 - DNA, 25 bp, Homo sapien
tgggaactgccagaccggaacccag

SEQ ID NO: 3623946 - DNA, 25 bp, Homo sapien
cttgcaggttagatgggaactgcca

SEQ ID NO: 3623947 - DNA, 25 bp, Homo sapien
catttagacctgtgtcttgtctctg

SEQ ID NO: 3623948 - DNA, 25 bp, Homo sapien
ggccgagcgtctcactcaggtgctt

SEQ ID NO: 3623949 - DNA, 25 bp, Homo sapien
ggtgcttcttattgtcaacctgccg

SEQ ID NO: 3623950 - DNA, 25 bp, Homo sapien
tctgacagtactcagggccgagcgt

SEQ ID NO: 3623951 - DNA, 25 bp, Homo sapien
agtagttgttagtgaaactccaggt

SEQ ID NO: 3623952 - DNA, 25 bp, Homo sapien
ttttcagtagttgttagtgaaactc

SEQ ID NO: 3623953 - DNA, 25 bp, Homo sapien
ttcagtagttgttagtgaaactcca

SEQ ID NO: 3623954 - DNA, 25 bp, Homo sapien
cagtagttgttagtgaaactccagg

SEQ ID NO: 3623955 - DNA, 25 bp, Homo sapien
tcacgccagcgggagggcaaacttg

SEQ ID NO: 3623956 - DNA, 25 bp, Homo sapien
acgccagcgggagggcaaacttgga

SEQ ID NO: 3623957 - DNA, 25 bp, Homo sapien
gccagcgggagggcaaacttggaat

SEQ ID NO: 3623958 - DNA, 25 bp, Homo sapien
cagcgggagggcaaacttggaatct

SEQ ID NO: 3623959 - DNA, 25 bp, Homo sapien
ggaagtgacactaagttggtgcttt

SEQ ID NO: 3623960 - DNA, 25 bp, Homo sapien
tttcaagttcattggaagtgacact

SEQ ID NO: 3623961 - DNA, 25 bp, Homo sapien
tctgatctttcctatgggggtcccc

SEQ ID NO: 3623962 - DNA, 25 bp, Homo sapien
gacactaagttggtgctttgcttcc

SEQ ID NO: 3623963 - DNA, 25 bp, Homo sapien
ttttcacttctgcgttgtggtgcat

SEQ ID NO: 3623964 - DNA, 25 bp, Homo sapien
ggttttcacttctgcgttgtggtgc

SEQ ID NO: 3623965 - DNA, 25 bp, Homo sapien
ttggttttcacttctgcgttgtggt

SEQ ID NO: 3623966 - DNA, 25 bp, Homo sapien
gttttcacttctgcgttgtggtgca

SEQ ID NO: 3623967 - DNA, 25 bp, Homo sapien
catgtcatattcgattgactgccag

SEQ ID NO: 3623968 - DNA, 25 bp, Homo sapien
tatactttctgttgttacacaccga

SEQ ID NO: 3623969 - DNA, 25 bp, Homo sapien
cacaccgaatactgacaaaacccat

SEQ ID NO: 3623970 - DNA, 25 bp, Homo sapien
atgactttcccctccgtaggcaaag

SEQ ID NO: 3623971 - DNA, 25 bp, Homo sapien
ttttatgtgtcaccactgatgctag

SEQ ID NO: 3623972 - DNA, 25 bp, Homo sapien
gagcgctggcataggtcttctttat

SEQ ID NO: 3623973 - DNA, 25 bp, Homo sapien
cccaatagtttaaggcattgaagaa
